United States Patent Application Publication US 2005/0255487 A1 - sequence listing, part 87

SEQ ID NO: 2392047 - RNA, 19 nt, Homo sapiens
  misc_RNA (1)...(19): siRNA sense strand
uaagaagaugguugaguca

SEQ ID NO: 2392048 - RNA, 19 nt, Homo sapiens
  misc_RNA (1)...(19): siRNA sense strand
caauuauccuugcacacaa

SEQ ID NO: 2392049 - RNA, 19 nt, Homo sapiens
  misc_RNA (1)...(19): siRNA sense strand
ucaggaauuugaagugaca

SEQ ID NO: 2392050 - RNA, 19 nt, Homo sapiens
  misc_RNA (1)...(19): siRNA sense strand
agaugaugaacuuagggua

SEQ ID NO: 2392051 - RNA, 19 nt, Homo sapiens
  misc_RNA (1)...(19): siRNA sense strand
uggcugagagugaagaaga

SEQ ID NO: 2392052 - RNA, 19 nt, Homo sapiens
  misc_RNA (1)...(19): siRNA sense strand
ugagagugaagaagacuau

SEQ ID NO: 2392053 - RNA, 19 nt, Homo sapiens
  misc_RNA (1)...(19): siRNA sense strand
ucagcaaaguaaagcucau

SEQ ID NO: 2392054 - RNA, 19 nt, Homo sapiens
  misc_RNA (1)...(19): siRNA sense strand
uuggaguuguggaguguau

SEQ ID NO: 2392055 - RNA, 19 nt, Homo sapiens
  misc_RNA (1)...(19): siRNA sense strand
gaaggcugucugaggauuu

SEQ ID NO: 2392056 - RNA, 19 nt, Homo sapiens
  misc_RNA (1)...(19): siRNA sense strand
gcaacaauuggucugcaua

SEQ ID NO: 2392057 - RNA, 19 nt, Homo sapiens
  misc_RNA (1)...(19): siRNA sense strand
gaucaggaauuugaaguga

SEQ ID NO: 2392058 - RNA, 19 nt, Homo sapiens
  misc_RNA (1)...(19): siRNA sense strand
acagaaaccaugugggaaa

SEQ ID NO: 2392059 - RNA, 19 nt, Homo sapiens
  misc_RNA (1)...(19): siRNA sense strand
ggacagaagaagaagaaaa

SEQ ID NO: 2392060 - RNA, 19 nt, Homo sapiens
  misc_RNA (1)...(19): siRNA sense strand
ggaccaaggaagaugaaau

SEQ ID NO: 2392061 - RNA, 19 nt, Homo sapiens
  misc_RNA (1)...(19): siRNA sense strand
ugucaaaagacgaaagaaa

SEQ ID NO: 2392062 - RNA, 19 nt, Homo sapiens
  misc_RNA (1)...(19): siRNA sense strand
ucuuaaggcacgcggaaua

SEQ ID NO: 2392063 - RNA, 19 nt, Homo sapiens
  misc_RNA (1)...(19): siRNA sense strand
agaaugaagcggaugaaau

SEQ ID NO: 2392064 - RNA, 19 nt, Homo sapiens
  misc_RNA (1)...(19): siRNA sense strand
ccaaggaagaugaaaucaa

SEQ ID NO: 2392065 - RNA, 19 nt, Homo sapiens
  misc_RNA (1)...(19): siRNA sense strand
cugaauggaccaaggaaga

SEQ ID NO: 2392066 - RNA, 19 nt, Homo sapiens
  misc_RNA (1)...(19): siRNA sense strand
cugaagaaauugagaagcu

SEQ ID NO: 2392067 - RNA, 19 nt, Homo sapiens
  misc_RNA (1)...(19): siRNA sense strand
ggaugugguccaaggaaga

SEQ ID NO: 2392068 - RNA, 19 nt, Homo sapiens
  misc_RNA (1)...(19): siRNA sense strand
ugaacaauauugaacgcua

SEQ ID NO: 2392069 - RNA, 19 nt, Homo sapiens
  misc_RNA (1)...(19): siRNA sense strand
cgauagugauauucaguca

SEQ ID NO: 2392070 - RNA, 19 nt, Homo sapiens
  misc_RNA (1)...(19): siRNA sense strand
cgaccuuaaacaagaggaa

SEQ ID NO: 2392071 - RNA, 19 nt, Homo sapiens
  misc_RNA (1)...(19): siRNA sense strand
gguccaaggaagaaauuga

SEQ ID NO: 2392072 - RNA, 19 nt, Homo sapiens
  misc_RNA (1)...(19): siRNA sense strand
agaagaacaaguugaucaa

SEQ ID NO: 2392073 - RNA, 19 nt, Homo sapiens
  misc_RNA (1)...(19): siRNA sense strand
gcacaguggaagaggauuc

SEQ ID NO: 2392074 - RNA, 19 nt, Homo sapiens
  misc_RNA (1)...(19): siRNA sense strand
auucaaaggaugucgaaga

SEQ ID NO: 2392075 - RNA, 19 nt, Homo sapiens
  misc_RNA (1)...(19): siRNA sense strand
cagaaguagcagaugauga

SEQ ID NO: 2392076 - RNA, 19 nt, Homo sapiens
  misc_RNA (1)...(19): siRNA sense strand
ugauguagcugaugaaaau

SEQ ID NO: 2392077 - RNA, 19 nt, Homo sapiens
  misc_RNA (1)...(19): siRNA sense strand
ugagcaacuagaugaaaua

SEQ ID NO: 2392078 - RNA, 19 nt, Homo sapiens
  misc_RNA (1)...(19): siRNA sense strand
gucaaaagacgaaagaaaa

SEQ ID NO: 2392079 - RNA, 19 nt, Homo sapiens
  misc_RNA (1)...(19): siRNA sense strand
ccggauaaagcauggcaau

SEQ ID NO: 2392080 - RNA, 19 nt, Homo sapiens
  misc_RNA (1)...(19): siRNA sense strand
acuacagacauuugagauu

SEQ ID NO: 2392081 - RNA, 19 nt, Homo sapiens
  misc_RNA (1)...(19): siRNA sense strand
guggacagaagaagaagaa

SEQ ID NO: 2392082 - RNA, 19 nt, Homo sapiens
  misc_RNA (1)...(19): siRNA sense strand
ccaaggaagaaauugauau

SEQ ID NO: 2392083 - RNA, 19 nt, Homo sapiens
  misc_RNA (1)...(19): siRNA sense strand
ggagaauaaaucaggaucu

SEQ ID NO: 2392084 - RNA, 19 nt, Homo sapiens
  misc_RNA (1)...(19): siRNA sense strand
ugauuuagccagugcuuau

SEQ ID NO: 2392085 - RNA, 19 nt, Homo sapiens
  misc_RNA (1)...(19): siRNA sense strand
augucgaagauuugguaaa

SEQ ID NO: 2392086 - RNA, 19 nt, Homo sapiens
  misc_RNA (1)...(19): siRNA sense strand
cagaaaaugaucagagcuu

SEQ ID NO: 2392087 - RNA, 19 nt, Homo sapiens
  misc_RNA (1)...(19): siRNA sense strand
agaaaagagacuugcagaa

SEQ ID NO: 2392088 - RNA, 19 nt, Homo sapiens
  misc_RNA (1)...(19): siRNA sense strand
uagaagaacaaguugauca

SEQ ID NO: 2392089 - RNA, 19 nt, Homo sapiens
  misc_RNA (1)...(19): siRNA sense strand
gaaugagcaacuagaugaa

SEQ ID NO: 2392090 - RNA, 19 nt, Homo sapiens
  misc_RNA (1)...(19): siRNA sense strand
ccaaacaguaauaccaauu

SEQ ID NO: 2392091 - RNA, 19 nt, Homo sapiens
  misc_RNA (1)...(19): siRNA sense strand
cagaagauucaaaggaugu

SEQ ID NO: 2392092 - RNA, 19 nt, Homo sapiens
  misc_RNA (1)...(19): siRNA sense strand
cggaugaaauagacucaga

SEQ ID NO: 2392093 - RNA, 19 nt, Homo sapiens
  misc_RNA (1)...(19): siRNA sense strand
ggacauaaauggaagcagg

SEQ ID NO: 2392094 - RNA, 19 nt, Homo sapiens
  misc_RNA (1)...(19): siRNA sense strand
gagcacaguggaagaggau

SEQ ID NO: 2392095 - RNA, 19 nt, Homo sapiens
  misc_RNA (1)...(19): siRNA sense strand
cuauagaagaacaaguuga

SEQ ID NO: 2392096 - RNA, 19 nt, Homo sapiens
  misc_RNA (1)...(19): siRNA sense strand
ccucaggauagcagaacuu

SEQ ID NO: 2392097 - RNA, 19 nt, Homo sapiens
  misc_RNA (1)...(19): siRNA sense strand
caaacaagcucaagccaag

SEQ ID NO: 2392098 - RNA, 19 nt, Homo sapiens
  misc_RNA (1)...(19): siRNA sense strand
guugaacacaagugauaau

SEQ ID NO: 2392099 - RNA, 19 nt, Homo sapiens
  misc_RNA (1)...(19): siRNA sense strand
ugacacaguaacaguagaa

SEQ ID NO: 2392100 - RNA, 19 nt, Homo sapiens
  misc_RNA (1)...(19): siRNA sense strand
augagcaacuagaugaaau

SEQ ID NO: 2392101 - RNA, 19 nt, Homo sapiens
  misc_RNA (1)...(19): siRNA sense strand
gggaaaauauacaccugaa

SEQ ID NO: 2392102 - RNA, 19 nt, Homo sapiens
  misc_RNA (1)...(19): siRNA sense strand
cugacagucgauagugaua

SEQ ID NO: 2392103 - RNA, 19 nt, Homo sapiens
  misc_RNA (1)...(19): siRNA sense strand
agauacagauuuugcagaa

SEQ ID NO: 2392104 - RNA, 19 nt, Homo sapiens
  misc_RNA (1)...(19): siRNA sense strand
ugacagaaaccauguggga

SEQ ID NO: 2392105 - RNA, 19 nt, Homo sapiens
  misc_RNA (1)...(19): siRNA sense strand
ucaaacaagcucaagccaa

SEQ ID NO: 2392106 - RNA, 19 nt, Homo sapiens
  misc_RNA (1)...(19): siRNA sense strand
ucagaacagaagaagaaau

SEQ ID NO: 2392107 - RNA, 19 nt, Homo sapiens
  misc_RNA (1)...(19): siRNA sense strand
agaagauaguauugaaccu

SEQ ID NO: 2392108 - RNA, 19 nt, Homo sapiens
  misc_RNA (1)...(19): siRNA sense strand
agggaaguggacagaagaa

SEQ ID NO: 2392109 - RNA, 19 nt, Homo sapiens
  misc_RNA (1)...(19): siRNA sense strand
agauaagaguugcccgcuu

SEQ ID NO: 2392110 - RNA, 19 nt, Homo sapiens
  misc_RNA (1)...(19): siRNA sense strand
augaauaguguuaugguca

SEQ ID NO: 2392111 - RNA, 19 nt, Homo sapiens
  misc_RNA (1)...(19): siRNA sense strand
cucaaggagcuccggauaa

SEQ ID NO: 2392112 - RNA, 19 nt, Homo sapiens
  misc_RNA (1)...(19): siRNA sense strand
cagaacagaagaagaaauc

SEQ ID NO: 2392113 - RNA, 19 nt, Homo sapiens
  misc_RNA (1)...(19): siRNA sense strand
gguuuagagucucccacua

SEQ ID NO: 2392114 - RNA, 19 nt, Homo sapiens
  misc_RNA (1)...(19): siRNA sense strand
agaaaaggcuacaggaaau

SEQ ID NO: 2392115 - RNA, 19 nt, Homo sapiens
  misc_RNA (1)...(19): siRNA sense strand
gagaaaaggcuacaggaaa

SEQ ID NO: 2392116 - RNA, 19 nt, Homo sapiens
  misc_RNA (1)...(19): siRNA sense strand
gggagauauuauugauaca

SEQ ID NO: 2392117 - RNA, 19 nt, Homo sapiens
  misc_RNA (1)...(19): siRNA sense strand
guaaauggcaagagggugu

SEQ ID NO: 2392118 - RNA, 19 nt, Homo sapiens
  misc_RNA (1)...(19): siRNA sense strand
gaaacaagagauggagaaa

SEQ ID NO: 2392119 - RNA, 19 nt, Homo sapiens
  misc_RNA (1)...(19): siRNA sense strand
ggaucuagcaggaagugaa

SEQ ID NO: 2392120 - RNA, 19 nt, Homo sapiens
  misc_RNA (1)...(19): siRNA sense strand
ugaaacaagagauggagaa

SEQ ID NO: 2392121 - RNA, 19 nt, Homo sapiens
  misc_RNA (1)...(19): siRNA sense strand
cuuauacaaugauggguaa

SEQ ID NO: 2392122 - RNA, 19 nt, Homo sapiens
  misc_RNA (1)...(19): siRNA sense strand
gauuaaaggaaggagcaaa

SEQ ID NO: 2392123 - RNA, 19 nt, Homo sapiens
  misc_RNA (1)...(19): siRNA sense strand
cgagagaccagcaaggaau

SEQ ID NO: 2392124 - RNA, 19 nt, Homo sapiens
  misc_RNA (1)...(19): siRNA sense strand
gccaaagggacucgauuaa

SEQ ID NO: 2392125 - RNA, 19 nt, Homo sapiens
  misc_RNA (1)...(19): siRNA sense strand
auuaaaggaaggagcaaau

SEQ ID NO: 2392126 - RNA, 19 nt, Homo sapiens
  misc_RNA (1)...(19): siRNA sense strand
guuuaaaggaaucagagaa

SEQ ID NO: 2392127 - RNA, 19 nt, Homo sapiens
  misc_RNA (1)...(19): siRNA sense strand
cccaaagaauccaaaggaa

SEQ ID NO: 2392128 - RNA, 19 nt, Homo sapiens
  misc_RNA (1)...(19): siRNA sense strand
ugauucaacuggugccaaa

SEQ ID NO: 2392129 - RNA, 19 nt, Homo sapiens
  misc_RNA (1)...(19): siRNA sense strand
gggaaguuaucgugaccuu

SEQ ID NO: 2392130 - RNA, 19 nt, Homo sapiens
  misc_RNA (1)...(19): siRNA sense strand
agagggagcuucuggaaaa

SEQ ID NO: 2392131 - RNA, 19 nt, Homo sapiens
  misc_RNA (1)...(19): siRNA sense strand
aggaaggagcaaauauuaa

SEQ ID NO: 2392132 - RNA, 19 nt, Homo sapiens
  misc_RNA (1)...(19): siRNA sense strand
ggacauuugcccagaggga

SEQ ID NO: 2392133 - RNA, 19 nt, Homo sapiens
  misc_RNA (1)...(19): siRNA sense strand
ggagaaaaggcuacaggaa

SEQ ID NO: 2392134 - RNA, 19 nt, Homo sapiens
  misc_RNA (1)...(19): siRNA sense strand
gcagacuggugcuggaaaa

SEQ ID NO: 2392135 - RNA, 19 nt, Homo sapiens
  misc_RNA (1)...(19): siRNA sense strand
gaauggagagagaggcuuu

SEQ ID NO: 2392136 - RNA, 19 nt, Homo sapiens
  misc_RNA (1)...(19): siRNA sense strand
aaaccuacguaaauggcaa

SEQ ID NO: 2392137 - RNA, 19 nt, Homo sapiens
  misc_RNA (1)...(19): siRNA sense strand
uaaaggaaucagagaagau

SEQ ID NO: 2392138 - RNA, 19 nt, Homo sapiens
  misc_RNA (1)...(19): siRNA sense strand
ggaagauggaggaacccua

SEQ ID NO: 2392139 - RNA, 19 nt, Homo sapiens
  misc_RNA (1)...(19): siRNA sense strand
aggagaaggaagaagcaga

SEQ ID NO: 2392140 - RNA, 19 nt, Homo sapiens
  misc_RNA (1)...(19): siRNA sense strand
ccaaagaauccaaaggaag

SEQ ID NO: 2392141 - RNA, 19 nt, Homo sapiens
  misc_RNA (1)...(19): siRNA sense strand
guaaacaagaagaaagcca

SEQ ID NO: 2392142 - RNA, 19 nt, Homo sapiens
  misc_RNA (1)...(19): siRNA sense strand
ucacauuaaagaagagcau

SEQ ID NO: 2392143 - RNA, 19 nt, Homo sapiens
  misc_RNA (1)...(19): siRNA sense strand
ggagaaggaagaagcagau

SEQ ID NO: 2392144 - RNA, 19 nt, Homo sapiens
  misc_RNA (1)...(19): siRNA sense strand
ccucauggaugcugggaac

SEQ ID NO: 2392145 - RNA, 19 nt, Homo sapiens
  misc_RNA (1)...(19): siRNA sense strand
gggaguugccauucgggaa

SEQ ID NO: 2392146 - RNA, 19 nt, Homo sapiens
  misc_RNA (1)...(19): siRNA sense strand
cgauuaaaggaaggagcaa

SEQ ID NO: 2392147 - RNA, 19 nt, Homo sapiens
  misc_RNA (1)...(19): siRNA sense strand
aggaaauggagaucuuaua

SEQ ID NO: 2392148 - RNA, 19 nt, Homo sapiens
  misc_RNA (1)...(19): siRNA sense strand
aaugauggguaaacaagaa

SEQ ID NO: 2392149 - RNA, 19 nt, Homo sapiens
  misc_RNA (1)...(19): siRNA sense strand
ugugaaagaguacgagauu

SEQ ID NO: 2392150 - RNA, 19 nt, Homo sapiens
  misc_RNA (1)...(19): siRNA sense strand
ucaacuacgaugagacuuu

SEQ ID NO: 2392151 - RNA, 19 nt, Homo sapiens
  misc_RNA (1)...(19): siRNA sense strand
ucuuauacaaugaugggua

SEQ ID NO: 2392152 - RNA, 19 nt, Homo sapiens
  misc_RNA (1)...(19): siRNA sense strand
cccagaagaaacacgauaa

SEQ ID NO: 2392153 - RNA, 19 nt, Homo sapiens
  misc_RNA (1)...(19): siRNA sense strand
ggaaggagcaaauauuaau

SEQ ID NO: 2392154 - RNA, 19 nt, Homo sapiens
  misc_RNA (1)...(19): siRNA sense strand
cuuugagcacucugagaua

SEQ ID NO: 2392155 - RNA, 19 nt, Homo sapiens
  misc_RNA (1)...(19): siRNA sense strand
ccagaagaaacacgauaau

SEQ ID NO: 2392156 - RNA, 19 nt, Homo sapiens
  misc_RNA (1)...(19): siRNA sense strand
cagagaagaucauugcuga

SEQ ID NO: 2392157 - RNA, 19 nt, Homo sapiens
  misc_RNA (1)...(19): siRNA sense strand
cggagugagagaagcaaca

SEQ ID NO: 2392158 - RNA, 19 nt, Homo sapiens
  misc_RNA (1)...(19): siRNA sense strand
agaggaagcuauugaacgu

SEQ ID NO: 2392159 - RNA, 19 nt, Homo sapiens
  misc_RNA (1)...(19): siRNA sense strand
cguuuaaaggaaucagaga

SEQ ID NO: 2392160 - RNA, 19 nt, Homo sapiens
  misc_RNA (1)...(19): siRNA sense strand
gggauauaaugucuguauu

SEQ ID NO: 2392161 - RNA, 19 nt, Homo sapiens
  misc_RNA (1)...(19): siRNA sense strand
guaauuugcgugugcguga

SEQ ID NO: 2392162 - RNA, 19 nt, Homo sapiens
  misc_RNA (1)...(19): siRNA sense strand
ugccaaagggacucgauua

SEQ ID NO: 2392163 - RNA, 19 nt, Homo sapiens
  misc_RNA (1)...(19): siRNA sense strand
gugaaagaguacgagauuu

SEQ ID NO: 2392164 - RNA, 19 nt, Homo sapiens
  misc_RNA (1)...(19): siRNA sense strand
gcaaggaauccaaaugcau

SEQ ID NO: 2392165 - RNA, 19 nt, Homo sapiens
  misc_RNA (1)...(19): siRNA sense strand
gcuuuaaccacccggaaca

SEQ ID NO: 2392166 - RNA, 19 nt, Homo sapiens
  misc_RNA (1)...(19): siRNA sense strand
agauggaauuacaaggguu

SEQ ID NO: 2392167 - RNA, 19 nt, Homo sapiens
  misc_RNA (1)...(19): siRNA sense strand
aagcacgagcugagcgaga

SEQ ID NO: 2392168 - RNA, 19 nt, Homo sapiens
  misc_RNA (1)...(19): siRNA sense strand
ccuuggccgaggugaguaa

SEQ ID NO: 2392169 - RNA, 19 nt, Homo sapiens
  misc_RNA (1)...(19): siRNA sense strand
augcaaugcuguuaucaau

SEQ ID NO: 2392170 - RNA, 19 nt, Homo sapiens
  misc_RNA (1)...(19): siRNA sense strand
gugaauuaaaggaggaggu

SEQ ID NO: 2392171 - RNA, 19 nt, Homo sapiens
  misc_RNA (1)...(19): siRNA sense strand
auaugaaacaagagaugga

SEQ ID NO: 2392172 - RNA, 19 nt, Homo sapiens
  misc_RNA (1)...(19): siRNA sense strand
ggguaaacaagaagaaagc

SEQ ID NO: 2392173 - RNA, 19 nt, Homo sapiens
  misc_RNA (1)...(19): siRNA sense strand
gauaaugagaccaaccuuu

SEQ ID NO: 2392174 - RNA, 19 nt, Homo sapiens
  misc_RNA (1)...(19): siRNA sense strand
ucauucagaugcaaggcaa

SEQ ID NO: 2392175 - RNA, 19 nt, Homo sapiens
  misc_RNA (1)...(19): siRNA sense strand
auugcugaguugaaugaaa

SEQ ID NO: 2392176 - RNA, 19 nt, Homo sapiens
  misc_RNA (1)...(19): siRNA sense strand
gauggguaaacaagaagaa

SEQ ID NO: 2392177 - RNA, 19 nt, Homo sapiens
  misc_RNA (1)...(19): siRNA sense strand
gagaaaauuuagguggcaa

SEQ ID NO: 2392178 - RNA, 19 nt, Homo sapiens
  misc_RNA (1)...(19): siRNA sense strand
augccaaacugguucguga

SEQ ID NO: 2392179 - RNA, 19 nt, Homo sapiens
  misc_RNA (1)...(19): siRNA sense strand
ccaguauucaagagaggau

SEQ ID NO: 2392180 - RNA, 19 nt, Homo sapiens
  misc_RNA (1)...(19): siRNA sense strand
gcacgagcugagcgagaga

SEQ ID NO: 2392181 - RNA, 19 nt, Homo sapiens
  misc_RNA (1)...(19): siRNA sense strand
aaaggaaggagcaaauauu

SEQ ID NO: 2392182 - RNA, 19 nt, Homo sapiens
  misc_RNA (1)...(19): siRNA sense strand
gaagguggcuguccgggua

SEQ ID NO: 2392183 - RNA, 19 nt, Homo sapiens
  misc_RNA (1)...(19): siRNA sense strand
aggaagugaacgagcugau

SEQ ID NO: 2392184 - RNA, 19 nt, Homo sapiens
  misc_RNA (1)...(19): siRNA sense strand
aggaaucagagaagaucau

SEQ ID NO: 2392185 - RNA, 19 nt, Homo sapiens
  misc_RNA (1)...(19): siRNA sense strand
uuguuaaccucaaugaaga

SEQ ID NO: 2392186 - RNA, 19 nt, Homo sapiens
  misc_RNA (1)...(19): siRNA sense strand
ugauaugaaacaagagaug

SEQ ID NO: 2392187 - RNA, 19 nt, Homo sapiens
  misc_RNA (1)...(19): siRNA sense strand
agaaaauuuagguggcaau

SEQ ID NO: 2392188 - RNA, 19 nt, Homo sapiens
  misc_RNA (1)...(19): siRNA sense strand
aauuaaaggaggaggugac

SEQ ID NO: 2392189 - RNA, 19 nt, Homo sapiens
  misc_RNA (1)...(19): siRNA sense strand
cagaauggagagagaggcu

SEQ ID NO: 2392190 - RNA, 19 nt, Homo sapiens
  misc_RNA (1)...(19): siRNA sense strand
aauuacaaggguuggccaa

SEQ ID NO: 2392191 - RNA, 19 nt, Homo sapiens
  misc_RNA (1)...(19): siRNA sense strand
acauuaaagaagagcauug

SEQ ID NO: 2392192 - RNA, 19 nt, Homo sapiens
  misc_RNA (1)...(19): siRNA sense strand
gacccuauguggaggaucu

SEQ ID NO: 2392193 - RNA, 19 nt, Homo sapiens
  misc_RNA (1)...(19): siRNA sense strand
gaggagaggaagcuauuga

SEQ ID NO: 2392194 - RNA, 19 nt, Homo sapiens
  misc_RNA (1)...(19): siRNA sense strand
agaaaaggcuacaggaaau

SEQ ID NO: 2392195 - RNA, 19 nt, Homo sapiens
  misc_RNA (1)...(19): siRNA sense strand
gagaaaaggcuacaggaaa

SEQ ID NO: 2392196 - RNA, 19 nt, Homo sapiens
  misc_RNA (1)...(19): siRNA sense strand
gggagauauuauugauaca

SEQ ID NO: 2392197 - RNA, 19 nt, Homo sapiens
  misc_RNA (1)...(19): siRNA sense strand
guaaauggcaagagggugu

SEQ ID NO: 2392198 - RNA, 19 nt, Homo sapiens
  misc_RNA (1)...(19): siRNA sense strand
gaaacaagagauggagaaa

SEQ ID NO: 2392199 - RNA, 19 nt, Homo sapiens
  misc_RNA (1)...(19): siRNA sense strand
ggaucuagcaggaagugaa

SEQ ID NO: 2392200 - RNA, 19 nt, Homo sapiens
  misc_RNA (1)...(19): siRNA sense strand
ugaaacaagagauggagaa

SEQ ID NO: 2392201 - RNA, 19 nt, Homo sapiens
  misc_RNA (1)...(19): siRNA sense strand
cuuauacaaugauggguaa

SEQ ID NO: 2392202 - RNA, 19 nt, Homo sapiens
  misc_RNA (1)...(19): siRNA sense strand
gauuaaaggaaggagcaaa

SEQ ID NO: 2392203 - RNA, 19 nt, Homo sapiens
  misc_RNA (1)...(19): siRNA sense strand
cgagagaccagcaaggaau

SEQ ID NO: 2392204 - RNA, 19 nt, Homo sapiens
  misc_RNA (1)...(19): siRNA sense strand
gccaaagggacucgauuaa

SEQ ID NO: 2392205 - RNA, 19 nt, Homo sapiens
  misc_RNA (1)...(19): siRNA sense strand
auuaaaggaaggagcaaau

SEQ ID NO: 2392206 - RNA, 19 nt, Homo sapiens
  misc_RNA (1)...(19): siRNA sense strand
guuuaaaggaaucagagaa

SEQ ID NO: 2392207 - RNA, 19 nt, Homo sapiens
  misc_RNA (1)...(19): siRNA sense strand
cccaaagaauccaaaggaa

SEQ ID NO: 2392208 - RNA, 19 nt, Homo sapiens
  misc_RNA (1)...(19): siRNA sense strand
ugauucaacuggugccaaa

SEQ ID NO: 2392209 - RNA, 19 nt, Homo sapiens
  misc_RNA (1)...(19): siRNA sense strand
gggaaguuaucgugaccuu

SEQ ID NO: 2392210 - RNA, 19 nt, Homo sapiens
  misc_RNA (1)...(19): siRNA sense strand
agagggagcuucuggaaaa

SEQ ID NO: 2392211 - RNA, 19 nt, Homo sapiens
  misc_RNA (1)...(19): siRNA sense strand
aggaaggagcaaauauuaa

SEQ ID NO: 2392212 - RNA, 19 nt, Homo sapiens
  misc_RNA (1)...(19): siRNA sense strand
ggacauuugcccagaggga

SEQ ID NO: 2392213 - RNA, 19 nt, Homo sapiens
  misc_RNA (1)...(19): siRNA sense strand
ggagaaaaggcuacaggaa

SEQ ID NO: 2392214 - RNA, 19 nt, Homo sapiens
  misc_RNA (1)...(19): siRNA sense strand
gcagacuggugcuggaaaa

SEQ ID NO: 2392215 - RNA, 19 nt, Homo sapiens
  misc_RNA (1)...(19): siRNA sense strand
gaauggagagagaggcuuu

SEQ ID NO: 2392216 - RNA, 19 nt, Homo sapiens
  misc_RNA (1)...(19): siRNA sense strand
aaaccuacguaaauggcaa

SEQ ID NO: 2392217 - RNA, 19 nt, Homo sapiens
  misc_RNA (1)...(19): siRNA sense strand
uaaaggaaucagagaagau

SEQ ID NO: 2392218 - RNA, 19 nt, Homo sapiens
  misc_RNA (1)...(19): siRNA sense strand
ggaagauggaggaacccua

SEQ ID NO: 2392219 - RNA, 19 nt, Homo sapiens
  misc_RNA (1)...(19): siRNA sense strand
aggagaaggaagaagcaga

SEQ ID NO: 2392220 - RNA, 19 nt, Homo sapiens
  misc_RNA (1)...(19): siRNA sense strand
ccaaagaauccaaaggaag

SEQ ID NO: 2392221 - RNA, 19 nt, Homo sapiens
  misc_RNA (1)...(19): siRNA sense strand
guaaacaagaagaaagcca

SEQ ID NO: 2392222 - RNA, 19 nt, Homo sapiens
  misc_RNA (1)...(19): siRNA sense strand
ucacauuaaagaagagcau

SEQ ID NO: 2392223 - RNA, 19 nt, Homo sapiens
  misc_RNA (1)...(19): siRNA sense strand
ggagaaggaagaagcagau

SEQ ID NO: 2392224 - RNA, 19 nt, Homo sapiens
  misc_RNA (1)...(19): siRNA sense strand
ccucauggaugcugggaac

SEQ ID NO: 2392225 - RNA, 19 nt, Homo sapiens
  misc_RNA (1)...(19): siRNA sense strand
gggaguugccauucgggaa

SEQ ID NO: 2392226 - RNA, 19 nt, Homo sapiens
  misc_RNA (1)...(19): siRNA sense strand
cgauuaaaggaaggagcaa

SEQ ID NO: 2392227 - RNA, 19 nt, Homo sapiens
  misc_RNA (1)...(19): siRNA sense strand
aggaaauggagaucuuaua

SEQ ID NO: 2392228 - RNA, 19 nt, Homo sapiens
  misc_RNA (1)...(19): siRNA sense strand
aaugauggguaaacaagaa

SEQ ID NO: 2392229 - RNA, 19 nt, Homo sapiens
  misc_RNA (1)...(19): siRNA sense strand
ugugaaagaguacgagauu

SEQ ID NO: 2392230 - RNA, 19 nt, Homo sapiens
  misc_RNA (1)...(19): siRNA sense strand
ucaacuacgaugagacuuu

SEQ ID NO: 2392231 - RNA, 19 nt, Homo sapiens
  misc_RNA (1)...(19): siRNA sense strand
ucuuauacaaugaugggua

SEQ ID NO: 2392232 - RNA, 19 nt, Homo sapiens
  misc_RNA (1)...(19): siRNA sense strand
cccagaagaaacacgauaa

SEQ ID NO: 2392233 - RNA, 19 nt, Homo sapiens
  misc_RNA (1)...(19): siRNA sense strand
ggaaggagcaaauauuaau

SEQ ID NO: 2392234 - RNA, 19 nt, Homo sapiens
  misc_RNA (1)...(19): siRNA sense strand
cuuugagcacucugagaua

SEQ ID NO: 2392235 - RNA, 19 nt, Homo sapiens
  misc_RNA (1)...(19): siRNA sense strand
ccagaagaaacacgauaau

SEQ ID NO: 2392236 - RNA, 19 nt, Homo sapiens
  misc_RNA (1)...(19): siRNA sense strand
cagagaagaucauugcuga

SEQ ID NO: 2392237 - RNA, 19 nt, Homo sapiens
  misc_RNA (1)...(19): siRNA sense strand
cggagugagagaagcaaca

SEQ ID NO: 2392238 - RNA, 19 nt, Homo sapiens
  misc_RNA (1)...(19): siRNA sense strand
agaggaagcuauugaacgu

SEQ ID NO: 2392239 - RNA, 19 nt, Homo sapiens
  misc_RNA (1)...(19): siRNA sense strand
cguuuaaaggaaucagaga

SEQ ID NO: 2392240 - RNA, 19 nt, Homo sapiens
  misc_RNA (1)...(19): siRNA sense strand
gggauauaaugucuguauu

SEQ ID NO: 2392241 - RNA, 19 nt, Homo sapiens
  misc_RNA (1)...(19): siRNA sense strand
guaauuugcgugugcguga

SEQ ID NO: 2392242 - RNA, 19 nt, Homo sapiens
  misc_RNA (1)...(19): siRNA sense strand
ugccaaagggacucgauua

SEQ ID NO: 2392243 - RNA, 19 nt, Homo sapiens
  misc_RNA (1)...(19): siRNA sense strand
gugaaagaguacgagauuu

SEQ ID NO: 2392244 - RNA, 19 nt, Homo sapiens
  misc_RNA (1)...(19): siRNA sense strand
gcaaggaauccaaaugcau

SEQ ID NO: 2392245 - RNA, 19 nt, Homo sapiens
  misc_RNA (1)...(19): siRNA sense strand
gcuuuaaccacccggaaca

SEQ ID NO: 2392246 - RNA, 19 nt, Homo sapiens
  misc_RNA (1)...(19): siRNA sense strand
agauggaauuacaaggguu

SEQ ID NO: 2392247 - RNA, 19 nt, Homo sapiens
  misc_RNA (1)...(19): siRNA sense strand
aagcacgagcugagcgaga

SEQ ID NO: 2392248 - RNA, 19 nt, Homo sapiens
  misc_RNA (1)...(19): siRNA sense strand
ccuuggccgaggugaguaa

SEQ ID NO: 2392249 - RNA, 19 nt, Homo sapiens
  misc_RNA (1)...(19): siRNA sense strand
augcaaugcuguuaucaau

SEQ ID NO: 2392250 - RNA, 19 nt, Homo sapiens
  misc_RNA (1)...(19): siRNA sense strand
gugaauuaaaggaggaggu

SEQ ID NO: 2392251 - RNA, 19 nt, Homo sapiens
  misc_RNA (1)...(19): siRNA sense strand
auaugaaacaagagaugga

SEQ ID NO: 2392252 - RNA, 19 nt, Homo sapiens
  misc_RNA (1)...(19): siRNA sense strand
ggguaaacaagaagaaagc

SEQ ID NO: 2392253 - RNA, 19 nt, Homo sapiens
  misc_RNA (1)...(19): siRNA sense strand
gauaaugagaccaaccuuu

SEQ ID NO: 2392254 - RNA, 19 nt, Homo sapiens
  misc_RNA (1)...(19): siRNA sense strand
ucauucagaugcaaggcaa

SEQ ID NO: 2392255 - RNA, 19 nt, Homo sapiens
  misc_RNA (1)...(19): siRNA sense strand
auugcugaguugaaugaaa

SEQ ID NO: 2392256 - RNA, 19 nt, Homo sapiens
  misc_RNA (1)...(19): siRNA sense strand
gauggguaaacaagaagaa

SEQ ID NO: 2392257 - RNA, 19 nt, Homo sapiens
  misc_RNA (1)...(19): siRNA sense strand
gagaaaauuuagguggcaa

SEQ ID NO: 2392258 - RNA, 19 nt, Homo sapiens
  misc_RNA (1)...(19): siRNA sense strand
augccaaacugguucguga

SEQ ID NO: 2392259 - RNA, 19 nt, Homo sapiens
  misc_RNA (1)...(19): siRNA sense strand
ccaguauucaagagaggau

SEQ ID NO: 2392260 - RNA, 19 nt, Homo sapiens
  misc_RNA (1)...(19): siRNA sense strand
gcacgagcugagcgagaga

SEQ ID NO: 2392261 - RNA, 19 nt, Homo sapiens
  misc_RNA (1)...(19): siRNA sense strand
aaaggaaggagcaaauauu

SEQ ID NO: 2392262 - RNA, 19 nt, Homo sapiens
  misc_RNA (1)...(19): siRNA sense strand
gaagguggcuguccgggua

SEQ ID NO: 2392263 - RNA, 19 nt, Homo sapiens
  misc_RNA (1)...(19): siRNA sense strand
aggaagugaacgagcugau

SEQ ID NO: 2392264 - RNA, 19 nt, Homo sapiens
  misc_RNA (1)...(19): siRNA sense strand
aggaaucagagaagaucau

SEQ ID NO: 2392265 - RNA, 19 nt, Homo sapiens
  misc_RNA (1)...(19): siRNA sense strand
uuguuaaccucaaugaaga

SEQ ID NO: 2392266 - RNA, 19 nt, Homo sapiens
  misc_RNA (1)...(19): siRNA sense strand
ugauaugaaacaagagaug

SEQ ID NO: 2392267 - RNA, 19 nt, Homo sapiens
  misc_RNA (1)...(19): siRNA sense strand
agaaaauuuagguggcaau

SEQ ID NO: 2392268 - RNA, 19 nt, Homo sapiens
  misc_RNA (1)...(19): siRNA sense strand
aauuaaaggaggaggugac

SEQ ID NO: 2392269 - RNA, 19 nt, Homo sapiens
  misc_RNA (1)...(19): siRNA sense strand
cagaauggagagagaggcu

SEQ ID NO: 2392270 - RNA, 19 nt, Homo sapiens
  misc_RNA (1)...(19): siRNA sense strand
aauuacaaggguuggccaa

SEQ ID NO: 2392271 - RNA, 19 nt, Homo sapiens
  misc_RNA (1)...(19): siRNA sense strand
acauuaaagaagagcauug

SEQ ID NO: 2392272 - RNA, 19 nt, Homo sapiens
  misc_RNA (1)...(19): siRNA sense strand
gacccuauguggaggaucu

SEQ ID NO: 2392273 - RNA, 19 nt, Homo sapiens
  misc_RNA (1)...(19): siRNA sense strand
gaggagaggaagcuauuga

SEQ ID NO: 2392274 - RNA, 19 nt, Homo sapiens
  misc_RNA (1)...(19): siRNA sense strand
aauugaaggcacaggaaua

SEQ ID NO: 2392275 - RNA, 19 nt, Homo sapiens
  misc_RNA (1)...(19): siRNA sense strand
uggagaaacacaaggucaa

SEQ ID NO: 2392276 - RNA, 19 nt, Homo sapiens
  misc_RNA (1)...(19): siRNA sense strand
gaagcaaauugaaggcaca

SEQ ID NO: 2392277 - RNA, 19 nt, Homo sapiens
  misc_RNA (1)...(19): siRNA sense strand
cauaaaguacauggagaaa

SEQ ID NO: 2392278 - RNA, 19 nt, Homo sapiens
  misc_RNA (1)...(19): siRNA sense strand
ugggaagauauuagaaaga

SEQ ID NO: 2392279 - RNA, 19 nt, Homo sapiens
  misc_RNA (1)...(19): siRNA sense strand
uagaaagaugccagaauau

SEQ ID NO: 2392280 - RNA, 19 nt, Homo sapiens
  misc_RNA (1)...(19): siRNA sense strand
gagaauuaccucggagcaa

SEQ ID NO: 2392281 - RNA, 19 nt, Homo sapiens
  misc_RNA (1)...(19): siRNA sense strand
aggaauaugcauugaagca

SEQ ID NO: 2392282 - RNA, 19 nt, Homo sapiens
  misc_RNA (1)...(19): siRNA sense strand
ggaaaagaugaaaaggaau

SEQ ID NO: 2392283 - RNA, 19 nt, Homo sapiens
  misc_RNA (1)...(19): siRNA sense strand
agauaaagacugggaagau

SEQ ID NO: 2392284 - RNA, 19 nt, Homo sapiens
  misc_RNA (1)...(19): siRNA sense strand
gugacaagaaucagcaaca

SEQ ID NO: 2392285 - RNA, 19 nt, Homo sapiens
  misc_RNA (1)...(19): siRNA sense strand
cugugaugcccucggauua

SEQ ID NO: 2392286 - RNA, 19 nt, Homo sapiens
  misc_RNA (1)...(19): siRNA sense strand
gauuaugauuucaaggcga

SEQ ID NO: 2392287 - RNA, 19 nt, Homo sapiens
  misc_RNA (1)...(19): siRNA sense strand
gggagaagguccugagagg

SEQ ID NO: 2392288 - RNA, 19 nt, Homo sapiens
  misc_RNA (1)...(19): siRNA sense strand
auaaagacugggaagauau

SEQ ID NO: 2392289 - RNA, 19 nt, Homo sapiens
  misc_RNA (1)...(19): siRNA sense strand
cagauaaagacugggaaga

SEQ ID NO: 2392290 - RNA, 19 nt, Homo sapiens
  misc_RNA (1)...(19): siRNA sense strand
cuacaaggcgaggcggaaa

SEQ ID NO: 2392291 - RNA, 19 nt, Homo sapiens
  misc_RNA (1)...(19): siRNA sense strand
ggugcaaggcauuauacaa

SEQ ID NO: 2392292 - RNA, 19 nt, Homo sapiens
  misc_RNA (1)...(19): siRNA sense strand
cuuuagaagaacaacguau

SEQ ID NO: 2392293 - RNA, 19 nt, Homo sapiens
  misc_RNA (1)...(19): siRNA sense strand
ugccaagaucuaugguuaa

SEQ ID NO: 2392294 - RNA, 19 nt, Homo sapiens
  misc_RNA (1)...(19): siRNA sense strand
cucauaaaguacauggaga

SEQ ID NO: 2392295 - RNA, 19 nt, Homo sapiens
  misc_RNA (1)...(19): siRNA sense strand
gaaagauggaaaagaugaa

SEQ ID NO: 2392296 - RNA, 19 nt, Homo sapiens
  misc_RNA (1)...(19): siRNA sense strand
gggguuuccugcagauaaa

SEQ ID NO: 2392297 - RNA, 19 nt, Homo sapiens
  misc_RNA (1)...(19): siRNA sense strand
gcagauaaagacugggaag

SEQ ID NO: 2392298 - RNA, 19 nt, Homo sapiens
  misc_RNA (1)...(19): siRNA sense strand
agacuugaaaccagcaaau

SEQ ID NO: 2392299 - RNA, 19 nt, Homo sapiens
  misc_RNA (1)...(19): siRNA sense strand
aggauuuguuugaguacga

SEQ ID NO: 2392300 - RNA, 19 nt, Homo sapiens
  misc_RNA (1)...(19): siRNA sense strand
ggaauauccaugucggcuu

SEQ ID NO: 2392301 - RNA, 19 nt, Homo sapiens
  misc_RNA (1)...(19): siRNA sense strand
acugggaagauauuagaaa

SEQ ID NO: 2392302 - RNA, 19 nt, Homo sapiens
  misc_RNA (1)...(19): siRNA sense strand
aagaugauccugaagaaaa

SEQ ID NO: 2392303 - RNA, 19 nt, Homo sapiens
  misc_RNA (1)...(19): siRNA sense strand
acuugaaaccagcaaauau

SEQ ID NO: 2392304 - RNA, 19 nt, Homo sapiens
  misc_RNA (1)...(19): siRNA sense strand
auccaguaguugugacauu

SEQ ID NO: 2392305 - RNA, 19 nt, Homo sapiens
  misc_RNA (1)...(19): siRNA sense strand
auuagaaagaugccagaau

SEQ ID NO: 2392306 - RNA, 19 nt, Homo sapiens
  misc_RNA (1)...(19): siRNA sense strand
auuaugauuucaaggcgaa

SEQ ID NO: 2392307 - RNA, 19 nt, Homo sapiens
  misc_RNA (1)...(19): siRNA sense strand
agaacagcacccagaccaa

SEQ ID NO: 2392308 - RNA, 19 nt, Homo sapiens
  misc_RNA (1)...(19): siRNA sense strand
gaagaacaacguaugccaa

SEQ ID NO: 2392309 - RNA, 19 nt, Homo sapiens
  misc_RNA (1)...(19): siRNA sense strand
ccaaacgagaauuccuuaa

SEQ ID NO: 2392310 - RNA, 19 nt, Homo sapiens
  misc_RNA (1)...(19): siRNA sense strand
cagcagaacagcacccaga

SEQ ID NO: 2392311 - RNA, 19 nt, Homo sapiens
  misc_RNA (1)...(19): siRNA sense strand
cgaggcggaaagauggaaa

SEQ ID NO: 2392312 - RNA, 19 nt, Homo sapiens
  misc_RNA (1)...(19): siRNA sense strand
augcaguugccaagaucua

SEQ ID NO: 2392313 - RNA, 19 nt, Homo sapiens
  misc_RNA (1)...(19): siRNA sense strand
ugacauggguuuugccaga

SEQ ID NO: 2392314 - RNA, 19 nt, Homo sapiens
  misc_RNA (1)...(19): siRNA sense strand
ucuaaagccacuagcagau

SEQ ID NO: 2392315 - RNA, 19 nt, Homo sapiens
  misc_RNA (1)...(19): siRNA sense strand
acaaggagguggagcgcga

SEQ ID NO: 2392316 - RNA, 19 nt, Homo sapiens
  misc_RNA (1)...(19): siRNA sense strand
gcaagaacauugugcccau

SEQ ID NO: 2392317 - RNA, 19 nt, Homo sapiens
  misc_RNA (1)...(19): siRNA sense strand
agaccaagguguucagcga

SEQ ID NO: 2392318 - RNA, 19 nt, Homo sapiens
  misc_RNA (1)...(19): siRNA sense strand
cgacuaacaaggaggugga

SEQ ID NO: 2392319 - RNA, 19 nt, Homo sapiens
  misc_RNA (1)...(19): siRNA sense strand
gcuuggaggcgcagugcau

SEQ ID NO: 2392320 - RNA, 19 nt, Homo sapiens
  misc_RNA (1)...(19): siRNA sense strand
gugcuuacuuucaacggua

SEQ ID NO: 2392321 - RNA, 19 nt, Homo sapiens
  misc_RNA (1)...(19): siRNA sense strand
gcauaaggagauugugacu

SEQ ID NO: 2392322 - RNA, 19 nt, Homo sapiens
  misc_RNA (1)...(19): siRNA sense strand
uggacaagugcaugcaaga

SEQ ID NO: 2392323 - RNA, 19 nt, Homo sapiens
  misc_RNA (1)...(19): siRNA sense strand
cagcagaagagaugggaau

SEQ ID NO: 2392324 - RNA, 19 nt, Homo sapiens
  misc_RNA (1)...(19): siRNA sense strand
cuggagagcuggugggaga

SEQ ID NO: 2392325 - RNA, 19 nt, Homo sapiens
  misc_RNA (1)...(19): siRNA sense strand
ggaugaugaggaagagaaa

SEQ ID NO: 2392326 - RNA, 19 nt, Homo sapiens
  misc_RNA (1)...(19): siRNA sense strand
gcaaagugggcgagcucaa

SEQ ID NO: 2392327 - RNA, 19 nt, Homo sapiens
  misc_RNA (1)...(19): siRNA sense strand
cuggacaggcugaaagaua

SEQ ID NO: 2392328 - RNA, 19 nt, Homo sapiens
  misc_RNA (1)...(19): siRNA sense strand
augaugaggaagagaaauu

SEQ ID NO: 2392329 - RNA, 19 nt, Homo sapiens
  misc_RNA (1)...(19): siRNA sense strand
ccauaguacaggaagaaaa

SEQ ID NO: 2392330 - RNA, 19 nt, Homo sapiens
  misc_RNA (1)...(19): siRNA sense strand
aguacaaggaagaggagau

SEQ ID NO: 2392331 - RNA, 19 nt, Homo sapiens
  misc_RNA (1)...(19): siRNA sense strand
gcgccuaccacuuggagaa

SEQ ID NO: 2392332 - RNA, 19 nt, Homo sapiens
  misc_RNA (1)...(19): siRNA sense strand
cagaaaggagagagaggga

SEQ ID NO: 2392333 - RNA, 19 nt, Homo sapiens
  misc_RNA (1)...(19): siRNA sense strand
gggagaacaagcugcaaau

SEQ ID NO: 2392334 - RNA, 19 nt, Homo sapiens
  misc_RNA (1)...(19): siRNA sense strand
aguccauaguacaggaaga

SEQ ID NO: 2392335 - RNA, 19 nt, Homo sapiens
  misc_RNA (1)...(19): siRNA sense strand
aagaaaugcagaaaggaga

SEQ ID NO: 2392336 - RNA, 19 nt, Homo sapiens
  misc_RNA (1)...(19): siRNA sense strand
ggacaggcugaaagauaau

SEQ ID NO: 2392337 - RNA, 19 nt, Homo sapiens
  misc_RNA (1)...(19): siRNA sense strand
gggcaaugagcucaagaau

SEQ ID NO: 2392338 - RNA, 19 nt, Homo sapiens
  misc_RNA (1)...(19): siRNA sense strand
ucaacgagcagcugggaau

SEQ ID NO: 2392339 - RNA, 19 nt, Homo sapiens
  misc_RNA (1)...(19): siRNA sense strand
cugaggaugaugaggaaga

SEQ ID NO: 2392340 - RNA, 19 nt, Homo sapiens
  misc_RNA (1)...(19): siRNA sense strand
gaaaggagagagagggauc

SEQ ID NO: 2392341 - RNA, 19 nt, Homo sapiens
  misc_RNA (1)...(19): siRNA sense strand
gcauacagaaguuacgcaa

SEQ ID NO: 2392342 - RNA, 19 nt, Homo sapiens
  misc_RNA (1)...(19): siRNA sense strand
uugcaagauucgaugucua

SEQ ID NO: 2392343 - RNA, 19 nt, Homo sapiens
  misc_RNA (1)...(19): siRNA sense strand
ggacauaaugauagucgga

SEQ ID NO: 2392344 - RNA, 19 nt, Homo sapiens
  misc_RNA (1)...(19): siRNA sense strand
gagagggaucugauggcaa

SEQ ID NO: 2392345 - RNA, 19 nt, Homo sapiens
  misc_RNA (1)...(19): siRNA sense strand
aagccaaggacgaggucau

SEQ ID NO: 2392346 - RNA, 19 nt, Homo sapiens
  misc_RNA (1)...(19): siRNA sense strand
aggacgaggucaucaucaa

SEQ ID NO: 2392347 - RNA, 19 nt, Homo sapiens
  misc_RNA (1)...(19): siRNA sense strand
aggaugaugaggaagagaa

SEQ ID NO: 2392348 - RNA, 19 nt, Homo sapiens
  misc_RNA (1)...(19): siRNA sense strand
ccucagaaggcauacagaa

SEQ ID NO: 2392349 - RNA, 19 nt, Homo sapiens
  misc_RNA (1)...(19): siRNA sense strand
gguucagcuuggagaagga

SEQ ID NO: 2392350 - RNA, 19 nt, Homo sapiens
  misc_RNA (1)...(19): siRNA sense strand
gcuuggagaaggagagucu

SEQ ID NO: 2392351 - RNA, 19 nt, Homo sapiens
  misc_RNA (1)...(19): siRNA sense strand
gguacaaaacccaaaacaa

SEQ ID NO: 2392352 - RNA, 19 nt, Homo sapiens
  misc_RNA (1)...(19): siRNA sense strand
augaaggaccaaagguuau

SEQ ID NO: 2392353 - RNA, 19 nt, Homo sapiens
  misc_RNA (1)...(19): siRNA sense strand
gaagaaaagaagaagcuga

SEQ ID NO: 2392354 - RNA, 19 nt, Homo sapiens
  misc_RNA (1)...(19): siRNA sense strand
cggagcaagcauuuguuaa

SEQ ID NO: 2392355 - RNA, 19 nt, Homo sapiens
  misc_RNA (1)...(19): siRNA sense strand
ugcagaaggcgcuggagaa

SEQ ID NO: 2392356 - RNA, 19 nt, Homo sapiens
  misc_RNA (1)...(19): siRNA sense strand
cggcuacugucaaggccua

SEQ ID NO: 2392357 - RNA, 19 nt, Homo sapiens
  misc_RNA (1)...(19): siRNA sense strand
cgagacuauuauacaaaga

SEQ ID NO: 2392358 - RNA, 19 nt, Homo sapiens
  misc_RNA (1)...(19): siRNA sense strand
ugggagaacaagcugcaaa

SEQ ID NO: 2392359 - RNA, 19 nt, Homo sapiens
  misc_RNA (1)...(19): siRNA sense strand
cuacgaagaaaugcagaaa

SEQ ID NO: 2392360 - RNA, 19 nt, Homo sapiens
  misc_RNA (1)...(19): siRNA sense strand
cugcagaaggcgcuggaga

SEQ ID NO: 2392361 - RNA, 19 nt, Homo sapiens
  misc_RNA (1)...(19): siRNA sense strand
acaaggaagaggagauuuu

SEQ ID NO: 2392362 - RNA, 19 nt, Homo sapiens
  misc_RNA (1)...(19): siRNA sense strand
agagcuggugggagaacaa

SEQ ID NO: 2392363 - RNA, 19 nt, Homo sapiens
  misc_RNA (1)...(19): siRNA sense strand
agaaggagcuuguucgacu

SEQ ID NO: 2392364 - RNA, 19 nt, Homo sapiens
  misc_RNA (1)...(19): siRNA sense strand
ucaucuugucagugaauau

SEQ ID NO: 2392365 - RNA, 19 nt, Homo sapiens
  misc_RNA (1)...(19): siRNA sense strand
gggucaagugggaaaacua

SEQ ID NO: 2392366 - RNA, 19 nt, Homo sapiens
  misc_RNA (1)...(19): siRNA sense strand
caaaggaguaacuggcuca

SEQ ID NO: 2392367 - RNA, 19 nt, Homo sapiens
  misc_RNA (1)...(19): siRNA sense strand
auaauugggucguacaaaa

SEQ ID NO: 2392368 - RNA, 19 nt, Homo sapiens
  misc_RNA (1)...(19): siRNA sense strand
agaugggaauauuguaaca

SEQ ID NO: 2392369 - RNA, 19 nt, Homo sapiens
  misc_RNA (1)...(19): siRNA sense strand
cugccagauagaaaguaaa

SEQ ID NO: 2392370 - RNA, 19 nt, Homo sapiens
  misc_RNA (1)...(19): siRNA sense strand
gggaauauuguaacagucu

SEQ ID NO: 2392371 - RNA, 19 nt, Homo sapiens
  misc_RNA (1)...(19): siRNA sense strand
ccaagcagauugagcugga

SEQ ID NO: 2392372 - RNA, 19 nt, Homo sapiens
  misc_RNA (1)...(19): siRNA sense strand
uggaacaagaagaugcuuu

SEQ ID NO: 2392373 - RNA, 19 nt, Homo sapiens
  misc_RNA (1)...(19): siRNA sense strand
ccagaaauguccuagcugu

SEQ ID NO: 2392374 - RNA, 19 nt, Homo sapiens
  misc_RNA (1)...(19): siRNA sense strand
cuaaggaccuagaggaguc

SEQ ID NO: 2392375 - RNA, 19 nt, Homo sapiens
  misc_RNA (1)...(19): siRNA sense strand
guaaggacgcugaagagca

SEQ ID NO: 2392376 - RNA, 19 nt, Homo sapiens
  misc_RNA (1)...(19): siRNA sense strand
ucuacgaagaaaugcagaa

SEQ ID NO: 2392377 - RNA, 19 nt, Homo sapiens
  misc_RNA (1)...(19): siRNA sense strand
aaugcagaaaggagagaga

SEQ ID NO: 2392378 - RNA, 19 nt, Homo sapiens
  misc_RNA (1)...(19): siRNA sense strand
ggaucugauggcaaaguau

SEQ ID NO: 2392379 - RNA, 19 nt, Homo sapiens
  misc_RNA (1)...(19): siRNA sense strand
cugauauugcuccaagaaa

SEQ ID NO: 2392380 - RNA, 19 nt, Homo sapiens
  misc_RNA (1)...(19): siRNA sense strand
aguacagugaacagggaga

SEQ ID NO: 2392381 - RNA, 19 nt, Homo sapiens
  misc_RNA (1)...(19): siRNA sense strand
gggcaaaguggguguggaa

SEQ ID NO: 2392382 - RNA, 19 nt, Homo sapiens
  misc_RNA (1)...(19): siRNA sense strand
ggaaaagagacuagaggaa

SEQ ID NO: 2392383 - RNA, 19 nt, Homo sapiens
  misc_RNA (1)...(19): siRNA sense strand
agaaugagagagugggaua

SEQ ID NO: 2392384 - RNA, 19 nt, Homo sapiens
  misc_RNA (1)...(19): siRNA sense strand
aggaagaugaggaggaaaa

SEQ ID NO: 2392385 - RNA, 19 nt, Homo sapiens
  misc_RNA (1)...(19): siRNA sense strand
gcucagaugaccagagaga

SEQ ID NO: 2392386 - RNA, 19 nt, Homo sapiens
  misc_RNA (1)...(19): siRNA sense strand
aggaagacgaugaggauga

SEQ ID NO: 2392387 - RNA, 19 nt, Homo sapiens
  misc_RNA (1)...(19): siRNA sense strand
uggaagugaaggaggacaa

SEQ ID NO: 2392388 - RNA, 19 nt, Homo sapiens
  misc_RNA (1)...(19): siRNA sense strand
gggugauccucuuggagaa

SEQ ID NO: 2392389 - RNA, 19 nt, Homo sapiens
  misc_RNA (1)...(19): siRNA sense strand
gugaugaggaagaggauga

SEQ ID NO: 2392390 - RNA, 19 nt, Homo sapiens
  misc_RNA (1)...(19): siRNA sense strand
aggaggaagaggaggaaga

SEQ ID NO: 2392391 - RNA, 19 nt, Homo sapiens
  misc_RNA (1)...(19): siRNA sense strand
aagaggaagcugagaaaga

SEQ ID NO: 2392392 - RNA, 19 nt, Homo sapiens
  misc_RNA (1)...(19): siRNA sense strand
gaggacaagugcugggaga

SEQ ID NO: 2392393 - RNA, 19 nt, Homo sapiens
  misc_RNA (1)...(19): siRNA sense strand
guuuaggcacucagggaua

SEQ ID NO: 2392394 - RNA, 19 nt, Homo sapiens
  misc_RNA (1)...(19): siRNA sense strand
aggcagaagaggaggagga

SEQ ID NO: 2392395 - RNA, 19 nt, Homo sapiens
  misc_RNA (1)...(19): siRNA sense strand
aggaugaagaugaggccua

SEQ ID NO: 2392396 - RNA, 19 nt, Homo sapiens
  misc_RNA (1)...(19): siRNA sense strand
ugggagagauggaggcuga

SEQ ID NO: 2392397 - RNA, 19 nt, Homo sapiens
  misc_RNA (1)...(19): siRNA sense strand
ccguaguggcuauggagaa

SEQ ID NO: 2392398 - RNA, 19 nt, Homo sapiens
  misc_RNA (1)...(19): siRNA sense strand
aggaagccacugaggauaa

SEQ ID NO: 2392399 - RNA, 19 nt, Homo sapiens
  misc_RNA (1)...(19): siRNA sense strand
ggguguggaagaaggcaaa

SEQ ID NO: 2392400 - RNA, 19 nt, Homo sapiens
  misc_RNA (1)...(19): siRNA sense strand
uggaaauggccgagagucu

SEQ ID NO: 2392401 - RNA, 19 nt, Homo sapiens
  misc_RNA (1)...(19): siRNA sense strand
ccucgaugcauaaggacua

SEQ ID NO: 2392402 - RNA, 19 nt, Homo sapiens
  misc_RNA (1)...(19): siRNA sense strand
cuucuuuggugaugaggaa

SEQ ID NO: 2392403 - RNA, 19 nt, Homo sapiens
  misc_RNA (1)...(19): siRNA sense strand
ugaccaaccaggugggaga

SEQ ID NO: 2392404 - RNA, 19 nt, Homo sapiens
  misc_RNA (1)...(19): siRNA sense strand
cugaagaacucauucgaca

SEQ ID NO: 2392405 - RNA, 19 nt, Homo sapiens
  misc_RNA (1)...(19): siRNA sense strand
caguagagaccuugcugaa

SEQ ID NO: 2392406 - RNA, 19 nt, Homo sapiens
  misc_RNA (1)...(19): siRNA sense strand
gggagaagguggagguguc

SEQ ID NO: 2392407 - RNA, 19 nt, Homo sapiens
  misc_RNA (1)...(19): siRNA sense strand
gggacauagcagaggacca

SEQ ID NO: 2392408 - RNA, 19 nt, Homo sapiens
  misc_RNA (1)...(19): siRNA sense strand
acccaagagcugagagaca

SEQ ID NO: 2392409 - RNA, 19 nt, Homo sapiens
  misc_RNA (1)...(19): siRNA sense strand
aaaagagacuagaggaaga

SEQ ID NO: 2392410 - RNA, 19 nt, Homo sapiens
  misc_RNA (1)...(19): siRNA sense strand
ucucaaagcccauggggaa

SEQ ID NO: 2392411 - RNA, 19 nt, Homo sapiens
  misc_RNA (1)...(19): siRNA sense strand
aggaagaggaggaagagga

SEQ ID NO: 2392412 - RNA, 19 nt, Homo sapiens
  misc_RNA (1)...(19): siRNA sense strand
aggaagaggaagcugagaa

SEQ ID NO: 2392413 - RNA, 19 nt, Homo sapiens
  misc_RNA (1)...(19): siRNA sense strand
aaguagaaggguugaugaa

SEQ ID NO: 2392414 - RNA, 19 nt, Homo sapiens
  misc_RNA (1)...(19): siRNA sense strand
ggauaaggcuucagcagcu

SEQ ID NO: 2392415 - RNA, 19 nt, Homo sapiens
  misc_RNA (1)...(19): siRNA sense strand
gagagaagaugguggucgu

SEQ ID NO: 2392416 - RNA, 19 nt, Homo sapiens
  misc_RNA (1)...(19): siRNA sense strand
guguggaagugaaggagga

SEQ ID NO: 2392417 - RNA, 19 nt, Homo sapiens
  misc_RNA (1)...(19): siRNA sense strand
cguaguggcuauggagaau

SEQ ID NO: 2392418 - RNA, 19 nt, Homo sapiens
  misc_RNA (1)...(19): siRNA sense strand
agggauagcaccaagaaca

SEQ ID NO: 2392419 - RNA, 19 nt, Homo sapiens
  misc_RNA (1)...(19): siRNA sense strand
gacuagaggaagaggagga

SEQ ID NO: 2392420 - RNA, 19 nt, Homo sapiens
  misc_RNA (1)...(19): siRNA sense strand
augaaguggcaaugggaga

SEQ ID NO: 2392421 - RNA, 19 nt, Homo sapiens
  misc_RNA (1)...(19): siRNA sense strand
gauuauaacccaagagcug

SEQ ID NO: 2392422 - RNA, 19 nt, Homo sapiens
  misc_RNA (1)...(19): siRNA sense strand
aggaggaggaagaggagga

SEQ ID NO: 2392423 - RNA, 19 nt, Homo sapiens
  misc_RNA (1)...(19): siRNA sense strand
gcgaguuccggcagagcaa

SEQ ID NO: 2392424 - RNA, 19 nt, Homo sapiens
  misc_RNA (1)...(19): siRNA sense strand
gugaaaaggcccuagguga

SEQ ID NO: 2392425 - RNA, 19 nt, Homo sapiens
  misc_RNA (1)...(19): siRNA sense strand
cagaacuacuccuggacuu

SEQ ID NO: 2392426 - RNA, 19 nt, Homo sapiens
  misc_RNA (1)...(19): siRNA sense strand
gaggaagcugagaaagaau

SEQ ID NO: 2392427 - RNA, 19 nt, Homo sapiens
  misc_RNA (1)...(19): siRNA sense strand
cuguaagucuugcuggaau

SEQ ID NO: 2392428 - RNA, 19 nt, Homo sapiens
  misc_RNA (1)...(19): siRNA sense strand
uggaaugaguaccugacaa

SEQ ID NO: 2392429 - RNA, 19 nt, Homo sapiens
  misc_RNA (1)...(19): siRNA sense strand
cagagaaccuggagcugca

SEQ ID NO: 2392430 - RNA, 19 nt, Homo sapiens
  misc_RNA (1)...(19): siRNA sense strand
ccgaguggcagcaggauga

SEQ ID NO: 2392431 - RNA, 19 nt, Homo sapiens
  misc_RNA (1)...(19): siRNA sense strand
aggcauauccugaagaacu

SEQ ID NO: 2392432 - RNA, 19 nt, Homo sapiens
  misc_RNA (1)...(19): siRNA sense strand
agagaaggaugaaggccga

SEQ ID NO: 2392433 - RNA, 19 nt, Homo sapiens
  misc_RNA (1)...(19): siRNA sense strand
agaagcgguuucaggacua

SEQ ID NO: 2392434 - RNA, 19 nt, Homo sapiens
  misc_RNA (1)...(19): siRNA sense strand
ggccagaggcagaagagga

SEQ ID NO: 2392435 - RNA, 19 nt, Homo sapiens
  misc_RNA (1)...(19): siRNA sense strand
gacagaucgcugagagaga

SEQ ID NO: 2392436 - RNA, 19 nt, Homo sapiens
  misc_RNA (1)...(19): siRNA sense strand
agaaguacgcacagcucua

SEQ ID NO: 2392437 - RNA, 19 nt, Homo sapiens
  misc_RNA (1)...(19): siRNA sense strand
cagccaggguggugguguu

SEQ ID NO: 2392438 - RNA, 19 nt, Homo sapiens
  misc_RNA (1)...(19): siRNA sense strand
aggaggaggaagacgauga

SEQ ID NO: 2392439 - RNA, 19 nt, Homo sapiens
  misc_RNA (1)...(19): siRNA sense strand
gcaaaaugcugcaggcucu

SEQ ID NO: 2392440 - RNA, 19 nt, Homo sapiens
  misc_RNA (1)...(19): siRNA sense strand
ggaagaaccuggaugagac

SEQ ID NO: 2392441 - RNA, 19 nt, Homo sapiens
  misc_RNA (1)...(19): siRNA sense strand
uugaugaggagcuggacaa

SEQ ID NO: 2392442 - RNA, 19 nt, Homo sapiens
  misc_RNA (1)...(19): siRNA sense strand
gagaauaugugcagcagac

SEQ ID NO: 2392443 - RNA, 19 nt, Homo sapiens
  misc_RNA (1)...(19): siRNA sense strand
cugagagacacguuguuua

SEQ ID NO: 2392444 - RNA, 19 nt, Homo sapiens
  misc_RNA (1)...(19): siRNA sense strand
cuacacaauucgggcacaa

SEQ ID NO: 2392445 - RNA, 19 nt, Homo sapiens
  misc_RNA (1)...(19): siRNA sense strand
agagcaagcaccuggccaa

SEQ ID NO: 2392446 - RNA, 19 nt, Homo sapiens
  misc_RNA (1)...(19): siRNA sense strand
ucuccuuggugaagcgcua

SEQ ID NO: 2392447 - RNA, 19 nt, Homo sapiens
  misc_RNA (1)...(19): siRNA sense strand
aguacuuagaacagagaga

SEQ ID NO: 2392448 - RNA, 19 nt, Homo sapiens
  misc_RNA (1)...(19): siRNA sense strand
cccuggaacagaagaggaa

SEQ ID NO: 2392449 - RNA, 19 nt, Homo sapiens
  misc_RNA (1)...(19): siRNA sense strand
aggccagggcuacgugaaa

SEQ ID NO: 2392450 - RNA, 19 nt, Homo sapiens
  misc_RNA (1)...(19): siRNA sense strand
agccaaaucacaaagacua

SEQ ID NO: 2392451 - RNA, 19 nt, Homo sapiens
  misc_RNA (1)...(19): siRNA sense strand
aggaugaguuugaugagga

SEQ ID NO: 2392452 - RNA, 19 nt, Homo sapiens
  misc_RNA (1)...(19): siRNA sense strand
uggaagaaggcaaagcaga

SEQ ID NO: 2392453 - RNA, 19 nt, Homo sapiens
  misc_RNA (1)...(19): siRNA sense strand
ugaggaagccacugaggau

SEQ ID NO: 2392454 - RNA, 19 nt, Homo sapiens
  misc_RNA (1)...(19): siRNA sense strand
gaagaaugagagaguggga

SEQ ID NO: 2392455 - RNA, 19 nt, Homo sapiens
  misc_RNA (1)...(19): siRNA sense strand
ucagaugaccagagagauc

SEQ ID NO: 2392456 - RNA, 19 nt, Homo sapiens
  misc_RNA (1)...(19): siRNA sense strand
gaacagaaccuaugccuac

SEQ ID NO: 2392457 - RNA, 19 nt, Homo sapiens
  misc_RNA (1)...(19): siRNA sense strand
gggcagcagcagucggaaa

SEQ ID NO: 2392458 - RNA, 19 nt, Homo sapiens
  misc_RNA (1)...(19): siRNA sense strand
cggaaguacgagugcacaa

SEQ ID NO: 2392459 - RNA, 19 nt, Homo sapiens
  misc_RNA (1)...(19): siRNA sense strand
cggaaguaacggagccuga

SEQ ID NO: 2392460 - RNA, 19 nt, Homo sapiens
  misc_RNA (1)...(19): siRNA sense strand
auguauacuucaaggcaca

SEQ ID NO: 2392461 - RNA, 19 nt, Homo sapiens
  misc_RNA (1)...(19): siRNA sense strand
ucacaauagcccacgucaa

SEQ ID NO: 2392462 - RNA, 19 nt, Homo sapiens
  misc_RNA (1)...(19): siRNA sense strand
gaagggagucagauggaca

SEQ ID NO: 2392463 - RNA, 19 nt, Homo sapiens
  misc_RNA (1)...(19): siRNA sense strand
ccaucagaccagugagugu

SEQ ID NO: 2392464 - RNA, 19 nt, Homo sapiens
  misc_RNA (1)...(19): siRNA sense strand
caucuagccaacagggaga

SEQ ID NO: 2392465 - RNA, 19 nt, Homo sapiens
  misc_RNA (1)...(19): siRNA sense strand
ggauaagccaggagcaggu

SEQ ID NO: 2392466 - RNA, 19 nt, Homo sapiens
  misc_RNA (1)...(19): siRNA sense strand
acaacaugcuggugcaaac

SEQ ID NO: 2392467 - RNA, 19 nt, Homo sapiens
  misc_RNA (1)...(19): siRNA sense strand
cauucagauugcagaucau

SEQ ID NO: 2392468 - RNA, 19 nt, Homo sapiens
  misc_RNA (1)...(19): siRNA sense strand
cagaucaucaguugagaca

SEQ ID NO: 2392469 - RNA, 19 nt, Homo sapiens
  misc_RNA (1)...(19): siRNA sense strand
ggacgcaaauuuauccaga

SEQ ID NO: 2392470 - RNA, 19 nt, Homo sapiens
  misc_RNA (1)...(19): siRNA sense strand
cagagaaacuggaagggaa

SEQ ID NO: 2392471 - RNA, 19 nt, Homo sapiens
  misc_RNA (1)...(19): siRNA sense strand
caguagaaguaaaggacca

SEQ ID NO: 2392472 - RNA, 19 nt, Homo sapiens
  misc_RNA (1)...(19): siRNA sense strand
cugaagaagaagauaggaa

SEQ ID NO: 2392473 - RNA, 19 nt, Homo sapiens
  misc_RNA (1)...(19): siRNA sense strand
gguuauaugaagaggaacu

SEQ ID NO: 2392474 - RNA, 19 nt, Homo sapiens
  misc_RNA (1)...(19): siRNA sense strand
cguuguaucccaaaggaaa

SEQ ID NO: 2392475 - RNA, 19 nt, Homo sapiens
  misc_RNA (1)...(19): siRNA sense strand
agagaaacuggaagggaau

SEQ ID NO: 2392476 - RNA, 19 nt, Homo sapiens
  misc_RNA (1)...(19): siRNA sense strand
cucacaaauucgucagaaa

SEQ ID NO: 2392477 - RNA, 19 nt, Homo sapiens
  misc_RNA (1)...(19): siRNA sense strand
gggaaguuugggaguuaaa

SEQ ID NO: 2392478 - RNA, 19 nt, Homo sapiens
  misc_RNA (1)...(19): siRNA sense strand
caacauacacacuagggaa

SEQ ID NO: 2392479 - RNA, 19 nt, Homo sapiens
  misc_RNA (1)...(19): siRNA sense strand
gguuaaauggguaagcaau

SEQ ID NO: 2392480 - RNA, 19 nt, Homo sapiens
  misc_RNA (1)...(19): siRNA sense strand
aaccagaagaagaugaaua

SEQ ID NO: 2392481 - RNA, 19 nt, Homo sapiens
  misc_RNA (1)...(19): siRNA sense strand
cuucaaagcaucaagacau

SEQ ID NO: 2392482 - RNA, 19 nt, Homo sapiens
  misc_RNA (1)...(19): siRNA sense strand
ggucaaaugaacccaacaa

SEQ ID NO: 2392483 - RNA, 19 nt, Homo sapiens
  misc_RNA (1)...(19): siRNA sense strand
accagaagaagaugaauaa

SEQ ID NO: 2392484 - RNA, 19 nt, Homo sapiens
  misc_RNA (1)...(19): siRNA sense strand
cugguuauaugaagaggaa

SEQ ID NO: 2392485 - RNA, 19 nt, Homo sapiens
  misc_RNA (1)...(19): siRNA sense strand
aggaaacugggaagugaua

SEQ ID NO: 2392486 - RNA, 19 nt, Homo sapiens
  misc_RNA (1)...(19): siRNA sense strand
aggaaagccagaaauuaaa

SEQ ID NO: 2392487 - RNA, 19 nt, Homo sapiens
  misc_RNA (1)...(19): siRNA sense strand
uggcauaugaugucaaaca

SEQ ID NO: 2392488 - RNA, 19 nt, Homo sapiens
  misc_RNA (1)...(19): siRNA sense strand
gaagaagauaggaaagcca

SEQ ID NO: 2392489 - RNA, 19 nt, Homo sapiens
  misc_RNA (1)...(19): siRNA sense strand
gauauaaagagcaguucau

SEQ ID NO: 2392490 - RNA, 19 nt, Homo sapiens
  misc_RNA (1)...(19): siRNA sense strand
ugguuaaauggguaagcaa

SEQ ID NO: 2392491 - RNA, 19 nt, Homo sapiens
  misc_RNA (1)...(19): siRNA sense strand
cagcaaauucuuuaugaca

SEQ ID NO: 2392492 - RNA, 19 nt, Homo sapiens
  misc_RNA (1)...(19): siRNA sense strand
uggcagaggaaguggauuc

SEQ ID NO: 2392493 - RNA, 19 nt, Homo sapiens
  misc_RNA (1)...(19): siRNA sense strand
ggguuaugguggcuauauu

SEQ ID NO: 2392494 - RNA, 19 nt, Homo sapiens
  misc_RNA (1)...(19): siRNA sense strand
gaaucuucucccagaggaa

SEQ ID NO: 2392495 - RNA, 19 nt, Homo sapiens
  misc_RNA (1)...(19): siRNA sense strand
cucaaauucuucagugauu

SEQ ID NO: 2392496 - RNA, 19 nt, Homo sapiens
  misc_RNA (1)...(19): siRNA sense strand
ccagaguaaaagugagcaa

SEQ ID NO: 2392497 - RNA, 19 nt, Homo sapiens
  misc_RNA (1)...(19): siRNA sense strand
aagauaggaaagccagaaa

SEQ ID NO: 2392498 - RNA, 19 nt, Homo sapiens
  misc_RNA (1)...(19): siRNA sense strand
caugaaagaacaauguaca

SEQ ID NO: 2392499 - RNA, 19 nt, Homo sapiens
  misc_RNA (1)...(19): siRNA sense strand
cggacaacccagcaaaaua

SEQ ID NO: 2392500 - RNA, 19 nt, Homo sapiens
  misc_RNA (1)...(19): siRNA sense strand
ccagaggcucgguggauca

SEQ ID NO: 2392501 - RNA, 19 nt, Homo sapiens
  misc_RNA (1)...(19): siRNA sense strand
aguaaaggaccaaauaaca

SEQ ID NO: 2392502 - RNA, 19 nt, Homo sapiens
  misc_RNA (1)...(19): siRNA sense strand
gucaccagauggagaaaga

SEQ ID NO: 2392503 - RNA, 19 nt, Homo sapiens
  misc_RNA (1)...(19): siRNA sense strand
gugauaaagaucuuggcau

SEQ ID NO: 2392504 - RNA, 19 nt, Homo sapiens
  misc_RNA (1)...(19): siRNA sense strand
gaagaagaagauaggaaag

SEQ ID NO: 2392505 - RNA, 19 nt, Homo sapiens
  misc_RNA (1)...(19): siRNA sense strand
agauuugauggcagaggaa

SEQ ID NO: 2392506 - RNA, 19 nt, Homo sapiens
  misc_RNA (1)...(19): siRNA sense strand
ugaaagauaccuugggaug

SEQ ID NO: 2392507 - RNA, 19 nt, Homo sapiens
  misc_RNA (1)...(19): siRNA sense strand
cugaaaauuuugcaggaga

SEQ ID NO: 2392508 - RNA, 19 nt, Homo sapiens
  misc_RNA (1)...(19): siRNA sense strand
ccucuuaaccccagaugaa

SEQ ID NO: 2392509 - RNA, 19 nt, Homo sapiens
  misc_RNA (1)...(19): siRNA sense strand
ccugauauaaagagcaguu

SEQ ID NO: 2392510 - RNA, 19 nt, Homo sapiens
  misc_RNA (1)...(19): siRNA sense strand
ccaggcagccagugugcua

SEQ ID NO: 2392511 - RNA, 19 nt, Homo sapiens
  misc_RNA (1)...(19): siRNA sense strand
cagaauuaaucaagcaccu

SEQ ID NO: 2392512 - RNA, 19 nt, Homo sapiens
  misc_RNA (1)...(19): siRNA sense strand
acguaucugagaagagcaa

SEQ ID NO: 2392513 - RNA, 19 nt, Homo sapiens
  misc_RNA (1)...(19): siRNA sense strand
cacaggaaccagaagaaga

SEQ ID NO: 2392514 - RNA, 19 nt, Homo sapiens
  misc_RNA (1)...(19): siRNA sense strand
gcauaugaugucaaacaga

SEQ ID NO: 2392515 - RNA, 19 nt, Homo sapiens
  misc_RNA (1)...(19): siRNA sense strand
cuggaagggaauugcuauu

SEQ ID NO: 2392516 - RNA, 19 nt, Homo sapiens
  misc_RNA (1)...(19): siRNA sense strand
uugccuuccugaugauaaa

SEQ ID NO: 2392517 - RNA, 19 nt, Homo sapiens
  misc_RNA (1)...(19): siRNA sense strand
cacuaugguuaaaugggua

SEQ ID NO: 2392518 - RNA, 19 nt, Homo sapiens
  misc_RNA (1)...(19): siRNA sense strand
cugagaagagcaaguauca

SEQ ID NO: 2392519 - RNA, 19 nt, Homo sapiens
  misc_RNA (1)...(19): siRNA sense strand
caaucaaggaacugggaag

SEQ ID NO: 2392520 - RNA, 19 nt, Homo sapiens
  misc_RNA (1)...(19): siRNA sense strand
ccuucaaagcaucaagaca

SEQ ID NO: 2392521 - RNA, 19 nt, Homo sapiens
  misc_RNA (1)...(19): siRNA sense strand
gaguaaaagugagcaaauu

SEQ ID NO: 2392522 - RNA, 19 nt, Homo sapiens
  misc_RNA (1)...(19): siRNA sense strand
cugacugguuauaugaaga

SEQ ID NO: 2392523 - RNA, 19 nt, Homo sapiens
  misc_RNA (1)...(19): siRNA sense strand
gcguuguaucccaaaggaa

SEQ ID NO: 2392524 - RNA, 19 nt, Homo sapiens
  misc_RNA (1)...(19): siRNA sense strand
caggaagcuuuguggaaaa

SEQ ID NO: 2392525 - RNA, 19 nt, Homo sapiens
  misc_RNA (1)...(19): siRNA sense strand
ggacaguugcagcgcacaa

SEQ ID NO: 2392526 - RNA, 19 nt, Homo sapiens
  misc_RNA (1)...(19): siRNA sense strand
ggauaagccuccugugcca

SEQ ID NO: 2392527 - RNA, 19 nt, Homo sapiens
  misc_RNA (1)...(19): siRNA sense strand
ggauaagccuccugugcca

SEQ ID NO: 2392528 - RNA, 19 nt, Homo sapiens
  misc_RNA (1)...(19): siRNA sense strand
acaaggaagcagacaaaga

SEQ ID NO: 2392529 - RNA, 19 nt, Homo sapiens
  misc_RNA (1)...(19): siRNA sense strand
acaaggaagcagacaaaga

SEQ ID NO: 2392530 - RNA, 19 nt, Homo sapiens
  misc_RNA (1)...(19): siRNA sense strand
cagcugauagaaugggaua

SEQ ID NO: 2392531 - RNA, 19 nt, Homo sapiens
  misc_RNA (1)...(19): siRNA sense strand
aggaguugaugcuggagaa

SEQ ID NO: 2392532 - RNA, 19 nt, Homo sapiens
  misc_RNA (1)...(19): siRNA sense strand
cagcugauagaaugggaua

SEQ ID NO: 2392533 - RNA, 19 nt, Homo sapiens
  misc_RNA (1)...(19): siRNA sense strand
aggaguugaugcuggagaa

SEQ ID NO: 2392534 - RNA, 19 nt, Homo sapiens
  misc_RNA (1)...(19): siRNA sense strand
aggaaugcuggcagacaaa

SEQ ID NO: 2392535 - RNA, 19 nt, Homo sapiens
  misc_RNA (1)...(19): siRNA sense strand
aggaaugcuggcagacaaa

SEQ ID NO: 2392536 - RNA, 19 nt, Homo sapiens
  misc_RNA (1)...(19): siRNA sense strand
caaacagaggccuuggaaa

SEQ ID NO: 2392537 - RNA, 19 nt, Homo sapiens
  misc_RNA (1)...(19): siRNA sense strand
augaacuagagcugagaaa

SEQ ID NO: 2392538 - RNA, 19 nt, Homo sapiens
  misc_RNA (1)...(19): siRNA sense strand
cugaaggaaugcuggcaga

SEQ ID NO: 2392539 - RNA, 19 nt, Homo sapiens
  misc_RNA (1)...(19): siRNA sense strand
cugaaggaaugcuggcaga

SEQ ID NO: 2392540 - RNA, 19 nt, Homo sapiens
  misc_RNA (1)...(19): siRNA sense strand
aguugaugcuggagaaugu

SEQ ID NO: 2392541 - RNA, 19 nt, Homo sapiens
  misc_RNA (1)...(19): siRNA sense strand
aguugaugcuggagaaugu

SEQ ID NO: 2392542 - RNA, 19 nt, Homo sapiens
  misc_RNA (1)...(19): siRNA sense strand
gcauuaaggucucagagca

SEQ ID NO: 2392543 - RNA, 19 nt, Homo sapiens
  misc_RNA (1)...(19): siRNA sense strand
ugaaagacaaggaagcaga

SEQ ID NO: 2392544 - RNA, 19 nt, Homo sapiens
  misc_RNA (1)...(19): siRNA sense strand
ugaaagacaaggaagcaga

SEQ ID NO: 2392545 - RNA, 19 nt, Homo sapiens
  misc_RNA (1)...(19): siRNA sense strand
gugccaaagcauuauacaa

SEQ ID NO: 2392546 - RNA, 19 nt, Homo sapiens
  misc_RNA (1)...(19): siRNA sense strand
gugccaaagcauuauacaa

SEQ ID NO: 2392547 - RNA, 19 nt, Homo sapiens
  misc_RNA (1)...(19): siRNA sense strand
cagacaaguccucaggcua

SEQ ID NO: 2392548 - RNA, 19 nt, Homo sapiens
  misc_RNA (1)...(19): siRNA sense strand
gcuaaggucuuguugcaca

SEQ ID NO: 2392549 - RNA, 19 nt, Homo sapiens
  misc_RNA (1)...(19): siRNA sense strand
aagacaaggaagcagacaa

SEQ ID NO: 2392550 - RNA, 19 nt, Homo sapiens
  misc_RNA (1)...(19): siRNA sense strand
aagacaaggaagcagacaa

SEQ ID NO: 2392551 - RNA, 19 nt, Homo sapiens
  misc_RNA (1)...(19): siRNA sense strand
ccgcaaugcugugaggaca

SEQ ID NO: 2392552 - RNA, 19 nt, Homo sapiens
  misc_RNA (1)...(19): siRNA sense strand
ccagacaaggauagcaaaa

SEQ ID NO: 2392553 - RNA, 19 nt, Homo sapiens
  misc_RNA (1)...(19): siRNA sense strand
gcgaagacaaguggaugaa

SEQ ID NO: 2392554 - RNA, 19 nt, Homo sapiens
  misc_RNA (1)...(19): siRNA sense strand
gcgaagacaaguggaugaa

SEQ ID NO: 2392555 - RNA, 19 nt, Homo sapiens
  misc_RNA (1)...(19): siRNA sense strand
caugcauaccagcaagaua

SEQ ID NO: 2392556 - RNA, 19 nt, Homo sapiens
  misc_RNA (1)...(19): siRNA sense strand
aggcuaaggucuuguugca

SEQ ID NO: 2392557 - RNA, 19 nt, Homo sapiens
  misc_RNA (1)...(19): siRNA sense strand
acuccgacaccaagaagaa

SEQ ID NO: 2392558 - RNA, 19 nt, Homo sapiens
  misc_RNA (1)...(19): siRNA sense strand
acuugaacuuaaagaagga

SEQ ID NO: 2392559 - RNA, 19 nt, Homo sapiens
  misc_RNA (1)...(19): siRNA sense strand
gcccagaagcuccagggaa

SEQ ID NO: 2392560 - RNA, 19 nt, Homo sapiens
  misc_RNA (1)...(19): siRNA sense strand
agaccugucguuugugaaa

SEQ ID NO: 2392561 - RNA, 19 nt, Homo sapiens
  misc_RNA (1)...(19): siRNA sense strand
cccaggaagcuuuguggaa

SEQ ID NO: 2392562 - RNA, 19 nt, Homo sapiens
  misc_RNA (1)...(19): siRNA sense strand
gcacaaaugcauuaagguc

SEQ ID NO: 2392563 - RNA, 19 nt, Homo sapiens
  misc_RNA (1)...(19): siRNA sense strand
agagcagcacuguggcuaa

SEQ ID NO: 2392564 - RNA, 19 nt, Homo sapiens
  misc_RNA (1)...(19): siRNA sense strand
acaccaagaagaacaccaa

SEQ ID NO: 2392565 - RNA, 19 nt, Homo sapiens
  misc_RNA (1)...(19): siRNA sense strand
ggucacgacugcaguggca

SEQ ID NO: 2392566 - RNA, 19 nt, Homo sapiens
  misc_RNA (1)...(19): siRNA sense strand
caguaucagucgagccagu

SEQ ID NO: 2392567 - RNA, 19 nt, Homo sapiens
  misc_RNA (1)...(19): siRNA sense strand
aagugauaauggagagaaa

SEQ ID NO: 2392568 - RNA, 19 nt, Homo sapiens
  misc_RNA (1)...(19): siRNA sense strand
ggaucaaauagaugaacaa

SEQ ID NO: 2392569 - RNA, 19 nt, Homo sapiens
  misc_RNA (1)...(19): siRNA sense strand
caguaucaucugaggaaua

SEQ ID NO: 2392570 - RNA, 19 nt, Homo sapiens
  misc_RNA (1)...(19): siRNA sense strand
uggcagaggaagaggauga

SEQ ID NO: 2392571 - RNA, 19 nt, Homo sapiens
  misc_RNA (1)...(19): siRNA sense strand
guaacugauuugaggaaaa

SEQ ID NO: 2392572 - RNA, 19 nt, Homo sapiens
  misc_RNA (1)...(19): siRNA sense strand
uguaauaaagugaccgaaa

SEQ ID NO: 2392573 - RNA, 19 nt, Homo sapiens
  misc_RNA (1)...(19): siRNA sense strand
caaugaaaaugaugagcaa

SEQ ID NO: 2392574 - RNA, 19 nt, Homo sapiens
  misc_RNA (1)...(19): siRNA sense strand
uggaauuggaagugauaau

SEQ ID NO: 2392575 - RNA, 19 nt, Homo sapiens
  misc_RNA (1)...(19): siRNA sense strand
cagcaagaacagaagaaca

SEQ ID NO: 2392576 - RNA, 19 nt, Homo sapiens
  misc_RNA (1)...(19): siRNA sense strand
ggcaaaaugucgaagaaau

SEQ ID NO: 2392577 - RNA, 19 nt, Homo sapiens
  misc_RNA (1)...(19): siRNA sense strand
cagauauguuuaaagggua

SEQ ID NO: 2392578 - RNA, 19 nt, Homo sapiens
  misc_RNA (1)...(19): siRNA sense strand
cauaauaggaaguaagacu

SEQ ID NO: 2392579 - RNA, 19 nt, Homo sapiens
  misc_RNA (1)...(19): siRNA sense strand
gaagaaaggaggcggagca

SEQ ID NO: 2392580 - RNA, 19 nt, Homo sapiens
  misc_RNA (1)...(19): siRNA sense strand
ugaagaauuaggagaugaa

SEQ ID NO: 2392581 - RNA, 19 nt, Homo sapiens
  misc_RNA (1)...(19): siRNA sense strand
aggaagaguucaaguggca

SEQ ID NO: 2392582 - RNA, 19 nt, Homo sapiens
  misc_RNA (1)...(19): siRNA sense strand
acgggaagagcgagagcaa

SEQ ID NO: 2392583 - RNA, 19 nt, Homo sapiens
  misc_RNA (1)...(19): siRNA sense strand
agacagugauaaugcuaau

SEQ ID NO: 2392584 - RNA, 19 nt, Homo sapiens
  misc_RNA (1)...(19): siRNA sense strand
gagcaaacagauuagaaaa

SEQ ID NO: 2392585 - RNA, 19 nt, Homo sapiens
  misc_RNA (1)...(19): siRNA sense strand
acauucacuuagagagcua

SEQ ID NO: 2392586 - RNA, 19 nt, Homo sapiens
  misc_RNA (1)...(19): siRNA sense strand
ccaacaaaugggaaaauua

SEQ ID NO: 2392587 - RNA, 19 nt, Homo sapiens
  misc_RNA (1)...(19): siRNA sense strand
ucaaugaggaagaguucaa

SEQ ID NO: 2392588 - RNA, 19 nt, Homo sapiens
  misc_RNA (1)...(19): siRNA sense strand
gauggaacauuuacgggaa

SEQ ID NO: 2392589 - RNA, 19 nt, Homo sapiens
  misc_RNA (1)...(19): siRNA sense strand
uugcagaauggauaagaaa

SEQ ID NO: 2392590 - RNA, 19 nt, Homo sapiens
  misc_RNA (1)...(19): siRNA sense strand
ugagcaagacagugauaau

SEQ ID NO: 2392591 - RNA, 19 nt, Homo sapiens
  misc_RNA (1)...(19): siRNA sense strand
guaucauucuuuaagggaa

SEQ ID NO: 2392592 - RNA, 19 nt, Homo sapiens
  misc_RNA (1)...(19): siRNA sense strand
ccaaacugagcauggcaaa

SEQ ID NO: 2392593 - RNA, 19 nt, Homo sapiens
  misc_RNA (1)...(19): siRNA sense strand
cagaggaagaggaugauga

SEQ ID NO: 2392594 - RNA, 19 nt, Homo sapiens
  misc_RNA (1)...(19): siRNA sense strand
auucaagcauguugcagaa

SEQ ID NO: 2392595 - RNA, 19 nt, Homo sapiens
  misc_RNA (1)...(19): siRNA sense strand
aguuacuggcagaggaaga

SEQ ID NO: 2392596 - RNA, 19 nt, Homo sapiens
  misc_RNA (1)...(19): siRNA sense strand
gaagaguucaaguggcaau

SEQ ID NO: 2392597 - RNA, 19 nt, Homo sapiens
  misc_RNA (1)...(19): siRNA sense strand
guuuaaaggguaaggugca

SEQ ID NO: 2392598 - RNA, 19 nt, Homo sapiens
  misc_RNA (1)...(19): siRNA sense strand
ugagaagaaagauggaaca

SEQ ID NO: 2392599 - RNA, 19 nt, Homo sapiens
  misc_RNA (1)...(19): siRNA sense strand
agaaacaagccaaaacaaa

SEQ ID NO: 2392600 - RNA, 19 nt, Homo sapiens
  misc_RNA (1)...(19): siRNA sense strand
ugaugagaaacaagccaaa

SEQ ID NO: 2392601 - RNA, 19 nt, Homo sapiens
  misc_RNA (1)...(19): siRNA sense strand
cagaaagaccaggagguau

SEQ ID NO: 2392602 - RNA, 19 nt, Homo sapiens
  misc_RNA (1)...(19): siRNA sense strand
ccuuaacauuagccgaaau

SEQ ID NO: 2392603 - RNA, 19 nt, Homo sapiens
  misc_RNA (1)...(19): siRNA sense strand
cgguugugguggaggugga

SEQ ID NO: 2392604 - RNA, 19 nt, Homo sapiens
  misc_RNA (1)...(19): siRNA sense strand
gaugaugauuugaaggaag

SEQ ID NO: 2392605 - RNA, 19 nt, Homo sapiens
  misc_RNA (1)...(19): siRNA sense strand
caaacuguggaaugugaaa

SEQ ID NO: 2392606 - RNA, 19 nt, Homo sapiens
  misc_RNA (1)...(19): siRNA sense strand
aggaucaaauagaugaaca

SEQ ID NO: 2392607 - RNA, 19 nt, Homo sapiens
  misc_RNA (1)...(19): siRNA sense strand
guugcagaauggauaagaa

SEQ ID NO: 2392608 - RNA, 19 nt, Homo sapiens
  misc_RNA (1)...(19): siRNA sense strand
augaaaaugaugagcaaga

SEQ ID NO: 2392609 - RNA, 19 nt, Homo sapiens
  misc_RNA (1)...(19): siRNA sense strand
gcgagagcaaauacgacaa

SEQ ID NO: 2392610 - RNA, 19 nt, Homo sapiens
  misc_RNA (1)...(19): siRNA sense strand
uaacauuagccgaaaucuu

SEQ ID NO: 2392611 - RNA, 19 nt, Homo sapiens
  misc_RNA (1)...(19): siRNA sense strand
aaguaacugauuugaggaa

SEQ ID NO: 2392612 - RNA, 19 nt, Homo sapiens
  misc_RNA (1)...(19): siRNA sense strand
caucauugaguaaacgaau

SEQ ID NO: 2392613 - RNA, 19 nt, Homo sapiens
  misc_RNA (1)...(19): siRNA sense strand
ucucagcagaugaaguuaa

SEQ ID NO: 2392614 - RNA, 19 nt, Homo sapiens
  misc_RNA (1)...(19): siRNA sense strand
gagaagaaagauggaacau

SEQ ID NO: 2392615 - RNA, 19 nt, Homo sapiens
  misc_RNA (1)...(19): siRNA sense strand
aauagagagcagacaucaa

SEQ ID NO: 2392616 - RNA, 19 nt, Homo sapiens
  misc_RNA (1)...(19): siRNA sense strand
acacagaagauguagcagu

SEQ ID NO: 2392617 - RNA, 19 nt, Homo sapiens
  misc_RNA (1)...(19): siRNA sense strand
uagaaaaucagaaggauca

SEQ ID NO: 2392618 - RNA, 19 nt, Homo sapiens
  misc_RNA (1)...(19): siRNA sense strand
gaaggaucaaauagaugaa

SEQ ID NO: 2392619 - RNA, 19 nt, Homo sapiens
  misc_RNA (1)...(19): siRNA sense strand
augaugagcaagacaguga

SEQ ID NO: 2392620 - RNA, 19 nt, Homo sapiens
  misc_RNA (1)...(19): siRNA sense strand
gggaggaggcgguaacagu

SEQ ID NO: 2392621 - RNA, 19 nt, Homo sapiens
  misc_RNA (1)...(19): siRNA sense strand
gcaaaaugucgaagaaaug

SEQ ID NO: 2392622 - RNA, 19 nt, Homo sapiens
  misc_RNA (1)...(19): siRNA sense strand
agaugaauuaggagaccuu

SEQ ID NO: 2392623 - RNA, 19 nt, Homo sapiens
  misc_RNA (1)...(19): siRNA sense strand
cagaaaucguuuuacagaa

SEQ ID NO: 2392624 - RNA, 19 nt, Homo sapiens
  misc_RNA (1)...(19): siRNA sense strand
ucaaauagagagcagacau

SEQ ID NO: 2392625 - RNA, 19 nt, Homo sapiens
  misc_RNA (1)...(19): siRNA sense strand
ccuuaugagugcagagaau

SEQ ID NO: 2392626 - RNA, 19 nt, Homo sapiens
  misc_RNA (1)...(19): siRNA sense strand
gugcaguguaugugggaaa

SEQ ID NO: 2392627 - RNA, 19 nt, Homo sapiens
  misc_RNA (1)...(19): siRNA sense strand
guguagugaaugugggaaa

SEQ ID NO: 2392628 - RNA, 19 nt, Homo sapiens
  misc_RNA (1)...(19): siRNA sense strand
ccuuaugaguguagugaau

SEQ ID NO: 2392629 - RNA, 19 nt, Homo sapiens
  misc_RNA (1)...(19): siRNA sense strand
gugcgaugaaugugggaaa

SEQ ID NO: 2392630 - RNA, 19 nt, Homo sapiens
  misc_RNA (1)...(19): siRNA sense strand
auguagugaaugugggaaa

SEQ ID NO: 2392631 - RNA, 19 nt, Homo sapiens
  misc_RNA (1)...(19): siRNA sense strand
cugcagugaauguggcaaa

SEQ ID NO: 2392632 - RNA, 19 nt, Homo sapiens
  misc_RNA (1)...(19): siRNA sense strand
ccuuaugugugcagugaau

SEQ ID NO: 2392633 - RNA, 19 nt, Homo sapiens
  misc_RNA (1)...(19): siRNA sense strand
gcacuaaccucuaucguca

SEQ ID NO: 2392634 - RNA, 19 nt, Homo sapiens
  misc_RNA (1)...(19): siRNA sense strand
gugcagugaauguggaaaa

SEQ ID NO: 2392635 - RNA, 19 nt, Homo sapiens
  misc_RNA (1)...(19): siRNA sense strand
gcacuaaccucuuucgaca

SEQ ID NO: 2392636 - RNA, 19 nt, Homo sapiens
  misc_RNA (1)...(19): siRNA sense strand
aggaaaucuuuuagagaga

SEQ ID NO: 2392637 - RNA, 19 nt, Homo sapiens
  misc_RNA (1)...(19): siRNA sense strand
gggcaggacuccaaaggca

SEQ ID NO: 2392638 - RNA, 19 nt, Homo sapiens
  misc_RNA (1)...(19): siRNA sense strand
ggauuagacacuugagagu

SEQ ID NO: 2392639 - RNA, 19 nt, Homo sapiens
  misc_RNA (1)...(19): siRNA sense strand
gcuugauaauggagagaag

SEQ ID NO: 2392640 - RNA, 19 nt, Homo sapiens
  misc_RNA (1)...(19): siRNA sense strand
augugaugcuggagaacuu

SEQ ID NO: 2392641 - RNA, 19 nt, Homo sapiens
  misc_RNA (1)...(19): siRNA sense strand
augcagugaauguggaaaa

SEQ ID NO: 2392642 - RNA, 19 nt, Homo sapiens
  misc_RNA (1)...(19): siRNA sense strand
gggaaaucuuuuagccaca

SEQ ID NO: 2392643 - RNA, 19 nt, Homo sapiens
  misc_RNA (1)...(19): siRNA sense strand
ugggaaauccuuuagucaa

SEQ ID NO: 2392644 - RNA, 19 nt, Homo sapiens
  misc_RNA (1)...(19): siRNA sense strand
cuuaagacacagaagaguu

SEQ ID NO: 2392645 - RNA, 19 nt, Homo sapiens
  misc_RNA (1)...(19): siRNA sense strand
agugaaugugggaaaguuu

SEQ ID NO: 2392646 - RNA, 19 nt, Homo sapiens
  misc_RNA (1)...(19): siRNA sense strand
gcuccagaagcuugauaau

SEQ ID NO: 2392647 - RNA, 19 nt, Homo sapiens
  misc_RNA (1)...(19): siRNA sense strand
agaacaaggacucaugaau

SEQ ID NO: 2392648 - RNA, 19 nt, Homo sapiens
  misc_RNA (1)...(19): siRNA sense strand
ccuuugaggauguggccau

SEQ ID NO: 2392649 - RNA, 19 nt, Homo sapiens
  misc_RNA (1)...(19): siRNA sense strand
gagugcagugaaugugaaa

SEQ ID NO: 2392650 - RNA, 19 nt, Homo sapiens
  misc_RNA (1)...(19): siRNA sense strand
gagaguucacacuggagua

SEQ ID NO: 2392651 - RNA, 19 nt, Homo sapiens
  misc_RNA (1)...(19): siRNA sense strand
acacuaaaacaaagccuua

SEQ ID NO: 2392652 - RNA, 19 nt, Homo sapiens
  misc_RNA (1)...(19): siRNA sense strand
cagaagaguucaugugcag

SEQ ID NO: 2392653 - RNA, 19 nt, Homo sapiens
  misc_RNA (1)...(19): siRNA sense strand
ugggaaauccuauagccaa

SEQ ID NO: 2392654 - RNA, 19 nt, Homo sapiens
  misc_RNA (1)...(19): siRNA sense strand
gggaaagccuucagccaca

SEQ ID NO: 2392655 - RNA, 19 nt, Homo sapiens
  misc_RNA (1)...(19): siRNA sense strand
guguaacgagugcgggaaa

SEQ ID NO: 2392656 - RNA, 19 nt, Homo sapiens
  misc_RNA (1)...(19): siRNA sense strand
guguaacgaguguggcaaa

SEQ ID NO: 2392657 - RNA, 19 nt, Homo sapiens
  misc_RNA (1)...(19): siRNA sense strand
gugcaacgaguguggaaaa

SEQ ID NO: 2392658 - RNA, 19 nt, Homo sapiens
  misc_RNA (1)...(19): siRNA sense strand
ggacaaaggcuugcggcga

SEQ ID NO: 2392659 - RNA, 19 nt, Homo sapiens
  misc_RNA (1)...(19): siRNA sense strand
aggggagacucguaagaaa

SEQ ID NO: 2392660 - RNA, 19 nt, Homo sapiens
  misc_RNA (1)...(19): siRNA sense strand
augcacugugugugggaaa

SEQ ID NO: 2392661 - RNA, 19 nt, Homo sapiens
  misc_RNA (1)...(19): siRNA sense strand
ccuuaugaguguaacgagu

SEQ ID NO: 2392662 - RNA, 19 nt, Homo sapiens
  misc_RNA (1)...(19): siRNA sense strand
augcagcgaaugcgggaaa

SEQ ID NO: 2392663 - RNA, 19 nt, Homo sapiens
  misc_RNA (1)...(19): siRNA sense strand
ggggagacucguaagaaau

SEQ ID NO: 2392664 - RNA, 19 nt, Homo sapiens
  misc_RNA (1)...(19): siRNA sense strand
augucaucagugugggaaa

SEQ ID NO: 2392665 - RNA, 19 nt, Homo sapiens
  misc_RNA (1)...(19): siRNA sense strand
gaguguaacgagugcggga

SEQ ID NO: 2392666 - RNA, 19 nt, Homo sapiens
  misc_RNA (1)...(19): siRNA sense strand
cugccgcgagugugggaaa

SEQ ID NO: 2392667 - RNA, 19 nt, Homo sapiens
  misc_RNA (1)...(19): siRNA sense strand
cagaagacaaagagggaua

SEQ ID NO: 2392668 - RNA, 19 nt, Homo sapiens
  misc_RNA (1)...(19): siRNA sense strand
cagaaaaccaagagagaaa

SEQ ID NO: 2392669 - RNA, 19 nt, Homo sapiens
  misc_RNA (1)...(19): siRNA sense strand
aggaaaagaacgugggaaa

SEQ ID NO: 2392670 - RNA, 19 nt, Homo sapiens
  misc_RNA (1)...(19): siRNA sense strand
cauugaugcuucagagaaa

SEQ ID NO: 2392671 - RNA, 19 nt, Homo sapiens
  misc_RNA (1)...(19): siRNA sense strand
ccaagaauacacugagaaa

SEQ ID NO: 2392672 - RNA, 19 nt, Homo sapiens
  misc_RNA (1)...(19): siRNA sense strand
acacugagaaagaggguaa

SEQ ID NO: 2392673 - RNA, 19 nt, Homo sapiens
  misc_RNA (1)...(19): siRNA sense strand
gcaaauuggcucaggaaca

SEQ ID NO: 2392674 - RNA, 19 nt, Homo sapiens
  misc_RNA (1)...(19): siRNA sense strand
caagaaggaaagaggcaaa

SEQ ID NO: 2392675 - RNA, 19 nt, Homo sapiens
  misc_RNA (1)...(19): siRNA sense strand
gcaagauggaccagacaaa

SEQ ID NO: 2392676 - RNA, 19 nt, Homo sapiens
  misc_RNA (1)...(19): siRNA sense strand
ugaaagaggaaaaggaaaa

SEQ ID NO: 2392677 - RNA, 19 nt, Homo sapiens
  misc_RNA (1)...(19): siRNA sense strand
agacaaagauccaucgcua

SEQ ID NO: 2392678 - RNA, 19 nt, Homo sapiens
  misc_RNA (1)...(19): siRNA sense strand
gcuaggagaaagagaagaa

SEQ ID NO: 2392679 - RNA, 19 nt, Homo sapiens
  misc_RNA (1)...(19): siRNA sense strand
aagaauacacugagaaaga

SEQ ID NO: 2392680 - RNA, 19 nt, Homo sapiens
  misc_RNA (1)...(19): siRNA sense strand
ggaaaugaaaguugggcuu

SEQ ID NO: 2392681 - RNA, 19 nt, Homo sapiens
  misc_RNA (1)...(19): siRNA sense strand
acaaggaagauuauggaaa

SEQ ID NO: 2392682 - RNA, 19 nt, Homo sapiens
  misc_RNA (1)...(19): siRNA sense strand
ggugaaugguuugaagaaa

SEQ ID NO: 2392683 - RNA, 19 nt, Homo sapiens
  misc_RNA (1)...(19): siRNA sense strand
cagcagaguccaaagagaa

SEQ ID NO: 2392684 - RNA, 19 nt, Homo sapiens
  misc_RNA (1)...(19): siRNA sense strand
ucagaaaacaagaaggaaa

SEQ ID NO: 2392685 - RNA, 19 nt, Homo sapiens
  misc_RNA (1)...(19): siRNA sense strand
ugggaaagaacaacaguua

SEQ ID NO: 2392686 - RNA, 19 nt, Homo sapiens
  misc_RNA (1)...(19): siRNA sense strand
aaagaagucaggaggcaaa

SEQ ID NO: 2392687 - RNA, 19 nt, Homo sapiens
  misc_RNA (1)...(19): siRNA sense strand
uggaagagaaggaagaaaa

SEQ ID NO: 2392688 - RNA, 19 nt, Homo sapiens
  misc_RNA (1)...(19): siRNA sense strand
agaagaagacaaacagcua

SEQ ID NO: 2392689 - RNA, 19 nt, Homo sapiens
  misc_RNA (1)...(19): siRNA sense strand
cuucaacaguauacacaaa

SEQ ID NO: 2392690 - RNA, 19 nt, Homo sapiens
  misc_RNA (1)...(19): siRNA sense strand
ucagauuccucuagagaca

SEQ ID NO: 2392691 - RNA, 19 nt, Homo sapiens
  misc_RNA (1)...(19): siRNA sense strand
ggaaaagaacgugggaaaa

SEQ ID NO: 2392692 - RNA, 19 nt, Homo sapiens
  misc_RNA (1)...(19): siRNA sense strand
gucugaaccaagagaauua

SEQ ID NO: 2392693 - RNA, 19 nt, Homo sapiens
  misc_RNA (1)...(19): siRNA sense strand
cuaugggaucuuugggaaa

SEQ ID NO: 2392694 - RNA, 19 nt, Homo sapiens
  misc_RNA (1)...(19): siRNA sense strand
cuaaguaaggagauggcaa

SEQ ID NO: 2392695 - RNA, 19 nt, Homo sapiens
  misc_RNA (1)...(19): siRNA sense strand
cuucacugcuggagaauga

SEQ ID NO: 2392696 - RNA, 19 nt, Homo sapiens
  misc_RNA (1)...(19): siRNA sense strand
cagcaauaccuuuggacga

SEQ ID NO: 2392697 - RNA, 19 nt, Homo sapiens
  misc_RNA (1)...(19): siRNA sense strand
uggaaaggaaugaggaguu

SEQ ID NO: 2392698 - RNA, 19 nt, Homo sapiens
  misc_RNA (1)...(19): siRNA sense strand
gcgaaagcagguugaguga

SEQ ID NO: 2392699 - RNA, 19 nt, Homo sapiens
  misc_RNA (1)...(19): siRNA sense strand
uaaguaaggagauggcaaa

SEQ ID NO: 2392700 - RNA, 19 nt, Homo sapiens
  misc_RNA (1)...(19): siRNA sense strand
gaagcaaaucaaagcaauu

SEQ ID NO: 2392701 - RNA, 19 nt, Homo sapiens
  misc_RNA (1)...(19): siRNA sense strand
cauggaugcuucugagcua

SEQ ID NO: 2392702 - RNA, 19 nt, Homo sapiens
  misc_RNA (1)...(19): siRNA sense strand
ccauuuaucucuuggcaca

SEQ ID NO: 2392703 - RNA, 19 nt, Homo sapiens
  misc_RNA (1)...(19): siRNA sense strand
gcuuaauaucuaugaggau

SEQ ID NO: 2392704 - RNA, 19 nt, Homo sapiens
  misc_RNA (1)...(19): siRNA sense strand
cagaaaauucccagcuaaa

SEQ ID NO: 2392705 - RNA, 19 nt, Homo sapiens
  misc_RNA (1)...(19): siRNA sense strand
agaucuuucuucagcaaua

SEQ ID NO: 2392706 - RNA, 19 nt, Homo sapiens
  misc_RNA (1)...(19): siRNA sense strand
acagaggagauuuggacaa

SEQ ID NO: 2392707 - RNA, 19 nt, Homo sapiens
  misc_RNA (1)...(19): siRNA sense strand
gggccaagagaaaggacau

SEQ ID NO: 2392708 - RNA, 19 nt, Homo sapiens
  misc_RNA (1)...(19): siRNA sense strand
gagcuaacaccaagggcuu

SEQ ID NO: 2392709 - RNA, 19 nt, Homo sapiens
  misc_RNA (1)...(19): siRNA sense strand
ccucaaguggagacugaaa

SEQ ID NO: 2392710 - RNA, 19 nt, Homo sapiens
  misc_RNA (1)...(19): siRNA sense strand
ggucacagaaguaaauaau

SEQ ID NO: 2392711 - RNA, 19 nt, Homo sapiens
  misc_RNA (1)...(19): siRNA sense strand
gggagaaccaggaagaguu

SEQ ID NO: 2392712 - RNA, 19 nt, Homo sapiens
  misc_RNA (1)...(19): siRNA sense strand
cauaaaguuaagacgacua

SEQ ID NO: 2392713 - RNA, 19 nt, Homo sapiens
  misc_RNA (1)...(19): siRNA sense strand
agggagugguagagccauu

SEQ ID NO: 2392714 - RNA, 19 nt, Homo sapiens
  misc_RNA (1)...(19): siRNA sense strand
gcaacaaaggagugcuuca

SEQ ID NO: 2392715 - RNA, 19 nt, Homo sapiens
  misc_RNA (1)...(19): siRNA sense strand
caaccacagaugaugaaua

SEQ ID NO: 2392716 - RNA, 19 nt, Homo sapiens
  misc_RNA (1)...(19): siRNA sense strand
ggagaauaagagauaugaa

SEQ ID NO: 2392717 - RNA, 19 nt, Homo sapiens
  misc_RNA (1)...(19): siRNA sense strand
ccaaaagacaacaccaaaa

SEQ ID NO: 2392718 - RNA, 19 nt, Homo sapiens
  misc_RNA (1)...(19): siRNA sense strand
cugaagaugaaaugcagaa

SEQ ID NO: 2392719 - RNA, 19 nt, Homo sapiens
  misc_RNA (1)...(19): siRNA sense strand
ggguacagucgaagauuca

SEQ ID NO: 2392720 - RNA, 19 nt, Homo sapiens
  misc_RNA (1)...(19): siRNA sense strand
gaaaggaugugauggccau

SEQ ID NO: 2392721 - RNA, 19 nt, Homo sapiens
  misc_RNA (1)...(19): siRNA sense strand
uagaugacuuggauagcaa

SEQ ID NO: 2392722 - RNA, 19 nt, Homo sapiens
  misc_RNA (1)...(19): siRNA sense strand
caugguaauaucacagaaa

SEQ ID NO: 2392723 - RNA, 19 nt, Homo sapiens
  misc_RNA (1)...(19): siRNA sense strand
ggaagaaccaaaagaauca

SEQ ID NO: 2392724 - RNA, 19 nt, Homo sapiens
  misc_RNA (1)...(19): siRNA sense strand
uaggaaugaaagaggaaaa

SEQ ID NO: 2392725 - RNA, 19 nt, Homo sapiens
  misc_RNA (1)...(19): siRNA sense strand
ggugaugaagauaauguaa

SEQ ID NO: 2392726 - RNA, 19 nt, Homo sapiens
  misc_RNA (1)...(19): siRNA sense strand
cauccaaugagaagccaua

SEQ ID NO: 2392727 - RNA, 19 nt, Homo sapiens
  misc_RNA (1)...(19): siRNA sense strand
gcaaauaguguaucagcca

SEQ ID NO: 2392728 - RNA, 19 nt, Homo sapiens
  misc_RNA (1)...(19): siRNA sense strand
ccacagucacuuugcagaa

SEQ ID NO: 2392729 - RNA, 19 nt, Homo sapiens
  misc_RNA (1)...(19): siRNA sense strand
agacaaacaaggcagguga

SEQ ID NO: 2392730 - RNA, 19 nt, Homo sapiens
  misc_RNA (1)...(19): siRNA sense strand
cugaagccacagagagaau

SEQ ID NO: 2392731 - RNA, 19 nt, Homo sapiens
  misc_RNA (1)...(19): siRNA sense strand
ccgaggaaacccagcaaaa

SEQ ID NO: 2392732 - RNA, 19 nt, Homo sapiens
  misc_RNA (1)...(19): siRNA sense strand
gcauuaauguucauggcga

SEQ ID NO: 2392733 - RNA, 19 nt, Homo sapiens
  misc_RNA (1)...(19): siRNA sense strand
ucagauggcuucagggagu

SEQ ID NO: 2392734 - RNA, 19 nt, Homo sapiens
  misc_RNA (1)...(19): siRNA sense strand
agauaugaaucguaccauu

SEQ ID NO: 2392735 - RNA, 19 nt, Homo sapiens
  misc_RNA (1)...(19): siRNA sense strand
aagacaaacagcuaagcaa

SEQ ID NO: 2392736 - RNA, 19 nt, Homo sapiens
  misc_RNA (1)...(19): siRNA sense strand
aggaaguccaagagagaaa

SEQ ID NO: 2392737 - RNA, 19 nt, Homo sapiens
  misc_RNA (1)...(19): siRNA sense strand
ccaaaagucaggaggaaaa

SEQ ID NO: 2392738 - RNA, 19 nt, Homo sapiens
  misc_RNA (1)...(19): siRNA sense strand
cagcaaaacuggagaacca

SEQ ID NO: 2392739 - RNA, 19 nt, Homo sapiens
  misc_RNA (1)...(19): siRNA sense strand
gugcugaaugggagauaaa

SEQ ID NO: 2392740 - RNA, 19 nt, Homo sapiens
  misc_RNA (1)...(19): siRNA sense strand
ccuacaccauggagggaua

SEQ ID NO: 2392741 - RNA, 19 nt, Homo sapiens
  misc_RNA (1)...(19): siRNA sense strand
augaaguaucccuggaaua

SEQ ID NO: 2392742 - RNA, 19 nt, Homo sapiens
  misc_RNA (1)...(19): siRNA sense strand
cguucagucaacagagaaa

SEQ ID NO: 2392743 - RNA, 19 nt, Homo sapiens
  misc_RNA (1)...(19): siRNA sense strand
ucaugaaccacuuggcaaa

SEQ ID NO: 2392744 - RNA, 19 nt, Homo sapiens
  misc_RNA (1)...(19): siRNA sense strand
agaaacaggaacaaaggaa

SEQ ID NO: 2392745 - RNA, 19 nt, Homo sapiens
  misc_RNA (1)...(19): siRNA sense strand
cggaagaagagcagugacu

SEQ ID NO: 2392746 - RNA, 19 nt, Homo sapiens
  misc_RNA (1)...(19): siRNA sense strand
acaaagacagccagaguga

SEQ ID NO: 2392747 - RNA, 19 nt, Homo sapiens
  misc_RNA (1)...(19): siRNA sense strand
aaacaggaacaaaggaaca

SEQ ID NO: 2392748 - RNA, 19 nt, Homo sapiens
  misc_RNA (1)...(19): siRNA sense strand
agaaagaaucucagcuuca

SEQ ID NO: 2392749 - RNA, 19 nt, Homo sapiens
  misc_RNA (1)...(19): siRNA sense strand
acaaagagacagaaaagua

SEQ ID NO: 2392750 - RNA, 19 nt, Homo sapiens
  misc_RNA (1)...(19): siRNA sense strand
cuaacaaccacaagcagaa

SEQ ID NO: 2392751 - RNA, 19 nt, Homo sapiens
  misc_RNA (1)...(19): siRNA sense strand
caucaaauccaaacagcau

SEQ ID NO: 2392752 - RNA, 19 nt, Homo sapiens
  misc_RNA (1)...(19): siRNA sense strand
gcugaaugggagauaaaga

SEQ ID NO: 2392753 - RNA, 19 nt, Homo sapiens
  misc_RNA (1)...(19): siRNA sense strand
auacagaacacaagaaauc

SEQ ID NO: 2392754 - RNA, 19 nt, Homo sapiens
  misc_RNA (1)...(19): siRNA sense strand
cagccagagugaagggacu

SEQ ID NO: 2392755 - RNA, 19 nt, Homo sapiens
  misc_RNA (1)...(19): siRNA sense strand
uggacaagaccaacaaauu

SEQ ID NO: 2392756 - RNA, 19 nt, Homo sapiens
  misc_RNA (1)...(19): siRNA sense strand
augcagaaacagaugauga

SEQ ID NO: 2392757 - RNA, 19 nt, Homo sapiens
  misc_RNA (1)...(19): siRNA sense strand
ggccagaagaagcgguaca

SEQ ID NO: 2392758 - RNA, 19 nt, Homo sapiens
  misc_RNA (1)...(19): siRNA sense strand
ccuuggagaaguuucgaaa

SEQ ID NO: 2392759 - RNA, 19 nt, Homo sapiens
  misc_RNA (1)...(19): siRNA sense strand
acgaacuggccaaggauuu

SEQ ID NO: 2392760 - RNA, 19 nt, Homo sapiens
  misc_RNA (1)...(19): siRNA sense strand
gcuaacaaccacaagcaga

SEQ ID NO: 2392761 - RNA, 19 nt, Homo sapiens
  misc_RNA (1)...(19): siRNA sense strand
gauacggaugauugagaau

SEQ ID NO: 2392762 - RNA, 19 nt, Homo sapiens
  misc_RNA (1)...(19): siRNA sense strand
acgaagcagagcuggacaa

SEQ ID NO: 2392763 - RNA, 19 nt, Homo sapiens
  misc_RNA (1)...(19): siRNA sense strand
aagaaugcuuccaggacca

SEQ ID NO: 2392764 - RNA, 19 nt, Homo sapiens
  misc_RNA (1)...(19): siRNA sense strand
cagaaacagaugaugagau

SEQ ID NO: 2392765 - RNA, 19 nt, Homo sapiens
  misc_RNA (1)...(19): siRNA sense strand
ucaucggcucccagagaaa

SEQ ID NO: 2392766 - RNA, 19 nt, Homo sapiens
  misc_RNA (1)...(19): siRNA sense strand
cagaugaugagauguguau

SEQ ID NO: 2392767 - RNA, 19 nt, Homo sapiens
  misc_RNA (1)...(19): siRNA sense strand
uaugacaaagagacagaaa

SEQ ID NO: 2392768 - RNA, 19 nt, Homo sapiens
  misc_RNA (1)...(19): siRNA sense strand
cauacagaacacaagaaau

SEQ ID NO: 2392769 - RNA, 19 nt, Homo sapiens
  misc_RNA (1)...(19): siRNA sense strand
gaccaaaagucaggaggaa

SEQ ID NO: 2392770 - RNA, 19 nt, Homo sapiens
  misc_RNA (1)...(19): siRNA sense strand
agcaagggcuguaucgaau

SEQ ID NO: 2392771 - RNA, 19 nt, Homo sapiens
  misc_RNA (1)...(19): siRNA sense strand
cugagaauuacguggaguu

SEQ ID NO: 2392772 - RNA, 19 nt, Homo sapiens
  misc_RNA (1)...(19): siRNA sense strand
gagagaaagauguuugagu

SEQ ID NO: 2392773 - RNA, 19 nt, Homo sapiens
  misc_RNA (1)...(19): siRNA sense strand
ugaacaugacucagaacuu

SEQ ID NO: 2392774 - RNA, 19 nt, Homo sapiens
  misc_RNA (1)...(19): siRNA sense strand
uguggaaaccagagggauc

SEQ ID NO: 2392775 - RNA, 19 nt, Homo sapiens
  misc_RNA (1)...(19): siRNA sense strand
agaaaaccacgaaaagaua

SEQ ID NO: 2392776 - RNA, 19 nt, Homo sapiens
  misc_RNA (1)...(19): siRNA sense strand
ccugcaaagcugaacauga

SEQ ID NO: 2392777 - RNA, 19 nt, Homo sapiens
  misc_RNA (1)...(19): siRNA sense strand
aauaugacaaagagacaga

SEQ ID NO: 2392778 - RNA, 19 nt, Homo sapiens
  misc_RNA (1)...(19): siRNA sense strand
cagagggaucaacgagcaa

SEQ ID NO: 2392779 - RNA, 19 nt, Homo sapiens
  misc_RNA (1)...(19): siRNA sense strand
acagaaaaguauuguggca

SEQ ID NO: 2392780 - RNA, 19 nt, Homo sapiens
  misc_RNA (1)...(19): siRNA sense strand
cuuucuaucaccaugguua

SEQ ID NO: 2392781 - RNA, 19 nt, Homo sapiens
  misc_RNA (1)...(19): siRNA sense strand
acagagaaacaggaacaaa

SEQ ID NO: 2392782 - RNA, 19 nt, Homo sapiens
  misc_RNA (1)...(19): siRNA sense strand
ucauaagcgcgcucaagaa

SEQ ID NO: 2392783 - RNA, 19 nt, Homo sapiens
  misc_RNA (1)...(19): siRNA sense strand
gcagcauuucuaugaagua

SEQ ID NO: 2392784 - RNA, 19 nt, Homo sapiens
  misc_RNA (1)...(19): siRNA sense strand
gcuucagcauaaucaggaa

SEQ ID NO: 2392785 - RNA, 19 nt, Homo sapiens
  misc_RNA (1)...(19): siRNA sense strand
accucuacgugcaggagaa

SEQ ID NO: 2392786 - RNA, 19 nt, Homo sapiens
  misc_RNA (1)...(19): siRNA sense strand
cagagaaacaggaacaaag

SEQ ID NO: 2392787 - RNA, 19 nt, Homo sapiens
  misc_RNA (1)...(19): siRNA sense strand
uggaaagguaugugaaaua

SEQ ID NO: 2392788 - RNA, 19 nt, Homo sapiens
  misc_RNA (1)...(19): siRNA sense strand
aguugaaggaggaaauaaa

SEQ ID NO: 2392789 - RNA, 19 nt, Homo sapiens
  misc_RNA (1)...(19): siRNA sense strand
ugucgaagucauacagaaa

SEQ ID NO: 2392790 - RNA, 19 nt, Homo sapiens
  misc_RNA (1)...(19): siRNA sense strand
caagcgaaacugaaggaaa

SEQ ID NO: 2392791 - RNA, 19 nt, Homo sapiens
  misc_RNA (1)...(19): siRNA sense strand
gagagaaaucacaggcauu

SEQ ID NO: 2392792 - RNA, 19 nt, Homo sapiens
  misc_RNA (1)...(19): siRNA sense strand
cagcaagaugugagugaau

SEQ ID NO: 2392793 - RNA, 19 nt, Homo sapiens
  misc_RNA (1)...(19): siRNA sense strand
aauucaagcugauggaaga

SEQ ID NO: 2392794 - RNA, 19 nt, Homo sapiens
  misc_RNA (1)...(19): siRNA sense strand
gauuauaguuuguuccgaa

SEQ ID NO: 2392795 - RNA, 19 nt, Homo sapiens
  misc_RNA (1)...(19): siRNA sense strand
cuaaacgcucaaagagaaa

SEQ ID NO: 2392796 - RNA, 19 nt, Homo sapiens
  misc_RNA (1)...(19): siRNA sense strand
gcaacuuagacgaguguuu

SEQ ID NO: 2392797 - RNA, 19 nt, Homo sapiens
  misc_RNA (1)...(19): siRNA sense strand
ugaauauggaagaguacaa

SEQ ID NO: 2392798 - RNA, 19 nt, Homo sapiens
  misc_RNA (1)...(19): siRNA sense strand
ccuauggaggccugagaaa

SEQ ID NO: 2392799 - RNA, 19 nt, Homo sapiens
  misc_RNA (1)...(19): siRNA sense strand
uguuaaaucaacugagaga

SEQ ID NO: 2392800 - RNA, 19 nt, Homo sapiens
  misc_RNA (1)...(19): siRNA sense strand
gagauggaggagugagauu

SEQ ID NO: 2392801 - RNA, 19 nt, Homo sapiens
  misc_RNA (1)...(19): siRNA sense strand
ggaaaugccuucacagcca

SEQ ID NO: 2392802 - RNA, 19 nt, Homo sapiens
  misc_RNA (1)...(19): siRNA sense strand
ucaugaaggacaagcaaau

SEQ ID NO: 2392803 - RNA, 19 nt, Homo sapiens
  misc_RNA (1)...(19): siRNA sense strand
ugagaagagcgguguagaa

SEQ ID NO: 2392804 - RNA, 19 nt, Homo sapiens
  misc_RNA (1)...(19): siRNA sense strand
aguuauagucugccacaaa

SEQ ID NO: 2392805 - RNA, 19 nt, Homo sapiens
  misc_RNA (1)...(19): siRNA sense strand
guuaacagucccaggaaca

SEQ ID NO: 2392806 - RNA, 19 nt, Homo sapiens
  misc_RNA (1)...(19): siRNA sense strand
cagagauggaggagugaga

SEQ ID NO: 2392807 - RNA, 19 nt, Homo sapiens
  misc_RNA (1)...(19): siRNA sense strand
gaacagauguacugcgauc

SEQ ID NO: 2392808 - RNA, 19 nt, Homo sapiens
  misc_RNA (1)...(19): siRNA sense strand
ccugaaagugacacacaua

SEQ ID NO: 2392809 - RNA, 19 nt, Homo sapiens
  misc_RNA (1)...(19): siRNA sense strand
caaggaaguauuagcaaaa

SEQ ID NO: 2392810 - RNA, 19 nt, Homo sapiens
  misc_RNA (1)...(19): siRNA sense strand
uggcaauacauguugguuu

SEQ ID NO: 2392811 - RNA, 19 nt, Homo sapiens
  misc_RNA (1)...(19): siRNA sense strand
gaggagugagauugaacaa

SEQ ID NO: 2392812 - RNA, 19 nt, Homo sapiens
  misc_RNA (1)...(19): siRNA sense strand
gguuugagcaggaaguaga

SEQ ID NO: 2392813 - RNA, 19 nt, Homo sapiens
  misc_RNA (1)...(19): siRNA sense strand
cauccuggccauagcuaaa

SEQ ID NO: 2392814 - RNA, 19 nt, Homo sapiens
  misc_RNA (1)...(19): siRNA sense strand
gaagaauacuccaggcucu

SEQ ID NO: 2392815 - RNA, 19 nt, Homo sapiens
  misc_RNA (1)...(19): siRNA sense strand
gagaaauguuagugcuuac

SEQ ID NO: 2392816 - RNA, 19 nt, Homo sapiens
  misc_RNA (1)...(19): siRNA sense strand
auuacauucaggaggauaa

SEQ ID NO: 2392817 - RNA, 19 nt, Homo sapiens
  misc_RNA (1)...(19): siRNA sense strand
cgaaaguugaaggaggaaa

SEQ ID NO: 2392818 - RNA, 19 nt, Homo sapiens
  misc_RNA (1)...(19): siRNA sense strand
agguaaacgguuaucgcaa

SEQ ID NO: 2392819 - RNA, 19 nt, Homo sapiens
  misc_RNA (1)...(19): siRNA sense strand
agagagaguguauucgaaa

SEQ ID NO: 2392820 - RNA, 19 nt, Homo sapiens
  misc_RNA (1)...(19): siRNA sense strand
cugggaagaaguugaaaga

SEQ ID NO: 2392821 - RNA, 19 nt, Homo sapiens
  misc_RNA (1)...(19): siRNA sense strand
gaaaguaccaagaggcacu

SEQ ID NO: 2392822 - RNA, 19 nt, Homo sapiens
  misc_RNA (1)...(19): siRNA sense strand
gguccagaugacaugaaua

SEQ ID NO: 2392823 - RNA, 19 nt, Homo sapiens
  misc_RNA (1)...(19): siRNA sense strand
ccaaaugcuguuaaaucaa

SEQ ID NO: 2392824 - RNA, 19 nt, Homo sapiens
  misc_RNA (1)...(19): siRNA sense strand
cuucagagauggaggagug

SEQ ID NO: 2392825 - RNA, 19 nt, Homo sapiens
  misc_RNA (1)...(19): siRNA sense strand
gagcaaacugcccaggcua

SEQ ID NO: 2392826 - RNA, 19 nt, Homo sapiens
  misc_RNA (1)...(19): siRNA sense strand
cugaggaacagcagcaaga

SEQ ID NO: 2392827 - RNA, 19 nt, Homo sapiens
  misc_RNA (1)...(19): siRNA sense strand
ucgaaauaagagagagugu

SEQ ID NO: 2392828 - RNA, 19 nt, Homo sapiens
  misc_RNA (1)...(19): siRNA sense strand
gcauuaugaagguggcuca

SEQ ID NO: 2392829 - RNA, 19 nt, Homo sapiens
  misc_RNA (1)...(19): siRNA sense strand
gcagaaacuaaacgcucaa

SEQ ID NO: 2392830 - RNA, 19 nt, Homo sapiens
  misc_RNA (1)...(19): siRNA sense strand
cgaaauaagagagagugua

SEQ ID NO: 2392831 - RNA, 19 nt, Homo sapiens
  misc_RNA (1)...(19): siRNA sense strand
gaugaaagaucaaucagca

SEQ ID NO: 2392832 - RNA, 19 nt, Homo sapiens
  misc_RNA (1)...(19): siRNA sense strand
ccgaaaagugucuguguau

SEQ ID NO: 2392833 - RNA, 19 nt, Homo sapiens
  misc_RNA (1)...(19): siRNA sense strand
gcuuuauaccgaagaaaau

SEQ ID NO: 2392834 - RNA, 19 nt, Homo sapiens
  misc_RNA (1)...(19): siRNA sense strand
acagaugaggagauaaauu

SEQ ID NO: 2392835 - RNA, 19 nt, Homo sapiens
  misc_RNA (1)...(19): siRNA sense strand
guccagaugacaugaauau

SEQ ID NO: 2392836 - RNA, 19 nt, Homo sapiens
  misc_RNA (1)...(19): siRNA sense strand
auucgaaauaagagagagu

SEQ ID NO: 2392837 - RNA, 19 nt, Homo sapiens
  misc_RNA (1)...(19): siRNA sense strand
aggaaguagaggaguggga

SEQ ID NO: 2392838 - RNA, 19 nt, Homo sapiens
  misc_RNA (1)...(19): siRNA sense strand
ccuugggcagccagagaaa

SEQ ID NO: 2392839 - RNA, 19 nt, Homo sapiens
  misc_RNA (1)...(19): siRNA sense strand
auuggaaagguaugugaaa

SEQ ID NO: 2392840 - RNA, 19 nt, Homo sapiens
  misc_RNA (1)...(19): siRNA sense strand
gaaauauggcucaggccca

SEQ ID NO: 2392841 - RNA, 19 nt, Homo sapiens
  misc_RNA (1)...(19): siRNA sense strand
cugaagcagggcugauuaa

SEQ ID NO: 2392842 - RNA, 19 nt, Homo sapiens
  misc_RNA (1)...(19): siRNA sense strand
ggugaaagcuaauggccca

SEQ ID NO: 2392843 - RNA, 19 nt, Homo sapiens
  misc_RNA (1)...(19): siRNA sense strand
agaauaugacacugagcaa

SEQ ID NO: 2392844 - RNA, 19 nt, Homo sapiens
  misc_RNA (1)...(19): siRNA sense strand
agaagaagcuugaagguuc

SEQ ID NO: 2392845 - RNA, 19 nt, Homo sapiens
  misc_RNA (1)...(19): siRNA sense strand
ggagaagaaaggaggaaac

SEQ ID NO: 2392846 - RNA, 19 nt, Homo sapiens
  misc_RNA (1)...(19): siRNA sense strand
cugcaguucuugugcggaa

SEQ ID NO: 2392847 - RNA, 19 nt, Homo sapiens
  misc_RNA (1)...(19): siRNA sense strand
cagugaacacagaggugaa

SEQ ID NO: 2392848 - RNA, 19 nt, Homo sapiens
  misc_RNA (1)...(19): siRNA sense strand
cugcaaggaagguggagau

SEQ ID NO: 2392849 - RNA, 19 nt, Homo sapiens
  misc_RNA (1)...(19): siRNA sense strand
aaacugaacuaaaggccau

SEQ ID NO: 2392850 - RNA, 19 nt, Homo sapiens
  misc_RNA (1)...(19): siRNA sense strand
aggagaagaaaggaggaaa

SEQ ID NO: 2392851 - RNA, 19 nt, Homo sapiens
  misc_RNA (1)...(19): siRNA sense strand
ccaagacggacgaggcaga

SEQ ID NO: 2392852 - RNA, 19 nt, Homo sapiens
  misc_RNA (1)...(19): siRNA sense strand
ucuagcaagaggagaagaa

SEQ ID NO: 2392853 - RNA, 19 nt, Homo sapiens
  misc_RNA (1)...(19): siRNA sense strand
gaggagaagaaaggaggaa

SEQ ID NO: 2392854 - RNA, 19 nt, Homo sapiens
  misc_RNA (1)...(19): siRNA sense strand
ccgaaagaaacgagagcag

SEQ ID NO: 2392855 - RNA, 19 nt, Homo sapiens
  misc_RNA (1)...(19): siRNA sense strand
caaugggaucccugaggaa

SEQ ID NO: 2392856 - RNA, 19 nt, Homo sapiens
  misc_RNA (1)...(19): siRNA sense strand
cauugugaagacagagaau

SEQ ID NO: 2392857 - RNA, 19 nt, Homo sapiens
  misc_RNA (1)...(19): siRNA sense strand
gaggaaaccacagggaaaa

SEQ ID NO: 2392858 - RNA, 19 nt, Homo sapiens
  misc_RNA (1)...(19): siRNA sense strand
acuaaaggccauugcccau

SEQ ID NO: 2392859 - RNA, 19 nt, Homo sapiens
  misc_RNA (1)...(19): siRNA sense strand
gaagaaaggaggaaaccac

SEQ ID NO: 2392860 - RNA, 19 nt, Homo sapiens
  misc_RNA (1)...(19): siRNA sense strand
agcaugaauuagaucacaa

SEQ ID NO: 2392861 - RNA, 19 nt, Homo sapiens
  misc_RNA (1)...(19): siRNA sense strand
gagaaaauggagaccaaga

SEQ ID NO: 2392862 - RNA, 19 nt, Homo sapiens
  misc_RNA (1)...(19): siRNA sense strand
gguggacaaaucuggcaaa

SEQ ID NO: 2392863 - RNA, 19 nt, Homo sapiens
  misc_RNA (1)...(19): siRNA sense strand
ccagcaaaacugaacuaaa

SEQ ID NO: 2392864 - RNA, 19 nt, Homo sapiens
  misc_RNA (1)...(19): siRNA sense strand
cugcgauagcugcaaggaa

SEQ ID NO: 2392865 - RNA, 19 nt, Homo sapiens
  misc_RNA (1)...(19): siRNA sense strand
caguagcagcggagccaga

SEQ ID NO: 2392866 - RNA, 19 nt, Homo sapiens
  misc_RNA (1)...(19): siRNA sense strand
aagaagacacagcaugaau

SEQ ID NO: 2392867 - RNA, 19 nt, Homo sapiens
  misc_RNA (1)...(19): siRNA sense strand
agaaagaagaacagagaaa

SEQ ID NO: 2392868 - RNA, 19 nt, Homo sapiens
  misc_RNA (1)...(19): siRNA sense strand
caguuuaagugguggaaaa

SEQ ID NO: 2392869 - RNA, 19 nt, Homo sapiens
  misc_RNA (1)...(19): siRNA sense strand
cagaaagagcgcagaguga

SEQ ID NO: 2392870 - RNA, 19 nt, Homo sapiens
  misc_RNA (1)...(19): siRNA sense strand
agaaagaguccuuggugaa

SEQ ID NO: 2392871 - RNA, 19 nt, Homo sapiens
  misc_RNA (1)...(19): siRNA sense strand
aggaaauauuugaggaugu

SEQ ID NO: 2392872 - RNA, 19 nt, Homo sapiens
  misc_RNA (1)...(19): siRNA sense strand
cccaauuaauagagaaaga

SEQ ID NO: 2392873 - RNA, 19 nt, Homo sapiens
  misc_RNA (1)...(19): siRNA sense strand
gcuaguagacagagaacau

SEQ ID NO: 2392874 - RNA, 19 nt, Homo sapiens
  misc_RNA (1)...(19): siRNA sense strand
gagaaagaguccuugguga

SEQ ID NO: 2392875 - RNA, 19 nt, Homo sapiens
  misc_RNA (1)...(19): siRNA sense strand
ggcugaagaacaugaaaua

SEQ ID NO: 2392876 - RNA, 19 nt, Homo sapiens
  misc_RNA (1)...(19): siRNA sense strand
acaaauugagacagugaaa

SEQ ID NO: 2392877 - RNA, 19 nt, Homo sapiens
  misc_RNA (1)...(19): siRNA sense strand
gcagagugauauugagcau

SEQ ID NO: 2392878 - RNA, 19 nt, Homo sapiens
  misc_RNA (1)...(19): siRNA sense strand
agucuggaauggugguaaa

SEQ ID NO: 2392879 - RNA, 19 nt, Homo sapiens
  misc_RNA (1)...(19): siRNA sense strand
gagaaaagaaguacagaau

SEQ ID NO: 2392880 - RNA, 19 nt, Homo sapiens
  misc_RNA (1)...(19): siRNA sense strand
ccgugaagucagaggcgaa

SEQ ID NO: 2392881 - RNA, 19 nt, Homo sapiens
  misc_RNA (1)...(19): siRNA sense strand
agcaagaggaauugaacaa

SEQ ID NO: 2392882 - RNA, 19 nt, Homo sapiens
  misc_RNA (1)...(19): siRNA sense strand
gucagauaauagagaacaa

SEQ ID NO: 2392883 - RNA, 19 nt, Homo sapiens
  misc_RNA (1)...(19): siRNA sense strand
agaauuaagcagaacagaa

SEQ ID NO: 2392884 - RNA, 19 nt, Homo sapiens
  misc_RNA (1)...(19): siRNA sense strand
guugagagaaguugagaga

SEQ ID NO: 2392885 - RNA, 19 nt, Homo sapiens
  misc_RNA (1)...(19): siRNA sense strand
uggaguuguucaaggaaau

SEQ ID NO: 2392886 - RNA, 19 nt, Homo sapiens
  misc_RNA (1)...(19): siRNA sense strand
acauuagcuuccaaagaaa

SEQ ID NO: 2392887 - RNA, 19 nt, Homo sapiens
  misc_RNA (1)...(19): siRNA sense strand
agagaaagaagaacagaga

SEQ ID NO: 2392888 - RNA, 19 nt, Homo sapiens
  misc_RNA (1)...(19): siRNA sense strand
guucaaacgcacauaaaga

SEQ ID NO: 2392889 - RNA, 19 nt, Homo sapiens
  misc_RNA (1)...(19): siRNA sense strand
cauaauaggaaguuagagu

SEQ ID NO: 2392890 - RNA, 19 nt, Homo sapiens
  misc_RNA (1)...(19): siRNA sense strand
gcaagauugaccugggauu

SEQ ID NO: 2392891 - RNA, 19 nt, Homo sapiens
  misc_RNA (1)...(19): siRNA sense strand
gucuaggauuauuggcaaa

SEQ ID NO: 2392892 - RNA, 19 nt, Homo sapiens
  misc_RNA (1)...(19): siRNA sense strand
gccuauagacaacaggaaa

SEQ ID NO: 2392893 - RNA, 19 nt, Homo sapiens
  misc_RNA (1)...(19): siRNA sense strand
ugugagaauaucugacaua

SEQ ID NO: 2392894 - RNA, 19 nt, Homo sapiens
  misc_RNA (1)...(19): siRNA sense strand
aggaagaaaccauugauau

SEQ ID NO: 2392895 - RNA, 19 nt, Homo sapiens
  misc_RNA (1)...(19): siRNA sense strand
aguuagagucuguggcuga

SEQ ID NO: 2392896 - RNA, 19 nt, Homo sapiens
  misc_RNA (1)...(19): siRNA sense strand
uggagaaaguauagcagca

SEQ ID NO: 2392897 - RNA, 19 nt, Homo sapiens
  misc_RNA (1)...(19): siRNA sense strand
caaacaaugccuauagaca

SEQ ID NO: 2392898 - RNA, 19 nt, Homo sapiens
  misc_RNA (1)...(19): siRNA sense strand
gagaaaugaaaguacugaa

SEQ ID NO: 2392899 - RNA, 19 nt, Homo sapiens
  misc_RNA (1)...(19): siRNA sense strand
cagagauugucuucagaau

SEQ ID NO: 2392900 - RNA, 19 nt, Homo sapiens
  misc_RNA (1)...(19): siRNA sense strand
aaguauagcagcaaacaau

SEQ ID NO: 2392901 - RNA, 19 nt, Homo sapiens
  misc_RNA (1)...(19): siRNA sense strand
cuacaagaucuuuuggaaa

SEQ ID NO: 2392902 - RNA, 19 nt, Homo sapiens
  misc_RNA (1)...(19): siRNA sense strand
aaacaaauugagacaguga

SEQ ID NO: 2392903 - RNA, 19 nt, Homo sapiens
  misc_RNA (1)...(19): siRNA sense strand
auuagaaggucguuuggaa

SEQ ID NO: 2392904 - RNA, 19 nt, Homo sapiens
  misc_RNA (1)...(19): siRNA sense strand
cagcaaguugaaucagaaa

SEQ ID NO: 2392905 - RNA, 19 nt, Homo sapiens
  misc_RNA (1)...(19): siRNA sense strand
caaggaaauauuugaggau

SEQ ID NO: 2392906 - RNA, 19 nt, Homo sapiens
  misc_RNA (1)...(19): siRNA sense strand
agauuugugaugugagaau

SEQ ID NO: 2392907 - RNA, 19 nt, Homo sapiens
  misc_RNA (1)...(19): siRNA sense strand
gggaagauaaggaagaaac

SEQ ID NO: 2392908 - RNA, 19 nt, Homo sapiens
  misc_RNA (1)...(19): siRNA sense strand
cauugaaaccagagauugu

SEQ ID NO: 2392909 - RNA, 19 nt, Homo sapiens
  misc_RNA (1)...(19): siRNA sense strand
agagauugucuucagaaua

SEQ ID NO: 2392910 - RNA, 19 nt, Homo sapiens
  misc_RNA (1)...(19): siRNA sense strand
agaacagaacagauaagaa

SEQ ID NO: 2392911 - RNA, 19 nt, Homo sapiens
  misc_RNA (1)...(19): siRNA sense strand
ugcccaauuaauagagaaa

SEQ ID NO: 2392912 - RNA, 19 nt, Homo sapiens
  misc_RNA (1)...(19): siRNA sense strand
ggagaaaguauagcagcaa

SEQ ID NO: 2392913 - RNA, 19 nt, Homo sapiens
  misc_RNA (1)...(19): siRNA sense strand
ccacauuagcuuccaaaga

SEQ ID NO: 2392914 - RNA, 19 nt, Homo sapiens
  misc_RNA (1)...(19): siRNA sense strand
acagaaacucacacgacua

SEQ ID NO: 2392915 - RNA, 19 nt, Homo sapiens
  misc_RNA (1)...(19): siRNA sense strand
aaagggaagauaaggaaga

SEQ ID NO: 2392916 - RNA, 19 nt, Homo sapiens
  misc_RNA (1)...(19): siRNA sense strand
cugaagaacaugaaauacu

SEQ ID NO: 2392917 - RNA, 19 nt, Homo sapiens
  misc_RNA (1)...(19): siRNA sense strand
aggaaagggaagauaagga

SEQ ID NO: 2392918 - RNA, 19 nt, Homo sapiens
  misc_RNA (1)...(19): siRNA sense strand
gaguugagcauuaaggcuu

SEQ ID NO: 2392919 - RNA, 19 nt, Homo sapiens
  misc_RNA (1)...(19): siRNA sense strand
gaaacuucagcaagaggaa

SEQ ID NO: 2392920 - RNA, 19 nt, Homo sapiens
  misc_RNA (1)...(19): siRNA sense strand
aagaggaauugaacaaaca

SEQ ID NO: 2392921 - RNA, 19 nt, Homo sapiens
  misc_RNA (1)...(19): siRNA sense strand
gaguugccuuguagagcua

SEQ ID NO: 2392922 - RNA, 19 nt, Homo sapiens
  misc_RNA (1)...(19): siRNA sense strand
agaacauaagcuagcaaau

SEQ ID NO: 2392923 - RNA, 19 nt, Homo sapiens
  misc_RNA (1)...(19): siRNA sense strand
uaguagacagagaacauaa

SEQ ID NO: 2392924 - RNA, 19 nt, Homo sapiens
  misc_RNA (1)...(19): siRNA sense strand
uggaagagaaagaguccuu

SEQ ID NO: 2392925 - RNA, 19 nt, Homo sapiens
  misc_RNA (1)...(19): siRNA sense strand
uuggaguuguucaaggaaa

SEQ ID NO: 2392926 - RNA, 19 nt, Homo sapiens
  misc_RNA (1)...(19): siRNA sense strand
gagaaagaagaacagagaa

SEQ ID NO: 2392927 - RNA, 19 nt, Homo sapiens
  misc_RNA (1)...(19): siRNA sense strand
cuggaauggugguaaagga

SEQ ID NO: 2392928 - RNA, 19 nt, Homo sapiens
  misc_RNA (1)...(19): siRNA sense strand
ugucuaggauuauuggcaa

SEQ ID NO: 2392929 - RNA, 19 nt, Homo sapiens
  misc_RNA (1)...(19): siRNA sense strand
gcacaggcugauagacuga

SEQ ID NO: 2392930 - RNA, 19 nt, Homo sapiens
  misc_RNA (1)...(19): siRNA sense strand
agacagagauggaccgcaa

SEQ ID NO: 2392931 - RNA, 19 nt, Homo sapiens
  misc_RNA (1)...(19): siRNA sense strand
caguuaagagauugaggaa

SEQ ID NO: 2392932 - RNA, 19 nt, Homo sapiens
  misc_RNA (1)...(19): siRNA sense strand
aguuaagagauugaggaaa

SEQ ID NO: 2392933 - RNA, 19 nt, Homo sapiens
  misc_RNA (1)...(19): siRNA sense strand
cggcaauaaggauggaagu

SEQ ID NO: 2392934 - RNA, 19 nt, Homo sapiens
  misc_RNA (1)...(19): siRNA sense strand
gugacuaucuggagcagca

SEQ ID NO: 2392935 - RNA, 19 nt, Homo sapiens
  misc_RNA (1)...(19): siRNA sense strand
agccagagccagagccaga

SEQ ID NO: 2392936 - RNA, 19 nt, Homo sapiens
  misc_RNA (1)...(19): siRNA sense strand
gaggaaaauguccgugaaa

SEQ ID NO: 2392937 - RNA, 19 nt, Homo sapiens
  misc_RNA (1)...(19): siRNA sense strand
ccgcaagguccuagagcuc

SEQ ID NO: 2392938 - RNA, 19 nt, Homo sapiens
  misc_RNA (1)...(19): siRNA sense strand
gugacugacagcaaggcaa

SEQ ID NO: 2392939 - RNA, 19 nt, Homo sapiens
  misc_RNA (1)...(19): siRNA sense strand
ccauguacugcaacggcaa

SEQ ID NO: 2392940 - RNA, 19 nt, Homo sapiens
  misc_RNA (1)...(19): siRNA sense strand
agauggagguauuacgguu

SEQ ID NO: 2392941 - RNA, 19 nt, Homo sapiens
  misc_RNA (1)...(19): siRNA sense strand
gcaucaucugcauggagaa

SEQ ID NO: 2392942 - RNA, 19 nt, Homo sapiens
  misc_RNA (1)...(19): siRNA sense strand
acggcucaguuaagagauu

SEQ ID NO: 2392943 - RNA, 19 nt, Homo sapiens
  misc_RNA (1)...(19): siRNA sense strand
cugaagguggccuggaaga

SEQ ID NO: 2392944 - RNA, 19 nt, Homo sapiens
  misc_RNA (1)...(19): siRNA sense strand
gcacagaaauuaaugcgaa

SEQ ID NO: 2392945 - RNA, 19 nt, Homo sapiens
  misc_RNA (1)...(19): siRNA sense strand
ggauuacaucaaagggaga

SEQ ID NO: 2392946 - RNA, 19 nt, Homo sapiens
  misc_RNA (1)...(19): siRNA sense strand
ccauguuggcccagcaaau

SEQ ID NO: 2392947 - RNA, 19 nt, Homo sapiens
  misc_RNA (1)...(19): siRNA sense strand
cauuacaacccgugccaau

SEQ ID NO: 2392948 - RNA, 19 nt, Homo sapiens
  misc_RNA (1)...(19): siRNA sense strand
ccauaauaucugccgaaca

SEQ ID NO: 2392949 - RNA, 19 nt, Homo sapiens
  misc_RNA (1)...(19): siRNA sense strand
guugaaaauggacgaguaa

SEQ ID NO: 2392950 - RNA, 19 nt, Homo sapiens
  misc_RNA (1)...(19): siRNA sense strand
aauguugguuacagggaau

SEQ ID NO: 2392951 - RNA, 19 nt, Homo sapiens
  misc_RNA (1)...(19): siRNA sense strand
cagcagaagaacauggcca

SEQ ID NO: 2392952 - RNA, 19 nt, Homo sapiens
  misc_RNA (1)...(19): siRNA sense strand
ccgcagcugccaugggaau

SEQ ID NO: 2392953 - RNA, 19 nt, Homo sapiens
  misc_RNA (1)...(19): siRNA sense strand
caauguugguuacagggaa

SEQ ID NO: 2392954 - RNA, 19 nt, Homo sapiens
  misc_RNA (1)...(19): siRNA sense strand
aguugaaaauggacgagua

SEQ ID NO: 2392955 - RNA, 19 nt, Homo sapiens
  misc_RNA (1)...(19): siRNA sense strand
ggcucaauauugugcauga

SEQ ID NO: 2392956 - RNA, 19 nt, Homo sapiens
  misc_RNA (1)...(19): siRNA sense strand
aaacugaacuuccggcaga

SEQ ID NO: 2392957 - RNA, 19 nt, Homo sapiens
  misc_RNA (1)...(19): siRNA sense strand
gcaaagugaaagaaggcau

SEQ ID NO: 2392958 - RNA, 19 nt, Homo sapiens
  misc_RNA (1)...(19): siRNA sense strand
gcaucuuguccauggcaaa

SEQ ID NO: 2392959 - RNA, 19 nt, Homo sapiens
  misc_RNA (1)...(19): siRNA sense strand
cugagugguuggauggcaa

SEQ ID NO: 2392960 - RNA, 19 nt, Homo sapiens
  misc_RNA (1)...(19): siRNA sense strand
ggauuugguuauaaggguu

SEQ ID NO: 2392961 - RNA, 19 nt, Homo sapiens
  misc_RNA (1)...(19): siRNA sense strand
ugaauauuguggaggccau

SEQ ID NO: 2392962 - RNA, 19 nt, Homo sapiens
  misc_RNA (1)...(19): siRNA sense strand
cugccaagacugagugguu

SEQ ID NO: 2392963 - RNA, 19 nt, Homo sapiens
  misc_RNA (1)...(19): siRNA sense strand
cuguggacaacucgaauaa

SEQ ID NO: 2392964 - RNA, 19 nt, Homo sapiens
  misc_RNA (1)...(19): siRNA sense strand
agugaaagaaggcaugaau

SEQ ID NO: 2392965 - RNA, 19 nt, Homo sapiens
  misc_RNA (1)...(19): siRNA sense strand
cccaaagacagcagaaaau

SEQ ID NO: 2392966 - RNA, 19 nt, Homo sapiens
  misc_RNA (1)...(19): siRNA sense strand
gcaaagugaaagaaggcau

SEQ ID NO: 2392967 - RNA, 19 nt, Homo sapiens
  misc_RNA (1)...(19): siRNA sense strand
gcaucuuguccauggcaaa

SEQ ID NO: 2392968 - RNA, 19 nt, Homo sapiens
  misc_RNA (1)...(19): siRNA sense strand
cugagugguuggauggcaa

SEQ ID NO: 2392969 - RNA, 19 nt, Homo sapiens
  misc_RNA (1)...(19): siRNA sense strand
ugaauauuguggaggccau

SEQ ID NO: 2392970 - RNA, 19 nt, Homo sapiens
  misc_RNA (1)...(19): siRNA sense strand
cugccaagacugagugguu

SEQ ID NO: 2392971 - RNA, 19 nt, Homo sapiens
  misc_RNA (1)...(19): siRNA sense strand
cuguggacaacucgaauaa

SEQ ID NO: 2392972 - RNA, 19 nt, Homo sapiens
  misc_RNA (1)...(19): siRNA sense strand
agugaaagaaggcaugaau

SEQ ID NO: 2392973 - RNA, 19 nt, Homo sapiens
  misc_RNA (1)...(19): siRNA sense strand
gcaaagugaaagaaggcau

SEQ ID NO: 2392974 - RNA, 19 nt, Homo sapiens
  misc_RNA (1)...(19): siRNA sense strand
gcaucuuguccauggcaaa

SEQ ID NO: 2392975 - RNA, 19 nt, Homo sapiens
  misc_RNA (1)...(19): siRNA sense strand
cugagugguuggauggcaa

SEQ ID NO: 2392976 - RNA, 19 nt, Homo sapiens
  misc_RNA (1)...(19): siRNA sense strand
ugaauauuguggaggccau

SEQ ID NO: 2392977 - RNA, 19 nt, Homo sapiens
  misc_RNA (1)...(19): siRNA sense strand
cugccaagacugagugguu

SEQ ID NO: 2392978 - RNA, 19 nt, Homo sapiens
  misc_RNA (1)...(19): siRNA sense strand
cuguggacaacucgaauaa

SEQ ID NO: 2392979 - RNA, 19 nt, Homo sapiens
  misc_RNA (1)...(19): siRNA sense strand
agugaaagaaggcaugaau

SEQ ID NO: 2392980 - RNA, 19 nt, Homo sapiens
  misc_RNA (1)...(19): siRNA sense strand
ggauaggaucaaugagaga

SEQ ID NO: 2392981 - RNA, 19 nt, Homo sapiens
  misc_RNA (1)...(19): siRNA sense strand
uugaagaggcaaaggguuu

SEQ ID NO: 2392982 - RNA, 19 nt, Homo sapiens
  misc_RNA (1)...(19): siRNA sense strand
gcaauuggcaagauggcaa

SEQ ID NO: 2392983 - RNA, 19 nt, Homo sapiens
  misc_RNA (1)...(19): siRNA sense strand
cauccuucggagagagaaa

SEQ ID NO: 2392984 - RNA, 19 nt, Homo sapiens
  misc_RNA (1)...(19): siRNA sense strand
gcugcagcccggaaagaaa

SEQ ID NO: 2392985 - RNA, 19 nt, Homo sapiens
  misc_RNA (1)...(19): siRNA sense strand
gugccacaguugaggcuau

SEQ ID NO: 2392986 - RNA, 19 nt, Homo sapiens
  misc_RNA (1)...(19): siRNA sense strand
agauagauucaaagagcca

SEQ ID NO: 2392987 - RNA, 19 nt, Homo sapiens
  misc_RNA (1)...(19): siRNA sense strand
caauaauaaagcugcugua

SEQ ID NO: 2392988 - RNA, 19 nt, Homo sapiens
  misc_RNA (1)...(19): siRNA sense strand
auuuauggguucugaagau

SEQ ID NO: 2392989 - RNA, 19 nt, Homo sapiens
  misc_RNA (1)...(19): siRNA sense strand
cuguacagcaagaugguuu

SEQ ID NO: 2392990 - RNA, 19 nt, Homo sapiens
  misc_RNA (1)...(19): siRNA sense strand
aggucgaguagaugaagaa

SEQ ID NO: 2392991 - RNA, 19 nt, Homo sapiens
  misc_RNA (1)...(19): siRNA sense strand
agaugaagaaauugcgcuu

SEQ ID NO: 2392992 - RNA, 19 nt, Homo sapiens
  misc_RNA (1)...(19): siRNA sense strand
gagagaaaaccaugauaga

SEQ ID NO: 2392993 - RNA, 19 nt, Homo sapiens
  misc_RNA (1)...(19): siRNA sense strand
aagucaaacuacaggguuc

SEQ ID NO: 2392994 - RNA, 19 nt, Homo sapiens
  misc_RNA (1)...(19): siRNA sense strand
aagaaauugcgcuuagaau

SEQ ID NO: 2392995 - RNA, 19 nt, Homo sapiens
  misc_RNA (1)...(19): siRNA sense strand
cggaaagagucuaugaagc

SEQ ID NO: 2392996 - RNA, 19 nt, Homo sapiens
  misc_RNA (1)...(19): siRNA sense strand
guugccuaguggaguguua

SEQ ID NO: 2392997 - RNA, 19 nt, Homo sapiens
  misc_RNA (1)...(19): siRNA sense strand
agaaggucgaguagaugaa

SEQ ID NO: 2392998 - RNA, 19 nt, Homo sapiens
  misc_RNA (1)...(19): siRNA sense strand
gauuauuagagcucaugaa

SEQ ID NO: 2392999 - RNA, 19 nt, Homo sapiens
  misc_RNA (1)...(19): siRNA sense strand
agaaacaaaauucgagcaa

SEQ ID NO: 2393000 - RNA, 19 nt, Homo sapiens
  misc_RNA (1)...(19): siRNA sense strand
gauuauguggacagagguu

SEQ ID NO: 2393001 - RNA, 19 nt, Homo sapiens
  misc_RNA (1)...(19): siRNA sense strand
cuggaugauauuaggagau

SEQ ID NO: 2393002 - RNA, 19 nt, Homo sapiens
  misc_RNA (1)...(19): siRNA sense strand
cauccuuacugguugccua

SEQ ID NO: 2393003 - RNA, 19 nt, Homo sapiens
  misc_RNA (1)...(19): siRNA sense strand
gcucugaugaugaacuaau

SEQ ID NO: 2393004 - RNA, 19 nt, Homo sapiens
  misc_RNA (1)...(19): siRNA sense strand
ucgcuugacaucugaagaa

SEQ ID NO: 2393005 - RNA, 19 nt, Homo sapiens
  misc_RNA (1)...(19): siRNA sense strand
gauagaaguagaagcucca

SEQ ID NO: 2393006 - RNA, 19 nt, Homo sapiens
  misc_RNA (1)...(19): siRNA sense strand
agcucaagaugcaggcuau

SEQ ID NO: 2393007 - RNA, 19 nt, Homo sapiens
  misc_RNA (1)...(19): siRNA sense strand
auaggaucaaugagagaau

SEQ ID NO: 2393008 - RNA, 19 nt, Homo sapiens
  misc_RNA (1)...(19): siRNA sense strand
caugauagaaguagaagcu

SEQ ID NO: 2393009 - RNA, 19 nt, Homo sapiens
  misc_RNA (1)...(19): siRNA sense strand
gagaaaaccaugauagaag

SEQ ID NO: 2393010 - RNA, 19 nt, Homo sapiens
  misc_RNA (1)...(19): siRNA sense strand
gcucaagaugcaggcuaua

SEQ ID NO: 2393011 - RNA, 19 nt, Homo sapiens
  misc_RNA (1)...(19): siRNA sense strand
ggcaagauggcaagagucu

SEQ ID NO: 2393012 - RNA, 19 nt, Homo sapiens
  misc_RNA (1)...(19): siRNA sense strand
gugaaauacaggaccgaua

SEQ ID NO: 2393013 - RNA, 19 nt, Homo sapiens
  misc_RNA (1)...(19): siRNA sense strand
gcauacaguggacgagaaa

SEQ ID NO: 2393014 - RNA, 19 nt, Homo sapiens
  misc_RNA (1)...(19): siRNA sense strand
auacaguggacgagaaaca

SEQ ID NO: 2393015 - RNA, 19 nt, Homo sapiens
  misc_RNA (1)...(19): siRNA sense strand
ccagauuacuacaaagcau

SEQ ID NO: 2393016 - RNA, 19 nt, Homo sapiens
  misc_RNA (1)...(19): siRNA sense strand
acauggaggcugugagcuu

SEQ ID NO: 2393017 - RNA, 19 nt, Homo sapiens
  misc_RNA (1)...(19): siRNA sense strand
ccugugaaccuaagaguga

SEQ ID NO: 2393018 - RNA, 19 nt, Homo sapiens
  misc_RNA (1)...(19): siRNA sense strand
gggaggacauggaggcugu

SEQ ID NO: 2393019 - RNA, 19 nt, Homo sapiens
  misc_RNA (1)...(19): siRNA sense strand
ccggucagucccaggguaa

SEQ ID NO: 2393020 - RNA, 19 nt, Homo sapiens
  misc_RNA (1)...(19): siRNA sense strand
cagauuacuacaaagcaua

SEQ ID NO: 2393021 - RNA, 19 nt, Homo sapiens
  misc_RNA (1)...(19): siRNA sense strand
acccuaugaaugugaaaua

SEQ ID NO: 2393022 - RNA, 19 nt, Homo sapiens
  misc_RNA (1)...(19): siRNA sense strand
guaaagcgacccauugaaa

SEQ ID NO: 2393023 - RNA, 19 nt, Homo sapiens
  misc_RNA (1)...(19): siRNA sense strand
aaccuaagagugagaacua

SEQ ID NO: 2393024 - RNA, 19 nt, Homo sapiens
  misc_RNA (1)...(19): siRNA sense strand
cauacguaguagaugguca

SEQ ID NO: 2393025 - RNA, 19 nt, Homo sapiens
  misc_RNA (1)...(19): siRNA sense strand
ccuaagagugagaacuaca

SEQ ID NO: 2393026 - RNA, 19 nt, Homo sapiens
  misc_RNA (1)...(19): siRNA sense strand
ggacccuaucaaugugaaa

SEQ ID NO: 2393027 - RNA, 19 nt, Homo sapiens
  misc_RNA (1)...(19): siRNA sense strand
auacguaguagauggucaa

SEQ ID NO: 2393028 - RNA, 19 nt, Homo sapiens
  misc_RNA (1)...(19): siRNA sense strand
caucguaaagcgaggugau

SEQ ID NO: 2393029 - RNA, 19 nt, Homo sapiens
  misc_RNA (1)...(19): siRNA sense strand
cuauuaccauucaggagaa

SEQ ID NO: 2393030 - RNA, 19 nt, Homo sapiens
  misc_RNA (1)...(19): siRNA sense strand
ggaccgauaugguggcauc

SEQ ID NO: 2393031 - RNA, 19 nt, Homo sapiens
  misc_RNA (1)...(19): siRNA sense strand
caucugguacaaagggcaa

SEQ ID NO: 2393032 - RNA, 19 nt, Homo sapiens
  misc_RNA (1)...(19): siRNA sense strand
cgauugaagccgagccaac

SEQ ID NO: 2393033 - RNA, 19 nt, Homo sapiens
  misc_RNA (1)...(19): siRNA sense strand
ggcaaaugaaggaccucua

SEQ ID NO: 2393034 - RNA, 19 nt, Homo sapiens
  misc_RNA (1)...(19): siRNA sense strand
gagcuuaaccugugauccu

SEQ ID NO: 2393035 - RNA, 19 nt, Homo sapiens
  misc_RNA (1)...(19): siRNA sense strand
accuacauuugguggcuaa

SEQ ID NO: 2393036 - RNA, 19 nt, Homo sapiens
  misc_RNA (1)...(19): siRNA sense strand
acccuaucaaugugaaaua

SEQ ID NO: 2393037 - RNA, 19 nt, Homo sapiens
  misc_RNA (1)...(19): siRNA sense strand
gcuccaaauccaugacagu

SEQ ID NO: 2393038 - RNA, 19 nt, Homo sapiens
  misc_RNA (1)...(19): siRNA sense strand
uggacgagaaacaguauau

SEQ ID NO: 2393039 - RNA, 19 nt, Homo sapiens
  misc_RNA (1)...(19): siRNA sense strand
aaagcgaggugaugggacu

SEQ ID NO: 2393040 - RNA, 19 nt, Homo sapiens
  misc_RNA (1)...(19): siRNA sense strand
agugagaacuacaccuaca

SEQ ID NO: 2393041 - RNA, 19 nt, Homo sapiens
  misc_RNA (1)...(19): siRNA sense strand
ggacccuaugaaugugaaa

SEQ ID NO: 2393042 - RNA, 19 nt, Homo sapiens
  misc_RNA (1)...(19): siRNA sense strand
ucaaggaacuggagcccaa

SEQ ID NO: 2393043 - RNA, 19 nt, Homo sapiens
  misc_RNA (1)...(19): siRNA sense strand
cagaaugggaccugggagu

SEQ ID NO: 2393044 - RNA, 19 nt, Homo sapiens
  misc_RNA (1)...(19): siRNA sense strand
gcaucaauucacugcagaa

SEQ ID NO: 2393045 - RNA, 19 nt, Homo sapiens
  misc_RNA (1)...(19): siRNA sense strand
gagaaucuguucaccgcaa

SEQ ID NO: 2393046 - RNA, 19 nt, Homo sapiens
  misc_RNA (1)...(19): siRNA sense strand
ccauggucucucagaagaa

SEQ ID NO: 2393047 - RNA, 19 nt, Homo sapiens
  misc_RNA (1)...(19): siRNA sense strand
gaacaagcacagaauggga

SEQ ID NO: 2393048 - RNA, 19 nt, Homo sapiens
  misc_RNA (1)...(19): siRNA sense strand
acugugaguuugagggaug

SEQ ID NO: 2393049 - RNA, 19 nt, Homo sapiens
  misc_RNA (1)...(19): siRNA sense strand
ggacgugggaacaagcaca

SEQ ID NO: 2393050 - RNA, 19 nt, Homo sapiens
  misc_RNA (1)...(19): siRNA sense strand
ggacugugaguuugaggga

SEQ ID NO: 2393051 - RNA, 19 nt, Homo sapiens
  misc_RNA (1)...(19): siRNA sense strand
cauaaaugcuguuguggca

SEQ ID NO: 2393052 - RNA, 19 nt, Homo sapiens
  misc_RNA (1)...(19): siRNA sense strand
uggugagcgucguggccua

SEQ ID NO: 2393053 - RNA, 19 nt, Homo sapiens
  misc_RNA (1)...(19): siRNA sense strand
aggccuacuuggagcuuga

SEQ ID NO: 2393054 - RNA, 19 nt, Homo sapiens
  misc_RNA (1)...(19): siRNA sense strand
auucagaaguacacggacu

SEQ ID NO: 2393055 - RNA, 19 nt, Homo sapiens
  misc_RNA (1)...(19): siRNA sense strand
auguuaagcaccaggcaca

SEQ ID NO: 2393056 - RNA, 19 nt, Homo sapiens
  misc_RNA (1)...(19): siRNA sense strand
acaucaagcagacgggcau

SEQ ID NO: 2393057 - RNA, 19 nt, Homo sapiens
  misc_RNA (1)...(19): siRNA sense strand
gggcaucguguuugggagu

SEQ ID NO: 2393058 - RNA, 19 nt, Homo sapiens
  misc_RNA (1)...(19): siRNA sense strand
cuguuguauuggcgggaca

SEQ ID NO: 2393059 - RNA, 19 nt, Homo sapiens
  misc_RNA (1)...(19): siRNA sense strand
cauaaaugcuguuguggca

SEQ ID NO: 2393060 - RNA, 19 nt, Homo sapiens
  misc_RNA (1)...(19): siRNA sense strand
uggugagcgucguggccua

SEQ ID NO: 2393061 - RNA, 19 nt, Homo sapiens
  misc_RNA (1)...(19): siRNA sense strand
aggccuacuuggagcuuga

SEQ ID NO: 2393062 - RNA, 19 nt, Homo sapiens
  misc_RNA (1)...(19): siRNA sense strand
auucagaaguacacggacu

SEQ ID NO: 2393063 - RNA, 19 nt, Homo sapiens
  misc_RNA (1)...(19): siRNA sense strand
auguuaagcaccaggcaca

SEQ ID NO: 2393064 - RNA, 19 nt, Homo sapiens
  misc_RNA (1)...(19): siRNA sense strand
acaucaagcagacgggcau

SEQ ID NO: 2393065 - RNA, 19 nt, Homo sapiens
  misc_RNA (1)...(19): siRNA sense strand
gggcaucguguuugggagu

SEQ ID NO: 2393066 - RNA, 19 nt, Homo sapiens
  misc_RNA (1)...(19): siRNA sense strand
cuguuguauuggcgggaca

SEQ ID NO: 2393067 - RNA, 19 nt, Homo sapiens
  misc_RNA (1)...(19): siRNA sense strand
cauaaaugcuguuguggca

SEQ ID NO: 2393068 - RNA, 19 nt, Homo sapiens
  misc_RNA (1)...(19): siRNA sense strand
uggugagcgucguggccua

SEQ ID NO: 2393069 - RNA, 19 nt, Homo sapiens
  misc_RNA (1)...(19): siRNA sense strand
aggccuacuuggagcuuga

SEQ ID NO: 2393070 - RNA, 19 nt, Homo sapiens
  misc_RNA (1)...(19): siRNA sense strand
auucagaaguacacggacu

SEQ ID NO: 2393071 - RNA, 19 nt, Homo sapiens
  misc_RNA (1)...(19): siRNA sense strand
auguuaagcaccaggcaca

SEQ ID NO: 2393072 - RNA, 19 nt, Homo sapiens
  misc_RNA (1)...(19): siRNA sense strand
acaucaagcagacgggcau

SEQ ID NO: 2393073 - RNA, 19 nt, Homo sapiens
  misc_RNA (1)...(19): siRNA sense strand
gggcaucguguuugggagu

SEQ ID NO: 2393074 - RNA, 19 nt, Homo sapiens
  misc_RNA (1)...(19): siRNA sense strand
cuguuguauuggcgggaca

SEQ ID NO: 2393075 - RNA, 19 nt, Homo sapiens
  misc_RNA (1)...(19): siRNA sense strand
gggaaagauaucagggaaa

SEQ ID NO: 2393076 - RNA, 19 nt, Homo sapiens
  misc_RNA (1)...(19): siRNA sense strand
agaagaaggcaaagggaaa

SEQ ID NO: 2393077 - RNA, 19 nt, Homo sapiens
  misc_RNA (1)...(19): siRNA sense strand
acucaagacuucugggaaa

SEQ ID NO: 2393078 - RNA, 19 nt, Homo sapiens
  misc_RNA (1)...(19): siRNA sense strand
cugcaaaugccuuggguua

SEQ ID NO: 2393079 - RNA, 19 nt, Homo sapiens
  misc_RNA (1)...(19): siRNA sense strand
ggacauuggcucugagaau

SEQ ID NO: 2393080 - RNA, 19 nt, Homo sapiens
  misc_RNA (1)...(19): siRNA sense strand
acgcauugcagaagagaaa

SEQ ID NO: 2393081 - RNA, 19 nt, Homo sapiens
  misc_RNA (1)...(19): siRNA sense strand
uggcaaauguggaaggauu

SEQ ID NO: 2393082 - RNA, 19 nt, Homo sapiens
  misc_RNA (1)...(19): siRNA sense strand
caguggugcuggugggaua

SEQ ID NO: 2393083 - RNA, 19 nt, Homo sapiens
  misc_RNA (1)...(19): siRNA sense strand
aagcauagaagaaggcaaa

SEQ ID NO: 2393084 - RNA, 19 nt, Homo sapiens
  misc_RNA (1)...(19): siRNA sense strand
ugacagaagaacagaagaa

SEQ ID NO: 2393085 - RNA, 19 nt, Homo sapiens
  misc_RNA (1)...(19): siRNA sense strand
ucagauaagcauagaagaa

SEQ ID NO: 2393086 - RNA, 19 nt, Homo sapiens
  misc_RNA (1)...(19): siRNA sense strand
ugaagaauccagacagaaa

SEQ ID NO: 2393087 - RNA, 19 nt, Homo sapiens
  misc_RNA (1)...(19): siRNA sense strand
aaaggaagacaaagggaaa

SEQ ID NO: 2393088 - RNA, 19 nt, Homo sapiens
  misc_RNA (1)...(19): siRNA sense strand
agacaaaggcaaagaaugu

SEQ ID NO: 2393089 - RNA, 19 nt, Homo sapiens
  misc_RNA (1)...(19): siRNA sense strand
acaucaaggcaaagagcaa

SEQ ID NO: 2393090 - RNA, 19 nt, Homo sapiens
  misc_RNA (1)...(19): siRNA sense strand
agaacagucuggagaagaa

SEQ ID NO: 2393091 - RNA, 19 nt, Homo sapiens
  misc_RNA (1)...(19): siRNA sense strand
ggaaggaugcagaaaggaa

SEQ ID NO: 2393092 - RNA, 19 nt, Homo sapiens
  misc_RNA (1)...(19): siRNA sense strand
caccauagaaauaggcaaa

SEQ ID NO: 2393093 - RNA, 19 nt, Homo sapiens
  misc_RNA (1)...(19): siRNA sense strand
ggaugaauauauugaggau

SEQ ID NO: 2393094 - RNA, 19 nt, Homo sapiens
  misc_RNA (1)...(19): siRNA sense strand
ggucauggugauuggaaau

SEQ ID NO: 2393095 - RNA, 19 nt, Homo sapiens
  misc_RNA (1)...(19): siRNA sense strand
auaagauaguggagcacaa

SEQ ID NO: 2393096 - RNA, 19 nt, Homo sapiens
  misc_RNA (1)...(19): siRNA sense strand
uuuaagggauggauggaua

SEQ ID NO: 2393097 - RNA, 19 nt, Homo sapiens
  misc_RNA (1)...(19): siRNA sense strand
ggcaaagagcaaugaguau

SEQ ID NO: 2393098 - RNA, 19 nt, Homo sapiens
  misc_RNA (1)...(19): siRNA sense strand
ccacauuggaagaggcuga

SEQ ID NO: 2393099 - RNA, 19 nt, Homo sapiens
  misc_RNA (1)...(19): siRNA sense strand
ugguggaauuugaggaaaa

SEQ ID NO: 2393100 - RNA, 19 nt, Homo sapiens
  misc_RNA (1)...(19): siRNA sense strand
acaagaaagacaaaggcaa

SEQ ID NO: 2393101 - RNA, 19 nt, Homo sapiens
  misc_RNA (1)...(19): siRNA sense strand
gggaaaacguacaugauau

SEQ ID NO: 2393102 - RNA, 19 nt, Homo sapiens
  misc_RNA (1)...(19): siRNA sense strand
uggaagaggcugaacagaa

SEQ ID NO: 2393103 - RNA, 19 nt, Homo sapiens
  misc_RNA (1)...(19): siRNA sense strand
acuacgugcugcugggaaa

SEQ ID NO: 2393104 - RNA, 19 nt, Homo sapiens
  misc_RNA (1)...(19): siRNA sense strand
ccauggaauugguuggauu

SEQ ID NO: 2393105 - RNA, 19 nt, Homo sapiens
  misc_RNA (1)...(19): siRNA sense strand
ccauaccaccauagaaaua

SEQ ID NO: 2393106 - RNA, 19 nt, Homo sapiens
  misc_RNA (1)...(19): siRNA sense strand
cagauauggaggaaagcaa

SEQ ID NO: 2393107 - RNA, 19 nt, Homo sapiens
  misc_RNA (1)...(19): siRNA sense strand
guuuggaggucaagacauu

SEQ ID NO: 2393108 - RNA, 19 nt, Homo sapiens
  misc_RNA (1)...(19): siRNA sense strand
gaaugagggcuguuguaaa

SEQ ID NO: 2393109 - RNA, 19 nt, Homo sapiens
  misc_RNA (1)...(19): siRNA sense strand
gggcaaccuacgaaauaaa

SEQ ID NO: 2393110 - RNA, 19 nt, Homo sapiens
  misc_RNA (1)...(19): siRNA sense strand
aaagaaguuuggaggucaa

SEQ ID NO: 2393111 - RNA, 19 nt, Homo sapiens
  misc_RNA (1)...(19): siRNA sense strand
gggugagaguggagagaug

SEQ ID NO: 2393112 - RNA, 19 nt, Homo sapiens
  misc_RNA (1)...(19): siRNA sense strand
agggaaagauaucagggaa

SEQ ID NO: 2393113 - RNA, 19 nt, Homo sapiens
  misc_RNA (1)...(19): siRNA sense strand
uugaauaaagggaaagcaa

SEQ ID NO: 2393114 - RNA, 19 nt, Homo sapiens
  misc_RNA (1)...(19): siRNA sense strand
cuucagaggucgagcaaag

SEQ ID NO: 2393115 - RNA, 19 nt, Homo sapiens
  misc_RNA (1)...(19): siRNA sense strand
ccauggauuuauuggaaga

SEQ ID NO: 2393116 - RNA, 19 nt, Homo sapiens
  misc_RNA (1)...(19): siRNA sense strand
ggacaaugacagccgaaga

SEQ ID NO: 2393117 - RNA, 19 nt, Homo sapiens
  misc_RNA (1)...(19): siRNA sense strand
gaauaaagggaaagcaauc

SEQ ID NO: 2393118 - RNA, 19 nt, Homo sapiens
  misc_RNA (1)...(19): siRNA sense strand
ccuaugaggaacagaauca

SEQ ID NO: 2393119 - RNA, 19 nt, Homo sapiens
  misc_RNA (1)...(19): siRNA sense strand
gcaucuaaguugagcucca

SEQ ID NO: 2393120 - RNA, 19 nt, Homo sapiens
  misc_RNA (1)...(19): siRNA sense strand
aggcaaagagcaaugagua

SEQ ID NO: 2393121 - RNA, 19 nt, Homo sapiens
  misc_RNA (1)...(19): siRNA sense strand
acagaagaacagaagaaau

SEQ ID NO: 2393122 - RNA, 19 nt, Homo sapiens
  misc_RNA (1)...(19): siRNA sense strand
aggcaaagaaugugaugga

SEQ ID NO: 2393123 - RNA, 19 nt, Homo sapiens
  misc_RNA (1)...(19): siRNA sense strand
ggaugaggaugaugaaaau

SEQ ID NO: 2393124 - RNA, 19 nt, Homo sapiens
  misc_RNA (1)...(19): siRNA sense strand
ugacagaguuuguggaccu

SEQ ID NO: 2393125 - RNA, 19 nt, Homo sapiens
  misc_RNA (1)...(19): siRNA sense strand
cauggaagaacuugaagaa

SEQ ID NO: 2393126 - RNA, 19 nt, Homo sapiens
  misc_RNA (1)...(19): siRNA sense strand
gagaguggauagagaccau

SEQ ID NO: 2393127 - RNA, 19 nt, Homo sapiens
  misc_RNA (1)...(19): siRNA sense strand
ggauagagaccauguggga

SEQ ID NO: 2393128 - RNA, 19 nt, Homo sapiens
  misc_RNA (1)...(19): siRNA sense strand
ccuucaacccuauuagaaa

SEQ ID NO: 2393129 - RNA, 19 nt, Homo sapiens
  misc_RNA (1)...(19): siRNA sense strand
agucagauauggaggaaag

SEQ ID NO: 2393130 - RNA, 19 nt, Homo sapiens
  misc_RNA (1)...(19): siRNA sense strand
ggaggaaagcaaagagaag

SEQ ID NO: 2393131 - RNA, 19 nt, Homo sapiens
  misc_RNA (1)...(19): siRNA sense strand
uagaagaaggcaaagggaa

SEQ ID NO: 2393132 - RNA, 19 nt, Homo sapiens
  misc_RNA (1)...(19): siRNA sense strand
cggucauccuggagaacuu

SEQ ID NO: 2393133 - RNA, 19 nt, Homo sapiens
  misc_RNA (1)...(19): siRNA sense strand
gucuggagaagaagagaaa

SEQ ID NO: 2393134 - RNA, 19 nt, Homo sapiens
  misc_RNA (1)...(19): siRNA sense strand
aaagcaaagagaagcuaaa

SEQ ID NO: 2393135 - RNA, 19 nt, Homo sapiens
  misc_RNA (1)...(19): siRNA sense strand
agaaagaacagucuggaga

SEQ ID NO: 2393136 - RNA, 19 nt, Homo sapiens
  misc_RNA (1)...(19): siRNA sense strand
augaaugggaagaugcaua

SEQ ID NO: 2393137 - RNA, 19 nt, Homo sapiens
  misc_RNA (1)...(19): siRNA sense strand
uggucauggugauuggaaa

SEQ ID NO: 2393138 - RNA, 19 nt, Homo sapiens
  misc_RNA (1)...(19): siRNA sense strand
ugaagaaagugcagagccu

SEQ ID NO: 2393139 - RNA, 19 nt, Homo sapiens
  misc_RNA (1)...(19): siRNA sense strand
gcaaagaaugugauggaac

SEQ ID NO: 2393140 - RNA, 19 nt, Homo sapiens
  misc_RNA (1)...(19): siRNA sense strand
uuucaagaaggcuggaaua

SEQ ID NO: 2393141 - RNA, 19 nt, Homo sapiens
  misc_RNA (1)...(19): siRNA sense strand
gcuaaaguggguugcauau

SEQ ID NO: 2393142 - RNA, 19 nt, Homo sapiens
  misc_RNA (1)...(19): siRNA sense strand
agacaaagggaaagauauc

SEQ ID NO: 2393143 - RNA, 19 nt, Homo sapiens
  misc_RNA (1)...(19): siRNA sense strand
uugcagaagagaaagcuaa

SEQ ID NO: 2393144 - RNA, 19 nt, Homo sapiens
  misc_RNA (1)...(19): siRNA sense strand
cuugaagaauccagacaga

SEQ ID NO: 2393145 - RNA, 19 nt, Homo sapiens
  misc_RNA (1)...(19): siRNA sense strand
ccauagaaauaggcaaaga

SEQ ID NO: 2393146 - RNA, 19 nt, Homo sapiens
  misc_RNA (1)...(19): siRNA sense strand
gaacaggaaagaaggggaa

SEQ ID NO: 2393147 - RNA, 19 nt, Homo sapiens
  misc_RNA (1)...(19): siRNA sense strand
cuggaugaauauaaagaca

SEQ ID NO: 2393148 - RNA, 19 nt, Homo sapiens
  misc_RNA (1)...(19): siRNA sense strand
uuaucaagcagcugguuaa

SEQ ID NO: 2393149 - RNA, 19 nt, Homo sapiens
  misc_RNA (1)...(19): siRNA sense strand
cuguaaggauauaguuuca

SEQ ID NO: 2393150 - RNA, 19 nt, Homo sapiens
  misc_RNA (1)...(19): siRNA sense strand
cuacguuaucugagacaau

SEQ ID NO: 2393151 - RNA, 19 nt, Homo sapiens
  misc_RNA (1)...(19): siRNA sense strand
aagaaagggccaauguaau

SEQ ID NO: 2393152 - RNA, 19 nt, Homo sapiens
  misc_RNA (1)...(19): siRNA sense strand
aaagcauaguggaggacuu

SEQ ID NO: 2393153 - RNA, 19 nt, Homo sapiens
  misc_RNA (1)...(19): siRNA sense strand
gguuaagagaugggcagaa

SEQ ID NO: 2393154 - RNA, 19 nt, Homo sapiens
  misc_RNA (1)...(19): siRNA sense strand
ccagagaggucaugaggug

SEQ ID NO: 2393155 - RNA, 19 nt, Homo sapiens
  misc_RNA (1)...(19): siRNA sense strand
ugaagaaacuacaggaguc

SEQ ID NO: 2393156 - RNA, 19 nt, Homo sapiens
  misc_RNA (1)...(19): siRNA sense strand
aagaaggggaaaagagauu

SEQ ID NO: 2393157 - RNA, 19 nt, Homo sapiens
  misc_RNA (1)...(19): siRNA sense strand
cuguguggcaacugugaua

SEQ ID NO: 2393158 - RNA, 19 nt, Homo sapiens
  misc_RNA (1)...(19): siRNA sense strand
aggaaauggaagaguuugu

SEQ ID NO: 2393159 - RNA, 19 nt, Homo sapiens
  misc_RNA (1)...(19): siRNA sense strand
uguggagauuugaugggaa

SEQ ID NO: 2393160 - RNA, 19 nt, Homo sapiens
  misc_RNA (1)...(19): siRNA sense strand
uugcacacaugaaggccaa

SEQ ID NO: 2393161 - RNA, 19 nt, Homo sapiens
  misc_RNA (1)...(19): siRNA sense strand
ugaaaagcauaguggagga

SEQ ID NO: 2393162 - RNA, 19 nt, Homo sapiens
  misc_RNA (1)...(19): siRNA sense strand
acuuucauagagaggguaa

SEQ ID NO: 2393163 - RNA, 19 nt, Homo sapiens
  misc_RNA (1)...(19): siRNA sense strand
gaaggggaaaagagauuaa

SEQ ID NO: 2393164 - RNA, 19 nt, Homo sapiens
  misc_RNA (1)...(19): siRNA sense strand
gcaaaggagccguggaaaa

SEQ ID NO: 2393165 - RNA, 19 nt, Homo sapiens
  misc_RNA (1)...(19): siRNA sense strand
cuauucaaguauugggaaa

SEQ ID NO: 2393166 - RNA, 19 nt, Homo sapiens
  misc_RNA (1)...(19): siRNA sense strand
augcaggaaucuagguaaa

SEQ ID NO: 2393167 - RNA, 19 nt, Homo sapiens
  misc_RNA (1)...(19): siRNA sense strand
ucuuaaaagcugaaggaaa

SEQ ID NO: 2393168 - RNA, 19 nt, Homo sapiens
  misc_RNA (1)...(19): siRNA sense strand
uaugaaacccagaggaaau

SEQ ID NO: 2393169 - RNA, 19 nt, Homo sapiens
  misc_RNA (1)...(19): siRNA sense strand
gcgcaaaggagccguggaa

SEQ ID NO: 2393170 - RNA, 19 nt, Homo sapiens
  misc_RNA (1)...(19): siRNA sense strand
acacacaauuaauggagaa

SEQ ID NO: 2393171 - RNA, 19 nt, Homo sapiens
  misc_RNA (1)...(19): siRNA sense strand
cugccuuguugaugggaaa

SEQ ID NO: 2393172 - RNA, 19 nt, Homo sapiens
  misc_RNA (1)...(19): siRNA sense strand
guucauacaaagacugaua

SEQ ID NO: 2393173 - RNA, 19 nt, Homo sapiens
  misc_RNA (1)...(19): siRNA sense strand
ucucauugcugcaggaaaa

SEQ ID NO: 2393174 - RNA, 19 nt, Homo sapiens
  misc_RNA (1)...(19): siRNA sense strand
uggaacagcuggaaaguca

SEQ ID NO: 2393175 - RNA, 19 nt, Homo sapiens
  misc_RNA (1)...(19): siRNA sense strand
gagcagaacaccaggucau

SEQ ID NO: 2393176 - RNA, 19 nt, Homo sapiens
  misc_RNA (1)...(19): siRNA sense strand
agauaaagccaccaaggaa

SEQ ID NO: 2393177 - RNA, 19 nt, Homo sapiens
  misc_RNA (1)...(19): siRNA sense strand
guuccaguguauagguuua

SEQ ID NO: 2393178 - RNA, 19 nt, Homo sapiens
  misc_RNA (1)...(19): siRNA sense strand
gggaaaagccaauaacaau

SEQ ID NO: 2393179 - RNA, 19 nt, Homo sapiens
  misc_RNA (1)...(19): siRNA sense strand
caauuggagugguggacau

SEQ ID NO: 2393180 - RNA, 19 nt, Homo sapiens
  misc_RNA (1)...(19): siRNA sense strand
ccuuaaccaaagagagcaa

SEQ ID NO: 2393181 - RNA, 19 nt, Homo sapiens
  misc_RNA (1)...(19): siRNA sense strand
guauaaauuggcaguggaa

SEQ ID NO: 2393182 - RNA, 19 nt, Homo sapiens
  misc_RNA (1)...(19): siRNA sense strand
aaaugcaacuagaagcaaa

SEQ ID NO: 2393183 - RNA, 19 nt, Homo sapiens
  misc_RNA (1)...(19): siRNA sense strand
aggcauuaccuuaaccaaa

SEQ ID NO: 2393184 - RNA, 19 nt, Homo sapiens
  misc_RNA (1)...(19): siRNA sense strand
uggcauugugaaaguaaua

SEQ ID NO: 2393185 - RNA, 19 nt, Homo sapiens
  misc_RNA (1)...(19): siRNA sense strand
uaacauaaauauuggccca

SEQ ID NO: 2393186 - RNA, 19 nt, Homo sapiens
  misc_RNA (1)...(19): siRNA sense strand
cugccuagcaauucaguaa

SEQ ID NO: 2393187 - RNA, 19 nt, Homo sapiens
  misc_RNA (1)...(19): siRNA sense strand
agagcaagccuucaggaaa

SEQ ID NO: 2393188 - RNA, 19 nt, Homo sapiens
  misc_RNA (1)...(19): siRNA sense strand
caggcagucuauugauaaa

SEQ ID NO: 2393189 - RNA, 19 nt, Homo sapiens
  misc_RNA (1)...(19): siRNA sense strand
uauaugaaacccagaggaa

SEQ ID NO: 2393190 - RNA, 19 nt, Homo sapiens
  misc_RNA (1)...(19): siRNA sense strand
ggaaucauugagagaagaa

SEQ ID NO: 2393191 - RNA, 19 nt, Homo sapiens
  misc_RNA (1)...(19): siRNA sense strand
cgugagauuucaugaagau

SEQ ID NO: 2393192 - RNA, 19 nt, Homo sapiens
  misc_RNA (1)...(19): siRNA sense strand
caaaagaagcuuaugaaca

SEQ ID NO: 2393193 - RNA, 19 nt, Homo sapiens
  misc_RNA (1)...(19): siRNA sense strand
agaaacugaugcuggaaca

SEQ ID NO: 2393194 - RNA, 19 nt, Homo sapiens
  misc_RNA (1)...(19): siRNA sense strand
ugccuuaccugcagcgaaa

SEQ ID NO: 2393195 - RNA, 19 nt, Homo sapiens
  misc_RNA (1)...(19): siRNA sense strand
agaagcaagugcagauaca

SEQ ID NO: 2393196 - RNA, 19 nt, Homo sapiens
  misc_RNA (1)...(19): siRNA sense strand
agcaaauguuccaguguau

SEQ ID NO: 2393197 - RNA, 19 nt, Homo sapiens
  misc_RNA (1)...(19): siRNA sense strand
ucuaagaacucugaagcaa

SEQ ID NO: 2393198 - RNA, 19 nt, Homo sapiens
  misc_RNA (1)...(19): siRNA sense strand
ucuuuggguucgugagauu

SEQ ID NO: 2393199 - RNA, 19 nt, Homo sapiens
  misc_RNA (1)...(19): siRNA sense strand
uugcaaagugugaagucaa

SEQ ID NO: 2393200 - RNA, 19 nt, Homo sapiens
  misc_RNA (1)...(19): siRNA sense strand
aguaaaagcaacugucuua

SEQ ID NO: 2393201 - RNA, 19 nt, Homo sapiens
  misc_RNA (1)...(19): siRNA sense strand
uuuaaauccagcacagaaa

SEQ ID NO: 2393202 - RNA, 19 nt, Homo sapiens
  misc_RNA (1)...(19): siRNA sense strand
acaaugaacauaugguaga

SEQ ID NO: 2393203 - RNA, 19 nt, Homo sapiens
  misc_RNA (1)...(19): siRNA sense strand
caggaaucauugagagaag

SEQ ID NO: 2393204 - RNA, 19 nt, Homo sapiens
  misc_RNA (1)...(19): siRNA sense strand
cgguacgaauggaacaaau

SEQ ID NO: 2393205 - RNA, 19 nt, Homo sapiens
  misc_RNA (1)...(19): siRNA sense strand
cuacauaguacauugccaa

SEQ ID NO: 2393206 - RNA, 19 nt, Homo sapiens
  misc_RNA (1)...(19): siRNA sense strand
gugaugaggaaaagaaaau

SEQ ID NO: 2393207 - RNA, 19 nt, Homo sapiens
  misc_RNA (1)...(19): siRNA sense strand
caggcacacuggagagaca

SEQ ID NO: 2393208 - RNA, 19 nt, Homo sapiens
  misc_RNA (1)...(19): siRNA sense strand
gagcagacaaccacaaaca

SEQ ID NO: 2393209 - RNA, 19 nt, Homo sapiens
  misc_RNA (1)...(19): siRNA sense strand
ggagaagggauggaagaau

SEQ ID NO: 2393210 - RNA, 19 nt, Homo sapiens
  misc_RNA (1)...(19): siRNA sense strand
ggauaaauguccaccucca

SEQ ID NO: 2393211 - RNA, 19 nt, Homo sapiens
  misc_RNA (1)...(19): siRNA sense strand
caauaguacccaugguuca

SEQ ID NO: 2393212 - RNA, 19 nt, Homo sapiens
  misc_RNA (1)...(19): siRNA sense strand
cuaagaacucugaagcaau

SEQ ID NO: 2393213 - RNA, 19 nt, Homo sapiens
  misc_RNA (1)...(19): siRNA sense strand
ccgcgcaaauagaaauaau

SEQ ID NO: 2393214 - RNA, 19 nt, Homo sapiens
  misc_RNA (1)...(19): siRNA sense strand
aagcuaugcuauucaguau

SEQ ID NO: 2393215 - RNA, 19 nt, Homo sapiens
  misc_RNA (1)...(19): siRNA sense strand
ccaauaacaauguggguac

SEQ ID NO: 2393216 - RNA, 19 nt, Homo sapiens
  misc_RNA (1)...(19): siRNA sense strand
ucucagagccccaugaaaa

SEQ ID NO: 2393217 - RNA, 19 nt, Homo sapiens
  misc_RNA (1)...(19): siRNA sense strand
ccuggaauauggcacgaaa

SEQ ID NO: 2393218 - RNA, 19 nt, Homo sapiens
  misc_RNA (1)...(19): siRNA sense strand
gaugcaagucuaugaccaa

SEQ ID NO: 2393219 - RNA, 19 nt, Homo sapiens
  misc_RNA (1)...(19): siRNA sense strand
aggaaauaucauucugcaa

SEQ ID NO: 2393220 - RNA, 19 nt, Homo sapiens
  misc_RNA (1)...(19): siRNA sense strand
uggaauuccuaaugggcca

SEQ ID NO: 2393221 - RNA, 19 nt, Homo sapiens
  misc_RNA (1)...(19): siRNA sense strand
ugucguaucagcaggaaau

SEQ ID NO: 2393222 - RNA, 19 nt, Homo sapiens
  misc_RNA (1)...(19): siRNA sense strand
ccaagauugugcacgaaaa

SEQ ID NO: 2393223 - RNA, 19 nt, Homo sapiens
  misc_RNA (1)...(19): siRNA sense strand
caaagugaacacagacuau

SEQ ID NO: 2393224 - RNA, 19 nt, Homo sapiens
  misc_RNA (1)...(19): siRNA sense strand
aauuacagcauuuggaaca

SEQ ID NO: 2393225 - RNA, 19 nt, Homo sapiens
  misc_RNA (1)...(19): siRNA sense strand
ggaagaaacuggaggaagc

SEQ ID NO: 2393226 - RNA, 19 nt, Homo sapiens
  misc_RNA (1)...(19): siRNA sense strand
aagaggaacuggagcgaca

SEQ ID NO: 2393227 - RNA, 19 nt, Homo sapiens
  misc_RNA (1)...(19): siRNA sense strand
ccggcaagaugaagagaca

SEQ ID NO: 2393228 - RNA, 19 nt, Homo sapiens
  misc_RNA (1)...(19): siRNA sense strand
uugaagagagagagaagaa

SEQ ID NO: 2393229 - RNA, 19 nt, Homo sapiens
  misc_RNA (1)...(19): siRNA sense strand
augaagagacagugcggaa

SEQ ID NO: 2393230 - RNA, 19 nt, Homo sapiens
  misc_RNA (1)...(19): siRNA sense strand
ccagguuguuggaggaaga

SEQ ID NO: 2393231 - RNA, 19 nt, Homo sapiens
  misc_RNA (1)...(19): siRNA sense strand
accaagagcuggaaggaca

SEQ ID NO: 2393232 - RNA, 19 nt, Homo sapiens
  misc_RNA (1)...(19): siRNA sense strand
gcucauuacagaagaagau

SEQ ID NO: 2393233 - RNA, 19 nt, Homo sapiens
  misc_RNA (1)...(19): siRNA sense strand
agaagaaacaggaguggau

SEQ ID NO: 2393234 - RNA, 19 nt, Homo sapiens
  misc_RNA (1)...(19): siRNA sense strand
agugaggaucugaaggaua

SEQ ID NO: 2393235 - RNA, 19 nt, Homo sapiens
  misc_RNA (1)...(19): siRNA sense strand
cuggaaagagagaagcuua

SEQ ID NO: 2393236 - RNA, 19 nt, Homo sapiens
  misc_RNA (1)...(19): siRNA sense strand
cagcagaagaggaaaagaa

SEQ ID NO: 2393237 - RNA, 19 nt, Homo sapiens
  misc_RNA (1)...(19): siRNA sense strand
ccuucagacucaaguggaa

SEQ ID NO: 2393238 - RNA, 19 nt, Homo sapiens
  misc_RNA (1)...(19): siRNA sense strand
gugcagcagaagaggaaaa

SEQ ID NO: 2393239 - RNA, 19 nt, Homo sapiens
  misc_RNA (1)...(19): siRNA sense strand
ggaucugaaggauaagaaa

SEQ ID NO: 2393240 - RNA, 19 nt, Homo sapiens
  misc_RNA (1)...(19): siRNA sense strand
uggaaagagagaagcuuau

SEQ ID NO: 2393241 - RNA, 19 nt, Homo sapiens
  misc_RNA (1)...(19): siRNA sense strand
agcaggaguuggagaauca

SEQ ID NO: 2393242 - RNA, 19 nt, Homo sapiens
  misc_RNA (1)...(19): siRNA sense strand
gcaacuaauaagaccaaga

SEQ ID NO: 2393243 - RNA, 19 nt, Homo sapiens
  misc_RNA (1)...(19): siRNA sense strand
agaagcaggaguuggagaa

SEQ ID NO: 2393244 - RNA, 19 nt, Homo sapiens
  misc_RNA (1)...(19): siRNA sense strand
cagaacuugaagagagaga

SEQ ID NO: 2393245 - RNA, 19 nt, Homo sapiens
  misc_RNA (1)...(19): siRNA sense strand
ccaagagcuggaaggacaa

SEQ ID NO: 2393246 - RNA, 19 nt, Homo sapiens
  misc_RNA (1)...(19): siRNA sense strand
uuacagaagaagaugcauu

SEQ ID NO: 2393247 - RNA, 19 nt, Homo sapiens
  misc_RNA (1)...(19): siRNA sense strand
cggagaagcaggaguugga

SEQ ID NO: 2393248 - RNA, 19 nt, Homo sapiens
  misc_RNA (1)...(19): siRNA sense strand
agauugaauaccugcuuaa

SEQ ID NO: 2393249 - RNA, 19 nt, Homo sapiens
  misc_RNA (1)...(19): siRNA sense strand
guguagaguccuugccuga

SEQ ID NO: 2393250 - RNA, 19 nt, Homo sapiens
  misc_RNA (1)...(19): siRNA sense strand
agacaaccgaggcggagaa

SEQ ID NO: 2393251 - RNA, 19 nt, Homo sapiens
  misc_RNA (1)...(19): siRNA sense strand
uggcugaacaagaggaacu

SEQ ID NO: 2393252 - RNA, 19 nt, Homo sapiens
  misc_RNA (1)...(19): siRNA sense strand
ggaacaguauuuacagcga

SEQ ID NO: 2393253 - RNA, 19 nt, Homo sapiens
  misc_RNA (1)...(19): siRNA sense strand
aggcagaacuugaagagag

SEQ ID NO: 2393254 - RNA, 19 nt, Homo sapiens
  misc_RNA (1)...(19): siRNA sense strand
agaagaacuggaaagagaa

SEQ ID NO: 2393255 - RNA, 19 nt, Homo sapiens
  misc_RNA (1)...(19): siRNA sense strand
auguguuaaagcaggguua

SEQ ID NO: 2393256 - RNA, 19 nt, Homo sapiens
  misc_RNA (1)...(19): siRNA sense strand
gacaaagauggaaagaaau

SEQ ID NO: 2393257 - RNA, 19 nt, Homo sapiens
  misc_RNA (1)...(19): siRNA sense strand
gcggaagaaacuggaggaa

SEQ ID NO: 2393258 - RNA, 19 nt, Homo sapiens
  misc_RNA (1)...(19): siRNA sense strand
uggaagaacagguugcuca

SEQ ID NO: 2393259 - RNA, 19 nt, Homo sapiens
  misc_RNA (1)...(19): siRNA sense strand
gaguacgggagcuggaaga

SEQ ID NO: 2393260 - RNA, 19 nt, Homo sapiens
  misc_RNA (1)...(19): siRNA sense strand
cuggaagacauguaccuaa

SEQ ID NO: 2393261 - RNA, 19 nt, Homo sapiens
  misc_RNA (1)...(19): siRNA sense strand
ggcaagaugaagagacagu

SEQ ID NO: 2393262 - RNA, 19 nt, Homo sapiens
  misc_RNA (1)...(19): siRNA sense strand
aagacaacuuugacaagau

SEQ ID NO: 2393263 - RNA, 19 nt, Homo sapiens
  misc_RNA (1)...(19): siRNA sense strand
gcaaaggcauggaccggca

SEQ ID NO: 2393264 - RNA, 19 nt, Homo sapiens
  misc_RNA (1)...(19): siRNA sense strand
ucagauaagaagaagaaac

SEQ ID NO: 2393265 - RNA, 19 nt, Homo sapiens
  misc_RNA (1)...(19): siRNA sense strand
gauuaauucgacugauaga

SEQ ID NO: 2393266 - RNA, 19 nt, Homo sapiens
  misc_RNA (1)...(19): siRNA sense strand
gagagagaagaacuggaaa

SEQ ID NO: 2393267 - RNA, 19 nt, Homo sapiens
  misc_RNA (1)...(19): siRNA sense strand
ccauggagcagcuggagga

SEQ ID NO: 2393268 - RNA, 19 nt, Homo sapiens
  misc_RNA (1)...(19): siRNA sense strand
ggaaggacaaaguggccca

SEQ ID NO: 2393269 - RNA, 19 nt, Homo sapiens
  misc_RNA (1)...(19): siRNA sense strand
gagaagcaggaguuggaga

SEQ ID NO: 2393270 - RNA, 19 nt, Homo sapiens
  misc_RNA (1)...(19): siRNA sense strand
aggacaaaguggcccauca

SEQ ID NO: 2393271 - RNA, 19 nt, Homo sapiens
  misc_RNA (1)...(19): siRNA sense strand
agagagaagaacuggaaag

SEQ ID NO: 2393272 - RNA, 19 nt, Homo sapiens
  misc_RNA (1)...(19): siRNA sense strand
ggaaaagguccaagacaac

SEQ ID NO: 2393273 - RNA, 19 nt, Homo sapiens
  misc_RNA (1)...(19): siRNA sense strand
gaggaacuggagcgacaaa

SEQ ID NO: 2393274 - RNA, 19 nt, Homo sapiens
  misc_RNA (1)...(19): siRNA sense strand
aggccagguuguuggagga

SEQ ID NO: 2393275 - RNA, 19 nt, Homo sapiens
  misc_RNA (1)...(19): siRNA sense strand
gaguaaagccaaugaagaa

SEQ ID NO: 2393276 - RNA, 19 nt, Homo sapiens
  misc_RNA (1)...(19): siRNA sense strand
aaagaaagagugugagaaa

SEQ ID NO: 2393277 - RNA, 19 nt, Homo sapiens
  misc_RNA (1)...(19): siRNA sense strand
gaauguuaguucugggaaa

SEQ ID NO: 2393278 - RNA, 19 nt, Homo sapiens
  misc_RNA (1)...(19): siRNA sense strand
uagaagcacuugagggaaa

SEQ ID NO: 2393279 - RNA, 19 nt, Homo sapiens
  misc_RNA (1)...(19): siRNA sense strand
ggucaagaggcaagacaaa

SEQ ID NO: 2393280 - RNA, 19 nt, Homo sapiens
  misc_RNA (1)...(19): siRNA sense strand
gcaaauuagcagaguguau

SEQ ID NO: 2393281 - RNA, 19 nt, Homo sapiens
  misc_RNA (1)...(19): siRNA sense strand
ccgauaugcugguggacaa

SEQ ID NO: 2393282 - RNA, 19 nt, Homo sapiens
  misc_RNA (1)...(19): siRNA sense strand
aggagaagauggagaauca

SEQ ID NO: 2393283 - RNA, 19 nt, Homo sapiens
  misc_RNA (1)...(19): siRNA sense strand
agauggaaguggagaaaga

SEQ ID NO: 2393284 - RNA, 19 nt, Homo sapiens
  misc_RNA (1)...(19): siRNA sense strand
uugaagagccagagagcaa

SEQ ID NO: 2393285 - RNA, 19 nt, Homo sapiens
  misc_RNA (1)...(19): siRNA sense strand
gagaaaggagacuggaaua

SEQ ID NO: 2393286 - RNA, 19 nt, Homo sapiens
  misc_RNA (1)...(19): siRNA sense strand
cagcaaauggaaagauaua

SEQ ID NO: 2393287 - RNA, 19 nt, Homo sapiens
  misc_RNA (1)...(19): siRNA sense strand
guuuggagguagaggagaa

SEQ ID NO: 2393288 - RNA, 19 nt, Homo sapiens
  misc_RNA (1)...(19): siRNA sense strand
aguaggaggaccagagaaa

SEQ ID NO: 2393289 - RNA, 19 nt, Homo sapiens
  misc_RNA (1)...(19): siRNA sense strand
gcacaaagauggaagugga

SEQ ID NO: 2393290 - RNA, 19 nt, Homo sapiens
  misc_RNA (1)...(19): siRNA sense strand
agaagaagaccuugaaauu

SEQ ID NO: 2393291 - RNA, 19 nt, Homo sapiens
  misc_RNA (1)...(19): siRNA sense strand
gggagaaacaggaaggaca

SEQ ID NO: 2393292 - RNA, 19 nt, Homo sapiens
  misc_RNA (1)...(19): siRNA sense strand
ccuuaaugagauuggaaua

SEQ ID NO: 2393293 - RNA, 19 nt, Homo sapiens
  misc_RNA (1)...(19): siRNA sense strand
ccuauaaggaguaguuuaa

SEQ ID NO: 2393294 - RNA, 19 nt, Homo sapiens
  misc_RNA (1)...(19): siRNA sense strand
ugugaucgcuguagagaaa

SEQ ID NO: 2393295 - RNA, 19 nt, Homo sapiens
  misc_RNA (1)...(19): siRNA sense strand
cagcacacguaaagcauaa

SEQ ID NO: 2393296 - RNA, 19 nt, Homo sapiens
  misc_RNA (1)...(19): siRNA sense strand
guacagaggaagagacuca

SEQ ID NO: 2393297 - RNA, 19 nt, Homo sapiens
  misc_RNA (1)...(19): siRNA sense strand
cagccagagugaagagaau

SEQ ID NO: 2393298 - RNA, 19 nt, Homo sapiens
  misc_RNA (1)...(19): siRNA sense strand
uggcaaagcaguagaagau

SEQ ID NO: 2393299 - RNA, 19 nt, Homo sapiens
  misc_RNA (1)...(19): siRNA sense strand
guagaagauuugugcagaa

SEQ ID NO: 2393300 - RNA, 19 nt, Homo sapiens
  misc_RNA (1)...(19): siRNA sense strand
ggacaguguggacgagaua

SEQ ID NO: 2393301 - RNA, 19 nt, Homo sapiens
  misc_RNA (1)...(19): siRNA sense strand
gaacaggaaaugagagcau

SEQ ID NO: 2393302 - RNA, 19 nt, Homo sapiens
  misc_RNA (1)...(19): siRNA sense strand
gugaauaaccacagcauga

SEQ ID NO: 2393303 - RNA, 19 nt, Homo sapiens
  misc_RNA (1)...(19): siRNA sense strand
aagaaaagcuacuuggaua

SEQ ID NO: 2393304 - RNA, 19 nt, Homo sapiens
  misc_RNA (1)...(19): siRNA sense strand
aagcaguaaugaagguuua

SEQ ID NO: 2393305 - RNA, 19 nt, Homo sapiens
  misc_RNA (1)...(19): siRNA sense strand
ugaaagaugaacaggaaau

SEQ ID NO: 2393306 - RNA, 19 nt, Homo sapiens
  misc_RNA (1)...(19): siRNA sense strand
agaagaagaagaagcuaua

SEQ ID NO: 2393307 - RNA, 19 nt, Homo sapiens
  misc_RNA (1)...(19): siRNA sense strand
ggguuaacauugaagaaca

SEQ ID NO: 2393308 - RNA, 19 nt, Homo sapiens
  misc_RNA (1)...(19): siRNA sense strand
auucagaacaagagaaaga

SEQ ID NO: 2393309 - RNA, 19 nt, Homo sapiens
  misc_RNA (1)...(19): siRNA sense strand
gggcaaaggaguuacaaca

SEQ ID NO: 2393310 - RNA, 19 nt, Homo sapiens
  misc_RNA (1)...(19): siRNA sense strand
caaagauggaaguggagaa

SEQ ID NO: 2393311 - RNA, 19 nt, Homo sapiens
  misc_RNA (1)...(19): siRNA sense strand
ucaugaagguugugguaga

SEQ ID NO: 2393312 - RNA, 19 nt, Homo sapiens
  misc_RNA (1)...(19): siRNA sense strand
ggacaauucccgagaucuu

SEQ ID NO: 2393313 - RNA, 19 nt, Homo sapiens
  misc_RNA (1)...(19): siRNA sense strand
cugaaacacuggagcaaga

SEQ ID NO: 2393314 - RNA, 19 nt, Homo sapiens
  misc_RNA (1)...(19): siRNA sense strand
caagagaguuagaugguca

SEQ ID NO: 2393315 - RNA, 19 nt, Homo sapiens
  misc_RNA (1)...(19): siRNA sense strand
ggcaagacaaagaggaauu

SEQ ID NO: 2393316 - RNA, 19 nt, Homo sapiens
  misc_RNA (1)...(19): siRNA sense strand
cgaaaaggaugcaagcaaa

SEQ ID NO: 2393317 - RNA, 19 nt, Homo sapiens
  misc_RNA (1)...(19): siRNA sense strand
acuccuagauuuagagaga

SEQ ID NO: 2393318 - RNA, 19 nt, Homo sapiens
  misc_RNA (1)...(19): siRNA sense strand
ugaccaagauggaagaaga

SEQ ID NO: 2393319 - RNA, 19 nt, Homo sapiens
  misc_RNA (1)...(19): siRNA sense strand
ccgagaacacacaggcaaa

SEQ ID NO: 2393320 - RNA, 19 nt, Homo sapiens
  misc_RNA (1)...(19): siRNA sense strand
caggaguggaacagaguua

SEQ ID NO: 2393321 - RNA, 19 nt, Homo sapiens
  misc_RNA (1)...(19): siRNA sense strand
acaagaagcaagucugaaa

SEQ ID NO: 2393322 - RNA, 19 nt, Homo sapiens
  misc_RNA (1)...(19): siRNA sense strand
ggagugaauuugauggaga

SEQ ID NO: 2393323 - RNA, 19 nt, Homo sapiens
  misc_RNA (1)...(19): siRNA sense strand
ccuaagagacccagugaga

SEQ ID NO: 2393324 - RNA, 19 nt, Homo sapiens
  misc_RNA (1)...(19): siRNA sense strand
cagaggaagaagaggauga

SEQ ID NO: 2393325 - RNA, 19 nt, Homo sapiens
  misc_RNA (1)...(19): siRNA sense strand
aggaagaagaggaugaaga

SEQ ID NO: 2393326 - RNA, 19 nt, Homo sapiens
  misc_RNA (1)...(19): siRNA sense strand
aagaagaggaugaagaaaa

SEQ ID NO: 2393327 - RNA, 19 nt, Homo sapiens
  misc_RNA (1)...(19): siRNA sense strand
cagcaucauaggagugaaa

SEQ ID NO: 2393328 - RNA, 19 nt, Homo sapiens
  misc_RNA (1)...(19): siRNA sense strand
caguggaaccagaggaaga

SEQ ID NO: 2393329 - RNA, 19 nt, Homo sapiens
  misc_RNA (1)...(19): siRNA sense strand
guauauacagccugcaaua

SEQ ID NO: 2393330 - RNA, 19 nt, Homo sapiens
  misc_RNA (1)...(19): siRNA sense strand
acugaaagaugaacaggaa

SEQ ID NO: 2393331 - RNA, 19 nt, Homo sapiens
  misc_RNA (1)...(19): siRNA sense strand
ugugagaaaggaaggaaua

SEQ ID NO: 2393332 - RNA, 19 nt, Homo sapiens
  misc_RNA (1)...(19): siRNA sense strand
cgucucaaguauuuggaaa

SEQ ID NO: 2393333 - RNA, 19 nt, Homo sapiens
  misc_RNA (1)...(19): siRNA sense strand
augaagaccuggaagaaga

SEQ ID NO: 2393334 - RNA, 19 nt, Homo sapiens
  misc_RNA (1)...(19): siRNA sense strand
aauuagagguguugguuga

SEQ ID NO: 2393335 - RNA, 19 nt, Homo sapiens
  misc_RNA (1)...(19): siRNA sense strand
aaucaggagaugaagauaa

SEQ ID NO: 2393336 - RNA, 19 nt, Homo sapiens
  misc_RNA (1)...(19): siRNA sense strand
gcauggugaaauuggauaa

SEQ ID NO: 2393337 - RNA, 19 nt, Homo sapiens
  misc_RNA (1)...(19): siRNA sense strand
gguugaugauagugaacau

SEQ ID NO: 2393338 - RNA, 19 nt, Homo sapiens
  misc_RNA (1)...(19): siRNA sense strand
caucagauuaugugaaaga

SEQ ID NO: 2393339 - RNA, 19 nt, Homo sapiens
  misc_RNA (1)...(19): siRNA sense strand
gcgauagugaagagaguuu

SEQ ID NO: 2393340 - RNA, 19 nt, Homo sapiens
  misc_RNA (1)...(19): siRNA sense strand
caccagaacaagaggaaaa

SEQ ID NO: 2393341 - RNA, 19 nt, Homo sapiens
  misc_RNA (1)...(19): siRNA sense strand
ggauacaguggaacaguua

SEQ ID NO: 2393342 - RNA, 19 nt, Homo sapiens
  misc_RNA (1)...(19): siRNA sense strand
gaggcaagacaaagaggaa

SEQ ID NO: 2393343 - RNA, 19 nt, Homo sapiens
  misc_RNA (1)...(19): siRNA sense strand
uaagagacccagugagaau

SEQ ID NO: 2393344 - RNA, 19 nt, Homo sapiens
  misc_RNA (1)...(19): siRNA sense strand
gcaugaaggcauaguacau

SEQ ID NO: 2393345 - RNA, 19 nt, Homo sapiens
  misc_RNA (1)...(19): siRNA sense strand
gggauaaucacaucauaaa

SEQ ID NO: 2393346 - RNA, 19 nt, Homo sapiens
  misc_RNA (1)...(19): siRNA sense strand
caugacagccauaaggaua

SEQ ID NO: 2393347 - RNA, 19 nt, Homo sapiens
  misc_RNA (1)...(19): siRNA sense strand
gcgaaaaggaugcaagcaa

SEQ ID NO: 2393348 - RNA, 19 nt, Homo sapiens
  misc_RNA (1)...(19): siRNA sense strand
cuauggaggagguggaauu

SEQ ID NO: 2393349 - RNA, 19 nt, Homo sapiens
  misc_RNA (1)...(19): siRNA sense strand
caacaaugcaagaacaaga

SEQ ID NO: 2393350 - RNA, 19 nt, Homo sapiens
  misc_RNA (1)...(19): siRNA sense strand
cugcaagggagaaggucaa

SEQ ID NO: 2393351 - RNA, 19 nt, Homo sapiens
  misc_RNA (1)...(19): siRNA sense strand
acagaaaccuuuugggaau

SEQ ID NO: 2393352 - RNA, 19 nt, Homo sapiens
  misc_RNA (1)...(19): siRNA sense strand
caucaguggcagagaguaa

SEQ ID NO: 2393353 - RNA, 19 nt, Homo sapiens
  misc_RNA (1)...(19): siRNA sense strand
acaaauagauguaggcaga

SEQ ID NO: 2393354 - RNA, 19 nt, Homo sapiens
  misc_RNA (1)...(19): siRNA sense strand
acgaagauuuggagcgcaa

SEQ ID NO: 2393355 - RNA, 19 nt, Homo sapiens
  misc_RNA (1)...(19): siRNA sense strand
uagcagagggagagaacaa

SEQ ID NO: 2393356 - RNA, 19 nt, Homo sapiens
  misc_RNA (1)...(19): siRNA sense strand
aagcaaacgaagaacaaua

SEQ ID NO: 2393357 - RNA, 19 nt, Homo sapiens
  misc_RNA (1)...(19): siRNA sense strand
gcauauaugaugagggugu

SEQ ID NO: 2393358 - RNA, 19 nt, Homo sapiens
  misc_RNA (1)...(19): siRNA sense strand
gcagugaagcugaggaaca

SEQ ID NO: 2393359 - RNA, 19 nt, Homo sapiens
  misc_RNA (1)...(19): siRNA sense strand
ccuaaggaguggaagccaa

SEQ ID NO: 2393360 - RNA, 19 nt, Homo sapiens
  misc_RNA (1)...(19): siRNA sense strand
ggggagagaaagagacaaa

SEQ ID NO: 2393361 - RNA, 19 nt, Homo sapiens
  misc_RNA (1)...(19): siRNA sense strand
ggaggaggaaaguaagaaa

SEQ ID NO: 2393362 - RNA, 19 nt, Homo sapiens
  misc_RNA (1)...(19): siRNA sense strand
gaaacagagucuugggcga

SEQ ID NO: 2393363 - RNA, 19 nt, Homo sapiens
  misc_RNA (1)...(19): siRNA sense strand
auaucaaacucucaggaaa

SEQ ID NO: 2393364 - RNA, 19 nt, Homo sapiens
  misc_RNA (1)...(19): siRNA sense strand
ccaguauagcagagggaga

SEQ ID NO: 2393365 - RNA, 19 nt, Homo sapiens
  misc_RNA (1)...(19): siRNA sense strand
ggaggaaguggaagaaaca

SEQ ID NO: 2393366 - RNA, 19 nt, Homo sapiens
  misc_RNA (1)...(19): siRNA sense strand
gcaggaaagacauggugaa

SEQ ID NO: 2393367 - RNA, 19 nt, Homo sapiens
  misc_RNA (1)...(19): siRNA sense strand
uggauaucuuugugaggaa

SEQ ID NO: 2393368 - RNA, 19 nt, Homo sapiens
  misc_RNA (1)...(19): siRNA sense strand
agauagcaaugaagagaga

SEQ ID NO: 2393369 - RNA, 19 nt, Homo sapiens
  misc_RNA (1)...(19): siRNA sense strand
caaugaagagagaggacau

SEQ ID NO: 2393370 - RNA, 19 nt, Homo sapiens
  misc_RNA (1)...(19): siRNA sense strand
caucggagggaaagacuaa

SEQ ID NO: 2393371 - RNA, 19 nt, Homo sapiens
  misc_RNA (1)...(19): siRNA sense strand
gagaagucguccaagucaa

SEQ ID NO: 2393372 - RNA, 19 nt, Homo sapiens
  misc_RNA (1)...(19): siRNA sense strand
aggaagaggaagugucaga

SEQ ID NO: 2393373 - RNA, 19 nt, Homo sapiens
  misc_RNA (1)...(19): siRNA sense strand
ugaagaagaguguggcauu

SEQ ID NO: 2393374 - RNA, 19 nt, Homo sapiens
  misc_RNA (1)...(19): siRNA sense strand
cugcagaggaggaggaaag

SEQ ID NO: 2393375 - RNA, 19 nt, Homo sapiens
  misc_RNA (1)...(19): siRNA sense strand
cagagggagaagagaguga

SEQ ID NO: 2393376 - RNA, 19 nt, Homo sapiens
  misc_RNA (1)...(19): siRNA sense strand
ucguuacaucggagggaaa

SEQ ID NO: 2393377 - RNA, 19 nt, Homo sapiens
  misc_RNA (1)...(19): siRNA sense strand
ccaucaguauugaagaaau

SEQ ID NO: 2393378 - RNA, 19 nt, Homo sapiens
  misc_RNA (1)...(19): siRNA sense strand
uggaugugguugaagaaga

SEQ ID NO: 2393379 - RNA, 19 nt, Homo sapiens
  misc_RNA (1)...(19): siRNA sense strand
uggaaaacgacuugaaaga

SEQ ID NO: 2393380 - RNA, 19 nt, Homo sapiens
  misc_RNA (1)...(19): siRNA sense strand
guguguuaacagagggaga

SEQ ID NO: 2393381 - RNA, 19 nt, Homo sapiens
  misc_RNA (1)...(19): siRNA sense strand
uauuacaguugcagaguga

SEQ ID NO: 2393382 - RNA, 19 nt, Homo sapiens
  misc_RNA (1)...(19): siRNA sense strand
gagcauauaugaugagggu

SEQ ID NO: 2393383 - RNA, 19 nt, Homo sapiens
  misc_RNA (1)...(19): siRNA sense strand
uggaaacaaggaaaggaua

SEQ ID NO: 2393384 - RNA, 19 nt, Homo sapiens
  misc_RNA (1)...(19): siRNA sense strand
cugaugaggaagaggaagu

SEQ ID NO: 2393385 - RNA, 19 nt, Homo sapiens
  misc_RNA (1)...(19): siRNA sense strand
augacaaagcuuaugcaua

SEQ ID NO: 2393386 - RNA, 19 nt, Homo sapiens
  misc_RNA (1)...(19): siRNA sense strand
cccaguggagagagaaaua

SEQ ID NO: 2393387 - RNA, 19 nt, Homo sapiens
  misc_RNA (1)...(19): siRNA sense strand
cagaaaggacacaaauaga

SEQ ID NO: 2393388 - RNA, 19 nt, Homo sapiens
  misc_RNA (1)...(19): siRNA sense strand
agauagcagcaaugaagaa

SEQ ID NO: 2393389 - RNA, 19 nt, Homo sapiens
  misc_RNA (1)...(19): siRNA sense strand
agagugauguggagagcca

SEQ ID NO: 2393390 - RNA, 19 nt, Homo sapiens
  misc_RNA (1)...(19): siRNA sense strand
auuacaugcuuucgacaua

SEQ ID NO: 2393391 - RNA, 19 nt, Homo sapiens
  misc_RNA (1)...(19): siRNA sense strand
augagaagcccgagaaauc

SEQ ID NO: 2393392 - RNA, 19 nt, Homo sapiens
  misc_RNA (1)...(19): siRNA sense strand
aggaggaaguggaagaaac

SEQ ID NO: 2393393 - RNA, 19 nt, Homo sapiens
  misc_RNA (1)...(19): siRNA sense strand
cccagaaaggacacaaaua

SEQ ID NO: 2393394 - RNA, 19 nt, Homo sapiens
  misc_RNA (1)...(19): siRNA sense strand
ucaaguggcccgauggcaa

SEQ ID NO: 2393395 - RNA, 19 nt, Homo sapiens
  misc_RNA (1)...(19): siRNA sense strand
aauuucagccagacagaua

SEQ ID NO: 2393396 - RNA, 19 nt, Homo sapiens
  misc_RNA (1)...(19): siRNA sense strand
agucagaagcagcagugaa

SEQ ID NO: 2393397 - RNA, 19 nt, Homo sapiens
  misc_RNA (1)...(19): siRNA sense strand
uugaggaggaaguggaaga

SEQ ID NO: 2393398 - RNA, 19 nt, Homo sapiens
  misc_RNA (1)...(19): siRNA sense strand
augcuagaugggagacaaa

SEQ ID NO: 2393399 - RNA, 19 nt, Homo sapiens
  misc_RNA (1)...(19): siRNA sense strand
ccuugaagaggauggaaca

SEQ ID NO: 2393400 - RNA, 19 nt, Homo sapiens
  misc_RNA (1)...(19): siRNA sense strand
agauauuaaugggagcaua

SEQ ID NO: 2393401 - RNA, 19 nt, Homo sapiens
  misc_RNA (1)...(19): siRNA sense strand
aggaaguggaagaaacaga

SEQ ID NO: 2393402 - RNA, 19 nt, Homo sapiens
  misc_RNA (1)...(19): siRNA sense strand
ggguacugauggagccuga

SEQ ID NO: 2393403 - RNA, 19 nt, Homo sapiens
  misc_RNA (1)...(19): siRNA sense strand
cuaugagaagcccgagaaa

SEQ ID NO: 2393404 - RNA, 19 nt, Homo sapiens
  misc_RNA (1)...(19): siRNA sense strand
ggcaaauauuguacuccaa

SEQ ID NO: 2393405 - RNA, 19 nt, Homo sapiens
  misc_RNA (1)...(19): siRNA sense strand
cuccaucaguauugaagaa

SEQ ID NO: 2393406 - RNA, 19 nt, Homo sapiens
  misc_RNA (1)...(19): siRNA sense strand
gauggauugacuauggaaa

SEQ ID NO: 2393407 - RNA, 19 nt, Homo sapiens
  misc_RNA (1)...(19): siRNA sense strand
ggauaucuuugugaggaaa

SEQ ID NO: 2393408 - RNA, 19 nt, Homo sapiens
  misc_RNA (1)...(19): siRNA sense strand
ucaggaaacagcugcuuaa

SEQ ID NO: 2393409 - RNA, 19 nt, Homo sapiens
  misc_RNA (1)...(19): siRNA sense strand
cgccaagugaugaagaauu

SEQ ID NO: 2393410 - RNA, 19 nt, Homo sapiens
  misc_RNA (1)...(19): siRNA sense strand
agaagugccagaagagaca

SEQ ID NO: 2393411 - RNA, 19 nt, Homo sapiens
  misc_RNA (1)...(19): siRNA sense strand
ugaagagagaggacaucua

SEQ ID NO: 2393412 - RNA, 19 nt, Homo sapiens
  misc_RNA (1)...(19): siRNA sense strand
augaugaggguguggauga

SEQ ID NO: 2393413 - RNA, 19 nt, Homo sapiens
  misc_RNA (1)...(19): siRNA sense strand
ugaggaaauuucagccaga

SEQ ID NO: 2393414 - RNA, 19 nt, Homo sapiens
  misc_RNA (1)...(19): siRNA sense strand
agaggaagugucagaugaa

SEQ ID NO: 2393415 - RNA, 19 nt, Homo sapiens
  misc_RNA (1)...(19): siRNA sense strand
agaaauagcuucaaagucc

SEQ ID NO: 2393416 - RNA, 19 nt, Homo sapiens
  misc_RNA (1)...(19): siRNA sense strand
cgcaaguacuggaagaacu

SEQ ID NO: 2393417 - RNA, 19 nt, Homo sapiens
  misc_RNA (1)...(19): siRNA sense strand
aggaugaagaggaggguau

SEQ ID NO: 2393418 - RNA, 19 nt, Homo sapiens
  misc_RNA (1)...(19): siRNA sense strand
ggaacuggaagaagagaau

SEQ ID NO: 2393419 - RNA, 19 nt, Homo sapiens
  misc_RNA (1)...(19): siRNA sense strand
augcaagaaagaugaguua

SEQ ID NO: 2393420 - RNA, 19 nt, Homo sapiens
  misc_RNA (1)...(19): siRNA sense strand
uggaaaugcugcaagaaaa

SEQ ID NO: 2393421 - RNA, 19 nt, Homo sapiens
  misc_RNA (1)...(19): siRNA sense strand
ggagauagugauuuggcua

SEQ ID NO: 2393422 - RNA, 19 nt, Homo sapiens
  misc_RNA (1)...(19): siRNA sense strand
acaugaaucccaagaagaa

SEQ ID NO: 2393423 - RNA, 19 nt, Homo sapiens
  misc_RNA (1)...(19): siRNA sense strand
ggaaggaguuaguggcugu

SEQ ID NO: 2393424 - RNA, 19 nt, Homo sapiens
  misc_RNA (1)...(19): siRNA sense strand
cuaccacaguauaggcuaa

SEQ ID NO: 2393425 - RNA, 19 nt, Homo sapiens
  misc_RNA (1)...(19): siRNA sense strand
aagaaaagcucaaggaacu

SEQ ID NO: 2393426 - RNA, 19 nt, Homo sapiens
  misc_RNA (1)...(19): siRNA sense strand
cagauuuagaagaggauga

SEQ ID NO: 2393427 - RNA, 19 nt, Homo sapiens
  misc_RNA (1)...(19): siRNA sense strand
ggguggagcagaugaccaa

SEQ ID NO: 2393428 - RNA, 19 nt, Homo sapiens
  misc_RNA (1)...(19): siRNA sense strand
cgacuguguuaaagaacuu

SEQ ID NO: 2393429 - RNA, 19 nt, Homo sapiens
  misc_RNA (1)...(19): siRNA sense strand
cugaagaauggcagcggaa

SEQ ID NO: 2393430 - RNA, 19 nt, Homo sapiens
  misc_RNA (1)...(19): siRNA sense strand
gcaagaaagaugaguuacu

SEQ ID NO: 2393431 - RNA, 19 nt, Homo sapiens
  misc_RNA (1)...(19): siRNA sense strand
cagacaggguggagcagau

SEQ ID NO: 2393432 - RNA, 19 nt, Homo sapiens
  misc_RNA (1)...(19): siRNA sense strand
acagagacucggagagcau

SEQ ID NO: 2393433 - RNA, 19 nt, Homo sapiens
  misc_RNA (1)...(19): siRNA sense strand
uuacaugauucuaggcaca

SEQ ID NO: 2393434 - RNA, 19 nt, Homo sapiens
  misc_RNA (1)...(19): siRNA sense strand
cagcauaaacuuaaagaac

SEQ ID NO: 2393435 - RNA, 19 nt, Homo sapiens
  misc_RNA (1)...(19): siRNA sense strand
caguuuauuagguggacua

SEQ ID NO: 2393436 - RNA, 19 nt, Homo sapiens
  misc_RNA (1)...(19): siRNA sense strand
uggaggagcaauugggaca

SEQ ID NO: 2393437 - RNA, 19 nt, Homo sapiens
  misc_RNA (1)...(19): siRNA sense strand
gcacagacaggguggagca

SEQ ID NO: 2393438 - RNA, 19 nt, Homo sapiens
  misc_RNA (1)...(19): siRNA sense strand
uugagaaggaagaacuaaa

SEQ ID NO: 2393439 - RNA, 19 nt, Homo sapiens
  misc_RNA (1)...(19): siRNA sense strand
uuggaaaugcugcaagaaa

SEQ ID NO: 2393440 - RNA, 19 nt, Homo sapiens
  misc_RNA (1)...(19): siRNA sense strand
agucaaucccagaaugcaa

SEQ ID NO: 2393441 - RNA, 19 nt, Homo sapiens
  misc_RNA (1)...(19): siRNA sense strand
gauugagaaggaagaacua

SEQ ID NO: 2393442 - RNA, 19 nt, Homo sapiens
  misc_RNA (1)...(19): siRNA sense strand
gaguuacaagacaggaaua

SEQ ID NO: 2393443 - RNA, 19 nt, Homo sapiens
  misc_RNA (1)...(19): siRNA sense strand
gcucaaggaacuggaagaa

SEQ ID NO: 2393444 - RNA, 19 nt, Homo sapiens
  misc_RNA (1)...(19): siRNA sense strand
aaguugagcuggugagucu

SEQ ID NO: 2393445 - RNA, 19 nt, Homo sapiens
  misc_RNA (1)...(19): siRNA sense strand
auuuagaagaggaugaaga

SEQ ID NO: 2393446 - RNA, 19 nt, Homo sapiens
  misc_RNA (1)...(19): siRNA sense strand
ggugagucugcuagaagaa

SEQ ID NO: 2393447 - RNA, 19 nt, Homo sapiens
  misc_RNA (1)...(19): siRNA sense strand
ucacauaaagacagaaacu

SEQ ID NO: 2393448 - RNA, 19 nt, Homo sapiens
  misc_RNA (1)...(19): siRNA sense strand
uguuaaagaacuucgugaa

SEQ ID NO: 2393449 - RNA, 19 nt, Homo sapiens
  misc_RNA (1)...(19): siRNA sense strand
uagaagaggaugaagagga

SEQ ID NO: 2393450 - RNA, 19 nt, Homo sapiens
  misc_RNA (1)...(19): siRNA sense strand
cugaagaaagugaaacuga

SEQ ID NO: 2393451 - RNA, 19 nt, Homo sapiens
  misc_RNA (1)...(19): siRNA sense strand
uggacaggcugaagagacu

SEQ ID NO: 2393452 - RNA, 19 nt, Homo sapiens
  misc_RNA (1)...(19): siRNA sense strand
caagaacccuggugcccaa

SEQ ID NO: 2393453 - RNA, 19 nt, Homo sapiens
  misc_RNA (1)...(19): siRNA sense strand
gcaccaugagcuuggccaa

SEQ ID NO: 2393454 - RNA, 19 nt, Homo sapiens
  misc_RNA (1)...(19): siRNA sense strand
ggcagaaauugguccucaa

SEQ ID NO: 2393455 - RNA, 19 nt, Homo sapiens
  misc_RNA (1)...(19): siRNA sense strand
aguuggaaaugcugcaaga

SEQ ID NO: 2393456 - RNA, 19 nt, Homo sapiens
  misc_RNA (1)...(19): siRNA sense strand
aggaacuggaagaagagaa

SEQ ID NO: 2393457 - RNA, 19 nt, Homo sapiens
  misc_RNA (1)...(19): siRNA sense strand
agucauaauggguagcuuu

SEQ ID NO: 2393458 - RNA, 19 nt, Homo sapiens
  misc_RNA (1)...(19): siRNA sense strand
gaccagaaggaaggaguua

SEQ ID NO: 2393459 - RNA, 19 nt, Homo sapiens
  misc_RNA (1)...(19): siRNA sense strand
uagccagaguggucaagaa

SEQ ID NO: 2393460 - RNA, 19 nt, Homo sapiens
  misc_RNA (1)...(19): siRNA sense strand
ugucagcgacuguguuaaa

SEQ ID NO: 2393461 - RNA, 19 nt, Homo sapiens
  misc_RNA (1)...(19): siRNA sense strand
guccagaaugacugaagaa

SEQ ID NO: 2393462 - RNA, 19 nt, Homo sapiens
  misc_RNA (1)...(19): siRNA sense strand
agaacaacuaccacaguau

SEQ ID NO: 2393463 - RNA, 19 nt, Homo sapiens
  misc_RNA (1)...(19): siRNA sense strand
acgaaucccuggaggagca

SEQ ID NO: 2393464 - RNA, 19 nt, Homo sapiens
  misc_RNA (1)...(19): siRNA sense strand
acgaguuacaagacaggaa

SEQ ID NO: 2393465 - RNA, 19 nt, Homo sapiens
  misc_RNA (1)...(19): siRNA sense strand
ggaaagugccugucgugca

SEQ ID NO: 2393466 - RNA, 19 nt, Homo sapiens
  misc_RNA (1)...(19): siRNA sense strand
ggauagccagaguggucaa

SEQ ID NO: 2393467 - RNA, 19 nt, Homo sapiens
  misc_RNA (1)...(19): siRNA sense strand
gagucugcuagaagaacaa

SEQ ID NO: 2393468 - RNA, 19 nt, Homo sapiens
  misc_RNA (1)...(19): siRNA sense strand
ucuuaaagcggaaccauau

SEQ ID NO: 2393469 - RNA, 19 nt, Homo sapiens
  misc_RNA (1)...(19): siRNA sense strand
ccuaugaagaaaaggaaca

SEQ ID NO: 2393470 - RNA, 19 nt, Homo sapiens
  misc_RNA (1)...(19): siRNA sense strand
ggaagagugaugagcugau

SEQ ID NO: 2393471 - RNA, 19 nt, Homo sapiens
  misc_RNA (1)...(19): siRNA sense strand
ucucagauuuagaagagga

SEQ ID NO: 2393472 - RNA, 19 nt, Homo sapiens
  misc_RNA (1)...(19): siRNA sense strand
aacuggaagaagagaauau

SEQ ID NO: 2393473 - RNA, 19 nt, Homo sapiens
  misc_RNA (1)...(19): siRNA sense strand
uugaaguggaagagaaacu

SEQ ID NO: 2393474 - RNA, 19 nt, Homo sapiens
  misc_RNA (1)...(19): siRNA sense strand
aagaugaguuacuucgaau

SEQ ID NO: 2393475 - RNA, 19 nt, Homo sapiens
  misc_RNA (1)...(19): siRNA sense strand
gauuguagaccuucagcau

SEQ ID NO: 2393476 - RNA, 19 nt, Homo sapiens
  misc_RNA (1)...(19): siRNA sense strand
ugacaauggagcugcacga

SEQ ID NO: 2393477 - RNA, 19 nt, Homo sapiens
  misc_RNA (1)...(19): siRNA sense strand
gcccaacagaagcggguau

SEQ ID NO: 2393478 - RNA, 19 nt, Homo sapiens
  misc_RNA (1)...(19): siRNA sense strand
uggcagagagggaucguga

SEQ ID NO: 2393479 - RNA, 19 nt, Homo sapiens
  misc_RNA (1)...(19): siRNA sense strand
gguugcugcaguuggaaau

SEQ ID NO: 2393480 - RNA, 19 nt, Homo sapiens
  misc_RNA (1)...(19): siRNA sense strand
agaacuucgugaaacaaau

SEQ ID NO: 2393481 - RNA, 19 nt, Homo sapiens
  misc_RNA (1)...(19): siRNA sense strand
ggguauuacuuuucagguu

SEQ ID NO: 2393482 - RNA, 19 nt, Homo sapiens
  misc_RNA (1)...(19): siRNA sense strand
cuuugagccucgagugcau

SEQ ID NO: 2393483 - RNA, 19 nt, Homo sapiens
  misc_RNA (1)...(19): siRNA sense strand
ggguugcugcaguuggaaa

SEQ ID NO: 2393484 - RNA, 19 nt, Homo sapiens
  misc_RNA (1)...(19): siRNA sense strand
ggaacuucguaguagaucu

SEQ ID NO: 2393485 - RNA, 19 nt, Homo sapiens
  misc_RNA (1)...(19): siRNA sense strand
gugaaugagcccuggacua

SEQ ID NO: 2393486 - RNA, 19 nt, Homo sapiens
  misc_RNA (1)...(19): siRNA sense strand
auuggaugguggugggaaa

SEQ ID NO: 2393487 - RNA, 19 nt, Homo sapiens
  misc_RNA (1)...(19): siRNA sense strand
acuucaagcuggaggacuu

SEQ ID NO: 2393488 - RNA, 19 nt, Homo sapiens
  misc_RNA (1)...(19): siRNA sense strand
aggagaaccugcaggagau

SEQ ID NO: 2393489 - RNA, 19 nt, Homo sapiens
  misc_RNA (1)...(19): siRNA sense strand
cugccaacucagagaggua

SEQ ID NO: 2393490 - RNA, 19 nt, Homo sapiens
  misc_RNA (1)...(19): siRNA sense strand
cccagaagcuuauggccaa

SEQ ID NO: 2393491 - RNA, 19 nt, Homo sapiens
  misc_RNA (1)...(19): siRNA sense strand
cgaaguucuuugagcuaau

SEQ ID NO: 2393492 - RNA, 19 nt, Homo sapiens
  misc_RNA (1)...(19): siRNA sense strand
ccagaauguaccacugaaa

SEQ ID NO: 2393493 - RNA, 19 nt, Homo sapiens
  misc_RNA (1)...(19): siRNA sense strand
ggacuaugggauucagcaa

SEQ ID NO: 2393494 - RNA, 19 nt, Homo sapiens
  misc_RNA (1)...(19): siRNA sense strand
aaggugaaggauuggguaa

SEQ ID NO: 2393495 - RNA, 19 nt, Homo sapiens
  misc_RNA (1)...(19): siRNA sense strand
uggaggugaucaagggaga

SEQ ID NO: 2393496 - RNA, 19 nt, Homo sapiens
  misc_RNA (1)...(19): siRNA sense strand
gcagcaaugaagauggcua

SEQ ID NO: 2393497 - RNA, 19 nt, Homo sapiens
  misc_RNA (1)...(19): siRNA sense strand
agaucaaagcucuggcgaa

SEQ ID NO: 2393498 - RNA, 19 nt, Homo sapiens
  misc_RNA (1)...(19): siRNA sense strand
ugucagucauggagcaaaa

SEQ ID NO: 2393499 - RNA, 19 nt, Homo sapiens
  misc_RNA (1)...(19): siRNA sense strand
ugguggugggaaagagaaa

SEQ ID NO: 2393500 - RNA, 19 nt, Homo sapiens
  misc_RNA (1)...(19): siRNA sense strand
cuguggaaauugugcauga

SEQ ID NO: 2393501 - RNA, 19 nt, Homo sapiens
  misc_RNA (1)...(19): siRNA sense strand
ggauugauggagauggaga

SEQ ID NO: 2393502 - RNA, 19 nt, Homo sapiens
  misc_RNA (1)...(19): siRNA sense strand
aggugaaggauuggguaaa

SEQ ID NO: 2393503 - RNA, 19 nt, Homo sapiens
  misc_RNA (1)...(19): siRNA sense strand
ccgagaaauuugugaaagc

SEQ ID NO: 2393504 - RNA, 19 nt, Homo sapiens
  misc_RNA (1)...(19): siRNA sense strand
gcuuugaccaggagcugaa

SEQ ID NO: 2393505 - RNA, 19 nt, Homo sapiens
  misc_RNA (1)...(19): siRNA sense strand
gaguaugugcuguggagga

SEQ ID NO: 2393506 - RNA, 19 nt, Homo sapiens
  misc_RNA (1)...(19): siRNA sense strand
gcagagauacggaaggagu

SEQ ID NO: 2393507 - RNA, 19 nt, Homo sapiens
  misc_RNA (1)...(19): siRNA sense strand
agcuagaccugaagacaga

SEQ ID NO: 2393508 - RNA, 19 nt, Homo sapiens
  misc_RNA (1)...(19): siRNA sense strand
caagaugggcuucagggaa

SEQ ID NO: 2393509 - RNA, 19 nt, Homo sapiens
  misc_RNA (1)...(19): siRNA sense strand
gggugggauugauggagau

SEQ ID NO: 2393510 - RNA, 19 nt, Homo sapiens
  misc_RNA (1)...(19): siRNA sense strand
uggauaacacagaucgcaa

SEQ ID NO: 2393511 - RNA, 19 nt, Homo sapiens
  misc_RNA (1)...(19): siRNA sense strand
ccucuaaaacccuggagaa

SEQ ID NO: 2393512 - RNA, 19 nt, Homo sapiens
  misc_RNA (1)...(19): siRNA sense strand
ggaaaugagcgauuggaug

SEQ ID NO: 2393513 - RNA, 19 nt, Homo sapiens
  misc_RNA (1)...(19): siRNA sense strand
uguacagacuggaagagau

SEQ ID NO: 2393514 - RNA, 19 nt, Homo sapiens
  misc_RNA (1)...(19): siRNA sense strand
uugucagguuggagaugaa

SEQ ID NO: 2393515 - RNA, 19 nt, Homo sapiens
  misc_RNA (1)...(19): siRNA sense strand
ugggauugauggagaugga

SEQ ID NO: 2393516 - RNA, 19 nt, Homo sapiens
  misc_RNA (1)...(19): siRNA sense strand
cuaaaacccuggagaagau

SEQ ID NO: 2393517 - RNA, 19 nt, Homo sapiens
  misc_RNA (1)...(19): siRNA sense strand
aauucagcuugccgagaaa

SEQ ID NO: 2393518 - RNA, 19 nt, Homo sapiens
  misc_RNA (1)...(19): siRNA sense strand
cagaaaggucgaagaggcu

SEQ ID NO: 2393519 - RNA, 19 nt, Homo sapiens
  misc_RNA (1)...(19): siRNA sense strand
gggccaaucccuaugagau

SEQ ID NO: 2393520 - RNA, 19 nt, Homo sapiens
  misc_RNA (1)...(19): siRNA sense strand
gugggaaagagaaagauga

SEQ ID NO: 2393521 - RNA, 19 nt, Homo sapiens
  misc_RNA (1)...(19): siRNA sense strand
gacuggaagagauggagaa

SEQ ID NO: 2393522 - RNA, 19 nt, Homo sapiens
  misc_RNA (1)...(19): siRNA sense strand
gugucaugguuuccagaau

SEQ ID NO: 2393523 - RNA, 19 nt, Homo sapiens
  misc_RNA (1)...(19): siRNA sense strand
aggggaaggcccagaggaa

SEQ ID NO: 2393524 - RNA, 19 nt, Homo sapiens
  misc_RNA (1)...(19): siRNA sense strand
guggugggaaagagaaaga

SEQ ID NO: 2393525 - RNA, 19 nt, Homo sapiens
  misc_RNA (1)...(19): siRNA sense strand
ugggaaagagaaagaugau

SEQ ID NO: 2393526 - RNA, 19 nt, Homo sapiens
  misc_RNA (1)...(19): siRNA sense strand
cuauggugagggugggauu

SEQ ID NO: 2393527 - RNA, 19 nt, Homo sapiens
  misc_RNA (1)...(19): siRNA sense strand
acuaugggauucagcaaaa

SEQ ID NO: 2393528 - RNA, 19 nt, Homo sapiens
  misc_RNA (1)...(19): siRNA sense strand
ucagggaaggugaaggauu

SEQ ID NO: 2393529 - RNA, 19 nt, Homo sapiens
  misc_RNA (1)...(19): siRNA sense strand
gauugauggagauggagau

SEQ ID NO: 2393530 - RNA, 19 nt, Homo sapiens
  misc_RNA (1)...(19): siRNA sense strand
gggauuaccucuucgcagu

SEQ ID NO: 2393531 - RNA, 19 nt, Homo sapiens
  misc_RNA (1)...(19): siRNA sense strand
ggauggcauucgugugcau

SEQ ID NO: 2393532 - RNA, 19 nt, Homo sapiens
  misc_RNA (1)...(19): siRNA sense strand
cauagaugauguucgggau

SEQ ID NO: 2393533 - RNA, 19 nt, Homo sapiens
  misc_RNA (1)...(19): siRNA sense strand
gagccagagcccagugcuu

SEQ ID NO: 2393534 - RNA, 19 nt, Homo sapiens
  misc_RNA (1)...(19): siRNA sense strand
aguaugugcuguggaggaa

SEQ ID NO: 2393535 - RNA, 19 nt, Homo sapiens
  misc_RNA (1)...(19): siRNA sense strand
cagucagaccgcuggauca

SEQ ID NO: 2393536 - RNA, 19 nt, Homo sapiens
  misc_RNA (1)...(19): siRNA sense strand
gcauagaugauguucggga

SEQ ID NO: 2393537 - RNA, 19 nt, Homo sapiens
  misc_RNA (1)...(19): siRNA sense strand
cagaggaagaucagugcca

SEQ ID NO: 2393538 - RNA, 19 nt, Homo sapiens
  misc_RNA (1)...(19): siRNA sense strand
ccaucagggugaaggaggu

SEQ ID NO: 2393539 - RNA, 19 nt, Homo sapiens
  misc_RNA (1)...(19): siRNA sense strand
cugaaauuccugacacuca

SEQ ID NO: 2393540 - RNA, 19 nt, Homo sapiens
  misc_RNA (1)...(19): siRNA sense strand
gggaaagagaaagaugauu

SEQ ID NO: 2393541 - RNA, 19 nt, Homo sapiens
  misc_RNA (1)...(19): siRNA sense strand
acuguagucugcagaucaa

SEQ ID NO: 2393542 - RNA, 19 nt, Homo sapiens
  misc_RNA (1)...(19): siRNA sense strand
gaagagacuuugaggccaa

SEQ ID NO: 2393543 - RNA, 19 nt, Homo sapiens
  misc_RNA (1)...(19): siRNA sense strand
augaacaaccugauggaaa

SEQ ID NO: 2393544 - RNA, 19 nt, Homo sapiens
  misc_RNA (1)...(19): siRNA sense strand
acgacgaggaggaggagaa

SEQ ID NO: 2393545 - RNA, 19 nt, Homo sapiens
  misc_RNA (1)...(19): siRNA sense strand
ggacaggagaggagaucca

SEQ ID NO: 2393546 - RNA, 19 nt, Homo sapiens
  misc_RNA (1)...(19): siRNA sense strand
aggaauuccaccagaguuu

SEQ ID NO: 2393547 - RNA, 19 nt, Homo sapiens
  misc_RNA (1)...(19): siRNA sense strand
ggaugaaggacaacaacau

SEQ ID NO: 2393548 - RNA, 19 nt, Homo sapiens
  misc_RNA (1)...(19): siRNA sense strand
acagaaaacuggaagccaa

SEQ ID NO: 2393549 - RNA, 19 nt, Homo sapiens
  misc_RNA (1)...(19): siRNA sense strand
ggaaagcggcaguggggaa

SEQ ID NO: 2393550 - RNA, 19 nt, Homo sapiens
  misc_RNA (1)...(19): siRNA sense strand
agaaggagcaggaggagga

SEQ ID NO: 2393551 - RNA, 19 nt, Homo sapiens
  misc_RNA (1)...(19): siRNA sense strand
ccacacacucagggagaaa

SEQ ID NO: 2393552 - RNA, 19 nt, Homo sapiens
  misc_RNA (1)...(19): siRNA sense strand
aggaguacaucgagcgcau

SEQ ID NO: 2393553 - RNA, 19 nt, Homo sapiens
  misc_RNA (1)...(19): siRNA sense strand
aauaaugagcagaggcuga

SEQ ID NO: 2393554 - RNA, 19 nt, Homo sapiens
  misc_RNA (1)...(19): siRNA sense strand
caaggaagucggaggcuga

SEQ ID NO: 2393555 - RNA, 19 nt, Homo sapiens
  misc_RNA (1)...(19): siRNA sense strand
gaaauugaggugaaggaca

SEQ ID NO: 2393556 - RNA, 19 nt, Homo sapiens
  misc_RNA (1)...(19): siRNA sense strand
aagaagaggagaaggagca

SEQ ID NO: 2393557 - RNA, 19 nt, Homo sapiens
  misc_RNA (1)...(19): siRNA sense strand
ggaauauuuggaugaggaa

SEQ ID NO: 2393558 - RNA, 19 nt, Homo sapiens
  misc_RNA (1)...(19): siRNA sense strand
gggacauaaaggaggaagu

SEQ ID NO: 2393559 - RNA, 19 nt, Homo sapiens
  misc_RNA (1)...(19): siRNA sense strand
acuggaagccaaaggauuu

SEQ ID NO: 2393560 - RNA, 19 nt, Homo sapiens
  misc_RNA (1)...(19): siRNA sense strand
acauaaaggaggaagugga

SEQ ID NO: 2393561 - RNA, 19 nt, Homo sapiens
  misc_RNA (1)...(19): siRNA sense strand
cggucaaguucaucaccaa

SEQ ID NO: 2393562 - RNA, 19 nt, Homo sapiens
  misc_RNA (1)...(19): siRNA sense strand
cagaagagcuggccgagca

SEQ ID NO: 2393563 - RNA, 19 nt, Homo sapiens
  misc_RNA (1)...(19): siRNA sense strand
cagagagguccgaagaaga

SEQ ID NO: 2393564 - RNA, 19 nt, Homo sapiens
  misc_RNA (1)...(19): siRNA sense strand
acauucggacugaggguaa

SEQ ID NO: 2393565 - RNA, 19 nt, Homo sapiens
  misc_RNA (1)...(19): siRNA sense strand
aggcaggagaccagggcau

SEQ ID NO: 2393566 - RNA, 19 nt, Homo sapiens
  misc_RNA (1)...(19): siRNA sense strand
uuacagagagccagugcaa

SEQ ID NO: 2393567 - RNA, 19 nt, Homo sapiens
  misc_RNA (1)...(19): siRNA sense strand
aggagaaggagcaggagga

SEQ ID NO: 2393568 - RNA, 19 nt, Homo sapiens
  misc_RNA (1)...(19): siRNA sense strand
agccaagcuuagcaagaaa

SEQ ID NO: 2393569 - RNA, 19 nt, Homo sapiens
  misc_RNA (1)...(19): siRNA sense strand
uggaauauuuggaugagga

SEQ ID NO: 2393570 - RNA, 19 nt, Homo sapiens
  misc_RNA (1)...(19): siRNA sense strand
agcaggaggaggagggaga

SEQ ID NO: 2393571 - RNA, 19 nt, Homo sapiens
  misc_RNA (1)...(19): siRNA sense strand
cggaaaucgaccuaaauga

SEQ ID NO: 2393572 - RNA, 19 nt, Homo sapiens
  misc_RNA (1)...(19): siRNA sense strand
cagaaaacuggaagccaaa

SEQ ID NO: 2393573 - RNA, 19 nt, Homo sapiens
  misc_RNA (1)...(19): siRNA sense strand
cgcaagacgacgaggagga

SEQ ID NO: 2393574 - RNA, 19 nt, Homo sapiens
  misc_RNA (1)...(19): siRNA sense strand
cgaaacaagcucuacguca

SEQ ID NO: 2393575 - RNA, 19 nt, Homo sapiens
  misc_RNA (1)...(19): siRNA sense strand
ggucaggguccggggaaaa

SEQ ID NO: 2393576 - RNA, 19 nt, Homo sapiens
  misc_RNA (1)...(19): siRNA sense strand
uuguggaaccugaaacuaa

SEQ ID NO: 2393577 - RNA, 19 nt, Homo sapiens
  misc_RNA (1)...(19): siRNA sense strand
uggaaauugaggugaagga

SEQ ID NO: 2393578 - RNA, 19 nt, Homo sapiens
  misc_RNA (1)...(19): siRNA sense strand
gugcagaagagcuggccga

SEQ ID NO: 2393579 - RNA, 19 nt, Homo sapiens
  misc_RNA (1)...(19): siRNA sense strand
aggaggagcccuuggagga

SEQ ID NO: 2393580 - RNA, 19 nt, Homo sapiens
  misc_RNA (1)...(19): siRNA sense strand
cggaaagagcuccagcgaa

SEQ ID NO: 2393581 - RNA, 19 nt, Homo sapiens
  misc_RNA (1)...(19): siRNA sense strand
ugcuggaaauugaggugaa

SEQ ID NO: 2393582 - RNA, 19 nt, Homo sapiens
  misc_RNA (1)...(19): siRNA sense strand
gggaaaauuaagcucauua

SEQ ID NO: 2393583 - RNA, 19 nt, Homo sapiens
  misc_RNA (1)...(19): siRNA sense strand
gaucauuuguuggagggaa

SEQ ID NO: 2393584 - RNA, 19 nt, Homo sapiens
  misc_RNA (1)...(19): siRNA sense strand
cagaguuugcaguggauga

SEQ ID NO: 2393585 - RNA, 19 nt, Homo sapiens
  misc_RNA (1)...(19): siRNA sense strand
ucugaaaguccgacgggau

SEQ ID NO: 2393586 - RNA, 19 nt, Homo sapiens
  misc_RNA (1)...(19): siRNA sense strand
ugcaguggaugaaggacaa

SEQ ID NO: 2393587 - RNA, 19 nt, Homo sapiens
  misc_RNA (1)...(19): siRNA sense strand
cggaaagggaguugaaguc

SEQ ID NO: 2393588 - RNA, 19 nt, Homo sapiens
  misc_RNA (1)...(19): siRNA sense strand
gggcauggucucuguggga

SEQ ID NO: 2393589 - RNA, 19 nt, Homo sapiens
  misc_RNA (1)...(19): siRNA sense strand
gggcuggaagggaagaaga

SEQ ID NO: 2393590 - RNA, 19 nt, Homo sapiens
  misc_RNA (1)...(19): siRNA sense strand
uggcauauaaugacaagau

SEQ ID NO: 2393591 - RNA, 19 nt, Homo sapiens
  misc_RNA (1)...(19): siRNA sense strand
ccuaaaugacuggcggaau

SEQ ID NO: 2393592 - RNA, 19 nt, Homo sapiens
  misc_RNA (1)...(19): siRNA sense strand
ccaagcaaucggagagaag

SEQ ID NO: 2393593 - RNA, 19 nt, Homo sapiens
  misc_RNA (1)...(19): siRNA sense strand
caaucggagagaaggugaa

SEQ ID NO: 2393594 - RNA, 19 nt, Homo sapiens
  misc_RNA (1)...(19): siRNA sense strand
uggagaggccucagaaguu

SEQ ID NO: 2393595 - RNA, 19 nt, Homo sapiens
  misc_RNA (1)...(19): siRNA sense strand
ccaacaucaacaugaguca

SEQ ID NO: 2393596 - RNA, 19 nt, Homo sapiens
  misc_RNA (1)...(19): siRNA sense strand
uugcaguggaugaaggaca

SEQ ID NO: 2393597 - RNA, 19 nt, Homo sapiens
  misc_RNA (1)...(19): siRNA sense strand
cuaagaucugcuucaaaua

SEQ ID NO: 2393598 - RNA, 19 nt, Homo sapiens
  misc_RNA (1)...(19): siRNA sense strand
gaaacaagcucuacgucac

SEQ ID NO: 2393599 - RNA, 19 nt, Homo sapiens
  misc_RNA (1)...(19): siRNA sense strand
ccggauggcaugcggagau

SEQ ID NO: 2393600 - RNA, 19 nt, Homo sapiens
  misc_RNA (1)...(19): siRNA sense strand
aggccgagcaauucaguuu

SEQ ID NO: 2393601 - RNA, 19 nt, Homo sapiens
  misc_RNA (1)...(19): siRNA sense strand
cugacgugcuggaaauuga

SEQ ID NO: 2393602 - RNA, 19 nt, Homo sapiens
  misc_RNA (1)...(19): siRNA sense strand
ucggagagaaggugaaugu

SEQ ID NO: 2393603 - RNA, 19 nt, Homo sapiens
  misc_RNA (1)...(19): siRNA sense strand
cugcaagagcgucagccaa

SEQ ID NO: 2393604 - RNA, 19 nt, Homo sapiens
  misc_RNA (1)...(19): siRNA sense strand
gcggaauaacacugaguac

SEQ ID NO: 2393605 - RNA, 19 nt, Homo sapiens
  misc_RNA (1)...(19): siRNA sense strand
gcaacagguucgccagcca

SEQ ID NO: 2393606 - RNA, 19 nt, Homo sapiens
  misc_RNA (1)...(19): siRNA sense strand
auuugagugaccuggaaua

SEQ ID NO: 2393607 - RNA, 19 nt, Homo sapiens
  misc_RNA (1)...(19): siRNA sense strand
gugcacaaguggaggcaga

SEQ ID NO: 2393608 - RNA, 19 nt, Homo sapiens
  misc_RNA (1)...(19): siRNA sense strand
guaaugaggacuuccggaa

SEQ ID NO: 2393609 - RNA, 19 nt, Homo sapiens
  misc_RNA (1)...(19): siRNA sense strand
cagaggaggacaaggagga

SEQ ID NO: 2393610 - RNA, 19 nt, Homo sapiens
  misc_RNA (1)...(19): siRNA sense strand
gagaagaacucguggagcg

SEQ ID NO: 2393611 - RNA, 19 nt, Homo sapiens
  misc_RNA (1)...(19): siRNA sense strand
acggagagcgagaagcauu

SEQ ID NO: 2393612 - RNA, 19 nt, Homo sapiens
  misc_RNA (1)...(19): siRNA sense strand
ccggaaacuguucagcaaa

SEQ ID NO: 2393613 - RNA, 19 nt, Homo sapiens
  misc_RNA (1)...(19): siRNA sense strand
acaugucugaagaaggaaa

SEQ ID NO: 2393614 - RNA, 19 nt, Homo sapiens
  misc_RNA (1)...(19): siRNA sense strand
caggaagacugcugcggua

SEQ ID NO: 2393615 - RNA, 19 nt, Homo sapiens
  misc_RNA (1)...(19): siRNA sense strand
ggucagugcagcagagcca

SEQ ID NO: 2393616 - RNA, 19 nt, Homo sapiens
  misc_RNA (1)...(19): siRNA sense strand
gggacagaucucagcagaa

SEQ ID NO: 2393617 - RNA, 19 nt, Homo sapiens
  misc_RNA (1)...(19): siRNA sense strand
cugaggacacagaggaaga

SEQ ID NO: 2393618 - RNA, 19 nt, Homo sapiens
  misc_RNA (1)...(19): siRNA sense strand
gcaagaaccuucagggcuc

SEQ ID NO: 2393619 - RNA, 19 nt, Homo sapiens
  misc_RNA (1)...(19): siRNA sense strand
cggaagagauggagcgugc

SEQ ID NO: 2393620 - RNA, 19 nt, Homo sapiens
  misc_RNA (1)...(19): siRNA sense strand
ggaccugucucaagggcca

SEQ ID NO: 2393621 - RNA, 19 nt, Homo sapiens
  misc_RNA (1)...(19): siRNA sense strand
ggccagagcaagugccaca

SEQ ID NO: 2393622 - RNA, 19 nt, Homo sapiens
  misc_RNA (1)...(19): siRNA sense strand
auggcaaaugcgagaacaa

SEQ ID NO: 2393623 - RNA, 19 nt, Homo sapiens
  misc_RNA (1)...(19): siRNA sense strand
ccggauggcaaaugcgaga

SEQ ID NO: 2393624 - RNA, 19 nt, Homo sapiens
  misc_RNA (1)...(19): siRNA sense strand
ugaacgagugcgaggcaga

SEQ ID NO: 2393625 - RNA, 19 nt, Homo sapiens
  misc_RNA (1)...(19): siRNA sense strand
gcuucuacuacgacgggaa

SEQ ID NO: 2393626 - RNA, 19 nt, Homo sapiens
  misc_RNA (1)...(19): siRNA sense strand
agcaauuccuucugggaca

SEQ ID NO: 2393627 - RNA, 19 nt, Homo sapiens
  misc_RNA (1)...(19): siRNA sense strand
acacagaggaagagagagg

SEQ ID NO: 2393628 - RNA, 19 nt, Homo sapiens
  misc_RNA (1)...(19): siRNA sense strand
accacaagaaggagugcua

SEQ ID NO: 2393629 - RNA, 19 nt, Homo sapiens
  misc_RNA (1)...(19): siRNA sense strand
agggcuacacccaggacaa

SEQ ID NO: 2393630 - RNA, 19 nt, Homo sapiens
  misc_RNA (1)...(19): siRNA sense strand
cggaacggagugugugaga

SEQ ID NO: 2393631 - RNA, 19 nt, Homo sapiens
  misc_RNA (1)...(19): siRNA sense strand
uggauguggacgaguguga

SEQ ID NO: 2393632 - RNA, 19 nt, Homo sapiens
  misc_RNA (1)...(19): siRNA sense strand
gcgaagacaucgacgagug

SEQ ID NO: 2393633 - RNA, 19 nt, Homo sapiens
  misc_RNA (1)...(19): siRNA sense strand
gcuacgagugcuacugcaa

SEQ ID NO: 2393634 - RNA, 19 nt, Homo sapiens
  misc_RNA (1)...(19): siRNA sense strand
agagagaacauuagacaaa

SEQ ID NO: 2393635 - RNA, 19 nt, Homo sapiens
  misc_RNA (1)...(19): siRNA sense strand
acagaaaggacgaggaaga

SEQ ID NO: 2393636 - RNA, 19 nt, Homo sapiens
  misc_RNA (1)...(19): siRNA sense strand
ccugauaaacuaaaggaua

SEQ ID NO: 2393637 - RNA, 19 nt, Homo sapiens
  misc_RNA (1)...(19): siRNA sense strand
agaaagacaaaguggaaau

SEQ ID NO: 2393638 - RNA, 19 nt, Homo sapiens
  misc_RNA (1)...(19): siRNA sense strand
uggaaaagaugcugcaaaa

SEQ ID NO: 2393639 - RNA, 19 nt, Homo sapiens
  misc_RNA (1)...(19): siRNA sense strand
aggaagaagaagaaagaca

SEQ ID NO: 2393640 - RNA, 19 nt, Homo sapiens
  misc_RNA (1)...(19): siRNA sense strand
ucucaagcauccugauaaa

SEQ ID NO: 2393641 - RNA, 19 nt, Homo sapiens
  misc_RNA (1)...(19): siRNA sense strand
ccacuugaguauauggcaa

SEQ ID NO: 2393642 - RNA, 19 nt, Homo sapiens
  misc_RNA (1)...(19): siRNA sense strand
caccagaggaggaggaaga

SEQ ID NO: 2393643 - RNA, 19 nt, Homo sapiens
  misc_RNA (1)...(19): siRNA sense strand
aguacaggauauugaacaa

SEQ ID NO: 2393644 - RNA, 19 nt, Homo sapiens
  misc_RNA (1)...(19): siRNA sense strand
gcauaagagccuagaucca

SEQ ID NO: 2393645 - RNA, 19 nt, Homo sapiens
  misc_RNA (1)...(19): siRNA sense strand
ccacagaaaggacgaggaa

SEQ ID NO: 2393646 - RNA, 19 nt, Homo sapiens
  misc_RNA (1)...(19): siRNA sense strand
augucaaaguacaggauau

SEQ ID NO: 2393647 - RNA, 19 nt, Homo sapiens
  misc_RNA (1)...(19): siRNA sense strand
cuaaguugguacaggaaca

SEQ ID NO: 2393648 - RNA, 19 nt, Homo sapiens
  misc_RNA (1)...(19): siRNA sense strand
gguucugaugcuugggaaa

SEQ ID NO: 2393649 - RNA, 19 nt, Homo sapiens
  misc_RNA (1)...(19): siRNA sense strand
uguuagaagaugaugagaa

SEQ ID NO: 2393650 - RNA, 19 nt, Homo sapiens
  misc_RNA (1)...(19): siRNA sense strand
cagcagaugaugaagauga

SEQ ID NO: 2393651 - RNA, 19 nt, Homo sapiens
  misc_RNA (1)...(19): siRNA sense strand
cuggaaauauuaauggcua

SEQ ID NO: 2393652 - RNA, 19 nt, Homo sapiens
  misc_RNA (1)...(19): siRNA sense strand
cagaggaggaggaagaaga

SEQ ID NO: 2393653 - RNA, 19 nt, Homo sapiens
  misc_RNA (1)...(19): siRNA sense strand
aagcaaaauugaagaggau

SEQ ID NO: 2393654 - RNA, 19 nt, Homo sapiens
  misc_RNA (1)...(19): siRNA sense strand
agaaauuagguauggauga

SEQ ID NO: 2393655 - RNA, 19 nt, Homo sapiens
  misc_RNA (1)...(19): siRNA sense strand
ccgccuggaaugugugaaa

SEQ ID NO: 2393656 - RNA, 19 nt, Homo sapiens
  misc_RNA (1)...(19): siRNA sense strand
gcgaagugcuaaaagggaa

SEQ ID NO: 2393657 - RNA, 19 nt, Homo sapiens
  misc_RNA (1)...(19): siRNA sense strand
guauggaugacuugacuaa

SEQ ID NO: 2393658 - RNA, 19 nt, Homo sapiens
  misc_RNA (1)...(19): siRNA sense strand
cugguaaggcucaggauuu

SEQ ID NO: 2393659 - RNA, 19 nt, Homo sapiens
  misc_RNA (1)...(19): siRNA sense strand
aagaaagcaguuagaagua

SEQ ID NO: 2393660 - RNA, 19 nt, Homo sapiens
  misc_RNA (1)...(19): siRNA sense strand
aggaggaggaagaagaaga

SEQ ID NO: 2393661 - RNA, 19 nt, Homo sapiens
  misc_RNA (1)...(19): siRNA sense strand
aaguaaaggauuugcuuga

SEQ ID NO: 2393662 - RNA, 19 nt, Homo sapiens
  misc_RNA (1)...(19): siRNA sense strand
aaugaugguucgauggcua

SEQ ID NO: 2393663 - RNA, 19 nt, Homo sapiens
  misc_RNA (1)...(19): siRNA sense strand
cagaaagaugguagaaaau

SEQ ID NO: 2393664 - RNA, 19 nt, Homo sapiens
  misc_RNA (1)...(19): siRNA sense strand
gagagagaacauuagacaa

SEQ ID NO: 2393665 - RNA, 19 nt, Homo sapiens
  misc_RNA (1)...(19): siRNA sense strand
agguugugugcgugaaaua

SEQ ID NO: 2393666 - RNA, 19 nt, Homo sapiens
  misc_RNA (1)...(19): siRNA sense strand
gggaguaucugaagcagca

SEQ ID NO: 2393667 - RNA, 19 nt, Homo sapiens
  misc_RNA (1)...(19): siRNA sense strand
gcaagcaaucucagaccaa

SEQ ID NO: 2393668 - RNA, 19 nt, Homo sapiens
  misc_RNA (1)...(19): siRNA sense strand
acauaugcuuugaguuaga

SEQ ID NO: 2393669 - RNA, 19 nt, Homo sapiens
  misc_RNA (1)...(19): siRNA sense strand
guggaaauacggaacagaa

SEQ ID NO: 2393670 - RNA, 19 nt, Homo sapiens
  misc_RNA (1)...(19): siRNA sense strand
aggauauucuucuggucaa

SEQ ID NO: 2393671 - RNA, 19 nt, Homo sapiens
  misc_RNA (1)...(19): siRNA sense strand
uggaacagcagaugaugaa

SEQ ID NO: 2393672 - RNA, 19 nt, Homo sapiens
  misc_RNA (1)...(19): siRNA sense strand
cgaugaaugcuaucaagua

SEQ ID NO: 2393673 - RNA, 19 nt, Homo sapiens
  misc_RNA (1)...(19): siRNA sense strand
cagauuaugucaaaguaca

SEQ ID NO: 2393674 - RNA, 19 nt, Homo sapiens
  misc_RNA (1)...(19): siRNA sense strand
cauucaaagacuaggacca

SEQ ID NO: 2393675 - RNA, 19 nt, Homo sapiens
  misc_RNA (1)...(19): siRNA sense strand
gggucaagucauauaacau

SEQ ID NO: 2393676 - RNA, 19 nt, Homo sapiens
  misc_RNA (1)...(19): siRNA sense strand
uauuugagccucugcauaa

SEQ ID NO: 2393677 - RNA, 19 nt, Homo sapiens
  misc_RNA (1)...(19): siRNA sense strand
ggggaaaauuaguaaacca

SEQ ID NO: 2393678 - RNA, 19 nt, Homo sapiens
  misc_RNA (1)...(19): siRNA sense strand
ucaaagaguacuacauaca

SEQ ID NO: 2393679 - RNA, 19 nt, Homo sapiens
  misc_RNA (1)...(19): siRNA sense strand
gaacagaauaguccgccaa

SEQ ID NO: 2393680 - RNA, 19 nt, Homo sapiens
  misc_RNA (1)...(19): siRNA sense strand
ugaggaagcuauuagacau

SEQ ID NO: 2393681 - RNA, 19 nt, Homo sapiens
  misc_RNA (1)...(19): siRNA sense strand
gagacuugcugcugggagu

SEQ ID NO: 2393682 - RNA, 19 nt, Homo sapiens
  misc_RNA (1)...(19): siRNA sense strand
cagcaguggccugaggaaa

SEQ ID NO: 2393683 - RNA, 19 nt, Homo sapiens
  misc_RNA (1)...(19): siRNA sense strand
agaagaagaaagacaaagu

SEQ ID NO: 2393684 - RNA, 19 nt, Homo sapiens
  misc_RNA (1)...(19): siRNA sense strand
gggcuagaggauacaaaga

SEQ ID NO: 2393685 - RNA, 19 nt, Homo sapiens
  misc_RNA (1)...(19): siRNA sense strand
cgacaucaaguaaaggauu

SEQ ID NO: 2393686 - RNA, 19 nt, Homo sapiens
  misc_RNA (1)...(19): siRNA sense strand
gguuuguucuggaaauauu

SEQ ID NO: 2393687 - RNA, 19 nt, Homo sapiens
  misc_RNA (1)...(19): siRNA sense strand
cagucagcgaagucggaaa

SEQ ID NO: 2393688 - RNA, 19 nt, Homo sapiens
  misc_RNA (1)...(19): siRNA sense strand
ggccauacggcuucagaau

SEQ ID NO: 2393689 - RNA, 19 nt, Homo sapiens
  misc_RNA (1)...(19): siRNA sense strand
agaagagccaacaaugaaa

SEQ ID NO: 2393690 - RNA, 19 nt, Homo sapiens
  misc_RNA (1)...(19): siRNA sense strand
gagcaaugauaaugaggag

SEQ ID NO: 2393691 - RNA, 19 nt, Homo sapiens
  misc_RNA (1)...(19): siRNA sense strand
agacaaacgauggagagua

SEQ ID NO: 2393692 - RNA, 19 nt, Homo sapiens
  misc_RNA (1)...(19): siRNA sense strand
ucuaaagaggagaugguga

SEQ ID NO: 2393693 - RNA, 19 nt, Homo sapiens
  misc_RNA (1)...(19): siRNA sense strand
gguuacuauuggucauauu

SEQ ID NO: 2393694 - RNA, 19 nt, Homo sapiens
  misc_RNA (1)...(19): siRNA sense strand
ggagaaauuagguauggau

SEQ ID NO: 2393695 - RNA, 19 nt, Homo sapiens
  misc_RNA (1)...(19): siRNA sense strand
ccauacggcuucagaaucu

SEQ ID NO: 2393696 - RNA, 19 nt, Homo sapiens
  misc_RNA (1)...(19): siRNA sense strand
cuaucaacgaugaaugcua

SEQ ID NO: 2393697 - RNA, 19 nt, Homo sapiens
  misc_RNA (1)...(19): siRNA sense strand
agagagaacauuagacaaa

SEQ ID NO: 2393698 - RNA, 19 nt, Homo sapiens
  misc_RNA (1)...(19): siRNA sense strand
acagaaaggacgaggaaga

SEQ ID NO: 2393699 - RNA, 19 nt, Homo sapiens
  misc_RNA (1)...(19): siRNA sense strand
ccugauaaacuaaaggaua

SEQ ID NO: 2393700 - RNA, 19 nt, Homo sapiens
  misc_RNA (1)...(19): siRNA sense strand
agaaagacaaaguggaaau

SEQ ID NO: 2393701 - RNA, 19 nt, Homo sapiens
  misc_RNA (1)...(19): siRNA sense strand
uggaaaagaugcugcaaaa

SEQ ID NO: 2393702 - RNA, 19 nt, Homo sapiens
  misc_RNA (1)...(19): siRNA sense strand
aggaagaagaagaaagaca

SEQ ID NO: 2393703 - RNA, 19 nt, Homo sapiens
  misc_RNA (1)...(19): siRNA sense strand
ucucaagcauccugauaaa

SEQ ID NO: 2393704 - RNA, 19 nt, Homo sapiens
  misc_RNA (1)...(19): siRNA sense strand
ccacuugaguauauggcaa

SEQ ID NO: 2393705 - RNA, 19 nt, Homo sapiens
  misc_RNA (1)...(19): siRNA sense strand
caccagaggaggaggaaga

SEQ ID NO: 2393706 - RNA, 19 nt, Homo sapiens
  misc_RNA (1)...(19): siRNA sense strand
aguacaggauauugaacaa

SEQ ID NO: 2393707 - RNA, 19 nt, Homo sapiens
  misc_RNA (1)...(19): siRNA sense strand
gcauaagagccuagaucca

SEQ ID NO: 2393708 - RNA, 19 nt, Homo sapiens
  misc_RNA (1)...(19): siRNA sense strand
ccacagaaaggacgaggaa

SEQ ID NO: 2393709 - RNA, 19 nt, Homo sapiens
  misc_RNA (1)...(19): siRNA sense strand
augucaaaguacaggauau

SEQ ID NO: 2393710 - RNA, 19 nt, Homo sapiens
  misc_RNA (1)...(19): siRNA sense strand
cuaaguugguacaggaaca

SEQ ID NO: 2393711 - RNA, 19 nt, Homo sapiens
  misc_RNA (1)...(19): siRNA sense strand
gguucugaugcuugggaaa

SEQ ID NO: 2393712 - RNA, 19 nt, Homo sapiens
  misc_RNA (1)...(19): siRNA sense strand
uguuagaagaugaugagaa

SEQ ID NO: 2393713 - RNA, 19 nt, Homo sapiens
  misc_RNA (1)...(19): siRNA sense strand
cagcagaugaugaagauga

SEQ ID NO: 2393714 - RNA, 19 nt, Homo sapiens
  misc_RNA (1)...(19): siRNA sense strand
cuggaaauauuaauggcua

SEQ ID NO: 2393715 - RNA, 19 nt, Homo sapiens
  misc_RNA (1)...(19): siRNA sense strand
cagaggaggaggaagaaga

SEQ ID NO: 2393716 - RNA, 19 nt, Homo sapiens
  misc_RNA (1)...(19): siRNA sense strand
aagcaaaauugaagaggau

SEQ ID NO: 2393717 - RNA, 19 nt, Homo sapiens
  misc_RNA (1)...(19): siRNA sense strand
agaaauuagguauggauga

SEQ ID NO: 2393718 - RNA, 19 nt, Homo sapiens
  misc_RNA (1)...(19): siRNA sense strand
ccgccuggaaugugugaaa

SEQ ID NO: 2393719 - RNA, 19 nt, Homo sapiens
  misc_RNA (1)...(19): siRNA sense strand
guauggaugacuugacuaa

SEQ ID NO: 2393720 - RNA, 19 nt, Homo sapiens
  misc_RNA (1)...(19): siRNA sense strand
cugguaaggcucaggauuu

SEQ ID NO: 2393721 - RNA, 19 nt, Homo sapiens
  misc_RNA (1)...(19): siRNA sense strand
aagaaagcaguuagaagua

SEQ ID NO: 2393722 - RNA, 19 nt, Homo sapiens
  misc_RNA (1)...(19): siRNA sense strand
aggaggaggaagaagaaga

SEQ ID NO: 2393723 - RNA, 19 nt, Homo sapiens
  misc_RNA (1)...(19): siRNA sense strand
aaguaaaggauuugcuuga

SEQ ID NO: 2393724 - RNA, 19 nt, Homo sapiens
  misc_RNA (1)...(19): siRNA sense strand
aaugaugguucgauggcua

SEQ ID NO: 2393725 - RNA, 19 nt, Homo sapiens
  misc_RNA (1)...(19): siRNA sense strand
cagaaagaugguagaaaau

SEQ ID NO: 2393726 - RNA, 19 nt, Homo sapiens
  misc_RNA (1)...(19): siRNA sense strand
gagagagaacauuagacaa

SEQ ID NO: 2393727 - RNA, 19 nt, Homo sapiens
  misc_RNA (1)...(19): siRNA sense strand
agguugugugcgugaaaua

SEQ ID NO: 2393728 - RNA, 19 nt, Homo sapiens
  misc_RNA (1)...(19): siRNA sense strand
gggaguaucugaagcagca

SEQ ID NO: 2393729 - RNA, 19 nt, Homo sapiens
  misc_RNA (1)...(19): siRNA sense strand
gcaagcaaucucagaccaa

SEQ ID NO: 2393730 - RNA, 19 nt, Homo sapiens
  misc_RNA (1)...(19): siRNA sense strand
acauaugcuuugaguuaga

SEQ ID NO: 2393731 - RNA, 19 nt, Homo sapiens
  misc_RNA (1)...(19): siRNA sense strand
guggaaauacggaacagaa

SEQ ID NO: 2393732 - RNA, 19 nt, Homo sapiens
  misc_RNA (1)...(19): siRNA sense strand
aggauauucuucuggucaa

SEQ ID NO: 2393733 - RNA, 19 nt, Homo sapiens
  misc_RNA (1)...(19): siRNA sense strand
uggaacagcagaugaugaa

SEQ ID NO: 2393734 - RNA, 19 nt, Homo sapiens
  misc_RNA (1)...(19): siRNA sense strand
cgaugaaugcuaucaagua

SEQ ID NO: 2393735 - RNA, 19 nt, Homo sapiens
  misc_RNA (1)...(19): siRNA sense strand
cagauuaugucaaaguaca

SEQ ID NO: 2393736 - RNA, 19 nt, Homo sapiens
  misc_RNA (1)...(19): siRNA sense strand
cauucaaagacuaggacca

SEQ ID NO: 2393737 - RNA, 19 nt, Homo sapiens
  misc_RNA (1)...(19): siRNA sense strand
gggucaagucauauaacau

SEQ ID NO: 2393738 - RNA, 19 nt, Homo sapiens
  misc_RNA (1)...(19): siRNA sense strand
uauuugagccucugcauaa

SEQ ID NO: 2393739 - RNA, 19 nt, Homo sapiens
  misc_RNA (1)...(19): siRNA sense strand
ggggaaaauuaguaaacca

SEQ ID NO: 2393740 - RNA, 19 nt, Homo sapiens
  misc_RNA (1)...(19): siRNA sense strand
ucaaagaguacuacauaca

SEQ ID NO: 2393741 - RNA, 19 nt, Homo sapiens
  misc_RNA (1)...(19): siRNA sense strand
gaacagaauaguccgccaa

SEQ ID NO: 2393742 - RNA, 19 nt, Homo sapiens
  misc_RNA (1)...(19): siRNA sense strand
ugaggaagcuauuagacau

SEQ ID NO: 2393743 - RNA, 19 nt, Homo sapiens
  misc_RNA (1)...(19): siRNA sense strand
gagacuugcugcugggagu

SEQ ID NO: 2393744 - RNA, 19 nt, Homo sapiens
  misc_RNA (1)...(19): siRNA sense strand
cagcaguggccugaggaaa

SEQ ID NO: 2393745 - RNA, 19 nt, Homo sapiens
  misc_RNA (1)...(19): siRNA sense strand
agaagaagaaagacaaagu

SEQ ID NO: 2393746 - RNA, 19 nt, Homo sapiens
  misc_RNA (1)...(19): siRNA sense strand
gggcuagaggauacaaaga

SEQ ID NO: 2393747 - RNA, 19 nt, Homo sapiens
  misc_RNA (1)...(19): siRNA sense strand
cgacaucaaguaaaggauu

SEQ ID NO: 2393748 - RNA, 19 nt, Homo sapiens
  misc_RNA (1)...(19): siRNA sense strand
gguuuguucuggaaauauu

SEQ ID NO: 2393749 - RNA, 19 nt, Homo sapiens
  misc_RNA (1)...(19): siRNA sense strand
cagucagcgaagucggaaa

SEQ ID NO: 2393750 - RNA, 19 nt, Homo sapiens
  misc_RNA (1)...(19): siRNA sense strand
ggccauacggcuucagaau

SEQ ID NO: 2393751 - RNA, 19 nt, Homo sapiens
  misc_RNA (1)...(19): siRNA sense strand
agaagagccaacaaugaaa

SEQ ID NO: 2393752 - RNA, 19 nt, Homo sapiens
  misc_RNA (1)...(19): siRNA sense strand
gagcaaugauaaugaggag

SEQ ID NO: 2393753 - RNA, 19 nt, Homo sapiens
  misc_RNA (1)...(19): siRNA sense strand
agacaaacgauggagagua

SEQ ID NO: 2393754 - RNA, 19 nt, Homo sapiens
  misc_RNA (1)...(19): siRNA sense strand
ucuaaagaggagaugguga

SEQ ID NO: 2393755 - RNA, 19 nt, Homo sapiens
  misc_RNA (1)...(19): siRNA sense strand
gguuacuauuggucauauu

SEQ ID NO: 2393756 - RNA, 19 nt, Homo sapiens
  misc_RNA (1)...(19): siRNA sense strand
ggagaaauuagguauggau

SEQ ID NO: 2393757 - RNA, 19 nt, Homo sapiens
  misc_RNA (1)...(19): siRNA sense strand
ccauacggcuucagaaucu

SEQ ID NO: 2393758 - RNA, 19 nt, Homo sapiens
  misc_RNA (1)...(19): siRNA sense strand
cuaucaacgaugaaugcua

SEQ ID NO: 2393759 - RNA, 19 nt, Homo sapiens
  misc_RNA (1)...(19): siRNA sense strand
cugaagaaccugaggguca

SEQ ID NO: 2393760 - RNA, 19 nt, Homo sapiens
  misc_RNA (1)...(19): siRNA sense strand
ugaagauaaugaaaggcaa

SEQ ID NO: 2393761 - RNA, 19 nt, Homo sapiens
  misc_RNA (1)...(19): siRNA sense strand
acuccaaucaugaagauaa

SEQ ID NO: 2393762 - RNA, 19 nt, Homo sapiens
  misc_RNA (1)...(19): siRNA sense strand
gcuaagggucucuggugaa

SEQ ID NO: 2393763 - RNA, 19 nt, Homo sapiens
  misc_RNA (1)...(19): siRNA sense strand
aggcaaagugagcugcaaa

SEQ ID NO: 2393764 - RNA, 19 nt, Homo sapiens
  misc_RNA (1)...(19): siRNA sense strand
aaugaaaggcaaagcugaa

SEQ ID NO: 2393765 - RNA, 19 nt, Homo sapiens
  misc_RNA (1)...(19): siRNA sense strand
augaagaggaccugcagaa

SEQ ID NO: 2393766 - RNA, 19 nt, Homo sapiens
  misc_RNA (1)...(19): siRNA sense strand
guaccagagaggugcggaa

SEQ ID NO: 2393767 - RNA, 19 nt, Homo sapiens
  misc_RNA (1)...(19): siRNA sense strand
cugaggaugaugagucaaa

SEQ ID NO: 2393768 - RNA, 19 nt, Homo sapiens
  misc_RNA (1)...(19): siRNA sense strand
ggccaagcaaccaggacua

SEQ ID NO: 2393769 - RNA, 19 nt, Homo sapiens
  misc_RNA (1)...(19): siRNA sense strand
agucaaacaaacuggcaga

SEQ ID NO: 2393770 - RNA, 19 nt, Homo sapiens
  misc_RNA (1)...(19): siRNA sense strand
caaacaaacuggcagagca

SEQ ID NO: 2393771 - RNA, 19 nt, Homo sapiens
  misc_RNA (1)...(19): siRNA sense strand
ccaaauacaaggagagagc

SEQ ID NO: 2393772 - RNA, 19 nt, Homo sapiens
  misc_RNA (1)...(19): siRNA sense strand
ccaaccaaauacaaggaga

SEQ ID NO: 2393773 - RNA, 19 nt, Homo sapiens
  misc_RNA (1)...(19): siRNA sense strand
guccaaggucccugaggua

SEQ ID NO: 2393774 - RNA, 19 nt, Homo sapiens
  misc_RNA (1)...(19): siRNA sense strand
agaccagagccguggcaga

SEQ ID NO: 2393775 - RNA, 19 nt, Homo sapiens
  misc_RNA (1)...(19): siRNA sense strand
cuccaaucaugaagauaau

SEQ ID NO: 2393776 - RNA, 19 nt, Homo sapiens
  misc_RNA (1)...(19): siRNA sense strand
ccugauaggaacagugcca

SEQ ID NO: 2393777 - RNA, 19 nt, Homo sapiens
  misc_RNA (1)...(19): siRNA sense strand
cagcugugaagguggucaa

SEQ ID NO: 2393778 - RNA, 19 nt, Homo sapiens
  misc_RNA (1)...(19): siRNA sense strand
guacgaagacuauaagcga

SEQ ID NO: 2393779 - RNA, 19 nt, Homo sapiens
  misc_RNA (1)...(19): siRNA sense strand
auaucuuggcagagcgcaa

SEQ ID NO: 2393780 - RNA, 19 nt, Homo sapiens
  misc_RNA (1)...(19): siRNA sense strand
guccagacacaguggccaa

SEQ ID NO: 2393781 - RNA, 19 nt, Homo sapiens
  misc_RNA (1)...(19): siRNA sense strand
gggugagcccagugcugaa

SEQ ID NO: 2393782 - RNA, 19 nt, Homo sapiens
  misc_RNA (1)...(19): siRNA sense strand
gcugauggacaggcagaaa

SEQ ID NO: 2393783 - RNA, 19 nt, Homo sapiens
  misc_RNA (1)...(19): siRNA sense strand
auucauacacucaaggaga

SEQ ID NO: 2393784 - RNA, 19 nt, Homo sapiens
  misc_RNA (1)...(19): siRNA sense strand
cagcaguacugauggcucu

SEQ ID NO: 2393785 - RNA, 19 nt, Homo sapiens
  misc_RNA (1)...(19): siRNA sense strand
aaaaugacccgacgagaaa

SEQ ID NO: 2393786 - RNA, 19 nt, Homo sapiens
  misc_RNA (1)...(19): siRNA sense strand
aggguggagaagaggauuu

SEQ ID NO: 2393787 - RNA, 19 nt, Homo sapiens
  misc_RNA (1)...(19): siRNA sense strand
gggcugauggacaggcaga

SEQ ID NO: 2393788 - RNA, 19 nt, Homo sapiens
  misc_RNA (1)...(19): siRNA sense strand
aaggcaaagcugaagccaa

SEQ ID NO: 2393789 - RNA, 19 nt, Homo sapiens
  misc_RNA (1)...(19): siRNA sense strand
cgacaaucuuggcaccaga

SEQ ID NO: 2393790 - RNA, 19 nt, Homo sapiens
  misc_RNA (1)...(19): siRNA sense strand
caacuucccaccagggcua

SEQ ID NO: 2393791 - RNA, 19 nt, Homo sapiens
  misc_RNA (1)...(19): siRNA sense strand
aaguugaacaucucacaaa

SEQ ID NO: 2393792 - RNA, 19 nt, Homo sapiens
  misc_RNA (1)...(19): siRNA sense strand
ugaggaugaggguggagaa

SEQ ID NO: 2393793 - RNA, 19 nt, Homo sapiens
  misc_RNA (1)...(19): siRNA sense strand
gagaagaggauuuggccag

SEQ ID NO: 2393794 - RNA, 19 nt, Homo sapiens
  misc_RNA (1)...(19): siRNA sense strand
gugcgcugguuuggagaua

SEQ ID NO: 2393795 - RNA, 19 nt, Homo sapiens
  misc_RNA (1)...(19): siRNA sense strand
ggagcacuuuagauggcua

SEQ ID NO: 2393796 - RNA, 19 nt, Homo sapiens
  misc_RNA (1)...(19): siRNA sense strand
aggaagaggaggcugcuga

SEQ ID NO: 2393797 - RNA, 19 nt, Homo sapiens
  misc_RNA (1)...(19): siRNA sense strand
ggagaagaggauuuggcca

SEQ ID NO: 2393798 - RNA, 19 nt, Homo sapiens
  misc_RNA (1)...(19): siRNA sense strand
ggaaaugcccagcagccau

SEQ ID NO: 2393799 - RNA, 19 nt, Homo sapiens
  misc_RNA (1)...(19): siRNA sense strand
ggcaaagugagcugcaaaa

SEQ ID NO: 2393800 - RNA, 19 nt, Homo sapiens
  misc_RNA (1)...(19): siRNA sense strand
gaacgagauuccagggcug

SEQ ID NO: 2393801 - RNA, 19 nt, Homo sapiens
  misc_RNA (1)...(19): siRNA sense strand
acgaagaccaagugggcaa

SEQ ID NO: 2393802 - RNA, 19 nt, Homo sapiens
  misc_RNA (1)...(19): siRNA sense strand
cggaaugggaguugagaca

SEQ ID NO: 2393803 - RNA, 19 nt, Homo sapiens
  misc_RNA (1)...(19): siRNA sense strand
aggccgagcuggaaggaga

SEQ ID NO: 2393804 - RNA, 19 nt, Homo sapiens
  misc_RNA (1)...(19): siRNA sense strand
aggacaaggagucgggaau

SEQ ID NO: 2393805 - RNA, 19 nt, Homo sapiens
  misc_RNA (1)...(19): siRNA sense strand
gggcaaguuugauuggaga

SEQ ID NO: 2393806 - RNA, 19 nt, Homo sapiens
  misc_RNA (1)...(19): siRNA sense strand
agucauggccugucggaau

SEQ ID NO: 2393807 - RNA, 19 nt, Homo sapiens
  misc_RNA (1)...(19): siRNA sense strand
aggaugacucagugggcua

SEQ ID NO: 2393808 - RNA, 19 nt, Homo sapiens
  misc_RNA (1)...(19): siRNA sense strand
agauacacgcagagcgauu

SEQ ID NO: 2393809 - RNA, 19 nt, Homo sapiens
  misc_RNA (1)...(19): siRNA sense strand
cuaugagggcacugagcaa

SEQ ID NO: 2393810 - RNA, 19 nt, Homo sapiens
  misc_RNA (1)...(19): siRNA sense strand
gaacaaagcagagaggaga

SEQ ID NO: 2393811 - RNA, 19 nt, Homo sapiens
  misc_RNA (1)...(19): siRNA sense strand
gggccugaacugggagaua

SEQ ID NO: 2393812 - RNA, 19 nt, Homo sapiens
  misc_RNA (1)...(19): siRNA sense strand
ccuuuaaacugauggucca

SEQ ID NO: 2393813 - RNA, 19 nt, Homo sapiens
  misc_RNA (1)...(19): siRNA sense strand
gaugaugaauacaagguca

SEQ ID NO: 2393814 - RNA, 19 nt, Homo sapiens
  misc_RNA (1)...(19): siRNA sense strand
ugucaaguuuaauguggaa

SEQ ID NO: 2393815 - RNA, 19 nt, Homo sapiens
  misc_RNA (1)...(19): siRNA sense strand
gguuguagccacagagaag

SEQ ID NO: 2393816 - RNA, 19 nt, Homo sapiens
  misc_RNA (1)...(19): siRNA sense strand
ucgucaaggugaaggggaa

SEQ ID NO: 2393817 - RNA, 19 nt, Homo sapiens
  misc_RNA (1)...(19): siRNA sense strand
aagaugauggugaugguaa

SEQ ID NO: 2393818 - RNA, 19 nt, Homo sapiens
  misc_RNA (1)...(19): siRNA sense strand
cugaugguccagagaacua

SEQ ID NO: 2393819 - RNA, 19 nt, Homo sapiens
  misc_RNA (1)...(19): siRNA sense strand
cgagaucccaacagaacaa

SEQ ID NO: 2393820 - RNA, 19 nt, Homo sapiens
  misc_RNA (1)...(19): siRNA sense strand
uggaaggagaauuuggcaa

SEQ ID NO: 2393821 - RNA, 19 nt, Homo sapiens
  misc_RNA (1)...(19): siRNA sense strand
agguguugcuguugauaga

SEQ ID NO: 2393822 - RNA, 19 nt, Homo sapiens
  misc_RNA (1)...(19): siRNA sense strand
cagagaacuggguggugua

SEQ ID NO: 2393823 - RNA, 19 nt, Homo sapiens
  misc_RNA (1)...(19): siRNA sense strand
guucagcagguuaggguuu

SEQ ID NO: 2393824 - RNA, 19 nt, Homo sapiens
  misc_RNA (1)...(19): siRNA sense strand
gaagaaagccaaaggcccu

SEQ ID NO: 2393825 - RNA, 19 nt, Homo sapiens
  misc_RNA (1)...(19): siRNA sense strand
aauucaaccuccagaagau

SEQ ID NO: 2393826 - RNA, 19 nt, Homo sapiens
  misc_RNA (1)...(19): siRNA sense strand
acgcagagcgauucaucaa

SEQ ID NO: 2393827 - RNA, 19 nt, Homo sapiens
  misc_RNA (1)...(19): siRNA sense strand
agaacaaagcagagaggag

SEQ ID NO: 2393828 - RNA, 19 nt, Homo sapiens
  misc_RNA (1)...(19): siRNA sense strand
acagauacacgcagagcga

SEQ ID NO: 2393829 - RNA, 19 nt, Homo sapiens
  misc_RNA (1)...(19): siRNA sense strand
cuuguuugguuguggccua

SEQ ID NO: 2393830 - RNA, 19 nt, Homo sapiens
  misc_RNA (1)...(19): siRNA sense strand
cggaaugaagugcagaaaa

SEQ ID NO: 2393831 - RNA, 19 nt, Homo sapiens
  misc_RNA (1)...(19): siRNA sense strand
gccuagagaugguggaccu

SEQ ID NO: 2393832 - RNA, 19 nt, Homo sapiens
  misc_RNA (1)...(19): siRNA sense strand
ggaaacaguaucuacccaa

SEQ ID NO: 2393833 - RNA, 19 nt, Homo sapiens
  misc_RNA (1)...(19): siRNA sense strand
ggaacaucucccagaaagu

SEQ ID NO: 2393834 - RNA, 19 nt, Homo sapiens
  misc_RNA (1)...(19): siRNA sense strand
gugaggagucccuggcaga

SEQ ID NO: 2393835 - RNA, 19 nt, Homo sapiens
  misc_RNA (1)...(19): siRNA sense strand
agucagauuaagaaugaga

SEQ ID NO: 2393836 - RNA, 19 nt, Homo sapiens
  misc_RNA (1)...(19): siRNA sense strand
gaaguugguuguagccaca

SEQ ID NO: 2393837 - RNA, 19 nt, Homo sapiens
  misc_RNA (1)...(19): siRNA sense strand
cuccagaagaugaugguga

SEQ ID NO: 2393838 - RNA, 19 nt, Homo sapiens
  misc_RNA (1)...(19): siRNA sense strand
acgccaagguguugcuguu

SEQ ID NO: 2393839 - RNA, 19 nt, Homo sapiens
  misc_RNA (1)...(19): siRNA sense strand
augagggcacugagcaaua

SEQ ID NO: 2393840 - RNA, 19 nt, Homo sapiens
  misc_RNA (1)...(19): siRNA sense strand
cugcuggacaccacgauaa

SEQ ID NO: 2393841 - RNA, 19 nt, Homo sapiens
  misc_RNA (1)...(19): siRNA sense strand
gggacggcuguguggauau

SEQ ID NO: 2393842 - RNA, 19 nt, Homo sapiens
  misc_RNA (1)...(19): siRNA sense strand
cguuucuggcuuugggcua

SEQ ID NO: 2393843 - RNA, 19 nt, Homo sapiens
  misc_RNA (1)...(19): siRNA sense strand
caauauguugggaagguca

SEQ ID NO: 2393844 - RNA, 19 nt, Homo sapiens
  misc_RNA (1)...(19): siRNA sense strand
uggaagauggagagauugu

SEQ ID NO: 2393845 - RNA, 19 nt, Homo sapiens
  misc_RNA (1)...(19): siRNA sense strand
uuaccguacuggagcucua

SEQ ID NO: 2393846 - RNA, 19 nt, Homo sapiens
  misc_RNA (1)...(19): siRNA sense strand
agaccaagugggcaaguuu

SEQ ID NO: 2393847 - RNA, 19 nt, Homo sapiens
  misc_RNA (1)...(19): siRNA sense strand
aacaaagcagagaggagaa

SEQ ID NO: 2393848 - RNA, 19 nt, Homo sapiens
  misc_RNA (1)...(19): siRNA sense strand
ccuguggugugguggauga

SEQ ID NO: 2393849 - RNA, 19 nt, Homo sapiens
  misc_RNA (1)...(19): siRNA sense strand
ucaaaggacucucuggcuu

SEQ ID NO: 2393850 - RNA, 19 nt, Homo sapiens
  misc_RNA (1)...(19): siRNA sense strand
cggccugagcggcuguaua

SEQ ID NO: 2393851 - RNA, 19 nt, Homo sapiens
  misc_RNA (1)...(19): siRNA sense strand
aaagcagagaggagaacuu

SEQ ID NO: 2393852 - RNA, 19 nt, Homo sapiens
  misc_RNA (1)...(19): siRNA sense strand
acaucgcaguccugaagaa

SEQ ID NO: 2393853 - RNA, 19 nt, Homo sapiens
  misc_RNA (1)...(19): siRNA sense strand
ugaaagaaguacaagcaga

SEQ ID NO: 2393854 - RNA, 19 nt, Homo sapiens
  misc_RNA (1)...(19): siRNA sense strand
ugcuagaguacaugagaaa

SEQ ID NO: 2393855 - RNA, 19 nt, Homo sapiens
  misc_RNA (1)...(19): siRNA sense strand
cgaaggaaguggagcugga

SEQ ID NO: 2393856 - RNA, 19 nt, Homo sapiens
  misc_RNA (1)...(19): siRNA sense strand
aguuacaggaggagaaaca

SEQ ID NO: 2393857 - RNA, 19 nt, Homo sapiens
  misc_RNA (1)...(19): siRNA sense strand
agagaagcuccuugggcaa

SEQ ID NO: 2393858 - RNA, 19 nt, Homo sapiens
  misc_RNA (1)...(19): siRNA sense strand
aggaggagaaacaggaauu

SEQ ID NO: 2393859 - RNA, 19 nt, Homo sapiens
  misc_RNA (1)...(19): siRNA sense strand
ugacagacucagaggacga

SEQ ID NO: 2393860 - RNA, 19 nt, Homo sapiens
  misc_RNA (1)...(19): siRNA sense strand
ccagaccaucagugagaaa

SEQ ID NO: 2393861 - RNA, 19 nt, Homo sapiens
  misc_RNA (1)...(19): siRNA sense strand
cuggacaggcuuagagaca

SEQ ID NO: 2393862 - RNA, 19 nt, Homo sapiens
  misc_RNA (1)...(19): siRNA sense strand
guguggaggcagagaagga

SEQ ID NO: 2393863 - RNA, 19 nt, Homo sapiens
  misc_RNA (1)...(19): siRNA sense strand
aggcagagaaggacaagau

SEQ ID NO: 2393864 - RNA, 19 nt, Homo sapiens
  misc_RNA (1)...(19): siRNA sense strand
acuuaaauuuggaccugaa

SEQ ID NO: 2393865 - RNA, 19 nt, Homo sapiens
  misc_RNA (1)...(19): siRNA sense strand
uggcacaacaggagaacca

SEQ ID NO: 2393866 - RNA, 19 nt, Homo sapiens
  misc_RNA (1)...(19): siRNA sense strand
agaagguggcagaugagaa

SEQ ID NO: 2393867 - RNA, 19 nt, Homo sapiens
  misc_RNA (1)...(19): siRNA sense strand
gcucugacucggaggcuga

SEQ ID NO: 2393868 - RNA, 19 nt, Homo sapiens
  misc_RNA (1)...(19): siRNA sense strand
acaagguggcccagaugaa

SEQ ID NO: 2393869 - RNA, 19 nt, Homo sapiens
  misc_RNA (1)...(19): siRNA sense strand
aagaaguacaagcagacaa

SEQ ID NO: 2393870 - RNA, 19 nt, Homo sapiens
  misc_RNA (1)...(19): siRNA sense strand
caggaggagaggacccaaa

SEQ ID NO: 2393871 - RNA, 19 nt, Homo sapiens
  misc_RNA (1)...(19): siRNA sense strand
aggaaaaggagcaguuaca

SEQ ID NO: 2393872 - RNA, 19 nt, Homo sapiens
  misc_RNA (1)...(19): siRNA sense strand
ugaaagacaagguggccca

SEQ ID NO: 2393873 - RNA, 19 nt, Homo sapiens
  misc_RNA (1)...(19): siRNA sense strand
gcaccauagccgaacuaca

SEQ ID NO: 2393874 - RNA, 19 nt, Homo sapiens
  misc_RNA (1)...(19): siRNA sense strand
agcaguuacaggaggagaa

SEQ ID NO: 2393875 - RNA, 19 nt, Homo sapiens
  misc_RNA (1)...(19): siRNA sense strand
gcgaagagcuggcaagagg

SEQ ID NO: 2393876 - RNA, 19 nt, Homo sapiens
  misc_RNA (1)...(19): siRNA sense strand
gcuccuugggcaacugaaa

SEQ ID NO: 2393877 - RNA, 19 nt, Homo sapiens
  misc_RNA (1)...(19): siRNA sense strand
guuugcacuugaaggaaga

SEQ ID NO: 2393878 - RNA, 19 nt, Homo sapiens
  misc_RNA (1)...(19): siRNA sense strand
gacaagauccugaagcuga

SEQ ID NO: 2393879 - RNA, 19 nt, Homo sapiens
  misc_RNA (1)...(19): siRNA sense strand
aagagaagcuccuugggca

SEQ ID NO: 2393880 - RNA, 19 nt, Homo sapiens
  misc_RNA (1)...(19): siRNA sense strand
ggaaugaccugaugcagcu

SEQ ID NO: 2393881 - RNA, 19 nt, Homo sapiens
  misc_RNA (1)...(19): siRNA sense strand
ugacgaaggaaguggagcu

SEQ ID NO: 2393882 - RNA, 19 nt, Homo sapiens
  misc_RNA (1)...(19): siRNA sense strand
uugcuagaguacaugagaa

SEQ ID NO: 2393883 - RNA, 19 nt, Homo sapiens
  misc_RNA (1)...(19): siRNA sense strand
aggaggaguuugauggcaa

SEQ ID NO: 2393884 - RNA, 19 nt, Homo sapiens
  misc_RNA (1)...(19): siRNA sense strand
gagaagaaauacagcccuu

SEQ ID NO: 2393885 - RNA, 19 nt, Homo sapiens
  misc_RNA (1)...(19): siRNA sense strand
ccuugauacuccuggcaca

SEQ ID NO: 2393886 - RNA, 19 nt, Homo sapiens
  misc_RNA (1)...(19): siRNA sense strand
ccagaagacucaagccauc

SEQ ID NO: 2393887 - RNA, 19 nt, Homo sapiens
  misc_RNA (1)...(19): siRNA sense strand
ccacugaacuuuaccagca

SEQ ID NO: 2393888 - RNA, 19 nt, Homo sapiens
  misc_RNA (1)...(19): siRNA sense strand
cugaauaaccuggaagcau

SEQ ID NO: 2393889 - RNA, 19 nt, Homo sapiens
  misc_RNA (1)...(19): siRNA sense strand
cuaacagagaagaaauaca

SEQ ID NO: 2393890 - RNA, 19 nt, Homo sapiens
  misc_RNA (1)...(19): siRNA sense strand
uuuaccagcaacugaauaa

SEQ ID NO: 2393891 - RNA, 19 nt, Homo sapiens
  misc_RNA (1)...(19): siRNA sense strand
ugaauaaccuggaagcaug

SEQ ID NO: 2393892 - RNA, 19 nt, Homo sapiens
  misc_RNA (1)...(19): siRNA sense strand
auucagaagaagagagaaa

SEQ ID NO: 2393893 - RNA, 19 nt, Homo sapiens
  misc_RNA (1)...(19): siRNA sense strand
augaaaugguagagcaaga

SEQ ID NO: 2393894 - RNA, 19 nt, Homo sapiens
  misc_RNA (1)...(19): siRNA sense strand
ugguagagcaagaguuuaa

SEQ ID NO: 2393895 - RNA, 19 nt, Homo sapiens
  misc_RNA (1)...(19): siRNA sense strand
agaugaaaugguagagcaa

SEQ ID NO: 2393896 - RNA, 19 nt, Homo sapiens
  misc_RNA (1)...(19): siRNA sense strand
cugcaguugugguuggaua

SEQ ID NO: 2393897 - RNA, 19 nt, Homo sapiens
  misc_RNA (1)...(19): siRNA sense strand
gcaccuuauaacagugaua

SEQ ID NO: 2393898 - RNA, 19 nt, Homo sapiens
  misc_RNA (1)...(19): siRNA sense strand
ccaaagcagagaaggaaaa

SEQ ID NO: 2393899 - RNA, 19 nt, Homo sapiens
  misc_RNA (1)...(19): siRNA sense strand
uggccaagaucaagcaaaa

SEQ ID NO: 2393900 - RNA, 19 nt, Homo sapiens
  misc_RNA (1)...(19): siRNA sense strand
gccaaagcagagaaggaaa

SEQ ID NO: 2393901 - RNA, 19 nt, Homo sapiens
  misc_RNA (1)...(19): siRNA sense strand
agaaagaugaaaugguaga

SEQ ID NO: 2393902 - RNA, 19 nt, Homo sapiens
  misc_RNA (1)...(19): siRNA sense strand
aggaagaauugaaagaacu

SEQ ID NO: 2393903 - RNA, 19 nt, Homo sapiens
  misc_RNA (1)...(19): siRNA sense strand
aucaagagacagacaaaua

SEQ ID NO: 2393904 - RNA, 19 nt, Homo sapiens
  misc_RNA (1)...(19): siRNA sense strand
ucaucaagagacagacaaa

SEQ ID NO: 2393905 - RNA, 19 nt, Homo sapiens
  misc_RNA (1)...(19): siRNA sense strand
agaagagagaaaugccaaa

SEQ ID NO: 2393906 - RNA, 19 nt, Homo sapiens
  misc_RNA (1)...(19): siRNA sense strand
uagcugaaacacaaggaaa

SEQ ID NO: 2393907 - RNA, 19 nt, Homo sapiens
  misc_RNA (1)...(19): siRNA sense strand
acaaauacuugauuggcau

SEQ ID NO: 2393908 - RNA, 19 nt, Homo sapiens
  misc_RNA (1)...(19): siRNA sense strand
ugaaagugagccugaagaa

SEQ ID NO: 2393909 - RNA, 19 nt, Homo sapiens
  misc_RNA (1)...(19): siRNA sense strand
cuauguugcugcaggauca

SEQ ID NO: 2393910 - RNA, 19 nt, Homo sapiens
  misc_RNA (1)...(19): siRNA sense strand
acuucaauguccucaauaa

SEQ ID NO: 2393911 - RNA, 19 nt, Homo sapiens
  misc_RNA (1)...(19): siRNA sense strand
cagauugaacauuggaaga

SEQ ID NO: 2393912 - RNA, 19 nt, Homo sapiens
  misc_RNA (1)...(19): siRNA sense strand
gggaagaauugcagaccag

SEQ ID NO: 2393913 - RNA, 19 nt, Homo sapiens
  misc_RNA (1)...(19): siRNA sense strand
agcuguuccuaaagagaaa

SEQ ID NO: 2393914 - RNA, 19 nt, Homo sapiens
  misc_RNA (1)...(19): siRNA sense strand
caggaagaauugaaagaac

SEQ ID NO: 2393915 - RNA, 19 nt, Homo sapiens
  misc_RNA (1)...(19): siRNA sense strand
ccaccugacaguaaggaau

SEQ ID NO: 2393916 - RNA, 19 nt, Homo sapiens
  misc_RNA (1)...(19): siRNA sense strand
aagaagcaucugaaguaaa

SEQ ID NO: 2393917 - RNA, 19 nt, Homo sapiens
  misc_RNA (1)...(19): siRNA sense strand
agcagaaggccuagacauu

SEQ ID NO: 2393918 - RNA, 19 nt, Homo sapiens
  misc_RNA (1)...(19): siRNA sense strand
ggccauucucaaagggauu

SEQ ID NO: 2393919 - RNA, 19 nt, Homo sapiens
  misc_RNA (1)...(19): siRNA sense strand
caggagaagcugcugguau

SEQ ID NO: 2393920 - RNA, 19 nt, Homo sapiens
  misc_RNA (1)...(19): siRNA sense strand
gugcaguaccucagcccaa

SEQ ID NO: 2393921 - RNA, 19 nt, Homo sapiens
  misc_RNA (1)...(19): siRNA sense strand
cugaagaaccaucgggugu

SEQ ID NO: 2393922 - RNA, 19 nt, Homo sapiens
  misc_RNA (1)...(19): siRNA sense strand
uuggaagaagauagugaaa

SEQ ID NO: 2393923 - RNA, 19 nt, Homo sapiens
  misc_RNA (1)...(19): siRNA sense strand
aggaagaaaaugaaaguga

SEQ ID NO: 2393924 - RNA, 19 nt, Homo sapiens
  misc_RNA (1)...(19): siRNA sense strand
uuaugaagccaacggacaa

SEQ ID NO: 2393925 - RNA, 19 nt, Homo sapiens
  misc_RNA (1)...(19): siRNA sense strand
cauuggaagaagauaguga

SEQ ID NO: 2393926 - RNA, 19 nt, Homo sapiens
  misc_RNA (1)...(19): siRNA sense strand
ggcuuuagcagaaggccua

SEQ ID NO: 2393927 - RNA, 19 nt, Homo sapiens
  misc_RNA (1)...(19): siRNA sense strand
cugcaggaucaucuggaaa

SEQ ID NO: 2393928 - RNA, 19 nt, Homo sapiens
  misc_RNA (1)...(19): siRNA sense strand
acaguuauuuagagcguca

SEQ ID NO: 2393929 - RNA, 19 nt, Homo sapiens
  misc_RNA (1)...(19): siRNA sense strand
agacaggaaagguaauuau

SEQ ID NO: 2393930 - RNA, 19 nt, Homo sapiens
  misc_RNA (1)...(19): siRNA sense strand
uggaacuggccaagaucaa

SEQ ID NO: 2393931 - RNA, 19 nt, Homo sapiens
  misc_RNA (1)...(19): siRNA sense strand
augccaaagcagagaagga

SEQ ID NO: 2393932 - RNA, 19 nt, Homo sapiens
  misc_RNA (1)...(19): siRNA sense strand
aaguaaagccacccagaga

SEQ ID NO: 2393933 - RNA, 19 nt, Homo sapiens
  misc_RNA (1)...(19): siRNA sense strand
augcaaggaauaugaugaa

SEQ ID NO: 2393934 - RNA, 19 nt, Homo sapiens
  misc_RNA (1)...(19): siRNA sense strand
agagaaaugccaaagcaga

SEQ ID NO: 2393935 - RNA, 19 nt, Homo sapiens
  misc_RNA (1)...(19): siRNA sense strand
gugaagugauagcugugaa

SEQ ID NO: 2393936 - RNA, 19 nt, Homo sapiens
  misc_RNA (1)...(19): siRNA sense strand
ggcaucuauaagaggauaa

SEQ ID NO: 2393937 - RNA, 19 nt, Homo sapiens
  misc_RNA (1)...(19): siRNA sense strand
ggcacuaguggcaggagaa

SEQ ID NO: 2393938 - RNA, 19 nt, Homo sapiens
  misc_RNA (1)...(19): siRNA sense strand
aagcagagaaggaaaagaa

SEQ ID NO: 2393939 - RNA, 19 nt, Homo sapiens
  misc_RNA (1)...(19): siRNA sense strand
ccuaaagagaaagaugaaa

SEQ ID NO: 2393940 - RNA, 19 nt, Homo sapiens
  misc_RNA (1)...(19): siRNA sense strand
ccaaagaaacugugguguc

SEQ ID NO: 2393941 - RNA, 19 nt, Homo sapiens
  misc_RNA (1)...(19): siRNA sense strand
augaauuagcugaaacaca

SEQ ID NO: 2393942 - RNA, 19 nt, Homo sapiens
  misc_RNA (1)...(19): siRNA sense strand
ggaugaugacuuugaguuc

SEQ ID NO: 2393943 - RNA, 19 nt, Homo sapiens
  misc_RNA (1)...(19): siRNA sense strand
uaaauauggaacuggccaa

SEQ ID NO: 2393944 - RNA, 19 nt, Homo sapiens
  misc_RNA (1)...(19): siRNA sense strand
aagaacuccaucagcaaua

SEQ ID NO: 2393945 - RNA, 19 nt, Homo sapiens
  misc_RNA (1)...(19): siRNA sense strand
cugccgaguucuuagugaa

SEQ ID NO: 2393946 - RNA, 19 nt, Homo sapiens
  misc_RNA (1)...(19): siRNA sense strand
auacaaagaagcaucugaa

SEQ ID NO: 2393947 - RNA, 19 nt, Homo sapiens
  misc_RNA (1)...(19): siRNA sense strand
ugaugaauuagcugaaaca

SEQ ID NO: 2393948 - RNA, 19 nt, Homo sapiens
  misc_RNA (1)...(19): siRNA sense strand
aagaagagagaaaugccaa

SEQ ID NO: 2393949 - RNA, 19 nt, Homo sapiens
  misc_RNA (1)...(19): siRNA sense strand
ccaaagauucagcugacau

SEQ ID NO: 2393950 - RNA, 19 nt, Homo sapiens
  misc_RNA (1)...(19): siRNA sense strand
acaagagaagcaugucaaa

SEQ ID NO: 2393951 - RNA, 19 nt, Homo sapiens
  misc_RNA (1)...(19): siRNA sense strand
agauauuacugccgaguuc

SEQ ID NO: 2393952 - RNA, 19 nt, Homo sapiens
  misc_RNA (1)...(19): siRNA sense strand
ugacaguaaggaauggcua

SEQ ID NO: 2393953 - RNA, 19 nt, Homo sapiens
  misc_RNA (1)...(19): siRNA sense strand
uccuaaagagaaagaugaa

SEQ ID NO: 2393954 - RNA, 19 nt, Homo sapiens
  misc_RNA (1)...(19): siRNA sense strand
ugaauuugcuaaugccaca

SEQ ID NO: 2393955 - RNA, 19 nt, Homo sapiens
  misc_RNA (1)...(19): siRNA sense strand
ugaauacagcagugcgaca

SEQ ID NO: 2393956 - RNA, 19 nt, Homo sapiens
  misc_RNA (1)...(19): siRNA sense strand
cgaugugauuguuggccga

SEQ ID NO: 2393957 - RNA, 19 nt, Homo sapiens
  misc_RNA (1)...(19): siRNA sense strand
cgggaagaauugcagacca

SEQ ID NO: 2393958 - RNA, 19 nt, Homo sapiens
  misc_RNA (1)...(19): siRNA sense strand
agauugaacauuggaagaa

SEQ ID NO: 2393959 - RNA, 19 nt, Homo sapiens
  misc_RNA (1)...(19): siRNA sense strand
guugaaaggcaaagaggaa

SEQ ID NO: 2393960 - RNA, 19 nt, Homo sapiens
  misc_RNA (1)...(19): siRNA sense strand
augccaagauaaugagaaa

SEQ ID NO: 2393961 - RNA, 19 nt, Homo sapiens
  misc_RNA (1)...(19): siRNA sense strand
cagaaagagaagaagaaaa

SEQ ID NO: 2393962 - RNA, 19 nt, Homo sapiens
  misc_RNA (1)...(19): siRNA sense strand
gguaauggaugcagggugu

SEQ ID NO: 2393963 - RNA, 19 nt, Homo sapiens
  misc_RNA (1)...(19): siRNA sense strand
aggauaucuuagaggaaau

SEQ ID NO: 2393964 - RNA, 19 nt, Homo sapiens
  misc_RNA (1)...(19): siRNA sense strand
gagaagaagaaaagggaga

SEQ ID NO: 2393965 - RNA, 19 nt, Homo sapiens
  misc_RNA (1)...(19): siRNA sense strand
ccagaaagaggcggagaaa

SEQ ID NO: 2393966 - RNA, 19 nt, Homo sapiens
  misc_RNA (1)...(19): siRNA sense strand
cugaauugccugacgagaa

SEQ ID NO: 2393967 - RNA, 19 nt, Homo sapiens
  misc_RNA (1)...(19): siRNA sense strand
guuuggaguugaaaggcaa

SEQ ID NO: 2393968 - RNA, 19 nt, Homo sapiens
  misc_RNA (1)...(19): siRNA sense strand
caguauaagaggucgccua

SEQ ID NO: 2393969 - RNA, 19 nt, Homo sapiens
  misc_RNA (1)...(19): siRNA sense strand
ugaaaggcaaagaggaaga

SEQ ID NO: 2393970 - RNA, 19 nt, Homo sapiens
  misc_RNA (1)...(19): siRNA sense strand
gagaaaauuggcaagaaaa

SEQ ID NO: 2393971 - RNA, 19 nt, Homo sapiens
  misc_RNA (1)...(19): siRNA sense strand
aggaaagaugauggagaaa

SEQ ID NO: 2393972 - RNA, 19 nt, Homo sapiens
  misc_RNA (1)...(19): siRNA sense strand
cggagaaagccguacauca

SEQ ID NO: 2393973 - RNA, 19 nt, Homo sapiens
  misc_RNA (1)...(19): siRNA sense strand
ucucaggaguagaaaauua

SEQ ID NO: 2393974 - RNA, 19 nt, Homo sapiens
  misc_RNA (1)...(19): siRNA sense strand
cgaguuguugggaggaaua

SEQ ID NO: 2393975 - RNA, 19 nt, Homo sapiens
  misc_RNA (1)...(19): siRNA sense strand
agaaagaggcggagaaagc

SEQ ID NO: 2393976 - RNA, 19 nt, Homo sapiens
  misc_RNA (1)...(19): siRNA sense strand
agagugucacagagaauaa

SEQ ID NO: 2393977 - RNA, 19 nt, Homo sapiens
  misc_RNA (1)...(19): siRNA sense strand
gaccaggaggccagugaaa

SEQ ID NO: 2393978 - RNA, 19 nt, Homo sapiens
  misc_RNA (1)...(19): siRNA sense strand
agaauuuaaccguagacaa

SEQ ID NO: 2393979 - RNA, 19 nt, Homo sapiens
  misc_RNA (1)...(19): siRNA sense strand
acgccaagaaaaugagaaa

SEQ ID NO: 2393980 - RNA, 19 nt, Homo sapiens
  misc_RNA (1)...(19): siRNA sense strand
ugacagagguguaaagcac

SEQ ID NO: 2393981 - RNA, 19 nt, Homo sapiens
  misc_RNA (1)...(19): siRNA sense strand
ggccaacagucaagagcca

SEQ ID NO: 2393982 - RNA, 19 nt, Homo sapiens
  misc_RNA (1)...(19): siRNA sense strand
acaggauaucuuagaggaa

SEQ ID NO: 2393983 - RNA, 19 nt, Homo sapiens
  misc_RNA (1)...(19): siRNA sense strand
uaagagugucacagagaau

SEQ ID NO: 2393984 - RNA, 19 nt, Homo sapiens
  misc_RNA (1)...(19): siRNA sense strand
gggaggcagaggagguaau

SEQ ID NO: 2393985 - RNA, 19 nt, Homo sapiens
  misc_RNA (1)...(19): siRNA sense strand
aacagaaagagaagaagaa

SEQ ID NO: 2393986 - RNA, 19 nt, Homo sapiens
  misc_RNA (1)...(19): siRNA sense strand
cccagaaagaggcggagaa

SEQ ID NO: 2393987 - RNA, 19 nt, Homo sapiens
  misc_RNA (1)...(19): siRNA sense strand
aaaggaaagaugauggaga

SEQ ID NO: 2393988 - RNA, 19 nt, Homo sapiens
  misc_RNA (1)...(19): siRNA sense strand
ggaaagaugauggagaaaa

SEQ ID NO: 2393989 - RNA, 19 nt, Homo sapiens
  misc_RNA (1)...(19): siRNA sense strand
ugguaaggagagugaccua

SEQ ID NO: 2393990 - RNA, 19 nt, Homo sapiens
  misc_RNA (1)...(19): siRNA sense strand
caaaagaaguccaacgcuu

SEQ ID NO: 2393991 - RNA, 19 nt, Homo sapiens
  misc_RNA (1)...(19): siRNA sense strand
aaggcaaagaggaagaaau

SEQ ID NO: 2393992 - RNA, 19 nt, Homo sapiens
  misc_RNA (1)...(19): siRNA sense strand
gauuuaaaccggaugagga

SEQ ID NO: 2393993 - RNA, 19 nt, Homo sapiens
  misc_RNA (1)...(19): siRNA sense strand
ggagaaaaugcuaaaccaa

SEQ ID NO: 2393994 - RNA, 19 nt, Homo sapiens
  misc_RNA (1)...(19): siRNA sense strand
gccaagauaaugagaaagu

SEQ ID NO: 2393995 - RNA, 19 nt, Homo sapiens
  misc_RNA (1)...(19): siRNA sense strand
agaauaaaaucucggauca

SEQ ID NO: 2393996 - RNA, 19 nt, Homo sapiens
  misc_RNA (1)...(19): siRNA sense strand
ggugauggaacuagagauc

SEQ ID NO: 2393997 - RNA, 19 nt, Homo sapiens
  misc_RNA (1)...(19): siRNA sense strand
gcuuugugacucagggaga

SEQ ID NO: 2393998 - RNA, 19 nt, Homo sapiens
  misc_RNA (1)...(19): siRNA sense strand
uguaagagugucacagaga

SEQ ID NO: 2393999 - RNA, 19 nt, Homo sapiens
  misc_RNA (1)...(19): siRNA sense strand
ggcuguuggcuguggagaa

SEQ ID NO: 2394000 - RNA, 19 nt, Homo sapiens
  misc_RNA (1)...(19): siRNA sense strand
aggagauugcccagaaaga

SEQ ID NO: 2394001 - RNA, 19 nt, Homo sapiens
  misc_RNA (1)...(19): siRNA sense strand
guaagaaaccugacagcgu

SEQ ID NO: 2394002 - RNA, 19 nt, Homo sapiens
  misc_RNA (1)...(19): siRNA sense strand
gcagaggggcuuagugcua

SEQ ID NO: 2394003 - RNA, 19 nt, Homo sapiens
  misc_RNA (1)...(19): siRNA sense strand
cgaagagccaugagccaca

SEQ ID NO: 2394004 - RNA, 19 nt, Homo sapiens
  misc_RNA (1)...(19): siRNA sense strand
cgucaaacgccuucccaga

SEQ ID NO: 2394005 - RNA, 19 nt, Homo sapiens
  misc_RNA (1)...(19): siRNA sense strand
guagaaaauuacugaagca

SEQ ID NO: 2394006 - RNA, 19 nt, Homo sapiens
  misc_RNA (1)...(19): siRNA sense strand
cuaccauacucuuggaucu

SEQ ID NO: 2394007 - RNA, 19 nt, Homo sapiens
  misc_RNA (1)...(19): siRNA sense strand
ggaugcuguuugcggaaga

SEQ ID NO: 2394008 - RNA, 19 nt, Homo sapiens
  misc_RNA (1)...(19): siRNA sense strand
acagaaagagaagaagaaa

SEQ ID NO: 2394009 - RNA, 19 nt, Homo sapiens
  misc_RNA (1)...(19): siRNA sense strand
agaaaacacgccaagaaaa

SEQ ID NO: 2394010 - RNA, 19 nt, Homo sapiens
  misc_RNA (1)...(19): siRNA sense strand
gcgauuugacgauggagau

SEQ ID NO: 2394011 - RNA, 19 nt, Homo sapiens
  misc_RNA (1)...(19): siRNA sense strand
aggaaaagugacuggugaa

SEQ ID NO: 2394012 - RNA, 19 nt, Homo sapiens
  misc_RNA (1)...(19): siRNA sense strand
aguauaagaggucgccuaa

SEQ ID NO: 2394013 - RNA, 19 nt, Homo sapiens
  misc_RNA (1)...(19): siRNA sense strand
aagaaaacacgccaagaaa

SEQ ID NO: 2394014 - RNA, 19 nt, Homo sapiens
  misc_RNA (1)...(19): siRNA sense strand
acgcauagcuuuaucugga

SEQ ID NO: 2394015 - RNA, 19 nt, Homo sapiens
  misc_RNA (1)...(19): siRNA sense strand
acgaagaggaggaggacga

SEQ ID NO: 2394016 - RNA, 19 nt, Homo sapiens
  misc_RNA (1)...(19): siRNA sense strand
acgaagaggaggaggagga

SEQ ID NO: 2394017 - RNA, 19 nt, Homo sapiens
  misc_RNA (1)...(19): siRNA sense strand
aggaggaggaggaggauga

SEQ ID NO: 2394018 - RNA, 19 nt, Homo sapiens
  misc_RNA (1)...(19): siRNA sense strand
aggagauggaggagaguga

SEQ ID NO: 2394019 - RNA, 19 nt, Homo sapiens
  misc_RNA (1)...(19): siRNA sense strand
gggcagggguugagagaac

SEQ ID NO: 2394020 - RNA, 19 nt, Homo sapiens
  misc_RNA (1)...(19): siRNA sense strand
gggcaguagcaguggugga

SEQ ID NO: 2394021 - RNA, 19 nt, Homo sapiens
  misc_RNA (1)...(19): siRNA sense strand
gcggagaggagauggagga

SEQ ID NO: 2394022 - RNA, 19 nt, Homo sapiens
  misc_RNA (1)...(19): siRNA sense strand
aggaggaggaugaggagga

SEQ ID NO: 2394023 - RNA, 19 nt, Homo sapiens
  misc_RNA (1)...(19): siRNA sense strand
ccaccacguuggaggcaga

SEQ ID NO: 2394024 - RNA, 19 nt, Homo sapiens
  misc_RNA (1)...(19): siRNA sense strand
gagaggagauggaggagag

SEQ ID NO: 2394025 - RNA, 19 nt, Homo sapiens
  misc_RNA (1)...(19): siRNA sense strand
aggacgaagaggaggagga

SEQ ID NO: 2394026 - RNA, 19 nt, Homo sapiens
  misc_RNA (1)...(19): siRNA sense strand
aggacgaagaggaggagga

SEQ ID NO: 2394027 - RNA, 19 nt, Homo sapiens
  misc_RNA (1)...(19): siRNA sense strand
aagaggaggaggaggagga

SEQ ID NO: 2394028 - RNA, 19 nt, Homo sapiens
  misc_RNA (1)...(19): siRNA sense strand
ggggauaggggcugccaaa

SEQ ID NO: 2394029 - RNA, 19 nt, Homo sapiens
  misc_RNA (1)...(19): siRNA sense strand
ccaaacggcugcagaccca

SEQ ID NO: 2394030 - RNA, 19 nt, Homo sapiens
  misc_RNA (1)...(19): siRNA sense strand
acuauaaccugaagaccca

SEQ ID NO: 2394031 - RNA, 19 nt, Homo sapiens
  misc_RNA (1)...(19): siRNA sense strand
gugaggaggacgaagagga

SEQ ID NO: 2394032 - RNA, 19 nt, Homo sapiens
  misc_RNA (1)...(19): siRNA sense strand
gugcaaggcuggagcugcu

SEQ ID NO: 2394033 - RNA, 19 nt, Homo sapiens
  misc_RNA (1)...(19): siRNA sense strand
ccuacaagaccuacagcca

SEQ ID NO: 2394034 - RNA, 19 nt, Homo sapiens
  misc_RNA (1)...(19): siRNA sense strand
aggaggacgaagaggagga

SEQ ID NO: 2394035 - RNA, 19 nt, Homo sapiens
  misc_RNA (1)...(19): siRNA sense strand
aggaggacgaagaggagga

SEQ ID NO: 2394036 - RNA, 19 nt, Homo sapiens
  misc_RNA (1)...(19): siRNA sense strand
ccacccaagaaacgagaau

SEQ ID NO: 2394037 - RNA, 19 nt, Homo sapiens
  misc_RNA (1)...(19): siRNA sense strand
ccucauagccggagacacc

SEQ ID NO: 2394038 - RNA, 19 nt, Homo sapiens
  misc_RNA (1)...(19): siRNA sense strand
ccuucaccacccugagaaa

SEQ ID NO: 2394039 - RNA, 19 nt, Homo sapiens
  misc_RNA (1)...(19): siRNA sense strand
aggaggaggacgaagagga

SEQ ID NO: 2394040 - RNA, 19 nt, Homo sapiens
  misc_RNA (1)...(19): siRNA sense strand
ggggaaaaucugggaguga

SEQ ID NO: 2394041 - RNA, 19 nt, Homo sapiens
  misc_RNA (1)...(19): siRNA sense strand
gaauaggggaggaggccau

SEQ ID NO: 2394042 - RNA, 19 nt, Homo sapiens
  misc_RNA (1)...(19): siRNA sense strand
uggaggagagugaggagga

SEQ ID NO: 2394043 - RNA, 19 nt, Homo sapiens
  misc_RNA (1)...(19): siRNA sense strand
gggaggugaugccugggua

SEQ ID NO: 2394044 - RNA, 19 nt, Homo sapiens
  misc_RNA (1)...(19): siRNA sense strand
aggagagugaggaggacga

SEQ ID NO: 2394045 - RNA, 19 nt, Homo sapiens
  misc_RNA (1)...(19): siRNA sense strand
aaguagaagcagugcauaa

SEQ ID NO: 2394046 - RNA, 19 nt, Homo sapiens
  misc_RNA (1)...(19): siRNA sense strand
ugacagggaaggagggaca

SEQ ID NO: 2394047 - RNA, 19 nt, Homo sapiens
  misc_RNA (1)...(19): siRNA sense strand
ggugaaguugacugagaaa

SEQ ID NO: 2394048 - RNA, 19 nt, Homo sapiens
  misc_RNA (1)...(19): siRNA sense strand
uugagaaauggaaggaaua

SEQ ID NO: 2394049 - RNA, 19 nt, Homo sapiens
  misc_RNA (1)...(19): siRNA sense strand
cgauuuagauauaguggga

SEQ ID NO: 2394050 - RNA, 19 nt, Homo sapiens
  misc_RNA (1)...(19): siRNA sense strand
uuugagaaauggaaggaau

SEQ ID NO: 2394051 - RNA, 19 nt, Homo sapiens
  misc_RNA (1)...(19): siRNA sense strand
agauauucucaguggaaaa

SEQ ID NO: 2394052 - RNA, 19 nt, Homo sapiens
  misc_RNA (1)...(19): siRNA sense strand
cuccugacuucaagaguaa

SEQ ID NO: 2394053 - RNA, 19 nt, Homo sapiens
  misc_RNA (1)...(19): siRNA sense strand
gggcaaagaacaggaacau

SEQ ID NO: 2394054 - RNA, 19 nt, Homo sapiens
  misc_RNA (1)...(19): siRNA sense strand
auuuauggauucagcacaa

SEQ ID NO: 2394055 - RNA, 19 nt, Homo sapiens
  misc_RNA (1)...(19): siRNA sense strand
ggaacgacuccgagaagca

SEQ ID NO: 2394056 - RNA, 19 nt, Homo sapiens
  misc_RNA (1)...(19): siRNA sense strand
ccguagaacacuagggcgu

SEQ ID NO: 2394057 - RNA, 19 nt, Homo sapiens
  misc_RNA (1)...(19): siRNA sense strand
cugagaaaugccuuaauaa

SEQ ID NO: 2394058 - RNA, 19 nt, Homo sapiens
  misc_RNA (1)...(19): siRNA sense strand
gggacaugguaauaaagau

SEQ ID NO: 2394059 - RNA, 19 nt, Homo sapiens
  misc_RNA (1)...(19): siRNA sense strand
ccucagagaagcucaaaca

SEQ ID NO: 2394060 - RNA, 19 nt, Homo sapiens
  misc_RNA (1)...(19): siRNA sense strand
gccaggaggaaguggugaa

SEQ ID NO: 2394061 - RNA, 19 nt, Homo sapiens
  misc_RNA (1)...(19): siRNA sense strand
ccuuggugguuguagaaga

SEQ ID NO: 2394062 - RNA, 19 nt, Homo sapiens
  misc_RNA (1)...(19): siRNA sense strand
agggcaaagaacaggaaca

SEQ ID NO: 2394063 - RNA, 19 nt, Homo sapiens
  misc_RNA (1)...(19): siRNA sense strand
cuacaaaaccugaagaacu

SEQ ID NO: 2394064 - RNA, 19 nt, Homo sapiens
  misc_RNA (1)...(19): siRNA sense strand
auacagaggucaaacacca

SEQ ID NO: 2394065 - RNA, 19 nt, Homo sapiens
  misc_RNA (1)...(19): siRNA sense strand
agaccagcaugacaggaaa

SEQ ID NO: 2394066 - RNA, 19 nt, Homo sapiens
  misc_RNA (1)...(19): siRNA sense strand
cagaugaauuggaugccuu

SEQ ID NO: 2394067 - RNA, 19 nt, Homo sapiens
  misc_RNA (1)...(19): siRNA sense strand
ccaaaguaauggcucccaa

SEQ ID NO: 2394068 - RNA, 19 nt, Homo sapiens
  misc_RNA (1)...(19): siRNA sense strand
ugaaguugaauaugagaca

SEQ ID NO: 2394069 - RNA, 19 nt, Homo sapiens
  misc_RNA (1)...(19): siRNA sense strand
acauaaacagccaggagga

SEQ ID NO: 2394070 - RNA, 19 nt, Homo sapiens
  misc_RNA (1)...(19): siRNA sense strand
cagaccagcaugacaggaa

SEQ ID NO: 2394071 - RNA, 19 nt, Homo sapiens
  misc_RNA (1)...(19): siRNA sense strand
ggaaccugaaguugaauau

SEQ ID NO: 2394072 - RNA, 19 nt, Homo sapiens
  misc_RNA (1)...(19): siRNA sense strand
cuugagacucugaugcuua

SEQ ID NO: 2394073 - RNA, 19 nt, Homo sapiens
  misc_RNA (1)...(19): siRNA sense strand
gguuguagaagaugaugau

SEQ ID NO: 2394074 - RNA, 19 nt, Homo sapiens
  misc_RNA (1)...(19): siRNA sense strand
agacugaagagauggaacu

SEQ ID NO: 2394075 - RNA, 19 nt, Homo sapiens
  misc_RNA (1)...(19): siRNA sense strand
gugcuguguuaaaugagaa

SEQ ID NO: 2394076 - RNA, 19 nt, Homo sapiens
  misc_RNA (1)...(19): siRNA sense strand
gccaguggagauagagaau

SEQ ID NO: 2394077 - RNA, 19 nt, Homo sapiens
  misc_RNA (1)...(19): siRNA sense strand
gggaaccugaaguugaaua

SEQ ID NO: 2394078 - RNA, 19 nt, Homo sapiens
  misc_RNA (1)...(19): siRNA sense strand
cuuauaaucugcaagcuga

SEQ ID NO: 2394079 - RNA, 19 nt, Homo sapiens
  misc_RNA (1)...(19): siRNA sense strand
aagauaaccagauuggauu

SEQ ID NO: 2394080 - RNA, 19 nt, Homo sapiens
  misc_RNA (1)...(19): siRNA sense strand
acacuagggcgucggucua

SEQ ID NO: 2394081 - RNA, 19 nt, Homo sapiens
  misc_RNA (1)...(19): siRNA sense strand
agccaaaggacaagaguug

SEQ ID NO: 2394082 - RNA, 19 nt, Homo sapiens
  misc_RNA (1)...(19): siRNA sense strand
cuuugauacagcagugcaa

SEQ ID NO: 2394083 - RNA, 19 nt, Homo sapiens
  misc_RNA (1)...(19): siRNA sense strand
ggaacagaccagcaugaca

SEQ ID NO: 2394084 - RNA, 19 nt, Homo sapiens
  misc_RNA (1)...(19): siRNA sense strand
cauaaacagccaggaggaa

SEQ ID NO: 2394085 - RNA, 19 nt, Homo sapiens
  misc_RNA (1)...(19): siRNA sense strand
accaauaaagcaagaagau

SEQ ID NO: 2394086 - RNA, 19 nt, Homo sapiens
  misc_RNA (1)...(19): siRNA sense strand
cagcaaacgauauucuaga

SEQ ID NO: 2394087 - RNA, 19 nt, Homo sapiens
  misc_RNA (1)...(19): siRNA sense strand
uggugaaguugacugagaa

SEQ ID NO: 2394088 - RNA, 19 nt, Homo sapiens
  misc_RNA (1)...(19): siRNA sense strand
ucaaguagaagcagugcau

SEQ ID NO: 2394089 - RNA, 19 nt, Homo sapiens
  misc_RNA (1)...(19): siRNA sense strand
gugaggagcuaacccggua

SEQ ID NO: 2394090 - RNA, 19 nt, Homo sapiens
  misc_RNA (1)...(19): siRNA sense strand
ugagcauaguccugaacuu

SEQ ID NO: 2394091 - RNA, 19 nt, Homo sapiens
  misc_RNA (1)...(19): siRNA sense strand
gggcgucggucuaugcgua

SEQ ID NO: 2394092 - RNA, 19 nt, Homo sapiens
  misc_RNA (1)...(19): siRNA sense strand
agcugaacuuggugacuau

SEQ ID NO: 2394093 - RNA, 19 nt, Homo sapiens
  misc_RNA (1)...(19): siRNA sense strand
aguucagauucgugccuau

SEQ ID NO: 2394094 - RNA, 19 nt, Homo sapiens
  misc_RNA (1)...(19): siRNA sense strand
cuagagaugggaaugacua

SEQ ID NO: 2394095 - RNA, 19 nt, Homo sapiens
  misc_RNA (1)...(19): siRNA sense strand
auuuauucgacuaggauca

SEQ ID NO: 2394096 - RNA, 19 nt, Homo sapiens
  misc_RNA (1)...(19): siRNA sense strand
acaauaauguuucgaccca

SEQ ID NO: 2394097 - RNA, 19 nt, Homo sapiens
  misc_RNA (1)...(19): siRNA sense strand
aagcuguccugaagcagaa

SEQ ID NO: 2394098 - RNA, 19 nt, Homo sapiens
  misc_RNA (1)...(19): siRNA sense strand
agauaaccagauuggauuu

SEQ ID NO: 2394099 - RNA, 19 nt, Homo sapiens
  misc_RNA (1)...(19): siRNA sense strand
ggcaaagaacaggaacaua

SEQ ID NO: 2394100 - RNA, 19 nt, Homo sapiens
  misc_RNA (1)...(19): siRNA sense strand
aggaagaagaugaggacaa

SEQ ID NO: 2394101 - RNA, 19 nt, Homo sapiens
  misc_RNA (1)...(19): siRNA sense strand
cugugaagauggagagcuu

SEQ ID NO: 2394102 - RNA, 19 nt, Homo sapiens
  misc_RNA (1)...(19): siRNA sense strand
augcagaaucucaaagaaa

SEQ ID NO: 2394103 - RNA, 19 nt, Homo sapiens
  misc_RNA (1)...(19): siRNA sense strand
gugucaaggccuucagaaa

SEQ ID NO: 2394104 - RNA, 19 nt, Homo sapiens
  misc_RNA (1)...(19): siRNA sense strand
cauucaggcugguggaaau

SEQ ID NO: 2394105 - RNA, 19 nt, Homo sapiens
  misc_RNA (1)...(19): siRNA sense strand
acugaaaguuggagaucau

SEQ ID NO: 2394106 - RNA, 19 nt, Homo sapiens
  misc_RNA (1)...(19): siRNA sense strand
gcaagugaucagagauaau

SEQ ID NO: 2394107 - RNA, 19 nt, Homo sapiens
  misc_RNA (1)...(19): siRNA sense strand
cugaagaggaagaagauga

SEQ ID NO: 2394108 - RNA, 19 nt, Homo sapiens
  misc_RNA (1)...(19): siRNA sense strand
uauuauugguggagauaga

SEQ ID NO: 2394109 - RNA, 19 nt, Homo sapiens
  misc_RNA (1)...(19): siRNA sense strand
gagcaaugguucuggagca

SEQ ID NO: 2394110 - RNA, 19 nt, Homo sapiens
  misc_RNA (1)...(19): siRNA sense strand
ccugggagcagcugagaaa

SEQ ID NO: 2394111 - RNA, 19 nt, Homo sapiens
  misc_RNA (1)...(19): siRNA sense strand
acaaauagcuccauggacu

SEQ ID NO: 2394112 - RNA, 19 nt, Homo sapiens
  misc_RNA (1)...(19): siRNA sense strand
ggaggaagccaaaaggaaa

SEQ ID NO: 2394113 - RNA, 19 nt, Homo sapiens
  misc_RNA (1)...(19): siRNA sense strand
agucauuaaccaagggaga

SEQ ID NO: 2394114 - RNA, 19 nt, Homo sapiens
  misc_RNA (1)...(19): siRNA sense strand
gcuccauggacuuuagaaa

SEQ ID NO: 2394115 - RNA, 19 nt, Homo sapiens
  misc_RNA (1)...(19): siRNA sense strand
ucgaagacgcugaagaaga

SEQ ID NO: 2394116 - RNA, 19 nt, Homo sapiens
  misc_RNA (1)...(19): siRNA sense strand
acgugaaacccgagcaaca

SEQ ID NO: 2394117 - RNA, 19 nt, Homo sapiens
  misc_RNA (1)...(19): siRNA sense strand
guuccaaguuacaaccaaa

SEQ ID NO: 2394118 - RNA, 19 nt, Homo sapiens
  misc_RNA (1)...(19): siRNA sense strand
caguagagcuggagagagg

SEQ ID NO: 2394119 - RNA, 19 nt, Homo sapiens
  misc_RNA (1)...(19): siRNA sense strand
gaggaagccaaaaggaaaa

SEQ ID NO: 2394120 - RNA, 19 nt, Homo sapiens
  misc_RNA (1)...(19): siRNA sense strand
gcuauuaauggcaguggaa

SEQ ID NO: 2394121 - RNA, 19 nt, Homo sapiens
  misc_RNA (1)...(19): siRNA sense strand
cacacauacucgagcaauu

SEQ ID NO: 2394122 - RNA, 19 nt, Homo sapiens
  misc_RNA (1)...(19): siRNA sense strand
aaaugauacuggauaguca

SEQ ID NO: 2394123 - RNA, 19 nt, Homo sapiens
  misc_RNA (1)...(19): siRNA sense strand
uaaaauuggccgagucaua

SEQ ID NO: 2394124 - RNA, 19 nt, Homo sapiens
  misc_RNA (1)...(19): siRNA sense strand
gccaaaaugaaaacagaua

SEQ ID NO: 2394125 - RNA, 19 nt, Homo sapiens
  misc_RNA (1)...(19): siRNA sense strand
aguggagcauuguuagaaa

SEQ ID NO: 2394126 - RNA, 19 nt, Homo sapiens
  misc_RNA (1)...(19): siRNA sense strand
uuguagacaucaauggcaa

SEQ ID NO: 2394127 - RNA, 19 nt, Homo sapiens
  misc_RNA (1)...(19): siRNA sense strand
caggaaguuuggaggccau

SEQ ID NO: 2394128 - RNA, 19 nt, Homo sapiens
  misc_RNA (1)...(19): siRNA sense strand
agaaguaccaggaguggau

SEQ ID NO: 2394129 - RNA, 19 nt, Homo sapiens
  misc_RNA (1)...(19): siRNA sense strand
gaucaaagaugcugguguc

SEQ ID NO: 2394130 - RNA, 19 nt, Homo sapiens
  misc_RNA (1)...(19): siRNA sense strand
augugcugcuggagguaaa

SEQ ID NO: 2394131 - RNA, 19 nt, Homo sapiens
  misc_RNA (1)...(19): siRNA sense strand
aguuaggacagguugaaau

SEQ ID NO: 2394132 - RNA, 19 nt, Homo sapiens
  misc_RNA (1)...(19): siRNA sense strand
gcagaauucauguugguga

SEQ ID NO: 2394133 - RNA, 19 nt, Homo sapiens
  misc_RNA (1)...(19): siRNA sense strand
auaaugaguuugaugcaga

SEQ ID NO: 2394134 - RNA, 19 nt, Homo sapiens
  misc_RNA (1)...(19): siRNA sense strand
gugaaaaugauacuggaua

SEQ ID NO: 2394135 - RNA, 19 nt, Homo sapiens
  misc_RNA (1)...(19): siRNA sense strand
ccccagggauggagaagua

SEQ ID NO: 2394136 - RNA, 19 nt, Homo sapiens
  misc_RNA (1)...(19): siRNA sense strand
cugucaaucaguauguaaa

SEQ ID NO: 2394137 - RNA, 19 nt, Homo sapiens
  misc_RNA (1)...(19): siRNA sense strand
agaaggugaaauuggaaaa

SEQ ID NO: 2394138 - RNA, 19 nt, Homo sapiens
  misc_RNA (1)...(19): siRNA sense strand
cacuuuaugucgugguuau

SEQ ID NO: 2394139 - RNA, 19 nt, Homo sapiens
  misc_RNA (1)...(19): siRNA sense strand
ugggagcagcugagaaaga

SEQ ID NO: 2394140 - RNA, 19 nt, Homo sapiens
  misc_RNA (1)...(19): siRNA sense strand
gaacaaacucagccaggca

SEQ ID NO: 2394141 - RNA, 19 nt, Homo sapiens
  misc_RNA (1)...(19): siRNA sense strand
uagaaggugaaauuggaaa

SEQ ID NO: 2394142 - RNA, 19 nt, Homo sapiens
  misc_RNA (1)...(19): siRNA sense strand
cagaagugcccuagaaggu

SEQ ID NO: 2394143 - RNA, 19 nt, Homo sapiens
  misc_RNA (1)...(19): siRNA sense strand
uguuagaaagugggacaua

SEQ ID NO: 2394144 - RNA, 19 nt, Homo sapiens
  misc_RNA (1)...(19): siRNA sense strand
ggugcuaggaggagaugga

SEQ ID NO: 2394145 - RNA, 19 nt, Homo sapiens
  misc_RNA (1)...(19): siRNA sense strand
aagauggaaagaauggaua

SEQ ID NO: 2394146 - RNA, 19 nt, Homo sapiens
  misc_RNA (1)...(19): siRNA sense strand
uauuaauggcaguggaaac

SEQ ID NO: 2394147 - RNA, 19 nt, Homo sapiens
  misc_RNA (1)...(19): siRNA sense strand
ccuuauggcugggagaaaa

SEQ ID NO: 2394148 - RNA, 19 nt, Homo sapiens
  misc_RNA (1)...(19): siRNA sense strand
cuacuggacagaaggugaa

SEQ ID NO: 2394149 - RNA, 19 nt, Homo sapiens
  misc_RNA (1)...(19): siRNA sense strand
agggaaaucacacaaacaa

SEQ ID NO: 2394150 - RNA, 19 nt, Homo sapiens
  misc_RNA (1)...(19): siRNA sense strand
uguccuuguucgagcauca

SEQ ID NO: 2394151 - RNA, 19 nt, Homo sapiens
  misc_RNA (1)...(19): siRNA sense strand
ccuacuggacagaagguga

SEQ ID NO: 2394152 - RNA, 19 nt, Homo sapiens
  misc_RNA (1)...(19): siRNA sense strand
aagugguagaggugcuaaa

SEQ ID NO: 2394153 - RNA, 19 nt, Homo sapiens
  misc_RNA (1)...(19): siRNA sense strand
cccugaagacugugaagau

SEQ ID NO: 2394154 - RNA, 19 nt, Homo sapiens
  misc_RNA (1)...(19): siRNA sense strand
guuaaagggaaaucacaca

SEQ ID NO: 2394155 - RNA, 19 nt, Homo sapiens
  misc_RNA (1)...(19): siRNA sense strand
cggucauugcugaagaaga

SEQ ID NO: 2394156 - RNA, 19 nt, Homo sapiens
  misc_RNA (1)...(19): siRNA sense strand
ucccaagccuccagcagaa

SEQ ID NO: 2394157 - RNA, 19 nt, Homo sapiens
  misc_RNA (1)...(19): siRNA sense strand
caaauagcuccauggacuu

SEQ ID NO: 2394158 - RNA, 19 nt, Homo sapiens
  misc_RNA (1)...(19): siRNA sense strand
aggaagaagaugaggacaa

SEQ ID NO: 2394159 - RNA, 19 nt, Homo sapiens
  misc_RNA (1)...(19): siRNA sense strand
cugugaagauggagagcuu

SEQ ID NO: 2394160 - RNA, 19 nt, Homo sapiens
  misc_RNA (1)...(19): siRNA sense strand
augcagaaucucaaagaaa

SEQ ID NO: 2394161 - RNA, 19 nt, Homo sapiens
  misc_RNA (1)...(19): siRNA sense strand
gugucaaggccuucagaaa

SEQ ID NO: 2394162 - RNA, 19 nt, Homo sapiens
  misc_RNA (1)...(19): siRNA sense strand
cauucaggcugguggaaau

SEQ ID NO: 2394163 - RNA, 19 nt, Homo sapiens
  misc_RNA (1)...(19): siRNA sense strand
acugaaaguuggagaucau

SEQ ID NO: 2394164 - RNA, 19 nt, Homo sapiens
  misc_RNA (1)...(19): siRNA sense strand
gcaagugaucagagauaau

SEQ ID NO: 2394165 - RNA, 19 nt, Homo sapiens
  misc_RNA (1)...(19): siRNA sense strand
cugaagaggaagaagauga

SEQ ID NO: 2394166 - RNA, 19 nt, Homo sapiens
  misc_RNA (1)...(19): siRNA sense strand
uauuauugguggagauaga

SEQ ID NO: 2394167 - RNA, 19 nt, Homo sapiens
  misc_RNA (1)...(19): siRNA sense strand
gagcaaugguucuggagca

SEQ ID NO: 2394168 - RNA, 19 nt, Homo sapiens
  misc_RNA (1)...(19): siRNA sense strand
ccugggagcagcugagaaa

SEQ ID NO: 2394169 - RNA, 19 nt, Homo sapiens
  misc_RNA (1)...(19): siRNA sense strand
acaaauagcuccauggacu

SEQ ID NO: 2394170 - RNA, 19 nt, Homo sapiens
  misc_RNA (1)...(19): siRNA sense strand
ggaggaagccaaaaggaaa

SEQ ID NO: 2394171 - RNA, 19 nt, Homo sapiens
  misc_RNA (1)...(19): siRNA sense strand
agucauuaaccaagggaga

SEQ ID NO: 2394172 - RNA, 19 nt, Homo sapiens
  misc_RNA (1)...(19): siRNA sense strand
gcuccauggacuuuagaaa

SEQ ID NO: 2394173 - RNA, 19 nt, Homo sapiens
  misc_RNA (1)...(19): siRNA sense strand
ucgaagacgcugaagaaga

SEQ ID NO: 2394174 - RNA, 19 nt, Homo sapiens
  misc_RNA (1)...(19): siRNA sense strand
acgugaaacccgagcaaca

SEQ ID NO: 2394175 - RNA, 19 nt, Homo sapiens
  misc_RNA (1)...(19): siRNA sense strand
guuccaaguuacaaccaaa

SEQ ID NO: 2394176 - RNA, 19 nt, Homo sapiens
  misc_RNA (1)...(19): siRNA sense strand
caguagagcuggagagagg

SEQ ID NO: 2394177 - RNA, 19 nt, Homo sapiens
  misc_RNA (1)...(19): siRNA sense strand
gaggaagccaaaaggaaaa

SEQ ID NO: 2394178 - RNA, 19 nt, Homo sapiens
  misc_RNA (1)...(19): siRNA sense strand
gcuauuaauggcaguggaa

SEQ ID NO: 2394179 - RNA, 19 nt, Homo sapiens
  misc_RNA (1)...(19): siRNA sense strand
cacacauacucgagcaauu

SEQ ID NO: 2394180 - RNA, 19 nt, Homo sapiens
  misc_RNA (1)...(19): siRNA sense strand
aaaugauacuggauaguca

SEQ ID NO: 2394181 - RNA, 19 nt, Homo sapiens
  misc_RNA (1)...(19): siRNA sense strand
uaaaauuggccgagucaua

SEQ ID NO: 2394182 - RNA, 19 nt, Homo sapiens
  misc_RNA (1)...(19): siRNA sense strand
gccaaaaugaaaacagaua

SEQ ID NO: 2394183 - RNA, 19 nt, Homo sapiens
  misc_RNA (1)...(19): siRNA sense strand
aguggagcauuguuagaaa

SEQ ID NO: 2394184 - RNA, 19 nt, Homo sapiens
  misc_RNA (1)...(19): siRNA sense strand
uuguagacaucaauggcaa

SEQ ID NO: 2394185 - RNA, 19 nt, Homo sapiens
  misc_RNA (1)...(19): siRNA sense strand
caggaaguuuggaggccau

SEQ ID NO: 2394186 - RNA, 19 nt, Homo sapiens
  misc_RNA (1)...(19): siRNA sense strand
agaaguaccaggaguggau

SEQ ID NO: 2394187 - RNA, 19 nt, Homo sapiens
  misc_RNA (1)...(19): siRNA sense strand
gaucaaagaugcugguguc

SEQ ID NO: 2394188 - RNA, 19 nt, Homo sapiens
  misc_RNA (1)...(19): siRNA sense strand
augugcugcuggagguaaa

SEQ ID NO: 2394189 - RNA, 19 nt, Homo sapiens
  misc_RNA (1)...(19): siRNA sense strand
aguuaggacagguugaaau

SEQ ID NO: 2394190 - RNA, 19 nt, Homo sapiens
  misc_RNA (1)...(19): siRNA sense strand
gcagaauucauguugguga

SEQ ID NO: 2394191 - RNA, 19 nt, Homo sapiens
  misc_RNA (1)...(19): siRNA sense strand
auaaugaguuugaugcaga

SEQ ID NO: 2394192 - RNA, 19 nt, Homo sapiens
  misc_RNA (1)...(19): siRNA sense strand
gugaaaaugauacuggaua

SEQ ID NO: 2394193 - RNA, 19 nt, Homo sapiens
  misc_RNA (1)...(19): siRNA sense strand
ccccagggauggagaagua

SEQ ID NO: 2394194 - RNA, 19 nt, Homo sapiens
  misc_RNA (1)...(19): siRNA sense strand
cugucaaucaguauguaaa

SEQ ID NO: 2394195 - RNA, 19 nt, Homo sapiens
  misc_RNA (1)...(19): siRNA sense strand
agaaggugaaauuggaaaa

SEQ ID NO: 2394196 - RNA, 19 nt, Homo sapiens
  misc_RNA (1)...(19): siRNA sense strand
cacuuuaugucgugguuau

SEQ ID NO: 2394197 - RNA, 19 nt, Homo sapiens
  misc_RNA (1)...(19): siRNA sense strand
ugggagcagcugagaaaga

SEQ ID NO: 2394198 - RNA, 19 nt, Homo sapiens
  misc_RNA (1)...(19): siRNA sense strand
gaacaaacucagccaggca

SEQ ID NO: 2394199 - RNA, 19 nt, Homo sapiens
  misc_RNA (1)...(19): siRNA sense strand
uagaaggugaaauuggaaa

SEQ ID NO: 2394200 - RNA, 19 nt, Homo sapiens
  misc_RNA (1)...(19): siRNA sense strand
cagaagugcccuagaaggu

SEQ ID NO: 2394201 - RNA, 19 nt, Homo sapiens
  misc_RNA (1)...(19): siRNA sense strand
uguuagaaagugggacaua

SEQ ID NO: 2394202 - RNA, 19 nt, Homo sapiens
  misc_RNA (1)...(19): siRNA sense strand
ggugcuaggaggagaugga

SEQ ID NO: 2394203 - RNA, 19 nt, Homo sapiens
  misc_RNA (1)...(19): siRNA sense strand
aagauggaaagaauggaua

SEQ ID NO: 2394204 - RNA, 19 nt, Homo sapiens
  misc_RNA (1)...(19): siRNA sense strand
uauuaauggcaguggaaac

SEQ ID NO: 2394205 - RNA, 19 nt, Homo sapiens
  misc_RNA (1)...(19): siRNA sense strand
ccuuauggcugggagaaaa

SEQ ID NO: 2394206 - RNA, 19 nt, Homo sapiens
  misc_RNA (1)...(19): siRNA sense strand
cuacuggacagaaggugaa

SEQ ID NO: 2394207 - RNA, 19 nt, Homo sapiens
  misc_RNA (1)...(19): siRNA sense strand
agggaaaucacacaaacaa

SEQ ID NO: 2394208 - RNA, 19 nt, Homo sapiens
  misc_RNA (1)...(19): siRNA sense strand
uguccuuguucgagcauca

SEQ ID NO: 2394209 - RNA, 19 nt, Homo sapiens
  misc_RNA (1)...(19): siRNA sense strand
ccuacuggacagaagguga

SEQ ID NO: 2394210 - RNA, 19 nt, Homo sapiens
  misc_RNA (1)...(19): siRNA sense strand
aagugguagaggugcuaaa

SEQ ID NO: 2394211 - RNA, 19 nt, Homo sapiens
  misc_RNA (1)...(19): siRNA sense strand
cccugaagacugugaagau

SEQ ID NO: 2394212 - RNA, 19 nt, Homo sapiens
  misc_RNA (1)...(19): siRNA sense strand
guuaaagggaaaucacaca

SEQ ID NO: 2394213 - RNA, 19 nt, Homo sapiens
  misc_RNA (1)...(19): siRNA sense strand
cggucauugcugaagaaga

SEQ ID NO: 2394214 - RNA, 19 nt, Homo sapiens
  misc_RNA (1)...(19): siRNA sense strand
ucccaagccuccagcagaa

SEQ ID NO: 2394215 - RNA, 19 nt, Homo sapiens
  misc_RNA (1)...(19): siRNA sense strand
caaauagcuccauggacuu

SEQ ID NO: 2394216 - RNA, 19 nt, Homo sapiens
  misc_RNA (1)...(19): siRNA sense strand
gaaacuaacucaaggggau

SEQ ID NO: 2394217 - RNA, 19 nt, Homo sapiens
  misc_RNA (1)...(19): siRNA sense strand
cauuauaggacgaaggaug

SEQ ID NO: 2394218 - RNA, 19 nt, Homo sapiens
  misc_RNA (1)...(19): siRNA sense strand
aggcacaggaguuugggaa

SEQ ID NO: 2394219 - RNA, 19 nt, Homo sapiens
  misc_RNA (1)...(19): siRNA sense strand
uuccaaaagcagaguauaa

SEQ ID NO: 2394220 - RNA, 19 nt, Homo sapiens
  misc_RNA (1)...(19): siRNA sense strand
cuaaaagcuuccagcaaga

SEQ ID NO: 2394221 - RNA, 19 nt, Homo sapiens
  misc_RNA (1)...(19): siRNA sense strand
uauuuuaggauguggcaaa

SEQ ID NO: 2394222 - RNA, 19 nt, Homo sapiens
  misc_RNA (1)...(19): siRNA sense strand
aguauaagcaaguggaaca

SEQ ID NO: 2394223 - RNA, 19 nt, Homo sapiens
  misc_RNA (1)...(19): siRNA sense strand
agaucgaauaggaaagaaa

SEQ ID NO: 2394224 - RNA, 19 nt, Homo sapiens
  misc_RNA (1)...(19): siRNA sense strand
acaucaaugggaagagaua

SEQ ID NO: 2394225 - RNA, 19 nt, Homo sapiens
  misc_RNA (1)...(19): siRNA sense strand
gccagaaggcgguggaaaa

SEQ ID NO: 2394226 - RNA, 19 nt, Homo sapiens
  misc_RNA (1)...(19): siRNA sense strand
auacauacaucaaugggaa

SEQ ID NO: 2394227 - RNA, 19 nt, Homo sapiens
  misc_RNA (1)...(19): siRNA sense strand
agauauuccacaugacaua

SEQ ID NO: 2394228 - RNA, 19 nt, Homo sapiens
  misc_RNA (1)...(19): siRNA sense strand
ccucaagcagauugugaaa

SEQ ID NO: 2394229 - RNA, 19 nt, Homo sapiens
  misc_RNA (1)...(19): siRNA sense strand
guuaaugauucuuggggaa

SEQ ID NO: 2394230 - RNA, 19 nt, Homo sapiens
  misc_RNA (1)...(19): siRNA sense strand
acgaggucccggaggaaua

SEQ ID NO: 2394231 - RNA, 19 nt, Homo sapiens
  misc_RNA (1)...(19): siRNA sense strand
gagauuauaucguacgaga

SEQ ID NO: 2394232 - RNA, 19 nt, Homo sapiens
  misc_RNA (1)...(19): siRNA sense strand
cgacuagaucgaauaggaa

SEQ ID NO: 2394233 - RNA, 19 nt, Homo sapiens
  misc_RNA (1)...(19): siRNA sense strand
acgaaauccucaagcagau

SEQ ID NO: 2394234 - RNA, 19 nt, Homo sapiens
  misc_RNA (1)...(19): siRNA sense strand
cgguguugcuggugucauu

SEQ ID NO: 2394235 - RNA, 19 nt, Homo sapiens
  misc_RNA (1)...(19): siRNA sense strand
gugaaacaugacagggaga

SEQ ID NO: 2394236 - RNA, 19 nt, Homo sapiens
  misc_RNA (1)...(19): siRNA sense strand
guggaaaaggagcaggaaa

SEQ ID NO: 2394237 - RNA, 19 nt, Homo sapiens
  misc_RNA (1)...(19): siRNA sense strand
ucaacaaucaggagaacga

SEQ ID NO: 2394238 - RNA, 19 nt, Homo sapiens
  misc_RNA (1)...(19): siRNA sense strand
acacagacccagacgcaga

SEQ ID NO: 2394239 - RNA, 19 nt, Homo sapiens
  misc_RNA (1)...(19): siRNA sense strand
gguuaaaacugcaggcuuc

SEQ ID NO: 2394240 - RNA, 19 nt, Homo sapiens
  misc_RNA (1)...(19): siRNA sense strand
aguaaagaaaugaagcuga

SEQ ID NO: 2394241 - RNA, 19 nt, Homo sapiens
  misc_RNA (1)...(19): siRNA sense strand
gacuagaucgaauaggaaa

SEQ ID NO: 2394242 - RNA, 19 nt, Homo sapiens
  misc_RNA (1)...(19): siRNA sense strand
auuacgacuuucaagguua

SEQ ID NO: 2394243 - RNA, 19 nt, Homo sapiens
  misc_RNA (1)...(19): siRNA sense strand
caguaucaagagaaguaua

SEQ ID NO: 2394244 - RNA, 19 nt, Homo sapiens
  misc_RNA (1)...(19): siRNA sense strand
aagaaaugaagcugacaga

SEQ ID NO: 2394245 - RNA, 19 nt, Homo sapiens
  misc_RNA (1)...(19): siRNA sense strand
ucuucaaagcuaugaguca

SEQ ID NO: 2394246 - RNA, 19 nt, Homo sapiens
  misc_RNA (1)...(19): siRNA sense strand
aaugaagacaguucugaaa

SEQ ID NO: 2394247 - RNA, 19 nt, Homo sapiens
  misc_RNA (1)...(19): siRNA sense strand
caagagaaguauaagcaag

SEQ ID NO: 2394248 - RNA, 19 nt, Homo sapiens
  misc_RNA (1)...(19): siRNA sense strand
agauuugccugcugaccaa

SEQ ID NO: 2394249 - RNA, 19 nt, Homo sapiens
  misc_RNA (1)...(19): siRNA sense strand
aguugagauuugagguguu

SEQ ID NO: 2394250 - RNA, 19 nt, Homo sapiens
  misc_RNA (1)...(19): siRNA sense strand
caauguggcaucagauaca

SEQ ID NO: 2394251 - RNA, 19 nt, Homo sapiens
  misc_RNA (1)...(19): siRNA sense strand
agauuauaucguacgagaa

SEQ ID NO: 2394252 - RNA, 19 nt, Homo sapiens
  misc_RNA (1)...(19): siRNA sense strand
aaggagcaggaaaggguua

SEQ ID NO: 2394253 - RNA, 19 nt, Homo sapiens
  misc_RNA (1)...(19): siRNA sense strand
aucaaugggaagagauauu

SEQ ID NO: 2394254 - RNA, 19 nt, Homo sapiens
  misc_RNA (1)...(19): siRNA sense strand
cuaugaacacagauaccaa

SEQ ID NO: 2394255 - RNA, 19 nt, Homo sapiens
  misc_RNA (1)...(19): siRNA sense strand
guaaagaaaugaagcugac

SEQ ID NO: 2394256 - RNA, 19 nt, Homo sapiens
  misc_RNA (1)...(19): siRNA sense strand
augucugaccucuggauua

SEQ ID NO: 2394257 - RNA, 19 nt, Homo sapiens
  misc_RNA (1)...(19): siRNA sense strand
guauaagcaaguggaacaa

SEQ ID NO: 2394258 - RNA, 19 nt, Homo sapiens
  misc_RNA (1)...(19): siRNA sense strand
ccaaugaugaggagagccu

SEQ ID NO: 2394259 - RNA, 19 nt, Homo sapiens
  misc_RNA (1)...(19): siRNA sense strand
ucaucauaccaguuggaau

SEQ ID NO: 2394260 - RNA, 19 nt, Homo sapiens
  misc_RNA (1)...(19): siRNA sense strand
gaucgaauaggaaagaaaa

SEQ ID NO: 2394261 - RNA, 19 nt, Homo sapiens
  misc_RNA (1)...(19): siRNA sense strand
uggaaaaggagcaggaaag

SEQ ID NO: 2394262 - RNA, 19 nt, Homo sapiens
  misc_RNA (1)...(19): siRNA sense strand
cggccaugccaccgcuuua

SEQ ID NO: 2394263 - RNA, 19 nt, Homo sapiens
  misc_RNA (1)...(19): siRNA sense strand
ugaccgacuagaucgaaua

SEQ ID NO: 2394264 - RNA, 19 nt, Homo sapiens
  misc_RNA (1)...(19): siRNA sense strand
aagagaaguauaagcaagu

SEQ ID NO: 2394265 - RNA, 19 nt, Homo sapiens
  misc_RNA (1)...(19): siRNA sense strand
acaaucaggagaacgaaau

SEQ ID NO: 2394266 - RNA, 19 nt, Homo sapiens
  misc_RNA (1)...(19): siRNA sense strand
ccaagugggcugagggcaa

SEQ ID NO: 2394267 - RNA, 19 nt, Homo sapiens
  misc_RNA (1)...(19): siRNA sense strand
cucugaacccuuugggaaa

SEQ ID NO: 2394268 - RNA, 19 nt, Homo sapiens
  misc_RNA (1)...(19): siRNA sense strand
gcaucauugguguggacua

SEQ ID NO: 2394269 - RNA, 19 nt, Homo sapiens
  misc_RNA (1)...(19): siRNA sense strand
guguggaaguagugacgga

SEQ ID NO: 2394270 - RNA, 19 nt, Homo sapiens
  misc_RNA (1)...(19): siRNA sense strand
cuggcagggaggagagaca

SEQ ID NO: 2394271 - RNA, 19 nt, Homo sapiens
  misc_RNA (1)...(19): siRNA sense strand
acucugaacccuuugggaa

SEQ ID NO: 2394272 - RNA, 19 nt, Homo sapiens
  misc_RNA (1)...(19): siRNA sense strand
ccgagauccaggagaacca

SEQ ID NO: 2394273 - RNA, 19 nt, Homo sapiens
  misc_RNA (1)...(19): siRNA sense strand
gaugcagauuucagcguga

SEQ ID NO: 2394274 - RNA, 19 nt, Homo sapiens
  misc_RNA (1)...(19): siRNA sense strand
agaaccacgacgagaccua

SEQ ID NO: 2394275 - RNA, 19 nt, Homo sapiens
  misc_RNA (1)...(19): siRNA sense strand
uggugaagaacucagcaaa

SEQ ID NO: 2394276 - RNA, 19 nt, Homo sapiens
  misc_RNA (1)...(19): siRNA sense strand
ggacaggaucauugagcug

SEQ ID NO: 2394277 - RNA, 19 nt, Homo sapiens
  misc_RNA (1)...(19): siRNA sense strand
ggugaagaacucagcaaac

SEQ ID NO: 2394278 - RNA, 19 nt, Homo sapiens
  misc_RNA (1)...(19): siRNA sense strand
gcuacagguucaaggccaa

SEQ ID NO: 2394279 - RNA, 19 nt, Homo sapiens
  misc_RNA (1)...(19): siRNA sense strand
gcacaggaaacauaggcua

SEQ ID NO: 2394280 - RNA, 19 nt, Homo sapiens
  misc_RNA (1)...(19): siRNA sense strand
aggacaagccucuggucaa

SEQ ID NO: 2394281 - RNA, 19 nt, Homo sapiens
  misc_RNA (1)...(19): siRNA sense strand
ccgaauggcuggugcucca

SEQ ID NO: 2394282 - RNA, 19 nt, Homo sapiens
  misc_RNA (1)...(19): siRNA sense strand
aaagagacaacuugaagaa

SEQ ID NO: 2394283 - RNA, 19 nt, Homo sapiens
  misc_RNA (1)...(19): siRNA sense strand
cuguaguggccuugaucua

SEQ ID NO: 2394284 - RNA, 19 nt, Homo sapiens
  misc_RNA (1)...(19): siRNA sense strand
ggagaaaccaucaugcuga

SEQ ID NO: 2394285 - RNA, 19 nt, Homo sapiens
  misc_RNA (1)...(19): siRNA sense strand
caucagaaagagacaacuu

SEQ ID NO: 2394286 - RNA, 19 nt, Homo sapiens
  misc_RNA (1)...(19): siRNA sense strand
gaaagagacaacuugaaga

SEQ ID NO: 2394287 - RNA, 19 nt, Homo sapiens
  misc_RNA (1)...(19): siRNA sense strand
cagaaagagacaacuugaa

SEQ ID NO: 2394288 - RNA, 19 nt, Homo sapiens
  misc_RNA (1)...(19): siRNA sense strand
ugccacagcuggaaggaca

SEQ ID NO: 2394289 - RNA, 19 nt, Homo sapiens
  misc_RNA (1)...(19): siRNA sense strand
agagacaacuugaagaaac

SEQ ID NO: 2394290 - RNA, 19 nt, Homo sapiens
  misc_RNA (1)...(19): siRNA sense strand
uugaagaaaccaacaauga

SEQ ID NO: 2394291 - RNA, 19 nt, Homo sapiens
  misc_RNA (1)...(19): siRNA sense strand
auggaaaaucccagaaauu

SEQ ID NO: 2394292 - RNA, 19 nt, Homo sapiens
  misc_RNA (1)...(19): siRNA sense strand
ccccaaaggcugugcugaa

SEQ ID NO: 2394293 - RNA, 19 nt, Homo sapiens
  misc_RNA (1)...(19): siRNA sense strand
aagcaaucacaguguuaaa

SEQ ID NO: 2394294 - RNA, 19 nt, Homo sapiens
  misc_RNA (1)...(19): siRNA sense strand
ggccgaagccugaagcuca

SEQ ID NO: 2394295 - RNA, 19 nt, Homo sapiens
  misc_RNA (1)...(19): siRNA sense strand
cgccaaauccagaggaggu

SEQ ID NO: 2394296 - RNA, 19 nt, Homo sapiens
  misc_RNA (1)...(19): siRNA sense strand
aggagauggacccgccaaa

SEQ ID NO: 2394297 - RNA, 19 nt, Homo sapiens
  misc_RNA (1)...(19): siRNA sense strand
agaaugugucagaggauga

SEQ ID NO: 2394298 - RNA, 19 nt, Homo sapiens
  misc_RNA (1)...(19): siRNA sense strand
ucuucaagcuacugcggaa

SEQ ID NO: 2394299 - RNA, 19 nt, Homo sapiens
  misc_RNA (1)...(19): siRNA sense strand
ccucgaaugagcaggucaa

SEQ ID NO: 2394300 - RNA, 19 nt, Homo sapiens
  misc_RNA (1)...(19): siRNA sense strand
agaagcugauugagcgcaa

SEQ ID NO: 2394301 - RNA, 19 nt, Homo sapiens
  misc_RNA (1)...(19): siRNA sense strand
gcuggaagccauuggggaa

SEQ ID NO: 2394302 - RNA, 19 nt, Homo sapiens
  misc_RNA (1)...(19): siRNA sense strand
aucaagaagcagaaagaga

SEQ ID NO: 2394303 - RNA, 19 nt, Homo sapiens
  misc_RNA (1)...(19): siRNA sense strand
aggacaaauuggugcccga

SEQ ID NO: 2394304 - RNA, 19 nt, Homo sapiens
  misc_RNA (1)...(19): siRNA sense strand
uggugguggauguggagaa

SEQ ID NO: 2394305 - RNA, 19 nt, Homo sapiens
  misc_RNA (1)...(19): siRNA sense strand
ugguggauguggagaaucu

SEQ ID NO: 2394306 - RNA, 19 nt, Homo sapiens
  misc_RNA (1)...(19): siRNA sense strand
cagcccuccauuugagaaa

SEQ ID NO: 2394307 - RNA, 19 nt, Homo sapiens
  misc_RNA (1)...(19): siRNA sense strand
caucaaggacuacgaggga

SEQ ID NO: 2394308 - RNA, 19 nt, Homo sapiens
  misc_RNA (1)...(19): siRNA sense strand
ucaaggagggcgugaggca

SEQ ID NO: 2394309 - RNA, 19 nt, Homo sapiens
  misc_RNA (1)...(19): siRNA sense strand
ugauggagugugagcugaa

SEQ ID NO: 2394310 - RNA, 19 nt, Homo sapiens
  misc_RNA (1)...(19): siRNA sense strand
acgaguacgccaucggcua

SEQ ID NO: 2394311 - RNA, 19 nt, Homo sapiens
  misc_RNA (1)...(19): siRNA sense strand
agaagcagaaagagaucau

SEQ ID NO: 2394312 - RNA, 19 nt, Homo sapiens
  misc_RNA (1)...(19): siRNA sense strand
ggauggugguggaugugga

SEQ ID NO: 2394313 - RNA, 19 nt, Homo sapiens
  misc_RNA (1)...(19): siRNA sense strand
acguaucccacuuggagaa

SEQ ID NO: 2394314 - RNA, 19 nt, Homo sapiens
  misc_RNA (1)...(19): siRNA sense strand
ggaaggagcugaaggaccc

SEQ ID NO: 2394315 - RNA, 19 nt, Homo sapiens
  misc_RNA (1)...(19): siRNA sense strand
gagaagaaauacagcccuu

SEQ ID NO: 2394316 - RNA, 19 nt, Homo sapiens
  misc_RNA (1)...(19): siRNA sense strand
ccacugaacuuuaccagca

SEQ ID NO: 2394317 - RNA, 19 nt, Homo sapiens
  misc_RNA (1)...(19): siRNA sense strand
caagaaagguuaaggagga

SEQ ID NO: 2394318 - RNA, 19 nt, Homo sapiens
  misc_RNA (1)...(19): siRNA sense strand
aggaggaguuugauggcaa

SEQ ID NO: 2394319 - RNA, 19 nt, Homo sapiens
  misc_RNA (1)...(19): siRNA sense strand
agguuaaggaggaaggaau

SEQ ID NO: 2394320 - RNA, 19 nt, Homo sapiens
  misc_RNA (1)...(19): siRNA sense strand
ccauccuggcugugagaaa

SEQ ID NO: 2394321 - RNA, 19 nt, Homo sapiens
  misc_RNA (1)...(19): siRNA sense strand
ccaugaugcuccuggcaca

SEQ ID NO: 2394322 - RNA, 19 nt, Homo sapiens
  misc_RNA (1)...(19): siRNA sense strand
gagaagaaauacagcccuu

SEQ ID NO: 2394323 - RNA, 19 nt, Homo sapiens
  misc_RNA (1)...(19): siRNA sense strand
ccuugauacuccuggcaca

SEQ ID NO: 2394324 - RNA, 19 nt, Homo sapiens
  misc_RNA (1)...(19): siRNA sense strand
aggaggaguuugauggcca

SEQ ID NO: 2394325 - RNA, 19 nt, Homo sapiens
  misc_RNA (1)...(19): siRNA sense strand
ccagaagacucaagccauc

SEQ ID NO: 2394326 - RNA, 19 nt, Homo sapiens
  misc_RNA (1)...(19): siRNA sense strand
ccacugaacuuuaccagca

SEQ ID NO: 2394327 - RNA, 19 nt, Homo sapiens
  misc_RNA (1)...(19): siRNA sense strand
cuaacagagaagaaauaca

SEQ ID NO: 2394328 - RNA, 19 nt, Homo sapiens
  misc_RNA (1)...(19): siRNA sense strand
cuugaaggacagacaugaa

SEQ ID NO: 2394329 - RNA, 19 nt, Homo sapiens
  misc_RNA (1)...(19): siRNA sense strand
gguacaaauacugcagaaa

SEQ ID NO: 2394330 - RNA, 19 nt, Homo sapiens
  misc_RNA (1)...(19): siRNA sense strand
ugguacaaauacugcagaa

SEQ ID NO: 2394331 - RNA, 19 nt, Homo sapiens
  misc_RNA (1)...(19): siRNA sense strand
ccggucacuucaugggcaa

SEQ ID NO: 2394332 - RNA, 19 nt, Homo sapiens
  misc_RNA (1)...(19): siRNA sense strand
gcagaaaugacaccaauaa

SEQ ID NO: 2394333 - RNA, 19 nt, Homo sapiens
  misc_RNA (1)...(19): siRNA sense strand
gguacaaauacugcagaaa

SEQ ID NO: 2394334 - RNA, 19 nt, Homo sapiens
  misc_RNA (1)...(19): siRNA sense strand
ugguacaaauacugcagaa

SEQ ID NO: 2394335 - RNA, 19 nt, Homo sapiens
  misc_RNA (1)...(19): siRNA sense strand
gacacaacagcguggcuua

SEQ ID NO: 2394336 - RNA, 19 nt, Homo sapiens
  misc_RNA (1)...(19): siRNA sense strand
cagaaaugacaccaauaau

SEQ ID NO: 2394337 - RNA, 19 nt, Homo sapiens
  misc_RNA (1)...(19): siRNA sense strand
ccggucacuucaugggcaa

SEQ ID NO: 2394338 - RNA, 19 nt, Homo sapiens
  misc_RNA (1)...(19): siRNA sense strand
cugcagaaaugacaccaau

SEQ ID NO: 2394339 - RNA, 19 nt, Homo sapiens
  misc_RNA (1)...(19): siRNA sense strand
gggaaggugcugaauggga

SEQ ID NO: 2394340 - RNA, 19 nt, Homo sapiens
  misc_RNA (1)...(19): siRNA sense strand
ggaagaagaugaugaagaa

SEQ ID NO: 2394341 - RNA, 19 nt, Homo sapiens
  misc_RNA (1)...(19): siRNA sense strand
agacagaggagcagggaau

SEQ ID NO: 2394342 - RNA, 19 nt, Homo sapiens
  misc_RNA (1)...(19): siRNA sense strand
agggagagagagagagaaa

SEQ ID NO: 2394343 - RNA, 19 nt, Homo sapiens
  misc_RNA (1)...(19): siRNA sense strand
cugcagagcaugaaguaaa

SEQ ID NO: 2394344 - RNA, 19 nt, Homo sapiens
  misc_RNA (1)...(19): siRNA sense strand
cgugcgaagucuaaagaaa

SEQ ID NO: 2394345 - RNA, 19 nt, Homo sapiens
  misc_RNA (1)...(19): siRNA sense strand
aggaugagacagagcguaa

SEQ ID NO: 2394346 - RNA, 19 nt, Homo sapiens
  misc_RNA (1)...(19): siRNA sense strand
cgagaucgggauagggaaa

SEQ ID NO: 2394347 - RNA, 19 nt, Homo sapiens
  misc_RNA (1)...(19): siRNA sense strand
aagaagaggaagaagagaa

SEQ ID NO: 2394348 - RNA, 19 nt, Homo sapiens
  misc_RNA (1)...(19): siRNA sense strand
aagaagaagaagagcaaaa

SEQ ID NO: 2394349 - RNA, 19 nt, Homo sapiens
  misc_RNA (1)...(19): siRNA sense strand
gaggaggaagaaagagaaa

SEQ ID NO: 2394350 - RNA, 19 nt, Homo sapiens
  misc_RNA (1)...(19): siRNA sense strand
guguugaagaugaggagaa

SEQ ID NO: 2394351 - RNA, 19 nt, Homo sapiens
  misc_RNA (1)...(19): siRNA sense strand
gagugagaagaaagagaaa

SEQ ID NO: 2394352 - RNA, 19 nt, Homo sapiens
  misc_RNA (1)...(19): siRNA sense strand
aggaagaagaugaugaaga

SEQ ID NO: 2394353 - RNA, 19 nt, Homo sapiens
  misc_RNA (1)...(19): siRNA sense strand
aggaagaagaggaggagga

SEQ ID NO: 2394354 - RNA, 19 nt, Homo sapiens
  misc_RNA (1)...(19): siRNA sense strand
aggaggaggaggaggaaga

SEQ ID NO: 2394355 - RNA, 19 nt, Homo sapiens
  misc_RNA (1)...(19): siRNA sense strand
cugcagagggccaggagaa

SEQ ID NO: 2394356 - RNA, 19 nt, Homo sapiens
  misc_RNA (1)...(19): siRNA sense strand
cgagaacgaggcagggaaa

SEQ ID NO: 2394357 - RNA, 19 nt, Homo sapiens
  misc_RNA (1)...(19): siRNA sense strand
gaguaaaaccagaggagau

SEQ ID NO: 2394358 - RNA, 19 nt, Homo sapiens
  misc_RNA (1)...(19): siRNA sense strand
gcaucaagcaacagcagaa

SEQ ID NO: 2394359 - RNA, 19 nt, Homo sapiens
  misc_RNA (1)...(19): siRNA sense strand
guuagagagaggagggaga

SEQ ID NO: 2394360 - RNA, 19 nt, Homo sapiens
  misc_RNA (1)...(19): siRNA sense strand
uugaagaugaggagaagaa

SEQ ID NO: 2394361 - RNA, 19 nt, Homo sapiens
  misc_RNA (1)...(19): siRNA sense strand
gagaaugggcagagggaag

SEQ ID NO: 2394362 - RNA, 19 nt, Homo sapiens
  misc_RNA (1)...(19): siRNA sense strand
aagaagaggaggaggagga

SEQ ID NO: 2394363 - RNA, 19 nt, Homo sapiens
  misc_RNA (1)...(19): siRNA sense strand
gggucagagcagaucgaaa

SEQ ID NO: 2394364 - RNA, 19 nt, Homo sapiens
  misc_RNA (1)...(19): siRNA sense strand
aaacaagaucccaggaaca

SEQ ID NO: 2394365 - RNA, 19 nt, Homo sapiens
  misc_RNA (1)...(19): siRNA sense strand
gugugaagcugaagaggca

SEQ ID NO: 2394366 - RNA, 19 nt, Homo sapiens
  misc_RNA (1)...(19): siRNA sense strand
gcuccauagcgaagaagaa

SEQ ID NO: 2394367 - RNA, 19 nt, Homo sapiens
  misc_RNA (1)...(19): siRNA sense strand
gagccaaaggagaggacuu

SEQ ID NO: 2394368 - RNA, 19 nt, Homo sapiens
  misc_RNA (1)...(19): siRNA sense strand
agagaaagggagcgggaca

SEQ ID NO: 2394369 - RNA, 19 nt, Homo sapiens
  misc_RNA (1)...(19): siRNA sense strand
aagaagaaauagagcccau

SEQ ID NO: 2394370 - RNA, 19 nt, Homo sapiens
  misc_RNA (1)...(19): siRNA sense strand
ggaggaagaagaugaugaa

SEQ ID NO: 2394371 - RNA, 19 nt, Homo sapiens
  misc_RNA (1)...(19): siRNA sense strand
ggacaaaguucgagaaggg

SEQ ID NO: 2394372 - RNA, 19 nt, Homo sapiens
  misc_RNA (1)...(19): siRNA sense strand
cagcagcaggagaaggaaa

SEQ ID NO: 2394373 - RNA, 19 nt, Homo sapiens
  misc_RNA (1)...(19): siRNA sense strand
cugaggaggaagaggauca

SEQ ID NO: 2394374 - RNA, 19 nt, Homo sapiens
  misc_RNA (1)...(19): siRNA sense strand
augaagaagaggaagguga

SEQ ID NO: 2394375 - RNA, 19 nt, Homo sapiens
  misc_RNA (1)...(19): siRNA sense strand
ccagacagcagcaggagaa

SEQ ID NO: 2394376 - RNA, 19 nt, Homo sapiens
  misc_RNA (1)...(19): siRNA sense strand
agagggaagaagaggaaga

SEQ ID NO: 2394377 - RNA, 19 nt, Homo sapiens
  misc_RNA (1)...(19): siRNA sense strand
gcagaacgggaacgggaaa

SEQ ID NO: 2394378 - RNA, 19 nt, Homo sapiens
  misc_RNA (1)...(19): siRNA sense strand
gaggaagaggaucaagaaa

SEQ ID NO: 2394379 - RNA, 19 nt, Homo sapiens
  misc_RNA (1)...(19): siRNA sense strand
ccugaaagaguuuaaggaa

SEQ ID NO: 2394380 - RNA, 19 nt, Homo sapiens
  misc_RNA (1)...(19): siRNA sense strand
ggagaugauggaugagaga

SEQ ID NO: 2394381 - RNA, 19 nt, Homo sapiens
  misc_RNA (1)...(19): siRNA sense strand
acaucagaguccagaucaa

SEQ ID NO: 2394382 - RNA, 19 nt, Homo sapiens
  misc_RNA (1)...(19): siRNA sense strand
aagaugaggagaagaaaga

SEQ ID NO: 2394383 - RNA, 19 nt, Homo sapiens
  misc_RNA (1)...(19): siRNA sense strand
aagaagaugaugaagaaga

SEQ ID NO: 2394384 - RNA, 19 nt, Homo sapiens
  misc_RNA (1)...(19): siRNA sense strand
gagcaaaaggagcgggaga

SEQ ID NO: 2394385 - RNA, 19 nt, Homo sapiens
  misc_RNA (1)...(19): siRNA sense strand
aggaauuagcacuggccaa

SEQ ID NO: 2394386 - RNA, 19 nt, Homo sapiens
  misc_RNA (1)...(19): siRNA sense strand
cugaagaaugucugaaaca

SEQ ID NO: 2394387 - RNA, 19 nt, Homo sapiens
  misc_RNA (1)...(19): siRNA sense strand
agacgaucaucuaggguca

SEQ ID NO: 2394388 - RNA, 19 nt, Homo sapiens
  misc_RNA (1)...(19): siRNA sense strand
cagcagagaaagugccaga

SEQ ID NO: 2394389 - RNA, 19 nt, Homo sapiens
  misc_RNA (1)...(19): siRNA sense strand
agagaaagcccaggaggaa

SEQ ID NO: 2394390 - RNA, 19 nt, Homo sapiens
  misc_RNA (1)...(19): siRNA sense strand
aaaccaaggaaaggagaaa

SEQ ID NO: 2394391 - RNA, 19 nt, Homo sapiens
  misc_RNA (1)...(19): siRNA sense strand
agaugaugaagaagaggaa

SEQ ID NO: 2394392 - RNA, 19 nt, Homo sapiens
  misc_RNA (1)...(19): siRNA sense strand
uuacaagaucccaggaaga

SEQ ID NO: 2394393 - RNA, 19 nt, Homo sapiens
  misc_RNA (1)...(19): siRNA sense strand
aggaggaggaggaagaaga

SEQ ID NO: 2394394 - RNA, 19 nt, Homo sapiens
  misc_RNA (1)...(19): siRNA sense strand
ggaaggugaugaugaggga

SEQ ID NO: 2394395 - RNA, 19 nt, Homo sapiens
  misc_RNA (1)...(19): siRNA sense strand
agcaagaugagcuggauua

SEQ ID NO: 2394396 - RNA, 19 nt, Homo sapiens
  misc_RNA (1)...(19): siRNA sense strand
aaacuaagacagaggagca

SEQ ID NO: 2394397 - RNA, 19 nt, Homo sapiens
  misc_RNA (1)...(19): siRNA sense strand
cuaaagaaaagaagaguga

SEQ ID NO: 2394398 - RNA, 19 nt, Homo sapiens
  misc_RNA (1)...(19): siRNA sense strand
acagcuggagcgagagaaa

SEQ ID NO: 2394399 - RNA, 19 nt, Homo sapiens
  misc_RNA (1)...(19): siRNA sense strand
cugaaagaguuuaaggaag

SEQ ID NO: 2394400 - RNA, 19 nt, Homo sapiens
  misc_RNA (1)...(19): siRNA sense strand
gaugaggagaagaaagaga

SEQ ID NO: 2394401 - RNA, 19 nt, Homo sapiens
  misc_RNA (1)...(19): siRNA sense strand
gaaagggaucgcagggaca

SEQ ID NO: 2394402 - RNA, 19 nt, Homo sapiens
  misc_RNA (1)...(19): siRNA sense strand
ugaugagaaaccaaggaaa

SEQ ID NO: 2394403 - RNA, 19 nt, Homo sapiens
  misc_RNA (1)...(19): siRNA sense strand
cagccagaucguucagaaa

SEQ ID NO: 2394404 - RNA, 19 nt, Homo sapiens
  misc_RNA (1)...(19): siRNA sense strand
cagcugagucggaggacga

SEQ ID NO: 2394405 - RNA, 19 nt, Homo sapiens
  misc_RNA (1)...(19): siRNA sense strand
gaaaccaaggaaaggagaa

SEQ ID NO: 2394406 - RNA, 19 nt, Homo sapiens
  misc_RNA (1)...(19): siRNA sense strand
gugcgaagucuaaagaaaa

SEQ ID NO: 2394407 - RNA, 19 nt, Homo sapiens
  misc_RNA (1)...(19): siRNA sense strand
ccuaaaucuucuagcguaa

SEQ ID NO: 2394408 - RNA, 19 nt, Homo sapiens
  misc_RNA (1)...(19): siRNA sense strand
ccuccuugcuggugagaaa

SEQ ID NO: 2394409 - RNA, 19 nt, Homo sapiens
  misc_RNA (1)...(19): siRNA sense strand
acaaagaagagaagaguga

SEQ ID NO: 2394410 - RNA, 19 nt, Homo sapiens
  misc_RNA (1)...(19): siRNA sense strand
ggacaaagauucaucccua

SEQ ID NO: 2394411 - RNA, 19 nt, Homo sapiens
  misc_RNA (1)...(19): siRNA sense strand
aaagaagagaagagugaua

SEQ ID NO: 2394412 - RNA, 19 nt, Homo sapiens
  misc_RNA (1)...(19): siRNA sense strand
aguacauucuggaggguua

SEQ ID NO: 2394413 - RNA, 19 nt, Homo sapiens
  misc_RNA (1)...(19): siRNA sense strand
gguccagauugaugauaaa

SEQ ID NO: 2394414 - RNA, 19 nt, Homo sapiens
  misc_RNA (1)...(19): siRNA sense strand
aaucagaucuugaggccaa

SEQ ID NO: 2394415 - RNA, 19 nt, Homo sapiens
  misc_RNA (1)...(19): siRNA sense strand
gguuaaaagcugggagaaa

SEQ ID NO: 2394416 - RNA, 19 nt, Homo sapiens
  misc_RNA (1)...(19): siRNA sense strand
gcguaaagauguuggugga

SEQ ID NO: 2394417 - RNA, 19 nt, Homo sapiens
  misc_RNA (1)...(19): siRNA sense strand
cgacggacuucuagcacaa

SEQ ID NO: 2394418 - RNA, 19 nt, Homo sapiens
  misc_RNA (1)...(19): siRNA sense strand
cugaagguguagaggaaga

SEQ ID NO: 2394419 - RNA, 19 nt, Homo sapiens
  misc_RNA (1)...(19): siRNA sense strand
agauccaguuagugaguua

SEQ ID NO: 2394420 - RNA, 19 nt, Homo sapiens
  misc_RNA (1)...(19): siRNA sense strand
ucagcaaagacguggauua

SEQ ID NO: 2394421 - RNA, 19 nt, Homo sapiens
  misc_RNA (1)...(19): siRNA sense strand
aguagugggucaacagaaa

SEQ ID NO: 2394422 - RNA, 19 nt, Homo sapiens
  misc_RNA (1)...(19): siRNA sense strand
ugauagaaaucgugagauc

SEQ ID NO: 2394423 - RNA, 19 nt, Homo sapiens
  misc_RNA (1)...(19): siRNA sense strand
acauggaauugcuaagaaa

SEQ ID NO: 2394424 - RNA, 19 nt, Homo sapiens
  misc_RNA (1)...(19): siRNA sense strand
ccuucaagauggucagcaa

SEQ ID NO: 2394425 - RNA, 19 nt, Homo sapiens
  misc_RNA (1)...(19): siRNA sense strand
agauguugguggaaagcaa

SEQ ID NO: 2394426 - RNA, 19 nt, Homo sapiens
  misc_RNA (1)...(19): siRNA sense strand
ccuuauagagauaggcaau

SEQ ID NO: 2394427 - RNA, 19 nt, Homo sapiens
  misc_RNA (1)...(19): siRNA sense strand
ugggagaaauagcuggaaa

SEQ ID NO: 2394428 - RNA, 19 nt, Homo sapiens
  misc_RNA (1)...(19): siRNA sense strand
gugcaggcccagaggagaa

SEQ ID NO: 2394429 - RNA, 19 nt, Homo sapiens
  misc_RNA (1)...(19): siRNA sense strand
gggcagauacagugcucua

SEQ ID NO: 2394430 - RNA, 19 nt, Homo sapiens
  misc_RNA (1)...(19): siRNA sense strand
gcauuuaacuagaucccua

SEQ ID NO: 2394431 - RNA, 19 nt, Homo sapiens
  misc_RNA (1)...(19): siRNA sense strand
cuuacuaugucaaggguau

SEQ ID NO: 2394432 - RNA, 19 nt, Homo sapiens
  misc_RNA (1)...(19): siRNA sense strand
aagcaagcccugagaaaca

SEQ ID NO: 2394433 - RNA, 19 nt, Homo sapiens
  misc_RNA (1)...(19): siRNA sense strand
gguugcaguuccagaaauu

SEQ ID NO: 2394434 - RNA, 19 nt, Homo sapiens
  misc_RNA (1)...(19): siRNA sense strand
gggucauuaaagugaauaa

SEQ ID NO: 2394435 - RNA, 19 nt, Homo sapiens
  misc_RNA (1)...(19): siRNA sense strand
cuucccagcuugauagaaa

SEQ ID NO: 2394436 - RNA, 19 nt, Homo sapiens
  misc_RNA (1)...(19): siRNA sense strand
ccagggaagcauuggaaau

SEQ ID NO: 2394437 - RNA, 19 nt, Homo sapiens
  misc_RNA (1)...(19): siRNA sense strand
uaaggaaggaagugaagaa

SEQ ID NO: 2394438 - RNA, 19 nt, Homo sapiens
  misc_RNA (1)...(19): siRNA sense strand
gcaacaggacauugaucua

SEQ ID NO: 2394439 - RNA, 19 nt, Homo sapiens
  misc_RNA (1)...(19): siRNA sense strand
aguacaccuuauagagaua

SEQ ID NO: 2394440 - RNA, 19 nt, Homo sapiens
  misc_RNA (1)...(19): siRNA sense strand
cgucauagccagcugucaa

SEQ ID NO: 2394441 - RNA, 19 nt, Homo sapiens
  misc_RNA (1)...(19): siRNA sense strand
agucuuugaucuucggaaa

SEQ ID NO: 2394442 - RNA, 19 nt, Homo sapiens
  misc_RNA (1)...(19): siRNA sense strand
uacugaagguguagaggaa

SEQ ID NO: 2394443 - RNA, 19 nt, Homo sapiens
  misc_RNA (1)...(19): siRNA sense strand
guggcuagcuaaugagaca

SEQ ID NO: 2394444 - RNA, 19 nt, Homo sapiens
  misc_RNA (1)...(19): siRNA sense strand
agucauuccucuauggauu

SEQ ID NO: 2394445 - RNA, 19 nt, Homo sapiens
  misc_RNA (1)...(19): siRNA sense strand
gcaaaugaguucacggauc

SEQ ID NO: 2394446 - RNA, 19 nt, Homo sapiens
  misc_RNA (1)...(19): siRNA sense strand
ggacagaccaccugggaac

SEQ ID NO: 2394447 - RNA, 19 nt, Homo sapiens
  misc_RNA (1)...(19): siRNA sense strand
ugaaauucugggagagaga

SEQ ID NO: 2394448 - RNA, 19 nt, Homo sapiens
  misc_RNA (1)...(19): siRNA sense strand
cgaacagcuuaaagacauu

SEQ ID NO: 2394449 - RNA, 19 nt, Homo sapiens
  misc_RNA (1)...(19): siRNA sense strand
agagaagagugauaaguca

SEQ ID NO: 2394450 - RNA, 19 nt, Homo sapiens
  misc_RNA (1)...(19): siRNA sense strand
caggagacgcacaggaaaa

SEQ ID NO: 2394451 - RNA, 19 nt, Homo sapiens
  misc_RNA (1)...(19): siRNA sense strand
gcgaggaggcagugucauu

SEQ ID NO: 2394452 - RNA, 19 nt, Homo sapiens
  misc_RNA (1)...(19): siRNA sense strand
gguggaaaauucugguuua

SEQ ID NO: 2394453 - RNA, 19 nt, Homo sapiens
  misc_RNA (1)...(19): siRNA sense strand
ugacuugaguagagcauca

SEQ ID NO: 2394454 - RNA, 19 nt, Homo sapiens
  misc_RNA (1)...(19): siRNA sense strand
gcauuaacuuugacagacu

SEQ ID NO: 2394455 - RNA, 19 nt, Homo sapiens
  misc_RNA (1)...(19): siRNA sense strand
gggaagagcaagaugcagu

SEQ ID NO: 2394456 - RNA, 19 nt, Homo sapiens
  misc_RNA (1)...(19): siRNA sense strand
ccugugaaauucugggaga

SEQ ID NO: 2394457 - RNA, 19 nt, Homo sapiens
  misc_RNA (1)...(19): siRNA sense strand
gcuuaagaguguucaacca

SEQ ID NO: 2394458 - RNA, 19 nt, Homo sapiens
  misc_RNA (1)...(19): siRNA sense strand
acacaaaacgaguggauca

SEQ ID NO: 2394459 - RNA, 19 nt, Homo sapiens
  misc_RNA (1)...(19): siRNA sense strand
aguuuauuguccugugaua

SEQ ID NO: 2394460 - RNA, 19 nt, Homo sapiens
  misc_RNA (1)...(19): siRNA sense strand
caacucacauagagagcau

SEQ ID NO: 2394461 - RNA, 19 nt, Homo sapiens
  misc_RNA (1)...(19): siRNA sense strand
cagaaaacaaagaagagaa

SEQ ID NO: 2394462 - RNA, 19 nt, Homo sapiens
  misc_RNA (1)...(19): siRNA sense strand
agggagaggugcuagauga

SEQ ID NO: 2394463 - RNA, 19 nt, Homo sapiens
  misc_RNA (1)...(19): siRNA sense strand
caucugaagaagccaauaa

SEQ ID NO: 2394464 - RNA, 19 nt, Homo sapiens
  misc_RNA (1)...(19): siRNA sense strand
uagaggaagaugaaggauu

SEQ ID NO: 2394465 - RNA, 19 nt, Homo sapiens
  misc_RNA (1)...(19): siRNA sense strand
agacaaugcaggaaggacu

SEQ ID NO: 2394466 - RNA, 19 nt, Homo sapiens
  misc_RNA (1)...(19): siRNA sense strand
agggagaguuucuguguga

SEQ ID NO: 2394467 - RNA, 19 nt, Homo sapiens
  misc_RNA (1)...(19): siRNA sense strand
guccaguaauuuagaguca

SEQ ID NO: 2394468 - RNA, 19 nt, Homo sapiens
  misc_RNA (1)...(19): siRNA sense strand
agucaguggagcagcacaa

SEQ ID NO: 2394469 - RNA, 19 nt, Homo sapiens
  misc_RNA (1)...(19): siRNA sense strand
cugcauauguugcggucuu

SEQ ID NO: 2394470 - RNA, 19 nt, Homo sapiens
  misc_RNA (1)...(19): siRNA sense strand
cauuaaacuucaucaggau

SEQ ID NO: 2394471 - RNA, 19 nt, Homo sapiens
  misc_RNA (1)...(19): siRNA sense strand
ggaauguguccgaggucuu

SEQ ID NO: 2394472 - RNA, 19 nt, Homo sapiens
  misc_RNA (1)...(19): siRNA sense strand
auguaacagugguggcaau

SEQ ID NO: 2394473 - RNA, 19 nt, Homo sapiens
  misc_RNA (1)...(19): siRNA sense strand
gggccaaaguucuagucuu

SEQ ID NO: 2394474 - RNA, 19 nt, Homo sapiens
  misc_RNA (1)...(19): siRNA sense strand
ccgacaaagcagugaucca

SEQ ID NO: 2394475 - RNA, 19 nt, Homo sapiens
  misc_RNA (1)...(19): siRNA sense strand
gcauaucuagggagaguuu

SEQ ID NO: 2394476 - RNA, 19 nt, Homo sapiens
  misc_RNA (1)...(19): siRNA sense strand
ggagaguuucugugugauu

SEQ ID NO: 2394477 - RNA, 19 nt, Homo sapiens
  misc_RNA (1)...(19): siRNA sense strand
ggucaaacaacgaggacaa

SEQ ID NO: 2394478 - RNA, 19 nt, Homo sapiens
  misc_RNA (1)...(19): siRNA sense strand
gagcaauauuccaaguaua

SEQ ID NO: 2394479 - RNA, 19 nt, Homo sapiens
  misc_RNA (1)...(19): siRNA sense strand
gcgagaagguggagaccau

SEQ ID NO: 2394480 - RNA, 19 nt, Homo sapiens
  misc_RNA (1)...(19): siRNA sense strand
aaauaggaauggaggacaa

SEQ ID NO: 2394481 - RNA, 19 nt, Homo sapiens
  misc_RNA (1)...(19): siRNA sense strand
auaaggaacaagugagaaa

SEQ ID NO: 2394482 - RNA, 19 nt, Homo sapiens
  misc_RNA (1)...(19): siRNA sense strand
gaaaugagaaagaugguaa

SEQ ID NO: 2394483 - RNA, 19 nt, Homo sapiens
  misc_RNA (1)...(19): siRNA sense strand
ggaaagaaacggagaucca

SEQ ID NO: 2394484 - RNA, 19 nt, Homo sapiens
  misc_RNA (1)...(19): siRNA sense strand
aaagaaaagaggaggauua

SEQ ID NO: 2394485 - RNA, 19 nt, Homo sapiens
  misc_RNA (1)...(19): siRNA sense strand
ggaccaaccaagagugcaa

SEQ ID NO: 2394486 - RNA, 19 nt, Homo sapiens
  misc_RNA (1)...(19): siRNA sense strand
agacaagaauugcacgaaa

SEQ ID NO: 2394487 - RNA, 19 nt, Homo sapiens
  misc_RNA (1)...(19): siRNA sense strand
gcacgaagccucacacaaa

SEQ ID NO: 2394488 - RNA, 19 nt, Homo sapiens
  misc_RNA (1)...(19): siRNA sense strand
cgacauauucauggagaaa

SEQ ID NO: 2394489 - RNA, 19 nt, Homo sapiens
  misc_RNA (1)...(19): siRNA sense strand
uggagcagguggaaagaaa

SEQ ID NO: 2394490 - RNA, 19 nt, Homo sapiens
  misc_RNA (1)...(19): siRNA sense strand
ccagagaagcacagaaaca

SEQ ID NO: 2394491 - RNA, 19 nt, Homo sapiens
  misc_RNA (1)...(19): siRNA sense strand
agaaggaagaggaggaaaa

SEQ ID NO: 2394492 - RNA, 19 nt, Homo sapiens
  misc_RNA (1)...(19): siRNA sense strand
ucgaagaacgggagcgcaa

SEQ ID NO: 2394493 - RNA, 19 nt, Homo sapiens
  misc_RNA (1)...(19): siRNA sense strand
gcggcaaugaucagggaaa

SEQ ID NO: 2394494 - RNA, 19 nt, Homo sapiens
  misc_RNA (1)...(19): siRNA sense strand
cgcaaagaaaggcgggaaa

SEQ ID NO: 2394495 - RNA, 19 nt, Homo sapiens
  misc_RNA (1)...(19): siRNA sense strand
gcgacauauucauggagaa

SEQ ID NO: 2394496 - RNA, 19 nt, Homo sapiens
  misc_RNA (1)...(19): siRNA sense strand
ugaccgaagaggagaggaa

SEQ ID NO: 2394497 - RNA, 19 nt, Homo sapiens
  misc_RNA (1)...(19): siRNA sense strand
augaaaguccacaggguaa

SEQ ID NO: 2394498 - RNA, 19 nt, Homo sapiens
  misc_RNA (1)...(19): siRNA sense strand
cgaacaagacagaugaaaa

SEQ ID NO: 2394499 - RNA, 19 nt, Homo sapiens
  misc_RNA (1)...(19): siRNA sense strand
aguaaaaggaggaccaaaa

SEQ ID NO: 2394500 - RNA, 19 nt, Homo sapiens
  misc_RNA (1)...(19): siRNA sense strand
gcacauacuaagaccaaau

SEQ ID NO: 2394501 - RNA, 19 nt, Homo sapiens
  misc_RNA (1)...(19): siRNA sense strand
gaccaaaacaguaaagaaa

SEQ ID NO: 2394502 - RNA, 19 nt, Homo sapiens
  misc_RNA (1)...(19): siRNA sense strand
ccagaacagcaaagaacaa

SEQ ID NO: 2394503 - RNA, 19 nt, Homo sapiens
  misc_RNA (1)...(19): siRNA sense strand
agaacaagacagugagcuu

SEQ ID NO: 2394504 - RNA, 19 nt, Homo sapiens
  misc_RNA (1)...(19): siRNA sense strand
cuacaaagaucucagcgaa

SEQ ID NO: 2394505 - RNA, 19 nt, Homo sapiens
  misc_RNA (1)...(19): siRNA sense strand
gaacaagacagaugaaaau

SEQ ID NO: 2394506 - RNA, 19 nt, Homo sapiens
  misc_RNA (1)...(19): siRNA sense strand
gccaagaagaagacaagaa

SEQ ID NO: 2394507 - RNA, 19 nt, Homo sapiens
  misc_RNA (1)...(19): siRNA sense strand
uggaauauuuacagcucaa

SEQ ID NO: 2394508 - RNA, 19 nt, Homo sapiens
  misc_RNA (1)...(19): siRNA sense strand
acagagaaguccaacacaa

SEQ ID NO: 2394509 - RNA, 19 nt, Homo sapiens
  misc_RNA (1)...(19): siRNA sense strand
agaacuugaucgcgagcaa

SEQ ID NO: 2394510 - RNA, 19 nt, Homo sapiens
  misc_RNA (1)...(19): siRNA sense strand
uguacacacuggagcauaa

SEQ ID NO: 2394511 - RNA, 19 nt, Homo sapiens
  misc_RNA (1)...(19): siRNA sense strand
cgagagcgucagcgagaaa

SEQ ID NO: 2394512 - RNA, 19 nt, Homo sapiens
  misc_RNA (1)...(19): siRNA sense strand
aaacggagauccagccuua

SEQ ID NO: 2394513 - RNA, 19 nt, Homo sapiens
  misc_RNA (1)...(19): siRNA sense strand
acguggagcuggagagcga

SEQ ID NO: 2394514 - RNA, 19 nt, Homo sapiens
  misc_RNA (1)...(19): siRNA sense strand
augaaauacugguuaguga

SEQ ID NO: 2394515 - RNA, 19 nt, Homo sapiens
  misc_RNA (1)...(19): siRNA sense strand
aagaagaagccaugcucaa

SEQ ID NO: 2394516 - RNA, 19 nt, Homo sapiens
  misc_RNA (1)...(19): siRNA sense strand
gguaugauaaagugggaca

SEQ ID NO: 2394517 - RNA, 19 nt, Homo sapiens
  misc_RNA (1)...(19): siRNA sense strand
gguagaaucaguucauuua

SEQ ID NO: 2394518 - RNA, 19 nt, Homo sapiens
  misc_RNA (1)...(19): siRNA sense strand
ccuccuagagagagaaaga

SEQ ID NO: 2394519 - RNA, 19 nt, Homo sapiens
  misc_RNA (1)...(19): siRNA sense strand
ggguagaaucaguucauuu

SEQ ID NO: 2394520 - RNA, 19 nt, Homo sapiens
  misc_RNA (1)...(19): siRNA sense strand
ugagaaagaugguaaggca

SEQ ID NO: 2394521 - RNA, 19 nt, Homo sapiens
  misc_RNA (1)...(19): siRNA sense strand
uggagaaagcucuagcaaa

SEQ ID NO: 2394522 - RNA, 19 nt, Homo sapiens
  misc_RNA (1)...(19): siRNA sense strand
aauuagaaguggaagucau

SEQ ID NO: 2394523 - RNA, 19 nt, Homo sapiens
  misc_RNA (1)...(19): siRNA sense strand
cuccauaugucaaaguaua

SEQ ID NO: 2394524 - RNA, 19 nt, Homo sapiens
  misc_RNA (1)...(19): siRNA sense strand
ugucgaaagcaacaagaaa

SEQ ID NO: 2394525 - RNA, 19 nt, Homo sapiens
  misc_RNA (1)...(19): siRNA sense strand
gagaaaggugauuuggauu

SEQ ID NO: 2394526 - RNA, 19 nt, Homo sapiens
  misc_RNA (1)...(19): siRNA sense strand
gcacaagcuuuaugucaga

SEQ ID NO: 2394527 - RNA, 19 nt, Homo sapiens
  misc_RNA (1)...(19): siRNA sense strand
cuauaaggaacaagugaga

SEQ ID NO: 2394528 - RNA, 19 nt, Homo sapiens
  misc_RNA (1)...(19): siRNA sense strand
cauaaagaucaguacagaa

SEQ ID NO: 2394529 - RNA, 19 nt, Homo sapiens
  misc_RNA (1)...(19): siRNA sense strand
gacaagaauugcacgaaaa

SEQ ID NO: 2394530 - RNA, 19 nt, Homo sapiens
  misc_RNA (1)...(19): siRNA sense strand
guuugaaagcuauaaggaa

SEQ ID NO: 2394531 - RNA, 19 nt, Homo sapiens
  misc_RNA (1)...(19): siRNA sense strand
aaaugaaagugcaucgauu

SEQ ID NO: 2394532 - RNA, 19 nt, Homo sapiens
  misc_RNA (1)...(19): siRNA sense strand
guuacagcucugagggcaa

SEQ ID NO: 2394533 - RNA, 19 nt, Homo sapiens
  misc_RNA (1)...(19): siRNA sense strand
ggugauauacaaauaggaa

SEQ ID NO: 2394534 - RNA, 19 nt, Homo sapiens
  misc_RNA (1)...(19): siRNA sense strand
ucugaaaguuguuggagga

SEQ ID NO: 2394535 - RNA, 19 nt, Homo sapiens
  misc_RNA (1)...(19): siRNA sense strand
ccucgaaaucccuauguaa

SEQ ID NO: 2394536 - RNA, 19 nt, Homo sapiens
  misc_RNA (1)...(19): siRNA sense strand
caugaaugcuuuaacucaa

SEQ ID NO: 2394537 - RNA, 19 nt, Homo sapiens
  misc_RNA (1)...(19): siRNA sense strand
ccaagaagaagacaagaau

SEQ ID NO: 2394538 - RNA, 19 nt, Homo sapiens
  misc_RNA (1)...(19): siRNA sense strand
ugaaaguuguuggaggaaa

SEQ ID NO: 2394539 - RNA, 19 nt, Homo sapiens
  misc_RNA (1)...(19): siRNA sense strand
uagcagauguaguuggaca

SEQ ID NO: 2394540 - RNA, 19 nt, Homo sapiens
  misc_RNA (1)...(19): siRNA sense strand
caacauuaacugugccaga

SEQ ID NO: 2394541 - RNA, 19 nt, Homo sapiens
  misc_RNA (1)...(19): siRNA sense strand
gcgcaaagaaaggcgggaa

SEQ ID NO: 2394542 - RNA, 19 nt, Homo sapiens
  misc_RNA (1)...(19): siRNA sense strand
caagagugcaagaagaaga

SEQ ID NO: 2394543 - RNA, 19 nt, Homo sapiens
  misc_RNA (1)...(19): siRNA sense strand
caagaagaagaaagugaau

SEQ ID NO: 2394544 - RNA, 19 nt, Homo sapiens
  misc_RNA (1)...(19): siRNA sense strand
ugaugaugguauuggcgua

SEQ ID NO: 2394545 - RNA, 19 nt, Homo sapiens
  misc_RNA (1)...(19): siRNA sense strand
agugagaagcggcaguaua

SEQ ID NO: 2394546 - RNA, 19 nt, Homo sapiens
  misc_RNA (1)...(19): siRNA sense strand
ggcagaaggaagaggagga

SEQ ID NO: 2394547 - RNA, 19 nt, Homo sapiens
  misc_RNA (1)...(19): siRNA sense strand
gggccaauuagaaguggaa

SEQ ID NO: 2394548 - RNA, 19 nt, Homo sapiens
  misc_RNA (1)...(19): siRNA sense strand
ggaccaaaacaguaaagaa

SEQ ID NO: 2394549 - RNA, 19 nt, Homo sapiens
  misc_RNA (1)...(19): siRNA sense strand
gcagcugaaaugagaaaga

SEQ ID NO: 2394550 - RNA, 19 nt, Homo sapiens
  misc_RNA (1)...(19): siRNA sense strand
ccuguauagccaagaagaa

SEQ ID NO: 2394551 - RNA, 19 nt, Homo sapiens
  misc_RNA (1)...(19): siRNA sense strand
gaugaaaguccacagggua

SEQ ID NO: 2394552 - RNA, 19 nt, Homo sapiens
  misc_RNA (1)...(19): siRNA sense strand
gagaacaaguuuaacgaca

SEQ ID NO: 2394553 - RNA, 19 nt, Homo sapiens
  misc_RNA (1)...(19): siRNA sense strand
gggucaaagaauuacggaa

SEQ ID NO: 2394554 - RNA, 19 nt, Homo sapiens
  misc_RNA (1)...(19): siRNA sense strand
uuaucauacuucagccaaa

SEQ ID NO: 2394555 - RNA, 19 nt, Homo sapiens
  misc_RNA (1)...(19): siRNA sense strand
caaguggaugagagagcaa

SEQ ID NO: 2394556 - RNA, 19 nt, Homo sapiens
  misc_RNA (1)...(19): siRNA sense strand
aguuaaauauuggugggaa

SEQ ID NO: 2394557 - RNA, 19 nt, Homo sapiens
  misc_RNA (1)...(19): siRNA sense strand
aagcagagucguaugcaga

SEQ ID NO: 2394558 - RNA, 19 nt, Homo sapiens
  misc_RNA (1)...(19): siRNA sense strand
gccaaacagaacaaaggaa

SEQ ID NO: 2394559 - RNA, 19 nt, Homo sapiens
  misc_RNA (1)...(19): siRNA sense strand
ugagagagcaaaaggcaau

SEQ ID NO: 2394560 - RNA, 19 nt, Homo sapiens
  misc_RNA (1)...(19): siRNA sense strand
uacggaaaauguugggaaa

SEQ ID NO: 2394561 - RNA, 19 nt, Homo sapiens
  misc_RNA (1)...(19): siRNA sense strand
cagcaugaagagagagaaa

SEQ ID NO: 2394562 - RNA, 19 nt, Homo sapiens
  misc_RNA (1)...(19): siRNA sense strand
gaagaaagauacaggccau

SEQ ID NO: 2394563 - RNA, 19 nt, Homo sapiens
  misc_RNA (1)...(19): siRNA sense strand
aaauaguggaguagaagaa

SEQ ID NO: 2394564 - RNA, 19 nt, Homo sapiens
  misc_RNA (1)...(19): siRNA sense strand
ccauggaagaagaaggauu

SEQ ID NO: 2394565 - RNA, 19 nt, Homo sapiens
  misc_RNA (1)...(19): siRNA sense strand
cugagaaagccaaggacuu

SEQ ID NO: 2394566 - RNA, 19 nt, Homo sapiens
  misc_RNA (1)...(19): siRNA sense strand
guggaguagaagaaauaaa

SEQ ID NO: 2394567 - RNA, 19 nt, Homo sapiens
  misc_RNA (1)...(19): siRNA sense strand
gcacauaagggaaaggcca

SEQ ID NO: 2394568 - RNA, 19 nt, Homo sapiens
  misc_RNA (1)...(19): siRNA sense strand
agaagaaggauuagcagau

SEQ ID NO: 2394569 - RNA, 19 nt, Homo sapiens
  misc_RNA (1)...(19): siRNA sense strand
acaugaacucaaagaggaa

SEQ ID NO: 2394570 - RNA, 19 nt, Homo sapiens
  misc_RNA (1)...(19): siRNA sense strand
agaaauuagaaguggccau

SEQ ID NO: 2394571 - RNA, 19 nt, Homo sapiens
  misc_RNA (1)...(19): siRNA sense strand
ugggagcacauaagggaaa

SEQ ID NO: 2394572 - RNA, 19 nt, Homo sapiens
  misc_RNA (1)...(19): siRNA sense strand
gaaacuuggaagaagaaca

SEQ ID NO: 2394573 - RNA, 19 nt, Homo sapiens
  misc_RNA (1)...(19): siRNA sense strand
uagaaguggccauggaaga

SEQ ID NO: 2394574 - RNA, 19 nt, Homo sapiens
  misc_RNA (1)...(19): siRNA sense strand
gugccuggguggugaagau

SEQ ID NO: 2394575 - RNA, 19 nt, Homo sapiens
  misc_RNA (1)...(19): siRNA sense strand
aagaagaacaggagacaac

SEQ ID NO: 2394576 - RNA, 19 nt, Homo sapiens
  misc_RNA (1)...(19): siRNA sense strand
ggucuuugggagugauuau

SEQ ID NO: 2394577 - RNA, 19 nt, Homo sapiens
  misc_RNA (1)...(19): siRNA sense strand
gauuagcagaugaagagaa

SEQ ID NO: 2394578 - RNA, 19 nt, Homo sapiens
  misc_RNA (1)...(19): siRNA sense strand
ccgagcagaaagagauauu

SEQ ID NO: 2394579 - RNA, 19 nt, Homo sapiens
  misc_RNA (1)...(19): siRNA sense strand
gguaccuauaucugagaaa

SEQ ID NO: 2394580 - RNA, 19 nt, Homo sapiens
  misc_RNA (1)...(19): siRNA sense strand
ucgcaaagaaacagaguuc

SEQ ID NO: 2394581 - RNA, 19 nt, Homo sapiens
  misc_RNA (1)...(19): siRNA sense strand
aguuauaggaagaggagcu

SEQ ID NO: 2394582 - RNA, 19 nt, Homo sapiens
  misc_RNA (1)...(19): siRNA sense strand
caaccuuuccuaugagcaa

SEQ ID NO: 2394583 - RNA, 19 nt, Homo sapiens
  misc_RNA (1)...(19): siRNA sense strand
ccauauccgagcagaaaga

SEQ ID NO: 2394584 - RNA, 19 nt, Homo sapiens
  misc_RNA (1)...(19): siRNA sense strand
gagagagaaaccaggcaga

SEQ ID NO: 2394585 - RNA, 19 nt, Homo sapiens
  misc_RNA (1)...(19): siRNA sense strand
aagcagaaacuuggaagaa

SEQ ID NO: 2394586 - RNA, 19 nt, Homo sapiens
  misc_RNA (1)...(19): siRNA sense strand
auguacgggauuaaagaaa

SEQ ID NO: 2394587 - RNA, 19 nt, Homo sapiens
  misc_RNA (1)...(19): siRNA sense strand
cagaaacuuggaagaagaa

SEQ ID NO: 2394588 - RNA, 19 nt, Homo sapiens
  misc_RNA (1)...(19): siRNA sense strand
aaagaaagcucacaggacu

SEQ ID NO: 2394589 - RNA, 19 nt, Homo sapiens
  misc_RNA (1)...(19): siRNA sense strand
agaaggauuagcagaugaa

SEQ ID NO: 2394590 - RNA, 19 nt, Homo sapiens
  misc_RNA (1)...(19): siRNA sense strand
ugccaagggucauguaaaa

SEQ ID NO: 2394591 - RNA, 19 nt, Homo sapiens
  misc_RNA (1)...(19): siRNA sense strand
gguuuauguacgggauuaa

SEQ ID NO: 2394592 - RNA, 19 nt, Homo sapiens
  misc_RNA (1)...(19): siRNA sense strand
acucaaagaggaaagcaga

SEQ ID NO: 2394593 - RNA, 19 nt, Homo sapiens
  misc_RNA (1)...(19): siRNA sense strand
gguuugaaggguugacuca

SEQ ID NO: 2394594 - RNA, 19 nt, Homo sapiens
  misc_RNA (1)...(19): siRNA sense strand
acaggagacaacuggcaua

SEQ ID NO: 2394595 - RNA, 19 nt, Homo sapiens
  misc_RNA (1)...(19): siRNA sense strand
cugaaaacagaauuggaaa

SEQ ID NO: 2394596 - RNA, 19 nt, Homo sapiens
  misc_RNA (1)...(19): siRNA sense strand
gguugguccagaagaaaga

SEQ ID NO: 2394597 - RNA, 19 nt, Homo sapiens
  misc_RNA (1)...(19): siRNA sense strand
auaguggaguagaagaaau

SEQ ID NO: 2394598 - RNA, 19 nt, Homo sapiens
  misc_RNA (1)...(19): siRNA sense strand
aagaagaaggauuagcaga

SEQ ID NO: 2394599 - RNA, 19 nt, Homo sapiens
  misc_RNA (1)...(19): siRNA sense strand
aaggauuagcagaugaaga

SEQ ID NO: 2394600 - RNA, 19 nt, Homo sapiens
  misc_RNA (1)...(19): siRNA sense strand
ggcccauauccgagcagaa

SEQ ID NO: 2394601 - RNA, 19 nt, Homo sapiens
  misc_RNA (1)...(19): siRNA sense strand
ugguuuauguacgggauua

SEQ ID NO: 2394602 - RNA, 19 nt, Homo sapiens
  misc_RNA (1)...(19): siRNA sense strand
cagacugguuacaacaaau

SEQ ID NO: 2394603 - RNA, 19 nt, Homo sapiens
  misc_RNA (1)...(19): siRNA sense strand
gaucacaacacgcucgcaa

SEQ ID NO: 2394604 - RNA, 19 nt, Homo sapiens
  misc_RNA (1)...(19): siRNA sense strand
gguccagaagaaagauaca

SEQ ID NO: 2394605 - RNA, 19 nt, Homo sapiens
  misc_RNA (1)...(19): siRNA sense strand
cgauccaccaguuggguuu

SEQ ID NO: 2394606 - RNA, 19 nt, Homo sapiens
  misc_RNA (1)...(19): siRNA sense strand
aggacuuaauucucagauu

SEQ ID NO: 2394607 - RNA, 19 nt, Homo sapiens
  misc_RNA (1)...(19): siRNA sense strand
auaaaagguuugaaggguu

SEQ ID NO: 2394608 - RNA, 19 nt, Homo sapiens
  misc_RNA (1)...(19): siRNA sense strand
augccaagggucauguaaa

SEQ ID NO: 2394609 - RNA, 19 nt, Homo sapiens
  misc_RNA (1)...(19): siRNA sense strand
uggaaagaaacucugguau

SEQ ID NO: 2394610 - RNA, 19 nt, Homo sapiens
  misc_RNA (1)...(19): siRNA sense strand
caccuugacagaagaggaa

SEQ ID NO: 2394611 - RNA, 19 nt, Homo sapiens
  misc_RNA (1)...(19): siRNA sense strand
ggauauuaagccagacaac

SEQ ID NO: 2394612 - RNA, 19 nt, Homo sapiens
  misc_RNA (1)...(19): siRNA sense strand
cucaaagaggaaagcagaa

SEQ ID NO: 2394613 - RNA, 19 nt, Homo sapiens
  misc_RNA (1)...(19): siRNA sense strand
uuuacagcaugaagagaga

SEQ ID NO: 2394614 - RNA, 19 nt, Homo sapiens
  misc_RNA (1)...(19): siRNA sense strand
caaccauacccgggaaaga

SEQ ID NO: 2394615 - RNA, 19 nt, Homo sapiens
  misc_RNA (1)...(19): siRNA sense strand
ggccauggaagaagaagga

SEQ ID NO: 2394616 - RNA, 19 nt, Homo sapiens
  misc_RNA (1)...(19): siRNA sense strand
gaaaguuauaggaagagga

SEQ ID NO: 2394617 - RNA, 19 nt, Homo sapiens
  misc_RNA (1)...(19): siRNA sense strand
cuggcaagcgugugggcaa

SEQ ID NO: 2394618 - RNA, 19 nt, Homo sapiens
  misc_RNA (1)...(19): siRNA sense strand
acgacuaaguguggagaau

SEQ ID NO: 2394619 - RNA, 19 nt, Homo sapiens
  misc_RNA (1)...(19): siRNA sense strand
gaagaggggucgaaggaca

SEQ ID NO: 2394620 - RNA, 19 nt, Homo sapiens
  misc_RNA (1)...(19): siRNA sense strand
gaaauuuguuugaugccau

SEQ ID NO: 2394621 - RNA, 19 nt, Homo sapiens
  misc_RNA (1)...(19): siRNA sense strand
gcaugaggaaaguggggaa

SEQ ID NO: 2394622 - RNA, 19 nt, Homo sapiens
  misc_RNA (1)...(19): siRNA sense strand
cagacaucuuggugggagu

SEQ ID NO: 2394623 - RNA, 19 nt, Homo sapiens
  misc_RNA (1)...(19): siRNA sense strand
ccgaugugucgaaguggaa

SEQ ID NO: 2394624 - RNA, 19 nt, Homo sapiens
  misc_RNA (1)...(19): siRNA sense strand
ccagagagcaucuucgaga

SEQ ID NO: 2394625 - RNA, 19 nt, Homo sapiens
  misc_RNA (1)...(19): siRNA sense strand
ggugggagugaaagcagaa

SEQ ID NO: 2394626 - RNA, 19 nt, Homo sapiens
  misc_RNA (1)...(19): siRNA sense strand
agaaaccaaaugaaggcua

SEQ ID NO: 2394627 - RNA, 19 nt, Homo sapiens
  misc_RNA (1)...(19): siRNA sense strand
caagauuggcuaucggcau

SEQ ID NO: 2394628 - RNA, 19 nt, Homo sapiens
  misc_RNA (1)...(19): siRNA sense strand
cagaaaucgugcuaggaaa

SEQ ID NO: 2394629 - RNA, 19 nt, Homo sapiens
  misc_RNA (1)...(19): siRNA sense strand
cugaggaaguagugaagaa

SEQ ID NO: 2394630 - RNA, 19 nt, Homo sapiens
  misc_RNA (1)...(19): siRNA sense strand
cagcagaguaugagaacau

SEQ ID NO: 2394631 - RNA, 19 nt, Homo sapiens
  misc_RNA (1)...(19): siRNA sense strand
agucagauacggaggaaau

SEQ ID NO: 2394632 - RNA, 19 nt, Homo sapiens
  misc_RNA (1)...(19): siRNA sense strand
gcuccgagagauugggaaa

SEQ ID NO: 2394633 - RNA, 19 nt, Homo sapiens
  misc_RNA (1)...(19): siRNA sense strand
gcugaaaaggaaaggauua

SEQ ID NO: 2394634 - RNA, 19 nt, Homo sapiens
  misc_RNA (1)...(19): siRNA sense strand
gugcaugcuccgagagauu

SEQ ID NO: 2394635 - RNA, 19 nt, Homo sapiens
  misc_RNA (1)...(19): siRNA sense strand
cagaugaaguauuggagau

SEQ ID NO: 2394636 - RNA, 19 nt, Homo sapiens
  misc_RNA (1)...(19): siRNA sense strand
aggaaguagugaagaagau

SEQ ID NO: 2394637 - RNA, 19 nt, Homo sapiens
  misc_RNA (1)...(19): siRNA sense strand
ugucagagcugguggagca

SEQ ID NO: 2394638 - RNA, 19 nt, Homo sapiens
  misc_RNA (1)...(19): siRNA sense strand
ggagagagcgagugcguca

SEQ ID NO: 2394639 - RNA, 19 nt, Homo sapiens
  misc_RNA (1)...(19): siRNA sense strand
ccacagaaguccugcgaac

SEQ ID NO: 2394640 - RNA, 19 nt, Homo sapiens
  misc_RNA (1)...(19): siRNA sense strand
ccggaaacucccugaggaa

SEQ ID NO: 2394641 - RNA, 19 nt, Homo sapiens
  misc_RNA (1)...(19): siRNA sense strand
cagugagagaggaggagaa

SEQ ID NO: 2394642 - RNA, 19 nt, Homo sapiens
  misc_RNA (1)...(19): siRNA sense strand
cugcagaaguugcuggaga

SEQ ID NO: 2394643 - RNA, 19 nt, Homo sapiens
  misc_RNA (1)...(19): siRNA sense strand
ugacaacauugaugagaca

SEQ ID NO: 2394644 - RNA, 19 nt, Homo sapiens
  misc_RNA (1)...(19): siRNA sense strand
gggacaaggaaaggcgaaa

SEQ ID NO: 2394645 - RNA, 19 nt, Homo sapiens
  misc_RNA (1)...(19): siRNA sense strand
aaggaaaggauuaugggaa

SEQ ID NO: 2394646 - RNA, 19 nt, Homo sapiens
  misc_RNA (1)...(19): siRNA sense strand
guuccaagaagaaggauuu

SEQ ID NO: 2394647 - RNA, 19 nt, Homo sapiens
  misc_RNA (1)...(19): siRNA sense strand
ggaaagacagccagggcca

SEQ ID NO: 2394648 - RNA, 19 nt, Homo sapiens
  misc_RNA (1)...(19): siRNA sense strand
aaggaaaggcgaaaggaga

SEQ ID NO: 2394649 - RNA, 19 nt, Homo sapiens
  misc_RNA (1)...(19): siRNA sense strand
acaacauugaugagacaua

SEQ ID NO: 2394650 - RNA, 19 nt, Homo sapiens
  misc_RNA (1)...(19): siRNA sense strand
ugggaaagauggaagcuga

SEQ ID NO: 2394651 - RNA, 19 nt, Homo sapiens
  misc_RNA (1)...(19): siRNA sense strand
agguauacauggacuggua

SEQ ID NO: 2394652 - RNA, 19 nt, Homo sapiens
  misc_RNA (1)...(19): siRNA sense strand
agaaaucgugcuaggaaau

SEQ ID NO: 2394653 - RNA, 19 nt, Homo sapiens
  misc_RNA (1)...(19): siRNA sense strand
gcagaagaaggcagaugaa

SEQ ID NO: 2394654 - RNA, 19 nt, Homo sapiens
  misc_RNA (1)...(19): siRNA sense strand
augaugaccucaagggaga

SEQ ID NO: 2394655 - RNA, 19 nt, Homo sapiens
  misc_RNA (1)...(19): siRNA sense strand
ugugaaagaagcugagaca

SEQ ID NO: 2394656 - RNA, 19 nt, Homo sapiens
  misc_RNA (1)...(19): siRNA sense strand
acuaaagagacucgggaga

SEQ ID NO: 2394657 - RNA, 19 nt, Homo sapiens
  misc_RNA (1)...(19): siRNA sense strand
ccgcagaugcaggaggaaa

SEQ ID NO: 2394658 - RNA, 19 nt, Homo sapiens
  misc_RNA (1)...(19): siRNA sense strand
gaagaaagcgugaugagga

SEQ ID NO: 2394659 - RNA, 19 nt, Homo sapiens
  misc_RNA (1)...(19): siRNA sense strand
auugaaagccagaugguuu

SEQ ID NO: 2394660 - RNA, 19 nt, Homo sapiens
  misc_RNA (1)...(19): siRNA sense strand
acuacaaccugcagggcau

SEQ ID NO: 2394661 - RNA, 19 nt, Homo sapiens
  misc_RNA (1)...(19): siRNA sense strand
cagcagaaggccaagguga

SEQ ID NO: 2394662 - RNA, 19 nt, Homo sapiens
  misc_RNA (1)...(19): siRNA sense strand
ggaccaaaccgcagaugca

SEQ ID NO: 2394663 - RNA, 19 nt, Homo sapiens
  misc_RNA (1)...(19): siRNA sense strand
ugaucuugccggagaagua

SEQ ID NO: 2394664 - RNA, 19 nt, Homo sapiens
  misc_RNA (1)...(19): siRNA sense strand
ggaaagaagagccaagcga

SEQ ID NO: 2394665 - RNA, 19 nt, Homo sapiens
  misc_RNA (1)...(19): siRNA sense strand
aggaaaggcgaaaggagau

SEQ ID NO: 2394666 - RNA, 19 nt, Homo sapiens
  misc_RNA (1)...(19): siRNA sense strand
cugaugaguuccaagaaga

SEQ ID NO: 2394667 - RNA, 19 nt, Homo sapiens
  misc_RNA (1)...(19): siRNA sense strand
accugaagcugcugggcaa

SEQ ID NO: 2394668 - RNA, 19 nt, Homo sapiens
  misc_RNA (1)...(19): siRNA sense strand
gcaucagcaucgaggacga

SEQ ID NO: 2394669 - RNA, 19 nt, Homo sapiens
  misc_RNA (1)...(19): siRNA sense strand
agaagauugagaagaagaa

SEQ ID NO: 2394670 - RNA, 19 nt, Homo sapiens
  misc_RNA (1)...(19): siRNA sense strand
aggacaggcucaacaagaa

SEQ ID NO: 2394671 - RNA, 19 nt, Homo sapiens
  misc_RNA (1)...(19): siRNA sense strand
acaagggaguggagagugu

SEQ ID NO: 2394672 - RNA, 19 nt, Homo sapiens
  misc_RNA (1)...(19): siRNA sense strand
uugaugagauggugggcau

SEQ ID NO: 2394673 - RNA, 19 nt, Homo sapiens
  misc_RNA (1)...(19): siRNA sense strand
agaagaaggcagaugaagu

SEQ ID NO: 2394674 - RNA, 19 nt, Homo sapiens
  misc_RNA (1)...(19): siRNA sense strand
uggaugacuucaagauuau

SEQ ID NO: 2394675 - RNA, 19 nt, Homo sapiens
  misc_RNA (1)...(19): siRNA sense strand
cugcaagaugaucgacaaa

SEQ ID NO: 2394676 - RNA, 19 nt, Homo sapiens
  misc_RNA (1)...(19): siRNA sense strand
cuggagaagcuaagugaca

SEQ ID NO: 2394677 - RNA, 19 nt, Homo sapiens
  misc_RNA (1)...(19): siRNA sense strand
gcccaaaacuaaagagacu

SEQ ID NO: 2394678 - RNA, 19 nt, Homo sapiens
  misc_RNA (1)...(19): siRNA sense strand
cugaugaggaggaagguga

SEQ ID NO: 2394679 - RNA, 19 nt, Homo sapiens
  misc_RNA (1)...(19): siRNA sense strand
aggcuggguuugagggcuu

SEQ ID NO: 2394680 - RNA, 19 nt, Homo sapiens
  misc_RNA (1)...(19): siRNA sense strand
ggaaacucccugaggaagu

SEQ ID NO: 2394681 - RNA, 19 nt, Homo sapiens
  misc_RNA (1)...(19): siRNA sense strand
cgauggaagcagcgcaaga

SEQ ID NO: 2394682 - RNA, 19 nt, Homo sapiens
  misc_RNA (1)...(19): siRNA sense strand
ucaaggaaacgcugcuaaa

SEQ ID NO: 2394683 - RNA, 19 nt, Homo sapiens
  misc_RNA (1)...(19): siRNA sense strand
gaaagaagagccaagcgaa

SEQ ID NO: 2394684 - RNA, 19 nt, Homo sapiens
  misc_RNA (1)...(19): siRNA sense strand
agcugaaauuggagggcuu

SEQ ID NO: 2394685 - RNA, 19 nt, Homo sapiens
  misc_RNA (1)...(19): siRNA sense strand
ccaaguacgcccaggacga

SEQ ID NO: 2394686 - RNA, 19 nt, Homo sapiens
  misc_RNA (1)...(19): siRNA sense strand
agacuaugguggagauaag

SEQ ID NO: 2394687 - RNA, 19 nt, Homo sapiens
  misc_RNA (1)...(19): siRNA sense strand
gggaugaacccacaggaga

SEQ ID NO: 2394688 - RNA, 19 nt, Homo sapiens
  misc_RNA (1)...(19): siRNA sense strand
ccgguugaugcgagcgaua

SEQ ID NO: 2394689 - RNA, 19 nt, Homo sapiens
  misc_RNA (1)...(19): siRNA sense strand
aaacagugccuuugagagu

SEQ ID NO: 2394690 - RNA, 19 nt, Homo sapiens
  misc_RNA (1)...(19): siRNA sense strand
ugagaugacccaagaggau

SEQ ID NO: 2394691 - RNA, 19 nt, Homo sapiens
  misc_RNA (1)...(19): siRNA sense strand
gaacagaagcugagcagug

SEQ ID NO: 2394692 - RNA, 19 nt, Homo sapiens
  misc_RNA (1)...(19): siRNA sense strand
cggugaacuggcugggcua

SEQ ID NO: 2394693 - RNA, 19 nt, Homo sapiens
  misc_RNA (1)...(19): siRNA sense strand
acgacaagaagacgggcaa

SEQ ID NO: 2394694 - RNA, 19 nt, Homo sapiens
  misc_RNA (1)...(19): siRNA sense strand
augauacagugcagacuua

SEQ ID NO: 2394695 - RNA, 19 nt, Homo sapiens
  misc_RNA (1)...(19): siRNA sense strand
cuccaaugcagcagaguau

SEQ ID NO: 2394696 - RNA, 19 nt, Homo sapiens
  misc_RNA (1)...(19): siRNA sense strand
cagaaaugcaacagaugaa

SEQ ID NO: 2394697 - RNA, 19 nt, Homo sapiens
  misc_RNA (1)...(19): siRNA sense strand
ccucaaugcaaccgacaaa

SEQ ID NO: 2394698 - RNA, 19 nt, Homo sapiens
  misc_RNA (1)...(19): siRNA sense strand
ugauaauaccuguuggaau

SEQ ID NO: 2394699 - RNA, 19 nt, Homo sapiens
  misc_RNA (1)...(19): siRNA sense strand
aggaauauuuagaaagcca

SEQ ID NO: 2394700 - RNA, 19 nt, Homo sapiens
  misc_RNA (1)...(19): siRNA sense strand
gccaugaaacaguaggaaa

SEQ ID NO: 2394701 - RNA, 19 nt, Homo sapiens
  misc_RNA (1)...(19): siRNA sense strand
uaaccagaacagaaagaaa

SEQ ID NO: 2394702 - RNA, 19 nt, Homo sapiens
  misc_RNA (1)...(19): siRNA sense strand
agaugaagacagugacuuu

SEQ ID NO: 2394703 - RNA, 19 nt, Homo sapiens
  misc_RNA (1)...(19): siRNA sense strand
guagaguacaagaggcaau

SEQ ID NO: 2394704 - RNA, 19 nt, Homo sapiens
  misc_RNA (1)...(19): siRNA sense strand
gcugaugaggguagagaca

SEQ ID NO: 2394705 - RNA, 19 nt, Homo sapiens
  misc_RNA (1)...(19): siRNA sense strand
ccauuaaugaguccagaaa

SEQ ID NO: 2394706 - RNA, 19 nt, Homo sapiens
  misc_RNA (1)...(19): siRNA sense strand
aggagcagcuggugcggaa

SEQ ID NO: 2394707 - RNA, 19 nt, Homo sapiens
  misc_RNA (1)...(19): siRNA sense strand
ugggcaaaccuaagaagaa

SEQ ID NO: 2394708 - RNA, 19 nt, Homo sapiens
  misc_RNA (1)...(19): siRNA sense strand
aggaaauucagaagaugua

SEQ ID NO: 2394709 - RNA, 19 nt, Homo sapiens
  misc_RNA (1)...(19): siRNA sense strand
caguagaguacaagaggca

SEQ ID NO: 2394710 - RNA, 19 nt, Homo sapiens
  misc_RNA (1)...(19): siRNA sense strand
gugaugaagaagaugaaga

SEQ ID NO: 2394711 - RNA, 19 nt, Homo sapiens
  misc_RNA (1)...(19): siRNA sense strand
ccaugaaacaguaggaaag

SEQ ID NO: 2394712 - RNA, 19 nt, Homo sapiens
  misc_RNA (1)...(19): siRNA sense strand
gaguguagcaagagguguu

SEQ ID NO: 2394713 - RNA, 19 nt, Homo sapiens
  misc_RNA (1)...(19): siRNA sense strand
caucauagcuugcagccuu

SEQ ID NO: 2394714 - RNA, 19 nt, Homo sapiens
  misc_RNA (1)...(19): siRNA sense strand
aaucaaaagccguuaacaa

SEQ ID NO: 2394715 - RNA, 19 nt, Homo sapiens
  misc_RNA (1)...(19): siRNA sense strand
aagaagaugaagacaguga

SEQ ID NO: 2394716 - RNA, 19 nt, Homo sapiens
  misc_RNA (1)...(19): siRNA sense strand
ucaaauucacaaaggucaa

SEQ ID NO: 2394717 - RNA, 19 nt, Homo sapiens
  misc_RNA (1)...(19): siRNA sense strand
cgaugaaacaccagaugga

SEQ ID NO: 2394718 - RNA, 19 nt, Homo sapiens
  misc_RNA (1)...(19): siRNA sense strand
ugaagaaugcugugaaaau

SEQ ID NO: 2394719 - RNA, 19 nt, Homo sapiens
  misc_RNA (1)...(19): siRNA sense strand
agaaagccaaagucagaaa

SEQ ID NO: 2394720 - RNA, 19 nt, Homo sapiens
  misc_RNA (1)...(19): siRNA sense strand
aagccuaaugagucggaaa

SEQ ID NO: 2394721 - RNA, 19 nt, Homo sapiens
  misc_RNA (1)...(19): siRNA sense strand
gagaugugcauaagggcau

SEQ ID NO: 2394722 - RNA, 19 nt, Homo sapiens
  misc_RNA (1)...(19): siRNA sense strand
acaagaggcaauugcagaa

SEQ ID NO: 2394723 - RNA, 19 nt, Homo sapiens
  misc_RNA (1)...(19): siRNA sense strand
cagaaguggcugcugaauu

SEQ ID NO: 2394724 - RNA, 19 nt, Homo sapiens
  misc_RNA (1)...(19): siRNA sense strand
cuaagaagaaugagagccu

SEQ ID NO: 2394725 - RNA, 19 nt, Homo sapiens
  misc_RNA (1)...(19): siRNA sense strand
caucagucuucgaacucaa

SEQ ID NO: 2394726 - RNA, 19 nt, Homo sapiens
  misc_RNA (1)...(19): siRNA sense strand
uggcagagcacgaugacca

SEQ ID NO: 2394727 - RNA, 19 nt, Homo sapiens
  misc_RNA (1)...(19): siRNA sense strand
auuaaugaguccagaaaug

SEQ ID NO: 2394728 - RNA, 19 nt, Homo sapiens
  misc_RNA (1)...(19): siRNA sense strand
aggaaaguuuauccaguau

SEQ ID NO: 2394729 - RNA, 19 nt, Homo sapiens
  misc_RNA (1)...(19): siRNA sense strand
acgaugaccaggaagauau

SEQ ID NO: 2394730 - RNA, 19 nt, Homo sapiens
  misc_RNA (1)...(19): siRNA sense strand
gaguguggcuuuagaccca

SEQ ID NO: 2394731 - RNA, 19 nt, Homo sapiens
  misc_RNA (1)...(19): siRNA sense strand
aaaccuaagaagaaugaga

SEQ ID NO: 2394732 - RNA, 19 nt, Homo sapiens
  misc_RNA (1)...(19): siRNA sense strand
ccuguggaguguagcaaga

SEQ ID NO: 2394733 - RNA, 19 nt, Homo sapiens
  misc_RNA (1)...(19): siRNA sense strand
caaaucuggcugagcauau

SEQ ID NO: 2394734 - RNA, 19 nt, Homo sapiens
  misc_RNA (1)...(19): siRNA sense strand
ugggcauauaguugaauua

SEQ ID NO: 2394735 - RNA, 19 nt, Homo sapiens
  misc_RNA (1)...(19): siRNA sense strand
cgucuuuggguuugcggaa

SEQ ID NO: 2394736 - RNA, 19 nt, Homo sapiens
  misc_RNA (1)...(19): siRNA sense strand
cugaacagcaguagaguac

SEQ ID NO: 2394737 - RNA, 19 nt, Homo sapiens
  misc_RNA (1)...(19): siRNA sense strand
cugggugggugcugcuaaa

SEQ ID NO: 2394738 - RNA, 19 nt, Homo sapiens
  misc_RNA (1)...(19): siRNA sense strand
aaccagaacagaaagaaau

SEQ ID NO: 2394739 - RNA, 19 nt, Homo sapiens
  misc_RNA (1)...(19): siRNA sense strand
guuuaaggauauugggguu

SEQ ID NO: 2394740 - RNA, 19 nt, Homo sapiens
  misc_RNA (1)...(19): siRNA sense strand
uguaguaaugcaugccaua

SEQ ID NO: 2394741 - RNA, 19 nt, Homo sapiens
  misc_RNA (1)...(19): siRNA sense strand
aggaacagcgagauugcua

SEQ ID NO: 2394742 - RNA, 19 nt, Homo sapiens
  misc_RNA (1)...(19): siRNA sense strand
ccaccaaugugacugaaaa

SEQ ID NO: 2394743 - RNA, 19 nt, Homo sapiens
  misc_RNA (1)...(19): siRNA sense strand
cggaaagauguucucuaua

SEQ ID NO: 2394744 - RNA, 19 nt, Homo sapiens
  misc_RNA (1)...(19): siRNA sense strand
aaauggaaagaaagccuaa

SEQ ID NO: 2394745 - RNA, 19 nt, Homo sapiens
  misc_RNA (1)...(19): siRNA sense strand
acgaaggcucgaugaaaca

SEQ ID NO: 2394746 - RNA, 19 nt, Homo sapiens
  misc_RNA (1)...(19): siRNA sense strand
ggaauauuuagaaagccaa

SEQ ID NO: 2394747 - RNA, 19 nt, Homo sapiens
  misc_RNA (1)...(19): siRNA sense strand
aacaccagauggacggaaa

SEQ ID NO: 2394748 - RNA, 19 nt, Homo sapiens
  misc_RNA (1)...(19): siRNA sense strand
caggaaauucagaagaugu

SEQ ID NO: 2394749 - RNA, 19 nt, Homo sapiens
  misc_RNA (1)...(19): siRNA sense strand
gggaauugaucucuccaca

SEQ ID NO: 2394750 - RNA, 19 nt, Homo sapiens
  misc_RNA (1)...(19): siRNA sense strand
cagcagcaauucuuggaga

SEQ ID NO: 2394751 - RNA, 19 nt, Homo sapiens
  misc_RNA (1)...(19): siRNA sense strand
agaauacaguguuggucga

SEQ ID NO: 2394752 - RNA, 19 nt, Homo sapiens
  misc_RNA (1)...(19): siRNA sense strand
caguauaugcugagagugc

SEQ ID NO: 2394753 - RNA, 19 nt, Homo sapiens
  misc_RNA (1)...(19): siRNA sense strand
ccaugggcauauaguugaa

SEQ ID NO: 2394754 - RNA, 19 nt, Homo sapiens
  misc_RNA (1)...(19): siRNA sense strand
agcaauucuuggagaucuu

SEQ ID NO: 2394755 - RNA, 19 nt, Homo sapiens
  misc_RNA (1)...(19): siRNA sense strand
auggugaacaacugggcaa

SEQ ID NO: 2394756 - RNA, 19 nt, Homo sapiens
  misc_RNA (1)...(19): siRNA sense strand
ccagaaaagaggagaauga

SEQ ID NO: 2394757 - RNA, 19 nt, Homo sapiens
  misc_RNA (1)...(19): siRNA sense strand
ggaggaacuaugaggugaa

SEQ ID NO: 2394758 - RNA, 19 nt, Homo sapiens
  misc_RNA (1)...(19): siRNA sense strand
agaccagcuuugugggcua

SEQ ID NO: 2394759 - RNA, 19 nt, Homo sapiens
  misc_RNA (1)...(19): siRNA sense strand
aagaagaagcugcaggaau

SEQ ID NO: 2394760 - RNA, 19 nt, Homo sapiens
  misc_RNA (1)...(19): siRNA sense strand
ugaguaucuucaugggaaa

SEQ ID NO: 2394761 - RNA, 19 nt, Homo sapiens
  misc_RNA (1)...(19): siRNA sense strand
ucacguuaguggaggcaau

SEQ ID NO: 2394762 - RNA, 19 nt, Homo sapiens
  misc_RNA (1)...(19): siRNA sense strand
gcaaagaggugcugacccu

SEQ ID NO: 2394763 - RNA, 19 nt, Homo sapiens
  misc_RNA (1)...(19): siRNA sense strand
gcaugguaccugaggacau

SEQ ID NO: 2394764 - RNA, 19 nt, Homo sapiens
  misc_RNA (1)...(19): siRNA sense strand
agaagaauuccaaggccaa

SEQ ID NO: 2394765 - RNA, 19 nt, Homo sapiens
  misc_RNA (1)...(19): siRNA sense strand
uaaagaaaacggaggguau

SEQ ID NO: 2394766 - RNA, 19 nt, Homo sapiens
  misc_RNA (1)...(19): siRNA sense strand
aagaugagcgugaaggcaa

SEQ ID NO: 2394767 - RNA, 19 nt, Homo sapiens
  misc_RNA (1)...(19): siRNA sense strand
gcguaaugggcaaagauga

SEQ ID NO: 2394768 - RNA, 19 nt, Homo sapiens
  misc_RNA (1)...(19): siRNA sense strand
gcccugaaguggaggaacu

SEQ ID NO: 2394769 - RNA, 19 nt, Homo sapiens
  misc_RNA (1)...(19): siRNA sense strand
ccggaaacagguggagaaa

SEQ ID NO: 2394770 - RNA, 19 nt, Homo sapiens
  misc_RNA (1)...(19): siRNA sense strand
cguuaguggaggcaauuaa

SEQ ID NO: 2394771 - RNA, 19 nt, Homo sapiens
  misc_RNA (1)...(19): siRNA sense strand
ucaccaaacuugacaggga

SEQ ID NO: 2394772 - RNA, 19 nt, Homo sapiens
  misc_RNA (1)...(19): siRNA sense strand
cugaguaucuucaugggaa

SEQ ID NO: 2394773 - RNA, 19 nt, Homo sapiens
  misc_RNA (1)...(19): siRNA sense strand
ugggaaacaugguguggau

SEQ ID NO: 2394774 - RNA, 19 nt, Homo sapiens
  misc_RNA (1)...(19): siRNA sense strand
gaccaaucggauagaggaa

SEQ ID NO: 2394775 - RNA, 19 nt, Homo sapiens
  misc_RNA (1)...(19): siRNA sense strand
augugaaacucaagcugua

SEQ ID NO: 2394776 - RNA, 19 nt, Homo sapiens
  misc_RNA (1)...(19): siRNA sense strand
ucgcagagaucaaggccca

SEQ ID NO: 2394777 - RNA, 19 nt, Homo sapiens
  misc_RNA (1)...(19): siRNA sense strand
ugauggaaguaaaggaaac

SEQ ID NO: 2394778 - RNA, 19 nt, Homo sapiens
  misc_RNA (1)...(19): siRNA sense strand
uagaagaauuccaaggcca

SEQ ID NO: 2394779 - RNA, 19 nt, Homo sapiens
  misc_RNA (1)...(19): siRNA sense strand
acaaugaagaccaggaguu

SEQ ID NO: 2394780 - RNA, 19 nt, Homo sapiens
  misc_RNA (1)...(19): siRNA sense strand
uaaccaagcugcuccgcaa

SEQ ID NO: 2394781 - RNA, 19 nt, Homo sapiens
  misc_RNA (1)...(19): siRNA sense strand
uggaaugaagauugcaaau

SEQ ID NO: 2394782 - RNA, 19 nt, Homo sapiens
  misc_RNA (1)...(19): siRNA sense strand
ggaaacaggugauccagga

SEQ ID NO: 2394783 - RNA, 19 nt, Homo sapiens
  misc_RNA (1)...(19): siRNA sense strand
ggccaagaacgaagcguca

SEQ ID NO: 2394784 - RNA, 19 nt, Homo sapiens
  misc_RNA (1)...(19): siRNA sense strand
agaagcauggacugggaua

SEQ ID NO: 2394785 - RNA, 19 nt, Homo sapiens
  misc_RNA (1)...(19): siRNA sense strand
aaguaaaggaaacagguga

SEQ ID NO: 2394786 - RNA, 19 nt, Homo sapiens
  misc_RNA (1)...(19): siRNA sense strand
ugggcaaagaugagcguga

SEQ ID NO: 2394787 - RNA, 19 nt, Homo sapiens
  misc_RNA (1)...(19): siRNA sense strand
uggugaagcacuugcccaa

SEQ ID NO: 2394788 - RNA, 19 nt, Homo sapiens
  misc_RNA (1)...(19): siRNA sense strand
aguaaaggaaacaggugau

SEQ ID NO: 2394789 - RNA, 19 nt, Homo sapiens
  misc_RNA (1)...(19): siRNA sense strand
cugauggaaguaaaggaaa

SEQ ID NO: 2394790 - RNA, 19 nt, Homo sapiens
  misc_RNA (1)...(19): siRNA sense strand
cugcagauggagcaugaua

SEQ ID NO: 2394791 - RNA, 19 nt, Homo sapiens
  misc_RNA (1)...(19): siRNA sense strand
cugcaggccaugaggcaca

SEQ ID NO: 2394792 - RNA, 19 nt, Homo sapiens
  misc_RNA (1)...(19): siRNA sense strand
ccaagaagaagcugcagga

SEQ ID NO: 2394793 - RNA, 19 nt, Homo sapiens
  misc_RNA (1)...(19): siRNA sense strand
cugcacagcugaagcccau

SEQ ID NO: 2394794 - RNA, 19 nt, Homo sapiens
  misc_RNA (1)...(19): siRNA sense strand
gcuaugaacuccaugucca

SEQ ID NO: 2394795 - RNA, 19 nt, Homo sapiens
  misc_RNA (1)...(19): siRNA sense strand
cagagcagcugcaggccau

SEQ ID NO: 2394796 - RNA, 19 nt, Homo sapiens
  misc_RNA (1)...(19): siRNA sense strand
gcaauuaagcaggugguga

SEQ ID NO: 2394797 - RNA, 19 nt, Homo sapiens
  misc_RNA (1)...(19): siRNA sense strand
agaagggcccugauggcua

SEQ ID NO: 2394798 - RNA, 19 nt, Homo sapiens
  misc_RNA (1)...(19): siRNA sense strand
gguggguucaguagaagaa

SEQ ID NO: 2394799 - RNA, 19 nt, Homo sapiens
  misc_RNA (1)...(19): siRNA sense strand
auuccaaggccaagaacga

SEQ ID NO: 2394800 - RNA, 19 nt, Homo sapiens
  misc_RNA (1)...(19): siRNA sense strand
ccaaacuggaccugcaaca

SEQ ID NO: 2394801 - RNA, 19 nt, Homo sapiens
  misc_RNA (1)...(19): siRNA sense strand
ggaacuaugaggugaagcu

SEQ ID NO: 2394802 - RNA, 19 nt, Homo sapiens
  misc_RNA (1)...(19): siRNA sense strand
agucaaacccagagcagcu

SEQ ID NO: 2394803 - RNA, 19 nt, Homo sapiens
  misc_RNA (1)...(19): siRNA sense strand
gcugcaacugggacgcaaa

SEQ ID NO: 2394804 - RNA, 19 nt, Homo sapiens
  misc_RNA (1)...(19): siRNA sense strand
aggaauaccgggucuuaau

SEQ ID NO: 2394805 - RNA, 19 nt, Homo sapiens
  misc_RNA (1)...(19): siRNA sense strand
accggaaacagguggagaa

SEQ ID NO: 2394806 - RNA, 19 nt, Homo sapiens
  misc_RNA (1)...(19): siRNA sense strand
cgaccggagucuggaguca

SEQ ID NO: 2394807 - RNA, 19 nt, Homo sapiens
  misc_RNA (1)...(19): siRNA sense strand
cagggcugauggaaguaaa

SEQ ID NO: 2394808 - RNA, 19 nt, Homo sapiens
  misc_RNA (1)...(19): siRNA sense strand
agaauuuacugcaaggucu

SEQ ID NO: 2394809 - RNA, 19 nt, Homo sapiens
  misc_RNA (1)...(19): siRNA sense strand
auguaaagaauguggcaaa

SEQ ID NO: 2394810 - RNA, 19 nt, Homo sapiens
  misc_RNA (1)...(19): siRNA sense strand
aauucauaccggagagaaa

SEQ ID NO: 2394811 - RNA, 19 nt, Homo sapiens
  misc_RNA (1)...(19): siRNA sense strand
gagaaauguguuagagcuu

SEQ ID NO: 2394812 - RNA, 19 nt, Homo sapiens
  misc_RNA (1)...(19): siRNA sense strand
auguaaagaaugucgcaaa

SEQ ID NO: 2394813 - RNA, 19 nt, Homo sapiens
  misc_RNA (1)...(19): siRNA sense strand
augugaagaauguggcaaa

SEQ ID NO: 2394814 - RNA, 19 nt, Homo sapiens
  misc_RNA (1)...(19): siRNA sense strand
augugaagaauguggcaaa

SEQ ID NO: 2394815 - RNA, 19 nt, Homo sapiens
  misc_RNA (1)...(19): siRNA sense strand
augugaagaauguggcaaa

SEQ ID NO: 2394816 - RNA, 19 nt, Homo sapiens
  misc_RNA (1)...(19): siRNA sense strand
guaaacagcacaaaggaga

SEQ ID NO: 2394817 - RNA, 19 nt, Homo sapiens
  misc_RNA (1)...(19): siRNA sense strand
aauccauacuagagugaau

SEQ ID NO: 2394818 - RNA, 19 nt, Homo sapiens
  misc_RNA (1)...(19): siRNA sense strand
uguaaagaaugucgcaaaa

SEQ ID NO: 2394819 - RNA, 19 nt, Homo sapiens
  misc_RNA (1)...(19): siRNA sense strand
cccuaagaagauauagaaa

SEQ ID NO: 2394820 - RNA, 19 nt, Homo sapiens
  misc_RNA (1)...(19): siRNA sense strand
acguuaugaaugugaagaa

SEQ ID NO: 2394821 - RNA, 19 nt, Homo sapiens
  misc_RNA (1)...(19): siRNA sense strand
ucuacaaaugugaagcaua

SEQ ID NO: 2394822 - RNA, 19 nt, Homo sapiens
  misc_RNA (1)...(19): siRNA sense strand
augugaagaaugcggcaaa

SEQ ID NO: 2394823 - RNA, 19 nt, Homo sapiens
  misc_RNA (1)...(19): siRNA sense strand
cauucauacuggagagaag

SEQ ID NO: 2394824 - RNA, 19 nt, Homo sapiens
  misc_RNA (1)...(19): siRNA sense strand
uggccagagcagaacauaa

SEQ ID NO: 2394825 - RNA, 19 nt, Homo sapiens
  misc_RNA (1)...(19): siRNA sense strand
augugaagcauauggaaga

SEQ ID NO: 2394826 - RNA, 19 nt, Homo sapiens
  misc_RNA (1)...(19): siRNA sense strand
cggcaaagcuuuuaaccga

SEQ ID NO: 2394827 - RNA, 19 nt, Homo sapiens
  misc_RNA (1)...(19): siRNA sense strand
aggagauuauaguggacuu

SEQ ID NO: 2394828 - RNA, 19 nt, Homo sapiens
  misc_RNA (1)...(19): siRNA sense strand
cguuaugaaugugaagaau

SEQ ID NO: 2394829 - RNA, 19 nt, Homo sapiens
  misc_RNA (1)...(19): siRNA sense strand
cuggagagaagcuguacaa

SEQ ID NO: 2394830 - RNA, 19 nt, Homo sapiens
  misc_RNA (1)...(19): siRNA sense strand
cuggagagaaacuguacaa

SEQ ID NO: 2394831 - RNA, 19 nt, Homo sapiens
  misc_RNA (1)...(19): siRNA sense strand
acaugagaugguagcuaaa

SEQ ID NO: 2394832 - RNA, 19 nt, Homo sapiens
  misc_RNA (1)...(19): siRNA sense strand
ccucaaaccuuacugcaca

SEQ ID NO: 2394833 - RNA, 19 nt, Homo sapiens
  misc_RNA (1)...(19): siRNA sense strand
ccuacaaaugugagaaaug

SEQ ID NO: 2394834 - RNA, 19 nt, Homo sapiens
  misc_RNA (1)...(19): siRNA sense strand
cggagagaaacguuaugaa

SEQ ID NO: 2394835 - RNA, 19 nt, Homo sapiens
  misc_RNA (1)...(19): siRNA sense strand
gcuguacaaaugugaagaa

SEQ ID NO: 2394836 - RNA, 19 nt, Homo sapiens
  misc_RNA (1)...(19): siRNA sense strand
aagaaaaggcuguaaaagu

SEQ ID NO: 2394837 - RNA, 19 nt, Homo sapiens
  misc_RNA (1)...(19): siRNA sense strand
guuaagaaaaggcuguaaa

SEQ ID NO: 2394838 - RNA, 19 nt, Homo sapiens
  misc_RNA (1)...(19): siRNA sense strand
aagaauguggcaaagcuaa

SEQ ID NO: 2394839 - RNA, 19 nt, Homo sapiens
  misc_RNA (1)...(19): siRNA sense strand
gccuuuaacugguccucaa

SEQ ID NO: 2394840 - RNA, 19 nt, Homo sapiens
  misc_RNA (1)...(19): siRNA sense strand
acucuacaaaugugaagaa

SEQ ID NO: 2394841 - RNA, 19 nt, Homo sapiens
  misc_RNA (1)...(19): siRNA sense strand
caaaggagauuauagugga

SEQ ID NO: 2394842 - RNA, 19 nt, Homo sapiens
  misc_RNA (1)...(19): siRNA sense strand
agacaugagaugguagcua

SEQ ID NO: 2394843 - RNA, 19 nt, Homo sapiens
  misc_RNA (1)...(19): siRNA sense strand
ggauaugagaauuuacagu

SEQ ID NO: 2394844 - RNA, 19 nt, Homo sapiens
  misc_RNA (1)...(19): siRNA sense strand
agggagaggcugaggaacu

SEQ ID NO: 2394845 - RNA, 19 nt, Homo sapiens
  misc_RNA (1)...(19): siRNA sense strand
gcuuuaagggagaggucuu

SEQ ID NO: 2394846 - RNA, 19 nt, Homo sapiens
  misc_RNA (1)...(19): siRNA sense strand
gcgccaagaugucggacca

SEQ ID NO: 2394847 - RNA, 19 nt, Homo sapiens
  misc_RNA (1)...(19): siRNA sense strand
ccgcggaagaggcugguau

SEQ ID NO: 2394848 - RNA, 19 nt, Homo sapiens
  misc_RNA (1)...(19): siRNA sense strand
gcgaccacugcaagggcaa

SEQ ID NO: 2394849 - RNA, 19 nt, Homo sapiens
  misc_RNA (1)...(19): siRNA sense strand
ccaucgaccuggaccggaa

SEQ ID NO: 2394850 - RNA, 19 nt, Homo sapiens
  misc_RNA (1)...(19): siRNA sense strand
cuggaguggcugagggacu

SEQ ID NO: 2394851 - RNA, 19 nt, Homo sapiens
  misc_RNA (1)...(19): siRNA sense strand
ugaaggagaagcagcgcaa

SEQ ID NO: 2394852 - RNA, 19 nt, Homo sapiens
  misc_RNA (1)...(19): siRNA sense strand
guuucaaguaccuggagua

SEQ ID NO: 2394853 - RNA, 19 nt, Homo sapiens
  misc_RNA (1)...(19): siRNA sense strand
gcgaggaacagcagaggca

SEQ ID NO: 2394854 - RNA, 19 nt, Homo sapiens
  misc_RNA (1)...(19): siRNA sense strand
gagcgcgaguugaaggaga

SEQ ID NO: 2394855 - RNA, 19 nt, Homo sapiens
  misc_RNA (1)...(19): siRNA sense strand
gcgaguugaaggagaagca

SEQ ID NO: 2394856 - RNA, 19 nt, Homo sapiens
  misc_RNA (1)...(19): siRNA sense strand
gcugaagcugggcgaggaa

SEQ ID NO: 2394857 - RNA, 19 nt, Homo sapiens
  misc_RNA (1)...(19): siRNA sense strand
ccagccugcgcaagagaaa

SEQ ID NO: 2394858 - RNA, 19 nt, Homo sapiens
  misc_RNA (1)...(19): siRNA sense strand
aggcagcaguggauggcga

SEQ ID NO: 2394859 - RNA, 19 nt, Homo sapiens
  misc_RNA (1)...(19): siRNA sense strand
cgcaacagcaacagcaaca

SEQ ID NO: 2394860 - RNA, 19 nt, Homo sapiens
  misc_RNA (1)...(19): siRNA sense strand
agguaaacuuugaggauga

SEQ ID NO: 2394861 - RNA, 19 nt, Homo sapiens
  misc_RNA (1)...(19): siRNA sense strand
ggccauagcagguggacaa

SEQ ID NO: 2394862 - RNA, 19 nt, Homo sapiens
  misc_RNA (1)...(19): siRNA sense strand
ggaugauucucguggaaaa

SEQ ID NO: 2394863 - RNA, 19 nt, Homo sapiens
  misc_RNA (1)...(19): siRNA sense strand
cuauauuugugcagggaau

SEQ ID NO: 2394864 - RNA, 19 nt, Homo sapiens
  misc_RNA (1)...(19): siRNA sense strand
cugcaguggugaugaagaa

SEQ ID NO: 2394865 - RNA, 19 nt, Homo sapiens
  misc_RNA (1)...(19): siRNA sense strand
gcaaaaucccaaagcaaaa

SEQ ID NO: 2394866 - RNA, 19 nt, Homo sapiens
  misc_RNA (1)...(19): siRNA sense strand
augcaaagccggaugaauu

SEQ ID NO: 2394867 - RNA, 19 nt, Homo sapiens
  misc_RNA (1)...(19): siRNA sense strand
aagaagaagaugccugaaa

SEQ ID NO: 2394868 - RNA, 19 nt, Homo sapiens
  misc_RNA (1)...(19): siRNA sense strand
caguauugacuuaugcaaa

SEQ ID NO: 2394869 - RNA, 19 nt, Homo sapiens
  misc_RNA (1)...(19): siRNA sense strand
cuguaugggaucuuagaaa

SEQ ID NO: 2394870 - RNA, 19 nt, Homo sapiens
  misc_RNA (1)...(19): siRNA sense strand
ugcagggaauguagagaaa

SEQ ID NO: 2394871 - RNA, 19 nt, Homo sapiens
  misc_RNA (1)...(19): siRNA sense strand
cuucaaacgcuuacccuaa

SEQ ID NO: 2394872 - RNA, 19 nt, Homo sapiens
  misc_RNA (1)...(19): siRNA sense strand
ggaaagagauuguugaguc

SEQ ID NO: 2394873 - RNA, 19 nt, Homo sapiens
  misc_RNA (1)...(19): siRNA sense strand
acagcaaccucuuggucaa

SEQ ID NO: 2394874 - RNA, 19 nt, Homo sapiens
  misc_RNA (1)...(19): siRNA sense strand
gauaugaaaucuugugcca

SEQ ID NO: 2394875 - RNA, 19 nt, Homo sapiens
  misc_RNA (1)...(19): siRNA sense strand
cguuugagaaugucagaau

SEQ ID NO: 2394876 - RNA, 19 nt, Homo sapiens
  misc_RNA (1)...(19): siRNA sense strand
guuacugagcuguggaaaa

SEQ ID NO: 2394877 - RNA, 19 nt, Homo sapiens
  misc_RNA (1)...(19): siRNA sense strand
gugcagggaauguagagaa

SEQ ID NO: 2394878 - RNA, 19 nt, Homo sapiens
  misc_RNA (1)...(19): siRNA sense strand
caauaagcugggugucuaa

SEQ ID NO: 2394879 - RNA, 19 nt, Homo sapiens
  misc_RNA (1)...(19): siRNA sense strand
aggaagcacagaugguuua

SEQ ID NO: 2394880 - RNA, 19 nt, Homo sapiens
  misc_RNA (1)...(19): siRNA sense strand
gacagaaacaaguugacaa

SEQ ID NO: 2394881 - RNA, 19 nt, Homo sapiens
  misc_RNA (1)...(19): siRNA sense strand
gauugcagguggugaaaau

SEQ ID NO: 2394882 - RNA, 19 nt, Homo sapiens
  misc_RNA (1)...(19): siRNA sense strand
gcuugaaaaugaaggagau

SEQ ID NO: 2394883 - RNA, 19 nt, Homo sapiens
  misc_RNA (1)...(19): siRNA sense strand
ccagaugccaagaguucaa

SEQ ID NO: 2394884 - RNA, 19 nt, Homo sapiens
  misc_RNA (1)...(19): siRNA sense strand
gaggaagcacagaugguuu

SEQ ID NO: 2394885 - RNA, 19 nt, Homo sapiens
  misc_RNA (1)...(19): siRNA sense strand
accuugaacuucuaggaua

SEQ ID NO: 2394886 - RNA, 19 nt, Homo sapiens
  misc_RNA (1)...(19): siRNA sense strand
ucgcaaaaucccaaagcaa

SEQ ID NO: 2394887 - RNA, 19 nt, Homo sapiens
  misc_RNA (1)...(19): siRNA sense strand
ugacagacuuuguagagca

SEQ ID NO: 2394888 - RNA, 19 nt, Homo sapiens
  misc_RNA (1)...(19): siRNA sense strand
ccuugaacuucuaggauac

SEQ ID NO: 2394889 - RNA, 19 nt, Homo sapiens
  misc_RNA (1)...(19): siRNA sense strand
gcccagaaugacaagcaua

SEQ ID NO: 2394890 - RNA, 19 nt, Homo sapiens
  misc_RNA (1)...(19): siRNA sense strand
cacuaguacuguaggaguu

SEQ ID NO: 2394891 - RNA, 19 nt, Homo sapiens
  misc_RNA (1)...(19): siRNA sense strand
gagagaggcuuuagcugca

SEQ ID NO: 2394892 - RNA, 19 nt, Homo sapiens
  misc_RNA (1)...(19): siRNA sense strand
gugcagucuuugccaacaa

SEQ ID NO: 2394893 - RNA, 19 nt, Homo sapiens
  misc_RNA (1)...(19): siRNA sense strand
uuaccuagcaacaggaaca

SEQ ID NO: 2394894 - RNA, 19 nt, Homo sapiens
  misc_RNA (1)...(19): siRNA sense strand
ggaguuucuguaugauaaa

SEQ ID NO: 2394895 - RNA, 19 nt, Homo sapiens
  misc_RNA (1)...(19): siRNA sense strand
guaugauaaacuuagggaa

SEQ ID NO: 2394896 - RNA, 19 nt, Homo sapiens
  misc_RNA (1)...(19): siRNA sense strand
ggugaugaagaacuggaaa

SEQ ID NO: 2394897 - RNA, 19 nt, Homo sapiens
  misc_RNA (1)...(19): siRNA sense strand
acucagaaggauugaccau

SEQ ID NO: 2394898 - RNA, 19 nt, Homo sapiens
  misc_RNA (1)...(19): siRNA sense strand
ucugauugcagguggugaa

SEQ ID NO: 2394899 - RNA, 19 nt, Homo sapiens
  misc_RNA (1)...(19): siRNA sense strand
ccauaguaacagaaugcau

SEQ ID NO: 2394900 - RNA, 19 nt, Homo sapiens
  misc_RNA (1)...(19): siRNA sense strand
agaugguuuaagacagaaa

SEQ ID NO: 2394901 - RNA, 19 nt, Homo sapiens
  misc_RNA (1)...(19): siRNA sense strand
agucagguuguaacagaaa

SEQ ID NO: 2394902 - RNA, 19 nt, Homo sapiens
  misc_RNA (1)...(19): siRNA sense strand
cgcaaaaucccaaagcaaa

SEQ ID NO: 2394903 - RNA, 19 nt, Homo sapiens
  misc_RNA (1)...(19): siRNA sense strand
aaguugucauccugcgaaa

SEQ ID NO: 2394904 - RNA, 19 nt, Homo sapiens
  misc_RNA (1)...(19): siRNA sense strand
uaugauaaacuuagggaac

SEQ ID NO: 2394905 - RNA, 19 nt, Homo sapiens
  misc_RNA (1)...(19): siRNA sense strand
guuuaauuacucaggcuuu

SEQ ID NO: 2394906 - RNA, 19 nt, Homo sapiens
  misc_RNA (1)...(19): siRNA sense strand
cuuccauggcguacagcaa

SEQ ID NO: 2394907 - RNA, 19 nt, Homo sapiens
  misc_RNA (1)...(19): siRNA sense strand
augauaaacuuagggaaca

SEQ ID NO: 2394908 - RNA, 19 nt, Homo sapiens
  misc_RNA (1)...(19): siRNA sense strand
agaaacaaguugacaagcu

SEQ ID NO: 2394909 - RNA, 19 nt, Homo sapiens
  misc_RNA (1)...(19): siRNA sense strand
aaaagaagaucuaggaaag

SEQ ID NO: 2394910 - RNA, 19 nt, Homo sapiens
  misc_RNA (1)...(19): siRNA sense strand
ccucagaaugguuggaaug

SEQ ID NO: 2394911 - RNA, 19 nt, Homo sapiens
  misc_RNA (1)...(19): siRNA sense strand
aaugacaccaggagccaaa

SEQ ID NO: 2394912 - RNA, 19 nt, Homo sapiens
  misc_RNA (1)...(19): siRNA sense strand
ccaagaaaccuauuccaga

SEQ ID NO: 2394913 - RNA, 19 nt, Homo sapiens
  misc_RNA (1)...(19): siRNA sense strand
uggaaaauaccuugaacuu

SEQ ID NO: 2394914 - RNA, 19 nt, Homo sapiens
  misc_RNA (1)...(19): siRNA sense strand
agguaaacuuugaggauga

SEQ ID NO: 2394915 - RNA, 19 nt, Homo sapiens
  misc_RNA (1)...(19): siRNA sense strand
ggccauagcagguggacaa

SEQ ID NO: 2394916 - RNA, 19 nt, Homo sapiens
  misc_RNA (1)...(19): siRNA sense strand
ggaugauucucguggaaaa

SEQ ID NO: 2394917 - RNA, 19 nt, Homo sapiens
  misc_RNA (1)...(19): siRNA sense strand
cuauauuugugcagggaau

SEQ ID NO: 2394918 - RNA, 19 nt, Homo sapiens
  misc_RNA (1)...(19): siRNA sense strand
cugcaguggugaugaagaa

SEQ ID NO: 2394919 - RNA, 19 nt, Homo sapiens
  misc_RNA (1)...(19): siRNA sense strand
gcaaaaucccaaagcaaaa

SEQ ID NO: 2394920 - RNA, 19 nt, Homo sapiens
  misc_RNA (1)...(19): siRNA sense strand
augcaaagccggaugaauu

SEQ ID NO: 2394921 - RNA, 19 nt, Homo sapiens
  misc_RNA (1)...(19): siRNA sense strand
aagaagaagaugccugaaa

SEQ ID NO: 2394922 - RNA, 19 nt, Homo sapiens
  misc_RNA (1)...(19): siRNA sense strand
caguauugacuuaugcaaa

SEQ ID NO: 2394923 - RNA, 19 nt, Homo sapiens
  misc_RNA (1)...(19): siRNA sense strand
cuguaugggaucuuagaaa

SEQ ID NO: 2394924 - RNA, 19 nt, Homo sapiens
  misc_RNA (1)...(19): siRNA sense strand
ugcagggaauguagagaaa

SEQ ID NO: 2394925 - RNA, 19 nt, Homo sapiens
  misc_RNA (1)...(19): siRNA sense strand
cuucaaacgcuuacccuaa

SEQ ID NO: 2394926 - RNA, 19 nt, Homo sapiens
  misc_RNA (1)...(19): siRNA sense strand
ggaaagagauuguugaguc

SEQ ID NO: 2394927 - RNA, 19 nt, Homo sapiens
  misc_RNA (1)...(19): siRNA sense strand
acagcaaccucuuggucaa

SEQ ID NO: 2394928 - RNA, 19 nt, Homo sapiens
  misc_RNA (1)...(19): siRNA sense strand
gauaugaaaucuugugcca

SEQ ID NO: 2394929 - RNA, 19 nt, Homo sapiens
  misc_RNA (1)...(19): siRNA sense strand
cguuugagaaugucagaau

SEQ ID NO: 2394930 - RNA, 19 nt, Homo sapiens
  misc_RNA (1)...(19): siRNA sense strand
guuacugagcuguggaaaa

SEQ ID NO: 2394931 - RNA, 19 nt, Homo sapiens
  misc_RNA (1)...(19): siRNA sense strand
gugcagggaauguagagaa

SEQ ID NO: 2394932 - RNA, 19 nt, Homo sapiens
  misc_RNA (1)...(19): siRNA sense strand
caauaagcugggugucuaa

SEQ ID NO: 2394933 - RNA, 19 nt, Homo sapiens
  misc_RNA (1)...(19): siRNA sense strand
aggaagcacagaugguuua

SEQ ID NO: 2394934 - RNA, 19 nt, Homo sapiens
  misc_RNA (1)...(19): siRNA sense strand
gacagaaacaaguugacaa

SEQ ID NO: 2394935 - RNA, 19 nt, Homo sapiens
  misc_RNA (1)...(19): siRNA sense strand
gauugcagguggugaaaau

SEQ ID NO: 2394936 - RNA, 19 nt, Homo sapiens
  misc_RNA (1)...(19): siRNA sense strand
gcuugaaaaugaaggagau

SEQ ID NO: 2394937 - RNA, 19 nt, Homo sapiens
  misc_RNA (1)...(19): siRNA sense strand
ccagaugccaagaguucaa

SEQ ID NO: 2394938 - RNA, 19 nt, Homo sapiens
  misc_RNA (1)...(19): siRNA sense strand
gaggaagcacagaugguuu

SEQ ID NO: 2394939 - RNA, 19 nt, Homo sapiens
  misc_RNA (1)...(19): siRNA sense strand
accuugaacuucuaggaua

SEQ ID NO: 2394940 - RNA, 19 nt, Homo sapiens
  misc_RNA (1)...(19): siRNA sense strand
ucgcaaaaucccaaagcaa

SEQ ID NO: 2394941 - RNA, 19 nt, Homo sapiens
  misc_RNA (1)...(19): siRNA sense strand
ugacagacuuuguagagca

SEQ ID NO: 2394942 - RNA, 19 nt, Homo sapiens
  misc_RNA (1)...(19): siRNA sense strand
ccuugaacuucuaggauac

SEQ ID NO: 2394943 - RNA, 19 nt, Homo sapiens
  misc_RNA (1)...(19): siRNA sense strand
gcccagaaugacaagcaua

SEQ ID NO: 2394944 - RNA, 19 nt, Homo sapiens
  misc_RNA (1)...(19): siRNA sense strand
cacuaguacuguaggaguu

SEQ ID NO: 2394945 - RNA, 19 nt, Homo sapiens
  misc_RNA (1)...(19): siRNA sense strand
gagagaggcuuuagcugca

SEQ ID NO: 2394946 - RNA, 19 nt, Homo sapiens
  misc_RNA (1)...(19): siRNA sense strand
gugcagucuuugccaacaa

SEQ ID NO: 2394947 - RNA, 19 nt, Homo sapiens
  misc_RNA (1)...(19): siRNA sense strand
uuaccuagcaacaggaaca

SEQ ID NO: 2394948 - RNA, 19 nt, Homo sapiens
  misc_RNA (1)...(19): siRNA sense strand
ggaguuucuguaugauaaa

SEQ ID NO: 2394949 - RNA, 19 nt, Homo sapiens
  misc_RNA (1)...(19): siRNA sense strand
guaugauaaacuuagggaa

SEQ ID NO: 2394950 - RNA, 19 nt, Homo sapiens
  misc_RNA (1)...(19): siRNA sense strand
ggugaugaagaacuggaaa

SEQ ID NO: 2394951 - RNA, 19 nt, Homo sapiens
  misc_RNA (1)...(19): siRNA sense strand
acucagaaggauugaccau

SEQ ID NO: 2394952 - RNA, 19 nt, Homo sapiens
  misc_RNA (1)...(19): siRNA sense strand
ucugauugcagguggugaa

SEQ ID NO: 2394953 - RNA, 19 nt, Homo sapiens
  misc_RNA (1)...(19): siRNA sense strand
ccauaguaacagaaugcau

SEQ ID NO: 2394954 - RNA, 19 nt, Homo sapiens
  misc_RNA (1)...(19): siRNA sense strand
agaugguuuaagacagaaa

SEQ ID NO: 2394955 - RNA, 19 nt, Homo sapiens
  misc_RNA (1)...(19): siRNA sense strand
agucagguuguaacagaaa

SEQ ID NO: 2394956 - RNA, 19 nt, Homo sapiens
  misc_RNA (1)...(19): siRNA sense strand
cgcaaaaucccaaagcaaa

SEQ ID NO: 2394957 - RNA, 19 nt, Homo sapiens
  misc_RNA (1)...(19): siRNA sense strand
aaguugucauccugcgaaa

SEQ ID NO: 2394958 - RNA, 19 nt, Homo sapiens
  misc_RNA (1)...(19): siRNA sense strand
uaugauaaacuuagggaac

SEQ ID NO: 2394959 - RNA, 19 nt, Homo sapiens
  misc_RNA (1)...(19): siRNA sense strand
guuuaauuacucaggcuuu

SEQ ID NO: 2394960 - RNA, 19 nt, Homo sapiens
  misc_RNA (1)...(19): siRNA sense strand
cuuccauggcguacagcaa

SEQ ID NO: 2394961 - RNA, 19 nt, Homo sapiens
  misc_RNA (1)...(19): siRNA sense strand
augauaaacuuagggaaca

SEQ ID NO: 2394962 - RNA, 19 nt, Homo sapiens
  misc_RNA (1)...(19): siRNA sense strand
agaaacaaguugacaagcu

SEQ ID NO: 2394963 - RNA, 19 nt, Homo sapiens
  misc_RNA (1)...(19): siRNA sense strand
aaaagaagaucuaggaaag

SEQ ID NO: 2394964 - RNA, 19 nt, Homo sapiens
  misc_RNA (1)...(19): siRNA sense strand
ccucagaaugguuggaaug

SEQ ID NO: 2394965 - RNA, 19 nt, Homo sapiens
  misc_RNA (1)...(19): siRNA sense strand
aaugacaccaggagccaaa

SEQ ID NO: 2394966 - RNA, 19 nt, Homo sapiens
  misc_RNA (1)...(19): siRNA sense strand
ccaagaaaccuauuccaga

SEQ ID NO: 2394967 - RNA, 19 nt, Homo sapiens
  misc_RNA (1)...(19): siRNA sense strand
uggaaaauaccuugaacuu

SEQ ID NO: 2394968 - RNA, 19 nt, Homo sapiens
  misc_RNA (1)...(19): siRNA sense strand
guggaaacacagagagcaa

SEQ ID NO: 2394969 - RNA, 19 nt, Homo sapiens
  misc_RNA (1)...(19): siRNA sense strand
gagcaaaggccacggcaga

SEQ ID NO: 2394970 - RNA, 19 nt, Homo sapiens
  misc_RNA (1)...(19): siRNA sense strand
cgggagaagcaucggaaaa

SEQ ID NO: 2394971 - RNA, 19 nt, Homo sapiens
  misc_RNA (1)...(19): siRNA sense strand
aggaugacccuguggugaa

SEQ ID NO: 2394972 - RNA, 19 nt, Homo sapiens
  misc_RNA (1)...(19): siRNA sense strand
cguggaagccugugagaac

SEQ ID NO: 2394973 - RNA, 19 nt, Homo sapiens
  misc_RNA (1)...(19): siRNA sense strand
agaugagcuuccuggagaa

SEQ ID NO: 2394974 - RNA, 19 nt, Homo sapiens
  misc_RNA (1)...(19): siRNA sense strand
ggagauggcucgagaccuc

SEQ ID NO: 2394975 - RNA, 19 nt, Homo sapiens
  misc_RNA (1)...(19): siRNA sense strand
cggaagaagaagggcccaa

SEQ ID NO: 2394976 - RNA, 19 nt, Homo sapiens
  misc_RNA (1)...(19): siRNA sense strand
agagcaagacggauggaga

SEQ ID NO: 2394977 - RNA, 19 nt, Homo sapiens
  misc_RNA (1)...(19): siRNA sense strand
cagaugagcuuccuggaga

SEQ ID NO: 2394978 - RNA, 19 nt, Homo sapiens
  misc_RNA (1)...(19): siRNA sense strand
acgaugacgcggaagaaga

SEQ ID NO: 2394979 - RNA, 19 nt, Homo sapiens
  misc_RNA (1)...(19): siRNA sense strand
gggucagcguggaaacaca

SEQ ID NO: 2394980 - RNA, 19 nt, Homo sapiens
  misc_RNA (1)...(19): siRNA sense strand
uagaagauaucgaucgcau

SEQ ID NO: 2394981 - RNA, 19 nt, Homo sapiens
  misc_RNA (1)...(19): siRNA sense strand
cguauuuccugcugagcca

SEQ ID NO: 2394982 - RNA, 19 nt, Homo sapiens
  misc_RNA (1)...(19): siRNA sense strand
agucuauggagccgaacaa

SEQ ID NO: 2394983 - RNA, 19 nt, Homo sapiens
  misc_RNA (1)...(19): siRNA sense strand
acacagagagcaagacgga

SEQ ID NO: 2394984 - RNA, 19 nt, Homo sapiens
  misc_RNA (1)...(19): siRNA sense strand
gucucaugcaaguggcaaa

SEQ ID NO: 2394985 - RNA, 19 nt, Homo sapiens
  misc_RNA (1)...(19): siRNA sense strand
cggaaaacggacuagaaga

SEQ ID NO: 2394986 - RNA, 19 nt, Homo sapiens
  misc_RNA (1)...(19): siRNA sense strand
aagaagggcccaagcggga

SEQ ID NO: 2394987 - RNA, 19 nt, Homo sapiens
  misc_RNA (1)...(19): siRNA sense strand
gauuauacuacgagggcaa

SEQ ID NO: 2394988 - RNA, 19 nt, Homo sapiens
  misc_RNA (1)...(19): siRNA sense strand
gucaauaagcagagagauu

SEQ ID NO: 2394989 - RNA, 19 nt, Homo sapiens
  misc_RNA (1)...(19): siRNA sense strand
caaacaaggcaaugaacaa

SEQ ID NO: 2394990 - RNA, 19 nt, Homo sapiens
  misc_RNA (1)...(19): siRNA sense strand
ggauaagaaagcaggauau

SEQ ID NO: 2394991 - RNA, 19 nt, Homo sapiens
  misc_RNA (1)...(19): siRNA sense strand
ccauaacaccagagagauu

SEQ ID NO: 2394992 - RNA, 19 nt, Homo sapiens
  misc_RNA (1)...(19): siRNA sense strand
aggaagaaguauuugagaa

SEQ ID NO: 2394993 - RNA, 19 nt, Homo sapiens
  misc_RNA (1)...(19): siRNA sense strand
gggaaaaguauaugggaau

SEQ ID NO: 2394994 - RNA, 19 nt, Homo sapiens
  misc_RNA (1)...(19): siRNA sense strand
ugauaaagacagaccuaaa

SEQ ID NO: 2394995 - RNA, 19 nt, Homo sapiens
  misc_RNA (1)...(19): siRNA sense strand
ggauaucagagaagaagaa

SEQ ID NO: 2394996 - RNA, 19 nt, Homo sapiens
  misc_RNA (1)...(19): siRNA sense strand
aggaaucaaugcaaggaaa

SEQ ID NO: 2394997 - RNA, 19 nt, Homo sapiens
  misc_RNA (1)...(19): siRNA sense strand
ggggaaaaguauaugggaa

SEQ ID NO: 2394998 - RNA, 19 nt, Homo sapiens
  misc_RNA (1)...(19): siRNA sense strand
cccgaagguuugaaagaua

SEQ ID NO: 2394999 - RNA, 19 nt, Homo sapiens
  misc_RNA (1)...(19): siRNA sense strand
auauauaagcagagugaca

SEQ ID NO: 2395000 - RNA, 19 nt, Homo sapiens
  misc_RNA (1)...(19): siRNA sense strand
caaugaauaccuacggaaa

SEQ ID NO: 2395001 - RNA, 19 nt, Homo sapiens
  misc_RNA (1)...(19): siRNA sense strand
ugugaauggcuuaaagaua

SEQ ID NO: 2395002 - RNA, 19 nt, Homo sapiens
  misc_RNA (1)...(19): siRNA sense strand
gcagggaagaacagguuaa

SEQ ID NO: 2395003 - RNA, 19 nt, Homo sapiens
  misc_RNA (1)...(19): siRNA sense strand
cagacaaacuuaaggucau

SEQ ID NO: 2395004 - RNA, 19 nt, Homo sapiens
  misc_RNA (1)...(19): siRNA sense strand
cugcgaaaucccagguuua

SEQ ID NO: 2395005 - RNA, 19 nt, Homo sapiens
  misc_RNA (1)...(19): siRNA sense strand
ggaagauggguauggagaa

SEQ ID NO: 2395006 - RNA, 19 nt, Homo sapiens
  misc_RNA (1)...(19): siRNA sense strand
ggaagaaguauuugagaac

SEQ ID NO: 2395007 - RNA, 19 nt, Homo sapiens
  misc_RNA (1)...(19): siRNA sense strand
gcuacgagcuauaagccaa

SEQ ID NO: 2395008 - RNA, 19 nt, Homo sapiens
  misc_RNA (1)...(19): siRNA sense strand
ugaacaaagaagaccauua

SEQ ID NO: 2395009 - RNA, 19 nt, Homo sapiens
  misc_RNA (1)...(19): siRNA sense strand
ucaaagaagagaagcucaa

SEQ ID NO: 2395010 - RNA, 19 nt, Homo sapiens
  misc_RNA (1)...(19): siRNA sense strand
ugacaaccuuccagagaau

SEQ ID NO: 2395011 - RNA, 19 nt, Homo sapiens
  misc_RNA (1)...(19): siRNA sense strand
cugaagauggugaggucua

SEQ ID NO: 2395012 - RNA, 19 nt, Homo sapiens
  misc_RNA (1)...(19): siRNA sense strand
gcagagugacagcaggaaa

SEQ ID NO: 2395013 - RNA, 19 nt, Homo sapiens
  misc_RNA (1)...(19): siRNA sense strand
aagaagaccaugugauuau

SEQ ID NO: 2395014 - RNA, 19 nt, Homo sapiens
  misc_RNA (1)...(19): siRNA sense strand
uggauaagaaagcaggaua

SEQ ID NO: 2395015 - RNA, 19 nt, Homo sapiens
  misc_RNA (1)...(19): siRNA sense strand
caacagaggcagaaggauc

SEQ ID NO: 2395016 - RNA, 19 nt, Homo sapiens
  misc_RNA (1)...(19): siRNA sense strand
ugacagaaucucaggcaga

SEQ ID NO: 2395017 - RNA, 19 nt, Homo sapiens
  misc_RNA (1)...(19): siRNA sense strand
gaucaggcuuugagaggga

SEQ ID NO: 2395018 - RNA, 19 nt, Homo sapiens
  misc_RNA (1)...(19): siRNA sense strand
uaucagagaagaagaaaca

SEQ ID NO: 2395019 - RNA, 19 nt, Homo sapiens
  misc_RNA (1)...(19): siRNA sense strand
uagcaauaccuuuggucaa

SEQ ID NO: 2395020 - RNA, 19 nt, Homo sapiens
  misc_RNA (1)...(19): siRNA sense strand
acaaaguggcuacgagcua

SEQ ID NO: 2395021 - RNA, 19 nt, Homo sapiens
  misc_RNA (1)...(19): siRNA sense strand
cagcuaugcuucuggugaa

SEQ ID NO: 2395022 - RNA, 19 nt, Homo sapiens
  misc_RNA (1)...(19): siRNA sense strand
cagaauacacacugggcuu

SEQ ID NO: 2395023 - RNA, 19 nt, Homo sapiens
  misc_RNA (1)...(19): siRNA sense strand
agucuauaugagagugaua

SEQ ID NO: 2395024 - RNA, 19 nt, Homo sapiens
  misc_RNA (1)...(19): siRNA sense strand
aguccuaucuuaagcgaau

SEQ ID NO: 2395025 - RNA, 19 nt, Homo sapiens
  misc_RNA (1)...(19): siRNA sense strand
aggcuguaaaggagauuaa

SEQ ID NO: 2395026 - RNA, 19 nt, Homo sapiens
  misc_RNA (1)...(19): siRNA sense strand
ugaugugugucaagggaau

SEQ ID NO: 2395027 - RNA, 19 nt, Homo sapiens
  misc_RNA (1)...(19): siRNA sense strand
agaacagguuaaacaggaa

SEQ ID NO: 2395028 - RNA, 19 nt, Homo sapiens
  misc_RNA (1)...(19): siRNA sense strand
ggaaagggaaggaagggca

SEQ ID NO: 2395029 - RNA, 19 nt, Homo sapiens
  misc_RNA (1)...(19): siRNA sense strand
gucaaggagucuacagcua

SEQ ID NO: 2395030 - RNA, 19 nt, Homo sapiens
  misc_RNA (1)...(19): siRNA sense strand
agaagaagaaacagaggga

SEQ ID NO: 2395031 - RNA, 19 nt, Homo sapiens
  misc_RNA (1)...(19): siRNA sense strand
gaguuagcuacuacagaaa

SEQ ID NO: 2395032 - RNA, 19 nt, Homo sapiens
  misc_RNA (1)...(19): siRNA sense strand
acacucaguugauggaaau

SEQ ID NO: 2395033 - RNA, 19 nt, Homo sapiens
  misc_RNA (1)...(19): siRNA sense strand
aaaggaaggaagcagaaua

SEQ ID NO: 2395034 - RNA, 19 nt, Homo sapiens
  misc_RNA (1)...(19): siRNA sense strand
ccauaguggagcagugaca

SEQ ID NO: 2395035 - RNA, 19 nt, Homo sapiens
  misc_RNA (1)...(19): siRNA sense strand
gccauuggaaagaaggaaa

SEQ ID NO: 2395036 - RNA, 19 nt, Homo sapiens
  misc_RNA (1)...(19): siRNA sense strand
ucccauaacaccagagaga

SEQ ID NO: 2395037 - RNA, 19 nt, Homo sapiens
  misc_RNA (1)...(19): siRNA sense strand
gaaagauagcagggaagaa

SEQ ID NO: 2395038 - RNA, 19 nt, Homo sapiens
  misc_RNA (1)...(19): siRNA sense strand
ggaaagauguauucuggca

SEQ ID NO: 2395039 - RNA, 19 nt, Homo sapiens
  misc_RNA (1)...(19): siRNA sense strand
cuacaaggauccucgccua

SEQ ID NO: 2395040 - RNA, 19 nt, Homo sapiens
  misc_RNA (1)...(19): siRNA sense strand
aggcaaugaacaaagaaga

SEQ ID NO: 2395041 - RNA, 19 nt, Homo sapiens
  misc_RNA (1)...(19): siRNA sense strand
uuugaaagauagcagggaa

SEQ ID NO: 2395042 - RNA, 19 nt, Homo sapiens
  misc_RNA (1)...(19): siRNA sense strand
cagagugacagcaggaaaa

SEQ ID NO: 2395043 - RNA, 19 nt, Homo sapiens
  misc_RNA (1)...(19): siRNA sense strand
ggccaguggguaauggaua

SEQ ID NO: 2395044 - RNA, 19 nt, Homo sapiens
  misc_RNA (1)...(19): siRNA sense strand
ugagagugauaaagacaga

SEQ ID NO: 2395045 - RNA, 19 nt, Homo sapiens
  misc_RNA (1)...(19): siRNA sense strand
gguuauugcaggaggcugu

SEQ ID NO: 2395046 - RNA, 19 nt, Homo sapiens
  misc_RNA (1)...(19): siRNA sense strand
agugaaacauggaguucuu

SEQ ID NO: 2395047 - RNA, 19 nt, Homo sapiens
  misc_RNA (1)...(19): siRNA sense strand
auuuagccuugguggauaa

SEQ ID NO: 2395048 - RNA, 19 nt, Homo sapiens
  misc_RNA (1)...(19): siRNA sense strand
ggaaagcgguguuugacga

SEQ ID NO: 2395049 - RNA, 19 nt, Homo sapiens
  misc_RNA (1)...(19): siRNA sense strand
ggaauguguccuucgacua

SEQ ID NO: 2395050 - RNA, 19 nt, Homo sapiens
  misc_RNA (1)...(19): siRNA sense strand
guacauguggggagagaau

SEQ ID NO: 2395051 - RNA, 19 nt, Homo sapiens
  misc_RNA (1)...(19): siRNA sense strand
ggaaaaggaaggaagcaga

SEQ ID NO: 2395052 - RNA, 19 nt, Homo sapiens
  misc_RNA (1)...(19): siRNA sense strand
gugcuacgggccaggauua

SEQ ID NO: 2395053 - RNA, 19 nt, Homo sapiens
  misc_RNA (1)...(19): siRNA sense strand
agaagcugguggugugaau

SEQ ID NO: 2395054 - RNA, 19 nt, Homo sapiens
  misc_RNA (1)...(19): siRNA sense strand
gagaauacagaaucccaaa

SEQ ID NO: 2395055 - RNA, 19 nt, Homo sapiens
  misc_RNA (1)...(19): siRNA sense strand
ggcaagaugauguguguca

SEQ ID NO: 2395056 - RNA, 19 nt, Homo sapiens
  misc_RNA (1)...(19): siRNA sense strand
agugauaaagacagaccua

SEQ ID NO: 2395057 - RNA, 19 nt, Homo sapiens
  misc_RNA (1)...(19): siRNA sense strand
cugacagauuugaagaaua

SEQ ID NO: 2395058 - RNA, 19 nt, Homo sapiens
  misc_RNA (1)...(19): siRNA sense strand
ggcuaaaggaugaguuaau

SEQ ID NO: 2395059 - RNA, 19 nt, Homo sapiens
  misc_RNA (1)...(19): siRNA sense strand
agagaaacuugcagggcuu

SEQ ID NO: 2395060 - RNA, 19 nt, Homo sapiens
  misc_RNA (1)...(19): siRNA sense strand
uggaagaauauaaggauga

SEQ ID NO: 2395061 - RNA, 19 nt, Homo sapiens
  misc_RNA (1)...(19): siRNA sense strand
uuacagaagaugugaagau

SEQ ID NO: 2395062 - RNA, 19 nt, Homo sapiens
  misc_RNA (1)...(19): siRNA sense strand
uagaaaugcaacaggauga

SEQ ID NO: 2395063 - RNA, 19 nt, Homo sapiens
  misc_RNA (1)...(19): siRNA sense strand
ggaugaguuaauagcuaaa

SEQ ID NO: 2395064 - RNA, 19 nt, Homo sapiens
  misc_RNA (1)...(19): siRNA sense strand
acuacaaugcagaaacaua

SEQ ID NO: 2395065 - RNA, 19 nt, Homo sapiens
  misc_RNA (1)...(19): siRNA sense strand
gagagacagaugaagacaa

SEQ ID NO: 2395066 - RNA, 19 nt, Homo sapiens
  misc_RNA (1)...(19): siRNA sense strand
ggaugaacuagaaaugcaa

SEQ ID NO: 2395067 - RNA, 19 nt, Homo sapiens
  misc_RNA (1)...(19): siRNA sense strand
uggaugaaggagagacaga

SEQ ID NO: 2395068 - RNA, 19 nt, Homo sapiens
  misc_RNA (1)...(19): siRNA sense strand
gccauaugaagaagagauu

SEQ ID NO: 2395069 - RNA, 19 nt, Homo sapiens
  misc_RNA (1)...(19): siRNA sense strand
aaggagagacagaugaaga

SEQ ID NO: 2395070 - RNA, 19 nt, Homo sapiens
  misc_RNA (1)...(19): siRNA sense strand
agaugagcagagagaaauu

SEQ ID NO: 2395071 - RNA, 19 nt, Homo sapiens
  misc_RNA (1)...(19): siRNA sense strand
cugaaagugccgacagcau

SEQ ID NO: 2395072 - RNA, 19 nt, Homo sapiens
  misc_RNA (1)...(19): siRNA sense strand
acagaagaugugaagauau

SEQ ID NO: 2395073 - RNA, 19 nt, Homo sapiens
  misc_RNA (1)...(19): siRNA sense strand
ugagagacuucgaccaaaa

SEQ ID NO: 2395074 - RNA, 19 nt, Homo sapiens
  misc_RNA (1)...(19): siRNA sense strand
aagggaacacagagcuuaa

SEQ ID NO: 2395075 - RNA, 19 nt, Homo sapiens
  misc_RNA (1)...(19): siRNA sense strand
agacagaugaagacaaaau

SEQ ID NO: 2395076 - RNA, 19 nt, Homo sapiens
  misc_RNA (1)...(19): siRNA sense strand
aggaugaacuagaaaugca

SEQ ID NO: 2395077 - RNA, 19 nt, Homo sapiens
  misc_RNA (1)...(19): siRNA sense strand
uggccguggacgagaaaga

SEQ ID NO: 2395078 - RNA, 19 nt, Homo sapiens
  misc_RNA (1)...(19): siRNA sense strand
cguggacgagaaagaaaua

SEQ ID NO: 2395079 - RNA, 19 nt, Homo sapiens
  misc_RNA (1)...(19): siRNA sense strand
ucacagaagaaccugaaau

SEQ ID NO: 2395080 - RNA, 19 nt, Homo sapiens
  misc_RNA (1)...(19): siRNA sense strand
auauagaagccuuugacau

SEQ ID NO: 2395081 - RNA, 19 nt, Homo sapiens
  misc_RNA (1)...(19): siRNA sense strand
cuuugacaucagagaacua

SEQ ID NO: 2395082 - RNA, 19 nt, Homo sapiens
  misc_RNA (1)...(19): siRNA sense strand
ccaaauuugaugugauucu

SEQ ID NO: 2395083 - RNA, 19 nt, Homo sapiens
  misc_RNA (1)...(19): siRNA sense strand
gugccguguuaaauagcaa

SEQ ID NO: 2395084 - RNA, 19 nt, Homo sapiens
  misc_RNA (1)...(19): siRNA sense strand
ugguuguacagaagaaauu

SEQ ID NO: 2395085 - RNA, 19 nt, Homo sapiens
  misc_RNA (1)...(19): siRNA sense strand
uggaggaagagguggaacu

SEQ ID NO: 2395086 - RNA, 19 nt, Homo sapiens
  misc_RNA (1)...(19): siRNA sense strand
ggaccuuggaagagugugu

SEQ ID NO: 2395087 - RNA, 19 nt, Homo sapiens
  misc_RNA (1)...(19): siRNA sense strand
ccguggacgagaaagaaau

SEQ ID NO: 2395088 - RNA, 19 nt, Homo sapiens
  misc_RNA (1)...(19): siRNA sense strand
ggauguagguuuagcugac

SEQ ID NO: 2395089 - RNA, 19 nt, Homo sapiens
  misc_RNA (1)...(19): siRNA sense strand
auugcugaaacaagagaaa

SEQ ID NO: 2395090 - RNA, 19 nt, Homo sapiens
  misc_RNA (1)...(19): siRNA sense strand
cagagaacuaacacccaaa

SEQ ID NO: 2395091 - RNA, 19 nt, Homo sapiens
  misc_RNA (1)...(19): siRNA sense strand
cgaaaaugggguuacagaa

SEQ ID NO: 2395092 - RNA, 19 nt, Homo sapiens
  misc_RNA (1)...(19): siRNA sense strand
gaacaaaggaacacugccu

SEQ ID NO: 2395093 - RNA, 19 nt, Homo sapiens
  misc_RNA (1)...(19): siRNA sense strand
uacagaagaaauugagaga

SEQ ID NO: 2395094 - RNA, 19 nt, Homo sapiens
  misc_RNA (1)...(19): siRNA sense strand
acuuacaagccgauauaga

SEQ ID NO: 2395095 - RNA, 19 nt, Homo sapiens
  misc_RNA (1)...(19): siRNA sense strand
uggacgagaaagaaauaga

SEQ ID NO: 2395096 - RNA, 19 nt, Homo sapiens
  misc_RNA (1)...(19): siRNA sense strand
ggaaccagguggaggcuga

SEQ ID NO: 2395097 - RNA, 19 nt, Homo sapiens
  misc_RNA (1)...(19): siRNA sense strand
gugaaguacaagauagaau

SEQ ID NO: 2395098 - RNA, 19 nt, Homo sapiens
  misc_RNA (1)...(19): siRNA sense strand
cagcaguguggaagggcaa

SEQ ID NO: 2395099 - RNA, 19 nt, Homo sapiens
  misc_RNA (1)...(19): siRNA sense strand
aguucuacgugguggccua

SEQ ID NO: 2395100 - RNA, 19 nt, Homo sapiens
  misc_RNA (1)...(19): siRNA sense strand
caaacaagguguaucgagu

SEQ ID NO: 2395101 - RNA, 19 nt, Homo sapiens
  misc_RNA (1)...(19): siRNA sense strand
uggaagggcaagacggaga

SEQ ID NO: 2395102 - RNA, 19 nt, Homo sapiens
  misc_RNA (1)...(19): siRNA sense strand
ggugcgaggaaaugagaca

SEQ ID NO: 2395103 - RNA, 19 nt, Homo sapiens
  misc_RNA (1)...(19): siRNA sense strand
acaaacaugaggauggcua

SEQ ID NO: 2395104 - RNA, 19 nt, Homo sapiens
  misc_RNA (1)...(19): siRNA sense strand
ggacagggcugaagugcac

SEQ ID NO: 2395105 - RNA, 19 nt, Homo sapiens
  misc_RNA (1)...(19): siRNA sense strand
ccuuauggguggcgguguu

SEQ ID NO: 2395106 - RNA, 19 nt, Homo sapiens
  misc_RNA (1)...(19): siRNA sense strand
uggugaaguacaagauaga

SEQ ID NO: 2395107 - RNA, 19 nt, Homo sapiens
  misc_RNA (1)...(19): siRNA sense strand
aggcaaagauggagucccu

SEQ ID NO: 2395108 - RNA, 19 nt, Homo sapiens
  misc_RNA (1)...(19): siRNA sense strand
agaaagaucuccugggcuc

SEQ ID NO: 2395109 - RNA, 19 nt, Homo sapiens
  misc_RNA (1)...(19): siRNA sense strand
acaagauagaauacgguuu

SEQ ID NO: 2395110 - RNA, 19 nt, Homo sapiens
  misc_RNA (1)...(19): siRNA sense strand
gaguugaaggugcaggcaa

SEQ ID NO: 2395111 - RNA, 19 nt, Homo sapiens
  misc_RNA (1)...(19): siRNA sense strand
cggcucaagaagaaaguga

SEQ ID NO: 2395112 - RNA, 19 nt, Homo sapiens
  misc_RNA (1)...(19): siRNA sense strand
cucagacgguggaggagaa

SEQ ID NO: 2395113 - RNA, 19 nt, Homo sapiens
  misc_RNA (1)...(19): siRNA sense strand
cgacaagacgggaagccca

SEQ ID NO: 2395114 - RNA, 19 nt, Homo sapiens
  misc_RNA (1)...(19): siRNA sense strand
caggagaagcugucagacu

SEQ ID NO: 2395115 - RNA, 19 nt, Homo sapiens
  misc_RNA (1)...(19): siRNA sense strand
gcuaugcagcaguguggaa

SEQ ID NO: 2395116 - RNA, 19 nt, Homo sapiens
  misc_RNA (1)...(19): siRNA sense strand
ggcaaugggaggaagaagu

SEQ ID NO: 2395117 - RNA, 19 nt, Homo sapiens
  misc_RNA (1)...(19): siRNA sense strand
gggcagguggugaaguaca

SEQ ID NO: 2395118 - RNA, 19 nt, Homo sapiens
  misc_RNA (1)...(19): siRNA sense strand
gcgaggugcuagaggagac

SEQ ID NO: 2395119 - RNA, 19 nt, Homo sapiens
  misc_RNA (1)...(19): siRNA sense strand
ugggaaaggaagaucagau

SEQ ID NO: 2395120 - RNA, 19 nt, Homo sapiens
  misc_RNA (1)...(19): siRNA sense strand
uggauguucaggagaguga

SEQ ID NO: 2395121 - RNA, 19 nt, Homo sapiens
  misc_RNA (1)...(19): siRNA sense strand
cuguccggcucaagaagaa

SEQ ID NO: 2395122 - RNA, 19 nt, Homo sapiens
  misc_RNA (1)...(19): siRNA sense strand
acggggagaucguggagua

SEQ ID NO: 2395123 - RNA, 19 nt, Homo sapiens
  misc_RNA (1)...(19): siRNA sense strand
ggcugaaggagaaggguaa

SEQ ID NO: 2395124 - RNA, 19 nt, Homo sapiens
  misc_RNA (1)...(19): siRNA sense strand
aagaaggaacaguuggaaa

SEQ ID NO: 2395125 - RNA, 19 nt, Homo sapiens
  misc_RNA (1)...(19): siRNA sense strand
agaaggaacaguuggaaaa

SEQ ID NO: 2395126 - RNA, 19 nt, Homo sapiens
  misc_RNA (1)...(19): siRNA sense strand
ugaagaagaaggaggcaga

SEQ ID NO: 2395127 - RNA, 19 nt, Homo sapiens
  misc_RNA (1)...(19): siRNA sense strand
uggaagugauggaggagga

SEQ ID NO: 2395128 - RNA, 19 nt, Homo sapiens
  misc_RNA (1)...(19): siRNA sense strand
aggaagcagcggaggaaga

SEQ ID NO: 2395129 - RNA, 19 nt, Homo sapiens
  misc_RNA (1)...(19): siRNA sense strand
cggcugaaggagaagggua

SEQ ID NO: 2395130 - RNA, 19 nt, Homo sapiens
  misc_RNA (1)...(19): siRNA sense strand
cagauagccugcugggaca

SEQ ID NO: 2395131 - RNA, 19 nt, Homo sapiens
  misc_RNA (1)...(19): siRNA sense strand
gguggaggagggagaggaa

SEQ ID NO: 2395132 - RNA, 19 nt, Homo sapiens
  misc_RNA (1)...(19): siRNA sense strand
ugucggaacacgaggccaa

SEQ ID NO: 2395133 - RNA, 19 nt, Homo sapiens
  misc_RNA (1)...(19): siRNA sense strand
ccggaagaaaguggagaaa

SEQ ID NO: 2395134 - RNA, 19 nt, Homo sapiens
  misc_RNA (1)...(19): siRNA sense strand
uggaagaagacuuagccua

SEQ ID NO: 2395135 - RNA, 19 nt, Homo sapiens
  misc_RNA (1)...(19): siRNA sense strand
ccauaaagcugacgccagu

SEQ ID NO: 2395136 - RNA, 19 nt, Homo sapiens
  misc_RNA (1)...(19): siRNA sense strand
cuuccauguuugagcguga

SEQ ID NO: 2395137 - RNA, 19 nt, Homo sapiens
  misc_RNA (1)...(19): siRNA sense strand
gggaugaggagcagaccga

SEQ ID NO: 2395138 - RNA, 19 nt, Homo sapiens
  misc_RNA (1)...(19): siRNA sense strand
aggugguggaggagggaga

SEQ ID NO: 2395139 - RNA, 19 nt, Homo sapiens
  misc_RNA (1)...(19): siRNA sense strand
gagaggaagcagcggagga

SEQ ID NO: 2395140 - RNA, 19 nt, Homo sapiens
  misc_RNA (1)...(19): siRNA sense strand
cgaucagcaugucggaaca

SEQ ID NO: 2395141 - RNA, 19 nt, Homo sapiens
  misc_RNA (1)...(19): siRNA sense strand
ggaagaagacuuagccuag

SEQ ID NO: 2395142 - RNA, 19 nt, Homo sapiens
  misc_RNA (1)...(19): siRNA sense strand
aggaggaguucuucgacau

SEQ ID NO: 2395143 - RNA, 19 nt, Homo sapiens
  misc_RNA (1)...(19): siRNA sense strand
gagaugcggcugaaggaga

SEQ ID NO: 2395144 - RNA, 19 nt, Homo sapiens
  misc_RNA (1)...(19): siRNA sense strand
caggucauguggugggaca

SEQ ID NO: 2395145 - RNA, 19 nt, Homo sapiens
  misc_RNA (1)...(19): siRNA sense strand
aggaagaaggggaugaaga

SEQ ID NO: 2395146 - RNA, 19 nt, Homo sapiens
  misc_RNA (1)...(19): siRNA sense strand
ccaucaauguguucaggga

SEQ ID NO: 2395147 - RNA, 19 nt, Homo sapiens
  misc_RNA (1)...(19): siRNA sense strand
ccaccaggauggacggaac

SEQ ID NO: 2395148 - RNA, 19 nt, Homo sapiens
  misc_RNA (1)...(19): siRNA sense strand
aaguggagaaagaugagaa

SEQ ID NO: 2395149 - RNA, 19 nt, Homo sapiens
  misc_RNA (1)...(19): siRNA sense strand
acgaggaggccauggaagu

SEQ ID NO: 2395150 - RNA, 19 nt, Homo sapiens
  misc_RNA (1)...(19): siRNA sense strand
gaggaggaguucuucgaca

SEQ ID NO: 2395151 - RNA, 19 nt, Homo sapiens
  misc_RNA (1)...(19): siRNA sense strand
agaaggaggcagacgccau

SEQ ID NO: 2395152 - RNA, 19 nt, Homo sapiens
  misc_RNA (1)...(19): siRNA sense strand
ucaaugacgaggaggccau

SEQ ID NO: 2395153 - RNA, 19 nt, Homo sapiens
  misc_RNA (1)...(19): siRNA sense strand
gucaagaagcgcagcgagu

SEQ ID NO: 2395154 - RNA, 19 nt, Homo sapiens
  misc_RNA (1)...(19): siRNA sense strand
ucugaagacagccgggaau

SEQ ID NO: 2395155 - RNA, 19 nt, Homo sapiens
  misc_RNA (1)...(19): siRNA sense strand
agcaguucguggagcggaa

SEQ ID NO: 2395156 - RNA, 19 nt, Homo sapiens
  misc_RNA (1)...(19): siRNA sense strand
aggccaacucagagcgguu

SEQ ID NO: 2395157 - RNA, 19 nt, Homo sapiens
  misc_RNA (1)...(19): siRNA sense strand
caggaaaucaagagggcug

SEQ ID NO: 2395158 - RNA, 19 nt, Homo sapiens
  misc_RNA (1)...(19): siRNA sense strand
aaguugugaucuuggacau

SEQ ID NO: 2395159 - RNA, 19 nt, Homo sapiens
  misc_RNA (1)...(19): siRNA sense strand
uccagaggaaugagaagaa

SEQ ID NO: 2395160 - RNA, 19 nt, Homo sapiens
  misc_RNA (1)...(19): siRNA sense strand
agauaauggcaaagggaaa

SEQ ID NO: 2395161 - RNA, 19 nt, Homo sapiens
  misc_RNA (1)...(19): siRNA sense strand
ccacauagaaagauggcua

SEQ ID NO: 2395162 - RNA, 19 nt, Homo sapiens
  misc_RNA (1)...(19): siRNA sense strand
ggaagaagcuccaagacga

SEQ ID NO: 2395163 - RNA, 19 nt, Homo sapiens
  misc_RNA (1)...(19): siRNA sense strand
aguuaaaccuauugacaca

SEQ ID NO: 2395164 - RNA, 19 nt, Homo sapiens
  misc_RNA (1)...(19): siRNA sense strand
aggcauuacuagagacuca

SEQ ID NO: 2395165 - RNA, 19 nt, Homo sapiens
  misc_RNA (1)...(19): siRNA sense strand
gacaaaaugccuuggaaaa

SEQ ID NO: 2395166 - RNA, 19 nt, Homo sapiens
  misc_RNA (1)...(19): siRNA sense strand
ggucaagauaucauagcua

SEQ ID NO: 2395167 - RNA, 19 nt, Homo sapiens
  misc_RNA (1)...(19): siRNA sense strand
uggaaggaggaaagacaaa

SEQ ID NO: 2395168 - RNA, 19 nt, Homo sapiens
  misc_RNA (1)...(19): siRNA sense strand
gguacauccuuguggacau

SEQ ID NO: 2395169 - RNA, 19 nt, Homo sapiens
  misc_RNA (1)...(19): siRNA sense strand
ucuuacagauaauggcaaa

SEQ ID NO: 2395170 - RNA, 19 nt, Homo sapiens
  misc_RNA (1)...(19): siRNA sense strand
caaagaauauccaggagga

SEQ ID NO: 2395171 - RNA, 19 nt, Homo sapiens
  misc_RNA (1)...(19): siRNA sense strand
uaucagaggaggugaacuu

SEQ ID NO: 2395172 - RNA, 19 nt, Homo sapiens
  misc_RNA (1)...(19): siRNA sense strand
aagcaaaggccgaaaauau

SEQ ID NO: 2395173 - RNA, 19 nt, Homo sapiens
  misc_RNA (1)...(19): siRNA sense strand
ggaagaaggucugggguau

SEQ ID NO: 2395174 - RNA, 19 nt, Homo sapiens
  misc_RNA (1)...(19): siRNA sense strand
agacaaaaugccuuggaaa

SEQ ID NO: 2395175 - RNA, 19 nt, Homo sapiens
  misc_RNA (1)...(19): siRNA sense strand
aagaggaagaugaaggaga

SEQ ID NO: 2395176 - RNA, 19 nt, Homo sapiens
  misc_RNA (1)...(19): siRNA sense strand
gguuauauaccuuugugaa

SEQ ID NO: 2395177 - RNA, 19 nt, Homo sapiens
  misc_RNA (1)...(19): siRNA sense strand
cagaaugcacugacaucaa

SEQ ID NO: 2395178 - RNA, 19 nt, Homo sapiens
  misc_RNA (1)...(19): siRNA sense strand
cagauaauggcaaagggaa

SEQ ID NO: 2395179 - RNA, 19 nt, Homo sapiens
  misc_RNA (1)...(19): siRNA sense strand
gauaauggcaaagggaaau

SEQ ID NO: 2395180 - RNA, 19 nt, Homo sapiens
  misc_RNA (1)...(19): siRNA sense strand
aaaugaccgccuaggguua

SEQ ID NO: 2395181 - RNA, 19 nt, Homo sapiens
  misc_RNA (1)...(19): siRNA sense strand
aggaauuugcacuggaaca

SEQ ID NO: 2395182 - RNA, 19 nt, Homo sapiens
  misc_RNA (1)...(19): siRNA sense strand
ucaccagcacugaagaaua

SEQ ID NO: 2395183 - RNA, 19 nt, Homo sapiens
  misc_RNA (1)...(19): siRNA sense strand
gcagaauccaugugaugau

SEQ ID NO: 2395184 - RNA, 19 nt, Homo sapiens
  misc_RNA (1)...(19): siRNA sense strand
ccgagaucauaauguggaa

SEQ ID NO: 2395185 - RNA, 19 nt, Homo sapiens
  misc_RNA (1)...(19): siRNA sense strand
ugaugauaaacgacacaaa

SEQ ID NO: 2395186 - RNA, 19 nt, Homo sapiens
  misc_RNA (1)...(19): siRNA sense strand
ucuaguaauugguccacaa

SEQ ID NO: 2395187 - RNA, 19 nt, Homo sapiens
  misc_RNA (1)...(19): siRNA sense strand
gggaaagagggaacaagga

SEQ ID NO: 2395188 - RNA, 19 nt, Homo sapiens
  misc_RNA (1)...(19): siRNA sense strand
acaacuaucacaaaggaau

SEQ ID NO: 2395189 - RNA, 19 nt, Homo sapiens
  misc_RNA (1)...(19): siRNA sense strand
cggagaaguuuucgaacau

SEQ ID NO: 2395190 - RNA, 19 nt, Homo sapiens
  misc_RNA (1)...(19): siRNA sense strand
aaguaucagaggaggugaa

SEQ ID NO: 2395191 - RNA, 19 nt, Homo sapiens
  misc_RNA (1)...(19): siRNA sense strand
acuggaaggaggaaagaca

SEQ ID NO: 2395192 - RNA, 19 nt, Homo sapiens
  misc_RNA (1)...(19): siRNA sense strand
gauccagagucuagaacgu

SEQ ID NO: 2395193 - RNA, 19 nt, Homo sapiens
  misc_RNA (1)...(19): siRNA sense strand
acugaguuacagacagaaa

SEQ ID NO: 2395194 - RNA, 19 nt, Homo sapiens
  misc_RNA (1)...(19): siRNA sense strand
cagcuuaccaaguacacaa

SEQ ID NO: 2395195 - RNA, 19 nt, Homo sapiens
  misc_RNA (1)...(19): siRNA sense strand
uggaagaaggucuggggua

SEQ ID NO: 2395196 - RNA, 19 nt, Homo sapiens
  misc_RNA (1)...(19): siRNA sense strand
aguuacaccucguuauaau

SEQ ID NO: 2395197 - RNA, 19 nt, Homo sapiens
  misc_RNA (1)...(19): siRNA sense strand
uauugaaaccacugcagaa

SEQ ID NO: 2395198 - RNA, 19 nt, Homo sapiens
  misc_RNA (1)...(19): siRNA sense strand
gcuaauuauugauggacag

SEQ ID NO: 2395199 - RNA, 19 nt, Homo sapiens
  misc_RNA (1)...(19): siRNA sense strand
cuacaaacaggaaaugaca

SEQ ID NO: 2395200 - RNA, 19 nt, Homo sapiens
  misc_RNA (1)...(19): siRNA sense strand
ccguuaaaccuuuucaaua

SEQ ID NO: 2395201 - RNA, 19 nt, Homo sapiens
  misc_RNA (1)...(19): siRNA sense strand
agaauauccacaucugaaa

SEQ ID NO: 2395202 - RNA, 19 nt, Homo sapiens
  misc_RNA (1)...(19): siRNA sense strand
ccaacgaucacaugaagau

SEQ ID NO: 2395203 - RNA, 19 nt, Homo sapiens
  misc_RNA (1)...(19): siRNA sense strand
gagaagaugccuaguaccu

SEQ ID NO: 2395204 - RNA, 19 nt, Homo sapiens
  misc_RNA (1)...(19): siRNA sense strand
agacauuugaggaaguuca

SEQ ID NO: 2395205 - RNA, 19 nt, Homo sapiens
  misc_RNA (1)...(19): siRNA sense strand
uggcaacaacuaucacaaa

SEQ ID NO: 2395206 - RNA, 19 nt, Homo sapiens
  misc_RNA (1)...(19): siRNA sense strand
cuggaaggaggaaagacaa

SEQ ID NO: 2395207 - RNA, 19 nt, Homo sapiens
  misc_RNA (1)...(19): siRNA sense strand
agaucauaauguggaacua

SEQ ID NO: 2395208 - RNA, 19 nt, Homo sapiens
  misc_RNA (1)...(19): siRNA sense strand
ccaaacugcuacacagacu

SEQ ID NO: 2395209 - RNA, 19 nt, Homo sapiens
  misc_RNA (1)...(19): siRNA sense strand
uguggacauugaugauaua

SEQ ID NO: 2395210 - RNA, 19 nt, Homo sapiens
  misc_RNA (1)...(19): siRNA sense strand
acacagggacugaagagga

SEQ ID NO: 2395211 - RNA, 19 nt, Homo sapiens
  misc_RNA (1)...(19): siRNA sense strand
gacugaagaggaagaugaa

SEQ ID NO: 2395212 - RNA, 19 nt, Homo sapiens
  misc_RNA (1)...(19): siRNA sense strand
acagaaagggcuucauuca

SEQ ID NO: 2395213 - RNA, 19 nt, Homo sapiens
  misc_RNA (1)...(19): siRNA sense strand
aaaggaauagacugguaua

SEQ ID NO: 2395214 - RNA, 19 nt, Homo sapiens
  misc_RNA (1)...(19): siRNA sense strand
cuguaugcagcuuggaaga

SEQ ID NO: 2395215 - RNA, 19 nt, Homo sapiens
  misc_RNA (1)...(19): siRNA sense strand
gcacugaagaauauccaca

SEQ ID NO: 2395216 - RNA, 19 nt, Homo sapiens
  misc_RNA (1)...(19): siRNA sense strand
aguuauuucaacaggacau

SEQ ID NO: 2395217 - RNA, 19 nt, Homo sapiens
  misc_RNA (1)...(19): siRNA sense strand
ugagacaggaacugcagaa

SEQ ID NO: 2395218 - RNA, 19 nt, Homo sapiens
  misc_RNA (1)...(19): siRNA sense strand
ccuuugugaacuuggucaa

SEQ ID NO: 2395219 - RNA, 19 nt, Homo sapiens
  misc_RNA (1)...(19): siRNA sense strand
aggauaugcacaagagcaa

SEQ ID NO: 2395220 - RNA, 19 nt, Homo sapiens
  misc_RNA (1)...(19): siRNA sense strand
augaguaugcagaggagaa

SEQ ID NO: 2395221 - RNA, 19 nt, Homo sapiens
  misc_RNA (1)...(19): siRNA sense strand
ccuaaaggccacucgaaaa

SEQ ID NO: 2395222 - RNA, 19 nt, Homo sapiens
  misc_RNA (1)...(19): siRNA sense strand
ggcugaaggauaugcacaa

SEQ ID NO: 2395223 - RNA, 19 nt, Homo sapiens
  misc_RNA (1)...(19): siRNA sense strand
cccuaaaggccacucgaaa

SEQ ID NO: 2395224 - RNA, 19 nt, Homo sapiens
  misc_RNA (1)...(19): siRNA sense strand
cagaggagaaccugggcuu

SEQ ID NO: 2395225 - RNA, 19 nt, Homo sapiens
  misc_RNA (1)...(19): siRNA sense strand
cgggagaggaagaugcagu

SEQ ID NO: 2395226 - RNA, 19 nt, Homo sapiens
  misc_RNA (1)...(19): siRNA sense strand
aggauaugcacaagagcaa

SEQ ID NO: 2395227 - RNA, 19 nt, Homo sapiens
  misc_RNA (1)...(19): siRNA sense strand
augaguaugcagaggagaa

SEQ ID NO: 2395228 - RNA, 19 nt, Homo sapiens
  misc_RNA (1)...(19): siRNA sense strand
ccuaaaggccacucgaaaa

SEQ ID NO: 2395229 - RNA, 19 nt, Homo sapiens
  misc_RNA (1)...(19): siRNA sense strand
ggcugaaggauaugcacaa

SEQ ID NO: 2395230 - RNA, 19 nt, Homo sapiens
  misc_RNA (1)...(19): siRNA sense strand
cccuaaaggccacucgaaa

SEQ ID NO: 2395231 - RNA, 19 nt, Homo sapiens
  misc_RNA (1)...(19): siRNA sense strand
cagaggagaaccugggcuu

SEQ ID NO: 2395232 - RNA, 19 nt, Homo sapiens
  misc_RNA (1)...(19): siRNA sense strand
cgggagaggaagaugcagu

SEQ ID NO: 2395233 - RNA, 19 nt, Homo sapiens
  misc_RNA (1)...(19): siRNA sense strand
auuaugaaguggaggccua

SEQ ID NO: 2395234 - RNA, 19 nt, Homo sapiens
  misc_RNA (1)...(19): siRNA sense strand
caauacuacaagaggauga

SEQ ID NO: 2395235 - RNA, 19 nt, Homo sapiens
  misc_RNA (1)...(19): siRNA sense strand
ggauggaggcugugcagga

SEQ ID NO: 2395236 - RNA, 19 nt, Homo sapiens
  misc_RNA (1)...(19): siRNA sense strand
acauaauggcggaggugga

SEQ ID NO: 2395237 - RNA, 19 nt, Homo sapiens
  misc_RNA (1)...(19): siRNA sense strand
aagugauuaccaaggaaua

SEQ ID NO: 2395238 - RNA, 19 nt, Homo sapiens
  misc_RNA (1)...(19): siRNA sense strand
gggaaaagauggagcggag

SEQ ID NO: 2395239 - RNA, 19 nt, Homo sapiens
  misc_RNA (1)...(19): siRNA sense strand
cugcaauacuacaagagga

SEQ ID NO: 2395240 - RNA, 19 nt, Homo sapiens
  misc_RNA (1)...(19): siRNA sense strand
agguggaagaagagaagca

SEQ ID NO: 2395241 - RNA, 19 nt, Homo sapiens
  misc_RNA (1)...(19): siRNA sense strand
guaaggaccuguggcgcaa

SEQ ID NO: 2395242 - RNA, 19 nt, Homo sapiens
  misc_RNA (1)...(19): siRNA sense strand
cugacgaagaugaagacau

SEQ ID NO: 2395243 - RNA, 19 nt, Homo sapiens
  misc_RNA (1)...(19): siRNA sense strand
ccugaagagggaacagaga

SEQ ID NO: 2395244 - RNA, 19 nt, Homo sapiens
  misc_RNA (1)...(19): siRNA sense strand
uggagguggaagaagagaa

SEQ ID NO: 2395245 - RNA, 19 nt, Homo sapiens
  misc_RNA (1)...(19): siRNA sense strand
augcugagcuacaugguca

SEQ ID NO: 2395246 - RNA, 19 nt, Homo sapiens
  misc_RNA (1)...(19): siRNA sense strand
ccgaagggcuagaggagga

SEQ ID NO: 2395247 - RNA, 19 nt, Homo sapiens
  misc_RNA (1)...(19): siRNA sense strand
gggaggaagaggaacgcaa

SEQ ID NO: 2395248 - RNA, 19 nt, Homo sapiens
  misc_RNA (1)...(19): siRNA sense strand
gggaggaacaggaggagga

SEQ ID NO: 2395249 - RNA, 19 nt, Homo sapiens
  misc_RNA (1)...(19): siRNA sense strand
acgaugaggaugaagaaau

SEQ ID NO: 2395250 - RNA, 19 nt, Homo sapiens
  misc_RNA (1)...(19): siRNA sense strand
gguuggaggaggaggagga

SEQ ID NO: 2395251 - RNA, 19 nt, Homo sapiens
  misc_RNA (1)...(19): siRNA sense strand
cgacacaggagauggcaga

SEQ ID NO: 2395252 - RNA, 19 nt, Homo sapiens
  misc_RNA (1)...(19): siRNA sense strand
gggacacgcuggaagccaa

SEQ ID NO: 2395253 - RNA, 19 nt, Homo sapiens
  misc_RNA (1)...(19): siRNA sense strand
aggaacaggaggaggagga

SEQ ID NO: 2395254 - RNA, 19 nt, Homo sapiens
  misc_RNA (1)...(19): siRNA sense strand
cugaaggcuuugaggagga

SEQ ID NO: 2395255 - RNA, 19 nt, Homo sapiens
  misc_RNA (1)...(19): siRNA sense strand
gcagagaaguggagcucag

SEQ ID NO: 2395256 - RNA, 19 nt, Homo sapiens
  misc_RNA (1)...(19): siRNA sense strand
aguugcagcuggagggcga

SEQ ID NO: 2395257 - RNA, 19 nt, Homo sapiens
  misc_RNA (1)...(19): siRNA sense strand
ucgaggaggguguggugaa

SEQ ID NO: 2395258 - RNA, 19 nt, Homo sapiens
  misc_RNA (1)...(19): siRNA sense strand
gcauccaggaggcggagaa

SEQ ID NO: 2395259 - RNA, 19 nt, Homo sapiens
  misc_RNA (1)...(19): siRNA sense strand
agaucgagagcguggauga

SEQ ID NO: 2395260 - RNA, 19 nt, Homo sapiens
  misc_RNA (1)...(19): siRNA sense strand
ccggaagagcugcaggaca

SEQ ID NO: 2395261 - RNA, 19 nt, Homo sapiens
  misc_RNA (1)...(19): siRNA sense strand
cggaggaagaagagaagcu

SEQ ID NO: 2395262 - RNA, 19 nt, Homo sapiens
  misc_RNA (1)...(19): siRNA sense strand
ccuuggaggaggagcaguu

SEQ ID NO: 2395263 - RNA, 19 nt, Homo sapiens
  misc_RNA (1)...(19): siRNA sense strand
aggagauggcagagugguu

SEQ ID NO: 2395264 - RNA, 19 nt, Homo sapiens
  misc_RNA (1)...(19): siRNA sense strand
gcccauggcuguagcgauc

SEQ ID NO: 2395265 - RNA, 19 nt, Homo sapiens
  misc_RNA (1)...(19): siRNA sense strand
acaaggacccacagggcga

SEQ ID NO: 2395266 - RNA, 19 nt, Homo sapiens
  misc_RNA (1)...(19): siRNA sense strand
gccuggacgaugaggauga

SEQ ID NO: 2395267 - RNA, 19 nt, Homo sapiens
  misc_RNA (1)...(19): siRNA sense strand
cugaagaacagccggagca

SEQ ID NO: 2395268 - RNA, 19 nt, Homo sapiens
  misc_RNA (1)...(19): siRNA sense strand
aggaggaggaagagcuguu

SEQ ID NO: 2395269 - RNA, 19 nt, Homo sapiens
  misc_RNA (1)...(19): siRNA sense strand
cuggugagaucgagagcgu

SEQ ID NO: 2395270 - RNA, 19 nt, Homo sapiens
  misc_RNA (1)...(19): siRNA sense strand
cgcuggaagccaaagaauu

SEQ ID NO: 2395271 - RNA, 19 nt, Homo sapiens
  misc_RNA (1)...(19): siRNA sense strand
cugagaagcaggaggagaa

SEQ ID NO: 2395272 - RNA, 19 nt, Homo sapiens
  misc_RNA (1)...(19): siRNA sense strand
augaagaaguggagcagau

SEQ ID NO: 2395273 - RNA, 19 nt, Homo sapiens
  misc_RNA (1)...(19): siRNA sense strand
ucaccaagcugcaggccaa

SEQ ID NO: 2395274 - RNA, 19 nt, Homo sapiens
  misc_RNA (1)...(19): siRNA sense strand
gaucaaaaugaacgagaua

SEQ ID NO: 2395275 - RNA, 19 nt, Homo sapiens
  misc_RNA (1)...(19): siRNA sense strand
cagaaaaugaggagaccua

SEQ ID NO: 2395276 - RNA, 19 nt, Homo sapiens
  misc_RNA (1)...(19): siRNA sense strand
agaaagacaaagagaucau

SEQ ID NO: 2395277 - RNA, 19 nt, Homo sapiens
  misc_RNA (1)...(19): siRNA sense strand
cccucaagauagagaauga

SEQ ID NO: 2395278 - RNA, 19 nt, Homo sapiens
  misc_RNA (1)...(19): siRNA sense strand
augcauggcuggaggggaa

SEQ ID NO: 2395279 - RNA, 19 nt, Homo sapiens
  misc_RNA (1)...(19): siRNA sense strand
gcaucagugcggaaagcaa

SEQ ID NO: 2395280 - RNA, 19 nt, Homo sapiens
  misc_RNA (1)...(19): siRNA sense strand
uugagaaugcaguggacaa

SEQ ID NO: 2395281 - RNA, 19 nt, Homo sapiens
  misc_RNA (1)...(19): siRNA sense strand
gcgaugaagaaguggagca

SEQ ID NO: 2395282 - RNA, 19 nt, Homo sapiens
  misc_RNA (1)...(19): siRNA sense strand
ggaaugacuacuugcucaa

SEQ ID NO: 2395283 - RNA, 19 nt, Homo sapiens
  misc_RNA (1)...(19): siRNA sense strand
acaaagagaucauugcuga

SEQ ID NO: 2395284 - RNA, 19 nt, Homo sapiens
  misc_RNA (1)...(19): siRNA sense strand
gcuggaugucauugagaau

SEQ ID NO: 2395285 - RNA, 19 nt, Homo sapiens
  misc_RNA (1)...(19): siRNA sense strand
uggcagaagacaucgagaa

SEQ ID NO: 2395286 - RNA, 19 nt, Homo sapiens
  misc_RNA (1)...(19): siRNA sense strand
agaugaaggagaagaggca

SEQ ID NO: 2395287 - RNA, 19 nt, Homo sapiens
  misc_RNA (1)...(19): siRNA sense strand
aggagaagaggcaggccaa

SEQ ID NO: 2395288 - RNA, 19 nt, Homo sapiens
  misc_RNA (1)...(19): siRNA sense strand
acauaguuguacaggacau

SEQ ID NO: 2395289 - RNA, 19 nt, Homo sapiens
  misc_RNA (1)...(19): siRNA sense strand
uggagcagaucgaggcuau

SEQ ID NO: 2395290 - RNA, 19 nt, Homo sapiens
  misc_RNA (1)...(19): siRNA sense strand
agauagagaaugaggaggu

SEQ ID NO: 2395291 - RNA, 19 nt, Homo sapiens
  misc_RNA (1)...(19): siRNA sense strand
gcuagagggaccuguguau

SEQ ID NO: 2395292 - RNA, 19 nt, Homo sapiens
  misc_RNA (1)...(19): siRNA sense strand
auugagaagaugaaggaga

SEQ ID NO: 2395293 - RNA, 19 nt, Homo sapiens
  misc_RNA (1)...(19): siRNA sense strand
cggaaugacuacuugcuca

SEQ ID NO: 2395294 - RNA, 19 nt, Homo sapiens
  misc_RNA (1)...(19): siRNA sense strand
ucaaaugucuggagcagca

SEQ ID NO: 2395295 - RNA, 19 nt, Homo sapiens
  misc_RNA (1)...(19): siRNA sense strand
acgaagggcuggaugucau

SEQ ID NO: 2395296 - RNA, 19 nt, Homo sapiens
  misc_RNA (1)...(19): siRNA sense strand
ggggaagaauauugugaca

SEQ ID NO: 2395297 - RNA, 19 nt, Homo sapiens
  misc_RNA (1)...(19): siRNA sense strand
ccaacagcucagcggacaa

SEQ ID NO: 2395298 - RNA, 19 nt, Homo sapiens
  misc_RNA (1)...(19): siRNA sense strand
aguucaagaaagacaaaga

SEQ ID NO: 2395299 - RNA, 19 nt, Homo sapiens
  misc_RNA (1)...(19): siRNA sense strand
caaagagaucauugcugaa

SEQ ID NO: 2395300 - RNA, 19 nt, Homo sapiens
  misc_RNA (1)...(19): siRNA sense strand
aguauagcgacgagaacau

SEQ ID NO: 2395301 - RNA, 19 nt, Homo sapiens
  misc_RNA (1)...(19): siRNA sense strand
gccggaaagcugagauuga

SEQ ID NO: 2395302 - RNA, 19 nt, Homo sapiens
  misc_RNA (1)...(19): siRNA sense strand
agaagauugagaagaugaa

SEQ ID NO: 2395303 - RNA, 19 nt, Homo sapiens
  misc_RNA (1)...(19): siRNA sense strand
ucaagaaagacaaagagau

SEQ ID NO: 2395304 - RNA, 19 nt, Homo sapiens
  misc_RNA (1)...(19): siRNA sense strand
cggaaagcaagcugaagga

SEQ ID NO: 2395305 - RNA, 19 nt, Homo sapiens
  misc_RNA (1)...(19): siRNA sense strand
ccuacaugagcaagaucaa

SEQ ID NO: 2395306 - RNA, 19 nt, Homo sapiens
  misc_RNA (1)...(19): siRNA sense strand
aagaagauugagaagauga

SEQ ID NO: 2395307 - RNA, 19 nt, Homo sapiens
  misc_RNA (1)...(19): siRNA sense strand
acuaaguucaagaaagaca

SEQ ID NO: 2395308 - RNA, 19 nt, Homo sapiens
  misc_RNA (1)...(19): siRNA sense strand
ggacauggaugaugccuuc

SEQ ID NO: 2395309 - RNA, 19 nt, Homo sapiens
  misc_RNA (1)...(19): siRNA sense strand
agaacaugauggaucccua

SEQ ID NO: 2395310 - RNA, 19 nt, Homo sapiens
  misc_RNA (1)...(19): siRNA sense strand
aggaggagaagcaguucaa

SEQ ID NO: 2395311 - RNA, 19 nt, Homo sapiens
  misc_RNA (1)...(19): siRNA sense strand
gugaagaagauugagaaga

SEQ ID NO: 2395312 - RNA, 19 nt, Homo sapiens
  misc_RNA (1)...(19): siRNA sense strand
guguauagccauaaacucu

SEQ ID NO: 2395313 - RNA, 19 nt, Homo sapiens
  misc_RNA (1)...(19): siRNA sense strand
ugaaguugaccaugacaau

SEQ ID NO: 2395314 - RNA, 19 nt, Homo sapiens
  misc_RNA (1)...(19): siRNA sense strand
agaagcaggaggagaagca

SEQ ID NO: 2395315 - RNA, 19 nt, Homo sapiens
  misc_RNA (1)...(19): siRNA sense strand
aaugaggagguuaggaaaa

SEQ ID NO: 2395316 - RNA, 19 nt, Homo sapiens
  misc_RNA (1)...(19): siRNA sense strand
ggaagaauauugugacagc

SEQ ID NO: 2395317 - RNA, 19 nt, Homo sapiens
  misc_RNA (1)...(19): siRNA sense strand
gcugagaagcaggaggaga

SEQ ID NO: 2395318 - RNA, 19 nt, Homo sapiens
  misc_RNA (1)...(19): siRNA sense strand
gagaagaugaaggagaaga

SEQ ID NO: 2395319 - RNA, 19 nt, Homo sapiens
  misc_RNA (1)...(19): siRNA sense strand
ggaccuaucucucagcuga

SEQ ID NO: 2395320 - RNA, 19 nt, Homo sapiens
  misc_RNA (1)...(19): siRNA sense strand
cugaauaugaagcccaaau

SEQ ID NO: 2395321 - RNA, 19 nt, Homo sapiens
  misc_RNA (1)...(19): siRNA sense strand
gagccaaccagcaggaaac

SEQ ID NO: 2395322 - RNA, 19 nt, Homo sapiens
  misc_RNA (1)...(19): siRNA sense strand
cugugaagaagauugagaa

SEQ ID NO: 2395323 - RNA, 19 nt, Homo sapiens
  misc_RNA (1)...(19): siRNA sense strand
ccccuaaaccacagaaaau

SEQ ID NO: 2395324 - RNA, 19 nt, Homo sapiens
  misc_RNA (1)...(19): siRNA sense strand
aguucaagaaggaccagua

SEQ ID NO: 2395325 - RNA, 19 nt, Homo sapiens
  misc_RNA (1)...(19): siRNA sense strand
ucauuaaggauucaggaca

SEQ ID NO: 2395326 - RNA, 19 nt, Homo sapiens
  misc_RNA (1)...(19): siRNA sense strand
cuucagagugccaggaucu

SEQ ID NO: 2395327 - RNA, 19 nt, Homo sapiens
  misc_RNA (1)...(19): siRNA sense strand
ugacaauggcacugagccu

SEQ ID NO: 2395328 - RNA, 19 nt, Homo sapiens
  misc_RNA (1)...(19): siRNA sense strand
agagagcaucagugcggaa

SEQ ID NO: 2395329 - RNA, 19 nt, Homo sapiens
  misc_RNA (1)...(19): siRNA sense strand
gcucugugaagaagauuga

SEQ ID NO: 2395330 - RNA, 19 nt, Homo sapiens
  misc_RNA (1)...(19): siRNA sense strand
cuacuauuaaacuggagaa

SEQ ID NO: 2395331 - RNA, 19 nt, Homo sapiens
  misc_RNA (1)...(19): siRNA sense strand
guuacgaucugauggagca

SEQ ID NO: 2395332 - RNA, 19 nt, Homo sapiens
  misc_RNA (1)...(19): siRNA sense strand
gagaagcggaggauggcga

SEQ ID NO: 2395333 - RNA, 19 nt, Homo sapiens
  misc_RNA (1)...(19): siRNA sense strand
gggagaucaaggagggaca

SEQ ID NO: 2395334 - RNA, 19 nt, Homo sapiens
  misc_RNA (1)...(19): siRNA sense strand
uggccagcauggaggagaa

SEQ ID NO: 2395335 - RNA, 19 nt, Homo sapiens
  misc_RNA (1)...(19): siRNA sense strand
uggaggagaagguggccua

SEQ ID NO: 2395336 - RNA, 19 nt, Homo sapiens
  misc_RNA (1)...(19): siRNA sense strand
ugguacagcuggagggcgu

SEQ ID NO: 2395337 - RNA, 19 nt, Homo sapiens
  misc_RNA (1)...(19): siRNA sense strand
agacucagcugcagaggga

SEQ ID NO: 2395338 - RNA, 19 nt, Homo sapiens
  misc_RNA (1)...(19): siRNA sense strand
gaugagugcuccagcgcca

SEQ ID NO: 2395339 - RNA, 19 nt, Homo sapiens
  misc_RNA (1)...(19): siRNA sense strand
gcgacgacaauguggcaga

SEQ ID NO: 2395340 - RNA, 19 nt, Homo sapiens
  misc_RNA (1)...(19): siRNA sense strand
cuggaagagcuacgggaga

SEQ ID NO: 2395341 - RNA, 19 nt, Homo sapiens
  misc_RNA (1)...(19): siRNA sense strand
uggccaacaacgcggacaa

SEQ ID NO: 2395342 - RNA, 19 nt, Homo sapiens
  misc_RNA (1)...(19): siRNA sense strand
gguaugagcggcuggagga

SEQ ID NO: 2395343 - RNA, 19 nt, Homo sapiens
  misc_RNA (1)...(19): siRNA sense strand
uggugaaauugaagguaaa

SEQ ID NO: 2395344 - RNA, 19 nt, Homo sapiens
  misc_RNA (1)...(19): siRNA sense strand
ggaaguggccauaggaaaa

SEQ ID NO: 2395345 - RNA, 19 nt, Homo sapiens
  misc_RNA (1)...(19): siRNA sense strand
cuguaauggacaaguaaua

SEQ ID NO: 2395346 - RNA, 19 nt, Homo sapiens
  misc_RNA (1)...(19): siRNA sense strand
cagagaaagaugcuggaaa

SEQ ID NO: 2395347 - RNA, 19 nt, Homo sapiens
  misc_RNA (1)...(19): siRNA sense strand
guuauuugcaggagaacaa

SEQ ID NO: 2395348 - RNA, 19 nt, Homo sapiens
  misc_RNA (1)...(19): siRNA sense strand
cugugaagucagagaaaga

SEQ ID NO: 2395349 - RNA, 19 nt, Homo sapiens
  misc_RNA (1)...(19): siRNA sense strand
uggaaguggccauaggaaa

SEQ ID NO: 2395350 - RNA, 19 nt, Homo sapiens
  misc_RNA (1)...(19): siRNA sense strand
auggugaaauugaagguaa

SEQ ID NO: 2395351 - RNA, 19 nt, Homo sapiens
  misc_RNA (1)...(19): siRNA sense strand
cuugggaccuagagaagaa

SEQ ID NO: 2395352 - RNA, 19 nt, Homo sapiens
  misc_RNA (1)...(19): siRNA sense strand
gaaccagaacagagcaaaa

SEQ ID NO: 2395353 - RNA, 19 nt, Homo sapiens
  misc_RNA (1)...(19): siRNA sense strand
agaaguaacgagugagcca

SEQ ID NO: 2395354 - RNA, 19 nt, Homo sapiens
  misc_RNA (1)...(19): siRNA sense strand
ccagcaguuucaagaggaa

SEQ ID NO: 2395355 - RNA, 19 nt, Homo sapiens
  misc_RNA (1)...(19): siRNA sense strand
uauaaaugacagaggagga

SEQ ID NO: 2395356 - RNA, 19 nt, Homo sapiens
  misc_RNA (1)...(19): siRNA sense strand
acaaagaaauugaagagcu

SEQ ID NO: 2395357 - RNA, 19 nt, Homo sapiens
  misc_RNA (1)...(19): siRNA sense strand
aaaugacagaggaggacaa

SEQ ID NO: 2395358 - RNA, 19 nt, Homo sapiens
  misc_RNA (1)...(19): siRNA sense strand
uguagugagaauaggagua

SEQ ID NO: 2395359 - RNA, 19 nt, Homo sapiens
  misc_RNA (1)...(19): siRNA sense strand
gguacagguauaauguuaa

SEQ ID NO: 2395360 - RNA, 19 nt, Homo sapiens
  misc_RNA (1)...(19): siRNA sense strand
aggauacagaguagaguuu

SEQ ID NO: 2395361 - RNA, 19 nt, Homo sapiens
  misc_RNA (1)...(19): siRNA sense strand
ggggaaugagccagacaaa

SEQ ID NO: 2395362 - RNA, 19 nt, Homo sapiens
  misc_RNA (1)...(19): siRNA sense strand
ucagaaucgugauggcauu

SEQ ID NO: 2395363 - RNA, 19 nt, Homo sapiens
  misc_RNA (1)...(19): siRNA sense strand
acacaaaagcacacaaaga

SEQ ID NO: 2395364 - RNA, 19 nt, Homo sapiens
  misc_RNA (1)...(19): siRNA sense strand
agagaaaacuggaaaugau

SEQ ID NO: 2395365 - RNA, 19 nt, Homo sapiens
  misc_RNA (1)...(19): siRNA sense strand
cguaaugaagggaggaaug

SEQ ID NO: 2395366 - RNA, 19 nt, Homo sapiens
  misc_RNA (1)...(19): siRNA sense strand
aauauacaagcuugggaaa

SEQ ID NO: 2395367 - RNA, 19 nt, Homo sapiens
  misc_RNA (1)...(19): siRNA sense strand
aagcauaauggaacagaca

SEQ ID NO: 2395368 - RNA, 19 nt, Homo sapiens
  misc_RNA (1)...(19): siRNA sense strand
auaguuauuugcaggagaa

SEQ ID NO: 2395369 - RNA, 19 nt, Homo sapiens
  misc_RNA (1)...(19): siRNA sense strand
aagaucgauaugugaguaa

SEQ ID NO: 2395370 - RNA, 19 nt, Homo sapiens
  misc_RNA (1)...(19): siRNA sense strand
gagauauauagcacaagua

SEQ ID NO: 2395371 - RNA, 19 nt, Homo sapiens
  misc_RNA (1)...(19): siRNA sense strand
gagaaagaugcuggaaaga

SEQ ID NO: 2395372 - RNA, 19 nt, Homo sapiens
  misc_RNA (1)...(19): siRNA sense strand
gguggaaauuugauccuga

SEQ ID NO: 2395373 - RNA, 19 nt, Homo sapiens
  misc_RNA (1)...(19): siRNA sense strand
aagaaauugaagagcuuga

SEQ ID NO: 2395374 - RNA, 19 nt, Homo sapiens
  misc_RNA (1)...(19): siRNA sense strand
gggaccuagagaagaagua

SEQ ID NO: 2395375 - RNA, 19 nt, Homo sapiens
  misc_RNA (1)...(19): siRNA sense strand
cauaguuauuugcaggaga

SEQ ID NO: 2395376 - RNA, 19 nt, Homo sapiens
  misc_RNA (1)...(19): siRNA sense strand
caggagaacaaaaucaaaa

SEQ ID NO: 2395377 - RNA, 19 nt, Homo sapiens
  misc_RNA (1)...(19): siRNA sense strand
gauccugaagaauuagaaa

SEQ ID NO: 2395378 - RNA, 19 nt, Homo sapiens
  misc_RNA (1)...(19): siRNA sense strand
gcagacgaugagauauaua

SEQ ID NO: 2395379 - RNA, 19 nt, Homo sapiens
  misc_RNA (1)...(19): siRNA sense strand
uaauauacaagcuugggaa

SEQ ID NO: 2395380 - RNA, 19 nt, Homo sapiens
  misc_RNA (1)...(19): siRNA sense strand
cucagauguuggaucguua

SEQ ID NO: 2395381 - RNA, 19 nt, Homo sapiens
  misc_RNA (1)...(19): siRNA sense strand
cugaugaagaaaagaaaga

SEQ ID NO: 2395382 - RNA, 19 nt, Homo sapiens
  misc_RNA (1)...(19): siRNA sense strand
ccacagagucguauguuuu

SEQ ID NO: 2395383 - RNA, 19 nt, Homo sapiens
  misc_RNA (1)...(19): siRNA sense strand
ugucauguuaacuggaauu

SEQ ID NO: 2395384 - RNA, 19 nt, Homo sapiens
  misc_RNA (1)...(19): siRNA sense strand
aggaaaaggauacagagua

SEQ ID NO: 2395385 - RNA, 19 nt, Homo sapiens
  misc_RNA (1)...(19): siRNA sense strand
cagacaaauaucccuguaa

SEQ ID NO: 2395386 - RNA, 19 nt, Homo sapiens
  misc_RNA (1)...(19): siRNA sense strand
gcuggaaagaucauuguau

SEQ ID NO: 2395387 - RNA, 19 nt, Homo sapiens
  misc_RNA (1)...(19): siRNA sense strand
ccaagagaaaacuggaaau

SEQ ID NO: 2395388 - RNA, 19 nt, Homo sapiens
  misc_RNA (1)...(19): siRNA sense strand
aguaauaaagcuaugccau

SEQ ID NO: 2395389 - RNA, 19 nt, Homo sapiens
  misc_RNA (1)...(19): siRNA sense strand
uggaaccagaacagagcaa

SEQ ID NO: 2395390 - RNA, 19 nt, Homo sapiens
  misc_RNA (1)...(19): siRNA sense strand
uguuggaucguuaugaaua

SEQ ID NO: 2395391 - RNA, 19 nt, Homo sapiens
  misc_RNA (1)...(19): siRNA sense strand
uugaagagcuugaaaagga

SEQ ID NO: 2395392 - RNA, 19 nt, Homo sapiens
  misc_RNA (1)...(19): siRNA sense strand
gcuuaaagagagagagaua

SEQ ID NO: 2395393 - RNA, 19 nt, Homo sapiens
  misc_RNA (1)...(19): siRNA sense strand
aguaaauguuccagggcaa

SEQ ID NO: 2395394 - RNA, 19 nt, Homo sapiens
  misc_RNA (1)...(19): siRNA sense strand
cauaguugcuacagggaaa

SEQ ID NO: 2395395 - RNA, 19 nt, Homo sapiens
  misc_RNA (1)...(19): siRNA sense strand
cugaacaaguacagauaaa

SEQ ID NO: 2395396 - RNA, 19 nt, Homo sapiens
  misc_RNA (1)...(19): siRNA sense strand
guggaaagucaguggcaaa

SEQ ID NO: 2395397 - RNA, 19 nt, Homo sapiens
  misc_RNA (1)...(19): siRNA sense strand
caaaggaagcaguaggaaa

SEQ ID NO: 2395398 - RNA, 19 nt, Homo sapiens
  misc_RNA (1)...(19): siRNA sense strand
ugacauagaacuaggaaga

SEQ ID NO: 2395399 - RNA, 19 nt, Homo sapiens
  misc_RNA (1)...(19): siRNA sense strand
cuggaaagugagaaagaaa

SEQ ID NO: 2395400 - RNA, 19 nt, Homo sapiens
  misc_RNA (1)...(19): siRNA sense strand
gguaggaauuucaggaaca

SEQ ID NO: 2395401 - RNA, 19 nt, Homo sapiens
  misc_RNA (1)...(19): siRNA sense strand
gggaaacuguagaaaggaa

SEQ ID NO: 2395402 - RNA, 19 nt, Homo sapiens
  misc_RNA (1)...(19): siRNA sense strand
auaaagaagacaagagaga

SEQ ID NO: 2395403 - RNA, 19 nt, Homo sapiens
  misc_RNA (1)...(19): siRNA sense strand
gauaagaaaccgugagacu

SEQ ID NO: 2395404 - RNA, 19 nt, Homo sapiens
  misc_RNA (1)...(19): siRNA sense strand
aaauagaggaugaggacuu

SEQ ID NO: 2395405 - RNA, 19 nt, Homo sapiens
  misc_RNA (1)...(19): siRNA sense strand
cccaaagaugagagaauua

SEQ ID NO: 2395406 - RNA, 19 nt, Homo sapiens
  misc_RNA (1)...(19): siRNA sense strand
aggaugugguugaugguaa

SEQ ID NO: 2395407 - RNA, 19 nt, Homo sapiens
  misc_RNA (1)...(19): siRNA sense strand
cuucaaacccagcagaaua

SEQ ID NO: 2395408 - RNA, 19 nt, Homo sapiens
  misc_RNA (1)...(19): siRNA sense strand
ccugauaacccaaguggaa

SEQ ID NO: 2395409 - RNA, 19 nt, Homo sapiens
  misc_RNA (1)...(19): siRNA sense strand
gcagacaggagguggauau

SEQ ID NO: 2395410 - RNA, 19 nt, Homo sapiens
  misc_RNA (1)...(19): siRNA sense strand
aggaagaagcagagauguu

SEQ ID NO: 2395411 - RNA, 19 nt, Homo sapiens
  misc_RNA (1)...(19): siRNA sense strand
cugagaaaccugauggaau

SEQ ID NO: 2395412 - RNA, 19 nt, Homo sapiens
  misc_RNA (1)...(19): siRNA sense strand
ccgaaagaguguugaaaug

SEQ ID NO: 2395413 - RNA, 19 nt, Homo sapiens
  misc_RNA (1)...(19): siRNA sense strand
aagaagaagcagaaaugaa

SEQ ID NO: 2395414 - RNA, 19 nt, Homo sapiens
  misc_RNA (1)...(19): siRNA sense strand
aggcaaacacaaagacaau

SEQ ID NO: 2395415 - RNA, 19 nt, Homo sapiens
  misc_RNA (1)...(19): siRNA sense strand
gcaucuaucccgagaguca

SEQ ID NO: 2395416 - RNA, 19 nt, Homo sapiens
  misc_RNA (1)...(19): siRNA sense strand
aagcuagacuaaaggagaa

SEQ ID NO: 2395417 - RNA, 19 nt, Homo sapiens
  misc_RNA (1)...(19): siRNA sense strand
cuguagaaaggaagagauu

SEQ ID NO: 2395418 - RNA, 19 nt, Homo sapiens
  misc_RNA (1)...(19): siRNA sense strand
ccaugaaagugauuccaaa

SEQ ID NO: 2395419 - RNA, 19 nt, Homo sapiens
  misc_RNA (1)...(19): siRNA sense strand
agaaagagccacuggaguu

SEQ ID NO: 2395420 - RNA, 19 nt, Homo sapiens
  misc_RNA (1)...(19): siRNA sense strand
aaaggaagcaguaggaaau

SEQ ID NO: 2395421 - RNA, 19 nt, Homo sapiens
  misc_RNA (1)...(19): siRNA sense strand
uuccaaagcuguugcuaaa

SEQ ID NO: 2395422 - RNA, 19 nt, Homo sapiens
  misc_RNA (1)...(19): siRNA sense strand
ggucaauuaaagauagcaa

SEQ ID NO: 2395423 - RNA, 19 nt, Homo sapiens
  misc_RNA (1)...(19): siRNA sense strand
ggaaauggaagaagaagca

SEQ ID NO: 2395424 - RNA, 19 nt, Homo sapiens
  misc_RNA (1)...(19): siRNA sense strand
aaauaaaggaguucccaaa

SEQ ID NO: 2395425 - RNA, 19 nt, Homo sapiens
  misc_RNA (1)...(19): siRNA sense strand
cagcaaagauucaaggaag

SEQ ID NO: 2395426 - RNA, 19 nt, Homo sapiens
  misc_RNA (1)...(19): siRNA sense strand
agcaaagauucaaggaaga

SEQ ID NO: 2395427 - RNA, 19 nt, Homo sapiens
  misc_RNA (1)...(19): siRNA sense strand
guagaaaggaagagauuuu

SEQ ID NO: 2395428 - RNA, 19 nt, Homo sapiens
  misc_RNA (1)...(19): siRNA sense strand
cccgagagucagaaggaua

SEQ ID NO: 2395429 - RNA, 19 nt, Homo sapiens
  misc_RNA (1)...(19): siRNA sense strand
agguggagcuucaaagauu

SEQ ID NO: 2395430 - RNA, 19 nt, Homo sapiens
  misc_RNA (1)...(19): siRNA sense strand
aggaagaggagcauuuaaa

SEQ ID NO: 2395431 - RNA, 19 nt, Homo sapiens
  misc_RNA (1)...(19): siRNA sense strand
caauaaagaagacaagaga

SEQ ID NO: 2395432 - RNA, 19 nt, Homo sapiens
  misc_RNA (1)...(19): siRNA sense strand
caaagaaaucauugaagga

SEQ ID NO: 2395433 - RNA, 19 nt, Homo sapiens
  misc_RNA (1)...(19): siRNA sense strand
uggaagaagaagcagaaau

SEQ ID NO: 2395434 - RNA, 19 nt, Homo sapiens
  misc_RNA (1)...(19): siRNA sense strand
cgucaaaacaaaucugaaa

SEQ ID NO: 2395435 - RNA, 19 nt, Homo sapiens
  misc_RNA (1)...(19): siRNA sense strand
gcuucaaagauuacgagaa

SEQ ID NO: 2395436 - RNA, 19 nt, Homo sapiens
  misc_RNA (1)...(19): siRNA sense strand
cgaccaagaucuuucaaaa

SEQ ID NO: 2395437 - RNA, 19 nt, Homo sapiens
  misc_RNA (1)...(19): siRNA sense strand
ggaauguguaugcuggaaa

SEQ ID NO: 2395438 - RNA, 19 nt, Homo sapiens
  misc_RNA (1)...(19): siRNA sense strand
cacuguguguggagaguaa

SEQ ID NO: 2395439 - RNA, 19 nt, Homo sapiens
  misc_RNA (1)...(19): siRNA sense strand
guggacaagaaguuaaaua

SEQ ID NO: 2395440 - RNA, 19 nt, Homo sapiens
  misc_RNA (1)...(19): siRNA sense strand
gcugcaggaccgaaaguua

SEQ ID NO: 2395441 - RNA, 19 nt, Homo sapiens
  misc_RNA (1)...(19): siRNA sense strand
aggaaguagcauaugaaau

SEQ ID NO: 2395442 - RNA, 19 nt, Homo sapiens
  misc_RNA (1)...(19): siRNA sense strand
ucagaaggucccacagaua

SEQ ID NO: 2395443 - RNA, 19 nt, Homo sapiens
  misc_RNA (1)...(19): siRNA sense strand
guggcaacuacgaaggaaa

SEQ ID NO: 2395444 - RNA, 19 nt, Homo sapiens
  misc_RNA (1)...(19): siRNA sense strand
uugaauagauguaaagcga

SEQ ID NO: 2395445 - RNA, 19 nt, Homo sapiens
  misc_RNA (1)...(19): siRNA sense strand
gaauagauguaaagcgaug

SEQ ID NO: 2395446 - RNA, 19 nt, Homo sapiens
  misc_RNA (1)...(19): siRNA sense strand
ccacgaagaacaagcuuau

SEQ ID NO: 2395447 - RNA, 19 nt, Homo sapiens
  misc_RNA (1)...(19): siRNA sense strand
auugaaaggcaaacacaaa

SEQ ID NO: 2395448 - RNA, 19 nt, Homo sapiens
  misc_RNA (1)...(19): siRNA sense strand
caacuuagaaacagauaca

SEQ ID NO: 2395449 - RNA, 19 nt, Homo sapiens
  misc_RNA (1)...(19): siRNA sense strand
acauucaggaggugguaaa

SEQ ID NO: 2395450 - RNA, 19 nt, Homo sapiens
  misc_RNA (1)...(19): siRNA sense strand
aauuaaggcugcaaugaau

SEQ ID NO: 2395451 - RNA, 19 nt, Homo sapiens
  misc_RNA (1)...(19): siRNA sense strand
ccguagauguuuaugcuuu

SEQ ID NO: 2395452 - RNA, 19 nt, Homo sapiens
  misc_RNA (1)...(19): siRNA sense strand
agaacuaggaagaggagca

SEQ ID NO: 2395453 - RNA, 19 nt, Homo sapiens
  misc_RNA (1)...(19): siRNA sense strand
cugcaggaccgaaaguuaa

SEQ ID NO: 2395454 - RNA, 19 nt, Homo sapiens
  misc_RNA (1)...(19): siRNA sense strand
ggguggaguuagcagaaga

SEQ ID NO: 2395455 - RNA, 19 nt, Homo sapiens
  misc_RNA (1)...(19): siRNA sense strand
ggaaauaucacgggacaca

SEQ ID NO: 2395456 - RNA, 19 nt, Homo sapiens
  misc_RNA (1)...(19): siRNA sense strand
ccuccaaaucagaacacaa

SEQ ID NO: 2395457 - RNA, 19 nt, Homo sapiens
  misc_RNA (1)...(19): siRNA sense strand
acuaggaagaggagcauuu

SEQ ID NO: 2395458 - RNA, 19 nt, Homo sapiens
  misc_RNA (1)...(19): siRNA sense strand
ccuauuaaaccaugcauuu

SEQ ID NO: 2395459 - RNA, 19 nt, Homo sapiens
  misc_RNA (1)...(19): siRNA sense strand
agaaggucccacagauaaa

SEQ ID NO: 2395460 - RNA, 19 nt, Homo sapiens
  misc_RNA (1)...(19): siRNA sense strand
agaaauagaaccugccaca

SEQ ID NO: 2395461 - RNA, 19 nt, Homo sapiens
  misc_RNA (1)...(19): siRNA sense strand
auaaacaagcugagagaaa

SEQ ID NO: 2395462 - RNA, 19 nt, Homo sapiens
  misc_RNA (1)...(19): siRNA sense strand
ugauaaugacugugaguaa

SEQ ID NO: 2395463 - RNA, 19 nt, Homo sapiens
  misc_RNA (1)...(19): siRNA sense strand
cagaaauaccugugaaaca

SEQ ID NO: 2395464 - RNA, 19 nt, Homo sapiens
  misc_RNA (1)...(19): siRNA sense strand
ccacaggaggacagugaaa

SEQ ID NO: 2395465 - RNA, 19 nt, Homo sapiens
  misc_RNA (1)...(19): siRNA sense strand
ucauagacgacaaaggaua

SEQ ID NO: 2395466 - RNA, 19 nt, Homo sapiens
  misc_RNA (1)...(19): siRNA sense strand
acauaaacaagcugagaga

SEQ ID NO: 2395467 - RNA, 19 nt, Homo sapiens
  misc_RNA (1)...(19): siRNA sense strand
aagaaaugucagugcguau

SEQ ID NO: 2395468 - RNA, 19 nt, Homo sapiens
  misc_RNA (1)...(19): siRNA sense strand
cugugaaacaacugaagaa

SEQ ID NO: 2395469 - RNA, 19 nt, Homo sapiens
  misc_RNA (1)...(19): siRNA sense strand
ggaugacacaaauggaaau

SEQ ID NO: 2395470 - RNA, 19 nt, Homo sapiens
  misc_RNA (1)...(19): siRNA sense strand
gcaaauacagacaugguca

SEQ ID NO: 2395471 - RNA, 19 nt, Homo sapiens
  misc_RNA (1)...(19): siRNA sense strand
gauucgaaguacaaacaau

SEQ ID NO: 2395472 - RNA, 19 nt, Homo sapiens
  misc_RNA (1)...(19): siRNA sense strand
ggugcaugguggacaguga

SEQ ID NO: 2395473 - RNA, 19 nt, Homo sapiens
  misc_RNA (1)...(19): siRNA sense strand
agaaaugaaguaauggcua

SEQ ID NO: 2395474 - RNA, 19 nt, Homo sapiens
  misc_RNA (1)...(19): siRNA sense strand
gaaaugaaguaauggcuac

SEQ ID NO: 2395475 - RNA, 19 nt, Homo sapiens
  misc_RNA (1)...(19): siRNA sense strand
uggaugacacaaauggaaa

SEQ ID NO: 2395476 - RNA, 19 nt, Homo sapiens
  misc_RNA (1)...(19): siRNA sense strand
ggaaguacggugugccaga

SEQ ID NO: 2395477 - RNA, 19 nt, Homo sapiens
  misc_RNA (1)...(19): siRNA sense strand
ccacgaagacagaggcauc

SEQ ID NO: 2395478 - RNA, 19 nt, Homo sapiens
  misc_RNA (1)...(19): siRNA sense strand
ggucgaucaggaacagaaa

SEQ ID NO: 2395479 - RNA, 19 nt, Homo sapiens
  misc_RNA (1)...(19): siRNA sense strand
ggaaagacucaccuggaca

SEQ ID NO: 2395480 - RNA, 19 nt, Homo sapiens
  misc_RNA (1)...(19): siRNA sense strand
gugauuaagggcagcauga

SEQ ID NO: 2395481 - RNA, 19 nt, Homo sapiens
  misc_RNA (1)...(19): siRNA sense strand
accagaaauaccugugaaa

SEQ ID NO: 2395482 - RNA, 19 nt, Homo sapiens
  misc_RNA (1)...(19): siRNA sense strand
ucagccagccagagacaaa

SEQ ID NO: 2395483 - RNA, 19 nt, Homo sapiens
  misc_RNA (1)...(19): siRNA sense strand
cuguaaugauucucaccua

SEQ ID NO: 2395484 - RNA, 19 nt, Homo sapiens
  misc_RNA (1)...(19): siRNA sense strand
uuacuuagauguuggagga

SEQ ID NO: 2395485 - RNA, 19 nt, Homo sapiens
  misc_RNA (1)...(19): siRNA sense strand
aggaacagaaagugaucau

SEQ ID NO: 2395486 - RNA, 19 nt, Homo sapiens
  misc_RNA (1)...(19): siRNA sense strand
accuggagccggugacaua

SEQ ID NO: 2395487 - RNA, 19 nt, Homo sapiens
  misc_RNA (1)...(19): siRNA sense strand
cagcugauucgaaguacaa

SEQ ID NO: 2395488 - RNA, 19 nt, Homo sapiens
  misc_RNA (1)...(19): siRNA sense strand
cauagacgacaaaggauau

SEQ ID NO: 2395489 - RNA, 19 nt, Homo sapiens
  misc_RNA (1)...(19): siRNA sense strand
caauaggugaugaggugau

SEQ ID NO: 2395490 - RNA, 19 nt, Homo sapiens
  misc_RNA (1)...(19): siRNA sense strand
ugguggacagugauggaaa

SEQ ID NO: 2395491 - RNA, 19 nt, Homo sapiens
  misc_RNA (1)...(19): siRNA sense strand
ugaugacaugggagcaaua

SEQ ID NO: 2395492 - RNA, 19 nt, Homo sapiens
  misc_RNA (1)...(19): siRNA sense strand
gaaaccaugaugaggacuu

SEQ ID NO: 2395493 - RNA, 19 nt, Homo sapiens
  misc_RNA (1)...(19): siRNA sense strand
agaaagugaucaugguuac

SEQ ID NO: 2395494 - RNA, 19 nt, Homo sapiens
  misc_RNA (1)...(19): siRNA sense strand
ggggauugugggagccaaa

SEQ ID NO: 2395495 - RNA, 19 nt, Homo sapiens
  misc_RNA (1)...(19): siRNA sense strand
gggucgaucaggaacagaa

SEQ ID NO: 2395496 - RNA, 19 nt, Homo sapiens
  misc_RNA (1)...(19): siRNA sense strand
aaacaagcugagagaaacu

SEQ ID NO: 2395497 - RNA, 19 nt, Homo sapiens
  misc_RNA (1)...(19): siRNA sense strand
cuggaaaggaagccuacaa

SEQ ID NO: 2395498 - RNA, 19 nt, Homo sapiens
  misc_RNA (1)...(19): siRNA sense strand
ucuacaaaguucugaugga

SEQ ID NO: 2395499 - RNA, 19 nt, Homo sapiens
  misc_RNA (1)...(19): siRNA sense strand
ccggugacauacacagcua

SEQ ID NO: 2395500 - RNA, 19 nt, Homo sapiens
  misc_RNA (1)...(19): siRNA sense strand
guugaugacaugggagcaa

SEQ ID NO: 2395501 - RNA, 19 nt, Homo sapiens
  misc_RNA (1)...(19): siRNA sense strand
ucugagggaucuagcugaa

SEQ ID NO: 2395502 - RNA, 19 nt, Homo sapiens
  misc_RNA (1)...(19): siRNA sense strand
ugggcagguucuacacaaa

SEQ ID NO: 2395503 - RNA, 19 nt, Homo sapiens
  misc_RNA (1)...(19): siRNA sense strand
ugggagaugguuugauaau

SEQ ID NO: 2395504 - RNA, 19 nt, Homo sapiens
  misc_RNA (1)...(19): siRNA sense strand
cuagaaagucccaccauca

SEQ ID NO: 2395505 - RNA, 19 nt, Homo sapiens
  misc_RNA (1)...(19): siRNA sense strand
auacagacauggucaucau

SEQ ID NO: 2395506 - RNA, 19 nt, Homo sapiens
  misc_RNA (1)...(19): siRNA sense strand
ccaaugcagagaaccgaaa

SEQ ID NO: 2395507 - RNA, 19 nt, Homo sapiens
  misc_RNA (1)...(19): siRNA sense strand
cacaaaguuccaagcaaau

SEQ ID NO: 2395508 - RNA, 19 nt, Homo sapiens
  misc_RNA (1)...(19): siRNA sense strand
ggaagaugguacaagacac

SEQ ID NO: 2395509 - RNA, 19 nt, Homo sapiens
  misc_RNA (1)...(19): siRNA sense strand
acagaggcaucaucagcaa

SEQ ID NO: 2395510 - RNA, 19 nt, Homo sapiens
  misc_RNA (1)...(19): siRNA sense strand
gguuuauagcugcggucau

SEQ ID NO: 2395511 - RNA, 19 nt, Homo sapiens
  misc_RNA (1)...(19): siRNA sense strand
gcccacaggaggacaguga

SEQ ID NO: 2395512 - RNA, 19 nt, Homo sapiens
  misc_RNA (1)...(19): siRNA sense strand
gcugagagaaacuggaaag

SEQ ID NO: 2395513 - RNA, 19 nt, Homo sapiens
  misc_RNA (1)...(19): siRNA sense strand
ugacagagaugaaagggac

SEQ ID NO: 2395514 - RNA, 19 nt, Homo sapiens
  misc_RNA (1)...(19): siRNA sense strand
cagaugaauggaugacaca

SEQ ID NO: 2395515 - RNA, 19 nt, Homo sapiens
  misc_RNA (1)...(19): siRNA sense strand
acucagauacuucuacaaa

SEQ ID NO: 2395516 - RNA, 19 nt, Homo sapiens
  misc_RNA (1)...(19): siRNA sense strand
cgaaguacaaacaauaaca

SEQ ID NO: 2395517 - RNA, 19 nt, Homo sapiens
  misc_RNA (1)...(19): siRNA sense strand
gggaucuagcugaacagaa

SEQ ID NO: 2395518 - RNA, 19 nt, Homo sapiens
  misc_RNA (1)...(19): siRNA sense strand
gaagaugguacaagacacu

SEQ ID NO: 2395519 - RNA, 19 nt, Homo sapiens
  misc_RNA (1)...(19): siRNA sense strand
guacaaagaaugauggcuu

SEQ ID NO: 2395520 - RNA, 19 nt, Homo sapiens
  misc_RNA (1)...(19): siRNA sense strand
ucauaaaugccuuggaaaa

SEQ ID NO: 2395521 - RNA, 19 nt, Homo sapiens
  misc_RNA (1)...(19): siRNA sense strand
cuucagcagggaugagaaa

SEQ ID NO: 2395522 - RNA, 19 nt, Homo sapiens
  misc_RNA (1)...(19): siRNA sense strand
aaggaugaugugaggcaua

SEQ ID NO: 2395523 - RNA, 19 nt, Homo sapiens
  misc_RNA (1)...(19): siRNA sense strand
ggaaagucuaaaagaagua

SEQ ID NO: 2395524 - RNA, 19 nt, Homo sapiens
  misc_RNA (1)...(19): siRNA sense strand
agacacaagaugguggaaa

SEQ ID NO: 2395525 - RNA, 19 nt, Homo sapiens
  misc_RNA (1)...(19): siRNA sense strand
ggucagagccaggagccua

SEQ ID NO: 2395526 - RNA, 19 nt, Homo sapiens
  misc_RNA (1)...(19): siRNA sense strand
augagaaaguccuugguca

SEQ ID NO: 2395527 - RNA, 19 nt, Homo sapiens
  misc_RNA (1)...(19): siRNA sense strand
aaagaauugccaagugaca

SEQ ID NO: 2395528 - RNA, 19 nt, Homo sapiens
  misc_RNA (1)...(19): siRNA sense strand
ucauaauaaugguggggca

SEQ ID NO: 2395529 - RNA, 19 nt, Homo sapiens
  misc_RNA (1)...(19): siRNA sense strand
auggguacaugguggugaa

SEQ ID NO: 2395530 - RNA, 19 nt, Homo sapiens
  misc_RNA (1)...(19): siRNA sense strand
cagccuugauauugagauc

SEQ ID NO: 2395531 - RNA, 19 nt, Homo sapiens
  misc_RNA (1)...(19): siRNA sense strand
ccaaagaccuaaugcgcuu

SEQ ID NO: 2395532 - RNA, 19 nt, Homo sapiens
  misc_RNA (1)...(19): siRNA sense strand
aagcaaaauuguagcagaa

SEQ ID NO: 2395533 - RNA, 19 nt, Homo sapiens
  misc_RNA (1)...(19): siRNA sense strand
gagaaauggucuuggagcu

SEQ ID NO: 2395534 - RNA, 19 nt, Homo sapiens
  misc_RNA (1)...(19): siRNA sense strand
gaaaagaagaacaagggua

SEQ ID NO: 2395535 - RNA, 19 nt, Homo sapiens
  misc_RNA (1)...(19): siRNA sense strand
gggaggaggaaguggagga

SEQ ID NO: 2395536 - RNA, 19 nt, Homo sapiens
  misc_RNA (1)...(19): siRNA sense strand
ugaaagaucagaauggcaa

SEQ ID NO: 2395537 - RNA, 19 nt, Homo sapiens
  misc_RNA (1)...(19): siRNA sense strand
ccuuauacaccaugaugaa

SEQ ID NO: 2395538 - RNA, 19 nt, Homo sapiens
  misc_RNA (1)...(19): siRNA sense strand
cguuuaagggacagguauu

SEQ ID NO: 2395539 - RNA, 19 nt, Homo sapiens
  misc_RNA (1)...(19): siRNA sense strand
agggaagagcgaugggaga

SEQ ID NO: 2395540 - RNA, 19 nt, Homo sapiens
  misc_RNA (1)...(19): siRNA sense strand
auuugaaggaggaggguga

SEQ ID NO: 2395541 - RNA, 19 nt, Homo sapiens
  misc_RNA (1)...(19): siRNA sense strand
guaaguacaccuauggcaa

SEQ ID NO: 2395542 - RNA, 19 nt, Homo sapiens
  misc_RNA (1)...(19): siRNA sense strand
agaaguacuacaugaagaa

SEQ ID NO: 2395543 - RNA, 19 nt, Homo sapiens
  misc_RNA (1)...(19): siRNA sense strand
gaguauguguugagcucau

SEQ ID NO: 2395544 - RNA, 19 nt, Homo sapiens
  misc_RNA (1)...(19): siRNA sense strand
gggauaacauucaugcaga

SEQ ID NO: 2395545 - RNA, 19 nt, Homo sapiens
  misc_RNA (1)...(19): siRNA sense strand
ggaugcagacagugaugaa

SEQ ID NO: 2395546 - RNA, 19 nt, Homo sapiens
  misc_RNA (1)...(19): siRNA sense strand
gugccaagccuguggagga

SEQ ID NO: 2395547 - RNA, 19 nt, Homo sapiens
  misc_RNA (1)...(19): siRNA sense strand
gggacagguauuugccuua

SEQ ID NO: 2395548 - RNA, 19 nt, Homo sapiens
  misc_RNA (1)...(19): siRNA sense strand
gcaaaauuguagcagaaau

SEQ ID NO: 2395549 - RNA, 19 nt, Homo sapiens
  misc_RNA (1)...(19): siRNA sense strand
ugguggauguguuugguaa

SEQ ID NO: 2395550 - RNA, 19 nt, Homo sapiens
  misc_RNA (1)...(19): siRNA sense strand
ucuaagaaaaggaggauuu

SEQ ID NO: 2395551 - RNA, 19 nt, Homo sapiens
  misc_RNA (1)...(19): siRNA sense strand
agggugaugugauggacaa

SEQ ID NO: 2395552 - RNA, 19 nt, Homo sapiens
  misc_RNA (1)...(19): siRNA sense strand
gccaaguaccgcagugcaa

SEQ ID NO: 2395553 - RNA, 19 nt, Homo sapiens
  misc_RNA (1)...(19): siRNA sense strand
agcagaaauccgaggcaau

SEQ ID NO: 2395554 - RNA, 19 nt, Homo sapiens
  misc_RNA (1)...(19): siRNA sense strand
gcaagcacauucuggccaa

SEQ ID NO: 2395555 - RNA, 19 nt, Homo sapiens
  misc_RNA (1)...(19): siRNA sense strand
ccuuggaggguuuggaaca

SEQ ID NO: 2395556 - RNA, 19 nt, Homo sapiens
  misc_RNA (1)...(19): siRNA sense strand
agauggaccaaaaggaaua

SEQ ID NO: 2395557 - RNA, 19 nt, Homo sapiens
  misc_RNA (1)...(19): siRNA sense strand
caaucauggugcagagaag

SEQ ID NO: 2395558 - RNA, 19 nt, Homo sapiens
  misc_RNA (1)...(19): siRNA sense strand
ugucuugaagugugugaaa

SEQ ID NO: 2395559 - RNA, 19 nt, Homo sapiens
  misc_RNA (1)...(19): siRNA sense strand
ugaaugcaggcgcgagaaa

SEQ ID NO: 2395560 - RNA, 19 nt, Homo sapiens
  misc_RNA (1)...(19): siRNA sense strand
uggagaaguacuacaugaa

SEQ ID NO: 2395561 - RNA, 19 nt, Homo sapiens
  misc_RNA (1)...(19): siRNA sense strand
aaacagaugaauccagcaa

SEQ ID NO: 2395562 - RNA, 19 nt, Homo sapiens
  misc_RNA (1)...(19): siRNA sense strand
caccaguauuauggaguua

SEQ ID NO: 2395563 - RNA, 19 nt, Homo sapiens
  misc_RNA (1)...(19): siRNA sense strand
gcgggagauugcuggacau

SEQ ID NO: 2395564 - RNA, 19 nt, Homo sapiens
  misc_RNA (1)...(19): siRNA sense strand
cuggacauauaauggaauu

SEQ ID NO: 2395565 - RNA, 19 nt, Homo sapiens
  misc_RNA (1)...(19): siRNA sense strand
guuguggagaaguguguua

SEQ ID NO: 2395566 - RNA, 19 nt, Homo sapiens
  misc_RNA (1)...(19): siRNA sense strand
acaccaugaugaaggacca

SEQ ID NO: 2395567 - RNA, 19 nt, Homo sapiens
  misc_RNA (1)...(19): siRNA sense strand
cuggagaaguacuacauga

SEQ ID NO: 2395568 - RNA, 19 nt, Homo sapiens
  misc_RNA (1)...(19): siRNA sense strand
agaaugggauugaugcaga

SEQ ID NO: 2395569 - RNA, 19 nt, Homo sapiens
  misc_RNA (1)...(19): siRNA sense strand
ccauggaugaacugaauca

SEQ ID NO: 2395570 - RNA, 19 nt, Homo sapiens
  misc_RNA (1)...(19): siRNA sense strand
gcagcaacuaauucagcua

SEQ ID NO: 2395571 - RNA, 19 nt, Homo sapiens
  misc_RNA (1)...(19): siRNA sense strand
gaaccagcagggacagcaa

SEQ ID NO: 2395572 - RNA, 19 nt, Homo sapiens
  misc_RNA (1)...(19): siRNA sense strand
cuuuauaagaggacaucga

SEQ ID NO: 2395573 - RNA, 19 nt, Homo sapiens
  misc_RNA (1)...(19): siRNA sense strand
gcuuaaaccugggaggacu

SEQ ID NO: 2395574 - RNA, 19 nt, Homo sapiens
  misc_RNA (1)...(19): siRNA sense strand
acacagagcagcuuguaca

SEQ ID NO: 2395575 - RNA, 19 nt, Homo sapiens
  misc_RNA (1)...(19): siRNA sense strand
guacaggaucaauauggaa

SEQ ID NO: 2395576 - RNA, 19 nt, Homo sapiens
  misc_RNA (1)...(19): siRNA sense strand
agugaaugcaggcgcgaga

SEQ ID NO: 2395577 - RNA, 19 nt, Homo sapiens
  misc_RNA (1)...(19): siRNA sense strand
guuugauggagauaagcua

SEQ ID NO: 2395578 - RNA, 19 nt, Homo sapiens
  misc_RNA (1)...(19): siRNA sense strand
gcagaaugggauugaugca

SEQ ID NO: 2395579 - RNA, 19 nt, Homo sapiens
  misc_RNA (1)...(19): siRNA sense strand
uggagcagcugguggucuu

SEQ ID NO: 2395580 - RNA, 19 nt, Homo sapiens
  misc_RNA (1)...(19): siRNA sense strand
acuacgugguccagaagau

SEQ ID NO: 2395581 - RNA, 19 nt, Homo sapiens
  misc_RNA (1)...(19): siRNA sense strand
cccaggaucuauaggaguu

SEQ ID NO: 2395582 - RNA, 19 nt, Homo sapiens
  misc_RNA (1)...(19): siRNA sense strand
cugccguguuauccagaaa

SEQ ID NO: 2395583 - RNA, 19 nt, Homo sapiens
  misc_RNA (1)...(19): siRNA sense strand
gugaaagaucagaauggca

SEQ ID NO: 2395584 - RNA, 19 nt, Homo sapiens
  misc_RNA (1)...(19): siRNA sense strand
uagcagaaauccgaggcaa

SEQ ID NO: 2395585 - RNA, 19 nt, Homo sapiens
  misc_RNA (1)...(19): siRNA sense strand
augugaacagugaggucaa

SEQ ID NO: 2395586 - RNA, 19 nt, Homo sapiens
  misc_RNA (1)...(19): siRNA sense strand
ggauccucuucaagcuuaa

SEQ ID NO: 2395587 - RNA, 19 nt, Homo sapiens
  misc_RNA (1)...(19): siRNA sense strand
agaaugagaugguucggga

SEQ ID NO: 2395588 - RNA, 19 nt, Homo sapiens
  misc_RNA (1)...(19): siRNA sense strand
gaaugagaugguucgggaa

SEQ ID NO: 2395589 - RNA, 19 nt, Homo sapiens
  misc_RNA (1)...(19): siRNA sense strand
gaaagaucagaauggcaau

SEQ ID NO: 2395590 - RNA, 19 nt, Homo sapiens
  misc_RNA (1)...(19): siRNA sense strand
ccaugaugaaggaccagua

SEQ ID NO: 2395591 - RNA, 19 nt, Homo sapiens
  misc_RNA (1)...(19): siRNA sense strand
uagcaaacaucgauggccu

SEQ ID NO: 2395592 - RNA, 19 nt, Homo sapiens
  misc_RNA (1)...(19): siRNA sense strand
acaaaggugaaaagaagaa

SEQ ID NO: 2395593 - RNA, 19 nt, Homo sapiens
  misc_RNA (1)...(19): siRNA sense strand
uggaacaacaaauggacca

SEQ ID NO: 2395594 - RNA, 19 nt, Homo sapiens
  misc_RNA (1)...(19): siRNA sense strand
gguggauguguuugguaau

SEQ ID NO: 2395595 - RNA, 19 nt, Homo sapiens
  misc_RNA (1)...(19): siRNA sense strand
gcguuuaagggacagguau

SEQ ID NO: 2395596 - RNA, 19 nt, Homo sapiens
  misc_RNA (1)...(19): siRNA sense strand
ccugaggauaaaagcaaaa

SEQ ID NO: 2395597 - RNA, 19 nt, Homo sapiens
  misc_RNA (1)...(19): siRNA sense strand
ggccaaggcuacugggaaa

SEQ ID NO: 2395598 - RNA, 19 nt, Homo sapiens
  misc_RNA (1)...(19): siRNA sense strand
aggagaagauggagaugaa

SEQ ID NO: 2395599 - RNA, 19 nt, Homo sapiens
  misc_RNA (1)...(19): siRNA sense strand
gcuuaaaggaggaugaaga

SEQ ID NO: 2395600 - RNA, 19 nt, Homo sapiens
  misc_RNA (1)...(19): siRNA sense strand
guugaaagaacuagaagaa

SEQ ID NO: 2395601 - RNA, 19 nt, Homo sapiens
  misc_RNA (1)...(19): siRNA sense strand
ggugauaagaauuggaaga

SEQ ID NO: 2395602 - RNA, 19 nt, Homo sapiens
  misc_RNA (1)...(19): siRNA sense strand
aggaauggcuggaaggaga

SEQ ID NO: 2395603 - RNA, 19 nt, Homo sapiens
  misc_RNA (1)...(19): siRNA sense strand
gaaauggagaugugcgaaa

SEQ ID NO: 2395604 - RNA, 19 nt, Homo sapiens
  misc_RNA (1)...(19): siRNA sense strand
guauagagacacugaggaa

SEQ ID NO: 2395605 - RNA, 19 nt, Homo sapiens
  misc_RNA (1)...(19): siRNA sense strand
ggacuggagacuaaagaaa

SEQ ID NO: 2395606 - RNA, 19 nt, Homo sapiens
  misc_RNA (1)...(19): siRNA sense strand
caaucaaccuaaagcuaaa

SEQ ID NO: 2395607 - RNA, 19 nt, Homo sapiens
  misc_RNA (1)...(19): siRNA sense strand
acugauacaugguaagaaa

SEQ ID NO: 2395608 - RNA, 19 nt, Homo sapiens
  misc_RNA (1)...(19): siRNA sense strand
ggaugaauacauugagcaa

SEQ ID NO: 2395609 - RNA, 19 nt, Homo sapiens
  misc_RNA (1)...(19): siRNA sense strand
aggaaagccuuaagugaau

SEQ ID NO: 2395610 - RNA, 19 nt, Homo sapiens
  misc_RNA (1)...(19): siRNA sense strand
caauaaaacagguggaaga

SEQ ID NO: 2395611 - RNA, 19 nt, Homo sapiens
  misc_RNA (1)...(19): siRNA sense strand
augcagaauuugagaagau

SEQ ID NO: 2395612 - RNA, 19 nt, Homo sapiens
  misc_RNA (1)...(19): siRNA sense strand
caucaaaggccaaagugaa

SEQ ID NO: 2395613 - RNA, 19 nt, Homo sapiens
  misc_RNA (1)...(19): siRNA sense strand
gcuaagugaagaagaauau

SEQ ID NO: 2395614 - RNA, 19 nt, Homo sapiens
  misc_RNA (1)...(19): siRNA sense strand
caaccaucuuggagaaauu

SEQ ID NO: 2395615 - RNA, 19 nt, Homo sapiens
  misc_RNA (1)...(19): siRNA sense strand
acuggagacuaaagaaaua

SEQ ID NO: 2395616 - RNA, 19 nt, Homo sapiens
  misc_RNA (1)...(19): siRNA sense strand
gauagaaguaugcgaagaa

SEQ ID NO: 2395617 - RNA, 19 nt, Homo sapiens
  misc_RNA (1)...(19): siRNA sense strand
caagauuggagaugugaaa

SEQ ID NO: 2395618 - RNA, 19 nt, Homo sapiens
  misc_RNA (1)...(19): siRNA sense strand
ggaaaagagcaaaggauga

SEQ ID NO: 2395619 - RNA, 19 nt, Homo sapiens
  misc_RNA (1)...(19): siRNA sense strand
uguucaaacugauuggaaa

SEQ ID NO: 2395620 - RNA, 19 nt, Homo sapiens
  misc_RNA (1)...(19): siRNA sense strand
aagcauagcacaaguggua

SEQ ID NO: 2395621 - RNA, 19 nt, Homo sapiens
  misc_RNA (1)...(19): siRNA sense strand
guucaaacugauuggaaau

SEQ ID NO: 2395622 - RNA, 19 nt, Homo sapiens
  misc_RNA (1)...(19): siRNA sense strand
uggagaaauucaaagagaa

SEQ ID NO: 2395623 - RNA, 19 nt, Homo sapiens
  misc_RNA (1)...(19): siRNA sense strand
ugaugaaagcacuagaaua

SEQ ID NO: 2395624 - RNA, 19 nt, Homo sapiens
  misc_RNA (1)...(19): siRNA sense strand
aagaaauaguggagccuga

SEQ ID NO: 2395625 - RNA, 19 nt, Homo sapiens
  misc_RNA (1)...(19): siRNA sense strand
ugguacagaugaaggagaa

SEQ ID NO: 2395626 - RNA, 19 nt, Homo sapiens
  misc_RNA (1)...(19): siRNA sense strand
gagcagagugccuggaaga

SEQ ID NO: 2395627 - RNA, 19 nt, Homo sapiens
  misc_RNA (1)...(19): siRNA sense strand
gagaagaugcagggacaaa

SEQ ID NO: 2395628 - RNA, 19 nt, Homo sapiens
  misc_RNA (1)...(19): siRNA sense strand
uuaucaaaguguugccaaa

SEQ ID NO: 2395629 - RNA, 19 nt, Homo sapiens
  misc_RNA (1)...(19): siRNA sense strand
gcaaaggaugaaagaugaa

SEQ ID NO: 2395630 - RNA, 19 nt, Homo sapiens
  misc_RNA (1)...(19): siRNA sense strand
aauaaagagcagucgcaaa

SEQ ID NO: 2395631 - RNA, 19 nt, Homo sapiens
  misc_RNA (1)...(19): siRNA sense strand
aggauuaagcggucagcaa

SEQ ID NO: 2395632 - RNA, 19 nt, Homo sapiens
  misc_RNA (1)...(19): siRNA sense strand
gaauguucuuugaggauga

SEQ ID NO: 2395633 - RNA, 19 nt, Homo sapiens
  misc_RNA (1)...(19): siRNA sense strand
uugagaagaugcagggaca

SEQ ID NO: 2395634 - RNA, 19 nt, Homo sapiens
  misc_RNA (1)...(19): siRNA sense strand
cuugcuaagugaagaagaa

SEQ ID NO: 2395635 - RNA, 19 nt, Homo sapiens
  misc_RNA (1)...(19): siRNA sense strand
augacaaaauugaggcaaa

SEQ ID NO: 2395636 - RNA, 19 nt, Homo sapiens
  misc_RNA (1)...(19): siRNA sense strand
cugaacagguugugucaau

SEQ ID NO: 2395637 - RNA, 19 nt, Homo sapiens
  misc_RNA (1)...(19): siRNA sense strand
ugaaggagguggugaugau

SEQ ID NO: 2395638 - RNA, 19 nt, Homo sapiens
  misc_RNA (1)...(19): siRNA sense strand
ggauuaagcggucagcaaa

SEQ ID NO: 2395639 - RNA, 19 nt, Homo sapiens
  misc_RNA (1)...(19): siRNA sense strand
ccaaaaucaucuugcuuaa

SEQ ID NO: 2395640 - RNA, 19 nt, Homo sapiens
  misc_RNA (1)...(19): siRNA sense strand
uagagaaagccaaaguuaa

SEQ ID NO: 2395641 - RNA, 19 nt, Homo sapiens
  misc_RNA (1)...(19): siRNA sense strand
uaaaggaggaugaagacaa

SEQ ID NO: 2395642 - RNA, 19 nt, Homo sapiens
  misc_RNA (1)...(19): siRNA sense strand
cauaggagaccgugacaau

SEQ ID NO: 2395643 - RNA, 19 nt, Homo sapiens
  misc_RNA (1)...(19): siRNA sense strand
gguacaguccgaugugaaa

SEQ ID NO: 2395644 - RNA, 19 nt, Homo sapiens
  misc_RNA (1)...(19): siRNA sense strand
aggccaaagugaaugauuu

SEQ ID NO: 2395645 - RNA, 19 nt, Homo sapiens
  misc_RNA (1)...(19): siRNA sense strand
gagagaaggcuguucgaga

SEQ ID NO: 2395646 - RNA, 19 nt, Homo sapiens
  misc_RNA (1)...(19): siRNA sense strand
acaagaacuagaagcuaaa

SEQ ID NO: 2395647 - RNA, 19 nt, Homo sapiens
  misc_RNA (1)...(19): siRNA sense strand
ccaaagagaaacugaagca

SEQ ID NO: 2395648 - RNA, 19 nt, Homo sapiens
  misc_RNA (1)...(19): siRNA sense strand
uggccuggcuguugggcua

SEQ ID NO: 2395649 - RNA, 19 nt, Homo sapiens
  misc_RNA (1)...(19): siRNA sense strand
ggagaaauucaaagagaag

SEQ ID NO: 2395650 - RNA, 19 nt, Homo sapiens
  misc_RNA (1)...(19): siRNA sense strand
gauaaggacacaaaggaca

SEQ ID NO: 2395651 - RNA, 19 nt, Homo sapiens
  misc_RNA (1)...(19): siRNA sense strand
cuucuaaagaucagguauu

SEQ ID NO: 2395652 - RNA, 19 nt, Homo sapiens
  misc_RNA (1)...(19): siRNA sense strand
auacaagcguccugaugaa

SEQ ID NO: 2395653 - RNA, 19 nt, Homo sapiens
  misc_RNA (1)...(19): siRNA sense strand
gaaagaggccuucggguga

SEQ ID NO: 2395654 - RNA, 19 nt, Homo sapiens
  misc_RNA (1)...(19): siRNA sense strand
ccaaaggaaaugaggcaga

SEQ ID NO: 2395655 - RNA, 19 nt, Homo sapiens
  misc_RNA (1)...(19): siRNA sense strand
cgggaggaguucugggaga

SEQ ID NO: 2395656 - RNA, 19 nt, Homo sapiens
  misc_RNA (1)...(19): siRNA sense strand
gagaacuaucugaagacaa

SEQ ID NO: 2395657 - RNA, 19 nt, Homo sapiens
  misc_RNA (1)...(19): siRNA sense strand
agacaaaccgagagggccu

SEQ ID NO: 2395658 - RNA, 19 nt, Homo sapiens
  misc_RNA (1)...(19): siRNA sense strand
cagaagcaggugcgggaau

SEQ ID NO: 2395659 - RNA, 19 nt, Homo sapiens
  misc_RNA (1)...(19): siRNA sense strand
ccacaagcugcgagagaag

SEQ ID NO: 2395660 - RNA, 19 nt, Homo sapiens
  misc_RNA (1)...(19): siRNA sense strand
gaauggaaggagcagggua

SEQ ID NO: 2395661 - RNA, 19 nt, Homo sapiens
  misc_RNA (1)...(19): siRNA sense strand
acaugaaccgggaggaguu

SEQ ID NO: 2395662 - RNA, 19 nt, Homo sapiens
  misc_RNA (1)...(19): siRNA sense strand
cugccaagaaguacgucaa

SEQ ID NO: 2395663 - RNA, 19 nt, Homo sapiens
  misc_RNA (1)...(19): siRNA sense strand
aguacauucccuugagaca

SEQ ID NO: 2395664 - RNA, 19 nt, Homo sapiens
  misc_RNA (1)...(19): siRNA sense strand
gaucaugggcacaggcauc

SEQ ID NO: 2395665 - RNA, 19 nt, Homo sapiens
  misc_RNA (1)...(19): siRNA sense strand
cgaugcacuccguccgaaa

SEQ ID NO: 2395666 - RNA, 19 nt, Homo sapiens
  misc_RNA (1)...(19): siRNA sense strand
aggacaugcuggugcccau

SEQ ID NO: 2395667 - RNA, 19 nt, Homo sapiens
  misc_RNA (1)...(19): siRNA sense strand
agaaacagauuguccgugu

SEQ ID NO: 2395668 - RNA, 19 nt, Homo sapiens
  misc_RNA (1)...(19): siRNA sense strand
gggaaguacaagaagacac

SEQ ID NO: 2395669 - RNA, 19 nt, Homo sapiens
  misc_RNA (1)...(19): siRNA sense strand
aaguggacaccaagaaaca

SEQ ID NO: 2395670 - RNA, 19 nt, Homo sapiens
  misc_RNA (1)...(19): siRNA sense strand
ccguguugccugagcuuga

SEQ ID NO: 2395671 - RNA, 19 nt, Homo sapiens
  misc_RNA (1)...(19): siRNA sense strand
gguuuaaauuugaggugga

SEQ ID NO: 2395672 - RNA, 19 nt, Homo sapiens
  misc_RNA (1)...(19): siRNA sense strand
gcuauagagcugugauaau

SEQ ID NO: 2395673 - RNA, 19 nt, Homo sapiens
  misc_RNA (1)...(19): siRNA sense strand
ggaacagaggcuugaagaa

SEQ ID NO: 2395674 - RNA, 19 nt, Homo sapiens
  misc_RNA (1)...(19): siRNA sense strand
gcuugaaaguacuugaaau

SEQ ID NO: 2395675 - RNA, 19 nt, Homo sapiens
  misc_RNA (1)...(19): siRNA sense strand
guacuugaaaugagaggaa

SEQ ID NO: 2395676 - RNA, 19 nt, Homo sapiens
  misc_RNA (1)...(19): siRNA sense strand
caugauacuuacagugcaa

SEQ ID NO: 2395677 - RNA, 19 nt, Homo sapiens
  misc_RNA (1)...(19): siRNA sense strand
ugaagagauuauaggauca

SEQ ID NO: 2395678 - RNA, 19 nt, Homo sapiens
  misc_RNA (1)...(19): siRNA sense strand
gcguuggaacagagggaau

SEQ ID NO: 2395679 - RNA, 19 nt, Homo sapiens
  misc_RNA (1)...(19): siRNA sense strand
acacagaugccauggaaga

SEQ ID NO: 2395680 - RNA, 19 nt, Homo sapiens
  misc_RNA (1)...(19): siRNA sense strand
aagcacaggcagaagcaaa

SEQ ID NO: 2395681 - RNA, 19 nt, Homo sapiens
  misc_RNA (1)...(19): siRNA sense strand
acuugaaaugagaggaaau

SEQ ID NO: 2395682 - RNA, 19 nt, Homo sapiens
  misc_RNA (1)...(19): siRNA sense strand
augcaacaguuauuggaaa

SEQ ID NO: 2395683 - RNA, 19 nt, Homo sapiens
  misc_RNA (1)...(19): siRNA sense strand
gggaagugguagugcugga

SEQ ID NO: 2395684 - RNA, 19 nt, Homo sapiens
  misc_RNA (1)...(19): siRNA sense strand
cagaagaagauaaaugaca

SEQ ID NO: 2395685 - RNA, 19 nt, Homo sapiens
  misc_RNA (1)...(19): siRNA sense strand
augccuucguggagguaaa

SEQ ID NO: 2395686 - RNA, 19 nt, Homo sapiens
  misc_RNA (1)...(19): siRNA sense strand
ggcagaaaucagacaagaa

SEQ ID NO: 2395687 - RNA, 19 nt, Homo sapiens
  misc_RNA (1)...(19): siRNA sense strand
ucucauaugcagaagaaga

SEQ ID NO: 2395688 - RNA, 19 nt, Homo sapiens
  misc_RNA (1)...(19): siRNA sense strand
aagcaaguccaguggguga

SEQ ID NO: 2395689 - RNA, 19 nt, Homo sapiens
  misc_RNA (1)...(19): siRNA sense strand
guugaaaagucauugcaaa

SEQ ID NO: 2395690 - RNA, 19 nt, Homo sapiens
  misc_RNA (1)...(19): siRNA sense strand
gccuacacguuguggauuu

SEQ ID NO: 2395691 - RNA, 19 nt, Homo sapiens
  misc_RNA (1)...(19): siRNA sense strand
agaaauuaugcccgguaua

SEQ ID NO: 2395692 - RNA, 19 nt, Homo sapiens
  misc_RNA (1)...(19): siRNA sense strand
ccaacagaugcaacaguua

SEQ ID NO: 2395693 - RNA, 19 nt, Homo sapiens
  misc_RNA (1)...(19): siRNA sense strand
ccagggaagcugaagguga

SEQ ID NO: 2395694 - RNA, 19 nt, Homo sapiens
  misc_RNA (1)...(19): siRNA sense strand
cggcguguacucuggauaa

SEQ ID NO: 2395695 - RNA, 19 nt, Homo sapiens
  misc_RNA (1)...(19): siRNA sense strand
gaagaagauaaaugacaca

SEQ ID NO: 2395696 - RNA, 19 nt, Homo sapiens
  misc_RNA (1)...(19): siRNA sense strand
caucaaaugaggccagaca

SEQ ID NO: 2395697 - RNA, 19 nt, Homo sapiens
  misc_RNA (1)...(19): siRNA sense strand
cucaacagauaaugaagaa

SEQ ID NO: 2395698 - RNA, 19 nt, Homo sapiens
  misc_RNA (1)...(19): siRNA sense strand
guuucgaucuggagggcga

SEQ ID NO: 2395699 - RNA, 19 nt, Homo sapiens
  misc_RNA (1)...(19): siRNA sense strand
aauaauuggaccucugaaa

SEQ ID NO: 2395700 - RNA, 19 nt, Homo sapiens
  misc_RNA (1)...(19): siRNA sense strand
cugaagagauuauaggauc

SEQ ID NO: 2395701 - RNA, 19 nt, Homo sapiens
  misc_RNA (1)...(19): siRNA sense strand
augaagacuuacaagauga

SEQ ID NO: 2395702 - RNA, 19 nt, Homo sapiens
  misc_RNA (1)...(19): siRNA sense strand
ucaaaugaggccagacaga

SEQ ID NO: 2395703 - RNA, 19 nt, Homo sapiens
  misc_RNA (1)...(19): siRNA sense strand
gaaaugcaguuguggggua

SEQ ID NO: 2395704 - RNA, 19 nt, Homo sapiens
  misc_RNA (1)...(19): siRNA sense strand
uggaaaagguugucuuauu

SEQ ID NO: 2395705 - RNA, 19 nt, Homo sapiens
  misc_RNA (1)...(19): siRNA sense strand
cauaugcagaagaagauaa

SEQ ID NO: 2395706 - RNA, 19 nt, Homo sapiens
  misc_RNA (1)...(19): siRNA sense strand
caacagauaaugaagaacu

SEQ ID NO: 2395707 - RNA, 19 nt, Homo sapiens
  misc_RNA (1)...(19): siRNA sense strand
aaauguaaguggugacgca

SEQ ID NO: 2395708 - RNA, 19 nt, Homo sapiens
  misc_RNA (1)...(19): siRNA sense strand
uuaaauuugagguggauga

SEQ ID NO: 2395709 - RNA, 19 nt, Homo sapiens
  misc_RNA (1)...(19): siRNA sense strand
guuaguggugcgagccaua

SEQ ID NO: 2395710 - RNA, 19 nt, Homo sapiens
  misc_RNA (1)...(19): siRNA sense strand
cagaaaucagacaagaaau

SEQ ID NO: 2395711 - RNA, 19 nt, Homo sapiens
  misc_RNA (1)...(19): siRNA sense strand
gaaccuaggcaacgcucaa

SEQ ID NO: 2395712 - RNA, 19 nt, Homo sapiens
  misc_RNA (1)...(19): siRNA sense strand
cuaagaucucaaucagaaa

SEQ ID NO: 2395713 - RNA, 19 nt, Homo sapiens
  misc_RNA (1)...(19): siRNA sense strand
cgauuuaggcagucaucau

SEQ ID NO: 2395714 - RNA, 19 nt, Homo sapiens
  misc_RNA (1)...(19): siRNA sense strand
ggugagcugcagaggaaga

SEQ ID NO: 2395715 - RNA, 19 nt, Homo sapiens
  misc_RNA (1)...(19): siRNA sense strand
ggauaaauuaaguagccca

SEQ ID NO: 2395716 - RNA, 19 nt, Homo sapiens
  misc_RNA (1)...(19): siRNA sense strand
ugguagugcuggaaaagaa

SEQ ID NO: 2395717 - RNA, 19 nt, Homo sapiens
  misc_RNA (1)...(19): siRNA sense strand
ccauaugaugaacugaaua

SEQ ID NO: 2395718 - RNA, 19 nt, Homo sapiens
  misc_RNA (1)...(19): siRNA sense strand
ugcaacaguuauuggaaaa

SEQ ID NO: 2395719 - RNA, 19 nt, Homo sapiens
  misc_RNA (1)...(19): siRNA sense strand
aaaugaggccagacagaga

SEQ ID NO: 2395720 - RNA, 19 nt, Homo sapiens
  misc_RNA (1)...(19): siRNA sense strand
ggguguaguuagugcacgu

SEQ ID NO: 2395721 - RNA, 19 nt, Homo sapiens
  misc_RNA (1)...(19): siRNA sense strand
cguggaaggcuguuuggaa

SEQ ID NO: 2395722 - RNA, 19 nt, Homo sapiens
  misc_RNA (1)...(19): siRNA sense strand
gguauaaauaauuggaccu

SEQ ID NO: 2395723 - RNA, 19 nt, Homo sapiens
  misc_RNA (1)...(19): siRNA sense strand
ggaggaaggaggagucagu

SEQ ID NO: 2395724 - RNA, 19 nt, Homo sapiens
  misc_RNA (1)...(19): siRNA sense strand
augcuauagagcugugaua

SEQ ID NO: 2395725 - RNA, 19 nt, Homo sapiens
  misc_RNA (1)...(19): siRNA sense strand
cauccaaagaaaugaagga

SEQ ID NO: 2395726 - RNA, 19 nt, Homo sapiens
  misc_RNA (1)...(19): siRNA sense strand
ugcuauaacugcaggaaac

SEQ ID NO: 2395727 - RNA, 19 nt, Homo sapiens
  misc_RNA (1)...(19): siRNA sense strand
cagcuaaagccaugacagu

SEQ ID NO: 2395728 - RNA, 19 nt, Homo sapiens
  misc_RNA (1)...(19): siRNA sense strand
ccaaaaugcuauagagcug

SEQ ID NO: 2395729 - RNA, 19 nt, Homo sapiens
  misc_RNA (1)...(19): siRNA sense strand
caaagaaaugaaggagauu

SEQ ID NO: 2395730 - RNA, 19 nt, Homo sapiens
  misc_RNA (1)...(19): siRNA sense strand
uauaacugcaggaaacaaa

SEQ ID NO: 2395731 - RNA, 19 nt, Homo sapiens
  misc_RNA (1)...(19): siRNA sense strand
cugugauaauucauggauu

SEQ ID NO: 2395732 - RNA, 19 nt, Homo sapiens
  misc_RNA (1)...(19): siRNA sense strand
uggaaugggaagugguagu

SEQ ID NO: 2395733 - RNA, 19 nt, Homo sapiens
  misc_RNA (1)...(19): siRNA sense strand
aaggaaaaguacugggaaa

SEQ ID NO: 2395734 - RNA, 19 nt, Homo sapiens
  misc_RNA (1)...(19): siRNA sense strand
aggaagaagaagaagaaga

SEQ ID NO: 2395735 - RNA, 19 nt, Homo sapiens
  misc_RNA (1)...(19): siRNA sense strand
cuggaagauugaacagaaa

SEQ ID NO: 2395736 - RNA, 19 nt, Homo sapiens
  misc_RNA (1)...(19): siRNA sense strand
gugaaaaggaagaagaaga

SEQ ID NO: 2395737 - RNA, 19 nt, Homo sapiens
  misc_RNA (1)...(19): siRNA sense strand
cuucauugccagggagaaa

SEQ ID NO: 2395738 - RNA, 19 nt, Homo sapiens
  misc_RNA (1)...(19): siRNA sense strand
gcagaaagcuggaugggcu

SEQ ID NO: 2395739 - RNA, 19 nt, Homo sapiens
  misc_RNA (1)...(19): siRNA sense strand
gagcaguggaagugugaca

SEQ ID NO: 2395740 - RNA, 19 nt, Homo sapiens
  misc_RNA (1)...(19): siRNA sense strand
uggagaugacaaaggcaaa

SEQ ID NO: 2395741 - RNA, 19 nt, Homo sapiens
  misc_RNA (1)...(19): siRNA sense strand
agaaaagucuguaaggcaa

SEQ ID NO: 2395742 - RNA, 19 nt, Homo sapiens
  misc_RNA (1)...(19): siRNA sense strand
cagaaagcuggaugggcua

SEQ ID NO: 2395743 - RNA, 19 nt, Homo sapiens
  misc_RNA (1)...(19): siRNA sense strand
ggcuuuugcuugugggaaa

SEQ ID NO: 2395744 - RNA, 19 nt, Homo sapiens
  misc_RNA (1)...(19): siRNA sense strand
aguacaacuuugaggggaa

SEQ ID NO: 2395745 - RNA, 19 nt, Homo sapiens
  misc_RNA (1)...(19): siRNA sense strand
gacacaggucagaaagaaa

SEQ ID NO: 2395746 - RNA, 19 nt, Homo sapiens
  misc_RNA (1)...(19): siRNA sense strand
cugaggaccuggaggacga

SEQ ID NO: 2395747 - RNA, 19 nt, Homo sapiens
  misc_RNA (1)...(19): siRNA sense strand
ggggacuacuggaagaaaa

SEQ ID NO: 2395748 - RNA, 19 nt, Homo sapiens
  misc_RNA (1)...(19): siRNA sense strand
acaaagauccagaaggguu

SEQ ID NO: 2395749 - RNA, 19 nt, Homo sapiens
  misc_RNA (1)...(19): siRNA sense strand
ggaacacaaccaaggaaaa

SEQ ID NO: 2395750 - RNA, 19 nt, Homo sapiens
  misc_RNA (1)...(19): siRNA sense strand
ugaaaaggaagaagaagaa

SEQ ID NO: 2395751 - RNA, 19 nt, Homo sapiens
  misc_RNA (1)...(19): siRNA sense strand
cggaaggcgagcaguggaa

SEQ ID NO: 2395752 - RNA, 19 nt, Homo sapiens
  misc_RNA (1)...(19): siRNA sense strand
uggaacacaaccaaggaaa

SEQ ID NO: 2395753 - RNA, 19 nt, Homo sapiens
  misc_RNA (1)...(19): siRNA sense strand
aagcuuggcauguggaaau

SEQ ID NO: 2395754 - RNA, 19 nt, Homo sapiens
  misc_RNA (1)...(19): siRNA sense strand
gugcacagaaaaugaaaua

SEQ ID NO: 2395755 - RNA, 19 nt, Homo sapiens
  misc_RNA (1)...(19): siRNA sense strand
ugacaaagacguucagcca

SEQ ID NO: 2395756 - RNA, 19 nt, Homo sapiens
  misc_RNA (1)...(19): siRNA sense strand
cuguaagcaaagugaucua

SEQ ID NO: 2395757 - RNA, 19 nt, Homo sapiens
  misc_RNA (1)...(19): siRNA sense strand
gagccaaggagcaggagca

SEQ ID NO: 2395758 - RNA, 19 nt, Homo sapiens
  misc_RNA (1)...(19): siRNA sense strand
accaaauagcacacaguua

SEQ ID NO: 2395759 - RNA, 19 nt, Homo sapiens
  misc_RNA (1)...(19): siRNA sense strand
agggagaaauaaacagcuu

SEQ ID NO: 2395760 - RNA, 19 nt, Homo sapiens
  misc_RNA (1)...(19): siRNA sense strand
cuaucaaagugaaaaggaa

SEQ ID NO: 2395761 - RNA, 19 nt, Homo sapiens
  misc_RNA (1)...(19): siRNA sense strand
aaggcaaauuggaacacaa

SEQ ID NO: 2395762 - RNA, 19 nt, Homo sapiens
  misc_RNA (1)...(19): siRNA sense strand
gcaaauuggaacacaacca

SEQ ID NO: 2395763 - RNA, 19 nt, Homo sapiens
  misc_RNA (1)...(19): siRNA sense strand
uugaaaggagauaggaaca

SEQ ID NO: 2395764 - RNA, 19 nt, Homo sapiens
  misc_RNA (1)...(19): siRNA sense strand
ggagaugucuggaugcuca

SEQ ID NO: 2395765 - RNA, 19 nt, Homo sapiens
  misc_RNA (1)...(19): siRNA sense strand
gcucagaggacuuugacca

SEQ ID NO: 2395766 - RNA, 19 nt, Homo sapiens
  misc_RNA (1)...(19): siRNA sense strand
gaucagacauugacgucca

SEQ ID NO: 2395767 - RNA, 19 nt, Homo sapiens
  misc_RNA (1)...(19): siRNA sense strand
gggaagacauccaacccau

SEQ ID NO: 2395768 - RNA, 19 nt, Homo sapiens
  misc_RNA (1)...(19): siRNA sense strand
ccaagaagccccaaggaga

SEQ ID NO: 2395769 - RNA, 19 nt, Homo sapiens
  misc_RNA (1)...(19): siRNA sense strand
cgacaaagauccagaaggg

SEQ ID NO: 2395770 - RNA, 19 nt, Homo sapiens
  misc_RNA (1)...(19): siRNA sense strand
gaagaagacagaaggugga

SEQ ID NO: 2395771 - RNA, 19 nt, Homo sapiens
  misc_RNA (1)...(19): siRNA sense strand
cuggagaugacaaaggcaa

SEQ ID NO: 2395772 - RNA, 19 nt, Homo sapiens
  misc_RNA (1)...(19): siRNA sense strand
aaauaaacagcuucggaga

SEQ ID NO: 2395773 - RNA, 19 nt, Homo sapiens
  misc_RNA (1)...(19): siRNA sense strand
ugucacugguauucacaaa

SEQ ID NO: 2395774 - RNA, 19 nt, Homo sapiens
  misc_RNA (1)...(19): siRNA sense strand
gaaaagucuguaaggcaaa

SEQ ID NO: 2395775 - RNA, 19 nt, Homo sapiens
  misc_RNA (1)...(19): siRNA sense strand
ucuugaaaggagauaggaa

SEQ ID NO: 2395776 - RNA, 19 nt, Homo sapiens
  misc_RNA (1)...(19): siRNA sense strand
acaaagacguucagccacu

SEQ ID NO: 2395777 - RNA, 19 nt, Homo sapiens
  misc_RNA (1)...(19): siRNA sense strand
ucacagagauucaacgcca

SEQ ID NO: 2395778 - RNA, 19 nt, Homo sapiens
  misc_RNA (1)...(19): siRNA sense strand
aagaagaagaagacagaag

SEQ ID NO: 2395779 - RNA, 19 nt, Homo sapiens
  misc_RNA (1)...(19): siRNA sense strand
ggaagaugugggaggcagu

SEQ ID NO: 2395780 - RNA, 19 nt, Homo sapiens
  misc_RNA (1)...(19): siRNA sense strand
acacaggucagaaagaaau

SEQ ID NO: 2395781 - RNA, 19 nt, Homo sapiens
  misc_RNA (1)...(19): siRNA sense strand
ccguagaaaagguggcaga

SEQ ID NO: 2395782 - RNA, 19 nt, Homo sapiens
  misc_RNA (1)...(19): siRNA sense strand
ccuguuacauucagagagu

SEQ ID NO: 2395783 - RNA, 19 nt, Homo sapiens
  misc_RNA (1)...(19): siRNA sense strand
gcagcuuaccugagaggca

SEQ ID NO: 2395784 - RNA, 19 nt, Homo sapiens
  misc_RNA (1)...(19): siRNA sense strand
ccagcgaugaggaggacau

SEQ ID NO: 2395785 - RNA, 19 nt, Homo sapiens
  misc_RNA (1)...(19): siRNA sense strand
uguaaggcaaauuggaaca

SEQ ID NO: 2395786 - RNA, 19 nt, Homo sapiens
  misc_RNA (1)...(19): siRNA sense strand
ccaucagcucagaggacuu

SEQ ID NO: 2395787 - RNA, 19 nt, Homo sapiens
  misc_RNA (1)...(19): siRNA sense strand
ggaagaugacauuagaacu

SEQ ID NO: 2395788 - RNA, 19 nt, Homo sapiens
  misc_RNA (1)...(19): siRNA sense strand
ggauaaugauugagccacc

SEQ ID NO: 2395789 - RNA, 19 nt, Homo sapiens
  misc_RNA (1)...(19): siRNA sense strand
gauuauagccagaaagugc

SEQ ID NO: 2395790 - RNA, 19 nt, Homo sapiens
  misc_RNA (1)...(19): siRNA sense strand
aggaaaaguacugggaaau

SEQ ID NO: 2395791 - RNA, 19 nt, Homo sapiens
  misc_RNA (1)...(19): siRNA sense strand
ggaaaaguacugggaaauu

SEQ ID NO: 2395792 - RNA, 19 nt, Homo sapiens
  misc_RNA (1)...(19): siRNA sense strand
cuggauaaugauugagcca

SEQ ID NO: 2395793 - RNA, 19 nt, Homo sapiens
  misc_RNA (1)...(19): siRNA sense strand
cuuuagaacccgucugcau

SEQ ID NO: 2395794 - RNA, 19 nt, Homo sapiens
  misc_RNA (1)...(19): siRNA sense strand
augaauuccacgucgcuaa

SEQ ID NO: 2395795 - RNA, 19 nt, Homo sapiens
  misc_RNA (1)...(19): siRNA sense strand
gggacuacuggaagaaaau

SEQ ID NO: 2395796 - RNA, 19 nt, Homo sapiens
  misc_RNA (1)...(19): siRNA sense strand
gcugaguuggaaugaauau

SEQ ID NO: 2395797 - RNA, 19 nt, Homo sapiens
  misc_RNA (1)...(19): siRNA sense strand
cugaaaugccacacuguca

SEQ ID NO: 2395798 - RNA, 19 nt, Homo sapiens
  misc_RNA (1)...(19): siRNA sense strand
cgcuaagggaagucucaua

SEQ ID NO: 2395799 - RNA, 19 nt, Homo sapiens
  misc_RNA (1)...(19): siRNA sense strand
gggaagaggaggaggacca

SEQ ID NO: 2395800 - RNA, 19 nt, Homo sapiens
  misc_RNA (1)...(19): siRNA sense strand
aggaggaccacgagggaga

SEQ ID NO: 2395801 - RNA, 19 nt, Homo sapiens
  misc_RNA (1)...(19): siRNA sense strand
ccaucaagcuguaugagga

SEQ ID NO: 2395802 - RNA, 19 nt, Homo sapiens
  misc_RNA (1)...(19): siRNA sense strand
cuggagagaccaagagcuu

SEQ ID NO: 2395803 - RNA, 19 nt, Homo sapiens
  misc_RNA (1)...(19): siRNA sense strand
aguuaauucuggauguaga

SEQ ID NO: 2395804 - RNA, 19 nt, Homo sapiens
  misc_RNA (1)...(19): siRNA sense strand
ucgagaaggaggcaggcaa

SEQ ID NO: 2395805 - RNA, 19 nt, Homo sapiens
  misc_RNA (1)...(19): siRNA sense strand
agaagaagaucaagccugu

SEQ ID NO: 2395806 - RNA, 19 nt, Homo sapiens
  misc_RNA (1)...(19): siRNA sense strand
agaucaagccuguggugga

SEQ ID NO: 2395807 - RNA, 19 nt, Homo sapiens
  misc_RNA (1)...(19): siRNA sense strand
cugcugaagguguggacau

SEQ ID NO: 2395808 - RNA, 19 nt, Homo sapiens
  misc_RNA (1)...(19): siRNA sense strand
ccaacaugguaacuggaga

SEQ ID NO: 2395809 - RNA, 19 nt, Homo sapiens
  misc_RNA (1)...(19): siRNA sense strand
gggcucuggaggaggugaa

SEQ ID NO: 2395810 - RNA, 19 nt, Homo sapiens
  misc_RNA (1)...(19): siRNA sense strand
agcuguaugaggagaacaa

SEQ ID NO: 2395811 - RNA, 19 nt, Homo sapiens
  misc_RNA (1)...(19): siRNA sense strand
gcgugaaaggauaugagau

SEQ ID NO: 2395812 - RNA, 19 nt, Homo sapiens
  misc_RNA (1)...(19): siRNA sense strand
gauggugcgacaagggaau

SEQ ID NO: 2395813 - RNA, 19 nt, Homo sapiens
  misc_RNA (1)...(19): siRNA sense strand
ucaaagacucugugaccca

SEQ ID NO: 2395814 - RNA, 19 nt, Homo sapiens
  misc_RNA (1)...(19): siRNA sense strand
acuacgugcaagaaguuaa

SEQ ID NO: 2395815 - RNA, 19 nt, Homo sapiens
  misc_RNA (1)...(19): siRNA sense strand
uggagaaggcggaggagac

SEQ ID NO: 2395816 - RNA, 19 nt, Homo sapiens
  misc_RNA (1)...(19): siRNA sense strand
auuugaguguucugggauu

SEQ ID NO: 2395817 - RNA, 19 nt, Homo sapiens
  misc_RNA (1)...(19): siRNA sense strand
acaaccagaagaagaucaa

SEQ ID NO: 2395818 - RNA, 19 nt, Homo sapiens
  misc_RNA (1)...(19): siRNA sense strand
ggcucuacaaccagaagaa

SEQ ID NO: 2395819 - RNA, 19 nt, Homo sapiens
  misc_RNA (1)...(19): siRNA sense strand
ucuacaaccagaagaagau

SEQ ID NO: 2395820 - RNA, 19 nt, Homo sapiens
  misc_RNA (1)...(19): siRNA sense strand
gcauaaauacucagaagaa

SEQ ID NO: 2395821 - RNA, 19 nt, Homo sapiens
  misc_RNA (1)...(19): siRNA sense strand
gggcauaaauacucagaag

SEQ ID NO: 2395822 - RNA, 19 nt, Homo sapiens
  misc_RNA (1)...(19): siRNA sense strand
ccucauuggaagagauguu

SEQ ID NO: 2395823 - RNA, 19 nt, Homo sapiens
  misc_RNA (1)...(19): siRNA sense strand
uguccaaucccaugagcaa

SEQ ID NO: 2395824 - RNA, 19 nt, Homo sapiens
  misc_RNA (1)...(19): siRNA sense strand
ccuggggaauuguggaaaa

SEQ ID NO: 2395825 - RNA, 19 nt, Homo sapiens
  misc_RNA (1)...(19): siRNA sense strand
aauauggagcagaggugaa

SEQ ID NO: 2395826 - RNA, 19 nt, Homo sapiens
  misc_RNA (1)...(19): siRNA sense strand
acucauaguggaaggagga

SEQ ID NO: 2395827 - RNA, 19 nt, Homo sapiens
  misc_RNA (1)...(19): siRNA sense strand
ucaagcaagucuuugggaa

SEQ ID NO: 2395828 - RNA, 19 nt, Homo sapiens
  misc_RNA (1)...(19): siRNA sense strand
acaacuggagcguggauau

SEQ ID NO: 2395829 - RNA, 19 nt, Homo sapiens
  misc_RNA (1)...(19): siRNA sense strand
cgaggaaagauaugcacca

SEQ ID NO: 2395830 - RNA, 19 nt, Homo sapiens
  misc_RNA (1)...(19): siRNA sense strand
cauccuggccuuugggcau

SEQ ID NO: 2395831 - RNA, 19 nt, Homo sapiens
  misc_RNA (1)...(19): siRNA sense strand
cuccagaagauaaacacaa

SEQ ID NO: 2395832 - RNA, 19 nt, Homo sapiens
  misc_RNA (1)...(19): siRNA sense strand
gcauaaauacucagaagaa

SEQ ID NO: 2395833 - RNA, 19 nt, Homo sapiens
  misc_RNA (1)...(19): siRNA sense strand
gggcauaaauacucagaag

SEQ ID NO: 2395834 - RNA, 19 nt, Homo sapiens
  misc_RNA (1)...(19): siRNA sense strand
ccucauuggaagagauguu

SEQ ID NO: 2395835 - RNA, 19 nt, Homo sapiens
  misc_RNA (1)...(19): siRNA sense strand
uguccaaucccaugagcaa

SEQ ID NO: 2395836 - RNA, 19 nt, Homo sapiens
  misc_RNA (1)...(19): siRNA sense strand
ccuggggaauuguggaaaa

SEQ ID NO: 2395837 - RNA, 19 nt, Homo sapiens
  misc_RNA (1)...(19): siRNA sense strand
aauauggagcagaggugaa

SEQ ID NO: 2395838 - RNA, 19 nt, Homo sapiens
  misc_RNA (1)...(19): siRNA sense strand
acucauaguggaaggagga

SEQ ID NO: 2395839 - RNA, 19 nt, Homo sapiens
  misc_RNA (1)...(19): siRNA sense strand
ucaagcaagucuuugggaa

SEQ ID NO: 2395840 - RNA, 19 nt, Homo sapiens
  misc_RNA (1)...(19): siRNA sense strand
acaacuggagcguggauau

SEQ ID NO: 2395841 - RNA, 19 nt, Homo sapiens
  misc_RNA (1)...(19): siRNA sense strand
cgaggaaagauaugcacca

SEQ ID NO: 2395842 - RNA, 19 nt, Homo sapiens
  misc_RNA (1)...(19): siRNA sense strand
cauccuggccuuugggcau

SEQ ID NO: 2395843 - RNA, 19 nt, Homo sapiens
  misc_RNA (1)...(19): siRNA sense strand
cuccagaagauaaacacaa

SEQ ID NO: 2395844 - RNA, 19 nt, Homo sapiens
  misc_RNA (1)...(19): siRNA sense strand
gcauaaauacucagaagaa

SEQ ID NO: 2395845 - RNA, 19 nt, Homo sapiens
  misc_RNA (1)...(19): siRNA sense strand
gggcauaaauacucagaag

SEQ ID NO: 2395846 - RNA, 19 nt, Homo sapiens
  misc_RNA (1)...(19): siRNA sense strand
ccucauuggaagagauguu

SEQ ID NO: 2395847 - RNA, 19 nt, Homo sapiens
  misc_RNA (1)...(19): siRNA sense strand
uguccaaucccaugagcaa

SEQ ID NO: 2395848 - RNA, 19 nt, Homo sapiens
  misc_RNA (1)...(19): siRNA sense strand
ccuggggaauuguggaaaa

SEQ ID NO: 2395849 - RNA, 19 nt, Homo sapiens
  misc_RNA (1)...(19): siRNA sense strand
aauauggagcagaggugaa

SEQ ID NO: 2395850 - RNA, 19 nt, Homo sapiens
  misc_RNA (1)...(19): siRNA sense strand
acucauaguggaaggagga

SEQ ID NO: 2395851 - RNA, 19 nt, Homo sapiens
  misc_RNA (1)...(19): siRNA sense strand
ucaagcaagucuuugggaa

SEQ ID NO: 2395852 - RNA, 19 nt, Homo sapiens
  misc_RNA (1)...(19): siRNA sense strand
acaacuggagcguggauau

SEQ ID NO: 2395853 - RNA, 19 nt, Homo sapiens
  misc_RNA (1)...(19): siRNA sense strand
cgaggaaagauaugcacca

SEQ ID NO: 2395854 - RNA, 19 nt, Homo sapiens
  misc_RNA (1)...(19): siRNA sense strand
cauccuggccuuugggcau

SEQ ID NO: 2395855 - RNA, 19 nt, Homo sapiens
  misc_RNA (1)...(19): siRNA sense strand
cuccagaagauaaacacaa

SEQ ID NO: 2395856 - RNA, 19 nt, Homo sapiens
  misc_RNA (1)...(19): siRNA sense strand
gcauaaauacucagaagaa

SEQ ID NO: 2395857 - RNA, 19 nt, Homo sapiens
  misc_RNA (1)...(19): siRNA sense strand
gggcauaaauacucagaag

SEQ ID NO: 2395858 - RNA, 19 nt, Homo sapiens
  misc_RNA (1)...(19): siRNA sense strand
ccucauuggaagagauguu

SEQ ID NO: 2395859 - RNA, 19 nt, Homo sapiens
  misc_RNA (1)...(19): siRNA sense strand
uguccaaucccaugagcaa

SEQ ID NO: 2395860 - RNA, 19 nt, Homo sapiens
  misc_RNA (1)...(19): siRNA sense strand
ccuggggaauuguggaaaa

SEQ ID NO: 2395861 - RNA, 19 nt, Homo sapiens
  misc_RNA (1)...(19): siRNA sense strand
aauauggagcagaggugaa

SEQ ID NO: 2395862 - RNA, 19 nt, Homo sapiens
  misc_RNA (1)...(19): siRNA sense strand
acucauaguggaaggagga

SEQ ID NO: 2395863 - RNA, 19 nt, Homo sapiens
  misc_RNA (1)...(19): siRNA sense strand
ucaagcaagucuuugggaa

SEQ ID NO: 2395864 - RNA, 19 nt, Homo sapiens
  misc_RNA (1)...(19): siRNA sense strand
acaacuggagcguggauau

SEQ ID NO: 2395865 - RNA, 19 nt, Homo sapiens
  misc_RNA (1)...(19): siRNA sense strand
cgaggaaagauaugcacca

SEQ ID NO: 2395866 - RNA, 19 nt, Homo sapiens
  misc_RNA (1)...(19): siRNA sense strand
cauccuggccuuugggcau

SEQ ID NO: 2395867 - RNA, 19 nt, Homo sapiens
  misc_RNA (1)...(19): siRNA sense strand
cuccagaagauaaacacaa

SEQ ID NO: 2395868 - RNA, 19 nt, Homo sapiens
  misc_RNA (1)...(19): siRNA sense strand
gcauaaauacucagaagaa

SEQ ID NO: 2395869 - RNA, 19 nt, Homo sapiens
  misc_RNA (1)...(19): siRNA sense strand
gggcauaaauacucagaag

SEQ ID NO: 2395870 - RNA, 19 nt, Homo sapiens
  misc_RNA (1)...(19): siRNA sense strand
ccucauuggaagagauguu

SEQ ID NO: 2395871 - RNA, 19 nt, Homo sapiens
  misc_RNA (1)...(19): siRNA sense strand
uguccaaucccaugagcaa

SEQ ID NO: 2395872 - RNA, 19 nt, Homo sapiens
  misc_RNA (1)...(19): siRNA sense strand
ccuggggaauuguggaaaa

SEQ ID NO: 2395873 - RNA, 19 nt, Homo sapiens
  misc_RNA (1)...(19): siRNA sense strand
aauauggagcagaggugaa

SEQ ID NO: 2395874 - RNA, 19 nt, Homo sapiens
  misc_RNA (1)...(19): siRNA sense strand
acucauaguggaaggagga

SEQ ID NO: 2395875 - RNA, 19 nt, Homo sapiens
  misc_RNA (1)...(19): siRNA sense strand
ucaagcaagucuuugggaa

SEQ ID NO: 2395876 - RNA, 19 nt, Homo sapiens
  misc_RNA (1)...(19): siRNA sense strand
acaacuggagcguggauau

SEQ ID NO: 2395877 - RNA, 19 nt, Homo sapiens
  misc_RNA (1)...(19): siRNA sense strand
cgaggaaagauaugcacca

SEQ ID NO: 2395878 - RNA, 19 nt, Homo sapiens
  misc_RNA (1)...(19): siRNA sense strand
cauccuggccuuugggcau

SEQ ID NO: 2395879 - RNA, 19 nt, Homo sapiens
  misc_RNA (1)...(19): siRNA sense strand
cuccagaagauaaacacaa

SEQ ID NO: 2395880 - RNA, 19 nt, Homo sapiens
  misc_RNA (1)...(19): siRNA sense strand
gcauaaauacucagaagaa

SEQ ID NO: 2395881 - RNA, 19 nt, Homo sapiens
  misc_RNA (1)...(19): siRNA sense strand
gggcauaaauacucagaag

SEQ ID NO: 2395882 - RNA, 19 nt, Homo sapiens
  misc_RNA (1)...(19): siRNA sense strand
ccucauuggaagagauguu

SEQ ID NO: 2395883 - RNA, 19 nt, Homo sapiens
  misc_RNA (1)...(19): siRNA sense strand
uguccaaucccaugagcaa

SEQ ID NO: 2395884 - RNA, 19 nt, Homo sapiens
  misc_RNA (1)...(19): siRNA sense strand
ccuggggaauuguggaaaa

SEQ ID NO: 2395885 - RNA, 19 nt, Homo sapiens
  misc_RNA (1)...(19): siRNA sense strand
aauauggagcagaggugaa

SEQ ID NO: 2395886 - RNA, 19 nt, Homo sapiens
  misc_RNA (1)...(19): siRNA sense strand
acucauaguggaaggagga

SEQ ID NO: 2395887 - RNA, 19 nt, Homo sapiens
  misc_RNA (1)...(19): siRNA sense strand
ucaagcaagucuuugggaa

SEQ ID NO: 2395888 - RNA, 19 nt, Homo sapiens
  misc_RNA (1)...(19): siRNA sense strand
acaacuggagcguggauau

SEQ ID NO: 2395889 - RNA, 19 nt, Homo sapiens
  misc_RNA (1)...(19): siRNA sense strand
cgaggaaagauaugcacca

SEQ ID NO: 2395890 - RNA, 19 nt, Homo sapiens
  misc_RNA (1)...(19): siRNA sense strand
cauccuggccuuugggcau

SEQ ID NO: 2395891 - RNA, 19 nt, Homo sapiens
  misc_RNA (1)...(19): siRNA sense strand
cuccagaagauaaacacaa

SEQ ID NO: 2395892 - RNA, 19 nt, Homo sapiens
  misc_RNA (1)...(19): siRNA sense strand
gcauaaauacucagaagaa

SEQ ID NO: 2395893 - RNA, 19 nt, Homo sapiens
  misc_RNA (1)...(19): siRNA sense strand
gggcauaaauacucagaag

SEQ ID NO: 2395894 - RNA, 19 nt, Homo sapiens
  misc_RNA (1)...(19): siRNA sense strand
ccucauuggaagagauguu

SEQ ID NO: 2395895 - RNA, 19 nt, Homo sapiens
  misc_RNA (1)...(19): siRNA sense strand
uguccaaucccaugagcaa

SEQ ID NO: 2395896 - RNA, 19 nt, Homo sapiens
  misc_RNA (1)...(19): siRNA sense strand
ccuggggaauuguggaaaa

SEQ ID NO: 2395897 - RNA, 19 nt, Homo sapiens
  misc_RNA (1)...(19): siRNA sense strand
aauauggagcagaggugaa

SEQ ID NO: 2395898 - RNA, 19 nt, Homo sapiens
  misc_RNA (1)...(19): siRNA sense strand
acucauaguggaaggagga

SEQ ID NO: 2395899 - RNA, 19 nt, Homo sapiens
  misc_RNA (1)...(19): siRNA sense strand
ucaagcaagucuuugggaa

SEQ ID NO: 2395900 - RNA, 19 nt, Homo sapiens
  misc_RNA (1)...(19): siRNA sense strand
acaacuggagcguggauau

SEQ ID NO: 2395901 - RNA, 19 nt, Homo sapiens
  misc_RNA (1)...(19): siRNA sense strand
cgaggaaagauaugcacca

SEQ ID NO: 2395902 - RNA, 19 nt, Homo sapiens
  misc_RNA (1)...(19): siRNA sense strand
cauccuggccuuugggcau

SEQ ID NO: 2395903 - RNA, 19 nt, Homo sapiens
  misc_RNA (1)...(19): siRNA sense strand
cuccagaagauaaacacaa

SEQ ID NO: 2395904 - RNA, 19 nt, Homo sapiens
  misc_RNA (1)...(19): siRNA sense strand
cgggaaagccagaaggaca

SEQ ID NO: 2395905 - RNA, 19 nt, Homo sapiens
  misc_RNA (1)...(19): siRNA sense strand
cguaauaucaggaaagcca

SEQ ID NO: 2395906 - RNA, 19 nt, Homo sapiens
  misc_RNA (1)...(19): siRNA sense strand
gggaaagccagaaggacca

SEQ ID NO: 2395907 - RNA, 19 nt, Homo sapiens
  misc_RNA (1)...(19): siRNA sense strand
gggaaagccagaaggacca

SEQ ID NO: 2395908 - RNA, 19 nt, Homo sapiens
  misc_RNA (1)...(19): siRNA sense strand
gggaaagccagaaggacca

SEQ ID NO: 2395909 - RNA, 19 nt, Homo sapiens
  misc_RNA (1)...(19): siRNA sense strand
gggaaagccagaaggacca

SEQ ID NO: 2395910 - RNA, 19 nt, Homo sapiens
  misc_RNA (1)...(19): siRNA sense strand
gggaaagccagaaggacca

SEQ ID NO: 2395911 - RNA, 19 nt, Homo sapiens
  misc_RNA (1)...(19): siRNA sense strand
gggaaagccagaaggacca

SEQ ID NO: 2395912 - RNA, 19 nt, Homo sapiens
  misc_RNA (1)...(19): siRNA sense strand
ccuccguaauaucaggaaa

SEQ ID NO: 2395913 - RNA, 19 nt, Homo sapiens
  misc_RNA (1)...(19): siRNA sense strand
aggaaagccagaaggacga

SEQ ID NO: 2395914 - RNA, 19 nt, Homo sapiens
  misc_RNA (1)...(19): siRNA sense strand
aggaaagccagaaggacga

SEQ ID NO: 2395915 - RNA, 19 nt, Homo sapiens
  misc_RNA (1)...(19): siRNA sense strand
cccacaagaagguaacaaa

SEQ ID NO: 2395916 - RNA, 19 nt, Homo sapiens
  misc_RNA (1)...(19): siRNA sense strand
aggaaagccacaaggacca

SEQ ID NO: 2395917 - RNA, 19 nt, Homo sapiens
  misc_RNA (1)...(19): siRNA sense strand
aggaaagccagaaggacca

SEQ ID NO: 2395918 - RNA, 19 nt, Homo sapiens
  misc_RNA (1)...(19): siRNA sense strand
aggaaagccagaaggacca

SEQ ID NO: 2395919 - RNA, 19 nt, Homo sapiens
  misc_RNA (1)...(19): siRNA sense strand
aggaaagccagaaggacca

SEQ ID NO: 2395920 - RNA, 19 nt, Homo sapiens
  misc_RNA (1)...(19): siRNA sense strand
cccacaaggaggcaacaaa

SEQ ID NO: 2395921 - RNA, 19 nt, Homo sapiens
  misc_RNA (1)...(19): siRNA sense strand
ggaagaaucucccuccgua

SEQ ID NO: 2395922 - RNA, 19 nt, Homo sapiens
  misc_RNA (1)...(19): siRNA sense strand
cgggaaagccagaaggacc

SEQ ID NO: 2395923 - RNA, 19 nt, Homo sapiens
  misc_RNA (1)...(19): siRNA sense strand
cgggaaagccagaaggacc

SEQ ID NO: 2395924 - RNA, 19 nt, Homo sapiens
  misc_RNA (1)...(19): siRNA sense strand
cgggaaagccagaaggacc

SEQ ID NO: 2395925 - RNA, 19 nt, Homo sapiens
  misc_RNA (1)...(19): siRNA sense strand
cgggaaagccagaaggacc

SEQ ID NO: 2395926 - RNA, 19 nt, Homo sapiens
  misc_RNA (1)...(19): siRNA sense strand
cgggaaagccagaaggacc

SEQ ID NO: 2395927 - RNA, 19 nt, Homo sapiens
  misc_RNA (1)...(19): siRNA sense strand
cgggaaagccagaaggacc

SEQ ID NO: 2395928 - RNA, 19 nt, Homo sapiens
  misc_RNA (1)...(19): siRNA sense strand
aggaaggccacaaggacca

SEQ ID NO: 2395929 - RNA, 19 nt, Homo sapiens
  misc_RNA (1)...(19): siRNA sense strand
gagcaaaguuggagggcac

SEQ ID NO: 2395930 - RNA, 19 nt, Homo sapiens
  misc_RNA (1)...(19): siRNA sense strand
ccacuaaccgccagggcaa

SEQ ID NO: 2395931 - RNA, 19 nt, Homo sapiens
  misc_RNA (1)...(19): siRNA sense strand
ccaacaaggcucuggacau

SEQ ID NO: 2395932 - RNA, 19 nt, Homo sapiens
  misc_RNA (1)...(19): siRNA sense strand
cagccaugccagagagaca

SEQ ID NO: 2395933 - RNA, 19 nt, Homo sapiens
  misc_RNA (1)...(19): siRNA sense strand
uggugaacccacagcgaaa

SEQ ID NO: 2395934 - RNA, 19 nt, Homo sapiens
  misc_RNA (1)...(19): siRNA sense strand
gggcaugguguuuggcauu

SEQ ID NO: 2395935 - RNA, 19 nt, Homo sapiens
  misc_RNA (1)...(19): siRNA sense strand
ugaccaacccagagaacau

SEQ ID NO: 2395936 - RNA, 19 nt, Homo sapiens
  misc_RNA (1)...(19): siRNA sense strand
gagauggaaucaaaggaga

SEQ ID NO: 2395937 - RNA, 19 nt, Homo sapiens
  misc_RNA (1)...(19): siRNA sense strand
gugcauggcucgaggcuac

SEQ ID NO: 2395938 - RNA, 19 nt, Homo sapiens
  misc_RNA (1)...(19): siRNA sense strand
ugugugagcacgaggagaa

SEQ ID NO: 2395939 - RNA, 19 nt, Homo sapiens
  misc_RNA (1)...(19): siRNA sense strand
ugguggugcugcaagguaa

SEQ ID NO: 2395940 - RNA, 19 nt, Homo sapiens
  misc_RNA (1)...(19): siRNA sense strand
agaagcagguggaggugau

SEQ ID NO: 2395941 - RNA, 19 nt, Homo sapiens
  misc_RNA (1)...(19): siRNA sense strand
gggacuuccagaugguuua

SEQ ID NO: 2395942 - RNA, 19 nt, Homo sapiens
  misc_RNA (1)...(19): siRNA sense strand
ccgaugacuucaagggugu

SEQ ID NO: 2395943 - RNA, 19 nt, Homo sapiens
  misc_RNA (1)...(19): siRNA sense strand
cgccucagcuagagaccaa

SEQ ID NO: 2395944 - RNA, 19 nt, Homo sapiens
  misc_RNA (1)...(19): siRNA sense strand
ccauccaagucgacgguga

SEQ ID NO: 2395945 - RNA, 19 nt, Homo sapiens
  misc_RNA (1)...(19): siRNA sense strand
ggacaugucugaugagcuc

SEQ ID NO: 2395946 - RNA, 19 nt, Homo sapiens
  misc_RNA (1)...(19): siRNA sense strand
gggcgaggugucagugaau

SEQ ID NO: 2395947 - RNA, 19 nt, Homo sapiens
  misc_RNA (1)...(19): siRNA sense strand
ucagaaugcacuaggcaca

SEQ ID NO: 2395948 - RNA, 19 nt, Homo sapiens
  misc_RNA (1)...(19): siRNA sense strand
agacaaccaucaugcgaca

SEQ ID NO: 2395949 - RNA, 19 nt, Homo sapiens
  misc_RNA (1)...(19): siRNA sense strand
ugugggugaaagugggaaa

SEQ ID NO: 2395950 - RNA, 19 nt, Homo sapiens
  misc_RNA (1)...(19): siRNA sense strand
acauaugggcucauggaca

SEQ ID NO: 2395951 - RNA, 19 nt, Homo sapiens
  misc_RNA (1)...(19): siRNA sense strand
uguccgaggcugugguaga

SEQ ID NO: 2395952 - RNA, 19 nt, Homo sapiens
  misc_RNA (1)...(19): siRNA sense strand
gcuccaugcccaucagaau

SEQ ID NO: 2395953 - RNA, 19 nt, Homo sapiens
  misc_RNA (1)...(19): siRNA sense strand
cggagacauaccagggaga

SEQ ID NO: 2395954 - RNA, 19 nt, Homo sapiens
  misc_RNA (1)...(19): siRNA sense strand
agacauaccagggagacaa

SEQ ID NO: 2395955 - RNA, 19 nt, Homo sapiens
  misc_RNA (1)...(19): siRNA sense strand
agcuagagaccaagagcau

SEQ ID NO: 2395956 - RNA, 19 nt, Homo sapiens
  misc_RNA (1)...(19): siRNA sense strand
gcgcacagacaucgcgaca

SEQ ID NO: 2395957 - RNA, 19 nt, Homo sapiens
  misc_RNA (1)...(19): siRNA sense strand
agcugauucuggagaguau

SEQ ID NO: 2395958 - RNA, 19 nt, Homo sapiens
  misc_RNA (1)...(19): siRNA sense strand
acccaugggcugagggcau

SEQ ID NO: 2395959 - RNA, 19 nt, Homo sapiens
  misc_RNA (1)...(19): siRNA sense strand
gccuggacguggaguucaa

SEQ ID NO: 2395960 - RNA, 19 nt, Homo sapiens
  misc_RNA (1)...(19): siRNA sense strand
caagauggcuagcguggga

SEQ ID NO: 2395961 - RNA, 19 nt, Homo sapiens
  misc_RNA (1)...(19): siRNA sense strand
aggagaauucacuguggaa

SEQ ID NO: 2395962 - RNA, 19 nt, Homo sapiens
  misc_RNA (1)...(19): siRNA sense strand
gcucccugauuguggguga

SEQ ID NO: 2395963 - RNA, 19 nt, Homo sapiens
  misc_RNA (1)...(19): siRNA sense strand
gagaggaggagcuacgaga

SEQ ID NO: 2395964 - RNA, 19 nt, Homo sapiens
  misc_RNA (1)...(19): siRNA sense strand
ccgccugcacaacgggaaa

SEQ ID NO: 2395965 - RNA, 19 nt, Homo sapiens
  misc_RNA (1)...(19): siRNA sense strand
gcauccagggcgaggagau

SEQ ID NO: 2395966 - RNA, 19 nt, Homo sapiens
  misc_RNA (1)...(19): siRNA sense strand
ccaagugaccggaagcuca

SEQ ID NO: 2395967 - RNA, 19 nt, Homo sapiens
  misc_RNA (1)...(19): siRNA sense strand
ccaagaaguccgugugccu

SEQ ID NO: 2395968 - RNA, 19 nt, Homo sapiens
  misc_RNA (1)...(19): siRNA sense strand
ggagcaagcuggauggcag

SEQ ID NO: 2395969 - RNA, 19 nt, Homo sapiens
  misc_RNA (1)...(19): siRNA sense strand
gagacauaccagggagaca

SEQ ID NO: 2395970 - RNA, 19 nt, Homo sapiens
  misc_RNA (1)...(19): siRNA sense strand
gcaacguccagcugaguga

SEQ ID NO: 2395971 - RNA, 19 nt, Homo sapiens
  misc_RNA (1)...(19): siRNA sense strand
ggcacaagcguggaggaaa

SEQ ID NO: 2395972 - RNA, 19 nt, Homo sapiens
  misc_RNA (1)...(19): siRNA sense strand
gaauacgugugccggguga

SEQ ID NO: 2395973 - RNA, 19 nt, Homo sapiens
  misc_RNA (1)...(19): siRNA sense strand
gggccagcguugaguucca

SEQ ID NO: 2395974 - RNA, 19 nt, Homo sapiens
  misc_RNA (1)...(19): siRNA sense strand
gugugaggaaggugugaca

SEQ ID NO: 2395975 - RNA, 19 nt, Homo sapiens
  misc_RNA (1)...(19): siRNA sense strand
ucaagaaccuggugcugca

SEQ ID NO: 2395976 - RNA, 19 nt, Homo sapiens
  misc_RNA (1)...(19): siRNA sense strand
ggaggagcuacgagaucau

SEQ ID NO: 2395977 - RNA, 19 nt, Homo sapiens
  misc_RNA (1)...(19): siRNA sense strand
gcacacugaucauccguga

SEQ ID NO: 2395978 - RNA, 19 nt, Homo sapiens
  misc_RNA (1)...(19): siRNA sense strand
ccgcagauucucagacacu

SEQ ID NO: 2395979 - RNA, 19 nt, Homo sapiens
  misc_RNA (1)...(19): siRNA sense strand
ccgucaaccaggagauugu

SEQ ID NO: 2395980 - RNA, 19 nt, Homo sapiens
  misc_RNA (1)...(19): siRNA sense strand
gagcagugccagccaggau

SEQ ID NO: 2395981 - RNA, 19 nt, Homo sapiens
  misc_RNA (1)...(19): siRNA sense strand
cggucagagcgcacagaca

SEQ ID NO: 2395982 - RNA, 19 nt, Homo sapiens
  misc_RNA (1)...(19): siRNA sense strand
ggugucagugaauggcaaa

SEQ ID NO: 2395983 - RNA, 19 nt, Homo sapiens
  misc_RNA (1)...(19): siRNA sense strand
aggguguggaggugggaga

SEQ ID NO: 2395984 - RNA, 19 nt, Homo sapiens
  misc_RNA (1)...(19): siRNA sense strand
gcagauucuccucgggcau

SEQ ID NO: 2395985 - RNA, 19 nt, Homo sapiens
  misc_RNA (1)...(19): siRNA sense strand
agacaaaggaagaaguaga

SEQ ID NO: 2395986 - RNA, 19 nt, Homo sapiens
  misc_RNA (1)...(19): siRNA sense strand
uugcaaagacaaaggaaga

SEQ ID NO: 2395987 - RNA, 19 nt, Homo sapiens
  misc_RNA (1)...(19): siRNA sense strand
agaugauggugaagaugaa

SEQ ID NO: 2395988 - RNA, 19 nt, Homo sapiens
  misc_RNA (1)...(19): siRNA sense strand
agagaaaagaaaagaggaa

SEQ ID NO: 2395989 - RNA, 19 nt, Homo sapiens
  misc_RNA (1)...(19): siRNA sense strand
aggagaaagugcaggccau

SEQ ID NO: 2395990 - RNA, 19 nt, Homo sapiens
  misc_RNA (1)...(19): siRNA sense strand
agaaaagaaaagaggaaga

SEQ ID NO: 2395991 - RNA, 19 nt, Homo sapiens
  misc_RNA (1)...(19): siRNA sense strand
ccucaacauccgaguggaa

SEQ ID NO: 2395992 - RNA, 19 nt, Homo sapiens
  misc_RNA (1)...(19): siRNA sense strand
gugaaacaucaguagcaaa

SEQ ID NO: 2395993 - RNA, 19 nt, Homo sapiens
  misc_RNA (1)...(19): siRNA sense strand
ggaaaagaaauguuggauu

SEQ ID NO: 2395994 - RNA, 19 nt, Homo sapiens
  misc_RNA (1)...(19): siRNA sense strand
cagacuucagugagaguaa

SEQ ID NO: 2395995 - RNA, 19 nt, Homo sapiens
  misc_RNA (1)...(19): siRNA sense strand
aaggaaauugagaggagaa

SEQ ID NO: 2395996 - RNA, 19 nt, Homo sapiens
  misc_RNA (1)...(19): siRNA sense strand
aagaggaagaacagagaga

SEQ ID NO: 2395997 - RNA, 19 nt, Homo sapiens
  misc_RNA (1)...(19): siRNA sense strand
gaaugcuggaggaaagaaa

SEQ ID NO: 2395998 - RNA, 19 nt, Homo sapiens
  misc_RNA (1)...(19): siRNA sense strand
ugcagagcuuugugagaua

SEQ ID NO: 2395999 - RNA, 19 nt, Homo sapiens
  misc_RNA (1)...(19): siRNA sense strand
aagaaaggagagaagagaa

SEQ ID NO: 2396000 - RNA, 19 nt, Homo sapiens
  misc_RNA (1)...(19): siRNA sense strand
aaauggaagucaagaggga

SEQ ID NO: 2396001 - RNA, 19 nt, Homo sapiens
  misc_RNA (1)...(19): siRNA sense strand
gagagaagagaaaagaaaa

SEQ ID NO: 2396002 - RNA, 19 nt, Homo sapiens
  misc_RNA (1)...(19): siRNA sense strand
ucaucuagcaaaucagaaa

SEQ ID NO: 2396003 - RNA, 19 nt, Homo sapiens
  misc_RNA (1)...(19): siRNA sense strand
aggaaauugagaggagaaa

SEQ ID NO: 2396004 - RNA, 19 nt, Homo sapiens
  misc_RNA (1)...(19): siRNA sense strand
ugggaagaugauaaaguua

SEQ ID NO: 2396005 - RNA, 19 nt, Homo sapiens
  misc_RNA (1)...(19): siRNA sense strand
auggaagucaagagggaau

SEQ ID NO: 2396006 - RNA, 19 nt, Homo sapiens
  misc_RNA (1)...(19): siRNA sense strand
ggacucaagaugaugguga

SEQ ID NO: 2396007 - RNA, 19 nt, Homo sapiens
  misc_RNA (1)...(19): siRNA sense strand
uauuggagacaguggaauu

SEQ ID NO: 2396008 - RNA, 19 nt, Homo sapiens
  misc_RNA (1)...(19): siRNA sense strand
agaaggaaauugagaggag

SEQ ID NO: 2396009 - RNA, 19 nt, Homo sapiens
  misc_RNA (1)...(19): siRNA sense strand
auuaaggacucaagaugau

SEQ ID NO: 2396010 - RNA, 19 nt, Homo sapiens
  misc_RNA (1)...(19): siRNA sense strand
aaagaaaagaggaagaaca

SEQ ID NO: 2396011 - RNA, 19 nt, Homo sapiens
  misc_RNA (1)...(19): siRNA sense strand
aggaaguguuucugcagau

SEQ ID NO: 2396012 - RNA, 19 nt, Homo sapiens
  misc_RNA (1)...(19): siRNA sense strand
aggaagaaguagaggcugc

SEQ ID NO: 2396013 - RNA, 19 nt, Homo sapiens
  misc_RNA (1)...(19): siRNA sense strand
gaguggaaagacuaacaaa

SEQ ID NO: 2396014 - RNA, 19 nt, Homo sapiens
  misc_RNA (1)...(19): siRNA sense strand
cagagagaaagcagaagau

SEQ ID NO: 2396015 - RNA, 19 nt, Homo sapiens
  misc_RNA (1)...(19): siRNA sense strand
gaaacagagagaaagcaga

SEQ ID NO: 2396016 - RNA, 19 nt, Homo sapiens
  misc_RNA (1)...(19): siRNA sense strand
agauagggcagcucgagaa

SEQ ID NO: 2396017 - RNA, 19 nt, Homo sapiens
  misc_RNA (1)...(19): siRNA sense strand
ccugcaucaucuagcaaau

SEQ ID NO: 2396018 - RNA, 19 nt, Homo sapiens
  misc_RNA (1)...(19): siRNA sense strand
aaguugggaagaugauaaa

SEQ ID NO: 2396019 - RNA, 19 nt, Homo sapiens
  misc_RNA (1)...(19): siRNA sense strand
acagagagaaagcagaaga

SEQ ID NO: 2396020 - RNA, 19 nt, Homo sapiens
  misc_RNA (1)...(19): siRNA sense strand
agaaagaagcacuguugca

SEQ ID NO: 2396021 - RNA, 19 nt, Homo sapiens
  misc_RNA (1)...(19): siRNA sense strand
aggaagaacagagagaaau

SEQ ID NO: 2396022 - RNA, 19 nt, Homo sapiens
  misc_RNA (1)...(19): siRNA sense strand
ggaaauugagaggagaaaa

SEQ ID NO: 2396023 - RNA, 19 nt, Homo sapiens
  misc_RNA (1)...(19): siRNA sense strand
uagcaaaacaggcagaaau

SEQ ID NO: 2396024 - RNA, 19 nt, Homo sapiens
  misc_RNA (1)...(19): siRNA sense strand
cuugaagaaaggagagaag

SEQ ID NO: 2396025 - RNA, 19 nt, Homo sapiens
  misc_RNA (1)...(19): siRNA sense strand
aagcacuguugcaagaauu

SEQ ID NO: 2396026 - RNA, 19 nt, Homo sapiens
  misc_RNA (1)...(19): siRNA sense strand
agcaaauggcagucaguca

SEQ ID NO: 2396027 - RNA, 19 nt, Homo sapiens
  misc_RNA (1)...(19): siRNA sense strand
auuuggaccuuguugggaa

SEQ ID NO: 2396028 - RNA, 19 nt, Homo sapiens
  misc_RNA (1)...(19): siRNA sense strand
ucucaggagccuaguggau

SEQ ID NO: 2396029 - RNA, 19 nt, Homo sapiens
  misc_RNA (1)...(19): siRNA sense strand
cauccgaguggaaagacua

SEQ ID NO: 2396030 - RNA, 19 nt, Homo sapiens
  misc_RNA (1)...(19): siRNA sense strand
gaaggaaauugagaggaga

SEQ ID NO: 2396031 - RNA, 19 nt, Homo sapiens
  misc_RNA (1)...(19): siRNA sense strand
caacacuuggaauggaaau

SEQ ID NO: 2396032 - RNA, 19 nt, Homo sapiens
  misc_RNA (1)...(19): siRNA sense strand
acgaagagcuccuggcaga

SEQ ID NO: 2396033 - RNA, 19 nt, Homo sapiens
  misc_RNA (1)...(19): siRNA sense strand
caggaauuucaaagagaua

SEQ ID NO: 2396034 - RNA, 19 nt, Homo sapiens
  misc_RNA (1)...(19): siRNA sense strand
gggagagacuugaugccaa

SEQ ID NO: 2396035 - RNA, 19 nt, Homo sapiens
  misc_RNA (1)...(19): siRNA sense strand
gugcuuuggugaugggcua

SEQ ID NO: 2396036 - RNA, 19 nt, Homo sapiens
  misc_RNA (1)...(19): siRNA sense strand
aaauugaggccgaggugaa

SEQ ID NO: 2396037 - RNA, 19 nt, Homo sapiens
  misc_RNA (1)...(19): siRNA sense strand
cuggauggccuguuggaaa

SEQ ID NO: 2396038 - RNA, 19 nt, Homo sapiens
  misc_RNA (1)...(19): siRNA sense strand
cgcaagauacauugaacaa

SEQ ID NO: 2396039 - RNA, 19 nt, Homo sapiens
  misc_RNA (1)...(19): siRNA sense strand
aguggaaaucuacgagaaa

SEQ ID NO: 2396040 - RNA, 19 nt, Homo sapiens
  misc_RNA (1)...(19): siRNA sense strand
gcuucuugauaaacgguua

SEQ ID NO: 2396041 - RNA, 19 nt, Homo sapiens
  misc_RNA (1)...(19): siRNA sense strand
cuuuagaagaaguguguga

SEQ ID NO: 2396042 - RNA, 19 nt, Homo sapiens
  misc_RNA (1)...(19): siRNA sense strand
ccauauuggacauagaaaa

SEQ ID NO: 2396043 - RNA, 19 nt, Homo sapiens
  misc_RNA (1)...(19): siRNA sense strand
ggauggagagcguguucaa

SEQ ID NO: 2396044 - RNA, 19 nt, Homo sapiens
  misc_RNA (1)...(19): siRNA sense strand
cuaacuuugaagacagaaa

SEQ ID NO: 2396045 - RNA, 19 nt, Homo sapiens
  misc_RNA (1)...(19): siRNA sense strand
ccaccauauuggacauaga

SEQ ID NO: 2396046 - RNA, 19 nt, Homo sapiens
  misc_RNA (1)...(19): siRNA sense strand
ugauggaggugaugcccaa

SEQ ID NO: 2396047 - RNA, 19 nt, Homo sapiens
  misc_RNA (1)...(19): siRNA sense strand
cugcauggauccaaggcuu

SEQ ID NO: 2396048 - RNA, 19 nt, Homo sapiens
  misc_RNA (1)...(19): siRNA sense strand
gggucaugcauguggacga

SEQ ID NO: 2396049 - RNA, 19 nt, Homo sapiens
  misc_RNA (1)...(19): siRNA sense strand
gaaucuauguuuugaccaa

SEQ ID NO: 2396050 - RNA, 19 nt, Homo sapiens
  misc_RNA (1)...(19): siRNA sense strand
uggaguacgcagagcugaa

SEQ ID NO: 2396051 - RNA, 19 nt, Homo sapiens
  misc_RNA (1)...(19): siRNA sense strand
gggccaucccacaggugaa

SEQ ID NO: 2396052 - RNA, 19 nt, Homo sapiens
  misc_RNA (1)...(19): siRNA sense strand
ccgacagcgcugaagagua

SEQ ID NO: 2396053 - RNA, 19 nt, Homo sapiens
  misc_RNA (1)...(19): siRNA sense strand
cugcaggccaucaggaaga

SEQ ID NO: 2396054 - RNA, 19 nt, Homo sapiens
  misc_RNA (1)...(19): siRNA sense strand
acgacgaaauugaggccga

SEQ ID NO: 2396055 - RNA, 19 nt, Homo sapiens
  misc_RNA (1)...(19): siRNA sense strand
ucucaaagucaugggauuu

SEQ ID NO: 2396056 - RNA, 19 nt, Homo sapiens
  misc_RNA (1)...(19): siRNA sense strand
ugaacgagaugcuggagga

SEQ ID NO: 2396057 - RNA, 19 nt, Homo sapiens
  misc_RNA (1)...(19): siRNA sense strand
ccgacaaguacuccaacaa

SEQ ID NO: 2396058 - RNA, 19 nt, Homo sapiens
  misc_RNA (1)...(19): siRNA sense strand
auggcaaagaugagauuau

SEQ ID NO: 2396059 - RNA, 19 nt, Homo sapiens
  misc_RNA (1)...(19): siRNA sense strand
ugaagaagaugguggagag

SEQ ID NO: 2396060 - RNA, 19 nt, Homo sapiens
  misc_RNA (1)...(19): siRNA sense strand
cugaagaacaugaagugca

SEQ ID NO: 2396061 - RNA, 19 nt, Homo sapiens
  misc_RNA (1)...(19): siRNA sense strand
cggcaggccaucaagaaga

SEQ ID NO: 2396062 - RNA, 19 nt, Homo sapiens
  misc_RNA (1)...(19): siRNA sense strand
acgcagagcugaagacggu

SEQ ID NO: 2396063 - RNA, 19 nt, Homo sapiens
  misc_RNA (1)...(19): siRNA sense strand
uguccauguuugaggucau

SEQ ID NO: 2396064 - RNA, 19 nt, Homo sapiens
  misc_RNA (1)...(19): siRNA sense strand
gguuacgaucagaaugcaa

SEQ ID NO: 2396065 - RNA, 19 nt, Homo sapiens
  misc_RNA (1)...(19): siRNA sense strand
ccaaggaggcaucgaugau

SEQ ID NO: 2396066 - RNA, 19 nt, Homo sapiens
  misc_RNA (1)...(19): siRNA sense strand
ugauggaguacgugcucua

SEQ ID NO: 2396067 - RNA, 19 nt, Homo sapiens
  misc_RNA (1)...(19): siRNA sense strand
gcuacgagacgcugcugaa

SEQ ID NO: 2396068 - RNA, 19 nt, Homo sapiens
  misc_RNA (1)...(19): siRNA sense strand
uccagaaacaugauggcaa

SEQ ID NO: 2396069 - RNA, 19 nt, Homo sapiens
  misc_RNA (1)...(19): siRNA sense strand
uucucaaagucaugggauu

SEQ ID NO: 2396070 - RNA, 19 nt, Homo sapiens
  misc_RNA (1)...(19): siRNA sense strand
agaagacggacgcggagua

SEQ ID NO: 2396071 - RNA, 19 nt, Homo sapiens
  misc_RNA (1)...(19): siRNA sense strand
uguccauguuccuggccaa

SEQ ID NO: 2396072 - RNA, 19 nt, Homo sapiens
  misc_RNA (1)...(19): siRNA sense strand
acaaguacuucaagcaacu

SEQ ID NO: 2396073 - RNA, 19 nt, Homo sapiens
  misc_RNA (1)...(19): siRNA sense strand
gcgcccacuacgaggaaaa

SEQ ID NO: 2396074 - RNA, 19 nt, Homo sapiens
  misc_RNA (1)...(19): siRNA sense strand
ccauguuccgggaggccaa

SEQ ID NO: 2396075 - RNA, 19 nt, Homo sapiens
  misc_RNA (1)...(19): siRNA sense strand
ugaagugcagugugaagaa

SEQ ID NO: 2396076 - RNA, 19 nt, Homo sapiens
  misc_RNA (1)...(19): siRNA sense strand
ccgagaggaggaaggacuu

SEQ ID NO: 2396077 - RNA, 19 nt, Homo sapiens
  misc_RNA (1)...(19): siRNA sense strand
ccuggcagauauugugaau

SEQ ID NO: 2396078 - RNA, 19 nt, Homo sapiens
  misc_RNA (1)...(19): siRNA sense strand
uggaugggagugucaguaa

SEQ ID NO: 2396079 - RNA, 19 nt, Homo sapiens
  misc_RNA (1)...(19): siRNA sense strand
aggaagaccgugugugacu

SEQ ID NO: 2396080 - RNA, 19 nt, Homo sapiens
  misc_RNA (1)...(19): siRNA sense strand
gcgaggaccacaugcgcuu

SEQ ID NO: 2396081 - RNA, 19 nt, Homo sapiens
  misc_RNA (1)...(19): siRNA sense strand
ggugaaauguaacgagcag

SEQ ID NO: 2396082 - RNA, 19 nt, Homo sapiens
  misc_RNA (1)...(19): siRNA sense strand
agagcggcuucgacauaaa

SEQ ID NO: 2396083 - RNA, 19 nt, Homo sapiens
  misc_RNA (1)...(19): siRNA sense strand
gauuggacgauuugaaagu

SEQ ID NO: 2396084 - RNA, 19 nt, Homo sapiens
  misc_RNA (1)...(19): siRNA sense strand
ccacaguccauccaggaau

SEQ ID NO: 2396085 - RNA, 19 nt, Homo sapiens
  misc_RNA (1)...(19): siRNA sense strand
uauccaaaaucgacaagua

SEQ ID NO: 2396086 - RNA, 19 nt, Homo sapiens
  misc_RNA (1)...(19): siRNA sense strand
cuggcaagauauaucaaga

SEQ ID NO: 2396087 - RNA, 19 nt, Homo sapiens
  misc_RNA (1)...(19): siRNA sense strand
cugaugggcaggauggaga

SEQ ID NO: 2396088 - RNA, 19 nt, Homo sapiens
  misc_RNA (1)...(19): siRNA sense strand
aaaauuucaucgagaguca

SEQ ID NO: 2396089 - RNA, 19 nt, Homo sapiens
  misc_RNA (1)...(19): siRNA sense strand
ccaacuuacuggagagaaa

SEQ ID NO: 2396090 - RNA, 19 nt, Homo sapiens
  misc_RNA (1)...(19): siRNA sense strand
cauuaaagcuggaggccaa

SEQ ID NO: 2396091 - RNA, 19 nt, Homo sapiens
  misc_RNA (1)...(19): siRNA sense strand
gaaaggagcuggaaggcaa

SEQ ID NO: 2396092 - RNA, 19 nt, Homo sapiens
  misc_RNA (1)...(19): siRNA sense strand
gugaagaggaggaggaaga

SEQ ID NO: 2396093 - RNA, 19 nt, Homo sapiens
  misc_RNA (1)...(19): siRNA sense strand
uggacaaggugaagacaaa

SEQ ID NO: 2396094 - RNA, 19 nt, Homo sapiens
  misc_RNA (1)...(19): siRNA sense strand
aagcugaaccugagagaua

SEQ ID NO: 2396095 - RNA, 19 nt, Homo sapiens
  misc_RNA (1)...(19): siRNA sense strand
agaaaaggcuauuggauua

SEQ ID NO: 2396096 - RNA, 19 nt, Homo sapiens
  misc_RNA (1)...(19): siRNA sense strand
cgacaaugaagaaggagaa

SEQ ID NO: 2396097 - RNA, 19 nt, Homo sapiens
  misc_RNA (1)...(19): siRNA sense strand
ggaauauguaagaggagaa

SEQ ID NO: 2396098 - RNA, 19 nt, Homo sapiens
  misc_RNA (1)...(19): siRNA sense strand
gcaugaaggaugugaguga

SEQ ID NO: 2396099 - RNA, 19 nt, Homo sapiens
  misc_RNA (1)...(19): siRNA sense strand
caaugaagaaggagaagaa

SEQ ID NO: 2396100 - RNA, 19 nt, Homo sapiens
  misc_RNA (1)...(19): siRNA sense strand
ggguuaacuucaugaacaa

SEQ ID NO: 2396101 - RNA, 19 nt, Homo sapiens
  misc_RNA (1)...(19): siRNA sense strand
cauuaaagaucauggcuau

SEQ ID NO: 2396102 - RNA, 19 nt, Homo sapiens
  misc_RNA (1)...(19): siRNA sense strand
ggacgaaggauuuguggaa

SEQ ID NO: 2396103 - RNA, 19 nt, Homo sapiens
  misc_RNA (1)...(19): siRNA sense strand
auauuaagggcgaggauaa

SEQ ID NO: 2396104 - RNA, 19 nt, Homo sapiens
  misc_RNA (1)...(19): siRNA sense strand
aggaagaggaggagauaga

SEQ ID NO: 2396105 - RNA, 19 nt, Homo sapiens
  misc_RNA (1)...(19): siRNA sense strand
guauaaagaaguugcagaa

SEQ ID NO: 2396106 - RNA, 19 nt, Homo sapiens
  misc_RNA (1)...(19): siRNA sense strand
ccuugagggaagagaauua

SEQ ID NO: 2396107 - RNA, 19 nt, Homo sapiens
  misc_RNA (1)...(19): siRNA sense strand
cugcugaauugguguaaua

SEQ ID NO: 2396108 - RNA, 19 nt, Homo sapiens
  misc_RNA (1)...(19): siRNA sense strand
uggcaagggaggagaguuu

SEQ ID NO: 2396109 - RNA, 19 nt, Homo sapiens
  misc_RNA (1)...(19): siRNA sense strand
gauaaaagccagcaagaua

SEQ ID NO: 2396110 - RNA, 19 nt, Homo sapiens
  misc_RNA (1)...(19): siRNA sense strand
gcccauaaggagacagaaa

SEQ ID NO: 2396111 - RNA, 19 nt, Homo sapiens
  misc_RNA (1)...(19): siRNA sense strand
agaaagaagccgagagucu

SEQ ID NO: 2396112 - RNA, 19 nt, Homo sapiens
  misc_RNA (1)...(19): siRNA sense strand
ggacauuaaaguaccgaua

SEQ ID NO: 2396113 - RNA, 19 nt, Homo sapiens
  misc_RNA (1)...(19): siRNA sense strand
cugaaaggauugaguguga

SEQ ID NO: 2396114 - RNA, 19 nt, Homo sapiens
  misc_RNA (1)...(19): siRNA sense strand
uagcaaaggcuucaggaaa

SEQ ID NO: 2396115 - RNA, 19 nt, Homo sapiens
  misc_RNA (1)...(19): siRNA sense strand
gcuguugacugcugggaaa

SEQ ID NO: 2396116 - RNA, 19 nt, Homo sapiens
  misc_RNA (1)...(19): siRNA sense strand
aggaagaugaggaggaaga

SEQ ID NO: 2396117 - RNA, 19 nt, Homo sapiens
  misc_RNA (1)...(19): siRNA sense strand
uggaauagguucaggggua

SEQ ID NO: 2396118 - RNA, 19 nt, Homo sapiens
  misc_RNA (1)...(19): siRNA sense strand
cuugcaagacuuagagaaa

SEQ ID NO: 2396119 - RNA, 19 nt, Homo sapiens
  misc_RNA (1)...(19): siRNA sense strand
aaacagaagaacaggaaga

SEQ ID NO: 2396120 - RNA, 19 nt, Homo sapiens
  misc_RNA (1)...(19): siRNA sense strand
cagaagaacaggaagauga

SEQ ID NO: 2396121 - RNA, 19 nt, Homo sapiens
  misc_RNA (1)...(19): siRNA sense strand
cuacaauagaugagacgua

SEQ ID NO: 2396122 - RNA, 19 nt, Homo sapiens
  misc_RNA (1)...(19): siRNA sense strand
acgaaggauuuguggaaga

SEQ ID NO: 2396123 - RNA, 19 nt, Homo sapiens
  misc_RNA (1)...(19): siRNA sense strand
accaauaggauguggcaaa

SEQ ID NO: 2396124 - RNA, 19 nt, Homo sapiens
  misc_RNA (1)...(19): siRNA sense strand
caacguuggaggagaacaa

SEQ ID NO: 2396125 - RNA, 19 nt, Homo sapiens
  misc_RNA (1)...(19): siRNA sense strand
ggucagaagccaagcacau

SEQ ID NO: 2396126 - RNA, 19 nt, Homo sapiens
  misc_RNA (1)...(19): siRNA sense strand
aagaaguccuugagaaaca

SEQ ID NO: 2396127 - RNA, 19 nt, Homo sapiens
  misc_RNA (1)...(19): siRNA sense strand
agcaaaggcuucaggaaau

SEQ ID NO: 2396128 - RNA, 19 nt, Homo sapiens
  misc_RNA (1)...(19): siRNA sense strand
caggaauggaugaggaaga

SEQ ID NO: 2396129 - RNA, 19 nt, Homo sapiens
  misc_RNA (1)...(19): siRNA sense strand
ucagaagccagaagagaaa

SEQ ID NO: 2396130 - RNA, 19 nt, Homo sapiens
  misc_RNA (1)...(19): siRNA sense strand
gcacaggauugggaggaaa

SEQ ID NO: 2396131 - RNA, 19 nt, Homo sapiens
  misc_RNA (1)...(19): siRNA sense strand
augaagaacagguggaaga

SEQ ID NO: 2396132 - RNA, 19 nt, Homo sapiens
  misc_RNA (1)...(19): siRNA sense strand
agaaggagaagaagagaau

SEQ ID NO: 2396133 - RNA, 19 nt, Homo sapiens
  misc_RNA (1)...(19): siRNA sense strand
ggaauaagaaacagguuca

SEQ ID NO: 2396134 - RNA, 19 nt, Homo sapiens
  misc_RNA (1)...(19): siRNA sense strand
caacaguguccuugaagua

SEQ ID NO: 2396135 - RNA, 19 nt, Homo sapiens
  misc_RNA (1)...(19): siRNA sense strand
gauuggaugcucagaguua

SEQ ID NO: 2396136 - RNA, 19 nt, Homo sapiens
  misc_RNA (1)...(19): siRNA sense strand
guuuagaacugaaagccaa

SEQ ID NO: 2396137 - RNA, 19 nt, Homo sapiens
  misc_RNA (1)...(19): siRNA sense strand
aggaaaugggcaugggcaa

SEQ ID NO: 2396138 - RNA, 19 nt, Homo sapiens
  misc_RNA (1)...(19): siRNA sense strand
aggaggaagaagacaauaa

SEQ ID NO: 2396139 - RNA, 19 nt, Homo sapiens
  misc_RNA (1)...(19): siRNA sense strand
agaaguuauuggaagcaaa

SEQ ID NO: 2396140 - RNA, 19 nt, Homo sapiens
  misc_RNA (1)...(19): siRNA sense strand
aggcuuuacuggagaaaca

SEQ ID NO: 2396141 - RNA, 19 nt, Homo sapiens
  misc_RNA (1)...(19): siRNA sense strand
gagcaaagagacucacaaa

SEQ ID NO: 2396142 - RNA, 19 nt, Homo sapiens
  misc_RNA (1)...(19): siRNA sense strand
aagaagaggaugaugagaa

SEQ ID NO: 2396143 - RNA, 19 nt, Homo sapiens
  misc_RNA (1)...(19): siRNA sense strand
gcauacaagcaaacugaaa

SEQ ID NO: 2396144 - RNA, 19 nt, Homo sapiens
  misc_RNA (1)...(19): siRNA sense strand
ggaaagagucugggaccaa

SEQ ID NO: 2396145 - RNA, 19 nt, Homo sapiens
  misc_RNA (1)...(19): siRNA sense strand
ucaggaagcaggaggaaau

SEQ ID NO: 2396146 - RNA, 19 nt, Homo sapiens
  misc_RNA (1)...(19): siRNA sense strand
gggcuugaguccauacaaa

SEQ ID NO: 2396147 - RNA, 19 nt, Homo sapiens
  misc_RNA (1)...(19): siRNA sense strand
ugccacagguugaaggaaa

SEQ ID NO: 2396148 - RNA, 19 nt, Homo sapiens
  misc_RNA (1)...(19): siRNA sense strand
aggaaacgcaugaggaaga

SEQ ID NO: 2396149 - RNA, 19 nt, Homo sapiens
  misc_RNA (1)...(19): siRNA sense strand
cagucaacuacgagauuaa

SEQ ID NO: 2396150 - RNA, 19 nt, Homo sapiens
  misc_RNA (1)...(19): siRNA sense strand
ggaagauuuugaugggaaa

SEQ ID NO: 2396151 - RNA, 19 nt, Homo sapiens
  misc_RNA (1)...(19): siRNA sense strand
cagaugagcuggaugguca

SEQ ID NO: 2396152 - RNA, 19 nt, Homo sapiens
  misc_RNA (1)...(19): siRNA sense strand
gcucagaguuaaauggcuu

SEQ ID NO: 2396153 - RNA, 19 nt, Homo sapiens
  misc_RNA (1)...(19): siRNA sense strand
gaggacaaggauagugaaa

SEQ ID NO: 2396154 - RNA, 19 nt, Homo sapiens
  misc_RNA (1)...(19): siRNA sense strand
guaugaaugaagagcacaa

SEQ ID NO: 2396155 - RNA, 19 nt, Homo sapiens
  misc_RNA (1)...(19): siRNA sense strand
uagagaagguggagggaac

SEQ ID NO: 2396156 - RNA, 19 nt, Homo sapiens
  misc_RNA (1)...(19): siRNA sense strand
ccgaagagauggacagauc

SEQ ID NO: 2396157 - RNA, 19 nt, Homo sapiens
  misc_RNA (1)...(19): siRNA sense strand
ggauggaucggcuggauaa

SEQ ID NO: 2396158 - RNA, 19 nt, Homo sapiens
  misc_RNA (1)...(19): siRNA sense strand
caagauaagaaggaagaaa

SEQ ID NO: 2396159 - RNA, 19 nt, Homo sapiens
  misc_RNA (1)...(19): siRNA sense strand
agauguuccuggagaguuu

SEQ ID NO: 2396160 - RNA, 19 nt, Homo sapiens
  misc_RNA (1)...(19): siRNA sense strand
ggauaagagagaacugaau

SEQ ID NO: 2396161 - RNA, 19 nt, Homo sapiens
  misc_RNA (1)...(19): siRNA sense strand
gugaauugcuaguaacaga

SEQ ID NO: 2396162 - RNA, 19 nt, Homo sapiens
  misc_RNA (1)...(19): siRNA sense strand
cugaagugaugcuggauuu

SEQ ID NO: 2396163 - RNA, 19 nt, Homo sapiens
  misc_RNA (1)...(19): siRNA sense strand
ggagaaggugguaaagcua

SEQ ID NO: 2396164 - RNA, 19 nt, Homo sapiens
  misc_RNA (1)...(19): siRNA sense strand
acaaagaaguucagacugu

SEQ ID NO: 2396165 - RNA, 19 nt, Homo sapiens
  misc_RNA (1)...(19): siRNA sense strand
gagaguggguugagagaac

SEQ ID NO: 2396166 - RNA, 19 nt, Homo sapiens
  misc_RNA (1)...(19): siRNA sense strand
cggugaagagggaguacaa

SEQ ID NO: 2396167 - RNA, 19 nt, Homo sapiens
  misc_RNA (1)...(19): siRNA sense strand
caacuuggauaguggcaau

SEQ ID NO: 2396168 - RNA, 19 nt, Homo sapiens
  misc_RNA (1)...(19): siRNA sense strand
gggcagaauagauccuaaa

SEQ ID NO: 2396169 - RNA, 19 nt, Homo sapiens
  misc_RNA (1)...(19): siRNA sense strand
cagcagaagaaguggccaa

SEQ ID NO: 2396170 - RNA, 19 nt, Homo sapiens
  misc_RNA (1)...(19): siRNA sense strand
cugccaagguagagaagau

SEQ ID NO: 2396171 - RNA, 19 nt, Homo sapiens
  misc_RNA (1)...(19): siRNA sense strand
gagugauggccgaggagaa

SEQ ID NO: 2396172 - RNA, 19 nt, Homo sapiens
  misc_RNA (1)...(19): siRNA sense strand
ccucaaagccagccgggaa

SEQ ID NO: 2396173 - RNA, 19 nt, Homo sapiens
  misc_RNA (1)...(19): siRNA sense strand
uggaagagguggaagguac

SEQ ID NO: 2396174 - RNA, 19 nt, Homo sapiens
  misc_RNA (1)...(19): siRNA sense strand
gucuagaacagaugacaaa

SEQ ID NO: 2396175 - RNA, 19 nt, Homo sapiens
  misc_RNA (1)...(19): siRNA sense strand
ggaagaaucugacggagca

SEQ ID NO: 2396176 - RNA, 19 nt, Homo sapiens
  misc_RNA (1)...(19): siRNA sense strand
gggaaaagucucaccacaa

SEQ ID NO: 2396177 - RNA, 19 nt, Homo sapiens
  misc_RNA (1)...(19): siRNA sense strand
gaaagaaaacugagagacu

SEQ ID NO: 2396178 - RNA, 19 nt, Homo sapiens
  misc_RNA (1)...(19): siRNA sense strand
gggcagcuuacaaaggaaa

SEQ ID NO: 2396179 - RNA, 19 nt, Homo sapiens
  misc_RNA (1)...(19): siRNA sense strand
aggacuacaucgagaagca

SEQ ID NO: 2396180 - RNA, 19 nt, Homo sapiens
  misc_RNA (1)...(19): siRNA sense strand
cuguuuaguuuggcagaaa

SEQ ID NO: 2396181 - RNA, 19 nt, Homo sapiens
  misc_RNA (1)...(19): siRNA sense strand
ggauguauuuugaugggaa

SEQ ID NO: 2396182 - RNA, 19 nt, Homo sapiens
  misc_RNA (1)...(19): siRNA sense strand
cuauugaagaugaagccaa

SEQ ID NO: 2396183 - RNA, 19 nt, Homo sapiens
  misc_RNA (1)...(19): siRNA sense strand
agugacagcagcaggacua

SEQ ID NO: 2396184 - RNA, 19 nt, Homo sapiens
  misc_RNA (1)...(19): siRNA sense strand
gccaaagaacuuaagucaa

SEQ ID NO: 2396185 - RNA, 19 nt, Homo sapiens
  misc_RNA (1)...(19): siRNA sense strand
agaacagaugacaaaguua

SEQ ID NO: 2396186 - RNA, 19 nt, Homo sapiens
  misc_RNA (1)...(19): siRNA sense strand
aaacaaaggcagaaggcuc

SEQ ID NO: 2396187 - RNA, 19 nt, Homo sapiens
  misc_RNA (1)...(19): siRNA sense strand
cagaaagaaaacugagaga

SEQ ID NO: 2396188 - RNA, 19 nt, Homo sapiens
  misc_RNA (1)...(19): siRNA sense strand
agucuagaacagaugacaa

SEQ ID NO: 2396189 - RNA, 19 nt, Homo sapiens
  misc_RNA (1)...(19): siRNA sense strand
cuugcgacguagugaucaa

SEQ ID NO: 2396190 - RNA, 19 nt, Homo sapiens
  misc_RNA (1)...(19): siRNA sense strand
cuuggaugccauagcuaaa

SEQ ID NO: 2396191 - RNA, 19 nt, Homo sapiens
  misc_RNA (1)...(19): siRNA sense strand
gcucuugccuucagggagu

SEQ ID NO: 2396192 - RNA, 19 nt, Homo sapiens
  misc_RNA (1)...(19): siRNA sense strand
cucaaagccagccgggaaa

SEQ ID NO: 2396193 - RNA, 19 nt, Homo sapiens
  misc_RNA (1)...(19): siRNA sense strand
guagagaagaugcgccaga

SEQ ID NO: 2396194 - RNA, 19 nt, Homo sapiens
  misc_RNA (1)...(19): siRNA sense strand
ccaggaaccacauggacau

SEQ ID NO: 2396195 - RNA, 19 nt, Homo sapiens
  misc_RNA (1)...(19): siRNA sense strand
gcggcaacaucgagcucuu

SEQ ID NO: 2396196 - RNA, 19 nt, Homo sapiens
  misc_RNA (1)...(19): siRNA sense strand
ggaaccacaugcuuggcua

SEQ ID NO: 2396197 - RNA, 19 nt, Homo sapiens
  misc_RNA (1)...(19): siRNA sense strand
ggguaaggcgguagaggac

SEQ ID NO: 2396198 - RNA, 19 nt, Homo sapiens
  misc_RNA (1)...(19): siRNA sense strand
ggacaagaaccgcaggaug

SEQ ID NO: 2396199 - RNA, 19 nt, Homo sapiens
  misc_RNA (1)...(19): siRNA sense strand
ucuaaaacgugcaauacaa

SEQ ID NO: 2396200 - RNA, 19 nt, Homo sapiens
  misc_RNA (1)...(19): siRNA sense strand
ccuagauccccgaggaauu

SEQ ID NO: 2396201 - RNA, 19 nt, Homo sapiens
  misc_RNA (1)...(19): siRNA sense strand
gggaagaaucugacggagc

SEQ ID NO: 2396202 - RNA, 19 nt, Homo sapiens
  misc_RNA (1)...(19): siRNA sense strand
cagacuuccaccagaauuu

SEQ ID NO: 2396203 - RNA, 19 nt, Homo sapiens
  misc_RNA (1)...(19): siRNA sense strand
auucgauuuaagagagcaa

SEQ ID NO: 2396204 - RNA, 19 nt, Homo sapiens
  misc_RNA (1)...(19): siRNA sense strand
guacuauggcagagguuac

SEQ ID NO: 2396205 - RNA, 19 nt, Homo sapiens
  misc_RNA (1)...(19): siRNA sense strand
agguagagaagaugcgcca

SEQ ID NO: 2396206 - RNA, 19 nt, Homo sapiens
  misc_RNA (1)...(19): siRNA sense strand
gaucaaagccguugcugac

SEQ ID NO: 2396207 - RNA, 19 nt, Homo sapiens
  misc_RNA (1)...(19): siRNA sense strand
ggacacgagcgggaagaau

SEQ ID NO: 2396208 - RNA, 19 nt, Homo sapiens
  misc_RNA (1)...(19): siRNA sense strand
aggcgguagaggacaagaa

SEQ ID NO: 2396209 - RNA, 19 nt, Homo sapiens
  misc_RNA (1)...(19): siRNA sense strand
gcguccaagaggaguuauu

SEQ ID NO: 2396210 - RNA, 19 nt, Homo sapiens
  misc_RNA (1)...(19): siRNA sense strand
ccuugaauaaugacucuaa

SEQ ID NO: 2396211 - RNA, 19 nt, Homo sapiens
  misc_RNA (1)...(19): siRNA sense strand
gagaccaaacaaaggcaga

SEQ ID NO: 2396212 - RNA, 19 nt, Homo sapiens
  misc_RNA (1)...(19): siRNA sense strand
ggaagagguggaagguacu

SEQ ID NO: 2396213 - RNA, 19 nt, Homo sapiens
  misc_RNA (1)...(19): siRNA sense strand
guagcagguacgugggcaa

SEQ ID NO: 2396214 - RNA, 19 nt, Homo sapiens
  misc_RNA (1)...(19): siRNA sense strand
gcuccuuacugcagaccca

SEQ ID NO: 2396215 - RNA, 19 nt, Homo sapiens
  misc_RNA (1)...(19): siRNA sense strand
ccagaagaacugagagaga

SEQ ID NO: 2396216 - RNA, 19 nt, Homo sapiens
  misc_RNA (1)...(19): siRNA sense strand
ugauaaugaagaagaggaa

SEQ ID NO: 2396217 - RNA, 19 nt, Homo sapiens
  misc_RNA (1)...(19): siRNA sense strand
ugguagaacuuguggagga

SEQ ID NO: 2396218 - RNA, 19 nt, Homo sapiens
  misc_RNA (1)...(19): siRNA sense strand
agaagaacugagagagauu

SEQ ID NO: 2396219 - RNA, 19 nt, Homo sapiens
  misc_RNA (1)...(19): siRNA sense strand
aggagaaaucaaagcaaau

SEQ ID NO: 2396220 - RNA, 19 nt, Homo sapiens
  misc_RNA (1)...(19): siRNA sense strand
ggauguggcagauggaaau

SEQ ID NO: 2396221 - RNA, 19 nt, Homo sapiens
  misc_RNA (1)...(19): siRNA sense strand
auaaugaagaagaggaaca

SEQ ID NO: 2396222 - RNA, 19 nt, Homo sapiens
  misc_RNA (1)...(19): siRNA sense strand
aggauguggcagauggaaa

SEQ ID NO: 2396223 - RNA, 19 nt, Homo sapiens
  misc_RNA (1)...(19): siRNA sense strand
uggaugaacuugaacaaaa

SEQ ID NO: 2396224 - RNA, 19 nt, Homo sapiens
  misc_RNA (1)...(19): siRNA sense strand
cccaagaugaccagggcaa

SEQ ID NO: 2396225 - RNA, 19 nt, Homo sapiens
  misc_RNA (1)...(19): siRNA sense strand
aagagaaggauguggcaga

SEQ ID NO: 2396226 - RNA, 19 nt, Homo sapiens
  misc_RNA (1)...(19): siRNA sense strand
aaacugaggaaaugggaga

SEQ ID NO: 2396227 - RNA, 19 nt, Homo sapiens
  misc_RNA (1)...(19): siRNA sense strand
aaacaaacccagaagaacu

SEQ ID NO: 2396228 - RNA, 19 nt, Homo sapiens
  misc_RNA (1)...(19): siRNA sense strand
gcuuaucacaggagacuuu

SEQ ID NO: 2396229 - RNA, 19 nt, Homo sapiens
  misc_RNA (1)...(19): siRNA sense strand
agggaagcagauuggguaa

SEQ ID NO: 2396230 - RNA, 19 nt, Homo sapiens
  misc_RNA (1)...(19): siRNA sense strand
uguccgaggaguugaaauu

SEQ ID NO: 2396231 - RNA, 19 nt, Homo sapiens
  misc_RNA (1)...(19): siRNA sense strand
acuaguaaaugaugagagu

SEQ ID NO: 2396232 - RNA, 19 nt, Homo sapiens
  misc_RNA (1)...(19): siRNA sense strand
ugaaauuggcugugaucca

SEQ ID NO: 2396233 - RNA, 19 nt, Homo sapiens
  misc_RNA (1)...(19): siRNA sense strand
ugucaaacagcccgugaaa

SEQ ID NO: 2396234 - RNA, 19 nt, Homo sapiens
  misc_RNA (1)...(19): siRNA sense strand
cugcugggcuggagguuga

SEQ ID NO: 2396235 - RNA, 19 nt, Homo sapiens
  misc_RNA (1)...(19): siRNA sense strand
gacuacaagcugugaguga

SEQ ID NO: 2396236 - RNA, 19 nt, Homo sapiens
  misc_RNA (1)...(19): siRNA sense strand
gucuugaaacugaggaaau

SEQ ID NO: 2396237 - RNA, 19 nt, Homo sapiens
  misc_RNA (1)...(19): siRNA sense strand
gaacaguaacaucuggcaa

SEQ ID NO: 2396238 - RNA, 19 nt, Homo sapiens
  misc_RNA (1)...(19): siRNA sense strand
ccuccaagagcaaaguuua

SEQ ID NO: 2396239 - RNA, 19 nt, Homo sapiens
  misc_RNA (1)...(19): siRNA sense strand
ggcuggagguugaggaucu

SEQ ID NO: 2396240 - RNA, 19 nt, Homo sapiens
  misc_RNA (1)...(19): siRNA sense strand
ugaugaagguggacccaga

SEQ ID NO: 2396241 - RNA, 19 nt, Homo sapiens
  misc_RNA (1)...(19): siRNA sense strand
cucccaaaguggaugagaa

SEQ ID NO: 2396242 - RNA, 19 nt, Homo sapiens
  misc_RNA (1)...(19): siRNA sense strand
ucccaaaguggaugagaau

SEQ ID NO: 2396243 - RNA, 19 nt, Homo sapiens
  misc_RNA (1)...(19): siRNA sense strand
gugagggugaccugaauaa

SEQ ID NO: 2396244 - RNA, 19 nt, Homo sapiens
  misc_RNA (1)...(19): siRNA sense strand
cuacaagcugugagugaca

SEQ ID NO: 2396245 - RNA, 19 nt, Homo sapiens
  misc_RNA (1)...(19): siRNA sense strand
cauuaaugcacucagcuua

SEQ ID NO: 2396246 - RNA, 19 nt, Homo sapiens
  misc_RNA (1)...(19): siRNA sense strand
uugcagaacaggagaaauc

SEQ ID NO: 2396247 - RNA, 19 nt, Homo sapiens
  misc_RNA (1)...(19): siRNA sense strand
gcagaacaggagaaaucaa

SEQ ID NO: 2396248 - RNA, 19 nt, Homo sapiens
  misc_RNA (1)...(19): siRNA sense strand
gggaagcagauuggguaaa

SEQ ID NO: 2396249 - RNA, 19 nt, Homo sapiens
  misc_RNA (1)...(19): siRNA sense strand
uggaagucaugcugcggaa

SEQ ID NO: 2396250 - RNA, 19 nt, Homo sapiens
  misc_RNA (1)...(19): siRNA sense strand
gccugaaggucuuggaugu

SEQ ID NO: 2396251 - RNA, 19 nt, Homo sapiens
  misc_RNA (1)...(19): siRNA sense strand
gcacagaguagcagagcug

SEQ ID NO: 2396252 - RNA, 19 nt, Homo sapiens
  misc_RNA (1)...(19): siRNA sense strand
gcugaugguuuacagggaa

SEQ ID NO: 2396253 - RNA, 19 nt, Homo sapiens
  misc_RNA (1)...(19): siRNA sense strand
uuuauuugcuuguggauca

SEQ ID NO: 2396254 - RNA, 19 nt, Homo sapiens
  misc_RNA (1)...(19): siRNA sense strand
agacccagacaguggagaa

SEQ ID NO: 2396255 - RNA, 19 nt, Homo sapiens
  misc_RNA (1)...(19): siRNA sense strand
ccacuuguugucagauaaa

SEQ ID NO: 2396256 - RNA, 19 nt, Homo sapiens
  misc_RNA (1)...(19): siRNA sense strand
uggagaauguggagcaucu

SEQ ID NO: 2396257 - RNA, 19 nt, Homo sapiens
  misc_RNA (1)...(19): siRNA sense strand
acccagaagaacugagaga

SEQ ID NO: 2396258 - RNA, 19 nt, Homo sapiens
  misc_RNA (1)...(19): siRNA sense strand
cagcauuagcccagugguu

SEQ ID NO: 2396259 - RNA, 19 nt, Homo sapiens
  misc_RNA (1)...(19): siRNA sense strand
gcaacaaagcccucgcuga

SEQ ID NO: 2396260 - RNA, 19 nt, Homo sapiens
  misc_RNA (1)...(19): siRNA sense strand
cggcuguguccgaggaguu

SEQ ID NO: 2396261 - RNA, 19 nt, Homo sapiens
  misc_RNA (1)...(19): siRNA sense strand
guuuaggagaagagggaag

SEQ ID NO: 2396262 - RNA, 19 nt, Homo sapiens
  misc_RNA (1)...(19): siRNA sense strand
uuuacaagacagugagcuu

SEQ ID NO: 2396263 - RNA, 19 nt, Homo sapiens
  misc_RNA (1)...(19): siRNA sense strand
auccaagcccagugcaaua

SEQ ID NO: 2396264 - RNA, 19 nt, Homo sapiens
  misc_RNA (1)...(19): siRNA sense strand
aacaguaacaucuggcaaa

SEQ ID NO: 2396265 - RNA, 19 nt, Homo sapiens
  misc_RNA (1)...(19): siRNA sense strand
acuguuaggccuugcagaa

SEQ ID NO: 2396266 - RNA, 19 nt, Homo sapiens
  misc_RNA (1)...(19): siRNA sense strand
ccaagaugaccagggcaaa

SEQ ID NO: 2396267 - RNA, 19 nt, Homo sapiens
  misc_RNA (1)...(19): siRNA sense strand
augaacagcucaaaagaau

SEQ ID NO: 2396268 - RNA, 19 nt, Homo sapiens
  misc_RNA (1)...(19): siRNA sense strand
guagcagagcugaugguuu

SEQ ID NO: 2396269 - RNA, 19 nt, Homo sapiens
  misc_RNA (1)...(19): siRNA sense strand
cagggaagcagauugggua

SEQ ID NO: 2396270 - RNA, 19 nt, Homo sapiens
  misc_RNA (1)...(19): siRNA sense strand
ugaagaauacacaagucaa

SEQ ID NO: 2396271 - RNA, 19 nt, Homo sapiens
  misc_RNA (1)...(19): siRNA sense strand
aaguuuaggagaagaggga

SEQ ID NO: 2396272 - RNA, 19 nt, Homo sapiens
  misc_RNA (1)...(19): siRNA sense strand
uaaaacaaacccagaagaa

SEQ ID NO: 2396273 - RNA, 19 nt, Homo sapiens
  misc_RNA (1)...(19): siRNA sense strand
ccccaaagguccuggaagu

SEQ ID NO: 2396274 - RNA, 19 nt, Homo sapiens
  misc_RNA (1)...(19): siRNA sense strand
acguuuaggauuugcugua

SEQ ID NO: 2396275 - RNA, 19 nt, Homo sapiens
  misc_RNA (1)...(19): siRNA sense strand
agucaagauuggagagcaa

SEQ ID NO: 2396276 - RNA, 19 nt, Homo sapiens
  misc_RNA (1)...(19): siRNA sense strand
uugccaagcccuaggguaa

SEQ ID NO: 2396277 - RNA, 19 nt, Homo sapiens
  misc_RNA (1)...(19): siRNA sense strand
ggaagaagaugcugccaga

SEQ ID NO: 2396278 - RNA, 19 nt, Homo sapiens
  misc_RNA (1)...(19): siRNA sense strand
gaugaugauucuaggccaa

SEQ ID NO: 2396279 - RNA, 19 nt, Homo sapiens
  misc_RNA (1)...(19): siRNA sense strand
uggaagaaacugaggagau

SEQ ID NO: 2396280 - RNA, 19 nt, Homo sapiens
  misc_RNA (1)...(19): siRNA sense strand
uggugaaggaucagagcaa

SEQ ID NO: 2396281 - RNA, 19 nt, Homo sapiens
  misc_RNA (1)...(19): siRNA sense strand
caauggaagaugaggccaa

SEQ ID NO: 2396282 - RNA, 19 nt, Homo sapiens
  misc_RNA (1)...(19): siRNA sense strand
gaggcugagauuugggaaa

SEQ ID NO: 2396283 - RNA, 19 nt, Homo sapiens
  misc_RNA (1)...(19): siRNA sense strand
uggccagaauccacagaaa

SEQ ID NO: 2396284 - RNA, 19 nt, Homo sapiens
  misc_RNA (1)...(19): siRNA sense strand
cuguacaaccgaagggaga

SEQ ID NO: 2396285 - RNA, 19 nt, Homo sapiens
  misc_RNA (1)...(19): siRNA sense strand
gaucagagcaaguacccua

SEQ ID NO: 2396286 - RNA, 19 nt, Homo sapiens
  misc_RNA (1)...(19): siRNA sense strand
ggguucaagcugggagaaa

SEQ ID NO: 2396287 - RNA, 19 nt, Homo sapiens
  misc_RNA (1)...(19): siRNA sense strand
aauucgagguccugagaga

SEQ ID NO: 2396288 - RNA, 19 nt, Homo sapiens
  misc_RNA (1)...(19): siRNA sense strand
acaacgaagcucuggaaga

SEQ ID NO: 2396289 - RNA, 19 nt, Homo sapiens
  misc_RNA (1)...(19): siRNA sense strand
ccuagagcccguuuggaaa

SEQ ID NO: 2396290 - RNA, 19 nt, Homo sapiens
  misc_RNA (1)...(19): siRNA sense strand
cuauagaauucgagguccu

SEQ ID NO: 2396291 - RNA, 19 nt, Homo sapiens
  misc_RNA (1)...(19): siRNA sense strand
gggagauggaagaaacuga

SEQ ID NO: 2396292 - RNA, 19 nt, Homo sapiens
  misc_RNA (1)...(19): siRNA sense strand
cccaagacccuauggaaca

SEQ ID NO: 2396293 - RNA, 19 nt, Homo sapiens
  misc_RNA (1)...(19): siRNA sense strand
ugagagaacuugacccuga

SEQ ID NO: 2396294 - RNA, 19 nt, Homo sapiens
  misc_RNA (1)...(19): siRNA sense strand
cgaagggagauggaagaaa

SEQ ID NO: 2396295 - RNA, 19 nt, Homo sapiens
  misc_RNA (1)...(19): siRNA sense strand
cagaauccacagaaaggaa

SEQ ID NO: 2396296 - RNA, 19 nt, Homo sapiens
  misc_RNA (1)...(19): siRNA sense strand
gugaaggaucagagcaagu

SEQ ID NO: 2396297 - RNA, 19 nt, Homo sapiens
  misc_RNA (1)...(19): siRNA sense strand
ccucuaagaugaaagccuu

SEQ ID NO: 2396298 - RNA, 19 nt, Homo sapiens
  misc_RNA (1)...(19): siRNA sense strand
agguuugaauugagagaac

SEQ ID NO: 2396299 - RNA, 19 nt, Homo sapiens
  misc_RNA (1)...(19): siRNA sense strand
ggguuagaagagagcccaa

SEQ ID NO: 2396300 - RNA, 19 nt, Homo sapiens
  misc_RNA (1)...(19): siRNA sense strand
cuguaaaccaguggaguau

SEQ ID NO: 2396301 - RNA, 19 nt, Homo sapiens
  misc_RNA (1)...(19): siRNA sense strand
gguaagggaucaagcaccu

SEQ ID NO: 2396302 - RNA, 19 nt, Homo sapiens
  misc_RNA (1)...(19): siRNA sense strand
acagggaggcaauggaaga

SEQ ID NO: 2396303 - RNA, 19 nt, Homo sapiens
  misc_RNA (1)...(19): siRNA sense strand
gagucugaaaugcgggaau

SEQ ID NO: 2396304 - RNA, 19 nt, Homo sapiens
  misc_RNA (1)...(19): siRNA sense strand
guuugaauugagagaacuu

SEQ ID NO: 2396305 - RNA, 19 nt, Homo sapiens
  misc_RNA (1)...(19): siRNA sense strand
ccucaauacuucccggguu

SEQ ID NO: 2396306 - RNA, 19 nt, Homo sapiens
  misc_RNA (1)...(19): siRNA sense strand
ucaucuuuauuaugggcaa

SEQ ID NO: 2396307 - RNA, 19 nt, Homo sapiens
  misc_RNA (1)...(19): siRNA sense strand
ugggagaaagcaugugauu

SEQ ID NO: 2396308 - RNA, 19 nt, Homo sapiens
  misc_RNA (1)...(19): siRNA sense strand
uggaaaccucuaagaugaa

SEQ ID NO: 2396309 - RNA, 19 nt, Homo sapiens
  misc_RNA (1)...(19): siRNA sense strand
ccagagaaauacaacgaag

SEQ ID NO: 2396310 - RNA, 19 nt, Homo sapiens
  misc_RNA (1)...(19): siRNA sense strand
agauuggagagcaaggcaa

SEQ ID NO: 2396311 - RNA, 19 nt, Homo sapiens
  misc_RNA (1)...(19): siRNA sense strand
gcagcaaaguguucccuga

SEQ ID NO: 2396312 - RNA, 19 nt, Homo sapiens
  misc_RNA (1)...(19): siRNA sense strand
gauacuugagucagcgcua

SEQ ID NO: 2396313 - RNA, 19 nt, Homo sapiens
  misc_RNA (1)...(19): siRNA sense strand
gugcaauaugaguuuguau

SEQ ID NO: 2396314 - RNA, 19 nt, Homo sapiens
  misc_RNA (1)...(19): siRNA sense strand
ggccagagaaauacaacga

SEQ ID NO: 2396315 - RNA, 19 nt, Homo sapiens
  misc_RNA (1)...(19): siRNA sense strand
agaaauacaacgaagcucu

SEQ ID NO: 2396316 - RNA, 19 nt, Homo sapiens
  misc_RNA (1)...(19): siRNA sense strand
ugggacagaacuaguggua

SEQ ID NO: 2396317 - RNA, 19 nt, Homo sapiens
  misc_RNA (1)...(19): siRNA sense strand
ugggaaaugcucuggagga

SEQ ID NO: 2396318 - RNA, 19 nt, Homo sapiens
  misc_RNA (1)...(19): siRNA sense strand
ccuauggauuggccagaga

SEQ ID NO: 2396319 - RNA, 19 nt, Homo sapiens
  misc_RNA (1)...(19): siRNA sense strand
cuacauuggccgagagugc

SEQ ID NO: 2396320 - RNA, 19 nt, Homo sapiens
  misc_RNA (1)...(19): siRNA sense strand
ccaaacaggccuggcaaca

SEQ ID NO: 2396321 - RNA, 19 nt, Homo sapiens
  misc_RNA (1)...(19): siRNA sense strand
gaaaggaaccacaggacug

SEQ ID NO: 2396322 - RNA, 19 nt, Homo sapiens
  misc_RNA (1)...(19): siRNA sense strand
ccuaugaauacaaggaaua

SEQ ID NO: 2396323 - RNA, 19 nt, Homo sapiens
  misc_RNA (1)...(19): siRNA sense strand
aguucaugauggugagaaa

SEQ ID NO: 2396324 - RNA, 19 nt, Homo sapiens
  misc_RNA (1)...(19): siRNA sense strand
aauucauacuggugagaaa

SEQ ID NO: 2396325 - RNA, 19 nt, Homo sapiens
  misc_RNA (1)...(19): siRNA sense strand
aauucauaguggugagaaa

SEQ ID NO: 2396326 - RNA, 19 nt, Homo sapiens
  misc_RNA (1)...(19): siRNA sense strand
uggaguauguagagaacuu

SEQ ID NO: 2396327 - RNA, 19 nt, Homo sapiens
  misc_RNA (1)...(19): siRNA sense strand
aauacauacugguggaaaa

SEQ ID NO: 2396328 - RNA, 19 nt, Homo sapiens
  misc_RNA (1)...(19): siRNA sense strand
ucauugaacaucagagaau

SEQ ID NO: 2396329 - RNA, 19 nt, Homo sapiens
  misc_RNA (1)...(19): siRNA sense strand
uuggaaaaccuuugggaua

SEQ ID NO: 2396330 - RNA, 19 nt, Homo sapiens
  misc_RNA (1)...(19): siRNA sense strand
auguaaggagugugggaau

SEQ ID NO: 2396331 - RNA, 19 nt, Homo sapiens
  misc_RNA (1)...(19): siRNA sense strand
cuuuaguguuguugggcau

SEQ ID NO: 2396332 - RNA, 19 nt, Homo sapiens
  misc_RNA (1)...(19): siRNA sense strand
gggaaauccuuuagagugc

SEQ ID NO: 2396333 - RNA, 19 nt, Homo sapiens
  misc_RNA (1)...(19): siRNA sense strand
aggaauaugagaaggucuu

SEQ ID NO: 2396334 - RNA, 19 nt, Homo sapiens
  misc_RNA (1)...(19): siRNA sense strand
uuaccgaacaucagagaau

SEQ ID NO: 2396335 - RNA, 19 nt, Homo sapiens
  misc_RNA (1)...(19): siRNA sense strand
agaaauaguucaucccuga

SEQ ID NO: 2396336 - RNA, 19 nt, Homo sapiens
  misc_RNA (1)...(19): siRNA sense strand
aagaauucacaguggucaa

SEQ ID NO: 2396337 - RNA, 19 nt, Homo sapiens
  misc_RNA (1)...(19): siRNA sense strand
caguugugacuuagaguuu

SEQ ID NO: 2396338 - RNA, 19 nt, Homo sapiens
  misc_RNA (1)...(19): siRNA sense strand
gugggauauuucagucaaa

SEQ ID NO: 2396339 - RNA, 19 nt, Homo sapiens
  misc_RNA (1)...(19): siRNA sense strand
gcucauugaacaucagaga

SEQ ID NO: 2396340 - RNA, 19 nt, Homo sapiens
  misc_RNA (1)...(19): siRNA sense strand
uggcaaagcaaaagcaaga

SEQ ID NO: 2396341 - RNA, 19 nt, Homo sapiens
  misc_RNA (1)...(19): siRNA sense strand
ugggaaggcuuuuggagua

SEQ ID NO: 2396342 - RNA, 19 nt, Homo sapiens
  misc_RNA (1)...(19): siRNA sense strand
uguaaggagugugggaauu

SEQ ID NO: 2396343 - RNA, 19 nt, Homo sapiens
  misc_RNA (1)...(19): siRNA sense strand
cccuaugaauacaaggaau

SEQ ID NO: 2396344 - RNA, 19 nt, Homo sapiens
  misc_RNA (1)...(19): siRNA sense strand
guagagaacuugcucguca

SEQ ID NO: 2396345 - RNA, 19 nt, Homo sapiens
  misc_RNA (1)...(19): siRNA sense strand
ggugagaaacacuuugaau

SEQ ID NO: 2396346 - RNA, 19 nt, Homo sapiens
  misc_RNA (1)...(19): siRNA sense strand
ugacuagacaucagaggau

SEQ ID NO: 2396347 - RNA, 19 nt, Homo sapiens
  misc_RNA (1)...(19): siRNA sense strand
guaaagaaugugagaaagc

SEQ ID NO: 2396348 - RNA, 19 nt, Homo sapiens
  misc_RNA (1)...(19): siRNA sense strand
guggcaaggacuucagauu

SEQ ID NO: 2396349 - RNA, 19 nt, Homo sapiens
  misc_RNA (1)...(19): siRNA sense strand
gaaaauacauacuggugga

SEQ ID NO: 2396350 - RNA, 19 nt, Homo sapiens
  misc_RNA (1)...(19): siRNA sense strand
augcucauucugugggaaa

SEQ ID NO: 2396351 - RNA, 19 nt, Homo sapiens
  misc_RNA (1)...(19): siRNA sense strand
gugggaaggccuuuagaca

SEQ ID NO: 2396352 - RNA, 19 nt, Homo sapiens
  misc_RNA (1)...(19): siRNA sense strand
gugggaaggccuuuagaca

SEQ ID NO: 2396353 - RNA, 19 nt, Homo sapiens
  misc_RNA (1)...(19): siRNA sense strand
gaauguaaggaguguggga

SEQ ID NO: 2396354 - RNA, 19 nt, Homo sapiens
  misc_RNA (1)...(19): siRNA sense strand
ggugagaaaccuuaugcau

SEQ ID NO: 2396355 - RNA, 19 nt, Homo sapiens
  misc_RNA (1)...(19): siRNA sense strand
gugagaaagcauuuggagu

SEQ ID NO: 2396356 - RNA, 19 nt, Homo sapiens
  misc_RNA (1)...(19): siRNA sense strand
agugagaagcccuaugaau

SEQ ID NO: 2396357 - RNA, 19 nt, Homo sapiens
  misc_RNA (1)...(19): siRNA sense strand
acaaggaccugaaguggga

SEQ ID NO: 2396358 - RNA, 19 nt, Homo sapiens
  misc_RNA (1)...(19): siRNA sense strand
aggaaugugggaaggcuuu

SEQ ID NO: 2396359 - RNA, 19 nt, Homo sapiens
  misc_RNA (1)...(19): siRNA sense strand
cagagaauucauacuggua

SEQ ID NO: 2396360 - RNA, 19 nt, Homo sapiens
  misc_RNA (1)...(19): siRNA sense strand
agagaauucauacugguaa

SEQ ID NO: 2396361 - RNA, 19 nt, Homo sapiens
  misc_RNA (1)...(19): siRNA sense strand
gagaauucauacugguaag

SEQ ID NO: 2396362 - RNA, 19 nt, Homo sapiens
  misc_RNA (1)...(19): siRNA sense strand
aaagaaugugagaaagcau

SEQ ID NO: 2396363 - RNA, 19 nt, Homo sapiens
  misc_RNA (1)...(19): siRNA sense strand
uggaauguggcaaggacuu

SEQ ID NO: 2396364 - RNA, 19 nt, Homo sapiens
  misc_RNA (1)...(19): siRNA sense strand
ccuuacagaacaucagaga

SEQ ID NO: 2396365 - RNA, 19 nt, Homo sapiens
  misc_RNA (1)...(19): siRNA sense strand
auaucgugcuggagaacaa

SEQ ID NO: 2396366 - RNA, 19 nt, Homo sapiens
  misc_RNA (1)...(19): siRNA sense strand
ccugaacgagcgagaggaa

SEQ ID NO: 2396367 - RNA, 19 nt, Homo sapiens
  misc_RNA (1)...(19): siRNA sense strand
cagaauggcuccucgggau

SEQ ID NO: 2396368 - RNA, 19 nt, Homo sapiens
  misc_RNA (1)...(19): siRNA sense strand
agaacaacguggacggugu

SEQ ID NO: 2396369 - RNA, 19 nt, Homo sapiens
  misc_RNA (1)...(19): siRNA sense strand
ggauagagaugcaguggug

SEQ ID NO: 2396370 - RNA, 19 nt, Homo sapiens
  misc_RNA (1)...(19): siRNA sense strand
gggugggacacaaaggaau

SEQ ID NO: 2396371 - RNA, 19 nt, Homo sapiens
  misc_RNA (1)...(19): siRNA sense strand
ucacuuugacaaugggaau

SEQ ID NO: 2396372 - RNA, 19 nt, Homo sapiens
  misc_RNA (1)...(19): siRNA sense strand
gagacucggauguggucaa

SEQ ID NO: 2396373 - RNA, 19 nt, Homo sapiens
  misc_RNA (1)...(19): siRNA sense strand
augcugugguugugcucaa

SEQ ID NO: 2396374 - RNA, 19 nt, Homo sapiens
  misc_RNA (1)...(19): siRNA sense strand
gagaauggggagugggcca

SEQ ID NO: 2396375 - RNA, 19 nt, Homo sapiens
  misc_RNA (1)...(19): siRNA sense strand
acuacgacgcggagaacaa

SEQ ID NO: 2396376 - RNA, 19 nt, Homo sapiens
  misc_RNA (1)...(19): siRNA sense strand
ggaauagacuccuucguga

SEQ ID NO: 2396377 - RNA, 19 nt, Homo sapiens
  misc_RNA (1)...(19): siRNA sense strand
acaacuacgacgcggagaa

SEQ ID NO: 2396378 - RNA, 19 nt, Homo sapiens
  misc_RNA (1)...(19): siRNA sense strand
cggagaacaaacugaacga

SEQ ID NO: 2396379 - RNA, 19 nt, Homo sapiens
  misc_RNA (1)...(19): siRNA sense strand
ccuccuugcucuugggaca

SEQ ID NO: 2396380 - RNA, 19 nt, Homo sapiens
  misc_RNA (1)...(19): siRNA sense strand
ggucgaagaugaaggcccu

SEQ ID NO: 2396381 - RNA, 19 nt, Homo sapiens
  misc_RNA (1)...(19): siRNA sense strand
agguggaagucaagaugga

SEQ ID NO: 2396382 - RNA, 19 nt, Homo sapiens
  misc_RNA (1)...(19): siRNA sense strand
ccaggguggucuugagcca

SEQ ID NO: 2396383 - RNA, 19 nt, Homo sapiens
  misc_RNA (1)...(19): siRNA sense strand
caucaugaggauugcgcuu

SEQ ID NO: 2396384 - RNA, 19 nt, Homo sapiens
  misc_RNA (1)...(19): siRNA sense strand
cgggauuccuggcuggaca

SEQ ID NO: 2396385 - RNA, 19 nt, Homo sapiens
  misc_RNA (1)...(19): siRNA sense strand
gcccaggacaagagccuau

SEQ ID NO: 2396386 - RNA, 19 nt, Homo sapiens
  misc_RNA (1)...(19): siRNA sense strand
cgucaaggugagaacuuaa

SEQ ID NO: 2396387 - RNA, 19 nt, Homo sapiens
  misc_RNA (1)...(19): siRNA sense strand
cugaagacaagacggacaa

SEQ ID NO: 2396388 - RNA, 19 nt, Homo sapiens
  misc_RNA (1)...(19): siRNA sense strand
cagcauuggagguggaauc

SEQ ID NO: 2396389 - RNA, 19 nt, Homo sapiens
  misc_RNA (1)...(19): siRNA sense strand
ucugaagacaagacggaca

SEQ ID NO: 2396390 - RNA, 19 nt, Homo sapiens
  misc_RNA (1)...(19): siRNA sense strand
gacaagacggacaagggua

SEQ ID NO: 2396391 - RNA, 19 nt, Homo sapiens
  misc_RNA (1)...(19): siRNA sense strand
gagacaagaucaugcaggu

SEQ ID NO: 2396392 - RNA, 19 nt, Homo sapiens
  misc_RNA (1)...(19): siRNA sense strand
caggugaacggcugggaca

SEQ ID NO: 2396393 - RNA, 19 nt, Homo sapiens
  misc_RNA (1)...(19): siRNA sense strand
agguggagugggauagaaa

SEQ ID NO: 2396394 - RNA, 19 nt, Homo sapiens
  misc_RNA (1)...(19): siRNA sense strand
guggagugggauagaaaga

SEQ ID NO: 2396395 - RNA, 19 nt, Homo sapiens
  misc_RNA (1)...(19): siRNA sense strand
guauaaagugcgaacgucu

SEQ ID NO: 2396396 - RNA, 19 nt, Homo sapiens
  misc_RNA (1)...(19): siRNA sense strand
cagcagcagugaaugccaa

SEQ ID NO: 2396397 - RNA, 19 nt, Homo sapiens
  misc_RNA (1)...(19): siRNA sense strand
acaacuguguagaggacuu

SEQ ID NO: 2396398 - RNA, 19 nt, Homo sapiens
  misc_RNA (1)...(19): siRNA sense strand
aggacagggaggagcguga

SEQ ID NO: 2396399 - RNA, 19 nt, Homo sapiens
  misc_RNA (1)...(19): siRNA sense strand
aggacaaggaggacgacuu

SEQ ID NO: 2396400 - RNA, 19 nt, Homo sapiens
  misc_RNA (1)...(19): siRNA sense strand
cauccauccaggagcgcaa

SEQ ID NO: 2396401 - RNA, 19 nt, Homo sapiens
  misc_RNA (1)...(19): siRNA sense strand
caaguaagcuuaaugggca

SEQ ID NO: 2396402 - RNA, 19 nt, Homo sapiens
  misc_RNA (1)...(19): siRNA sense strand
aggaugaggacaaggagga

SEQ ID NO: 2396403 - RNA, 19 nt, Homo sapiens
  misc_RNA (1)...(19): siRNA sense strand
augagaagccacuggacuu

SEQ ID NO: 2396404 - RNA, 19 nt, Homo sapiens
  misc_RNA (1)...(19): siRNA sense strand
uguacaagaacguggaugu

SEQ ID NO: 2396405 - RNA, 19 nt, Homo sapiens
  misc_RNA (1)...(19): siRNA sense strand
cgcaugaaguggugugcca

SEQ ID NO: 2396406 - RNA, 19 nt, Homo sapiens
  misc_RNA (1)...(19): siRNA sense strand
guguagaggacuuugacca

SEQ ID NO: 2396407 - RNA, 19 nt, Homo sapiens
  misc_RNA (1)...(19): siRNA sense strand
ccgaggcugcugugggaau

SEQ ID NO: 2396408 - RNA, 19 nt, Homo sapiens
  misc_RNA (1)...(19): siRNA sense strand
gugcacacauggugggcgu

SEQ ID NO: 2396409 - RNA, 19 nt, Homo sapiens
  misc_RNA (1)...(19): siRNA sense strand
gagaagcaguuuaaggaga

SEQ ID NO: 2396410 - RNA, 19 nt, Homo sapiens
  misc_RNA (1)...(19): siRNA sense strand
gagaagcggaggagggaca

SEQ ID NO: 2396411 - RNA, 19 nt, Homo sapiens
  misc_RNA (1)...(19): siRNA sense strand
cgcuggugcuggaggaaau

SEQ ID NO: 2396412 - RNA, 19 nt, Homo sapiens
  misc_RNA (1)...(19): siRNA sense strand
ggucaacuuuggagggucu

SEQ ID NO: 2396413 - RNA, 19 nt, Homo sapiens
  misc_RNA (1)...(19): siRNA sense strand
ccaagguggccgagaagca

SEQ ID NO: 2396414 - RNA, 19 nt, Homo sapiens
  misc_RNA (1)...(19): siRNA sense strand
gagacaguccagaaggaga

SEQ ID NO: 2396415 - RNA, 19 nt, Homo sapiens
  misc_RNA (1)...(19): siRNA sense strand
aggaaauccggcagggcuu

SEQ ID NO: 2396416 - RNA, 19 nt, Homo sapiens
  misc_RNA (1)...(19): siRNA sense strand
ugguuuagauggcugggaa

SEQ ID NO: 2396417 - RNA, 19 nt, Homo sapiens
  misc_RNA (1)...(19): siRNA sense strand
ggggaggugcugcggaaaa

SEQ ID NO: 2396418 - RNA, 19 nt, Homo sapiens
  misc_RNA (1)...(19): siRNA sense strand
uggaggaggugauggugga

SEQ ID NO: 2396419 - RNA, 19 nt, Homo sapiens
  misc_RNA (1)...(19): siRNA sense strand
ccugaaggcgcuggugaaa

SEQ ID NO: 2396420 - RNA, 19 nt, Homo sapiens
  misc_RNA (1)...(19): siRNA sense strand
uggacaucgccaagaguga

SEQ ID NO: 2396421 - RNA, 19 nt, Homo sapiens
  misc_RNA (1)...(19): siRNA sense strand
ucaucgugguagagcgcau

SEQ ID NO: 2396422 - RNA, 19 nt, Homo sapiens
  misc_RNA (1)...(19): siRNA sense strand
uguaugacuucgagcagga

SEQ ID NO: 2396423 - RNA, 19 nt, Homo sapiens
  misc_RNA (1)...(19): siRNA sense strand
uccagguggugcagggcaa

SEQ ID NO: 2396424 - RNA, 19 nt, Homo sapiens
  misc_RNA (1)...(19): siRNA sense strand
agaucaaacuggagagcca

SEQ ID NO: 2396425 - RNA, 19 nt, Homo sapiens
  misc_RNA (1)...(19): siRNA sense strand
aggaagaagaugaagaaaa

SEQ ID NO: 2396426 - RNA, 19 nt, Homo sapiens
  misc_RNA (1)...(19): siRNA sense strand
gcguuaaagagaugcuaaa

SEQ ID NO: 2396427 - RNA, 19 nt, Homo sapiens
  misc_RNA (1)...(19): siRNA sense strand
aggagaagaagaagaagaa

SEQ ID NO: 2396428 - RNA, 19 nt, Homo sapiens
  misc_RNA (1)...(19): siRNA sense strand
agaaagagaaagaggcuca

SEQ ID NO: 2396429 - RNA, 19 nt, Homo sapiens
  misc_RNA (1)...(19): siRNA sense strand
uggaagaggagaaagacaa

SEQ ID NO: 2396430 - RNA, 19 nt, Homo sapiens
  misc_RNA (1)...(19): siRNA sense strand
gcucgaacuccuugggaau

SEQ ID NO: 2396431 - RNA, 19 nt, Homo sapiens
  misc_RNA (1)...(19): siRNA sense strand
cccgaaaauuugaagaaaa

SEQ ID NO: 2396432 - RNA, 19 nt, Homo sapiens
  misc_RNA (1)...(19): siRNA sense strand
ggacccagggaguggcaaa

SEQ ID NO: 2396433 - RNA, 19 nt, Homo sapiens
  misc_RNA (1)...(19): siRNA sense strand
cggaugaggaagaagauga

SEQ ID NO: 2396434 - RNA, 19 nt, Homo sapiens
  misc_RNA (1)...(19): siRNA sense strand
gaagaauauccgagggaag

SEQ ID NO: 2396435 - RNA, 19 nt, Homo sapiens
  misc_RNA (1)...(19): siRNA sense strand
acacuuaugacaaggagaa

SEQ ID NO: 2396436 - RNA, 19 nt, Homo sapiens
  misc_RNA (1)...(19): siRNA sense strand
ccaagaugcuggaagagga

SEQ ID NO: 2396437 - RNA, 19 nt, Homo sapiens
  misc_RNA (1)...(19): siRNA sense strand
cuuaugacaaggagaagaa

SEQ ID NO: 2396438 - RNA, 19 nt, Homo sapiens
  misc_RNA (1)...(19): siRNA sense strand
aguaaggagaagaagaaga

SEQ ID NO: 2396439 - RNA, 19 nt, Homo sapiens
  misc_RNA (1)...(19): siRNA sense strand
cccaaguucagcagggaaa

SEQ ID NO: 2396440 - RNA, 19 nt, Homo sapiens
  misc_RNA (1)...(19): siRNA sense strand
gggcaggagaacagcauca

SEQ ID NO: 2396441 - RNA, 19 nt, Homo sapiens
  misc_RNA (1)...(19): siRNA sense strand
uggaaagaaacguagaaaa

SEQ ID NO: 2396442 - RNA, 19 nt, Homo sapiens
  misc_RNA (1)...(19): siRNA sense strand
aaggagaagaagaagaaga

SEQ ID NO: 2396443 - RNA, 19 nt, Homo sapiens
  misc_RNA (1)...(19): siRNA sense strand
gggcgaugccagagcagau

SEQ ID NO: 2396444 - RNA, 19 nt, Homo sapiens
  misc_RNA (1)...(19): siRNA sense strand
aggcacacacgcaggcaaa

SEQ ID NO: 2396445 - RNA, 19 nt, Homo sapiens
  misc_RNA (1)...(19): siRNA sense strand
ugggauuggaccaggaauu

SEQ ID NO: 2396446 - RNA, 19 nt, Homo sapiens
  misc_RNA (1)...(19): siRNA sense strand
aggaaaggcauaaaguaga

SEQ ID NO: 2396447 - RNA, 19 nt, Homo sapiens
  misc_RNA (1)...(19): siRNA sense strand
uugccaagaugcuggaaga

SEQ ID NO: 2396448 - RNA, 19 nt, Homo sapiens
  misc_RNA (1)...(19): siRNA sense strand
aggagaaagacaaggagca

SEQ ID NO: 2396449 - RNA, 19 nt, Homo sapiens
  misc_RNA (1)...(19): siRNA sense strand
cguuuuauguacagaagaa

SEQ ID NO: 2396450 - RNA, 19 nt, Homo sapiens
  misc_RNA (1)...(19): siRNA sense strand
ucgauaacucugaggcgua

SEQ ID NO: 2396451 - RNA, 19 nt, Homo sapiens
  misc_RNA (1)...(19): siRNA sense strand
cagaaguacaucaguccaa

SEQ ID NO: 2396452 - RNA, 19 nt, Homo sapiens
  misc_RNA (1)...(19): siRNA sense strand
gagaaagaggcucagaaaa

SEQ ID NO: 2396453 - RNA, 19 nt, Homo sapiens
  misc_RNA (1)...(19): siRNA sense strand
uggaauccuauuagacaua

SEQ ID NO: 2396454 - RNA, 19 nt, Homo sapiens
  misc_RNA (1)...(19): siRNA sense strand
gccagguggugaagaucaa

SEQ ID NO: 2396455 - RNA, 19 nt, Homo sapiens
  misc_RNA (1)...(19): siRNA sense strand
cuucuaaaaucaaggugaa

SEQ ID NO: 2396456 - RNA, 19 nt, Homo sapiens
  misc_RNA (1)...(19): siRNA sense strand
cuggagauaagaagaaaga

SEQ ID NO: 2396457 - RNA, 19 nt, Homo sapiens
  misc_RNA (1)...(19): siRNA sense strand
cuggaagaggagaaagaca

SEQ ID NO: 2396458 - RNA, 19 nt, Homo sapiens
  misc_RNA (1)...(19): siRNA sense strand
aagacaaggagcagaggga

SEQ ID NO: 2396459 - RNA, 19 nt, Homo sapiens
  misc_RNA (1)...(19): siRNA sense strand
guggaaagaaacguagaaa

SEQ ID NO: 2396460 - RNA, 19 nt, Homo sapiens
  misc_RNA (1)...(19): siRNA sense strand
gugaagaauauccgaggga

SEQ ID NO: 2396461 - RNA, 19 nt, Homo sapiens
  misc_RNA (1)...(19): siRNA sense strand
ggcauaaaguagaggcccu

SEQ ID NO: 2396462 - RNA, 19 nt, Homo sapiens
  misc_RNA (1)...(19): siRNA sense strand
gguggaaagaaacguagaa

SEQ ID NO: 2396463 - RNA, 19 nt, Homo sapiens
  misc_RNA (1)...(19): siRNA sense strand
aggaagguggugagaagau

SEQ ID NO: 2396464 - RNA, 19 nt, Homo sapiens
  misc_RNA (1)...(19): siRNA sense strand
cagcggaaguucagggccu

SEQ ID NO: 2396465 - RNA, 19 nt, Homo sapiens
  misc_RNA (1)...(19): siRNA sense strand
gccaguaaggagaagaaga

SEQ ID NO: 2396466 - RNA, 19 nt, Homo sapiens
  misc_RNA (1)...(19): siRNA sense strand
ggagagcagacgaggccau

SEQ ID NO: 2396467 - RNA, 19 nt, Homo sapiens
  misc_RNA (1)...(19): siRNA sense strand
augaagacuugauccgcaa

SEQ ID NO: 2396468 - RNA, 19 nt, Homo sapiens
  misc_RNA (1)...(19): siRNA sense strand
guucggaugaggaagaaga

SEQ ID NO: 2396469 - RNA, 19 nt, Homo sapiens
  misc_RNA (1)...(19): siRNA sense strand
aagcggaaguugaaggaag

SEQ ID NO: 2396470 - RNA, 19 nt, Homo sapiens
  misc_RNA (1)...(19): siRNA sense strand
uagcagagcagcugggaac

SEQ ID NO: 2396471 - RNA, 19 nt, Homo sapiens
  misc_RNA (1)...(19): siRNA sense strand
ugggaaagggccugcugua

SEQ ID NO: 2396472 - RNA, 19 nt, Homo sapiens
  misc_RNA (1)...(19): siRNA sense strand
gggguaugguuaugaugaa

SEQ ID NO: 2396473 - RNA, 19 nt, Homo sapiens
  misc_RNA (1)...(19): siRNA sense strand
agaugcuggaagaggagaa

SEQ ID NO: 2396474 - RNA, 19 nt, Homo sapiens
  misc_RNA (1)...(19): siRNA sense strand
augaggaagaagaugaaga

SEQ ID NO: 2396475 - RNA, 19 nt, Homo sapiens
  misc_RNA (1)...(19): siRNA sense strand
aggacugugugaagggcuu

SEQ ID NO: 2396476 - RNA, 19 nt, Homo sapiens
  misc_RNA (1)...(19): siRNA sense strand
ggguaugguuaugaugaau

SEQ ID NO: 2396477 - RNA, 19 nt, Homo sapiens
  misc_RNA (1)...(19): siRNA sense strand
gguggugagaagauaaaga

SEQ ID NO: 2396478 - RNA, 19 nt, Homo sapiens
  misc_RNA (1)...(19): siRNA sense strand
cggauuuggacuuggagca

SEQ ID NO: 2396479 - RNA, 19 nt, Homo sapiens
  misc_RNA (1)...(19): siRNA sense strand
uauuagacauagaggcgca

SEQ ID NO: 2396480 - RNA, 19 nt, Homo sapiens
  misc_RNA (1)...(19): siRNA sense strand
ugcuggaagaggagaaaga

SEQ ID NO: 2396481 - RNA, 19 nt, Homo sapiens
  misc_RNA (1)...(19): siRNA sense strand
gaggaagaagaugaagaaa

SEQ ID NO: 2396482 - RNA, 19 nt, Homo sapiens
  misc_RNA (1)...(19): siRNA sense strand
uagugaagacagcggccaa

SEQ ID NO: 2396483 - RNA, 19 nt, Homo sapiens
  misc_RNA (1)...(19): siRNA sense strand
cuucucagcuucaugggaa

SEQ ID NO: 2396484 - RNA, 19 nt, Homo sapiens
  misc_RNA (1)...(19): siRNA sense strand
aagaugacacuuaugacaa

SEQ ID NO: 2396485 - RNA, 19 nt, Homo sapiens
  misc_RNA (1)...(19): siRNA sense strand
ggauaaugggaccucggaa

SEQ ID NO: 2396486 - RNA, 19 nt, Homo sapiens
  misc_RNA (1)...(19): siRNA sense strand
acaaagagcuguccugcca

SEQ ID NO: 2396487 - RNA, 19 nt, Homo sapiens
  misc_RNA (1)...(19): siRNA sense strand
ggcacaaggagaugagcaa

SEQ ID NO: 2396488 - RNA, 19 nt, Homo sapiens
  misc_RNA (1)...(19): siRNA sense strand
gcuaagugcaauagggucu

SEQ ID NO: 2396489 - RNA, 19 nt, Homo sapiens
  misc_RNA (1)...(19): siRNA sense strand
cagaacaaguuaaaggagu

SEQ ID NO: 2396490 - RNA, 19 nt, Homo sapiens
  misc_RNA (1)...(19): siRNA sense strand
gcaucguggagcaggagaa

SEQ ID NO: 2396491 - RNA, 19 nt, Homo sapiens
  misc_RNA (1)...(19): siRNA sense strand
aggcagaugaugagcgcca

SEQ ID NO: 2396492 - RNA, 19 nt, Homo sapiens
  misc_RNA (1)...(19): siRNA sense strand
aggcugcacaacaggguaa

SEQ ID NO: 2396493 - RNA, 19 nt, Homo sapiens
  misc_RNA (1)...(19): siRNA sense strand
agacgauggagcugcggaa

SEQ ID NO: 2396494 - RNA, 19 nt, Homo sapiens
  misc_RNA (1)...(19): siRNA sense strand
ccuauaaggaccugugcga

SEQ ID NO: 2396495 - RNA, 19 nt, Homo sapiens
  misc_RNA (1)...(19): siRNA sense strand
cugcacaaguacagccuga

SEQ ID NO: 2396496 - RNA, 19 nt, Homo sapiens
  misc_RNA (1)...(19): siRNA sense strand
cuaccagggccaaggacuu

SEQ ID NO: 2396497 - RNA, 19 nt, Homo sapiens
  misc_RNA (1)...(19): siRNA sense strand
cagcugacauccaggcuca

SEQ ID NO: 2396498 - RNA, 19 nt, Homo sapiens
  misc_RNA (1)...(19): siRNA sense strand
agaacaaguuaaaggaguc

SEQ ID NO: 2396499 - RNA, 19 nt, Homo sapiens
  misc_RNA (1)...(19): siRNA sense strand
uccugaagcauguggagua

SEQ ID NO: 2396500 - RNA, 19 nt, Homo sapiens
  misc_RNA (1)...(19): siRNA sense strand
ggguaagcaggaagagaac

SEQ ID NO: 2396501 - RNA, 19 nt, Homo sapiens
  misc_RNA (1)...(19): siRNA sense strand
ggagagcccugaagcgcuu

SEQ ID NO: 2396502 - RNA, 19 nt, Homo sapiens
  misc_RNA (1)...(19): siRNA sense strand
ccgacaaggcugcacaaca

SEQ ID NO: 2396503 - RNA, 19 nt, Homo sapiens
  misc_RNA (1)...(19): siRNA sense strand
aguuaaaggagucagcaca

SEQ ID NO: 2396504 - RNA, 19 nt, Homo sapiens
  misc_RNA (1)...(19): siRNA sense strand
ccgugcagguggagcucau

SEQ ID NO: 2396505 - RNA, 19 nt, Homo sapiens
  misc_RNA (1)...(19): siRNA sense strand
gagaagggcguguugcaca

SEQ ID NO: 2396506 - RNA, 19 nt, Homo sapiens
  misc_RNA (1)...(19): siRNA sense strand
gggcacaaggagaugagca

SEQ ID NO: 2396507 - RNA, 19 nt, Homo sapiens
  misc_RNA (1)...(19): siRNA sense strand
agaugagcaagguguggaa

SEQ ID NO: 2396508 - RNA, 19 nt, Homo sapiens
  misc_RNA (1)...(19): siRNA sense strand
gguuaaaacaccaggcaaa

SEQ ID NO: 2396509 - RNA, 19 nt, Homo sapiens
  misc_RNA (1)...(19): siRNA sense strand
ccuaugaaguugagcgaca

SEQ ID NO: 2396510 - RNA, 19 nt, Homo sapiens
  misc_RNA (1)...(19): siRNA sense strand
ugaaagagcccauaggcaa

SEQ ID NO: 2396511 - RNA, 19 nt, Homo sapiens
  misc_RNA (1)...(19): siRNA sense strand
uuaaaggacuucaagguga

SEQ ID NO: 2396512 - RNA, 19 nt, Homo sapiens
  misc_RNA (1)...(19): siRNA sense strand
acaugguggucuuaggcaa

SEQ ID NO: 2396513 - RNA, 19 nt, Homo sapiens
  misc_RNA (1)...(19): siRNA sense strand
cauugaaagccaacugcaa

SEQ ID NO: 2396514 - RNA, 19 nt, Homo sapiens
  misc_RNA (1)...(19): siRNA sense strand
ggauauguuacccgggaga

SEQ ID NO: 2396515 - RNA, 19 nt, Homo sapiens
  misc_RNA (1)...(19): siRNA sense strand
gccaacagcuucagggucu

SEQ ID NO: 2396516 - RNA, 19 nt, Homo sapiens
  misc_RNA (1)...(19): siRNA sense strand
gagacaaucuucaugcaca

SEQ ID NO: 2396517 - RNA, 19 nt, Homo sapiens
  misc_RNA (1)...(19): siRNA sense strand
ugguuaacaugguggucuu

SEQ ID NO: 2396518 - RNA, 19 nt, Homo sapiens
  misc_RNA (1)...(19): siRNA sense strand
uggugggagucgaggcaca

SEQ ID NO: 2396519 - RNA, 19 nt, Homo sapiens
  misc_RNA (1)...(19): siRNA sense strand
uuaaugagaugcuggcaga

SEQ ID NO: 2396520 - RNA, 19 nt, Homo sapiens
  misc_RNA (1)...(19): siRNA sense strand
guaaugugcugaagcggga

SEQ ID NO: 2396521 - RNA, 19 nt, Homo sapiens
  misc_RNA (1)...(19): siRNA sense strand
aguaaggaauuaaaggacu

SEQ ID NO: 2396522 - RNA, 19 nt, Homo sapiens
  misc_RNA (1)...(19): siRNA sense strand
gugaaagagcccauaggca

SEQ ID NO: 2396523 - RNA, 19 nt, Homo sapiens
  misc_RNA (1)...(19): siRNA sense strand
aggaauuaaaggacuucaa

SEQ ID NO: 2396524 - RNA, 19 nt, Homo sapiens
  misc_RNA (1)...(19): siRNA sense strand
caaagagaguugugcagcu

SEQ ID NO: 2396525 - RNA, 19 nt, Homo sapiens
  misc_RNA (1)...(19): siRNA sense strand
gagccaaggggacaagaaa

SEQ ID NO: 2396526 - RNA, 19 nt, Homo sapiens
  misc_RNA (1)...(19): siRNA sense strand
gggccauguggacgaguuu

SEQ ID NO: 2396527 - RNA, 19 nt, Homo sapiens
  misc_RNA (1)...(19): siRNA sense strand
ccaaagaggaagagcaaaa

SEQ ID NO: 2396528 - RNA, 19 nt, Homo sapiens
  misc_RNA (1)...(19): siRNA sense strand
uaacagaaacaaagggcua

SEQ ID NO: 2396529 - RNA, 19 nt, Homo sapiens
  misc_RNA (1)...(19): siRNA sense strand
ggcagaaagaagauggaaa

SEQ ID NO: 2396530 - RNA, 19 nt, Homo sapiens
  misc_RNA (1)...(19): siRNA sense strand
ggguaaaagccaaaguaaa

SEQ ID NO: 2396531 - RNA, 19 nt, Homo sapiens
  misc_RNA (1)...(19): siRNA sense strand
guuacaugacaguggauaa

SEQ ID NO: 2396532 - RNA, 19 nt, Homo sapiens
  misc_RNA (1)...(19): siRNA sense strand
cagaauacaaccagaguca

SEQ ID NO: 2396533 - RNA, 19 nt, Homo sapiens
  misc_RNA (1)...(19): siRNA sense strand
uauuaugcuuggaaggaaa

SEQ ID NO: 2396534 - RNA, 19 nt, Homo sapiens
  misc_RNA (1)...(19): siRNA sense strand
gcaaauaaacacaaagcca

SEQ ID NO: 2396535 - RNA, 19 nt, Homo sapiens
  misc_RNA (1)...(19): siRNA sense strand
gaaaggagaaggaggcaga

SEQ ID NO: 2396536 - RNA, 19 nt, Homo sapiens
  misc_RNA (1)...(19): siRNA sense strand
uuccuaaaguauuggguaa

SEQ ID NO: 2396537 - RNA, 19 nt, Homo sapiens
  misc_RNA (1)...(19): siRNA sense strand
ugcuuuaacuggagggcua

SEQ ID NO: 2396538 - RNA, 19 nt, Homo sapiens
  misc_RNA (1)...(19): siRNA sense strand
caaauaaacacaaagccaa

SEQ ID NO: 2396539 - RNA, 19 nt, Homo sapiens
  misc_RNA (1)...(19): siRNA sense strand
ucaaaugguacuuggagaa

SEQ ID NO: 2396540 - RNA, 19 nt, Homo sapiens
  misc_RNA (1)...(19): siRNA sense strand
ccuaaggggacaugggaaa

SEQ ID NO: 2396541 - RNA, 19 nt, Homo sapiens
  misc_RNA (1)...(19): siRNA sense strand
ugaagacaguggagcggaa

SEQ ID NO: 2396542 - RNA, 19 nt, Homo sapiens
  misc_RNA (1)...(19): siRNA sense strand
cuaacaagcagaagacaga

SEQ ID NO: 2396543 - RNA, 19 nt, Homo sapiens
  misc_RNA (1)...(19): siRNA sense strand
gcagaagacagacgggaga

SEQ ID NO: 2396544 - RNA, 19 nt, Homo sapiens
  misc_RNA (1)...(19): siRNA sense strand
ccucaucgaccaagggcua

SEQ ID NO: 2396545 - RNA, 19 nt, Homo sapiens
  misc_RNA (1)...(19): siRNA sense strand
aaccaaagaggaagagcaa

SEQ ID NO: 2396546 - RNA, 19 nt, Homo sapiens
  misc_RNA (1)...(19): siRNA sense strand
agcaaagggagcugcgaaa

SEQ ID NO: 2396547 - RNA, 19 nt, Homo sapiens
  misc_RNA (1)...(19): siRNA sense strand
cgaaagaaacugaagugca

SEQ ID NO: 2396548 - RNA, 19 nt, Homo sapiens
  misc_RNA (1)...(19): siRNA sense strand
uuaauguggcuuuggguaa

SEQ ID NO: 2396549 - RNA, 19 nt, Homo sapiens
  misc_RNA (1)...(19): siRNA sense strand
guggaugugugguggugaa

SEQ ID NO: 2396550 - RNA, 19 nt, Homo sapiens
  misc_RNA (1)...(19): siRNA sense strand
ccucauucauagcagcaaa

SEQ ID NO: 2396551 - RNA, 19 nt, Homo sapiens
  misc_RNA (1)...(19): siRNA sense strand
cgaccaagggcuagauguu

SEQ ID NO: 2396552 - RNA, 19 nt, Homo sapiens
  misc_RNA (1)...(19): siRNA sense strand
agaaagaagauggaaagaa

SEQ ID NO: 2396553 - RNA, 19 nt, Homo sapiens
  misc_RNA (1)...(19): siRNA sense strand
gauaaggauaugaguuaca

SEQ ID NO: 2396554 - RNA, 19 nt, Homo sapiens
  misc_RNA (1)...(19): siRNA sense strand
guggugaaauugagaucau

SEQ ID NO: 2396555 - RNA, 19 nt, Homo sapiens
  misc_RNA (1)...(19): siRNA sense strand
cugaaagggacuugaaugu

SEQ ID NO: 2396556 - RNA, 19 nt, Homo sapiens
  misc_RNA (1)...(19): siRNA sense strand
gcaaucuauuaaugagaca

SEQ ID NO: 2396557 - RNA, 19 nt, Homo sapiens
  misc_RNA (1)...(19): siRNA sense strand
gcucaugggaagaaacuca

SEQ ID NO: 2396558 - RNA, 19 nt, Homo sapiens
  misc_RNA (1)...(19): siRNA sense strand
cccaaagaccggaugaaga

SEQ ID NO: 2396559 - RNA, 19 nt, Homo sapiens
  misc_RNA (1)...(19): siRNA sense strand
gguaaaagccaaaguaaac

SEQ ID NO: 2396560 - RNA, 19 nt, Homo sapiens
  misc_RNA (1)...(19): siRNA sense strand
aagccaaaguaaacacauu

SEQ ID NO: 2396561 - RNA, 19 nt, Homo sapiens
  misc_RNA (1)...(19): siRNA sense strand
cggaagagucauaguccca

SEQ ID NO: 2396562 - RNA, 19 nt, Homo sapiens
  misc_RNA (1)...(19): siRNA sense strand
guagaugacuucagcacca

SEQ ID NO: 2396563 - RNA, 19 nt, Homo sapiens
  misc_RNA (1)...(19): siRNA sense strand
agccauggccuuaaacaaa

SEQ ID NO: 2396564 - RNA, 19 nt, Homo sapiens
  misc_RNA (1)...(19): siRNA sense strand
aaggaaacuucaaugucua

SEQ ID NO: 2396565 - RNA, 19 nt, Homo sapiens
  misc_RNA (1)...(19): siRNA sense strand
aguauaaggagcuguucua

SEQ ID NO: 2396566 - RNA, 19 nt, Homo sapiens
  misc_RNA (1)...(19): siRNA sense strand
cgaugggagcaaagagcuu

SEQ ID NO: 2396567 - RNA, 19 nt, Homo sapiens
  misc_RNA (1)...(19): siRNA sense strand
acacaaagccaauacgagu

SEQ ID NO: 2396568 - RNA, 19 nt, Homo sapiens
  misc_RNA (1)...(19): siRNA sense strand
aaacccagagggaaagaaa

SEQ ID NO: 2396569 - RNA, 19 nt, Homo sapiens
  misc_RNA (1)...(19): siRNA sense strand
auucaaaucgcuuaaggaa

SEQ ID NO: 2396570 - RNA, 19 nt, Homo sapiens
  misc_RNA (1)...(19): siRNA sense strand
aggucuggcuggaugagua

SEQ ID NO: 2396571 - RNA, 19 nt, Homo sapiens
  misc_RNA (1)...(19): siRNA sense strand
cagugaagccauaucaaaa

SEQ ID NO: 2396572 - RNA, 19 nt, Homo sapiens
  misc_RNA (1)...(19): siRNA sense strand
ggaccaaacccagagggaa

SEQ ID NO: 2396573 - RNA, 19 nt, Homo sapiens
  misc_RNA (1)...(19): siRNA sense strand
aggaagagcaaaaggcaga

SEQ ID NO: 2396574 - RNA, 19 nt, Homo sapiens
  misc_RNA (1)...(19): siRNA sense strand
caguaaucgaagucaucaa

SEQ ID NO: 2396575 - RNA, 19 nt, Homo sapiens
  misc_RNA (1)...(19): siRNA sense strand
aacuuugguuggagaacaa

SEQ ID NO: 2396576 - RNA, 19 nt, Homo sapiens
  misc_RNA (1)...(19): siRNA sense strand
cagaaaugacaauccauau

SEQ ID NO: 2396577 - RNA, 19 nt, Homo sapiens
  misc_RNA (1)...(19): siRNA sense strand
aggaagacauugugaggag

SEQ ID NO: 2396578 - RNA, 19 nt, Homo sapiens
  misc_RNA (1)...(19): siRNA sense strand
gauucagaguucagccaga

SEQ ID NO: 2396579 - RNA, 19 nt, Homo sapiens
  misc_RNA (1)...(19): siRNA sense strand
caggaauagaagugagaug

SEQ ID NO: 2396580 - RNA, 19 nt, Homo sapiens
  misc_RNA (1)...(19): siRNA sense strand
ggaaaggggcauggggcaa

SEQ ID NO: 2396581 - RNA, 19 nt, Homo sapiens
  misc_RNA (1)...(19): siRNA sense strand
caucaaaacuagcagcuga

SEQ ID NO: 2396582 - RNA, 19 nt, Homo sapiens
  misc_RNA (1)...(19): siRNA sense strand
agaaggaggcagaaagaag

SEQ ID NO: 2396583 - RNA, 19 nt, Homo sapiens
  misc_RNA (1)...(19): siRNA sense strand
cuccagaugucauugcaaa

SEQ ID NO: 2396584 - RNA, 19 nt, Homo sapiens
  misc_RNA (1)...(19): siRNA sense strand
ggcuaaaauggcugcauaa

SEQ ID NO: 2396585 - RNA, 19 nt, Homo sapiens
  misc_RNA (1)...(19): siRNA sense strand
cgaagagaagagagaguca

SEQ ID NO: 2396586 - RNA, 19 nt, Homo sapiens
  misc_RNA (1)...(19): siRNA sense strand
ugauagaucuggaugguca

SEQ ID NO: 2396587 - RNA, 19 nt, Homo sapiens
  misc_RNA (1)...(19): siRNA sense strand
augaagacccuaaggaaaa

SEQ ID NO: 2396588 - RNA, 19 nt, Homo sapiens
  misc_RNA (1)...(19): siRNA sense strand
acaaugaguggguggucaa

SEQ ID NO: 2396589 - RNA, 19 nt, Homo sapiens
  misc_RNA (1)...(19): siRNA sense strand
acgucaaggccgagaggga

SEQ ID NO: 2396590 - RNA, 19 nt, Homo sapiens
  misc_RNA (1)...(19): siRNA sense strand
ccuugagggaaaucagaua

SEQ ID NO: 2396591 - RNA, 19 nt, Homo sapiens
  misc_RNA (1)...(19): siRNA sense strand
agucacgcaucaagagcua

SEQ ID NO: 2396592 - RNA, 19 nt, Homo sapiens
  misc_RNA (1)...(19): siRNA sense strand
cuauguuugucaagaucaa

SEQ ID NO: 2396593 - RNA, 19 nt, Homo sapiens
  misc_RNA (1)...(19): siRNA sense strand
gagcagauugugcggguca

SEQ ID NO: 2396594 - RNA, 19 nt, Homo sapiens
  misc_RNA (1)...(19): siRNA sense strand
uggagcagcacguggagaa

SEQ ID NO: 2396595 - RNA, 19 nt, Homo sapiens
  misc_RNA (1)...(19): siRNA sense strand
cagcagcagaugagagcca

SEQ ID NO: 2396596 - RNA, 19 nt, Homo sapiens
  misc_RNA (1)...(19): siRNA sense strand
ggauggaggucuucccuga

SEQ ID NO: 2396597 - RNA, 19 nt, Homo sapiens
  misc_RNA (1)...(19): siRNA sense strand
aaauauuaccagaaaggga

SEQ ID NO: 2396598 - RNA, 19 nt, Homo sapiens
  misc_RNA (1)...(19): siRNA sense strand
cggcaaaugcugcaggaac

SEQ ID NO: 2396599 - RNA, 19 nt, Homo sapiens
  misc_RNA (1)...(19): siRNA sense strand
uguacuuugugauggacua

SEQ ID NO: 2396600 - RNA, 19 nt, Homo sapiens
  misc_RNA (1)...(19): siRNA sense strand
gaagaaagcccuuggaacg

SEQ ID NO: 2396601 - RNA, 19 nt, Homo sapiens
  misc_RNA (1)...(19): siRNA sense strand
gacgaagagaagagagagu

SEQ ID NO: 2396602 - RNA, 19 nt, Homo sapiens
  misc_RNA (1)...(19): siRNA sense strand
ccgaugaccugaaggccca

SEQ ID NO: 2396603 - RNA, 19 nt, Homo sapiens
  misc_RNA (1)...(19): siRNA sense strand
gcucagauuuagaaagcuc

SEQ ID NO: 2396604 - RNA, 19 nt, Homo sapiens
  misc_RNA (1)...(19): siRNA sense strand
ccaaaguccuggggagcaa

SEQ ID NO: 2396605 - RNA, 19 nt, Homo sapiens
  misc_RNA (1)...(19): siRNA sense strand
cugcagaagugaaccggca

SEQ ID NO: 2396606 - RNA, 19 nt, Homo sapiens
  misc_RNA (1)...(19): siRNA sense strand
ccgcaaaggguacacucaa

SEQ ID NO: 2396607 - RNA, 19 nt, Homo sapiens
  misc_RNA (1)...(19): siRNA sense strand
aagcugagcaggagcagau

SEQ ID NO: 2396608 - RNA, 19 nt, Homo sapiens
  misc_RNA (1)...(19): siRNA sense strand
cccaaagccuucaggagca

SEQ ID NO: 2396609 - RNA, 19 nt, Homo sapiens
  misc_RNA (1)...(19): siRNA sense strand
agaaauggccaaagcugga

SEQ ID NO: 2396610 - RNA, 19 nt, Homo sapiens
  misc_RNA (1)...(19): siRNA sense strand
uggccgaggcagacaauga

SEQ ID NO: 2396611 - RNA, 19 nt, Homo sapiens
  misc_RNA (1)...(19): siRNA sense strand
ggaaaggggcucaugccaa

SEQ ID NO: 2396612 - RNA, 19 nt, Homo sapiens
  misc_RNA (1)...(19): siRNA sense strand
ucagaaagccuugagggaa

SEQ ID NO: 2396613 - RNA, 19 nt, Homo sapiens
  misc_RNA (1)...(19): siRNA sense strand
ggagcaagaaauggccaaa

SEQ ID NO: 2396614 - RNA, 19 nt, Homo sapiens
  misc_RNA (1)...(19): siRNA sense strand
ccauugagaguguccacaa

SEQ ID NO: 2396615 - RNA, 19 nt, Homo sapiens
  misc_RNA (1)...(19): siRNA sense strand
gcugaagacccuagagcag

SEQ ID NO: 2396616 - RNA, 19 nt, Homo sapiens
  misc_RNA (1)...(19): siRNA sense strand
cggugaagagcgugcgugu

SEQ ID NO: 2396617 - RNA, 19 nt, Homo sapiens
  misc_RNA (1)...(19): siRNA sense strand
acagcagagacgaagagaa

SEQ ID NO: 2396618 - RNA, 19 nt, Homo sapiens
  misc_RNA (1)...(19): siRNA sense strand
cggaagauccucuaccaga

SEQ ID NO: 2396619 - RNA, 19 nt, Homo sapiens
  misc_RNA (1)...(19): siRNA sense strand
gggacaggcugaagacccu

SEQ ID NO: 2396620 - RNA, 19 nt, Homo sapiens
  misc_RNA (1)...(19): siRNA sense strand
agucuauguuugucaagau

SEQ ID NO: 2396621 - RNA, 19 nt, Homo sapiens
  misc_RNA (1)...(19): siRNA sense strand
gucaaggccgagagggaca

SEQ ID NO: 2396622 - RNA, 19 nt, Homo sapiens
  misc_RNA (1)...(19): siRNA sense strand
cauuaaacucacagauuuc

SEQ ID NO: 2396623 - RNA, 19 nt, Homo sapiens
  misc_RNA (1)...(19): siRNA sense strand
gggacaaagaccugagacu

SEQ ID NO: 2396624 - RNA, 19 nt, Homo sapiens
  misc_RNA (1)...(19): siRNA sense strand
acuacaaguaugaagagaa

SEQ ID NO: 2396625 - RNA, 19 nt, Homo sapiens
  misc_RNA (1)...(19): siRNA sense strand
ccacauuucuguuugagga

SEQ ID NO: 2396626 - RNA, 19 nt, Homo sapiens
  misc_RNA (1)...(19): siRNA sense strand
ccagugguuucaagggaca

SEQ ID NO: 2396627 - RNA, 19 nt, Homo sapiens
  misc_RNA (1)...(19): siRNA sense strand
gaggauuucuccaaagcca

SEQ ID NO: 2396628 - RNA, 19 nt, Homo sapiens
  misc_RNA (1)...(19): siRNA sense strand
ugggaaagcuuguggguag

SEQ ID NO: 2396629 - RNA, 19 nt, Homo sapiens
  misc_RNA (1)...(19): siRNA sense strand
agaaaauccugaugcggaa

SEQ ID NO: 2396630 - RNA, 19 nt, Homo sapiens
  misc_RNA (1)...(19): siRNA sense strand
cccuggaggaggaggauau

SEQ ID NO: 2396631 - RNA, 19 nt, Homo sapiens
  misc_RNA (1)...(19): siRNA sense strand
ccugguacgugaaggccau

SEQ ID NO: 2396632 - RNA, 19 nt, Homo sapiens
  misc_RNA (1)...(19): siRNA sense strand
ugggaaagcuuguggguag

SEQ ID NO: 2396633 - RNA, 19 nt, Homo sapiens
  misc_RNA (1)...(19): siRNA sense strand
agaaaauccugaugcggaa

SEQ ID NO: 2396634 - RNA, 19 nt, Homo sapiens
  misc_RNA (1)...(19): siRNA sense strand
cccuggaggaggaggauau

SEQ ID NO: 2396635 - RNA, 19 nt, Homo sapiens
  misc_RNA (1)...(19): siRNA sense strand
ucauauaccugcaggagcu

SEQ ID NO: 2396636 - RNA, 19 nt, Homo sapiens
  misc_RNA (1)...(19): siRNA sense strand
ccugguacgugaaggccau

SEQ ID NO: 2396637 - RNA, 19 nt, Homo sapiens
  misc_RNA (1)...(19): siRNA sense strand
agugcauacuggagagaaa

SEQ ID NO: 2396638 - RNA, 19 nt, Homo sapiens
  misc_RNA (1)...(19): siRNA sense strand
agauagaagaagagcaaga

SEQ ID NO: 2396639 - RNA, 19 nt, Homo sapiens
  misc_RNA (1)...(19): siRNA sense strand
guuucauacuggagaacaa

SEQ ID NO: 2396640 - RNA, 19 nt, Homo sapiens
  misc_RNA (1)...(19): siRNA sense strand
guggaaggaauaugggaaa

SEQ ID NO: 2396641 - RNA, 19 nt, Homo sapiens
  misc_RNA (1)...(19): siRNA sense strand
agggaaugguaaagaaaga

SEQ ID NO: 2396642 - RNA, 19 nt, Homo sapiens
  misc_RNA (1)...(19): siRNA sense strand
uugaagaagcuguggaauu

SEQ ID NO: 2396643 - RNA, 19 nt, Homo sapiens
  misc_RNA (1)...(19): siRNA sense strand
ccguaucgauguagggaau

SEQ ID NO: 2396644 - RNA, 19 nt, Homo sapiens
  misc_RNA (1)...(19): siRNA sense strand
auguauggaaugugggaaa

SEQ ID NO: 2396645 - RNA, 19 nt, Homo sapiens
  misc_RNA (1)...(19): siRNA sense strand
cucuauaaguggaaggaau

SEQ ID NO: 2396646 - RNA, 19 nt, Homo sapiens
  misc_RNA (1)...(19): siRNA sense strand
gaagaaacaucucagggaa

SEQ ID NO: 2396647 - RNA, 19 nt, Homo sapiens
  misc_RNA (1)...(19): siRNA sense strand
aauccauacaggugagaaa

SEQ ID NO: 2396648 - RNA, 19 nt, Homo sapiens
  misc_RNA (1)...(19): siRNA sense strand
aauucauacaggugagaaa

SEQ ID NO: 2396649 - RNA, 19 nt, Homo sapiens
  misc_RNA (1)...(19): siRNA sense strand
gugagaaggcauuuagcaa

SEQ ID NO: 2396650 - RNA, 19 nt, Homo sapiens
  misc_RNA (1)...(19): siRNA sense strand
gcgaauucacacuggacaa

SEQ ID NO: 2396651 - RNA, 19 nt, Homo sapiens
  misc_RNA (1)...(19): siRNA sense strand
uagaagaagagcaagagaa

SEQ ID NO: 2396652 - RNA, 19 nt, Homo sapiens
  misc_RNA (1)...(19): siRNA sense strand
cuuuaaugaacaucggaaa

SEQ ID NO: 2396653 - RNA, 19 nt, Homo sapiens
  misc_RNA (1)...(19): siRNA sense strand
gaaaauucauacuggggaa

SEQ ID NO: 2396654 - RNA, 19 nt, Homo sapiens
  misc_RNA (1)...(19): siRNA sense strand
augugaggaaugugggaaa

SEQ ID NO: 2396655 - RNA, 19 nt, Homo sapiens
  misc_RNA (1)...(19): siRNA sense strand
cuguggaauuugagagcga

SEQ ID NO: 2396656 - RNA, 19 nt, Homo sapiens
  misc_RNA (1)...(19): siRNA sense strand
aagaaacaucucagggaau

SEQ ID NO: 2396657 - RNA, 19 nt, Homo sapiens
  misc_RNA (1)...(19): siRNA sense strand
auguagggaaugugguaaa

SEQ ID NO: 2396658 - RNA, 19 nt, Homo sapiens
  misc_RNA (1)...(19): siRNA sense strand
gccuucaacuguagagcaa

SEQ ID NO: 2396659 - RNA, 19 nt, Homo sapiens
  misc_RNA (1)...(19): siRNA sense strand
cuguauacaugcuuggaau

SEQ ID NO: 2396660 - RNA, 19 nt, Homo sapiens
  misc_RNA (1)...(19): siRNA sense strand
caguguaaucaguguggaa

SEQ ID NO: 2396661 - RNA, 19 nt, Homo sapiens
  misc_RNA (1)...(19): siRNA sense strand
cuggagagaaacuguauaa

SEQ ID NO: 2396662 - RNA, 19 nt, Homo sapiens
  misc_RNA (1)...(19): siRNA sense strand
gggaaagauuuuaaacaga

SEQ ID NO: 2396663 - RNA, 19 nt, Homo sapiens
  misc_RNA (1)...(19): siRNA sense strand
gugagugugggaagggaua

SEQ ID NO: 2396664 - RNA, 19 nt, Homo sapiens
  misc_RNA (1)...(19): siRNA sense strand
acuuuauacaugugaggaa

SEQ ID NO: 2396665 - RNA, 19 nt, Homo sapiens
  misc_RNA (1)...(19): siRNA sense strand
ggaaugguaaagaaagaau

SEQ ID NO: 2396666 - RNA, 19 nt, Homo sapiens
  misc_RNA (1)...(19): siRNA sense strand
cgauguagggaauguggua

SEQ ID NO: 2396667 - RNA, 19 nt, Homo sapiens
  misc_RNA (1)...(19): siRNA sense strand
agagcgagauagaagaaga

SEQ ID NO: 2396668 - RNA, 19 nt, Homo sapiens
  misc_RNA (1)...(19): siRNA sense strand
ccugcaugguggaaagaga

SEQ ID NO: 2396669 - RNA, 19 nt, Homo sapiens
  misc_RNA (1)...(19): siRNA sense strand
cuucaacuguagagcaaaa

SEQ ID NO: 2396670 - RNA, 19 nt, Homo sapiens
  misc_RNA (1)...(19): siRNA sense strand
cuuuauaggcaucagagaa

SEQ ID NO: 2396671 - RNA, 19 nt, Homo sapiens
  misc_RNA (1)...(19): siRNA sense strand
gccuacaguuacagaucaa

SEQ ID NO: 2396672 - RNA, 19 nt, Homo sapiens
  misc_RNA (1)...(19): siRNA sense strand
gagcaaaacuucacaggca

SEQ ID NO: 2396673 - RNA, 19 nt, Homo sapiens
  misc_RNA (1)...(19): siRNA sense strand
uaaccgaacaugagaggau

SEQ ID NO: 2396674 - RNA, 19 nt, Homo sapiens
  misc_RNA (1)...(19): siRNA sense strand
aaacagaagcauugccuca

SEQ ID NO: 2396675 - RNA, 19 nt, Homo sapiens
  misc_RNA (1)...(19): siRNA sense strand
cagaguguuccuauagaaa

SEQ ID NO: 2396676 - RNA, 19 nt, Homo sapiens
  misc_RNA (1)...(19): siRNA sense strand
cccuauaaauguagugagu

SEQ ID NO: 2396677 - RNA, 19 nt, Homo sapiens
  misc_RNA (1)...(19): siRNA sense strand
acaaauguaaugaguguga

SEQ ID NO: 2396678 - RNA, 19 nt, Homo sapiens
  misc_RNA (1)...(19): siRNA sense strand
cuauaaaugcggcgaaugu

SEQ ID NO: 2396679 - RNA, 19 nt, Homo sapiens
  misc_RNA (1)...(19): siRNA sense strand
ggaaaggccuucagccagu

SEQ ID NO: 2396680 - RNA, 19 nt, Homo sapiens
  misc_RNA (1)...(19): siRNA sense strand
ucacuguacaucagagaau

SEQ ID NO: 2396681 - RNA, 19 nt, Homo sapiens
  misc_RNA (1)...(19): siRNA sense strand
gggaagggauacagccagu

SEQ ID NO: 2396682 - RNA, 19 nt, Homo sapiens
  misc_RNA (1)...(19): siRNA sense strand
guguaaugaaugugagaag

SEQ ID NO: 2396683 - RNA, 19 nt, Homo sapiens
  misc_RNA (1)...(19): siRNA sense strand
ccuuaucagugcaacgaau

SEQ ID NO: 2396684 - RNA, 19 nt, Homo sapiens
  misc_RNA (1)...(19): siRNA sense strand
ucagggaaugguaaagaaa

SEQ ID NO: 2396685 - RNA, 19 nt, Homo sapiens
  misc_RNA (1)...(19): siRNA sense strand
uuuauaggcaucagagaau

SEQ ID NO: 2396686 - RNA, 19 nt, Homo sapiens
  misc_RNA (1)...(19): siRNA sense strand
guggaaaggccuucagcca

SEQ ID NO: 2396687 - RNA, 19 nt, Homo sapiens
  misc_RNA (1)...(19): siRNA sense strand
gaacaugagaggauccaca

SEQ ID NO: 2396688 - RNA, 19 nt, Homo sapiens
  misc_RNA (1)...(19): siRNA sense strand
aguucacacgaaagagaaa

SEQ ID NO: 2396689 - RNA, 19 nt, Homo sapiens
  misc_RNA (1)...(19): siRNA sense strand
caucucagggaaugguaaa

SEQ ID NO: 2396690 - RNA, 19 nt, Homo sapiens
  misc_RNA (1)...(19): siRNA sense strand
agaagaagagcaagagaag

SEQ ID NO: 2396691 - RNA, 19 nt, Homo sapiens
  misc_RNA (1)...(19): siRNA sense strand
aguggaaggaauaugggaa

SEQ ID NO: 2396692 - RNA, 19 nt, Homo sapiens
  misc_RNA (1)...(19): siRNA sense strand
gcgaaugugagaaggccuu

SEQ ID NO: 2396693 - RNA, 19 nt, Homo sapiens
  misc_RNA (1)...(19): siRNA sense strand
aagcauugccucauagaca

SEQ ID NO: 2396694 - RNA, 19 nt, Homo sapiens
  misc_RNA (1)...(19): siRNA sense strand
ugauagauucgcaugagaa

SEQ ID NO: 2396695 - RNA, 19 nt, Homo sapiens
  misc_RNA (1)...(19): siRNA sense strand
agauuuacccaggaggaaa

SEQ ID NO: 2396696 - RNA, 19 nt, Homo sapiens
  misc_RNA (1)...(19): siRNA sense strand
cgcaagagcugcagcgaca

SEQ ID NO: 2396697 - RNA, 19 nt, Homo sapiens
  misc_RNA (1)...(19): siRNA sense strand
acguggaggccguggacaa

SEQ ID NO: 2396698 - RNA, 19 nt, Homo sapiens
  misc_RNA (1)...(19): siRNA sense strand
ccaccaaagucaagacgca

SEQ ID NO: 2396699 - RNA, 19 nt, Homo sapiens
  misc_RNA (1)...(19): siRNA sense strand
gggaagacucugcuggaga

SEQ ID NO: 2396700 - RNA, 19 nt, Homo sapiens
  misc_RNA (1)...(19): siRNA sense strand
gagagaagagccugagcca

SEQ ID NO: 2396701 - RNA, 19 nt, Homo sapiens
  misc_RNA (1)...(19): siRNA sense strand
uggacaagcggcuggaaca

SEQ ID NO: 2396702 - RNA, 19 nt, Homo sapiens
  misc_RNA (1)...(19): siRNA sense strand
gaacagagccagcccgagu

SEQ ID NO: 2396703 - RNA, 19 nt, Homo sapiens
  misc_RNA (1)...(19): siRNA sense strand
ccaaugaggaacaggugca

SEQ ID NO: 2396704 - RNA, 19 nt, Homo sapiens
  misc_RNA (1)...(19): siRNA sense strand
acgccaaagucuaugagca

SEQ ID NO: 2396705 - RNA, 19 nt, Homo sapiens
  misc_RNA (1)...(19): siRNA sense strand
ccaggauccagaagaccaa

SEQ ID NO: 2396706 - RNA, 19 nt, Homo sapiens
  misc_RNA (1)...(19): siRNA sense strand
gagaagagccugagccagc

SEQ ID NO: 2396707 - RNA, 19 nt, Homo sapiens
  misc_RNA (1)...(19): siRNA sense strand
aaguaaggaugcagaggaa

SEQ ID NO: 2396708 - RNA, 19 nt, Homo sapiens
  misc_RNA (1)...(19): siRNA sense strand
gcgugaaagggaagagcaa

SEQ ID NO: 2396709 - RNA, 19 nt, Homo sapiens
  misc_RNA (1)...(19): siRNA sense strand
gugaaagggaagagcaaga

SEQ ID NO: 2396710 - RNA, 19 nt, Homo sapiens
  misc_RNA (1)...(19): siRNA sense strand
guaaggaugcagaggaaau

SEQ ID NO: 2396711 - RNA, 19 nt, Homo sapiens
  misc_RNA (1)...(19): siRNA sense strand
cugaaagaagauauggaaa

SEQ ID NO: 2396712 - RNA, 19 nt, Homo sapiens
  misc_RNA (1)...(19): siRNA sense strand
gauuaagacuguagcagga

SEQ ID NO: 2396713 - RNA, 19 nt, Homo sapiens
  misc_RNA (1)...(19): siRNA sense strand
ucgaaaaguucuugguaau

SEQ ID NO: 2396714 - RNA, 19 nt, Homo sapiens
  misc_RNA (1)...(19): siRNA sense strand
acucaggauuugacagaau

SEQ ID NO: 2396715 - RNA, 19 nt, Homo sapiens
  misc_RNA (1)...(19): siRNA sense strand
agaucaggguugcuagaaa

SEQ ID NO: 2396716 - RNA, 19 nt, Homo sapiens
  misc_RNA (1)...(19): siRNA sense strand
agccagagacuuugugaaa

SEQ ID NO: 2396717 - RNA, 19 nt, Homo sapiens
  misc_RNA (1)...(19): siRNA sense strand
uguagcaggaaguggaaua

SEQ ID NO: 2396718 - RNA, 19 nt, Homo sapiens
  misc_RNA (1)...(19): siRNA sense strand
gaauaggacaucagggcuu

SEQ ID NO: 2396719 - RNA, 19 nt, Homo sapiens
  misc_RNA (1)...(19): siRNA sense strand
gggccgaagaacuggagua

SEQ ID NO: 2396720 - RNA, 19 nt, Homo sapiens
  misc_RNA (1)...(19): siRNA sense strand
ugacagaaugagcgaagaa

SEQ ID NO: 2396721 - RNA, 19 nt, Homo sapiens
  misc_RNA (1)...(19): siRNA sense strand
gagauaaguaagagagaug

SEQ ID NO: 2396722 - RNA, 19 nt, Homo sapiens
  misc_RNA (1)...(19): siRNA sense strand
cugaggaacugaaaagaaa

SEQ ID NO: 2396723 - RNA, 19 nt, Homo sapiens
  misc_RNA (1)...(19): siRNA sense strand
acagugaggaugagcuaaa

SEQ ID NO: 2396724 - RNA, 19 nt, Homo sapiens
  misc_RNA (1)...(19): siRNA sense strand
ugaaacagucagaagagaa

SEQ ID NO: 2396725 - RNA, 19 nt, Homo sapiens
  misc_RNA (1)...(19): siRNA sense strand
cagcuacagcagagagauu

SEQ ID NO: 2396726 - RNA, 19 nt, Homo sapiens
  misc_RNA (1)...(19): siRNA sense strand
uuaaccagcaguagagaaa

SEQ ID NO: 2396727 - RNA, 19 nt, Homo sapiens
  misc_RNA (1)...(19): siRNA sense strand
gcacaaauuuaacaggcuu

SEQ ID NO: 2396728 - RNA, 19 nt, Homo sapiens
  misc_RNA (1)...(19): siRNA sense strand
ccaaaagagaacaguuuaa

SEQ ID NO: 2396729 - RNA, 19 nt, Homo sapiens
  misc_RNA (1)...(19): siRNA sense strand
agacagugaggaugagcua

SEQ ID NO: 2396730 - RNA, 19 nt, Homo sapiens
  misc_RNA (1)...(19): siRNA sense strand
aagacugugaugagaauaa

SEQ ID NO: 2396731 - RNA, 19 nt, Homo sapiens
  misc_RNA (1)...(19): siRNA sense strand
acgaacagcagcaggaaga

SEQ ID NO: 2396732 - RNA, 19 nt, Homo sapiens
  misc_RNA (1)...(19): siRNA sense strand
cguacugaaaagaggaaaa

SEQ ID NO: 2396733 - RNA, 19 nt, Homo sapiens
  misc_RNA (1)...(19): siRNA sense strand
acaacaaggccaugacaga

SEQ ID NO: 2396734 - RNA, 19 nt, Homo sapiens
  misc_RNA (1)...(19): siRNA sense strand
cuaaagacugugaugagaa

SEQ ID NO: 2396735 - RNA, 19 nt, Homo sapiens
  misc_RNA (1)...(19): siRNA sense strand
aguaugauauggagcguga

SEQ ID NO: 2396736 - RNA, 19 nt, Homo sapiens
  misc_RNA (1)...(19): siRNA sense strand
uugacaaaguaccaaguaa

SEQ ID NO: 2396737 - RNA, 19 nt, Homo sapiens
  misc_RNA (1)...(19): siRNA sense strand
gauuacacuggcuggaaua

SEQ ID NO: 2396738 - RNA, 19 nt, Homo sapiens
  misc_RNA (1)...(19): siRNA sense strand
aagauuacccuaaggaaaa

SEQ ID NO: 2396739 - RNA, 19 nt, Homo sapiens
  misc_RNA (1)...(19): siRNA sense strand
caaucaggcuucugcaaaa

SEQ ID NO: 2396740 - RNA, 19 nt, Homo sapiens
  misc_RNA (1)...(19): siRNA sense strand
cugaugaggacucuggaaa

SEQ ID NO: 2396741 - RNA, 19 nt, Homo sapiens
  misc_RNA (1)...(19): siRNA sense strand
ucagaagagaauaggacau

SEQ ID NO: 2396742 - RNA, 19 nt, Homo sapiens
  misc_RNA (1)...(19): siRNA sense strand
ggacuaauguuucaagcca

SEQ ID NO: 2396743 - RNA, 19 nt, Homo sapiens
  misc_RNA (1)...(19): siRNA sense strand
auucaagaaaugccagaaa

SEQ ID NO: 2396744 - RNA, 19 nt, Homo sapiens
  misc_RNA (1)...(19): siRNA sense strand
cuagaaaaucguacugaaa

SEQ ID NO: 2396745 - RNA, 19 nt, Homo sapiens
  misc_RNA (1)...(19): siRNA sense strand
augcagaggaaaugagguu

SEQ ID NO: 2396746 - RNA, 19 nt, Homo sapiens
  misc_RNA (1)...(19): siRNA sense strand
cugaaaagaggaaaagaau

SEQ ID NO: 2396747 - RNA, 19 nt, Homo sapiens
  misc_RNA (1)...(19): siRNA sense strand
agaaaugcugagacaggaa

SEQ ID NO: 2396748 - RNA, 19 nt, Homo sapiens
  misc_RNA (1)...(19): siRNA sense strand
gagcuggauccaaggaaca

SEQ ID NO: 2396749 - RNA, 19 nt, Homo sapiens
  misc_RNA (1)...(19): siRNA sense strand
ugaagaugaugaugagcca

SEQ ID NO: 2396750 - RNA, 19 nt, Homo sapiens
  misc_RNA (1)...(19): siRNA sense strand
ggaacagaaagaagaugau

SEQ ID NO: 2396751 - RNA, 19 nt, Homo sapiens
  misc_RNA (1)...(19): siRNA sense strand
ugaugaggacucuggaaau

SEQ ID NO: 2396752 - RNA, 19 nt, Homo sapiens
  misc_RNA (1)...(19): siRNA sense strand
acugaaaagaggaaaagaa

SEQ ID NO: 2396753 - RNA, 19 nt, Homo sapiens
  misc_RNA (1)...(19): siRNA sense strand
auucagacagugaggauga

SEQ ID NO: 2396754 - RNA, 19 nt, Homo sapiens
  misc_RNA (1)...(19): siRNA sense strand
aggcuugggaacagaaaga

SEQ ID NO: 2396755 - RNA, 19 nt, Homo sapiens
  misc_RNA (1)...(19): siRNA sense strand
ggauauuucagcuaaguca

SEQ ID NO: 2396756 - RNA, 19 nt, Homo sapiens
  misc_RNA (1)...(19): siRNA sense strand
cuggaguauucuugugaga

SEQ ID NO: 2396757 - RNA, 19 nt, Homo sapiens
  misc_RNA (1)...(19): siRNA sense strand
gggauuacaaaguggaaag

SEQ ID NO: 2396758 - RNA, 19 nt, Homo sapiens
  misc_RNA (1)...(19): siRNA sense strand
auuuggaguuugagguuca

SEQ ID NO: 2396759 - RNA, 19 nt, Homo sapiens
  misc_RNA (1)...(19): siRNA sense strand
acagaaugagcgaagaaga

SEQ ID NO: 2396760 - RNA, 19 nt, Homo sapiens
  misc_RNA (1)...(19): siRNA sense strand
aagaagcaagcgugguuua

SEQ ID NO: 2396761 - RNA, 19 nt, Homo sapiens
  misc_RNA (1)...(19): siRNA sense strand
ugagaaguguggugggaag

SEQ ID NO: 2396762 - RNA, 19 nt, Homo sapiens
  misc_RNA (1)...(19): siRNA sense strand
ccucauucuccauuugaaa

SEQ ID NO: 2396763 - RNA, 19 nt, Homo sapiens
  misc_RNA (1)...(19): siRNA sense strand
gcaacgaacagcagcagga

SEQ ID NO: 2396764 - RNA, 19 nt, Homo sapiens
  misc_RNA (1)...(19): siRNA sense strand
uggagauaaguaagagaga

SEQ ID NO: 2396765 - RNA, 19 nt, Homo sapiens
  misc_RNA (1)...(19): siRNA sense strand
cagaaaauccagacacuau

SEQ ID NO: 2396766 - RNA, 19 nt, Homo sapiens
  misc_RNA (1)...(19): siRNA sense strand
uaugauauggagcgugaaa

SEQ ID NO: 2396767 - RNA, 19 nt, Homo sapiens
  misc_RNA (1)...(19): siRNA sense strand
cugaagaagaugaggaaga

SEQ ID NO: 2396768 - RNA, 19 nt, Homo sapiens
  misc_RNA (1)...(19): siRNA sense strand
ggguaaacagcaauggaaa

SEQ ID NO: 2396769 - RNA, 19 nt, Homo sapiens
  misc_RNA (1)...(19): siRNA sense strand
gccaaaaggcgaaggguaa

SEQ ID NO: 2396770 - RNA, 19 nt, Homo sapiens
  misc_RNA (1)...(19): siRNA sense strand
cauuagaagaggaagaaau

SEQ ID NO: 2396771 - RNA, 19 nt, Homo sapiens
  misc_RNA (1)...(19): siRNA sense strand
gggaaaauaaagaggagaa

SEQ ID NO: 2396772 - RNA, 19 nt, Homo sapiens
  misc_RNA (1)...(19): siRNA sense strand
aagaaaugauggaaggaga

SEQ ID NO: 2396773 - RNA, 19 nt, Homo sapiens
  misc_RNA (1)...(19): siRNA sense strand
aggaagaagaggaagaaga

SEQ ID NO: 2396774 - RNA, 19 nt, Homo sapiens
  misc_RNA (1)...(19): siRNA sense strand
ggaauuaucuguuuggaca

SEQ ID NO: 2396775 - RNA, 19 nt, Homo sapiens
  misc_RNA (1)...(19): siRNA sense strand
ggcugaaggccuauggaaa

SEQ ID NO: 2396776 - RNA, 19 nt, Homo sapiens
  misc_RNA (1)...(19): siRNA sense strand
gguaaacagcaauggaaaa

SEQ ID NO: 2396777 - RNA, 19 nt, Homo sapiens
  misc_RNA (1)...(19): siRNA sense strand
aagaagaaucugaagaaga

SEQ ID NO: 2396778 - RNA, 19 nt, Homo sapiens
  misc_RNA (1)...(19): siRNA sense strand
agaaaugauggaaggagaa

SEQ ID NO: 2396779 - RNA, 19 nt, Homo sapiens
  misc_RNA (1)...(19): siRNA sense strand
aagaugaggaagaggaaga

SEQ ID NO: 2396780 - RNA, 19 nt, Homo sapiens
  misc_RNA (1)...(19): siRNA sense strand
gaacaaggucaguugguga

SEQ ID NO: 2396781 - RNA, 19 nt, Homo sapiens
  misc_RNA (1)...(19): siRNA sense strand
aagaggaagaagaggaaga

SEQ ID NO: 2396782 - RNA, 19 nt, Homo sapiens
  misc_RNA (1)...(19): siRNA sense strand
cagaagaagcauugagaag

SEQ ID NO: 2396783 - RNA, 19 nt, Homo sapiens
  misc_RNA (1)...(19): siRNA sense strand
aagaagaaggugaagauga

SEQ ID NO: 2396784 - RNA, 19 nt, Homo sapiens
  misc_RNA (1)...(19): siRNA sense strand
aguacuuaccagaagauaa

SEQ ID NO: 2396785 - RNA, 19 nt, Homo sapiens
  misc_RNA (1)...(19): siRNA sense strand
aggugaagaugaugaagau

SEQ ID NO: 2396786 - RNA, 19 nt, Homo sapiens
  misc_RNA (1)...(19): siRNA sense strand
ggcgaaggguaaacagcaa

SEQ ID NO: 2396787 - RNA, 19 nt, Homo sapiens
  misc_RNA (1)...(19): siRNA sense strand
agaagaugaggaagaggaa

SEQ ID NO: 2396788 - RNA, 19 nt, Homo sapiens
  misc_RNA (1)...(19): siRNA sense strand
aggaagaggaagaagagga

SEQ ID NO: 2396789 - RNA, 19 nt, Homo sapiens
  misc_RNA (1)...(19): siRNA sense strand
ugauggaaggagaaacaaa

SEQ ID NO: 2396790 - RNA, 19 nt, Homo sapiens
  misc_RNA (1)...(19): siRNA sense strand
uagugaaguagaagaagaa

SEQ ID NO: 2396791 - RNA, 19 nt, Homo sapiens
  misc_RNA (1)...(19): siRNA sense strand
acacauuaauggaccaaca

SEQ ID NO: 2396792 - RNA, 19 nt, Homo sapiens
  misc_RNA (1)...(19): siRNA sense strand
agaaauuccaguuggcauu

SEQ ID NO: 2396793 - RNA, 19 nt, Homo sapiens
  misc_RNA (1)...(19): siRNA sense strand
cuucuagacgaaagugaaa

SEQ ID NO: 2396794 - RNA, 19 nt, Homo sapiens
  misc_RNA (1)...(19): siRNA sense strand
aaguaaaaguugaaggguu

SEQ ID NO: 2396795 - RNA, 19 nt, Homo sapiens
  misc_RNA (1)...(19): siRNA sense strand
cugaaggaucucacauaaa

SEQ ID NO: 2396796 - RNA, 19 nt, Homo sapiens
  misc_RNA (1)...(19): siRNA sense strand
aaaagcagcuagagaggaa

SEQ ID NO: 2396797 - RNA, 19 nt, Homo sapiens
  misc_RNA (1)...(19): siRNA sense strand
agaggaagaagaaggugaa

SEQ ID NO: 2396798 - RNA, 19 nt, Homo sapiens
  misc_RNA (1)...(19): siRNA sense strand
auagugaaguagaagaaga

SEQ ID NO: 2396799 - RNA, 19 nt, Homo sapiens
  misc_RNA (1)...(19): siRNA sense strand
gaacaagggcugaaggccu

SEQ ID NO: 2396800 - RNA, 19 nt, Homo sapiens
  misc_RNA (1)...(19): siRNA sense strand
cucaagaugcccaggaaau

SEQ ID NO: 2396801 - RNA, 19 nt, Homo sapiens
  misc_RNA (1)...(19): siRNA sense strand
aaugauggaaggagaaaca

SEQ ID NO: 2396802 - RNA, 19 nt, Homo sapiens
  misc_RNA (1)...(19): siRNA sense strand
ccgcccacgucgauguaaa

SEQ ID NO: 2396803 - RNA, 19 nt, Homo sapiens
  misc_RNA (1)...(19): siRNA sense strand
agaagaucuugcaagggaa

SEQ ID NO: 2396804 - RNA, 19 nt, Homo sapiens
  misc_RNA (1)...(19): siRNA sense strand
acgaacauuagaagaggaa

SEQ ID NO: 2396805 - RNA, 19 nt, Homo sapiens
  misc_RNA (1)...(19): siRNA sense strand
aagaggaagaagaagguga

SEQ ID NO: 2396806 - RNA, 19 nt, Homo sapiens
  misc_RNA (1)...(19): siRNA sense strand
ugaugaugaacgaacauua

SEQ ID NO: 2396807 - RNA, 19 nt, Homo sapiens
  misc_RNA (1)...(19): siRNA sense strand
gggaaggcgacaugccaau

SEQ ID NO: 2396808 - RNA, 19 nt, Homo sapiens
  misc_RNA (1)...(19): siRNA sense strand
augaagaugcugauaauga

SEQ ID NO: 2396809 - RNA, 19 nt, Homo sapiens
  misc_RNA (1)...(19): siRNA sense strand
uagaagaggaagaaaugau

SEQ ID NO: 2396810 - RNA, 19 nt, Homo sapiens
  misc_RNA (1)...(19): siRNA sense strand
agaggaagaguguagaaau

SEQ ID NO: 2396811 - RNA, 19 nt, Homo sapiens
  misc_RNA (1)...(19): siRNA sense strand
aacaagggcugaaggccua

SEQ ID NO: 2396812 - RNA, 19 nt, Homo sapiens
  misc_RNA (1)...(19): siRNA sense strand
cuucaugcagauauggaua

SEQ ID NO: 2396813 - RNA, 19 nt, Homo sapiens
  misc_RNA (1)...(19): siRNA sense strand
cagaaauuccaguuggcau

SEQ ID NO: 2396814 - RNA, 19 nt, Homo sapiens
  misc_RNA (1)...(19): siRNA sense strand
uggaccaacagguggaaau

SEQ ID NO: 2396815 - RNA, 19 nt, Homo sapiens
  misc_RNA (1)...(19): siRNA sense strand
augaggaagaggaagaaga

SEQ ID NO: 2396816 - RNA, 19 nt, Homo sapiens
  misc_RNA (1)...(19): siRNA sense strand
caaauagugaaguagaaga

SEQ ID NO: 2396817 - RNA, 19 nt, Homo sapiens
  misc_RNA (1)...(19): siRNA sense strand
augaugaagaugcugauaa

SEQ ID NO: 2396818 - RNA, 19 nt, Homo sapiens
  misc_RNA (1)...(19): siRNA sense strand
ggaaaauaaagaggagaau

SEQ ID NO: 2396819 - RNA, 19 nt, Homo sapiens
  misc_RNA (1)...(19): siRNA sense strand
agaaggguguagaagcaau

SEQ ID NO: 2396820 - RNA, 19 nt, Homo sapiens
  misc_RNA (1)...(19): siRNA sense strand
cagaggaagaguguagaaa

SEQ ID NO: 2396821 - RNA, 19 nt, Homo sapiens
  misc_RNA (1)...(19): siRNA sense strand
cccauaugacugcaagaaa

SEQ ID NO: 2396822 - RNA, 19 nt, Homo sapiens
  misc_RNA (1)...(19): siRNA sense strand
ugaaaacacagaugacuaa

SEQ ID NO: 2396823 - RNA, 19 nt, Homo sapiens
  misc_RNA (1)...(19): siRNA sense strand
gggcggaguugguggaaau

SEQ ID NO: 2396824 - RNA, 19 nt, Homo sapiens
  misc_RNA (1)...(19): siRNA sense strand
cggaguugguggaaauuau

SEQ ID NO: 2396825 - RNA, 19 nt, Homo sapiens
  misc_RNA (1)...(19): siRNA sense strand
ugcaaugcgccgagccuua

SEQ ID NO: 2396826 - RNA, 19 nt, Homo sapiens
  misc_RNA (1)...(19): siRNA sense strand
gcgccgagccuuacaaagu

SEQ ID NO: 2396827 - RNA, 19 nt, Homo sapiens
  misc_RNA (1)...(19): siRNA sense strand
gggcggaguugguggaaau

SEQ ID NO: 2396828 - RNA, 19 nt, Homo sapiens
  misc_RNA (1)...(19): siRNA sense strand
cgaaagugccagagaugaa

SEQ ID NO: 2396829 - RNA, 19 nt, Homo sapiens
  misc_RNA (1)...(19): siRNA sense strand
cugaaguuguagagagcaa

SEQ ID NO: 2396830 - RNA, 19 nt, Homo sapiens
  misc_RNA (1)...(19): siRNA sense strand
uggcugaguuggagggcaa

SEQ ID NO: 2396831 - RNA, 19 nt, Homo sapiens
  misc_RNA (1)...(19): siRNA sense strand
cgaaagugucagagaugaa

SEQ ID NO: 2396832 - RNA, 19 nt, Homo sapiens
  misc_RNA (1)...(19): siRNA sense strand
ccaaagugucagagaugaa

SEQ ID NO: 2396833 - RNA, 19 nt, Homo sapiens
  misc_RNA (1)...(19): siRNA sense strand
cgaaagucccagagaugaa

SEQ ID NO: 2396834 - RNA, 19 nt, Homo sapiens
  misc_RNA (1)...(19): siRNA sense strand
caugaagcucccagagaua

SEQ ID NO: 2396835 - RNA, 19 nt, Homo sapiens
  misc_RNA (1)...(19): siRNA sense strand
aagcagaaguucaagguga

SEQ ID NO: 2396836 - RNA, 19 nt, Homo sapiens
  misc_RNA (1)...(19): siRNA sense strand
aggaggaggaggaggaaga

SEQ ID NO: 2396837 - RNA, 19 nt, Homo sapiens
  misc_RNA (1)...(19): siRNA sense strand
aggcagaagggauggaauu

SEQ ID NO: 2396838 - RNA, 19 nt, Homo sapiens
  misc_RNA (1)...(19): siRNA sense strand
ugaaagugucggagaugaa

SEQ ID NO: 2396839 - RNA, 19 nt, Homo sapiens
  misc_RNA (1)...(19): siRNA sense strand
cggaaaugcaagugccgaa

SEQ ID NO: 2396840 - RNA, 19 nt, Homo sapiens
  misc_RNA (1)...(19): siRNA sense strand
ugaaagucccugagaugaa

SEQ ID NO: 2396841 - RNA, 19 nt, Homo sapiens
  misc_RNA (1)...(19): siRNA sense strand
caaaggugccugagaugaa

SEQ ID NO: 2396842 - RNA, 19 nt, Homo sapiens
  misc_RNA (1)...(19): siRNA sense strand
cggaguugguggaaauuau

SEQ ID NO: 2396843 - RNA, 19 nt, Homo sapiens
  misc_RNA (1)...(19): siRNA sense strand
ggaaggaagcagaaguuca

SEQ ID NO: 2396844 - RNA, 19 nt, Homo sapiens
  misc_RNA (1)...(19): siRNA sense strand
ggaagagggcaguggggaa

SEQ ID NO: 2396845 - RNA, 19 nt, Homo sapiens
  misc_RNA (1)...(19): siRNA sense strand
ggugaaaggucccagacuu

SEQ ID NO: 2396846 - RNA, 19 nt, Homo sapiens
  misc_RNA (1)...(19): siRNA sense strand
uggcuaaggcagaggcuga

SEQ ID NO: 2396847 - RNA, 19 nt, Homo sapiens
  misc_RNA (1)...(19): siRNA sense strand
gggccgaccucaaguucaa

SEQ ID NO: 2396848 - RNA, 19 nt, Homo sapiens
  misc_RNA (1)...(19): siRNA sense strand
aggaaguugcugaggccaa

SEQ ID NO: 2396849 - RNA, 19 nt, Homo sapiens
  misc_RNA (1)...(19): siRNA sense strand
ccaaggugucagagaugaa

SEQ ID NO: 2396850 - RNA, 19 nt, Homo sapiens
  misc_RNA (1)...(19): siRNA sense strand
gccgaaagugucagagauu

SEQ ID NO: 2396851 - RNA, 19 nt, Homo sapiens
  misc_RNA (1)...(19): siRNA sense strand
agccagagguggaugguga

SEQ ID NO: 2396852 - RNA, 19 nt, Homo sapiens
  misc_RNA (1)...(19): siRNA sense strand
gaaggaagcagaaguucaa

SEQ ID NO: 2396853 - RNA, 19 nt, Homo sapiens
  misc_RNA (1)...(19): siRNA sense strand
cagaacaggcagaagggau

SEQ ID NO: 2396854 - RNA, 19 nt, Homo sapiens
  misc_RNA (1)...(19): siRNA sense strand
gaugaaacuuccugagaug

SEQ ID NO: 2396855 - RNA, 19 nt, Homo sapiens
  misc_RNA (1)...(19): siRNA sense strand
gggucagggaagugggcuu

SEQ ID NO: 2396856 - RNA, 19 nt, Homo sapiens
  misc_RNA (1)...(19): siRNA sense strand
gcccaaagucugugaaaug

SEQ ID NO: 2396857 - RNA, 19 nt, Homo sapiens
  misc_RNA (1)...(19): siRNA sense strand
ccgaguaccagguggcaga

SEQ ID NO: 2396858 - RNA, 19 nt, Homo sapiens
  misc_RNA (1)...(19): siRNA sense strand
aggaggaggaggaggagga

SEQ ID NO: 2396859 - RNA, 19 nt, Homo sapiens
  misc_RNA (1)...(19): siRNA sense strand
aggaggaggaggaggagga

SEQ ID NO: 2396860 - RNA, 19 nt, Homo sapiens
  misc_RNA (1)...(19): siRNA sense strand
gaugaaagucccugagaug

SEQ ID NO: 2396861 - RNA, 19 nt, Homo sapiens
  misc_RNA (1)...(19): siRNA sense strand
cuaaaaugggcaagggaga

SEQ ID NO: 2396862 - RNA, 19 nt, Homo sapiens
  misc_RNA (1)...(19): siRNA sense strand
cuccggaggugcagcuaaa

SEQ ID NO: 2396863 - RNA, 19 nt, Homo sapiens
  misc_RNA (1)...(19): siRNA sense strand
ccaagggaccugaagugaa

SEQ ID NO: 2396864 - RNA, 19 nt, Homo sapiens
  misc_RNA (1)...(19): siRNA sense strand
gaaacucccugaagugcaa

SEQ ID NO: 2396865 - RNA, 19 nt, Homo sapiens
  misc_RNA (1)...(19): siRNA sense strand
caaaagucccagagaugaa

SEQ ID NO: 2396866 - RNA, 19 nt, Homo sapiens
  misc_RNA (1)...(19): siRNA sense strand
caaagucugugaaaugaaa

SEQ ID NO: 2396867 - RNA, 19 nt, Homo sapiens
  misc_RNA (1)...(19): siRNA sense strand
gugagcugcugguggguga

SEQ ID NO: 2396868 - RNA, 19 nt, Homo sapiens
  misc_RNA (1)...(19): siRNA sense strand
cugugaagaagaagaagau

SEQ ID NO: 2396869 - RNA, 19 nt, Homo sapiens
  misc_RNA (1)...(19): siRNA sense strand
caaagguggcuaaggcaga

SEQ ID NO: 2396870 - RNA, 19 nt, Homo sapiens
  misc_RNA (1)...(19): siRNA sense strand
ccugugaagaagaagaaga

SEQ ID NO: 2396871 - RNA, 19 nt, Homo sapiens
  misc_RNA (1)...(19): siRNA sense strand
ugaaacuuccugagaugaa

SEQ ID NO: 2396872 - RNA, 19 nt, Homo sapiens
  misc_RNA (1)...(19): siRNA sense strand
ugaaacucccugaggugaa

SEQ ID NO: 2396873 - RNA, 19 nt, Homo sapiens
  misc_RNA (1)...(19): siRNA sense strand
ugaaagucccugacaugaa

SEQ ID NO: 2396874 - RNA, 19 nt, Homo sapiens
  misc_RNA (1)...(19): siRNA sense strand
ugaagcucccagagauaaa

SEQ ID NO: 2396875 - RNA, 19 nt, Homo sapiens
  misc_RNA (1)...(19): siRNA sense strand
ugaagaugcccaagcugaa

SEQ ID NO: 2396876 - RNA, 19 nt, Homo sapiens
  misc_RNA (1)...(19): siRNA sense strand
ccaaagucugugaaaugaa

SEQ ID NO: 2396877 - RNA, 19 nt, Homo sapiens
  misc_RNA (1)...(19): siRNA sense strand
ccaagaugaccaugcccaa

SEQ ID NO: 2396878 - RNA, 19 nt, Homo sapiens
  misc_RNA (1)...(19): siRNA sense strand
ggacacugaggcagcagaa

SEQ ID NO: 2396879 - RNA, 19 nt, Homo sapiens
  misc_RNA (1)...(19): siRNA sense strand
ggacacaagcucaagguac

SEQ ID NO: 2396880 - RNA, 19 nt, Homo sapiens
  misc_RNA (1)...(19): siRNA sense strand
ccaggaaagccaaggugga

SEQ ID NO: 2396881 - RNA, 19 nt, Homo sapiens
  misc_RNA (1)...(19): siRNA sense strand
ccgaggugcagcugccaaa

SEQ ID NO: 2396882 - RNA, 19 nt, Homo sapiens
  misc_RNA (1)...(19): siRNA sense strand
agaggcagcugguggcuuu

SEQ ID NO: 2396883 - RNA, 19 nt, Homo sapiens
  misc_RNA (1)...(19): siRNA sense strand
ggugcggcuuccagaggua

SEQ ID NO: 2396884 - RNA, 19 nt, Homo sapiens
  misc_RNA (1)...(19): siRNA sense strand
ggugcggcuuccagaggua

SEQ ID NO: 2396885 - RNA, 19 nt, Homo sapiens
  misc_RNA (1)...(19): siRNA sense strand
ggugcggcuuccagaggua

SEQ ID NO: 2396886 - RNA, 19 nt, Homo sapiens
  misc_RNA (1)...(19): siRNA sense strand
gggaugggagggugaagau

SEQ ID NO: 2396887 - RNA, 19 nt, Homo sapiens
  misc_RNA (1)...(19): siRNA sense strand
gugaagaugcccaagcuga

SEQ ID NO: 2396888 - RNA, 19 nt, Homo sapiens
  misc_RNA (1)...(19): siRNA sense strand
cugaaauggccgugcccga

SEQ ID NO: 2396889 - RNA, 19 nt, Homo sapiens
  misc_RNA (1)...(19): siRNA sense strand
agggaaggaagcagaaguu

SEQ ID NO: 2396890 - RNA, 19 nt, Homo sapiens
  misc_RNA (1)...(19): siRNA sense strand
ugcaaugcgccgagccuua

SEQ ID NO: 2396891 - RNA, 19 nt, Homo sapiens
  misc_RNA (1)...(19): siRNA sense strand
ccaaggcuccugaggucaa

SEQ ID NO: 2396892 - RNA, 19 nt, Homo sapiens
  misc_RNA (1)...(19): siRNA sense strand
gcccaaagugucagagaug

SEQ ID NO: 2396893 - RNA, 19 nt, Homo sapiens
  misc_RNA (1)...(19): siRNA sense strand
agcagaaguucaaggugau

SEQ ID NO: 2396894 - RNA, 19 nt, Homo sapiens
  misc_RNA (1)...(19): siRNA sense strand
gcgccgagccuuacaaagu

SEQ ID NO: 2396895 - RNA, 19 nt, Homo sapiens
  misc_RNA (1)...(19): siRNA sense strand
agccaaagugagaugguca

SEQ ID NO: 2396896 - RNA, 19 nt, Homo sapiens
  misc_RNA (1)...(19): siRNA sense strand
agguacagcugccgaaagu

SEQ ID NO: 2396897 - RNA, 19 nt, Homo sapiens
  misc_RNA (1)...(19): siRNA sense strand
acaugaagcucccagagau

SEQ ID NO: 2396898 - RNA, 19 nt, Homo sapiens
  misc_RNA (1)...(19): siRNA sense strand
agguagagcugcccaaagu

SEQ ID NO: 2396899 - RNA, 19 nt, Homo sapiens
  misc_RNA (1)...(19): siRNA sense strand
agaugaaagucccugagau

SEQ ID NO: 2396900 - RNA, 19 nt, Homo sapiens
  misc_RNA (1)...(19): siRNA sense strand
agaugaaacuuccugagau

SEQ ID NO: 2396901 - RNA, 19 nt, Homo sapiens
  misc_RNA (1)...(19): siRNA sense strand
agaugaagcucccugagau

SEQ ID NO: 2396902 - RNA, 19 nt, Homo sapiens
  misc_RNA (1)...(19): siRNA sense strand
cagggaagcugguaacacu

SEQ ID NO: 2396903 - RNA, 19 nt, Homo sapiens
  misc_RNA (1)...(19): siRNA sense strand
cacugaggcagcagaacua

SEQ ID NO: 2396904 - RNA, 19 nt, Homo sapiens
  misc_RNA (1)...(19): siRNA sense strand
ggaagaagaugaaggcaga

SEQ ID NO: 2396905 - RNA, 19 nt, Homo sapiens
  misc_RNA (1)...(19): siRNA sense strand
cggcagaagaauagagcau

SEQ ID NO: 2396906 - RNA, 19 nt, Homo sapiens
  misc_RNA (1)...(19): siRNA sense strand
aguaugaagcagaggauga

SEQ ID NO: 2396907 - RNA, 19 nt, Homo sapiens
  misc_RNA (1)...(19): siRNA sense strand
augaggaacaagagaacua

SEQ ID NO: 2396908 - RNA, 19 nt, Homo sapiens
  misc_RNA (1)...(19): siRNA sense strand
acgaugaggaggaggauga

SEQ ID NO: 2396909 - RNA, 19 nt, Homo sapiens
  misc_RNA (1)...(19): siRNA sense strand
augaagaggaagaagauga

SEQ ID NO: 2396910 - RNA, 19 nt, Homo sapiens
  misc_RNA (1)...(19): siRNA sense strand
caggcagacuggaggugaa

SEQ ID NO: 2396911 - RNA, 19 nt, Homo sapiens
  misc_RNA (1)...(19): siRNA sense strand
aggaugaugaagaggaaga

SEQ ID NO: 2396912 - RNA, 19 nt, Homo sapiens
  misc_RNA (1)...(19): siRNA sense strand
agaugaaggcagaaaggau

SEQ ID NO: 2396913 - RNA, 19 nt, Homo sapiens
  misc_RNA (1)...(19): siRNA sense strand
gggaaaacaaagugcauga

SEQ ID NO: 2396914 - RNA, 19 nt, Homo sapiens
  misc_RNA (1)...(19): siRNA sense strand
ccuaaaugugggcaugaaa

SEQ ID NO: 2396915 - RNA, 19 nt, Homo sapiens
  misc_RNA (1)...(19): siRNA sense strand
augaaacucaggagacuaa

SEQ ID NO: 2396916 - RNA, 19 nt, Homo sapiens
  misc_RNA (1)...(19): siRNA sense strand
cuucagacugugucauaaa

SEQ ID NO: 2396917 - RNA, 19 nt, Homo sapiens
  misc_RNA (1)...(19): siRNA sense strand
gggcaugaaacucaggaga

SEQ ID NO: 2396918 - RNA, 19 nt, Homo sapiens
  misc_RNA (1)...(19): siRNA sense strand
augaugaagaggaagaaga

SEQ ID NO: 2396919 - RNA, 19 nt, Homo sapiens
  misc_RNA (1)...(19): siRNA sense strand
aagaagaugaaggcagaaa

SEQ ID NO: 2396920 - RNA, 19 nt, Homo sapiens
  misc_RNA (1)...(19): siRNA sense strand
acuaugaggaacaagagaa

SEQ ID NO: 2396921 - RNA, 19 nt, Homo sapiens
  misc_RNA (1)...(19): siRNA sense strand
cuggaggugaagagggaga

SEQ ID NO: 2396922 - RNA, 19 nt, Homo sapiens
  misc_RNA (1)...(19): siRNA sense strand
gcuuauuggaagaaccuuu

SEQ ID NO: 2396923 - RNA, 19 nt, Homo sapiens
  misc_RNA (1)...(19): siRNA sense strand
ugaugaagaggaagaagau

SEQ ID NO: 2396924 - RNA, 19 nt, Homo sapiens
  misc_RNA (1)...(19): siRNA sense strand
gacuggaggugaagaggga

SEQ ID NO: 2396925 - RNA, 19 nt, Homo sapiens
  misc_RNA (1)...(19): siRNA sense strand
augaggaggaggaugagua

SEQ ID NO: 2396926 - RNA, 19 nt, Homo sapiens
  misc_RNA (1)...(19): siRNA sense strand
acaaagugcaugaugaagu

SEQ ID NO: 2396927 - RNA, 19 nt, Homo sapiens
  misc_RNA (1)...(19): siRNA sense strand
aggaugaguaugaagcaga

SEQ ID NO: 2396928 - RNA, 19 nt, Homo sapiens
  misc_RNA (1)...(19): siRNA sense strand
ggaagaaggcugagaaccg

SEQ ID NO: 2396929 - RNA, 19 nt, Homo sapiens
  misc_RNA (1)...(19): siRNA sense strand
aagacuggugcgaggaaga

SEQ ID NO: 2396930 - RNA, 19 nt, Homo sapiens
  misc_RNA (1)...(19): siRNA sense strand
cauacaaggagcaaagugu

SEQ ID NO: 2396931 - RNA, 19 nt, Homo sapiens
  misc_RNA (1)...(19): siRNA sense strand
aggaagaagaugaaggcag

SEQ ID NO: 2396932 - RNA, 19 nt, Homo sapiens
  misc_RNA (1)...(19): siRNA sense strand
ucauaaagcaugcuggugu

SEQ ID NO: 2396933 - RNA, 19 nt, Homo sapiens
  misc_RNA (1)...(19): siRNA sense strand
auguaaugccucaauggaa

SEQ ID NO: 2396934 - RNA, 19 nt, Homo sapiens
  misc_RNA (1)...(19): siRNA sense strand
ggaugaugaagaggaagaa

SEQ ID NO: 2396935 - RNA, 19 nt, Homo sapiens
  misc_RNA (1)...(19): siRNA sense strand
aggagaagcuguuuggaca

SEQ ID NO: 2396936 - RNA, 19 nt, Homo sapiens
  misc_RNA (1)...(19): siRNA sense strand
auauuugacgagauggaua

SEQ ID NO: 2396937 - RNA, 19 nt, Homo sapiens
  misc_RNA (1)...(19): siRNA sense strand
cagaaguggauccgcggua

SEQ ID NO: 2396938 - RNA, 19 nt, Homo sapiens
  misc_RNA (1)...(19): siRNA sense strand
agcuggauuuggaggagaa

SEQ ID NO: 2396939 - RNA, 19 nt, Homo sapiens
  misc_RNA (1)...(19): siRNA sense strand
ucacaagaguggcagagga

SEQ ID NO: 2396940 - RNA, 19 nt, Homo sapiens
  misc_RNA (1)...(19): siRNA sense strand
agacaagggcugcaagacu

SEQ ID NO: 2396941 - RNA, 19 nt, Homo sapiens
  misc_RNA (1)...(19): siRNA sense strand
agauaaaacuguaccagga

SEQ ID NO: 2396942 - RNA, 19 nt, Homo sapiens
  misc_RNA (1)...(19): siRNA sense strand
aguacagacaugugaaaau

SEQ ID NO: 2396943 - RNA, 19 nt, Homo sapiens
  misc_RNA (1)...(19): siRNA sense strand
cgguaaugugagugcaugu

SEQ ID NO: 2396944 - RNA, 19 nt, Homo sapiens
  misc_RNA (1)...(19): siRNA sense strand
uagcggagcugcugcgaga

SEQ ID NO: 2396945 - RNA, 19 nt, Homo sapiens
  misc_RNA (1)...(19): siRNA sense strand
auucagugugggagaguuu

SEQ ID NO: 2396946 - RNA, 19 nt, Homo sapiens
  misc_RNA (1)...(19): siRNA sense strand
cuuuaaaggcagucgacau

SEQ ID NO: 2396947 - RNA, 19 nt, Homo sapiens
  misc_RNA (1)...(19): siRNA sense strand
auucagugugggagaguuu

SEQ ID NO: 2396948 - RNA, 19 nt, Homo sapiens
  misc_RNA (1)...(19): siRNA sense strand
augcaugccauauacgaaa

SEQ ID NO: 2396949 - RNA, 19 nt, Homo sapiens
  misc_RNA (1)...(19): siRNA sense strand
gccauauacgaaaggaaaa

SEQ ID NO: 2396950 - RNA, 19 nt, Homo sapiens
  misc_RNA (1)...(19): siRNA sense strand
cgaggauucugaugaacaa

SEQ ID NO: 2396951 - RNA, 19 nt, Homo sapiens
  misc_RNA (1)...(19): siRNA sense strand
cagcgaggauucugaugaa

SEQ ID NO: 2396952 - RNA, 19 nt, Homo sapiens
  misc_RNA (1)...(19): siRNA sense strand
ccaagagccugcagggaac

SEQ ID NO: 2396953 - RNA, 19 nt, Homo sapiens
  misc_RNA (1)...(19): siRNA sense strand
caucgugaucauaggucua

SEQ ID NO: 2396954 - RNA, 19 nt, Homo sapiens
  misc_RNA (1)...(19): siRNA sense strand
gcgaggauucugaugaaca

SEQ ID NO: 2396955 - RNA, 19 nt, Homo sapiens
  misc_RNA (1)...(19): siRNA sense strand
accaagagccugcagggaa

SEQ ID NO: 2396956 - RNA, 19 nt, Homo sapiens
  misc_RNA (1)...(19): siRNA sense strand
ugaaaucagaagagacagu

SEQ ID NO: 2396957 - RNA, 19 nt, Homo sapiens
  misc_RNA (1)...(19): siRNA sense strand
aggaggugucauacgcaua

SEQ ID NO: 2396958 - RNA, 19 nt, Homo sapiens
  misc_RNA (1)...(19): siRNA sense strand
guaaagcgcaggauggaga

SEQ ID NO: 2396959 - RNA, 19 nt, Homo sapiens
  misc_RNA (1)...(19): siRNA sense strand
cagaaaggcauuuggguug

SEQ ID NO: 2396960 - RNA, 19 nt, Homo sapiens
  misc_RNA (1)...(19): siRNA sense strand
ccugggaggaguugcacaa

SEQ ID NO: 2396961 - RNA, 19 nt, Homo sapiens
  misc_RNA (1)...(19): siRNA sense strand
ucagaaaggcauuuggguu

SEQ ID NO: 2396962 - RNA, 19 nt, Homo sapiens
  misc_RNA (1)...(19): siRNA sense strand
ccuccaccucugaaagaua

SEQ ID NO: 2396963 - RNA, 19 nt, Homo sapiens
  misc_RNA (1)...(19): siRNA sense strand
gcuucaauggcuauagaga

SEQ ID NO: 2396964 - RNA, 19 nt, Homo sapiens
  misc_RNA (1)...(19): siRNA sense strand
ggcuauagagagaacccaa

SEQ ID NO: 2396965 - RNA, 19 nt, Homo sapiens
  misc_RNA (1)...(19): siRNA sense strand
uaguggugcauuuaggaaa

SEQ ID NO: 2396966 - RNA, 19 nt, Homo sapiens
  misc_RNA (1)...(19): siRNA sense strand
aggaggacucucugaugaa

SEQ ID NO: 2396967 - RNA, 19 nt, Homo sapiens
  misc_RNA (1)...(19): siRNA sense strand
aguggugcauuuaggaaaa

SEQ ID NO: 2396968 - RNA, 19 nt, Homo sapiens
  misc_RNA (1)...(19): siRNA sense strand
ccacaaaucaccuggagag

SEQ ID NO: 2396969 - RNA, 19 nt, Homo sapiens
  misc_RNA (1)...(19): siRNA sense strand
cugacaucauccagggcaa

SEQ ID NO: 2396970 - RNA, 19 nt, Homo sapiens
  misc_RNA (1)...(19): siRNA sense strand
gaguguaugucuuuggaga

SEQ ID NO: 2396971 - RNA, 19 nt, Homo sapiens
  misc_RNA (1)...(19): siRNA sense strand
cagcaaguucugagagcca

SEQ ID NO: 2396972 - RNA, 19 nt, Homo sapiens
  misc_RNA (1)...(19): siRNA sense strand
agguagaagcagagguuac

SEQ ID NO: 2396973 - RNA, 19 nt, Homo sapiens
  misc_RNA (1)...(19): siRNA sense strand
aguacaaagagaaccacaa

SEQ ID NO: 2396974 - RNA, 19 nt, Homo sapiens
  misc_RNA (1)...(19): siRNA sense strand
caaagguaccaguggcuca

SEQ ID NO: 2396975 - RNA, 19 nt, Homo sapiens
  misc_RNA (1)...(19): siRNA sense strand
aguguaugucuuuggagaa

SEQ ID NO: 2396976 - RNA, 19 nt, Homo sapiens
  misc_RNA (1)...(19): siRNA sense strand
agaagauguccaaagugaa

SEQ ID NO: 2396977 - RNA, 19 nt, Homo sapiens
  misc_RNA (1)...(19): siRNA sense strand
uguccaaagugaaaggucu

SEQ ID NO: 2396978 - RNA, 19 nt, Homo sapiens
  misc_RNA (1)...(19): siRNA sense strand
gugugauggcugugaagca

SEQ ID NO: 2396979 - RNA, 19 nt, Homo sapiens
  misc_RNA (1)...(19): siRNA sense strand
uguugaaccuguuugccua

SEQ ID NO: 2396980 - RNA, 19 nt, Homo sapiens
  misc_RNA (1)...(19): siRNA sense strand
ccuguuugccuaugggaca

SEQ ID NO: 2396981 - RNA, 19 nt, Homo sapiens
  misc_RNA (1)...(19): siRNA sense strand
ggaaggagcuaaugcugcu

SEQ ID NO: 2396982 - RNA, 19 nt, Homo sapiens
  misc_RNA (1)...(19): siRNA sense strand
acuccguguugcugaaaga

SEQ ID NO: 2396983 - RNA, 19 nt, Homo sapiens
  misc_RNA (1)...(19): siRNA sense strand
gcuucuaaacagagagaga

SEQ ID NO: 2396984 - RNA, 19 nt, Homo sapiens
  misc_RNA (1)...(19): siRNA sense strand
agaugugggcagugaggaa

SEQ ID NO: 2396985 - RNA, 19 nt, Homo sapiens
  misc_RNA (1)...(19): siRNA sense strand
aacaagaagaggaggauga

SEQ ID NO: 2396986 - RNA, 19 nt, Homo sapiens
  misc_RNA (1)...(19): siRNA sense strand
ggaaagaauucacaggaag

SEQ ID NO: 2396987 - RNA, 19 nt, Homo sapiens
  misc_RNA (1)...(19): siRNA sense strand
aggaagaacaagaagagga

SEQ ID NO: 2396988 - RNA, 19 nt, Homo sapiens
  misc_RNA (1)...(19): siRNA sense strand
aagaacaagaagaggagga

SEQ ID NO: 2396989 - RNA, 19 nt, Homo sapiens
  misc_RNA (1)...(19): siRNA sense strand
gugaggaagaacaagaaga

SEQ ID NO: 2396990 - RNA, 19 nt, Homo sapiens
  misc_RNA (1)...(19): siRNA sense strand
gugaagaccaagaaggaug

SEQ ID NO: 2396991 - RNA, 19 nt, Homo sapiens
  misc_RNA (1)...(19): siRNA sense strand
aggcaccauuccaggagaa

SEQ ID NO: 2396992 - RNA, 19 nt, Homo sapiens
  misc_RNA (1)...(19): siRNA sense strand
cugaugaugcagaugaaga

SEQ ID NO: 2396993 - RNA, 19 nt, Homo sapiens
  misc_RNA (1)...(19): siRNA sense strand
acucagaagacaaagaugu

SEQ ID NO: 2396994 - RNA, 19 nt, Homo sapiens
  misc_RNA (1)...(19): siRNA sense strand
aaacagagagagaugcuca

SEQ ID NO: 2396995 - RNA, 19 nt, Homo sapiens
  misc_RNA (1)...(19): siRNA sense strand
agcagaggauagugaagau

SEQ ID NO: 2396996 - RNA, 19 nt, Homo sapiens
  misc_RNA (1)...(19): siRNA sense strand
ggaagaacaagaagaggag

SEQ ID NO: 2396997 - RNA, 19 nt, Homo sapiens
  misc_RNA (1)...(19): siRNA sense strand
aagaauucacaggaagaua

SEQ ID NO: 2396998 - RNA, 19 nt, Homo sapiens
  misc_RNA (1)...(19): siRNA sense strand
aggauuuauucgagacaaa

SEQ ID NO: 2396999 - RNA, 19 nt, Homo sapiens
  misc_RNA (1)...(19): siRNA sense strand
ccagaaagguuguagguuc

SEQ ID NO: 2397000 - RNA, 19 nt, Homo sapiens
  misc_RNA (1)...(19): siRNA sense strand
aagaaauaggcaagaaaca

SEQ ID NO: 2397001 - RNA, 19 nt, Homo sapiens
  misc_RNA (1)...(19): siRNA sense strand
ugggaaauggaaaggcaaa

SEQ ID NO: 2397002 - RNA, 19 nt, Homo sapiens
  misc_RNA (1)...(19): siRNA sense strand
aaucagaagaaauaggcaa

SEQ ID NO: 2397003 - RNA, 19 nt, Homo sapiens
  misc_RNA (1)...(19): siRNA sense strand
ggugaaaaugccacagaaa

SEQ ID NO: 2397004 - RNA, 19 nt, Homo sapiens
  misc_RNA (1)...(19): siRNA sense strand
aaagaugacaaguggaaaa

SEQ ID NO: 2397005 - RNA, 19 nt, Homo sapiens
  misc_RNA (1)...(19): siRNA sense strand
gcaaauaguaagaccagca

SEQ ID NO: 2397006 - RNA, 19 nt, Homo sapiens
  misc_RNA (1)...(19): siRNA sense strand
ugaaggacguggaucggua

SEQ ID NO: 2397007 - RNA, 19 nt, Homo sapiens
  misc_RNA (1)...(19): siRNA sense strand
aagagaugggaaauggaaa

SEQ ID NO: 2397008 - RNA, 19 nt, Homo sapiens
  misc_RNA (1)...(19): siRNA sense strand
agaaauacauggaccgaag

SEQ ID NO: 2397009 - RNA, 19 nt, Homo sapiens
  misc_RNA (1)...(19): siRNA sense strand
ggguaaagucaguuaaccu

SEQ ID NO: 2397010 - RNA, 19 nt, Homo sapiens
  misc_RNA (1)...(19): siRNA sense strand
gcaugaugaacuauggaca

SEQ ID NO: 2397011 - RNA, 19 nt, Homo sapiens
  misc_RNA (1)...(19): siRNA sense strand
gacaaauaugagaagaaga

SEQ ID NO: 2397012 - RNA, 19 nt, Homo sapiens
  misc_RNA (1)...(19): siRNA sense strand
ccgaauggaaugaugacca

SEQ ID NO: 2397013 - RNA, 19 nt, Homo sapiens
  misc_RNA (1)...(19): siRNA sense strand
gaugggaaauggaaaggca

SEQ ID NO: 2397014 - RNA, 19 nt, Homo sapiens
  misc_RNA (1)...(19): siRNA sense strand
gaaaagagggagcgaacca

SEQ ID NO: 2397015 - RNA, 19 nt, Homo sapiens
  misc_RNA (1)...(19): siRNA sense strand
acaucaaugccuuuaggaa

SEQ ID NO: 2397016 - RNA, 19 nt, Homo sapiens
  misc_RNA (1)...(19): siRNA sense strand
caggcaagucggugaagga

SEQ ID NO: 2397017 - RNA, 19 nt, Homo sapiens
  misc_RNA (1)...(19): siRNA sense strand
agucaaugaguggcggaaa

SEQ ID NO: 2397018 - RNA, 19 nt, Homo sapiens
  misc_RNA (1)...(19): siRNA sense strand
caaugaugggugugccgaa

SEQ ID NO: 2397019 - RNA, 19 nt, Homo sapiens
  misc_RNA (1)...(19): siRNA sense strand
uggcggaaauggacaggca

SEQ ID NO: 2397020 - RNA, 19 nt, Homo sapiens
  misc_RNA (1)...(19): siRNA sense strand
gcaagucggugaaggacgu

SEQ ID NO: 2397021 - RNA, 19 nt, Homo sapiens
  misc_RNA (1)...(19): siRNA sense strand
aguccucagauguggaaau

SEQ ID NO: 2397022 - RNA, 19 nt, Homo sapiens
  misc_RNA (1)...(19): siRNA sense strand
uggaagaggagcugcagau

SEQ ID NO: 2397023 - RNA, 19 nt, Homo sapiens
  misc_RNA (1)...(19): siRNA sense strand
ccacagaagcucaagccca

SEQ ID NO: 2397024 - RNA, 19 nt, Homo sapiens
  misc_RNA (1)...(19): siRNA sense strand
gcucaauaagacugugcuu

SEQ ID NO: 2397025 - RNA, 19 nt, Homo sapiens
  misc_RNA (1)...(19): siRNA sense strand
acaucaagguuucagcaga

SEQ ID NO: 2397026 - RNA, 19 nt, Homo sapiens
  misc_RNA (1)...(19): siRNA sense strand
gggaggacuacgaguucaa

SEQ ID NO: 2397027 - RNA, 19 nt, Homo sapiens
  misc_RNA (1)...(19): siRNA sense strand
gcaaguggugggugcggaa

SEQ ID NO: 2397028 - RNA, 19 nt, Homo sapiens
  misc_RNA (1)...(19): siRNA sense strand
ucguguacuucguggcauu

SEQ ID NO: 2397029 - RNA, 19 nt, Homo sapiens
  misc_RNA (1)...(19): siRNA sense strand
cagcaguacuuccaggaca

SEQ ID NO: 2397030 - RNA, 19 nt, Homo sapiens
  misc_RNA (1)...(19): siRNA sense strand
ucgcugaggaggcggaaga

SEQ ID NO: 2397031 - RNA, 19 nt, Homo sapiens
  misc_RNA (1)...(19): siRNA sense strand
ucuacaugucccugguuaa

SEQ ID NO: 2397032 - RNA, 19 nt, Homo sapiens
  misc_RNA (1)...(19): siRNA sense strand
gcuucgagacgcucagcaa

SEQ ID NO: 2397033 - RNA, 19 nt, Homo sapiens
  misc_RNA (1)...(19): siRNA sense strand
ggaagaggaucggagccua

SEQ ID NO: 2397034 - RNA, 19 nt, Homo sapiens
  misc_RNA (1)...(19): siRNA sense strand
uggcuuuccaucagaacaa

SEQ ID NO: 2397035 - RNA, 19 nt, Homo sapiens
  misc_RNA (1)...(19): siRNA sense strand
caucagaacaagcagcuca

SEQ ID NO: 2397036 - RNA, 19 nt, Homo sapiens
  misc_RNA (1)...(19): siRNA sense strand
augccaugugggaggacua

SEQ ID NO: 2397037 - RNA, 19 nt, Homo sapiens
  misc_RNA (1)...(19): siRNA sense strand
acaagcagcucaucgguga

SEQ ID NO: 2397038 - RNA, 19 nt, Homo sapiens
  misc_RNA (1)...(19): siRNA sense strand
ggaaaagaggauuggauau

SEQ ID NO: 2397039 - RNA, 19 nt, Homo sapiens
  misc_RNA (1)...(19): siRNA sense strand
gcucagaagaagaaagacu

SEQ ID NO: 2397040 - RNA, 19 nt, Homo sapiens
  misc_RNA (1)...(19): siRNA sense strand
gagaaggaggugagagcca

SEQ ID NO: 2397041 - RNA, 19 nt, Homo sapiens
  misc_RNA (1)...(19): siRNA sense strand
augccaugguacaaggaaa

SEQ ID NO: 2397042 - RNA, 19 nt, Homo sapiens
  misc_RNA (1)...(19): siRNA sense strand
aaagaagaugcuugggcaa

SEQ ID NO: 2397043 - RNA, 19 nt, Homo sapiens
  misc_RNA (1)...(19): siRNA sense strand
cugugaagucuuuggguga

SEQ ID NO: 2397044 - RNA, 19 nt, Homo sapiens
  misc_RNA (1)...(19): siRNA sense strand
ggaccuagaagaugcccaa

SEQ ID NO: 2397045 - RNA, 19 nt, Homo sapiens
  misc_RNA (1)...(19): siRNA sense strand
gcccaagagucaaaggcuu

SEQ ID NO: 2397046 - RNA, 19 nt, Homo sapiens
  misc_RNA (1)...(19): siRNA sense strand
gcaaacagcauaugggaag

SEQ ID NO: 2397047 - RNA, 19 nt, Homo sapiens
  misc_RNA (1)...(19): siRNA sense strand
uggaaaagaggauuggaua

SEQ ID NO: 2397048 - RNA, 19 nt, Homo sapiens
  misc_RNA (1)...(19): siRNA sense strand
acuucuuguuggagugauu

SEQ ID NO: 2397049 - RNA, 19 nt, Homo sapiens
  misc_RNA (1)...(19): siRNA sense strand
guacugagauuguagccuu

SEQ ID NO: 2397050 - RNA, 19 nt, Homo sapiens
  misc_RNA (1)...(19): siRNA sense strand
agacaagagaagaggagac

SEQ ID NO: 2397051 - RNA, 19 nt, Homo sapiens
  misc_RNA (1)...(19): siRNA sense strand
gagaaagggcaguggagug

SEQ ID NO: 2397052 - RNA, 19 nt, Homo sapiens
  misc_RNA (1)...(19): siRNA sense strand
cagcagaagccucaggguu

SEQ ID NO: 2397053 - RNA, 19 nt, Homo sapiens
  misc_RNA (1)...(19): siRNA sense strand
ugugcuggguacugagauu

SEQ ID NO: 2397054 - RNA, 19 nt, Homo sapiens
  misc_RNA (1)...(19): siRNA sense strand
cuggaagcucagaagaaga

SEQ ID NO: 2397055 - RNA, 19 nt, Homo sapiens
  misc_RNA (1)...(19): siRNA sense strand
gccuaauccaccacacaaa

SEQ ID NO: 2397056 - RNA, 19 nt, Homo sapiens
  misc_RNA (1)...(19): siRNA sense strand
aggaaauggagauguggua

SEQ ID NO: 2397057 - RNA, 19 nt, Homo sapiens
  misc_RNA (1)...(19): siRNA sense strand
gggccuugcgagaguggaa

SEQ ID NO: 2397058 - RNA, 19 nt, Homo sapiens
  misc_RNA (1)...(19): siRNA sense strand
aggagauccggauggaauu

SEQ ID NO: 2397059 - RNA, 19 nt, Homo sapiens
  misc_RNA (1)...(19): siRNA sense strand
gggcaguguuugagcggaa

SEQ ID NO: 2397060 - RNA, 19 nt, Homo sapiens
  misc_RNA (1)...(19): siRNA sense strand
aagaaaugccagaaggaau

SEQ ID NO: 2397061 - RNA, 19 nt, Homo sapiens
  misc_RNA (1)...(19): siRNA sense strand
aggacuugauugagaagaa

SEQ ID NO: 2397062 - RNA, 19 nt, Homo sapiens
  misc_RNA (1)...(19): siRNA sense strand
cggcaaugauggagacacu

SEQ ID NO: 2397063 - RNA, 19 nt, Homo sapiens
  misc_RNA (1)...(19): siRNA sense strand
caggaauugcagcgagaaa

SEQ ID NO: 2397064 - RNA, 19 nt, Homo sapiens
  misc_RNA (1)...(19): siRNA sense strand
gugaagaaacaggaagaaa

SEQ ID NO: 2397065 - RNA, 19 nt, Homo sapiens
  misc_RNA (1)...(19): siRNA sense strand
agaaggaaucagagcagaa

SEQ ID NO: 2397066 - RNA, 19 nt, Homo sapiens
  misc_RNA (1)...(19): siRNA sense strand
gaaacauucuccaggccua

SEQ ID NO: 2397067 - RNA, 19 nt, Homo sapiens
  misc_RNA (1)...(19): siRNA sense strand
ggaaacuagaagagguuca

SEQ ID NO: 2397068 - RNA, 19 nt, Homo sapiens
  misc_RNA (1)...(19): siRNA sense strand
cagauauugcggaggauuu

SEQ ID NO: 2397069 - RNA, 19 nt, Homo sapiens
  misc_RNA (1)...(19): siRNA sense strand
agaaagugcgagagagcga

SEQ ID NO: 2397070 - RNA, 19 nt, Homo sapiens
  misc_RNA (1)...(19): siRNA sense strand
gaaauggaguccuggcaga

SEQ ID NO: 2397071 - RNA, 19 nt, Homo sapiens
  misc_RNA (1)...(19): siRNA sense strand
uggagaagcagcagcagaa

SEQ ID NO: 2397072 - RNA, 19 nt, Homo sapiens
  misc_RNA (1)...(19): siRNA sense strand
gcucagauauugcggagga

SEQ ID NO: 2397073 - RNA, 19 nt, Homo sapiens
  misc_RNA (1)...(19): siRNA sense strand
caagaagaggcgaggaagu

SEQ ID NO: 2397074 - RNA, 19 nt, Homo sapiens
  misc_RNA (1)...(19): siRNA sense strand
uggcugaaagugugggaau

SEQ ID NO: 2397075 - RNA, 19 nt, Homo sapiens
  misc_RNA (1)...(19): siRNA sense strand
gggccaugaaagacaagaa

SEQ ID NO: 2397076 - RNA, 19 nt, Homo sapiens
  misc_RNA (1)...(19): siRNA sense strand
aagugaagaaacaggaaga

SEQ ID NO: 2397077 - RNA, 19 nt, Homo sapiens
  misc_RNA (1)...(19): siRNA sense strand
aguccuggcagaagcgaua

SEQ ID NO: 2397078 - RNA, 19 nt, Homo sapiens
  misc_RNA (1)...(19): siRNA sense strand
gggaaugacaagaaaugga

SEQ ID NO: 2397079 - RNA, 19 nt, Homo sapiens
  misc_RNA (1)...(19): siRNA sense strand
uggcagaagcgauacgauu

SEQ ID NO: 2397080 - RNA, 19 nt, Homo sapiens
  misc_RNA (1)...(19): siRNA sense strand
aggaaguggcucaagaaga

SEQ ID NO: 2397081 - RNA, 19 nt, Homo sapiens
  misc_RNA (1)...(19): siRNA sense strand
acagauaugcccaggacau

SEQ ID NO: 2397082 - RNA, 19 nt, Homo sapiens
  misc_RNA (1)...(19): siRNA sense strand
gcagaaagugcgagagagc

SEQ ID NO: 2397083 - RNA, 19 nt, Homo sapiens
  misc_RNA (1)...(19): siRNA sense strand
agacagaagccuugagcag

SEQ ID NO: 2397084 - RNA, 19 nt, Homo sapiens
  misc_RNA (1)...(19): siRNA sense strand
uggaggagacccaggcaau

SEQ ID NO: 2397085 - RNA, 19 nt, Homo sapiens
  misc_RNA (1)...(19): siRNA sense strand
gcgagagagcgaacugcaa

SEQ ID NO: 2397086 - RNA, 19 nt, Homo sapiens
  misc_RNA (1)...(19): siRNA sense strand
ggcucaagaagaaggaaca

SEQ ID NO: 2397087 - RNA, 19 nt, Homo sapiens
  misc_RNA (1)...(19): siRNA sense strand
gugugggaaugacaagaaa

SEQ ID NO: 2397088 - RNA, 19 nt, Homo sapiens
  misc_RNA (1)...(19): siRNA sense strand
aaacaggaagaaaggguca

SEQ ID NO: 2397089 - RNA, 19 nt, Homo sapiens
  misc_RNA (1)...(19): siRNA sense strand
uggaagaccaucagaagca

SEQ ID NO: 2397090 - RNA, 19 nt, Homo sapiens
  misc_RNA (1)...(19): siRNA sense strand
agauugaccuugaaaagaa

SEQ ID NO: 2397091 - RNA, 19 nt, Homo sapiens
  misc_RNA (1)...(19): siRNA sense strand
gcacaguggaucagcaucu

SEQ ID NO: 2397092 - RNA, 19 nt, Homo sapiens
  misc_RNA (1)...(19): siRNA sense strand
ucauugacaagcagaggaa

SEQ ID NO: 2397093 - RNA, 19 nt, Homo sapiens
  misc_RNA (1)...(19): siRNA sense strand
cgggagaagcagcagcgua

SEQ ID NO: 2397094 - RNA, 19 nt, Homo sapiens
  misc_RNA (1)...(19): siRNA sense strand
gcucaagaagaaggaacaa

SEQ ID NO: 2397095 - RNA, 19 nt, Homo sapiens
  misc_RNA (1)...(19): siRNA sense strand
ccagagacucagcuagauu

SEQ ID NO: 2397096 - RNA, 19 nt, Homo sapiens
  misc_RNA (1)...(19): siRNA sense strand
gagccagcacaguggauca

SEQ ID NO: 2397097 - RNA, 19 nt, Homo sapiens
  misc_RNA (1)...(19): siRNA sense strand
agaaaugccagaaggaauc

SEQ ID NO: 2397098 - RNA, 19 nt, Homo sapiens
  misc_RNA (1)...(19): siRNA sense strand
ugcugaggcuacaggaauu

SEQ ID NO: 2397099 - RNA, 19 nt, Homo sapiens
  misc_RNA (1)...(19): siRNA sense strand
agaaagugacugagcugga

SEQ ID NO: 2397100 - RNA, 19 nt, Homo sapiens
  misc_RNA (1)...(19): siRNA sense strand
gacaagaaauggagaccuc

SEQ ID NO: 2397101 - RNA, 19 nt, Homo sapiens
  misc_RNA (1)...(19): siRNA sense strand
cgauacgauucgcuccaaa

SEQ ID NO: 2397102 - RNA, 19 nt, Homo sapiens
  misc_RNA (1)...(19): siRNA sense strand
gauucugaguugaagagca

SEQ ID NO: 2397103 - RNA, 19 nt, Homo sapiens
  misc_RNA (1)...(19): siRNA sense strand
ggagaaagugacugagcug

SEQ ID NO: 2397104 - RNA, 19 nt, Homo sapiens
  misc_RNA (1)...(19): siRNA sense strand
acauagccugcaagauaaa

SEQ ID NO: 2397105 - RNA, 19 nt, Homo sapiens
  misc_RNA (1)...(19): siRNA sense strand
agaagcagcagcagaagau

SEQ ID NO: 2397106 - RNA, 19 nt, Homo sapiens
  misc_RNA (1)...(19): siRNA sense strand
agaggaaacuagaagaggu

SEQ ID NO: 2397107 - RNA, 19 nt, Homo sapiens
  misc_RNA (1)...(19): siRNA sense strand
ugaaagugugggaaugaca

SEQ ID NO: 2397108 - RNA, 19 nt, Homo sapiens
  misc_RNA (1)...(19): siRNA sense strand
ucagcaucuugaacaguaa

SEQ ID NO: 2397109 - RNA, 19 nt, Homo sapiens
  misc_RNA (1)...(19): siRNA sense strand
aaguugaaguccagcucau

SEQ ID NO: 2397110 - RNA, 19 nt, Homo sapiens
  misc_RNA (1)...(19): siRNA sense strand
cugcagagagaaggagauu

SEQ ID NO: 2397111 - RNA, 19 nt, Homo sapiens
  misc_RNA (1)...(19): siRNA sense strand
gaagccuugagcagagaaa

SEQ ID NO: 2397112 - RNA, 19 nt, Homo sapiens
  misc_RNA (1)...(19): siRNA sense strand
ggaaagaggcagagcagcu

SEQ ID NO: 2397113 - RNA, 19 nt, Homo sapiens
  misc_RNA (1)...(19): siRNA sense strand
cggaaaucuaccagcuuua

SEQ ID NO: 2397114 - RNA, 19 nt, Homo sapiens
  misc_RNA (1)...(19): siRNA sense strand
ggaaguaagccaugccaca

SEQ ID NO: 2397115 - RNA, 19 nt, Homo sapiens
  misc_RNA (1)...(19): siRNA sense strand
ccacgaggaaagaggcaga

SEQ ID NO: 2397116 - RNA, 19 nt, Homo sapiens
  misc_RNA (1)...(19): siRNA sense strand
aaagggagcuggagcgcau

SEQ ID NO: 2397117 - RNA, 19 nt, Homo sapiens
  misc_RNA (1)...(19): siRNA sense strand
gcaauuaaacucaugcaga

SEQ ID NO: 2397118 - RNA, 19 nt, Homo sapiens
  misc_RNA (1)...(19): siRNA sense strand
auaaugaagugaaggccuu

SEQ ID NO: 2397119 - RNA, 19 nt, Homo sapiens
  misc_RNA (1)...(19): siRNA sense strand
ugugaugagcauaaggaau

SEQ ID NO: 2397120 - RNA, 19 nt, Homo sapiens
  misc_RNA (1)...(19): siRNA sense strand
acccauuuguggacagcaa

SEQ ID NO: 2397121 - RNA, 19 nt, Homo sapiens
  misc_RNA (1)...(19): siRNA sense strand
aggaauucaaggaugucaa

SEQ ID NO: 2397122 - RNA, 19 nt, Homo sapiens
  misc_RNA (1)...(19): siRNA sense strand
augagaggacagaggcuau

SEQ ID NO: 2397123 - RNA, 19 nt, Homo sapiens
  misc_RNA (1)...(19): siRNA sense strand
cauaaggaauucaaggaug

SEQ ID NO: 2397124 - RNA, 19 nt, Homo sapiens
  misc_RNA (1)...(19): siRNA sense strand
ccguaugcaaggaagacau

SEQ ID NO: 2397125 - RNA, 19 nt, Homo sapiens
  misc_RNA (1)...(19): siRNA sense strand
ucgcaaaagaacugauuga

SEQ ID NO: 2397126 - RNA, 19 nt, Homo sapiens
  misc_RNA (1)...(19): siRNA sense strand
augugugugaugagcauaa

SEQ ID NO: 2397127 - RNA, 19 nt, Homo sapiens
  misc_RNA (1)...(19): siRNA sense strand
agccaugacaaucggaaau

SEQ ID NO: 2397128 - RNA, 19 nt, Homo sapiens
  misc_RNA (1)...(19): siRNA sense strand
gauaaaucuuccagggcaa

SEQ ID NO: 2397129 - RNA, 19 nt, Homo sapiens
  misc_RNA (1)...(19): siRNA sense strand
gaacaacaggugugggcaa

SEQ ID NO: 2397130 - RNA, 19 nt, Homo sapiens
  misc_RNA (1)...(19): siRNA sense strand
gcuacaaaugggugcuaaa

SEQ ID NO: 2397131 - RNA, 19 nt, Homo sapiens
  misc_RNA (1)...(19): siRNA sense strand
ugauagagcccaacgggaa

SEQ ID NO: 2397132 - RNA, 19 nt, Homo sapiens
  misc_RNA (1)...(19): siRNA sense strand
ccaaaggaaaggaagaaaa

SEQ ID NO: 2397133 - RNA, 19 nt, Homo sapiens
  misc_RNA (1)...(19): siRNA sense strand
gagaaagaaaugggcacaa

SEQ ID NO: 2397134 - RNA, 19 nt, Homo sapiens
  misc_RNA (1)...(19): siRNA sense strand
gagaacaaucggcgaggau

SEQ ID NO: 2397135 - RNA, 19 nt, Homo sapiens
  misc_RNA (1)...(19): siRNA sense strand
acaagggccaagauggaaa

SEQ ID NO: 2397136 - RNA, 19 nt, Homo sapiens
  misc_RNA (1)...(19): siRNA sense strand
ugccauaagacucgacuaa

SEQ ID NO: 2397137 - RNA, 19 nt, Homo sapiens
  misc_RNA (1)...(19): siRNA sense strand
cuaaaggagaguagcagau

SEQ ID NO: 2397138 - RNA, 19 nt, Homo sapiens
  misc_RNA (1)...(19): siRNA sense strand
gaaaugggcacaagagcca

SEQ ID NO: 2397139 - RNA, 19 nt, Homo sapiens
  misc_RNA (1)...(19): siRNA sense strand
ggaauaauuugguggcccu

SEQ ID NO: 2397140 - RNA, 19 nt, Homo sapiens
  misc_RNA (1)...(19): siRNA sense strand
ggcaaagguacaagggcca

SEQ ID NO: 2397141 - RNA, 19 nt, Homo sapiens
  misc_RNA (1)...(19): siRNA sense strand
aggaaucacgucagagaca

SEQ ID NO: 2397142 - RNA, 19 nt, Homo sapiens
  misc_RNA (1)...(19): siRNA sense strand
ggagaaagaaaugggcaca

SEQ ID NO: 2397143 - RNA, 19 nt, Homo sapiens
  misc_RNA (1)...(19): siRNA sense strand
cgucagagacaccuggaga

SEQ ID NO: 2397144 - RNA, 19 nt, Homo sapiens
  misc_RNA (1)...(19): siRNA sense strand
gagagaacauauugccgau

SEQ ID NO: 2397145 - RNA, 19 nt, Homo sapiens
  misc_RNA (1)...(19): siRNA sense strand
cuguagggcccauggcauu

SEQ ID NO: 2397146 - RNA, 19 nt, Homo sapiens
  misc_RNA (1)...(19): siRNA sense strand
cuuagaugccaaugugaau

SEQ ID NO: 2397147 - RNA, 19 nt, Homo sapiens
  misc_RNA (1)...(19): siRNA sense strand
acagccagucaaugagaaa

SEQ ID NO: 2397148 - RNA, 19 nt, Homo sapiens
  misc_RNA (1)...(19): siRNA sense strand
cagaaugagagaugugguu

SEQ ID NO: 2397149 - RNA, 19 nt, Homo sapiens
  misc_RNA (1)...(19): siRNA sense strand
ugaagacuggagaaagaaa

SEQ ID NO: 2397150 - RNA, 19 nt, Homo sapiens
  misc_RNA (1)...(19): siRNA sense strand
acgaauaaacuuaccagau

SEQ ID NO: 2397151 - RNA, 19 nt, Homo sapiens
  misc_RNA (1)...(19): siRNA sense strand
ucuuagcauucaaggaaca

SEQ ID NO: 2397152 - RNA, 19 nt, Homo sapiens
  misc_RNA (1)...(19): siRNA sense strand
augacgaguuagugcugua

SEQ ID NO: 2397153 - RNA, 19 nt, Homo sapiens
  misc_RNA (1)...(19): siRNA sense strand
cuguaaacaucuucccuau

SEQ ID NO: 2397154 - RNA, 19 nt, Homo sapiens
  misc_RNA (1)...(19): siRNA sense strand
gccuugaagacuggagaaa

SEQ ID NO: 2397155 - RNA, 19 nt, Homo sapiens
  misc_RNA (1)...(19): siRNA sense strand
ugcuauaccagaagucaaa

SEQ ID NO: 2397156 - RNA, 19 nt, Homo sapiens
  misc_RNA (1)...(19): siRNA sense strand
auguccaaaugcugauaaa

SEQ ID NO: 2397157 - RNA, 19 nt, Homo sapiens
  misc_RNA (1)...(19): siRNA sense strand
ucaccuuauaccugacaaa

SEQ ID NO: 2397158 - RNA, 19 nt, Homo sapiens
  misc_RNA (1)...(19): siRNA sense strand
aagaaauaucagcaccuaa

SEQ ID NO: 2397159 - RNA, 19 nt, Homo sapiens
  misc_RNA (1)...(19): siRNA sense strand
gggcaaagguacaagggcc

SEQ ID NO: 2397160 - RNA, 19 nt, Homo sapiens
  misc_RNA (1)...(19): siRNA sense strand
ugauaaaucuuccagggca

SEQ ID NO: 2397161 - RNA, 19 nt, Homo sapiens
  misc_RNA (1)...(19): siRNA sense strand
cuacaaagcaagaaaauuc

SEQ ID NO: 2397162 - RNA, 19 nt, Homo sapiens
  misc_RNA (1)...(19): siRNA sense strand
ggaaaggaagaaaaccaaa

SEQ ID NO: 2397163 - RNA, 19 nt, Homo sapiens
  misc_RNA (1)...(19): siRNA sense strand
augcuauaccagaagucaa

SEQ ID NO: 2397164 - RNA, 19 nt, Homo sapiens
  misc_RNA (1)...(19): siRNA sense strand
ugaccuucucucaguguua

SEQ ID NO: 2397165 - RNA, 19 nt, Homo sapiens
  misc_RNA (1)...(19): siRNA sense strand
cagcuaagacacagcaauc

SEQ ID NO: 2397166 - RNA, 19 nt, Homo sapiens
  misc_RNA (1)...(19): siRNA sense strand
aguuaagagacgaggaaua

SEQ ID NO: 2397167 - RNA, 19 nt, Homo sapiens
  misc_RNA (1)...(19): siRNA sense strand
uggaugaaauugagaggaa

SEQ ID NO: 2397168 - RNA, 19 nt, Homo sapiens
  misc_RNA (1)...(19): siRNA sense strand
gauacgacaccgagggaaa

SEQ ID NO: 2397169 - RNA, 19 nt, Homo sapiens
  misc_RNA (1)...(19): siRNA sense strand
ccacagaagaagugauuga

SEQ ID NO: 2397170 - RNA, 19 nt, Homo sapiens
  misc_RNA (1)...(19): siRNA sense strand
ggucaaagucgcagagcca

SEQ ID NO: 2397171 - RNA, 19 nt, Homo sapiens
  misc_RNA (1)...(19): siRNA sense strand
cuuaaagagcaacgggaaa

SEQ ID NO: 2397172 - RNA, 19 nt, Homo sapiens
  misc_RNA (1)...(19): siRNA sense strand
ugaaagaaugcaaggagaa

SEQ ID NO: 2397173 - RNA, 19 nt, Homo sapiens
  misc_RNA (1)...(19): siRNA sense strand
cugaagauaucuggagaaa

SEQ ID NO: 2397174 - RNA, 19 nt, Homo sapiens
  misc_RNA (1)...(19): siRNA sense strand
gcgcauuggccgaaauaau

SEQ ID NO: 2397175 - RNA, 19 nt, Homo sapiens
  misc_RNA (1)...(19): siRNA sense strand
uugaagaaucucagcauaa

SEQ ID NO: 2397176 - RNA, 19 nt, Homo sapiens
  misc_RNA (1)...(19): siRNA sense strand
cugaaagaaugcaaggaga

SEQ ID NO: 2397177 - RNA, 19 nt, Homo sapiens
  misc_RNA (1)...(19): siRNA sense strand
ggagaaucaacaagccaaa

SEQ ID NO: 2397178 - RNA, 19 nt, Homo sapiens
  misc_RNA (1)...(19): siRNA sense strand
ccucacaccaagagaguuu

SEQ ID NO: 2397179 - RNA, 19 nt, Homo sapiens
  misc_RNA (1)...(19): siRNA sense strand
ccaucaagauaucagcaaa

SEQ ID NO: 2397180 - RNA, 19 nt, Homo sapiens
  misc_RNA (1)...(19): siRNA sense strand
gugcacugcuggaggccaa

SEQ ID NO: 2397181 - RNA, 19 nt, Homo sapiens
  misc_RNA (1)...(19): siRNA sense strand
ggacauaagcaaagaggag

SEQ ID NO: 2397182 - RNA, 19 nt, Homo sapiens
  misc_RNA (1)...(19): siRNA sense strand
agaaggaagggaugagcua

SEQ ID NO: 2397183 - RNA, 19 nt, Homo sapiens
  misc_RNA (1)...(19): siRNA sense strand
cggacaaguucuuaaggau

SEQ ID NO: 2397184 - RNA, 19 nt, Homo sapiens
  misc_RNA (1)...(19): siRNA sense strand
gagcaguggagaacagcaa

SEQ ID NO: 2397185 - RNA, 19 nt, Homo sapiens
  misc_RNA (1)...(19): siRNA sense strand
aauacgacuuaaagagcaa

SEQ ID NO: 2397186 - RNA, 19 nt, Homo sapiens
  misc_RNA (1)...(19): siRNA sense strand
gaaccaagcucacggagga

SEQ ID NO: 2397187 - RNA, 19 nt, Homo sapiens
  misc_RNA (1)...(19): siRNA sense strand
agagaggaguuuagggcca

SEQ ID NO: 2397188 - RNA, 19 nt, Homo sapiens
  misc_RNA (1)...(19): siRNA sense strand
accgauaacaagagaagaa

SEQ ID NO: 2397189 - RNA, 19 nt, Homo sapiens
  misc_RNA (1)...(19): siRNA sense strand
caacaggagcucagcccaa

SEQ ID NO: 2397190 - RNA, 19 nt, Homo sapiens
  misc_RNA (1)...(19): siRNA sense strand
aggaaaacaucaucacaaa

SEQ ID NO: 2397191 - RNA, 19 nt, Homo sapiens
  misc_RNA (1)...(19): siRNA sense strand
cgauaacaagagaagaauu

SEQ ID NO: 2397192 - RNA, 19 nt, Homo sapiens
  misc_RNA (1)...(19): siRNA sense strand
aaaccgauaaugagggcaa

SEQ ID NO: 2397193 - RNA, 19 nt, Homo sapiens
  misc_RNA (1)...(19): siRNA sense strand
ccucagggguugcaaguua

SEQ ID NO: 2397194 - RNA, 19 nt, Homo sapiens
  misc_RNA (1)...(19): siRNA sense strand
gcucauaugaccuuggaga

SEQ ID NO: 2397195 - RNA, 19 nt, Homo sapiens
  misc_RNA (1)...(19): siRNA sense strand
ccaaaggaucagcuguuaa

SEQ ID NO: 2397196 - RNA, 19 nt, Homo sapiens
  misc_RNA (1)...(19): siRNA sense strand
aggaagagaugaaggagcu

SEQ ID NO: 2397197 - RNA, 19 nt, Homo sapiens
  misc_RNA (1)...(19): siRNA sense strand
gagcucagcccaaggaaaa

SEQ ID NO: 2397198 - RNA, 19 nt, Homo sapiens
  misc_RNA (1)...(19): siRNA sense strand
acuuaaagagcaacgggaa

SEQ ID NO: 2397199 - RNA, 19 nt, Homo sapiens
  misc_RNA (1)...(19): siRNA sense strand
guugcaaguuagcaguaaa

SEQ ID NO: 2397200 - RNA, 19 nt, Homo sapiens
  misc_RNA (1)...(19): siRNA sense strand
ggauucaguggaagaaauu

SEQ ID NO: 2397201 - RNA, 19 nt, Homo sapiens
  misc_RNA (1)...(19): siRNA sense strand
ccaagcucacggaggauaa

SEQ ID NO: 2397202 - RNA, 19 nt, Homo sapiens
  misc_RNA (1)...(19): siRNA sense strand
acgacgaguuugagcgcuu

SEQ ID NO: 2397203 - RNA, 19 nt, Homo sapiens
  misc_RNA (1)...(19): siRNA sense strand
uugaaauccaagugggaga

SEQ ID NO: 2397204 - RNA, 19 nt, Homo sapiens
  misc_RNA (1)...(19): siRNA sense strand
acagaagaagugauugaaa

SEQ ID NO: 2397205 - RNA, 19 nt, Homo sapiens
  misc_RNA (1)...(19): siRNA sense strand
gagacgaggaauacgaaaa

SEQ ID NO: 2397206 - RNA, 19 nt, Homo sapiens
  misc_RNA (1)...(19): siRNA sense strand
cuuagauauuguaugggaa

SEQ ID NO: 2397207 - RNA, 19 nt, Homo sapiens
  misc_RNA (1)...(19): siRNA sense strand
gauaaagaggauacaggau

SEQ ID NO: 2397208 - RNA, 19 nt, Homo sapiens
  misc_RNA (1)...(19): siRNA sense strand
acaccaagagaguuugaaa

SEQ ID NO: 2397209 - RNA, 19 nt, Homo sapiens
  misc_RNA (1)...(19): siRNA sense strand
gguugcggauucagaacua

SEQ ID NO: 2397210 - RNA, 19 nt, Homo sapiens
  misc_RNA (1)...(19): siRNA sense strand
agaacuagcuugugagcag

SEQ ID NO: 2397211 - RNA, 19 nt, Homo sapiens
  misc_RNA (1)...(19): siRNA sense strand
ggcccugugcagaggauua

SEQ ID NO: 2397212 - RNA, 19 nt, Homo sapiens
  misc_RNA (1)...(19): siRNA sense strand
auaaagaggauacaggauu

SEQ ID NO: 2397213 - RNA, 19 nt, Homo sapiens
  misc_RNA (1)...(19): siRNA sense strand
caaccuggacauaagcaaa

SEQ ID NO: 2397214 - RNA, 19 nt, Homo sapiens
  misc_RNA (1)...(19): siRNA sense strand
gcacacaagaugaaagaag

SEQ ID NO: 2397215 - RNA, 19 nt, Homo sapiens
  misc_RNA (1)...(19): siRNA sense strand
acuuaaagccaccacuaaa

SEQ ID NO: 2397216 - RNA, 19 nt, Homo sapiens
  misc_RNA (1)...(19): siRNA sense strand
guggagaacagcaagucaa

SEQ ID NO: 2397217 - RNA, 19 nt, Homo sapiens
  misc_RNA (1)...(19): siRNA sense strand
gaugaaauugagaggaacu

SEQ ID NO: 2397218 - RNA, 19 nt, Homo sapiens
  misc_RNA (1)...(19): siRNA sense strand
caaggagccuaauggaaaa

SEQ ID NO: 2397219 - RNA, 19 nt, Homo sapiens
  misc_RNA (1)...(19): siRNA sense strand
cuuuaucaccgcagaagaa

SEQ ID NO: 2397220 - RNA, 19 nt, Homo sapiens
  misc_RNA (1)...(19): siRNA sense strand
ugaugagugggcugagaaa

SEQ ID NO: 2397221 - RNA, 19 nt, Homo sapiens
  misc_RNA (1)...(19): siRNA sense strand
cgacuugaaccuuagauau

SEQ ID NO: 2397222 - RNA, 19 nt, Homo sapiens
  misc_RNA (1)...(19): siRNA sense strand
uaccaaauaccaagaagaa

SEQ ID NO: 2397223 - RNA, 19 nt, Homo sapiens
  misc_RNA (1)...(19): siRNA sense strand
aguuaagagacgaggaaua

SEQ ID NO: 2397224 - RNA, 19 nt, Homo sapiens
  misc_RNA (1)...(19): siRNA sense strand
uggaugaaauugagaggaa

SEQ ID NO: 2397225 - RNA, 19 nt, Homo sapiens
  misc_RNA (1)...(19): siRNA sense strand
gauacgacaccgagggaaa

SEQ ID NO: 2397226 - RNA, 19 nt, Homo sapiens
  misc_RNA (1)...(19): siRNA sense strand
ccacagaagaagugauuga

SEQ ID NO: 2397227 - RNA, 19 nt, Homo sapiens
  misc_RNA (1)...(19): siRNA sense strand
ggucaaagucgcagagcca

SEQ ID NO: 2397228 - RNA, 19 nt, Homo sapiens
  misc_RNA (1)...(19): siRNA sense strand
cuuaaagagcaacgggaaa

SEQ ID NO: 2397229 - RNA, 19 nt, Homo sapiens
  misc_RNA (1)...(19): siRNA sense strand
ugaaagaaugcaaggagaa

SEQ ID NO: 2397230 - RNA, 19 nt, Homo sapiens
  misc_RNA (1)...(19): siRNA sense strand
cugaagauaucuggagaaa

SEQ ID NO: 2397231 - RNA, 19 nt, Homo sapiens
  misc_RNA (1)...(19): siRNA sense strand
gcgcauuggccgaaauaau

SEQ ID NO: 2397232 - RNA, 19 nt, Homo sapiens
  misc_RNA (1)...(19): siRNA sense strand
uugaagaaucucagcauaa

SEQ ID NO: 2397233 - RNA, 19 nt, Homo sapiens
  misc_RNA (1)...(19): siRNA sense strand
cugaaagaaugcaaggaga

SEQ ID NO: 2397234 - RNA, 19 nt, Homo sapiens
  misc_RNA (1)...(19): siRNA sense strand
ggagaaucaacaagccaaa

SEQ ID NO: 2397235 - RNA, 19 nt, Homo sapiens
  misc_RNA (1)...(19): siRNA sense strand
ccucacaccaagagaguuu

SEQ ID NO: 2397236 - RNA, 19 nt, Homo sapiens
  misc_RNA (1)...(19): siRNA sense strand
ccaucaagauaucagcaaa

SEQ ID NO: 2397237 - RNA, 19 nt, Homo sapiens
  misc_RNA (1)...(19): siRNA sense strand
gugcacugcuggaggccaa

SEQ ID NO: 2397238 - RNA, 19 nt, Homo sapiens
  misc_RNA (1)...(19): siRNA sense strand
ggacauaagcaaagaggag

SEQ ID NO: 2397239 - RNA, 19 nt, Homo sapiens
  misc_RNA (1)...(19): siRNA sense strand
agaaggaagggaugagcua

SEQ ID NO: 2397240 - RNA, 19 nt, Homo sapiens
  misc_RNA (1)...(19): siRNA sense strand
cggacaaguucuuaaggau

SEQ ID NO: 2397241 - RNA, 19 nt, Homo sapiens
  misc_RNA (1)...(19): siRNA sense strand
gagcaguggagaacagcaa

SEQ ID NO: 2397242 - RNA, 19 nt, Homo sapiens
  misc_RNA (1)...(19): siRNA sense strand
aauacgacuuaaagagcaa

SEQ ID NO: 2397243 - RNA, 19 nt, Homo sapiens
  misc_RNA (1)...(19): siRNA sense strand
gaaccaagcucacggagga

SEQ ID NO: 2397244 - RNA, 19 nt, Homo sapiens
  misc_RNA (1)...(19): siRNA sense strand
agagaggaguuuagggcca

SEQ ID NO: 2397245 - RNA, 19 nt, Homo sapiens
  misc_RNA (1)...(19): siRNA sense strand
accgauaacaagagaagaa

SEQ ID NO: 2397246 - RNA, 19 nt, Homo sapiens
  misc_RNA (1)...(19): siRNA sense strand
caacaggagcucagcccaa

SEQ ID NO: 2397247 - RNA, 19 nt, Homo sapiens
  misc_RNA (1)...(19): siRNA sense strand
aggaaaacaucaucacaaa

SEQ ID NO: 2397248 - RNA, 19 nt, Homo sapiens
  misc_RNA (1)...(19): siRNA sense strand
cgauaacaagagaagaauu

SEQ ID NO: 2397249 - RNA, 19 nt, Homo sapiens
  misc_RNA (1)...(19): siRNA sense strand
aaaccgauaaugagggcaa

SEQ ID NO: 2397250 - RNA, 19 nt, Homo sapiens
  misc_RNA (1)...(19): siRNA sense strand
ccucagggguugcaaguua

SEQ ID NO: 2397251 - RNA, 19 nt, Homo sapiens
  misc_RNA (1)...(19): siRNA sense strand
gcucauaugaccuuggaga

SEQ ID NO: 2397252 - RNA, 19 nt, Homo sapiens
  misc_RNA (1)...(19): siRNA sense strand
ccaaaggaucagcuguuaa

SEQ ID NO: 2397253 - RNA, 19 nt, Homo sapiens
  misc_RNA (1)...(19): siRNA sense strand
aggaagagaugaaggagcu

SEQ ID NO: 2397254 - RNA, 19 nt, Homo sapiens
  misc_RNA (1)...(19): siRNA sense strand
gagcucagcccaaggaaaa

SEQ ID NO: 2397255 - RNA, 19 nt, Homo sapiens
  misc_RNA (1)...(19): siRNA sense strand
acuuaaagagcaacgggaa

SEQ ID NO: 2397256 - RNA, 19 nt, Homo sapiens
  misc_RNA (1)...(19): siRNA sense strand
guugcaaguuagcaguaaa

SEQ ID NO: 2397257 - RNA, 19 nt, Homo sapiens
  misc_RNA (1)...(19): siRNA sense strand
ggauucaguggaagaaauu

SEQ ID NO: 2397258 - RNA, 19 nt, Homo sapiens
  misc_RNA (1)...(19): siRNA sense strand
ccaagcucacggaggauaa

SEQ ID NO: 2397259 - RNA, 19 nt, Homo sapiens
  misc_RNA (1)...(19): siRNA sense strand
acgacgaguuugagcgcuu

SEQ ID NO: 2397260 - RNA, 19 nt, Homo sapiens
  misc_RNA (1)...(19): siRNA sense strand
uugaaauccaagugggaga

SEQ ID NO: 2397261 - RNA, 19 nt, Homo sapiens
  misc_RNA (1)...(19): siRNA sense strand
acagaagaagugauugaaa

SEQ ID NO: 2397262 - RNA, 19 nt, Homo sapiens
  misc_RNA (1)...(19): siRNA sense strand
gagacgaggaauacgaaaa

SEQ ID NO: 2397263 - RNA, 19 nt, Homo sapiens
  misc_RNA (1)...(19): siRNA sense strand
cuuagauauuguaugggaa

SEQ ID NO: 2397264 - RNA, 19 nt, Homo sapiens
  misc_RNA (1)...(19): siRNA sense strand
gauaaagaggauacaggau

SEQ ID NO: 2397265 - RNA, 19 nt, Homo sapiens
  misc_RNA (1)...(19): siRNA sense strand
acaccaagagaguuugaaa

SEQ ID NO: 2397266 - RNA, 19 nt, Homo sapiens
  misc_RNA (1)...(19): siRNA sense strand
gguugcggauucagaacua

SEQ ID NO: 2397267 - RNA, 19 nt, Homo sapiens
  misc_RNA (1)...(19): siRNA sense strand
agaacuagcuugugagcag

SEQ ID NO: 2397268 - RNA, 19 nt, Homo sapiens
  misc_RNA (1)...(19): siRNA sense strand
ggcccugugcagaggauua

SEQ ID NO: 2397269 - RNA, 19 nt, Homo sapiens
  misc_RNA (1)...(19): siRNA sense strand
auaaagaggauacaggauu

SEQ ID NO: 2397270 - RNA, 19 nt, Homo sapiens
  misc_RNA (1)...(19): siRNA sense strand
caaccuggacauaagcaaa

SEQ ID NO: 2397271 - RNA, 19 nt, Homo sapiens
  misc_RNA (1)...(19): siRNA sense strand
gcacacaagaugaaagaag

SEQ ID NO: 2397272 - RNA, 19 nt, Homo sapiens
  misc_RNA (1)...(19): siRNA sense strand
acuuaaagccaccacuaaa

SEQ ID NO: 2397273 - RNA, 19 nt, Homo sapiens
  misc_RNA (1)...(19): siRNA sense strand
guggagaacagcaagucaa

SEQ ID NO: 2397274 - RNA, 19 nt, Homo sapiens
  misc_RNA (1)...(19): siRNA sense strand
gaugaaauugagaggaacu

SEQ ID NO: 2397275 - RNA, 19 nt, Homo sapiens
  misc_RNA (1)...(19): siRNA sense strand
caaggagccuaauggaaaa

SEQ ID NO: 2397276 - RNA, 19 nt, Homo sapiens
  misc_RNA (1)...(19): siRNA sense strand
cuuuaucaccgcagaagaa

SEQ ID NO: 2397277 - RNA, 19 nt, Homo sapiens
  misc_RNA (1)...(19): siRNA sense strand
ugaugagugggcugagaaa

SEQ ID NO: 2397278 - RNA, 19 nt, Homo sapiens
  misc_RNA (1)...(19): siRNA sense strand
cgacuugaaccuuagauau

SEQ ID NO: 2397279 - RNA, 19 nt, Homo sapiens
  misc_RNA (1)...(19): siRNA sense strand
uaccaaauaccaagaagaa

SEQ ID NO: 2397280 - RNA, 19 nt, Homo sapiens
  misc_RNA (1)...(19): siRNA sense strand
ccaaagaguuguaccgaga

SEQ ID NO: 2397281 - RNA, 19 nt, Homo sapiens
  misc_RNA (1)...(19): siRNA sense strand
cuauagaauguuugcgauu

SEQ ID NO: 2397282 - RNA, 19 nt, Homo sapiens
  misc_RNA (1)...(19): siRNA sense strand
ucuuuaaaucucaggacuu

SEQ ID NO: 2397283 - RNA, 19 nt, Homo sapiens
  misc_RNA (1)...(19): siRNA sense strand
ugugcaaagcucaggccua

SEQ ID NO: 2397284 - RNA, 19 nt, Homo sapiens
  misc_RNA (1)...(19): siRNA sense strand
cuucaagauuccaaccaga

SEQ ID NO: 2397285 - RNA, 19 nt, Homo sapiens
  misc_RNA (1)...(19): siRNA sense strand
aaugcaaccaggaggccaa

SEQ ID NO: 2397286 - RNA, 19 nt, Homo sapiens
  misc_RNA (1)...(19): siRNA sense strand
aguuguaccgagacuauaa

SEQ ID NO: 2397287 - RNA, 19 nt, Homo sapiens
  misc_RNA (1)...(19): siRNA sense strand
agaacaacacugagauagu

SEQ ID NO: 2397288 - RNA, 19 nt, Homo sapiens
  misc_RNA (1)...(19): siRNA sense strand
uugccaaggucaaggccaa

SEQ ID NO: 2397289 - RNA, 19 nt, Homo sapiens
  misc_RNA (1)...(19): siRNA sense strand
acucuuauaccaagggcaa

SEQ ID NO: 2397290 - RNA, 19 nt, Homo sapiens
  misc_RNA (1)...(19): siRNA sense strand
gcaucauggcuaaucggaa

SEQ ID NO: 2397291 - RNA, 19 nt, Homo sapiens
  misc_RNA (1)...(19): siRNA sense strand
aagaaagacgggcagguga

SEQ ID NO: 2397292 - RNA, 19 nt, Homo sapiens
  misc_RNA (1)...(19): siRNA sense strand
caucauggcuaaucggaag

SEQ ID NO: 2397293 - RNA, 19 nt, Homo sapiens
  misc_RNA (1)...(19): siRNA sense strand
gggagaagguccugggcaa

SEQ ID NO: 2397294 - RNA, 19 nt, Homo sapiens
  misc_RNA (1)...(19): siRNA sense strand
gggagaaaacacugggcaa

SEQ ID NO: 2397295 - RNA, 19 nt, Homo sapiens
  misc_RNA (1)...(19): siRNA sense strand
gcaaguacaaggaggcuga

SEQ ID NO: 2397296 - RNA, 19 nt, Homo sapiens
  misc_RNA (1)...(19): siRNA sense strand
cgggaggaaagcaaggaua

SEQ ID NO: 2397297 - RNA, 19 nt, Homo sapiens
  misc_RNA (1)...(19): siRNA sense strand
cuguagaaucagagaagca

SEQ ID NO: 2397298 - RNA, 19 nt, Homo sapiens
  misc_RNA (1)...(19): siRNA sense strand
uggcaguccuguauggcaa

SEQ ID NO: 2397299 - RNA, 19 nt, Homo sapiens
  misc_RNA (1)...(19): siRNA sense strand
gggaggagaagcugagcca

SEQ ID NO: 2397300 - RNA, 19 nt, Homo sapiens
  misc_RNA (1)...(19): siRNA sense strand
gaagcucccuggugggcua

SEQ ID NO: 2397301 - RNA, 19 nt, Homo sapiens
  misc_RNA (1)...(19): siRNA sense strand
uggccaagcagcucagcaa

SEQ ID NO: 2397302 - RNA, 19 nt, Homo sapiens
  misc_RNA (1)...(19): siRNA sense strand
gcacuggagauccgggaga

SEQ ID NO: 2397303 - RNA, 19 nt, Homo sapiens
  misc_RNA (1)...(19): siRNA sense strand
gggcaaagcugaggaggug

SEQ ID NO: 2397304 - RNA, 19 nt, Homo sapiens
  misc_RNA (1)...(19): siRNA sense strand
agucugaccucgaggacgu

SEQ ID NO: 2397305 - RNA, 19 nt, Homo sapiens
  misc_RNA (1)...(19): siRNA sense strand
augcggagaccuuguacaa

SEQ ID NO: 2397306 - RNA, 19 nt, Homo sapiens
  misc_RNA (1)...(19): siRNA sense strand
gaacagaguccucagggaa

SEQ ID NO: 2397307 - RNA, 19 nt, Homo sapiens
  misc_RNA (1)...(19): siRNA sense strand
gcaacaucgucauuggcua

SEQ ID NO: 2397308 - RNA, 19 nt, Homo sapiens
  misc_RNA (1)...(19): siRNA sense strand
uggaaggucuggauggaga

SEQ ID NO: 2397309 - RNA, 19 nt, Homo sapiens
  misc_RNA (1)...(19): siRNA sense strand
ggaacagaguccucaggga

SEQ ID NO: 2397310 - RNA, 19 nt, Homo sapiens
  misc_RNA (1)...(19): siRNA sense strand
ccacagaggagcagggcua

SEQ ID NO: 2397311 - RNA, 19 nt, Homo sapiens
  misc_RNA (1)...(19): siRNA sense strand
caguggaguucaugggcua

SEQ ID NO: 2397312 - RNA, 19 nt, Homo sapiens
  misc_RNA (1)...(19): siRNA sense strand
gcaacuauuuugugggcuu

SEQ ID NO: 2397313 - RNA, 19 nt, Homo sapiens
  misc_RNA (1)...(19): siRNA sense strand
gugagaugcacaugguaga

SEQ ID NO: 2397314 - RNA, 19 nt, Homo sapiens
  misc_RNA (1)...(19): siRNA sense strand
gcacaagaugcgaggggca

SEQ ID NO: 2397315 - RNA, 19 nt, Homo sapiens
  misc_RNA (1)...(19): siRNA sense strand
aggcagugucucugggcuu

SEQ ID NO: 2397316 - RNA, 19 nt, Homo sapiens
  misc_RNA (1)...(19): siRNA sense strand
gcccaugucuuauuggcua

SEQ ID NO: 2397317 - RNA, 19 nt, Homo sapiens
  misc_RNA (1)...(19): siRNA sense strand
ccuuuagccgccaggaauu

SEQ ID NO: 2397318 - RNA, 19 nt, Homo sapiens
  misc_RNA (1)...(19): siRNA sense strand
uuaccgaggagaaggauca

SEQ ID NO: 2397319 - RNA, 19 nt, Homo sapiens
  misc_RNA (1)...(19): siRNA sense strand
ccacagaggagcagggcua

SEQ ID NO: 2397320 - RNA, 19 nt, Homo sapiens
  misc_RNA (1)...(19): siRNA sense strand
caguggaguucaugggcua

SEQ ID NO: 2397321 - RNA, 19 nt, Homo sapiens
  misc_RNA (1)...(19): siRNA sense strand
gcaacuauuuugugggcuu

SEQ ID NO: 2397322 - RNA, 19 nt, Homo sapiens
  misc_RNA (1)...(19): siRNA sense strand
gugagaugcacaugguaga

SEQ ID NO: 2397323 - RNA, 19 nt, Homo sapiens
  misc_RNA (1)...(19): siRNA sense strand
gcacaagaugcgaggggca

SEQ ID NO: 2397324 - RNA, 19 nt, Homo sapiens
  misc_RNA (1)...(19): siRNA sense strand
aggcagugucucugggcuu

SEQ ID NO: 2397325 - RNA, 19 nt, Homo sapiens
  misc_RNA (1)...(19): siRNA sense strand
gcccaugucuuauuggcua

SEQ ID NO: 2397326 - RNA, 19 nt, Homo sapiens
  misc_RNA (1)...(19): siRNA sense strand
ccuuuagccgccaggaauu

SEQ ID NO: 2397327 - RNA, 19 nt, Homo sapiens
  misc_RNA (1)...(19): siRNA sense strand
uuaccgaggagaaggauca

SEQ ID NO: 2397328 - RNA, 19 nt, Homo sapiens
  misc_RNA (1)...(19): siRNA sense strand
ccacagaggagcagggcua

SEQ ID NO: 2397329 - RNA, 19 nt, Homo sapiens
  misc_RNA (1)...(19): siRNA sense strand
caguggaguucaugggcua

SEQ ID NO: 2397330 - RNA, 19 nt, Homo sapiens
  misc_RNA (1)...(19): siRNA sense strand
gcaacuauuuugugggcuu

SEQ ID NO: 2397331 - RNA, 19 nt, Homo sapiens
  misc_RNA (1)...(19): siRNA sense strand
gugagaugcacaugguaga

SEQ ID NO: 2397332 - RNA, 19 nt, Homo sapiens
  misc_RNA (1)...(19): siRNA sense strand
gcacaagaugcgaggggca

SEQ ID NO: 2397333 - RNA, 19 nt, Homo sapiens
  misc_RNA (1)...(19): siRNA sense strand
aggcagugucucugggcuu

SEQ ID NO: 2397334 - RNA, 19 nt, Homo sapiens
  misc_RNA (1)...(19): siRNA sense strand
gcccaugucuuauuggcua

SEQ ID NO: 2397335 - RNA, 19 nt, Homo sapiens
  misc_RNA (1)...(19): siRNA sense strand
ccuuuagccgccaggaauu

SEQ ID NO: 2397336 - RNA, 19 nt, Homo sapiens
  misc_RNA (1)...(19): siRNA sense strand
uuaccgaggagaaggauca

SEQ ID NO: 2397337 - RNA, 19 nt, Homo sapiens
  misc_RNA (1)...(19): siRNA sense strand
ccacagaggagcagggcua

SEQ ID NO: 2397338 - RNA, 19 nt, Homo sapiens
  misc_RNA (1)...(19): siRNA sense strand
caguggaguucaugggcua

SEQ ID NO: 2397339 - RNA, 19 nt, Homo sapiens
  misc_RNA (1)...(19): siRNA sense strand
gcaacuauuuugugggcuu

SEQ ID NO: 2397340 - RNA, 19 nt, Homo sapiens
  misc_RNA (1)...(19): siRNA sense strand
gugagaugcacaugguaga

SEQ ID NO: 2397341 - RNA, 19 nt, Homo sapiens
  misc_RNA (1)...(19): siRNA sense strand
gcacaagaugcgaggggca

SEQ ID NO: 2397342 - RNA, 19 nt, Homo sapiens
  misc_RNA (1)...(19): siRNA sense strand
aggcagugucucugggcuu

SEQ ID NO: 2397343 - RNA, 19 nt, Homo sapiens
  misc_RNA (1)...(19): siRNA sense strand
gcccaugucuuauuggcua

SEQ ID NO: 2397344 - RNA, 19 nt, Homo sapiens
  misc_RNA (1)...(19): siRNA sense strand
ccuuuagccgccaggaauu

SEQ ID NO: 2397345 - RNA, 19 nt, Homo sapiens
  misc_RNA (1)...(19): siRNA sense strand
uuaccgaggagaaggauca

SEQ ID NO: 2397346 - RNA, 19 nt, Homo sapiens
  misc_RNA (1)...(19): siRNA sense strand
ccacagaggagcagggcua

SEQ ID NO: 2397347 - RNA, 19 nt, Homo sapiens
  misc_RNA (1)...(19): siRNA sense strand
caguggaguucaugggcua

SEQ ID NO: 2397348 - RNA, 19 nt, Homo sapiens
  misc_RNA (1)...(19): siRNA sense strand
gcaacuauuuugugggcuu

SEQ ID NO: 2397349 - RNA, 19 nt, Homo sapiens
  misc_RNA (1)...(19): siRNA sense strand
gugagaugcacaugguaga

SEQ ID NO: 2397350 - RNA, 19 nt, Homo sapiens
  misc_RNA (1)...(19): siRNA sense strand
gcacaagaugcgaggggca

SEQ ID NO: 2397351 - RNA, 19 nt, Homo sapiens
  misc_RNA (1)...(19): siRNA sense strand
aggcagugucucugggcuu

SEQ ID NO: 2397352 - RNA, 19 nt, Homo sapiens
  misc_RNA (1)...(19): siRNA sense strand
gcccaugucuuauuggcua

SEQ ID NO: 2397353 - RNA, 19 nt, Homo sapiens
  misc_RNA (1)...(19): siRNA sense strand
uuaccgaggagaaggauca

SEQ ID NO: 2397354 - RNA, 19 nt, Homo sapiens
  misc_RNA (1)...(19): siRNA sense strand
cagaagaagaagaagguga

SEQ ID NO: 2397355 - RNA, 19 nt, Homo sapiens
  misc_RNA (1)...(19): siRNA sense strand
ugggagaaauguuggaaau

SEQ ID NO: 2397356 - RNA, 19 nt, Homo sapiens
  misc_RNA (1)...(19): siRNA sense strand
cgaagaagacggagaccau

SEQ ID NO: 2397357 - RNA, 19 nt, Homo sapiens
  misc_RNA (1)...(19): siRNA sense strand
cagaaagauugcagaaaau

SEQ ID NO: 2397358 - RNA, 19 nt, Homo sapiens
  misc_RNA (1)...(19): siRNA sense strand
gcgagagggaagagaugaa

SEQ ID NO: 2397359 - RNA, 19 nt, Homo sapiens
  misc_RNA (1)...(19): siRNA sense strand
gggaguaauuugaccgaca

SEQ ID NO: 2397360 - RNA, 19 nt, Homo sapiens
  misc_RNA (1)...(19): siRNA sense strand
ggcucaagguggaagaaau

SEQ ID NO: 2397361 - RNA, 19 nt, Homo sapiens
  misc_RNA (1)...(19): siRNA sense strand
gauucaucuuggaggcaua

SEQ ID NO: 2397362 - RNA, 19 nt, Homo sapiens
  misc_RNA (1)...(19): siRNA sense strand
gagcaagaccaaaagaaaa

SEQ ID NO: 2397363 - RNA, 19 nt, Homo sapiens
  misc_RNA (1)...(19): siRNA sense strand
gggaaauacaaaugaacca

SEQ ID NO: 2397364 - RNA, 19 nt, Homo sapiens
  misc_RNA (1)...(19): siRNA sense strand
agguagaaauacaggacca

SEQ ID NO: 2397365 - RNA, 19 nt, Homo sapiens
  misc_RNA (1)...(19): siRNA sense strand
uggaaaugguuuaaacaca

SEQ ID NO: 2397366 - RNA, 19 nt, Homo sapiens
  misc_RNA (1)...(19): siRNA sense strand
augagagagaggagagauu

SEQ ID NO: 2397367 - RNA, 19 nt, Homo sapiens
  misc_RNA (1)...(19): siRNA sense strand
ggagcaagaccaaaagaaa

SEQ ID NO: 2397368 - RNA, 19 nt, Homo sapiens
  misc_RNA (1)...(19): siRNA sense strand
gcucaagaucgcagaacca

SEQ ID NO: 2397369 - RNA, 19 nt, Homo sapiens
  misc_RNA (1)...(19): siRNA sense strand
agcuuaaccuggaggauuu

SEQ ID NO: 2397370 - RNA, 19 nt, Homo sapiens
  misc_RNA (1)...(19): siRNA sense strand
gguggaagaaauacaggaa

SEQ ID NO: 2397371 - RNA, 19 nt, Homo sapiens
  misc_RNA (1)...(19): siRNA sense strand
aagaagacggagaccauaa

SEQ ID NO: 2397372 - RNA, 19 nt, Homo sapiens
  misc_RNA (1)...(19): siRNA sense strand
acgaagaucuagucaggau

SEQ ID NO: 2397373 - RNA, 19 nt, Homo sapiens
  misc_RNA (1)...(19): siRNA sense strand
agagauuuggagagaagaa

SEQ ID NO: 2397374 - RNA, 19 nt, Homo sapiens
  misc_RNA (1)...(19): siRNA sense strand
ucacaaggagcaagaccaa

SEQ ID NO: 2397375 - RNA, 19 nt, Homo sapiens
  misc_RNA (1)...(19): siRNA sense strand
acuuagaaauagaugcaca

SEQ ID NO: 2397376 - RNA, 19 nt, Homo sapiens
  misc_RNA (1)...(19): siRNA sense strand
caccaagacuguaugaaaa

SEQ ID NO: 2397377 - RNA, 19 nt, Homo sapiens
  misc_RNA (1)...(19): siRNA sense strand
ucaaggauuccaagaagaa

SEQ ID NO: 2397378 - RNA, 19 nt, Homo sapiens
  misc_RNA (1)...(19): siRNA sense strand
ccuaaacuuuccuguacaa

SEQ ID NO: 2397379 - RNA, 19 nt, Homo sapiens
  misc_RNA (1)...(19): siRNA sense strand
aaaugaacaagcugaguau

SEQ ID NO: 2397380 - RNA, 19 nt, Homo sapiens
  misc_RNA (1)...(19): siRNA sense strand
augaacaagcugaguauga

SEQ ID NO: 2397381 - RNA, 19 nt, Homo sapiens
  misc_RNA (1)...(19): siRNA sense strand
gcuucuagcaugucaucua

SEQ ID NO: 2397382 - RNA, 19 nt, Homo sapiens
  misc_RNA (1)...(19): siRNA sense strand
caaucauagcucugaguca

SEQ ID NO: 2397383 - RNA, 19 nt, Homo sapiens
  misc_RNA (1)...(19): siRNA sense strand
gguuacaggccaaaauuaa

SEQ ID NO: 2397384 - RNA, 19 nt, Homo sapiens
  misc_RNA (1)...(19): siRNA sense strand
guaaagagaaguuggagcu

SEQ ID NO: 2397385 - RNA, 19 nt, Homo sapiens
  misc_RNA (1)...(19): siRNA sense strand
caaugaagguaggcggaca

SEQ ID NO: 2397386 - RNA, 19 nt, Homo sapiens
  misc_RNA (1)...(19): siRNA sense strand
ccuucaagagauccagaaa

SEQ ID NO: 2397387 - RNA, 19 nt, Homo sapiens
  misc_RNA (1)...(19): siRNA sense strand
ugaacuauguaaagagaag

SEQ ID NO: 2397388 - RNA, 19 nt, Homo sapiens
  misc_RNA (1)...(19): siRNA sense strand
ucugauaugaugggaaaua

SEQ ID NO: 2397389 - RNA, 19 nt, Homo sapiens
  misc_RNA (1)...(19): siRNA sense strand
aaugaagguaggcggacaa

SEQ ID NO: 2397390 - RNA, 19 nt, Homo sapiens
  misc_RNA (1)...(19): siRNA sense strand
gcugaugguaaaagugaua

SEQ ID NO: 2397391 - RNA, 19 nt, Homo sapiens
  misc_RNA (1)...(19): siRNA sense strand
ggagauugcugucacgcau

SEQ ID NO: 2397392 - RNA, 19 nt, Homo sapiens
  misc_RNA (1)...(19): siRNA sense strand
ugaacuacauagagcucau

SEQ ID NO: 2397393 - RNA, 19 nt, Homo sapiens
  misc_RNA (1)...(19): siRNA sense strand
uugaauacaucauccacaa

SEQ ID NO: 2397394 - RNA, 19 nt, Homo sapiens
  misc_RNA (1)...(19): siRNA sense strand
cuacauagagcucaugcaa

SEQ ID NO: 2397395 - RNA, 19 nt, Homo sapiens
  misc_RNA (1)...(19): siRNA sense strand
ggacauuugauauugccua

SEQ ID NO: 2397396 - RNA, 19 nt, Homo sapiens
  misc_RNA (1)...(19): siRNA sense strand
acaaggagcaagaccaaaa

SEQ ID NO: 2397397 - RNA, 19 nt, Homo sapiens
  misc_RNA (1)...(19): siRNA sense strand
ccguaguaauguaccauca

SEQ ID NO: 2397398 - RNA, 19 nt, Homo sapiens
  misc_RNA (1)...(19): siRNA sense strand
uagaaggaggcgagaggga

SEQ ID NO: 2397399 - RNA, 19 nt, Homo sapiens
  misc_RNA (1)...(19): siRNA sense strand
caugaucacaguagauauu

SEQ ID NO: 2397400 - RNA, 19 nt, Homo sapiens
  misc_RNA (1)...(19): siRNA sense strand
ggaaauacaaaugaaccaa

SEQ ID NO: 2397401 - RNA, 19 nt, Homo sapiens
  misc_RNA (1)...(19): siRNA sense strand
agaggaugauuccgaagaa

SEQ ID NO: 2397402 - RNA, 19 nt, Homo sapiens
  misc_RNA (1)...(19): siRNA sense strand
aggaugauuccgaagaaga

SEQ ID NO: 2397403 - RNA, 19 nt, Homo sapiens
  misc_RNA (1)...(19): siRNA sense strand
ucugcaugguauagugaau

SEQ ID NO: 2397404 - RNA, 19 nt, Homo sapiens
  misc_RNA (1)...(19): siRNA sense strand
cugggagaaauguuggaaa

SEQ ID NO: 2397405 - RNA, 19 nt, Homo sapiens
  misc_RNA (1)...(19): siRNA sense strand
caucaaugguacuuggauc

SEQ ID NO: 2397406 - RNA, 19 nt, Homo sapiens
  misc_RNA (1)...(19): siRNA sense strand
gagaggagagauuuggaga

SEQ ID NO: 2397407 - RNA, 19 nt, Homo sapiens
  misc_RNA (1)...(19): siRNA sense strand
cagaaagaguacugaugaa

SEQ ID NO: 2397408 - RNA, 19 nt, Homo sapiens
  misc_RNA (1)...(19): siRNA sense strand
gauuacagacauagugaaa

SEQ ID NO: 2397409 - RNA, 19 nt, Homo sapiens
  misc_RNA (1)...(19): siRNA sense strand
ugguaaggugaaagagaaa

SEQ ID NO: 2397410 - RNA, 19 nt, Homo sapiens
  misc_RNA (1)...(19): siRNA sense strand
ccacguggacagagagaau

SEQ ID NO: 2397411 - RNA, 19 nt, Homo sapiens
  misc_RNA (1)...(19): siRNA sense strand
agaaagaggaaauguguuu

SEQ ID NO: 2397412 - RNA, 19 nt, Homo sapiens
  misc_RNA (1)...(19): siRNA sense strand
gagcaagacaagugggcga

SEQ ID NO: 2397413 - RNA, 19 nt, Homo sapiens
  misc_RNA (1)...(19): siRNA sense strand
gaaagauggaucagaaaca

SEQ ID NO: 2397414 - RNA, 19 nt, Homo sapiens
  misc_RNA (1)...(19): siRNA sense strand
ugacagggccaaaggagaa

SEQ ID NO: 2397415 - RNA, 19 nt, Homo sapiens
  misc_RNA (1)...(19): siRNA sense strand
ggaaauaaucauaggcaug

SEQ ID NO: 2397416 - RNA, 19 nt, Homo sapiens
  misc_RNA (1)...(19): siRNA sense strand
auagugaaauggaggacaa

SEQ ID NO: 2397417 - RNA, 19 nt, Homo sapiens
  misc_RNA (1)...(19): siRNA sense strand
cccaaugacaguagugaua

SEQ ID NO: 2397418 - RNA, 19 nt, Homo sapiens
  misc_RNA (1)...(19): siRNA sense strand
caauaaagagcguacagaa

SEQ ID NO: 2397419 - RNA, 19 nt, Homo sapiens
  misc_RNA (1)...(19): siRNA sense strand
uuccaaagcuagugccaua

SEQ ID NO: 2397420 - RNA, 19 nt, Homo sapiens
  misc_RNA (1)...(19): siRNA sense strand
cagcuagauuggcaaguaa

SEQ ID NO: 2397421 - RNA, 19 nt, Homo sapiens
  misc_RNA (1)...(19): siRNA sense strand
aaguaaugcucuucaggaa

SEQ ID NO: 2397422 - RNA, 19 nt, Homo sapiens
  misc_RNA (1)...(19): siRNA sense strand
aguaaugaacggaagcuaa

SEQ ID NO: 2397423 - RNA, 19 nt, Homo sapiens
  misc_RNA (1)...(19): siRNA sense strand
ucaaauggcuggauggcau

SEQ ID NO: 2397424 - RNA, 19 nt, Homo sapiens
  misc_RNA (1)...(19): siRNA sense strand
uggucaagcugcagcaauu

SEQ ID NO: 2397425 - RNA, 19 nt, Homo sapiens
  misc_RNA (1)...(19): siRNA sense strand
guacauugauggcaggaga

SEQ ID NO: 2397426 - RNA, 19 nt, Homo sapiens
  misc_RNA (1)...(19): siRNA sense strand
gcauugaugaggaggugaa

SEQ ID NO: 2397427 - RNA, 19 nt, Homo sapiens
  misc_RNA (1)...(19): siRNA sense strand
cgggaaaugagcaagacaa

SEQ ID NO: 2397428 - RNA, 19 nt, Homo sapiens
  misc_RNA (1)...(19): siRNA sense strand
gaagcuaccauaagagcaa

SEQ ID NO: 2397429 - RNA, 19 nt, Homo sapiens
  misc_RNA (1)...(19): siRNA sense strand
ugagaaacaggaagaaauu

SEQ ID NO: 2397430 - RNA, 19 nt, Homo sapiens
  misc_RNA (1)...(19): siRNA sense strand
cgauuagaaagcaggguuu

SEQ ID NO: 2397431 - RNA, 19 nt, Homo sapiens
  misc_RNA (1)...(19): siRNA sense strand
cugguaaggugaaagagaa

SEQ ID NO: 2397432 - RNA, 19 nt, Homo sapiens
  misc_RNA (1)...(19): siRNA sense strand
uggaaagaccacacagauu

SEQ ID NO: 2397433 - RNA, 19 nt, Homo sapiens
  misc_RNA (1)...(19): siRNA sense strand
aagaaagauggaucagaaa

SEQ ID NO: 2397434 - RNA, 19 nt, Homo sapiens
  misc_RNA (1)...(19): siRNA sense strand
gacaguagugauagugaaa

SEQ ID NO: 2397435 - RNA, 19 nt, Homo sapiens
  misc_RNA (1)...(19): siRNA sense strand
cagaaguggcauagcuuau

SEQ ID NO: 2397436 - RNA, 19 nt, Homo sapiens
  misc_RNA (1)...(19): siRNA sense strand
guguacuacugcagaaaga

SEQ ID NO: 2397437 - RNA, 19 nt, Homo sapiens
  misc_RNA (1)...(19): siRNA sense strand
agacugaaauuguggaucu

SEQ ID NO: 2397438 - RNA, 19 nt, Homo sapiens
  misc_RNA (1)...(19): siRNA sense strand
uaacacaaacucugagaau

SEQ ID NO: 2397439 - RNA, 19 nt, Homo sapiens
  misc_RNA (1)...(19): siRNA sense strand
uauuuaagguggaguggau

SEQ ID NO: 2397440 - RNA, 19 nt, Homo sapiens
  misc_RNA (1)...(19): siRNA sense strand
uugagaaacaggaagaaau

SEQ ID NO: 2397441 - RNA, 19 nt, Homo sapiens
  misc_RNA (1)...(19): siRNA sense strand
agaguagcaauuugagaaa

SEQ ID NO: 2397442 - RNA, 19 nt, Homo sapiens
  misc_RNA (1)...(19): siRNA sense strand
ccuaaaacagaaagaggaa

SEQ ID NO: 2397443 - RNA, 19 nt, Homo sapiens
  misc_RNA (1)...(19): siRNA sense strand
acacaaacucugagaauug

SEQ ID NO: 2397444 - RNA, 19 nt, Homo sapiens
  misc_RNA (1)...(19): siRNA sense strand
gggaaagcagcauaguuua

SEQ ID NO: 2397445 - RNA, 19 nt, Homo sapiens
  misc_RNA (1)...(19): siRNA sense strand
uggacuaggaggaguauuu

SEQ ID NO: 2397446 - RNA, 19 nt, Homo sapiens
  misc_RNA (1)...(19): siRNA sense strand
agucaaugauguugucuuu

SEQ ID NO: 2397447 - RNA, 19 nt, Homo sapiens
  misc_RNA (1)...(19): siRNA sense strand
gcgauguagaccuggaauu

SEQ ID NO: 2397448 - RNA, 19 nt, Homo sapiens
  misc_RNA (1)...(19): siRNA sense strand
uggaaauaaucauaggcau

SEQ ID NO: 2397449 - RNA, 19 nt, Homo sapiens
  misc_RNA (1)...(19): siRNA sense strand
gaacacaguugcuugguca

SEQ ID NO: 2397450 - RNA, 19 nt, Homo sapiens
  misc_RNA (1)...(19): siRNA sense strand
ucugagauuggaagggaaa

SEQ ID NO: 2397451 - RNA, 19 nt, Homo sapiens
  misc_RNA (1)...(19): siRNA sense strand
gggagcaaauagauaccua

SEQ ID NO: 2397452 - RNA, 19 nt, Homo sapiens
  misc_RNA (1)...(19): siRNA sense strand
aagaacaacuggauauaca

SEQ ID NO: 2397453 - RNA, 19 nt, Homo sapiens
  misc_RNA (1)...(19): siRNA sense strand
gagcgagccuuuugugaaa

SEQ ID NO: 2397454 - RNA, 19 nt, Homo sapiens
  misc_RNA (1)...(19): siRNA sense strand
agaauugggcugucguuaa

SEQ ID NO: 2397455 - RNA, 19 nt, Homo sapiens
  misc_RNA (1)...(19): siRNA sense strand
ugggaaagcagcauaguuu

SEQ ID NO: 2397456 - RNA, 19 nt, Homo sapiens
  misc_RNA (1)...(19): siRNA sense strand
acaagaaagugcagauaag

SEQ ID NO: 2397457 - RNA, 19 nt, Homo sapiens
  misc_RNA (1)...(19): siRNA sense strand
ugauauauauacagggaag

SEQ ID NO: 2397458 - RNA, 19 nt, Homo sapiens
  misc_RNA (1)...(19): siRNA sense strand
agcuaugcuuuguaggaaa

SEQ ID NO: 2397459 - RNA, 19 nt, Homo sapiens
  misc_RNA (1)...(19): siRNA sense strand
acgaggugguggugacauu

SEQ ID NO: 2397460 - RNA, 19 nt, Homo sapiens
  misc_RNA (1)...(19): siRNA sense strand
ugacaguagugauagugaa

SEQ ID NO: 2397461 - RNA, 19 nt, Homo sapiens
  misc_RNA (1)...(19): siRNA sense strand
aguaaaggaaagggagcaa

SEQ ID NO: 2397462 - RNA, 19 nt, Homo sapiens
  misc_RNA (1)...(19): siRNA sense strand
ucacaggcuacuauggaaa

SEQ ID NO: 2397463 - RNA, 19 nt, Homo sapiens
  misc_RNA (1)...(19): siRNA sense strand
uaaaggaaagggagcaaau

SEQ ID NO: 2397464 - RNA, 19 nt, Homo sapiens
  misc_RNA (1)...(19): siRNA sense strand
aguguugauuacagacaua

SEQ ID NO: 2397465 - RNA, 19 nt, Homo sapiens
  misc_RNA (1)...(19): siRNA sense strand
aagucaaguagaacaguua

SEQ ID NO: 2397466 - RNA, 19 nt, Homo sapiens
  misc_RNA (1)...(19): siRNA sense strand
gguucaaacaaauggaagu

SEQ ID NO: 2397467 - RNA, 19 nt, Homo sapiens
  misc_RNA (1)...(19): siRNA sense strand
agacagagagcuccugaaa

SEQ ID NO: 2397468 - RNA, 19 nt, Homo sapiens
  misc_RNA (1)...(19): siRNA sense strand
gcuuaagacaauagaugca

SEQ ID NO: 2397469 - RNA, 19 nt, Homo sapiens
  misc_RNA (1)...(19): siRNA sense strand
caacaagaaagugcagaua

SEQ ID NO: 2397470 - RNA, 19 nt, Homo sapiens
  misc_RNA (1)...(19): siRNA sense strand
ggagaaacugggucuggaa

SEQ ID NO: 2397471 - RNA, 19 nt, Homo sapiens
  misc_RNA (1)...(19): siRNA sense strand
gcaugaaagggaucgauuu

SEQ ID NO: 2397472 - RNA, 19 nt, Homo sapiens
  misc_RNA (1)...(19): siRNA sense strand
ggaaauggaugcuugccuu

SEQ ID NO: 2397473 - RNA, 19 nt, Homo sapiens
  misc_RNA (1)...(19): siRNA sense strand
ccuuuagaguggauggcau

SEQ ID NO: 2397474 - RNA, 19 nt, Homo sapiens
  misc_RNA (1)...(19): siRNA sense strand
cgagaaaggcccagggacu

SEQ ID NO: 2397475 - RNA, 19 nt, Homo sapiens
  misc_RNA (1)...(19): siRNA sense strand
gggaacagguggaagucga

SEQ ID NO: 2397476 - RNA, 19 nt, Homo sapiens
  misc_RNA (1)...(19): siRNA sense strand
aagaauggucucaggguga

SEQ ID NO: 2397477 - RNA, 19 nt, Homo sapiens
  misc_RNA (1)...(19): siRNA sense strand
aggacugagugguggcgaa

SEQ ID NO: 2397478 - RNA, 19 nt, Homo sapiens
  misc_RNA (1)...(19): siRNA sense strand
gacucaaaguagauggaca

SEQ ID NO: 2397479 - RNA, 19 nt, Homo sapiens
  misc_RNA (1)...(19): siRNA sense strand
uggacaaggacaagggagu

SEQ ID NO: 2397480 - RNA, 19 nt, Homo sapiens
  misc_RNA (1)...(19): siRNA sense strand
ggcgaagagaggccagaaa

SEQ ID NO: 2397481 - RNA, 19 nt, Homo sapiens
  misc_RNA (1)...(19): siRNA sense strand
ucacaaugucgcagccaau

SEQ ID NO: 2397482 - RNA, 19 nt, Homo sapiens
  misc_RNA (1)...(19): siRNA sense strand
ugauaaagcuuguggggcu

SEQ ID NO: 2397483 - RNA, 19 nt, Homo sapiens
  misc_RNA (1)...(19): siRNA sense strand
caaaggaggagaaagcaga

SEQ ID NO: 2397484 - RNA, 19 nt, Homo sapiens
  misc_RNA (1)...(19): siRNA sense strand
cgaagagaggccagaaacu

SEQ ID NO: 2397485 - RNA, 19 nt, Homo sapiens
  misc_RNA (1)...(19): siRNA sense strand
aagacaggguagaagagau

SEQ ID NO: 2397486 - RNA, 19 nt, Homo sapiens
  misc_RNA (1)...(19): siRNA sense strand
gagcagaaggaguuccaga

SEQ ID NO: 2397487 - RNA, 19 nt, Homo sapiens
  misc_RNA (1)...(19): siRNA sense strand
gggacaagcaaaagacuca

SEQ ID NO: 2397488 - RNA, 19 nt, Homo sapiens
  misc_RNA (1)...(19): siRNA sense strand
agaacuacgagcugcgaga

SEQ ID NO: 2397489 - RNA, 19 nt, Homo sapiens
  misc_RNA (1)...(19): siRNA sense strand
ccagcuggccaaagcgcua

SEQ ID NO: 2397490 - RNA, 19 nt, Homo sapiens
  misc_RNA (1)...(19): siRNA sense strand
auauagaacaggcaaccaa

SEQ ID NO: 2397491 - RNA, 19 nt, Homo sapiens
  misc_RNA (1)...(19): siRNA sense strand
gcacagccugggaggacau

SEQ ID NO: 2397492 - RNA, 19 nt, Homo sapiens
  misc_RNA (1)...(19): siRNA sense strand
aggguagaagagaugguua

SEQ ID NO: 2397493 - RNA, 19 nt, Homo sapiens
  misc_RNA (1)...(19): siRNA sense strand
cuucaggucuccacgguga

SEQ ID NO: 2397494 - RNA, 19 nt, Homo sapiens
  misc_RNA (1)...(19): siRNA sense strand
gugcagguauucagggaag

SEQ ID NO: 2397495 - RNA, 19 nt, Homo sapiens
  misc_RNA (1)...(19): siRNA sense strand
gucagaaggagguggaacu

SEQ ID NO: 2397496 - RNA, 19 nt, Homo sapiens
  misc_RNA (1)...(19): siRNA sense strand
gcccaagggacaugaggca

SEQ ID NO: 2397497 - RNA, 19 nt, Homo sapiens
  misc_RNA (1)...(19): siRNA sense strand
gagagauggugcaggacug

SEQ ID NO: 2397498 - RNA, 19 nt, Homo sapiens
  misc_RNA (1)...(19): siRNA sense strand
gggacaugaggcagcccaa

SEQ ID NO: 2397499 - RNA, 19 nt, Homo sapiens
  misc_RNA (1)...(19): siRNA sense strand
gcacaaaugauaaagcuug

SEQ ID NO: 2397500 - RNA, 19 nt, Homo sapiens
  misc_RNA (1)...(19): siRNA sense strand
aagcaaaagacucaaagua

SEQ ID NO: 2397501 - RNA, 19 nt, Homo sapiens
  misc_RNA (1)...(19): siRNA sense strand
gccaauuguaauagaacua

SEQ ID NO: 2397502 - RNA, 19 nt, Homo sapiens
  misc_RNA (1)...(19): siRNA sense strand
cuggugaagaagagaauuu

SEQ ID NO: 2397503 - RNA, 19 nt, Homo sapiens
  misc_RNA (1)...(19): siRNA sense strand
cacuaucagaauugagaaa

SEQ ID NO: 2397504 - RNA, 19 nt, Homo sapiens
  misc_RNA (1)...(19): siRNA sense strand
aauuuaaacuggaggaccu

SEQ ID NO: 2397505 - RNA, 19 nt, Homo sapiens
  misc_RNA (1)...(19): siRNA sense strand
cugaauucacagaagaaca

SEQ ID NO: 2397506 - RNA, 19 nt, Homo sapiens
  misc_RNA (1)...(19): siRNA sense strand
gaagaagagaauuugggau

SEQ ID NO: 2397507 - RNA, 19 nt, Homo sapiens
  misc_RNA (1)...(19): siRNA sense strand
agaaccaauccuaaagaau

SEQ ID NO: 2397508 - RNA, 19 nt, Homo sapiens
  misc_RNA (1)...(19): siRNA sense strand
ucaaacacuacaagccuaa

SEQ ID NO: 2397509 - RNA, 19 nt, Homo sapiens
  misc_RNA (1)...(19): siRNA sense strand
cagaagaacaaaagaaaac

SEQ ID NO: 2397510 - RNA, 19 nt, Homo sapiens
  misc_RNA (1)...(19): siRNA sense strand
agaagaggguggugcugga

SEQ ID NO: 2397511 - RNA, 19 nt, Homo sapiens
  misc_RNA (1)...(19): siRNA sense strand
ucacagaagaacaaaagaa

SEQ ID NO: 2397512 - RNA, 19 nt, Homo sapiens
  misc_RNA (1)...(19): siRNA sense strand
ccugaagaagcuagaacca

SEQ ID NO: 2397513 - RNA, 19 nt, Homo sapiens
  misc_RNA (1)...(19): siRNA sense strand
cacagaagaacaaaagaaa

SEQ ID NO: 2397514 - RNA, 19 nt, Homo sapiens
  misc_RNA (1)...(19): siRNA sense strand
aaaagaaaaccauaggcaa

SEQ ID NO: 2397515 - RNA, 19 nt, Homo sapiens
  misc_RNA (1)...(19): siRNA sense strand
uaaaggaucugaauggcau

SEQ ID NO: 2397516 - RNA, 19 nt, Homo sapiens
  misc_RNA (1)...(19): siRNA sense strand
agauaggacgcgugaccaa

SEQ ID NO: 2397517 - RNA, 19 nt, Homo sapiens
  misc_RNA (1)...(19): siRNA sense strand
ggaugagaucggaggucuu

SEQ ID NO: 2397518 - RNA, 19 nt, Homo sapiens
  misc_RNA (1)...(19): siRNA sense strand
cuuuauuguccuggagaua

SEQ ID NO: 2397519 - RNA, 19 nt, Homo sapiens
  misc_RNA (1)...(19): siRNA sense strand
uggaagggguggugaacuu

SEQ ID NO: 2397520 - RNA, 19 nt, Homo sapiens
  misc_RNA (1)...(19): siRNA sense strand
ucgguugaccagaggguau

SEQ ID NO: 2397521 - RNA, 19 nt, Homo sapiens
  misc_RNA (1)...(19): siRNA sense strand
ugacaagggaagugaucaa

SEQ ID NO: 2397522 - RNA, 19 nt, Homo sapiens
  misc_RNA (1)...(19): siRNA sense strand
cuacaaugauaaugggcau

SEQ ID NO: 2397523 - RNA, 19 nt, Homo sapiens
  misc_RNA (1)...(19): siRNA sense strand
gggaagugaucaaggugga

SEQ ID NO: 2397524 - RNA, 19 nt, Homo sapiens
  misc_RNA (1)...(19): siRNA sense strand
ugguugagacuaagacaaa

SEQ ID NO: 2397525 - RNA, 19 nt, Homo sapiens
  misc_RNA (1)...(19): siRNA sense strand
gggacagaagcaagggcua

SEQ ID NO: 2397526 - RNA, 19 nt, Homo sapiens
  misc_RNA (1)...(19): siRNA sense strand
cuuuaaguaugguggauga

SEQ ID NO: 2397527 - RNA, 19 nt, Homo sapiens
  misc_RNA (1)...(19): siRNA sense strand
gugaugaggaugaagaaaa

SEQ ID NO: 2397528 - RNA, 19 nt, Homo sapiens
  misc_RNA (1)...(19): siRNA sense strand
agaaugagucaaaggccaa

SEQ ID NO: 2397529 - RNA, 19 nt, Homo sapiens
  misc_RNA (1)...(19): siRNA sense strand
aggcaguggcugaggcaga

SEQ ID NO: 2397530 - RNA, 19 nt, Homo sapiens
  misc_RNA (1)...(19): siRNA sense strand
uggucaagggccagguaua

SEQ ID NO: 2397531 - RNA, 19 nt, Homo sapiens
  misc_RNA (1)...(19): siRNA sense strand
agaccuuagcugagaucaa

SEQ ID NO: 2397532 - RNA, 19 nt, Homo sapiens
  misc_RNA (1)...(19): siRNA sense strand
agaauugaucagugccaaa

SEQ ID NO: 2397533 - RNA, 19 nt, Homo sapiens
  misc_RNA (1)...(19): siRNA sense strand
gggcaucaguccugcuuau

SEQ ID NO: 2397534 - RNA, 19 nt, Homo sapiens
  misc_RNA (1)...(19): siRNA sense strand
agacaaaaccccuggcaga

SEQ ID NO: 2397535 - RNA, 19 nt, Homo sapiens
  misc_RNA (1)...(19): siRNA sense strand
cuaccuaagauccaggaaa

SEQ ID NO: 2397536 - RNA, 19 nt, Homo sapiens
  misc_RNA (1)...(19): siRNA sense strand
uaaccaagucugaagucaa

SEQ ID NO: 2397537 - RNA, 19 nt, Homo sapiens
  misc_RNA (1)...(19): siRNA sense strand
aagaaugagucaaaggcca

SEQ ID NO: 2397538 - RNA, 19 nt, Homo sapiens
  misc_RNA (1)...(19): siRNA sense strand
gaucccgaagugagagaua

SEQ ID NO: 2397539 - RNA, 19 nt, Homo sapiens
  misc_RNA (1)...(19): siRNA sense strand
aaacagaaucagugaccca

SEQ ID NO: 2397540 - RNA, 19 nt, Homo sapiens
  misc_RNA (1)...(19): siRNA sense strand
guauagugccacaaaccaa

SEQ ID NO: 2397541 - RNA, 19 nt, Homo sapiens
  misc_RNA (1)...(19): siRNA sense strand
ucccgaagugagagauaaa

SEQ ID NO: 2397542 - RNA, 19 nt, Homo sapiens
  misc_RNA (1)...(19): siRNA sense strand
gggaaaaguaugggccuaa

SEQ ID NO: 2397543 - RNA, 19 nt, Homo sapiens
  misc_RNA (1)...(19): siRNA sense strand
uaccuaagauccaggaaaa

SEQ ID NO: 2397544 - RNA, 19 nt, Homo sapiens
  misc_RNA (1)...(19): siRNA sense strand
augccaagucacaugauaa

SEQ ID NO: 2397545 - RNA, 19 nt, Homo sapiens
  misc_RNA (1)...(19): siRNA sense strand
ugaugaggaugaagaaaau

SEQ ID NO: 2397546 - RNA, 19 nt, Homo sapiens
  misc_RNA (1)...(19): siRNA sense strand
agccuaaagaguuugauaa

SEQ ID NO: 2397547 - RNA, 19 nt, Homo sapiens
  misc_RNA (1)...(19): siRNA sense strand
aaucagugacccaggccaa

SEQ ID NO: 2397548 - RNA, 19 nt, Homo sapiens
  misc_RNA (1)...(19): siRNA sense strand
aagcaagggcuagaggaaa

SEQ ID NO: 2397549 - RNA, 19 nt, Homo sapiens
  misc_RNA (1)...(19): siRNA sense strand
aggcagaacugaaaacaga

SEQ ID NO: 2397550 - RNA, 19 nt, Homo sapiens
  misc_RNA (1)...(19): siRNA sense strand
agucugaagucaagguugu

SEQ ID NO: 2397551 - RNA, 19 nt, Homo sapiens
  misc_RNA (1)...(19): siRNA sense strand
gggcuagaggaaaggcuga

SEQ ID NO: 2397552 - RNA, 19 nt, Homo sapiens
  misc_RNA (1)...(19): siRNA sense strand
ugcuagagugaaugguaaa

SEQ ID NO: 2397553 - RNA, 19 nt, Homo sapiens
  misc_RNA (1)...(19): siRNA sense strand
caucaaguuuguaaaggca

SEQ ID NO: 2397554 - RNA, 19 nt, Homo sapiens
  misc_RNA (1)...(19): siRNA sense strand
aguucaaaacaaaggcaaa

SEQ ID NO: 2397555 - RNA, 19 nt, Homo sapiens
  misc_RNA (1)...(19): siRNA sense strand
agcaagggcuagaggaaag

SEQ ID NO: 2397556 - RNA, 19 nt, Homo sapiens
  misc_RNA (1)...(19): siRNA sense strand
agucacaugauaaggccaa

SEQ ID NO: 2397557 - RNA, 19 nt, Homo sapiens
  misc_RNA (1)...(19): siRNA sense strand
cagugaugaggaugaagaa

SEQ ID NO: 2397558 - RNA, 19 nt, Homo sapiens
  misc_RNA (1)...(19): siRNA sense strand
ggauucgaccuuugaccaa

SEQ ID NO: 2397559 - RNA, 19 nt, Homo sapiens
  misc_RNA (1)...(19): siRNA sense strand
acagauuaggcaaagggaa

SEQ ID NO: 2397560 - RNA, 19 nt, Homo sapiens
  misc_RNA (1)...(19): siRNA sense strand
aaaccaagucaaaggccau

SEQ ID NO: 2397561 - RNA, 19 nt, Homo sapiens
  misc_RNA (1)...(19): siRNA sense strand
ugaaauuacuagggcacuu

SEQ ID NO: 2397562 - RNA, 19 nt, Homo sapiens
  misc_RNA (1)...(19): siRNA sense strand
agucaaaggccaauauucu

SEQ ID NO: 2397563 - RNA, 19 nt, Homo sapiens
  misc_RNA (1)...(19): siRNA sense strand
ggaagauacaacuaagacu

SEQ ID NO: 2397564 - RNA, 19 nt, Homo sapiens
  misc_RNA (1)...(19): siRNA sense strand
aagcuauuuaccaaggaaa

SEQ ID NO: 2397565 - RNA, 19 nt, Homo sapiens
  misc_RNA (1)...(19): siRNA sense strand
caaaccaagucaaaggcca

SEQ ID NO: 2397566 - RNA, 19 nt, Homo sapiens
  misc_RNA (1)...(19): siRNA sense strand
ugguugagaccuugauuga

SEQ ID NO: 2397567 - RNA, 19 nt, Homo sapiens
  misc_RNA (1)...(19): siRNA sense strand
ugaccuacagggaggcuau

SEQ ID NO: 2397568 - RNA, 19 nt, Homo sapiens
  misc_RNA (1)...(19): siRNA sense strand
ccagugaugaggaugaaga

SEQ ID NO: 2397569 - RNA, 19 nt, Homo sapiens
  misc_RNA (1)...(19): siRNA sense strand
uggcugaggcagaacugaa

SEQ ID NO: 2397570 - RNA, 19 nt, Homo sapiens
  misc_RNA (1)...(19): siRNA sense strand
gguccuaugccaagucaca

SEQ ID NO: 2397571 - RNA, 19 nt, Homo sapiens
  misc_RNA (1)...(19): siRNA sense strand
cuuuaaugggacagaaaua

SEQ ID NO: 2397572 - RNA, 19 nt, Homo sapiens
  misc_RNA (1)...(19): siRNA sense strand
ucauaaagaaugccagcaa

SEQ ID NO: 2397573 - RNA, 19 nt, Homo sapiens
  misc_RNA (1)...(19): siRNA sense strand
aauuggaugcuauggaaua

SEQ ID NO: 2397574 - RNA, 19 nt, Homo sapiens
  misc_RNA (1)...(19): siRNA sense strand
gggaagaagcguaaaagau

SEQ ID NO: 2397575 - RNA, 19 nt, Homo sapiens
  misc_RNA (1)...(19): siRNA sense strand
agagaaugaugauggagga

SEQ ID NO: 2397576 - RNA, 19 nt, Homo sapiens
  misc_RNA (1)...(19): siRNA sense strand
ccaccauggcagaacaaau

SEQ ID NO: 2397577 - RNA, 19 nt, Homo sapiens
  misc_RNA (1)...(19): siRNA sense strand
ugaggaaugcagauguaaa

SEQ ID NO: 2397578 - RNA, 19 nt, Homo sapiens
  misc_RNA (1)...(19): siRNA sense strand
cugcaguuugucagaauua

SEQ ID NO: 2397579 - RNA, 19 nt, Homo sapiens
  misc_RNA (1)...(19): siRNA sense strand
gagaaugaugauggaggaa

SEQ ID NO: 2397580 - RNA, 19 nt, Homo sapiens
  misc_RNA (1)...(19): siRNA sense strand
gaauuaugugaaauggcaa

SEQ ID NO: 2397581 - RNA, 19 nt, Homo sapiens
  misc_RNA (1)...(19): siRNA sense strand
uggaguuguuugcucgaaa

SEQ ID NO: 2397582 - RNA, 19 nt, Homo sapiens
  misc_RNA (1)...(19): siRNA sense strand
agaaugaugauggaggaaa

SEQ ID NO: 2397583 - RNA, 19 nt, Homo sapiens
  misc_RNA (1)...(19): siRNA sense strand
agacauuacaauuggugga

SEQ ID NO: 2397584 - RNA, 19 nt, Homo sapiens
  misc_RNA (1)...(19): siRNA sense strand
gcguaaaagauguguuguu

SEQ ID NO: 2397585 - RNA, 19 nt, Homo sapiens
  misc_RNA (1)...(19): siRNA sense strand
ugaugauggaggaaauuau

SEQ ID NO: 2397586 - RNA, 19 nt, Homo sapiens
  misc_RNA (1)...(19): siRNA sense strand
auugaggaaugcagaugua

SEQ ID NO: 2397587 - RNA, 19 nt, Homo sapiens
  misc_RNA (1)...(19): siRNA sense strand
gaauuggaugcuauggaau

SEQ ID NO: 2397588 - RNA, 19 nt, Homo sapiens
  misc_RNA (1)...(19): siRNA sense strand
ggacaaggguaguaagccc

SEQ ID NO: 2397589 - RNA, 19 nt, Homo sapiens
  misc_RNA (1)...(19): siRNA sense strand
auuagauucuccacacaaa

SEQ ID NO: 2397590 - RNA, 19 nt, Homo sapiens
  misc_RNA (1)...(19): siRNA sense strand
uuauugggaagaagcguaa

SEQ ID NO: 2397591 - RNA, 19 nt, Homo sapiens
  misc_RNA (1)...(19): siRNA sense strand
cuguggagguaguugcuga

SEQ ID NO: 2397592 - RNA, 19 nt, Homo sapiens
  misc_RNA (1)...(19): siRNA sense strand
aagacuacaucaagccaga

SEQ ID NO: 2397593 - RNA, 19 nt, Homo sapiens
  misc_RNA (1)...(19): siRNA sense strand
cuucagagucagucaguaa

SEQ ID NO: 2397594 - RNA, 19 nt, Homo sapiens
  misc_RNA (1)...(19): siRNA sense strand
ggcaauaaucaaagcacua

SEQ ID NO: 2397595 - RNA, 19 nt, Homo sapiens
  misc_RNA (1)...(19): siRNA sense strand
cagcaggaaugaaaggaau

SEQ ID NO: 2397596 - RNA, 19 nt, Homo sapiens
  misc_RNA (1)...(19): siRNA sense strand
cggacuaggcaauugguaa

SEQ ID NO: 2397597 - RNA, 19 nt, Homo sapiens
  misc_RNA (1)...(19): siRNA sense strand
agagaaaucuguuugggaa

SEQ ID NO: 2397598 - RNA, 19 nt, Homo sapiens
  misc_RNA (1)...(19): siRNA sense strand
gagaaaucuguuugggaau

SEQ ID NO: 2397599 - RNA, 19 nt, Homo sapiens
  misc_RNA (1)...(19): siRNA sense strand
acacauaggagcaaaucaa

SEQ ID NO: 2397600 - RNA, 19 nt, Homo sapiens
  misc_RNA (1)...(19): siRNA sense strand
aucagaaauuggagagcaa

SEQ ID NO: 2397601 - RNA, 19 nt, Homo sapiens
  misc_RNA (1)...(19): siRNA sense strand
ucggaauacccuagaggaa

SEQ ID NO: 2397602 - RNA, 19 nt, Homo sapiens
  misc_RNA (1)...(19): siRNA sense strand
ugaaggugucauugaaaua

SEQ ID NO: 2397603 - RNA, 19 nt, Homo sapiens
  misc_RNA (1)...(19): siRNA sense strand
aggagaaucugcagcaaaa

SEQ ID NO: 2397604 - RNA, 19 nt, Homo sapiens
  misc_RNA (1)...(19): siRNA sense strand
cucaaguaguccugugaaa

SEQ ID NO: 2397605 - RNA, 19 nt, Homo sapiens
  misc_RNA (1)...(19): siRNA sense strand
ccagaaaguguuaagccaa

SEQ ID NO: 2397606 - RNA, 19 nt, Homo sapiens
  misc_RNA (1)...(19): siRNA sense strand
uggagauaaucaagcacaa

SEQ ID NO: 2397607 - RNA, 19 nt, Homo sapiens
  misc_RNA (1)...(19): siRNA sense strand
agaagaagcagcaagaaca

SEQ ID NO: 2397608 - RNA, 19 nt, Homo sapiens
  misc_RNA (1)...(19): siRNA sense strand
aggaacaacagaagaauca

SEQ ID NO: 2397609 - RNA, 19 nt, Homo sapiens
  misc_RNA (1)...(19): siRNA sense strand
aaagaaaccaauuguggaa

SEQ ID NO: 2397610 - RNA, 19 nt, Homo sapiens
  misc_RNA (1)...(19): siRNA sense strand
ccagaggaccaaauguaaa

SEQ ID NO: 2397611 - RNA, 19 nt, Homo sapiens
  misc_RNA (1)...(19): siRNA sense strand
cuagcaagguaucaguaaa

SEQ ID NO: 2397612 - RNA, 19 nt, Homo sapiens
  misc_RNA (1)...(19): siRNA sense strand
ccacaaaauaugaucgauu

SEQ ID NO: 2397613 - RNA, 19 nt, Homo sapiens
  misc_RNA (1)...(19): siRNA sense strand
agaagcaagcaaacaguaa

SEQ ID NO: 2397614 - RNA, 19 nt, Homo sapiens
  misc_RNA (1)...(19): siRNA sense strand
cagaaauuggagagcaaca

SEQ ID NO: 2397615 - RNA, 19 nt, Homo sapiens
  misc_RNA (1)...(19): siRNA sense strand
augaugaguacaagagcua

SEQ ID NO: 2397616 - RNA, 19 nt, Homo sapiens
  misc_RNA (1)...(19): siRNA sense strand
cuacaguggacuaagaaaa

SEQ ID NO: 2397617 - RNA, 19 nt, Homo sapiens
  misc_RNA (1)...(19): siRNA sense strand
caggagaaucugcagcaaa

SEQ ID NO: 2397618 - RNA, 19 nt, Homo sapiens
  misc_RNA (1)...(19): siRNA sense strand
caagcaauggagugacuaa

SEQ ID NO: 2397619 - RNA, 19 nt, Homo sapiens
  misc_RNA (1)...(19): siRNA sense strand
aagauaguauuguggaaga

SEQ ID NO: 2397620 - RNA, 19 nt, Homo sapiens
  misc_RNA (1)...(19): siRNA sense strand
gggaaugacccuucagagu

SEQ ID NO: 2397621 - RNA, 19 nt, Homo sapiens
  misc_RNA (1)...(19): siRNA sense strand
cacuaaaagcccaagaaaa

SEQ ID NO: 2397622 - RNA, 19 nt, Homo sapiens
  misc_RNA (1)...(19): siRNA sense strand
gugaacaacagcaagauau

SEQ ID NO: 2397623 - RNA, 19 nt, Homo sapiens
  misc_RNA (1)...(19): siRNA sense strand
agcaaaugucaaugaacaa

SEQ ID NO: 2397624 - RNA, 19 nt, Homo sapiens
  misc_RNA (1)...(19): siRNA sense strand
ccaauguuuuguugaguaa

SEQ ID NO: 2397625 - RNA, 19 nt, Homo sapiens
  misc_RNA (1)...(19): siRNA sense strand
cagugagagguuugggaau

SEQ ID NO: 2397626 - RNA, 19 nt, Homo sapiens
  misc_RNA (1)...(19): siRNA sense strand
aaucaagcacaaucagaaa

SEQ ID NO: 2397627 - RNA, 19 nt, Homo sapiens
  misc_RNA (1)...(19): siRNA sense strand
gaugaguacaagagcuauu

SEQ ID NO: 2397628 - RNA, 19 nt, Homo sapiens
  misc_RNA (1)...(19): siRNA sense strand
agaaaccaauuguggaaca

SEQ ID NO: 2397629 - RNA, 19 nt, Homo sapiens
  misc_RNA (1)...(19): siRNA sense strand
ugaaaugauugcuggaucu

SEQ ID NO: 2397630 - RNA, 19 nt, Homo sapiens
  misc_RNA (1)...(19): siRNA sense strand
auggaugaauaauggguau

SEQ ID NO: 2397631 - RNA, 19 nt, Homo sapiens
  misc_RNA (1)...(19): siRNA sense strand
cacaagaggcaaaucuaaa

SEQ ID NO: 2397632 - RNA, 19 nt, Homo sapiens
  misc_RNA (1)...(19): siRNA sense strand
cucuaaauguggugaaaau

SEQ ID NO: 2397633 - RNA, 19 nt, Homo sapiens
  misc_RNA (1)...(19): siRNA sense strand
ggaauuagaaggaaugcca

SEQ ID NO: 2397634 - RNA, 19 nt, Homo sapiens
  misc_RNA (1)...(19): siRNA sense strand
caacauagcucaaagaagc

SEQ ID NO: 2397635 - RNA, 19 nt, Homo sapiens
  misc_RNA (1)...(19): siRNA sense strand
uagcaagguaucaguaaau

SEQ ID NO: 2397636 - RNA, 19 nt, Homo sapiens
  misc_RNA (1)...(19): siRNA sense strand
ccugugaaaccgaugcaaa

SEQ ID NO: 2397637 - RNA, 19 nt, Homo sapiens
  misc_RNA (1)...(19): siRNA sense strand
caucaaggugccacuguaa

SEQ ID NO: 2397638 - RNA, 19 nt, Homo sapiens
  misc_RNA (1)...(19): siRNA sense strand
cuacauugcaagagaccca

SEQ ID NO: 2397639 - RNA, 19 nt, Homo sapiens
  misc_RNA (1)...(19): siRNA sense strand
gcaacaaaucacuaaagau

SEQ ID NO: 2397640 - RNA, 19 nt, Homo sapiens
  misc_RNA (1)...(19): siRNA sense strand
guggauagugcuuuaggaa

SEQ ID NO: 2397641 - RNA, 19 nt, Homo sapiens
  misc_RNA (1)...(19): siRNA sense strand
cuauauaggcaccaaguca

SEQ ID NO: 2397642 - RNA, 19 nt, Homo sapiens
  misc_RNA (1)...(19): siRNA sense strand
ggugaaaaugacaacaaua

SEQ ID NO: 2397643 - RNA, 19 nt, Homo sapiens
  misc_RNA (1)...(19): siRNA sense strand
aggaaguagccgacauaca

SEQ ID NO: 2397644 - RNA, 19 nt, Homo sapiens
  misc_RNA (1)...(19): siRNA sense strand
aucaggaacuaguggaaga

SEQ ID NO: 2397645 - RNA, 19 nt, Homo sapiens
  misc_RNA (1)...(19): siRNA sense strand
uggaagaccguuucaggaa

SEQ ID NO: 2397646 - RNA, 19 nt, Homo sapiens
  misc_RNA (1)...(19): siRNA sense strand
cagaagaagcagcaagaac

SEQ ID NO: 2397647 - RNA, 19 nt, Homo sapiens
  misc_RNA (1)...(19): siRNA sense strand
gcuacaagcaauggaguga

SEQ ID NO: 2397648 - RNA, 19 nt, Homo sapiens
  misc_RNA (1)...(19): siRNA sense strand
gcuacaguggacuaagaaa

SEQ ID NO: 2397649 - RNA, 19 nt, Homo sapiens
  misc_RNA (1)...(19): siRNA sense strand
ccagcaggaaugaaaggaa

SEQ ID NO: 2397650 - RNA, 19 nt, Homo sapiens
  misc_RNA (1)...(19): siRNA sense strand
acuaaaagcccaagaaaac

SEQ ID NO: 2397651 - RNA, 19 nt, Homo sapiens
  misc_RNA (1)...(19): siRNA sense strand
ggccacacacccugacaaa

SEQ ID NO: 2397652 - RNA, 19 nt, Homo sapiens
  misc_RNA (1)...(19): siRNA sense strand
gaagcagcaagaacagaaa

SEQ ID NO: 2397653 - RNA, 19 nt, Homo sapiens
  misc_RNA (1)...(19): siRNA sense strand
gcacuaaaagcccaagaaa

SEQ ID NO: 2397654 - RNA, 19 nt, Homo sapiens
  misc_RNA (1)...(19): siRNA sense strand
guguuaagaaggaccaaaa

SEQ ID NO: 2397655 - RNA, 19 nt, Homo sapiens
  misc_RNA (1)...(19): siRNA sense strand
caaccuugacuuucacaaa

SEQ ID NO: 2397656 - RNA, 19 nt, Homo sapiens
  misc_RNA (1)...(19): siRNA sense strand
aagucuaugaugaguacaa

SEQ ID NO: 2397657 - RNA, 19 nt, Homo sapiens
  misc_RNA (1)...(19): siRNA sense strand
ccucuugauaauaaaggaa

SEQ ID NO: 2397658 - RNA, 19 nt, Homo sapiens
  misc_RNA (1)...(19): siRNA sense strand
cggcagcaccagcaggaau

SEQ ID NO: 2397659 - RNA, 19 nt, Homo sapiens
  misc_RNA (1)...(19): siRNA sense strand
ggaaaauccagaagaagca

SEQ ID NO: 2397660 - RNA, 19 nt, Homo sapiens
  misc_RNA (1)...(19): siRNA sense strand
ggugccuccuguaaagaaa

SEQ ID NO: 2397661 - RNA, 19 nt, Homo sapiens
  misc_RNA (1)...(19): siRNA sense strand
cuaucaggaacuaguggaa

SEQ ID NO: 2397662 - RNA, 19 nt, Homo sapiens
  misc_RNA (1)...(19): siRNA sense strand
caggaaacauuguagggaa

SEQ ID NO: 2397663 - RNA, 19 nt, Homo sapiens
  misc_RNA (1)...(19): siRNA sense strand
uuauagaaccauuggccua

SEQ ID NO: 2397664 - RNA, 19 nt, Homo sapiens
  misc_RNA (1)...(19): siRNA sense strand
aggaaacauuguagggaag

SEQ ID NO: 2397665 - RNA, 19 nt, Homo sapiens
  misc_RNA (1)...(19): siRNA sense strand
gguuauucaagaagcccaa

SEQ ID NO: 2397666 - RNA, 19 nt, Homo sapiens
  misc_RNA (1)...(19): siRNA sense strand
gggaaguauggaacacgaa

SEQ ID NO: 2397667 - RNA, 19 nt, Homo sapiens
  misc_RNA (1)...(19): siRNA sense strand
gacuggagcaagauggaau

SEQ ID NO: 2397668 - RNA, 19 nt, Homo sapiens
  misc_RNA (1)...(19): siRNA sense strand
ccuccuggcaacuggauuu

SEQ ID NO: 2397669 - RNA, 19 nt, Homo sapiens
  misc_RNA (1)...(19): siRNA sense strand
ucuacaaaccagaguucuu

SEQ ID NO: 2397670 - RNA, 19 nt, Homo sapiens
  misc_RNA (1)...(19): siRNA sense strand
ugagagagggugaaccgua

SEQ ID NO: 2397671 - RNA, 19 nt, Homo sapiens
  misc_RNA (1)...(19): siRNA sense strand
cgcaauuucaagagcccua

SEQ ID NO: 2397672 - RNA, 19 nt, Homo sapiens
  misc_RNA (1)...(19): siRNA sense strand
gcaaagaaggccagcgaga

SEQ ID NO: 2397673 - RNA, 19 nt, Homo sapiens
  misc_RNA (1)...(19): siRNA sense strand
gcauaaggugaaugagcau

SEQ ID NO: 2397674 - RNA, 19 nt, Homo sapiens
  misc_RNA (1)...(19): siRNA sense strand
cagcaaaagcuaagguaca

SEQ ID NO: 2397675 - RNA, 19 nt, Homo sapiens
  misc_RNA (1)...(19): siRNA sense strand
gcaaagaagaaaaggaagu

SEQ ID NO: 2397676 - RNA, 19 nt, Homo sapiens
  misc_RNA (1)...(19): siRNA sense strand
aggcaaagaagaaaaggaa

SEQ ID NO: 2397677 - RNA, 19 nt, Homo sapiens
  misc_RNA (1)...(19): siRNA sense strand
gcagcaaaggagccagcaa

SEQ ID NO: 2397678 - RNA, 19 nt, Homo sapiens
  misc_RNA (1)...(19): siRNA sense strand
cuuuggaggaugaugguuu

SEQ ID NO: 2397679 - RNA, 19 nt, Homo sapiens
  misc_RNA (1)...(19): siRNA sense strand
ggcauaaggugaaugagca

SEQ ID NO: 2397680 - RNA, 19 nt, Homo sapiens
  misc_RNA (1)...(19): siRNA sense strand
aggcaaagaaggccagcga

SEQ ID NO: 2397681 - RNA, 19 nt, Homo sapiens
  misc_RNA (1)...(19): siRNA sense strand
gcaacgagcuucagaccac

SEQ ID NO: 2397682 - RNA, 19 nt, Homo sapiens
  misc_RNA (1)...(19): siRNA sense strand
ggaaaguaguaacagcagu

SEQ ID NO: 2397683 - RNA, 19 nt, Homo sapiens
  misc_RNA (1)...(19): siRNA sense strand
agcaugaacaagauggcaa

SEQ ID NO: 2397684 - RNA, 19 nt, Homo sapiens
  misc_RNA (1)...(19): siRNA sense strand
uggaagagcaugaagcaga

SEQ ID NO: 2397685 - RNA, 19 nt, Homo sapiens
  misc_RNA (1)...(19): siRNA sense strand
ucuuaaugguacagacaca

SEQ ID NO: 2397686 - RNA, 19 nt, Homo sapiens
  misc_RNA (1)...(19): siRNA sense strand
ugguagaugaugauggauu

SEQ ID NO: 2397687 - RNA, 19 nt, Homo sapiens
  misc_RNA (1)...(19): siRNA sense strand
cacagauaccagaaacaaa

SEQ ID NO: 2397688 - RNA, 19 nt, Homo sapiens
  misc_RNA (1)...(19): siRNA sense strand
caguuauaucucugccaaa

SEQ ID NO: 2397689 - RNA, 19 nt, Homo sapiens
  misc_RNA (1)...(19): siRNA sense strand
aagagaaguccaauguaau

SEQ ID NO: 2397690 - RNA, 19 nt, Homo sapiens
  misc_RNA (1)...(19): siRNA sense strand
cugaagaaacuacaguaau

SEQ ID NO: 2397691 - RNA, 19 nt, Homo sapiens
  misc_RNA (1)...(19): siRNA sense strand
gguacagacacaagaguuc

SEQ ID NO: 2397692 - RNA, 19 nt, Homo sapiens
  misc_RNA (1)...(19): siRNA sense strand
ggcaauuugauuagcuauu

SEQ ID NO: 2397693 - RNA, 19 nt, Homo sapiens
  misc_RNA (1)...(19): siRNA sense strand
uugauugagaacaagguua

SEQ ID NO: 2397694 - RNA, 19 nt, Homo sapiens
  misc_RNA (1)...(19): siRNA sense strand
gccuaaaacuucugaaucu

SEQ ID NO: 2397695 - RNA, 19 nt, Homo sapiens
  misc_RNA (1)...(19): siRNA sense strand
agcagaaaccuaugaagau

SEQ ID NO: 2397696 - RNA, 19 nt, Homo sapiens
  misc_RNA (1)...(19): siRNA sense strand
uagaacaacugaaugcuga

SEQ ID NO: 2397697 - RNA, 19 nt, Homo sapiens
  misc_RNA (1)...(19): siRNA sense strand
cuggagagccuguuggaga

SEQ ID NO: 2397698 - RNA, 19 nt, Homo sapiens
  misc_RNA (1)...(19): siRNA sense strand
ggagaaacacaaagagcug

SEQ ID NO: 2397699 - RNA, 19 nt, Homo sapiens
  misc_RNA (1)...(19): siRNA sense strand
gcuacaagcaagaccagga

SEQ ID NO: 2397700 - RNA, 19 nt, Homo sapiens
  misc_RNA (1)...(19): siRNA sense strand
agaucuaucggcagggaaa

SEQ ID NO: 2397701 - RNA, 19 nt, Homo sapiens
  misc_RNA (1)...(19): siRNA sense strand
uggaaaagggcaagaucua

SEQ ID NO: 2397702 - RNA, 19 nt, Homo sapiens
  misc_RNA (1)...(19): siRNA sense strand
cugucgacguugcuagaaa

SEQ ID NO: 2397703 - RNA, 19 nt, Homo sapiens
  misc_RNA (1)...(19): siRNA sense strand
agaggaauuuuguuggaaa

SEQ ID NO: 2397704 - RNA, 19 nt, Homo sapiens
  misc_RNA (1)...(19): siRNA sense strand
ugaugaagauugacgccuu

SEQ ID NO: 2397705 - RNA, 19 nt, Homo sapiens
  misc_RNA (1)...(19): siRNA sense strand
acguugaggucuacggcuu

SEQ ID NO: 2397706 - RNA, 19 nt, Homo sapiens
  misc_RNA (1)...(19): siRNA sense strand
acaaguacccagaagggau

SEQ ID NO: 2397707 - RNA, 19 nt, Homo sapiens
  misc_RNA (1)...(19): siRNA sense strand
cuuucagcuucguagacaa

SEQ ID NO: 2397708 - RNA, 19 nt, Homo sapiens
  misc_RNA (1)...(19): siRNA sense strand
ugaaagagcggcaggagcu

SEQ ID NO: 2397709 - RNA, 19 nt, Homo sapiens
  misc_RNA (1)...(19): siRNA sense strand
ucgagcaggacauggagaa

SEQ ID NO: 2397710 - RNA, 19 nt, Homo sapiens
  misc_RNA (1)...(19): siRNA sense strand
gcugugaaaucaaaggaca

SEQ ID NO: 2397711 - RNA, 19 nt, Homo sapiens
  misc_RNA (1)...(19): siRNA sense strand
cugugaaaucaaaggacau

SEQ ID NO: 2397712 - RNA, 19 nt, Homo sapiens
  misc_RNA (1)...(19): siRNA sense strand
ccuaagauguccaggagug

SEQ ID NO: 2397713 - RNA, 19 nt, Homo sapiens
  misc_RNA (1)...(19): siRNA sense strand
ucaccacagcagagacauu

SEQ ID NO: 2397714 - RNA, 19 nt, Homo sapiens
  misc_RNA (1)...(19): siRNA sense strand
cggagagacugcggagcuu

SEQ ID NO: 2397715 - RNA, 19 nt, Homo sapiens
  misc_RNA (1)...(19): siRNA sense strand
agguaacuuuggaaggaaa

SEQ ID NO: 2397716 - RNA, 19 nt, Homo sapiens
  misc_RNA (1)...(19): siRNA sense strand
acugauaagaagagugaau

SEQ ID NO: 2397717 - RNA, 19 nt, Homo sapiens
  misc_RNA (1)...(19): siRNA sense strand
agacaagagagaacgcaaa

SEQ ID NO: 2397718 - RNA, 19 nt, Homo sapiens
  misc_RNA (1)...(19): siRNA sense strand
aguuugaagcugaggauuu

SEQ ID NO: 2397719 - RNA, 19 nt, Homo sapiens
  misc_RNA (1)...(19): siRNA sense strand
cagcaauaguacucaccaa

SEQ ID NO: 2397720 - RNA, 19 nt, Homo sapiens
  misc_RNA (1)...(19): siRNA sense strand
gaaugaugacacagagaca

SEQ ID NO: 2397721 - RNA, 19 nt, Homo sapiens
  misc_RNA (1)...(19): siRNA sense strand
cauaaaucaucgaggugga

SEQ ID NO: 2397722 - RNA, 19 nt, Homo sapiens
  misc_RNA (1)...(19): siRNA sense strand
gcaggaagacagugaaaau

SEQ ID NO: 2397723 - RNA, 19 nt, Homo sapiens
  misc_RNA (1)...(19): siRNA sense strand
acagaguagaagaggaaca

SEQ ID NO: 2397724 - RNA, 19 nt, Homo sapiens
  misc_RNA (1)...(19): siRNA sense strand
gcucagagaaggaugacga

SEQ ID NO: 2397725 - RNA, 19 nt, Homo sapiens
  misc_RNA (1)...(19): siRNA sense strand
ggaugaaaugagagaauuc

SEQ ID NO: 2397726 - RNA, 19 nt, Homo sapiens
  misc_RNA (1)...(19): siRNA sense strand
uggcaggaagacagugaaa

SEQ ID NO: 2397727 - RNA, 19 nt, Homo sapiens
  misc_RNA (1)...(19): siRNA sense strand
gagacagaguagaagagga

SEQ ID NO: 2397728 - RNA, 19 nt, Homo sapiens
  misc_RNA (1)...(19): siRNA sense strand
agagagaaccaaaucacaa

SEQ ID NO: 2397729 - RNA, 19 nt, Homo sapiens
  misc_RNA (1)...(19): siRNA sense strand
cugcaggugugugggaaua

SEQ ID NO: 2397730 - RNA, 19 nt, Homo sapiens
  misc_RNA (1)...(19): siRNA sense strand
cacagauuguuaaaggaaa

SEQ ID NO: 2397731 - RNA, 19 nt, Homo sapiens
  misc_RNA (1)...(19): siRNA sense strand
ccacauuuggcguuggcaa

SEQ ID NO: 2397732 - RNA, 19 nt, Homo sapiens
  misc_RNA (1)...(19): siRNA sense strand
aaagaagacaagagagaac

SEQ ID NO: 2397733 - RNA, 19 nt, Homo sapiens
  misc_RNA (1)...(19): siRNA sense strand
cagugaaaaugaugaaaca

SEQ ID NO: 2397734 - RNA, 19 nt, Homo sapiens
  misc_RNA (1)...(19): siRNA sense strand
acacaauggaaaagccaaa

SEQ ID NO: 2397735 - RNA, 19 nt, Homo sapiens
  misc_RNA (1)...(19): siRNA sense strand
gagaaugaugacacagaga

SEQ ID NO: 2397736 - RNA, 19 nt, Homo sapiens
  misc_RNA (1)...(19): siRNA sense strand
accaagaaagggauauaaa

SEQ ID NO: 2397737 - RNA, 19 nt, Homo sapiens
  misc_RNA (1)...(19): siRNA sense strand
gacaaguagcagugauaca

SEQ ID NO: 2397738 - RNA, 19 nt, Homo sapiens
  misc_RNA (1)...(19): siRNA sense strand
gccaaggacuacaugaaaa

SEQ ID NO: 2397739 - RNA, 19 nt, Homo sapiens
  misc_RNA (1)...(19): siRNA sense strand
caauaagucuuuagcugca

SEQ ID NO: 2397740 - RNA, 19 nt, Homo sapiens
  misc_RNA (1)...(19): siRNA sense strand
gaugcuggucauuaagaaa

SEQ ID NO: 2397741 - RNA, 19 nt, Homo sapiens
  misc_RNA (1)...(19): siRNA sense strand
ucaccaagaaagggauaua

SEQ ID NO: 2397742 - RNA, 19 nt, Homo sapiens
  misc_RNA (1)...(19): siRNA sense strand
agaaagggauauaaaccga

SEQ ID NO: 2397743 - RNA, 19 nt, Homo sapiens
  misc_RNA (1)...(19): siRNA sense strand
acaacauaccugacaauga

SEQ ID NO: 2397744 - RNA, 19 nt, Homo sapiens
  misc_RNA (1)...(19): siRNA sense strand
aagacaagagagaacgcaa

SEQ ID NO: 2397745 - RNA, 19 nt, Homo sapiens
  misc_RNA (1)...(19): siRNA sense strand
aguaugagagagaaccaaa

SEQ ID NO: 2397746 - RNA, 19 nt, Homo sapiens
  misc_RNA (1)...(19): siRNA sense strand
gcugcaggugugugggaau

SEQ ID NO: 2397747 - RNA, 19 nt, Homo sapiens
  misc_RNA (1)...(19): siRNA sense strand
cugaggaugaaaugagaga

SEQ ID NO: 2397748 - RNA, 19 nt, Homo sapiens
  misc_RNA (1)...(19): siRNA sense strand
ccuccgaauccuaaaucua

SEQ ID NO: 2397749 - RNA, 19 nt, Homo sapiens
  misc_RNA (1)...(19): siRNA sense strand
auggaaaagccaaacaaaa

SEQ ID NO: 2397750 - RNA, 19 nt, Homo sapiens
  misc_RNA (1)...(19): siRNA sense strand
aagccaaggacuacaugaa

SEQ ID NO: 2397751 - RNA, 19 nt, Homo sapiens
  misc_RNA (1)...(19): siRNA sense strand
gcuccaaggaugcugguca

SEQ ID NO: 2397752 - RNA, 19 nt, Homo sapiens
  misc_RNA (1)...(19): siRNA sense strand
agaagaggaacaugaagau

SEQ ID NO: 2397753 - RNA, 19 nt, Homo sapiens
  misc_RNA (1)...(19): siRNA sense strand
augaaauuccucaagagaa

SEQ ID NO: 2397754 - RNA, 19 nt, Homo sapiens
  misc_RNA (1)...(19): siRNA sense strand
aaguuuggaccguggaaga

SEQ ID NO: 2397755 - RNA, 19 nt, Homo sapiens
  misc_RNA (1)...(19): siRNA sense strand
aaacaacauaccugacaau

SEQ ID NO: 2397756 - RNA, 19 nt, Homo sapiens
  misc_RNA (1)...(19): siRNA sense strand
acuuacagcuaucuggauu

SEQ ID NO: 2397757 - RNA, 19 nt, Homo sapiens
  misc_RNA (1)...(19): siRNA sense strand
aaaccuacacaauggaaaa

SEQ ID NO: 2397758 - RNA, 19 nt, Homo sapiens
  misc_RNA (1)...(19): siRNA sense strand
ccuuaacugaggaugaaau

SEQ ID NO: 2397759 - RNA, 19 nt, Homo sapiens
  misc_RNA (1)...(19): siRNA sense strand
acauggaagaaaugguaca

SEQ ID NO: 2397760 - RNA, 19 nt, Homo sapiens
  misc_RNA (1)...(19): siRNA sense strand
aagaaaugguacagaaaac

SEQ ID NO: 2397761 - RNA, 19 nt, Homo sapiens
  misc_RNA (1)...(19): siRNA sense strand
ugguccaaguguuuauaaa

SEQ ID NO: 2397762 - RNA, 19 nt, Homo sapiens
  misc_RNA (1)...(19): siRNA sense strand
aauaguacucaccaagaaa

SEQ ID NO: 2397763 - RNA, 19 nt, Homo sapiens
  misc_RNA (1)...(19): siRNA sense strand
ccguggaagaacagcacuu

SEQ ID NO: 2397764 - RNA, 19 nt, Homo sapiens
  misc_RNA (1)...(19): siRNA sense strand
cugagaaugaugacacaga

SEQ ID NO: 2397765 - RNA, 19 nt, Homo sapiens
  misc_RNA (1)...(19): siRNA sense strand
aaacauaaaucaucgaggu

SEQ ID NO: 2397766 - RNA, 19 nt, Homo sapiens
  misc_RNA (1)...(19): siRNA sense strand
ccaaaucacaauaagucuu

SEQ ID NO: 2397767 - RNA, 19 nt, Homo sapiens
  misc_RNA (1)...(19): siRNA sense strand
gaugcaaggccacgggaga

SEQ ID NO: 2397768 - RNA, 19 nt, Homo sapiens
  misc_RNA (1)...(19): siRNA sense strand
ucaaggaguuuguaggguu

SEQ ID NO: 2397769 - RNA, 19 nt, Homo sapiens
  misc_RNA (1)...(19): siRNA sense strand
cggacugggaggagaagga

SEQ ID NO: 2397770 - RNA, 19 nt, Homo sapiens
  misc_RNA (1)...(19): siRNA sense strand
augaaaugcgggaggacca

SEQ ID NO: 2397771 - RNA, 19 nt, Homo sapiens
  misc_RNA (1)...(19): siRNA sense strand
aggagaaggaguucggcuu

SEQ ID NO: 2397772 - RNA, 19 nt, Homo sapiens
  misc_RNA (1)...(19): siRNA sense strand
cugagaaugaccagcuaau

SEQ ID NO: 2397773 - RNA, 19 nt, Homo sapiens
  misc_RNA (1)...(19): siRNA sense strand
ccgcagaguucuaucucca

SEQ ID NO: 2397774 - RNA, 19 nt, Homo sapiens
  misc_RNA (1)...(19): siRNA sense strand
cugaaugaguucugggaug

SEQ ID NO: 2397775 - RNA, 19 nt, Homo sapiens
  misc_RNA (1)...(19): siRNA sense strand
acugugggguccaggaaua

SEQ ID NO: 2397776 - RNA, 19 nt, Homo sapiens
  misc_RNA (1)...(19): siRNA sense strand
acaacugggucaauggcuu

SEQ ID NO: 2397777 - RNA, 19 nt, Homo sapiens
  misc_RNA (1)...(19): siRNA sense strand
aggaugaaugccugagaua

SEQ ID NO: 2397778 - RNA, 19 nt, Homo sapiens
  misc_RNA (1)...(19): siRNA sense strand
ccagagaccacgaguaaga

SEQ ID NO: 2397779 - RNA, 19 nt, Homo sapiens
  misc_RNA (1)...(19): siRNA sense strand
gggauguugacgagaauuu

SEQ ID NO: 2397780 - RNA, 19 nt, Homo sapiens
  misc_RNA (1)...(19): siRNA sense strand
gcgggauguugacgagaau

SEQ ID NO: 2397781 - RNA, 19 nt, Homo sapiens
  misc_RNA (1)...(19): siRNA sense strand
ucccagagaccacgaguaa

SEQ ID NO: 2397782 - RNA, 19 nt, Homo sapiens
  misc_RNA (1)...(19): siRNA sense strand
cguuguuaccugaaggaga

SEQ ID NO: 2397783 - RNA, 19 nt, Homo sapiens
  misc_RNA (1)...(19): siRNA sense strand
ggcagaaauugcaugucua

SEQ ID NO: 2397784 - RNA, 19 nt, Homo sapiens
  misc_RNA (1)...(19): siRNA sense strand
aggaaauaccccaggauga

SEQ ID NO: 2397785 - RNA, 19 nt, Homo sapiens
  misc_RNA (1)...(19): siRNA sense strand
guauucaagagcuggaaau

SEQ ID NO: 2397786 - RNA, 19 nt, Homo sapiens
  misc_RNA (1)...(19): siRNA sense strand
ggccacgucugauaagaaa

SEQ ID NO: 2397787 - RNA, 19 nt, Homo sapiens
  misc_RNA (1)...(19): siRNA sense strand
guuguuaccugaaggagau

SEQ ID NO: 2397788 - RNA, 19 nt, Homo sapiens
  misc_RNA (1)...(19): siRNA sense strand
ccgauuaaauaucucagaa

SEQ ID NO: 2397789 - RNA, 19 nt, Homo sapiens
  misc_RNA (1)...(19): siRNA sense strand
uaagaaagcuucguuguua

SEQ ID NO: 2397790 - RNA, 19 nt, Homo sapiens
  misc_RNA (1)...(19): siRNA sense strand
gcagaaauugcaugucuau

SEQ ID NO: 2397791 - RNA, 19 nt, Homo sapiens
  misc_RNA (1)...(19): siRNA sense strand
cucagaaagucauugaaaa

SEQ ID NO: 2397792 - RNA, 19 nt, Homo sapiens
  misc_RNA (1)...(19): siRNA sense strand
accugaaggagaugaagaa

SEQ ID NO: 2397793 - RNA, 19 nt, Homo sapiens
  misc_RNA (1)...(19): siRNA sense strand
gggaagucaggcagcccaa

SEQ ID NO: 2397794 - RNA, 19 nt, Homo sapiens
  misc_RNA (1)...(19): siRNA sense strand
ccugaggagaguuugaauu

SEQ ID NO: 2397795 - RNA, 19 nt, Homo sapiens
  misc_RNA (1)...(19): siRNA sense strand
uaucuaacgccgauuaaau

SEQ ID NO: 2397796 - RNA, 19 nt, Homo sapiens
  misc_RNA (1)...(19): siRNA sense strand
aggaugaaugccugagaua

SEQ ID NO: 2397797 - RNA, 19 nt, Homo sapiens
  misc_RNA (1)...(19): siRNA sense strand
ucccagaggccaugaguaa

SEQ ID NO: 2397798 - RNA, 19 nt, Homo sapiens
  misc_RNA (1)...(19): siRNA sense strand
auguguacacugagggaau

SEQ ID NO: 2397799 - RNA, 19 nt, Homo sapiens
  misc_RNA (1)...(19): siRNA sense strand
aggaaauaccccaggauga

SEQ ID NO: 2397800 - RNA, 19 nt, Homo sapiens
  misc_RNA (1)...(19): siRNA sense strand
ggucaauuaucuaacgcca

SEQ ID NO: 2397801 - RNA, 19 nt, Homo sapiens
  misc_RNA (1)...(19): siRNA sense strand
gggaauucaggcagcccaa

SEQ ID NO: 2397802 - RNA, 19 nt, Homo sapiens
  misc_RNA (1)...(19): siRNA sense strand
gccaugaguaagaggcaga

SEQ ID NO: 2397803 - RNA, 19 nt, Homo sapiens
  misc_RNA (1)...(19): siRNA sense strand
ugaaggagaugaagacucu

SEQ ID NO: 2397804 - RNA, 19 nt, Homo sapiens
  misc_RNA (1)...(19): siRNA sense strand
cucagaaagucauugaaaa

SEQ ID NO: 2397805 - RNA, 19 nt, Homo sapiens
  misc_RNA (1)...(19): siRNA sense strand
ccugaggagaguuugaauu

SEQ ID NO: 2397806 - RNA, 19 nt, Homo sapiens
  misc_RNA (1)...(19): siRNA sense strand
ggcaggagcuuguggccau

SEQ ID NO: 2397807 - RNA, 19 nt, Homo sapiens
  misc_RNA (1)...(19): siRNA sense strand
cagcugaagaggagcgugu

SEQ ID NO: 2397808 - RNA, 19 nt, Homo sapiens
  misc_RNA (1)...(19): siRNA sense strand
gaauaagaagggcuggcaa

SEQ ID NO: 2397809 - RNA, 19 nt, Homo sapiens
  misc_RNA (1)...(19): siRNA sense strand
gcacagucaaggagccaga

SEQ ID NO: 2397810 - RNA, 19 nt, Homo sapiens
  misc_RNA (1)...(19): siRNA sense strand
gcguagugaacucguacaa

SEQ ID NO: 2397811 - RNA, 19 nt, Homo sapiens
  misc_RNA (1)...(19): siRNA sense strand
gagaagaauaagaagggcu

SEQ ID NO: 2397812 - RNA, 19 nt, Homo sapiens
  misc_RNA (1)...(19): siRNA sense strand
acauguucgagaagggcaa

SEQ ID NO: 2397813 - RNA, 19 nt, Homo sapiens
  misc_RNA (1)...(19): siRNA sense strand
acacacgcgugcagagcau

SEQ ID NO: 2397814 - RNA, 19 nt, Homo sapiens
  misc_RNA (1)...(19): siRNA sense strand
gagaagaggcucacgcugu

SEQ ID NO: 2397815 - RNA, 19 nt, Homo sapiens
  misc_RNA (1)...(19): siRNA sense strand
aauucauacuggugagaaa

SEQ ID NO: 2397816 - RNA, 19 nt, Homo sapiens
  misc_RNA (1)...(19): siRNA sense strand
auguaaggaaugugggaaa

SEQ ID NO: 2397817 - RNA, 19 nt, Homo sapiens
  misc_RNA (1)...(19): siRNA sense strand
guaauaagcuagaaagcca

SEQ ID NO: 2397818 - RNA, 19 nt, Homo sapiens
  misc_RNA (1)...(19): siRNA sense strand
augcagucauugugggaaa

SEQ ID NO: 2397819 - RNA, 19 nt, Homo sapiens
  misc_RNA (1)...(19): siRNA sense strand
augcaaagacuguggaaaa

SEQ ID NO: 2397820 - RNA, 19 nt, Homo sapiens
  misc_RNA (1)...(19): siRNA sense strand
auguaaggagugugggaaa

SEQ ID NO: 2397821 - RNA, 19 nt, Homo sapiens
  misc_RNA (1)...(19): siRNA sense strand
auguaggguaugugagaaa

SEQ ID NO: 2397822 - RNA, 19 nt, Homo sapiens
  misc_RNA (1)...(19): siRNA sense strand
uggcugauggagagagaua

SEQ ID NO: 2397823 - RNA, 19 nt, Homo sapiens
  misc_RNA (1)...(19): siRNA sense strand
agaacuacauuguggccua

SEQ ID NO: 2397824 - RNA, 19 nt, Homo sapiens
  misc_RNA (1)...(19): siRNA sense strand
gagaaagccuucagccaga

SEQ ID NO: 2397825 - RNA, 19 nt, Homo sapiens
  misc_RNA (1)...(19): siRNA sense strand
gauuagacaccuuaggcaa

SEQ ID NO: 2397826 - RNA, 19 nt, Homo sapiens
  misc_RNA (1)...(19): siRNA sense strand
aacucauguuagagagaaa

SEQ ID NO: 2397827 - RNA, 19 nt, Homo sapiens
  misc_RNA (1)...(19): siRNA sense strand
uggagaaagaccauauaaa

SEQ ID NO: 2397828 - RNA, 19 nt, Homo sapiens
  misc_RNA (1)...(19): siRNA sense strand
uugcuaaacaucagagaau

SEQ ID NO: 2397829 - RNA, 19 nt, Homo sapiens
  misc_RNA (1)...(19): siRNA sense strand
ggagaagaaccauggcuga

SEQ ID NO: 2397830 - RNA, 19 nt, Homo sapiens
  misc_RNA (1)...(19): siRNA sense strand
auguaaggaauguggaaaa

SEQ ID NO: 2397831 - RNA, 19 nt, Homo sapiens
  misc_RNA (1)...(19): siRNA sense strand
gauuguaaugaguguggaa

SEQ ID NO: 2397832 - RNA, 19 nt, Homo sapiens
  misc_RNA (1)...(19): siRNA sense strand
aguuaugccaggaccaaua

SEQ ID NO: 2397833 - RNA, 19 nt, Homo sapiens
  misc_RNA (1)...(19): siRNA sense strand
guuggagaaaggagaagaa

SEQ ID NO: 2397834 - RNA, 19 nt, Homo sapiens
  misc_RNA (1)...(19): siRNA sense strand
agaaccaaagaauggguaa

SEQ ID NO: 2397835 - RNA, 19 nt, Homo sapiens
  misc_RNA (1)...(19): siRNA sense strand
ccuuaggcaacaugagauu

SEQ ID NO: 2397836 - RNA, 19 nt, Homo sapiens
  misc_RNA (1)...(19): siRNA sense strand
ggagagagauauuucagga

SEQ ID NO: 2397837 - RNA, 19 nt, Homo sapiens
  misc_RNA (1)...(19): siRNA sense strand
agagaggccaagagucuaa

SEQ ID NO: 2397838 - RNA, 19 nt, Homo sapiens
  misc_RNA (1)...(19): siRNA sense strand
agauguaaggaauguggaa

SEQ ID NO: 2397839 - RNA, 19 nt, Homo sapiens
  misc_RNA (1)...(19): siRNA sense strand
aacaagagaaccaaagaau

SEQ ID NO: 2397840 - RNA, 19 nt, Homo sapiens
  misc_RNA (1)...(19): siRNA sense strand
cauucaaggaguuauacaa

SEQ ID NO: 2397841 - RNA, 19 nt, Homo sapiens
  misc_RNA (1)...(19): siRNA sense strand
uguaaggagugugggaaaa

SEQ ID NO: 2397842 - RNA, 19 nt, Homo sapiens
  misc_RNA (1)...(19): siRNA sense strand
aacucauacuggagaaaga

SEQ ID NO: 2397843 - RNA, 19 nt, Homo sapiens
  misc_RNA (1)...(19): siRNA sense strand
uuguaaugaguguggaaaa

SEQ ID NO: 2397844 - RNA, 19 nt, Homo sapiens
  misc_RNA (1)...(19): siRNA sense strand
uagaaagccaacaagagaa

SEQ ID NO: 2397845 - RNA, 19 nt, Homo sapiens
  misc_RNA (1)...(19): siRNA sense strand
gaauguaaggaguguggga

SEQ ID NO: 2397846 - RNA, 19 nt, Homo sapiens
  misc_RNA (1)...(19): siRNA sense strand
gugagaaagccuucagcca

SEQ ID NO: 2397847 - RNA, 19 nt, Homo sapiens
  misc_RNA (1)...(19): siRNA sense strand
cuuauuagacacugcaaaa

SEQ ID NO: 2397848 - RNA, 19 nt, Homo sapiens
  misc_RNA (1)...(19): siRNA sense strand
aaugauauuucgugggaag

SEQ ID NO: 2397849 - RNA, 19 nt, Homo sapiens
  misc_RNA (1)...(19): siRNA sense strand
gauguaaggaauguggaaa

SEQ ID NO: 2397850 - RNA, 19 nt, Homo sapiens
  misc_RNA (1)...(19): siRNA sense strand
cagccauaguacauaccua

SEQ ID NO: 2397851 - RNA, 19 nt, Homo sapiens
  misc_RNA (1)...(19): siRNA sense strand
ccuuauuagacacugcaaa

SEQ ID NO: 2397852 - RNA, 19 nt, Homo sapiens
  misc_RNA (1)...(19): siRNA sense strand
ccaguuggagaaaggagaa

SEQ ID NO: 2397853 - RNA, 19 nt, Homo sapiens
  misc_RNA (1)...(19): siRNA sense strand
ccuuaugauuguaaugagu

SEQ ID NO: 2397854 - RNA, 19 nt, Homo sapiens
  misc_RNA (1)...(19): siRNA sense strand
aagaaauaccuucagcaau

SEQ ID NO: 2397855 - RNA, 19 nt, Homo sapiens
  misc_RNA (1)...(19): siRNA sense strand
cauggcugauggagagaga

SEQ ID NO: 2397856 - RNA, 19 nt, Homo sapiens
  misc_RNA (1)...(19): siRNA sense strand
augugaagucagaaguuau

SEQ ID NO: 2397857 - RNA, 19 nt, Homo sapiens
  misc_RNA (1)...(19): siRNA sense strand
ccuggaaagagaagcagau

SEQ ID NO: 2397858 - RNA, 19 nt, Homo sapiens
  misc_RNA (1)...(19): siRNA sense strand
gccuuuagccagagaauac

SEQ ID NO: 2397859 - RNA, 19 nt, Homo sapiens
  misc_RNA (1)...(19): siRNA sense strand
aguuaaucauucaaggagu

SEQ ID NO: 2397860 - RNA, 19 nt, Homo sapiens
  misc_RNA (1)...(19): siRNA sense strand
agguagugccagugaagua

SEQ ID NO: 2397861 - RNA, 19 nt, Homo sapiens
  misc_RNA (1)...(19): siRNA sense strand
acguaaauaugaugaggau

SEQ ID NO: 2397862 - RNA, 19 nt, Homo sapiens
  misc_RNA (1)...(19): siRNA sense strand
aggaaacaccauugaaaga

SEQ ID NO: 2397863 - RNA, 19 nt, Homo sapiens
  misc_RNA (1)...(19): siRNA sense strand
aagcugaagcaauggaaau

SEQ ID NO: 2397864 - RNA, 19 nt, Homo sapiens
  misc_RNA (1)...(19): siRNA sense strand
cagugaagguuuggagaca

SEQ ID NO: 2397865 - RNA, 19 nt, Homo sapiens
  misc_RNA (1)...(19): siRNA sense strand
cugaaauggacaaagugaa

SEQ ID NO: 2397866 - RNA, 19 nt, Homo sapiens
  misc_RNA (1)...(19): siRNA sense strand
aagugaaagcugaagcaau

SEQ ID NO: 2397867 - RNA, 19 nt, Homo sapiens
  misc_RNA (1)...(19): siRNA sense strand
ggacagggcuauaggccac

SEQ ID NO: 2397868 - RNA, 19 nt, Homo sapiens
  misc_RNA (1)...(19): siRNA sense strand
agaacaugaaagagaagau

SEQ ID NO: 2397869 - RNA, 19 nt, Homo sapiens
  misc_RNA (1)...(19): siRNA sense strand
guuccuaauaagagcaaca

SEQ ID NO: 2397870 - RNA, 19 nt, Homo sapiens
  misc_RNA (1)...(19): siRNA sense strand
ucaauagaugccagagaau

SEQ ID NO: 2397871 - RNA, 19 nt, Homo sapiens
  misc_RNA (1)...(19): siRNA sense strand
gaacagacgaggaggacag

SEQ ID NO: 2397872 - RNA, 19 nt, Homo sapiens
  misc_RNA (1)...(19): siRNA sense strand
cauccaaagaacagcuauu

SEQ ID NO: 2397873 - RNA, 19 nt, Homo sapiens
  misc_RNA (1)...(19): siRNA sense strand
gggaggagcuuuugagaac

SEQ ID NO: 2397874 - RNA, 19 nt, Homo sapiens
  misc_RNA (1)...(19): siRNA sense strand
uggacaaagugaaagcuga

SEQ ID NO: 2397875 - RNA, 19 nt, Homo sapiens
  misc_RNA (1)...(19): siRNA sense strand
cuuuguuagugaacguaaa

SEQ ID NO: 2397876 - RNA, 19 nt, Homo sapiens
  misc_RNA (1)...(19): siRNA sense strand
agagaagauaaaugcggua

SEQ ID NO: 2397877 - RNA, 19 nt, Homo sapiens
  misc_RNA (1)...(19): siRNA sense strand
aaagaagagcauugauuca

SEQ ID NO: 2397878 - RNA, 19 nt, Homo sapiens
  misc_RNA (1)...(19): siRNA sense strand
uuugagaacaugaaagaga

SEQ ID NO: 2397879 - RNA, 19 nt, Homo sapiens
  misc_RNA (1)...(19): siRNA sense strand
uugauaacuguguggacaa

SEQ ID NO: 2397880 - RNA, 19 nt, Homo sapiens
  misc_RNA (1)...(19): siRNA sense strand
ccagagaauuggaggaucc

SEQ ID NO: 2397881 - RNA, 19 nt, Homo sapiens
  misc_RNA (1)...(19): siRNA sense strand
cauugauucauuuggacaa

SEQ ID NO: 2397882 - RNA, 19 nt, Homo sapiens
  misc_RNA (1)...(19): siRNA sense strand
caucaaugacacugagucu

SEQ ID NO: 2397883 - RNA, 19 nt, Homo sapiens
  misc_RNA (1)...(19): siRNA sense strand
gugaagguuuggagacacu

SEQ ID NO: 2397884 - RNA, 19 nt, Homo sapiens
  misc_RNA (1)...(19): siRNA sense strand
auguagagacccuaaagaa

SEQ ID NO: 2397885 - RNA, 19 nt, Homo sapiens
  misc_RNA (1)...(19): siRNA sense strand
cagugaaguacucaaagaa

SEQ ID NO: 2397886 - RNA, 19 nt, Homo sapiens
  misc_RNA (1)...(19): siRNA sense strand
gggagguauugccagggaa

SEQ ID NO: 2397887 - RNA, 19 nt, Homo sapiens
  misc_RNA (1)...(19): siRNA sense strand
ggacaguaacaggcaagaa

SEQ ID NO: 2397888 - RNA, 19 nt, Homo sapiens
  misc_RNA (1)...(19): siRNA sense strand
accaauggaacuagaguca

SEQ ID NO: 2397889 - RNA, 19 nt, Homo sapiens
  misc_RNA (1)...(19): siRNA sense strand
uaguuaaagaagagaugga

SEQ ID NO: 2397890 - RNA, 19 nt, Homo sapiens
  misc_RNA (1)...(19): siRNA sense strand
cauggaagguagugccagu

SEQ ID NO: 2397891 - RNA, 19 nt, Homo sapiens
  misc_RNA (1)...(19): siRNA sense strand
ggacagaacaggauccaug

SEQ ID NO: 2397892 - RNA, 19 nt, Homo sapiens
  misc_RNA (1)...(19): siRNA sense strand
acccaggaaugcugccaaa

SEQ ID NO: 2397893 - RNA, 19 nt, Homo sapiens
  misc_RNA (1)...(19): siRNA sense strand
gcuguuuaauggaucgaga

SEQ ID NO: 2397894 - RNA, 19 nt, Homo sapiens
  misc_RNA (1)...(19): siRNA sense strand
caucucaggcaccaggaaa

SEQ ID NO: 2397895 - RNA, 19 nt, Homo sapiens
  misc_RNA (1)...(19): siRNA sense strand
ccuaauaagagcaacaaug

SEQ ID NO: 2397896 - RNA, 19 nt, Homo sapiens
  misc_RNA (1)...(19): siRNA sense strand
guacaagcauucauggaag

SEQ ID NO: 2397897 - RNA, 19 nt, Homo sapiens
  misc_RNA (1)...(19): siRNA sense strand
agugaaguacucaaagaau

SEQ ID NO: 2397898 - RNA, 19 nt, Homo sapiens
  misc_RNA (1)...(19): siRNA sense strand
uggcguugcuugcugaaau

SEQ ID NO: 2397899 - RNA, 19 nt, Homo sapiens
  misc_RNA (1)...(19): siRNA sense strand
gcauugauucauuuggaca

SEQ ID NO: 2397900 - RNA, 19 nt, Homo sapiens
  misc_RNA (1)...(19): siRNA sense strand
aagaacagcuauucgacca

SEQ ID NO: 2397901 - RNA, 19 nt, Homo sapiens
  misc_RNA (1)...(19): siRNA sense strand
ccucagagaaaggugguau

SEQ ID NO: 2397902 - RNA, 19 nt, Homo sapiens
  misc_RNA (1)...(19): siRNA sense strand
aagaagaagagcugagaaa

SEQ ID NO: 2397903 - RNA, 19 nt, Homo sapiens
  misc_RNA (1)...(19): siRNA sense strand
gggacuaguuugagcagaa

SEQ ID NO: 2397904 - RNA, 19 nt, Homo sapiens
  misc_RNA (1)...(19): siRNA sense strand
agaugacacuagagagaaa

SEQ ID NO: 2397905 - RNA, 19 nt, Homo sapiens
  misc_RNA (1)...(19): siRNA sense strand
ggaucaauauguuggacaa

SEQ ID NO: 2397906 - RNA, 19 nt, Homo sapiens
  misc_RNA (1)...(19): siRNA sense strand
agacaauuauggaggaaaa

SEQ ID NO: 2397907 - RNA, 19 nt, Homo sapiens
  misc_RNA (1)...(19): siRNA sense strand
caaggaaagaagagagauu

SEQ ID NO: 2397908 - RNA, 19 nt, Homo sapiens
  misc_RNA (1)...(19): siRNA sense strand
cagaagaggaaauggauau

SEQ ID NO: 2397909 - RNA, 19 nt, Homo sapiens
  misc_RNA (1)...(19): siRNA sense strand
uaucagaaagcaagagaaa

SEQ ID NO: 2397910 - RNA, 19 nt, Homo sapiens
  misc_RNA (1)...(19): siRNA sense strand
uguaauagguguuugggaa

SEQ ID NO: 2397911 - RNA, 19 nt, Homo sapiens
  misc_RNA (1)...(19): siRNA sense strand
cagugaaaugucagagaaa

SEQ ID NO: 2397912 - RNA, 19 nt, Homo sapiens
  misc_RNA (1)...(19): siRNA sense strand
aggaauuaccugugagaga

SEQ ID NO: 2397913 - RNA, 19 nt, Homo sapiens
  misc_RNA (1)...(19): siRNA sense strand
ccaaagcagcaguaagaaa

SEQ ID NO: 2397914 - RNA, 19 nt, Homo sapiens
  misc_RNA (1)...(19): siRNA sense strand
cagaaagguagcagaaauu

SEQ ID NO: 2397915 - RNA, 19 nt, Homo sapiens
  misc_RNA (1)...(19): siRNA sense strand
ugaagaagacauugaagaa

SEQ ID NO: 2397916 - RNA, 19 nt, Homo sapiens
  misc_RNA (1)...(19): siRNA sense strand
uaaacaaagccaacagaaa

SEQ ID NO: 2397917 - RNA, 19 nt, Homo sapiens
  misc_RNA (1)...(19): siRNA sense strand
cuacaaagaaagaagauca

SEQ ID NO: 2397918 - RNA, 19 nt, Homo sapiens
  misc_RNA (1)...(19): siRNA sense strand
guagauacgaguucagaaa

SEQ ID NO: 2397919 - RNA, 19 nt, Homo sapiens
  misc_RNA (1)...(19): siRNA sense strand
ccagaaaauaggugcaaaa

SEQ ID NO: 2397920 - RNA, 19 nt, Homo sapiens
  misc_RNA (1)...(19): siRNA sense strand
ccauauggaugaagaagau

SEQ ID NO: 2397921 - RNA, 19 nt, Homo sapiens
  misc_RNA (1)...(19): siRNA sense strand
aggcaauaucagaaagcaa

SEQ ID NO: 2397922 - RNA, 19 nt, Homo sapiens
  misc_RNA (1)...(19): siRNA sense strand
caagaugacacuagagaga

SEQ ID NO: 2397923 - RNA, 19 nt, Homo sapiens
  misc_RNA (1)...(19): siRNA sense strand
ugaaggaaugaguggauua

SEQ ID NO: 2397924 - RNA, 19 nt, Homo sapiens
  misc_RNA (1)...(19): siRNA sense strand
gggaaagccaagaaucaaa

SEQ ID NO: 2397925 - RNA, 19 nt, Homo sapiens
  misc_RNA (1)...(19): siRNA sense strand
cagaagacgugggcagaaa

SEQ ID NO: 2397926 - RNA, 19 nt, Homo sapiens
  misc_RNA (1)...(19): siRNA sense strand
ccaucaaccucaagagcau

SEQ ID NO: 2397927 - RNA, 19 nt, Homo sapiens
  misc_RNA (1)...(19): siRNA sense strand
uggaaagcuuagagaacau

SEQ ID NO: 2397928 - RNA, 19 nt, Homo sapiens
  misc_RNA (1)...(19): siRNA sense strand
caucaucaguacugguuaa

SEQ ID NO: 2397929 - RNA, 19 nt, Homo sapiens
  misc_RNA (1)...(19): siRNA sense strand
gaaucaaaccuaagaggau

SEQ ID NO: 2397930 - RNA, 19 nt, Homo sapiens
  misc_RNA (1)...(19): siRNA sense strand
ugugagaaacugaggagaa

SEQ ID NO: 2397931 - RNA, 19 nt, Homo sapiens
  misc_RNA (1)...(19): siRNA sense strand
gugcuaagcuucagaaaau

SEQ ID NO: 2397932 - RNA, 19 nt, Homo sapiens
  misc_RNA (1)...(19): siRNA sense strand
gggaaauaaggcugagaca

SEQ ID NO: 2397933 - RNA, 19 nt, Homo sapiens
  misc_RNA (1)...(19): siRNA sense strand
guguagaguaugaaagaga

SEQ ID NO: 2397934 - RNA, 19 nt, Homo sapiens
  misc_RNA (1)...(19): siRNA sense strand
cucagaagacccagagaaa

SEQ ID NO: 2397935 - RNA, 19 nt, Homo sapiens
  misc_RNA (1)...(19): siRNA sense strand
gagaaaauguaaaaggaga

SEQ ID NO: 2397936 - RNA, 19 nt, Homo sapiens
  misc_RNA (1)...(19): siRNA sense strand
cagugaagaacuuggcuua

SEQ ID NO: 2397937 - RNA, 19 nt, Homo sapiens
  misc_RNA (1)...(19): siRNA sense strand
caagaaaagucaugcagaa

SEQ ID NO: 2397938 - RNA, 19 nt, Homo sapiens
  misc_RNA (1)...(19): siRNA sense strand
uaacaaacuugguuggaca

SEQ ID NO: 2397939 - RNA, 19 nt, Homo sapiens
  misc_RNA (1)...(19): siRNA sense strand
ccuccagaauucagcauua

SEQ ID NO: 2397940 - RNA, 19 nt, Homo sapiens
  misc_RNA (1)...(19): siRNA sense strand
ucagaaagcaagagaaaau

SEQ ID NO: 2397941 - RNA, 19 nt, Homo sapiens
  misc_RNA (1)...(19): siRNA sense strand
agauacgaguucagaaauu

SEQ ID NO: 2397942 - RNA, 19 nt, Homo sapiens
  misc_RNA (1)...(19): siRNA sense strand
ccuaagaggauguggugau

SEQ ID NO: 2397943 - RNA, 19 nt, Homo sapiens
  misc_RNA (1)...(19): siRNA sense strand
cuauagcagaagaaagaaa

SEQ ID NO: 2397944 - RNA, 19 nt, Homo sapiens
  misc_RNA (1)...(19): siRNA sense strand
caaagaacugacaaggaaa

SEQ ID NO: 2397945 - RNA, 19 nt, Homo sapiens
  misc_RNA (1)...(19): siRNA sense strand
gaaaagaaagaauggcaaa

SEQ ID NO: 2397946 - RNA, 19 nt, Homo sapiens
  misc_RNA (1)...(19): siRNA sense strand
accaauugaagaagagaaa

SEQ ID NO: 2397947 - RNA, 19 nt, Homo sapiens
  misc_RNA (1)...(19): siRNA sense strand
gcuuagagaacaugaacuu

SEQ ID NO: 2397948 - RNA, 19 nt, Homo sapiens
  misc_RNA (1)...(19): siRNA sense strand
cugaagaggaagagccaga

SEQ ID NO: 2397949 - RNA, 19 nt, Homo sapiens
  misc_RNA (1)...(19): siRNA sense strand
auucauaagccaacugaua

SEQ ID NO: 2397950 - RNA, 19 nt, Homo sapiens
  misc_RNA (1)...(19): siRNA sense strand
cugccaaggacuucaguaa

SEQ ID NO: 2397951 - RNA, 19 nt, Homo sapiens
  misc_RNA (1)...(19): siRNA sense strand
uggaaugggcuuauagaau

SEQ ID NO: 2397952 - RNA, 19 nt, Homo sapiens
  misc_RNA (1)...(19): siRNA sense strand
uuaagaaacccaaggaaca

SEQ ID NO: 2397953 - RNA, 19 nt, Homo sapiens
  misc_RNA (1)...(19): siRNA sense strand
ccuuauaauuaaagacgga

SEQ ID NO: 2397954 - RNA, 19 nt, Homo sapiens
  misc_RNA (1)...(19): siRNA sense strand
ggaaauaaggcugagacaa

SEQ ID NO: 2397955 - RNA, 19 nt, Homo sapiens
  misc_RNA (1)...(19): siRNA sense strand
ucauaagccaacugauaaa

SEQ ID NO: 2397956 - RNA, 19 nt, Homo sapiens
  misc_RNA (1)...(19): siRNA sense strand
ccagaaagugagggugaaa

SEQ ID NO: 2397957 - RNA, 19 nt, Homo sapiens
  misc_RNA (1)...(19): siRNA sense strand
uuacaugacuucaagggaa

SEQ ID NO: 2397958 - RNA, 19 nt, Homo sapiens
  misc_RNA (1)...(19): siRNA sense strand
guaauagguguuugggaau

SEQ ID NO: 2397959 - RNA, 19 nt, Homo sapiens
  misc_RNA (1)...(19): siRNA sense strand
cagaagacccagagaaaug

SEQ ID NO: 2397960 - RNA, 19 nt, Homo sapiens
  misc_RNA (1)...(19): siRNA sense strand
gaguauuccuuuaugucaa

SEQ ID NO: 2397961 - RNA, 19 nt, Homo sapiens
  misc_RNA (1)...(19): siRNA sense strand
ucaauauguuggacaagaa

SEQ ID NO: 2397962 - RNA, 19 nt, Homo sapiens
  misc_RNA (1)...(19): siRNA sense strand
agaagaucaaagugacaaa

SEQ ID NO: 2397963 - RNA, 19 nt, Homo sapiens
  misc_RNA (1)...(19): siRNA sense strand
uggcaaaguacuuaaauga

SEQ ID NO: 2397964 - RNA, 19 nt, Homo sapiens
  misc_RNA (1)...(19): siRNA sense strand
cugcuggaauggaugauaa

SEQ ID NO: 2397965 - RNA, 19 nt, Homo sapiens
  misc_RNA (1)...(19): siRNA sense strand
gacaaggaaaggacaguaa

SEQ ID NO: 2397966 - RNA, 19 nt, Homo sapiens
  misc_RNA (1)...(19): siRNA sense strand
gaagaagaucaaagugaca

SEQ ID NO: 2397967 - RNA, 19 nt, Homo sapiens
  misc_RNA (1)...(19): siRNA sense strand
ugucauagucugcagcaua

SEQ ID NO: 2397968 - RNA, 19 nt, Homo sapiens
  misc_RNA (1)...(19): siRNA sense strand
caaagaaagaagaucauga

SEQ ID NO: 2397969 - RNA, 19 nt, Homo sapiens
  misc_RNA (1)...(19): siRNA sense strand
acagaagaggaaauggaua

SEQ ID NO: 2397970 - RNA, 19 nt, Homo sapiens
  misc_RNA (1)...(19): siRNA sense strand
cugaaguaagacaaggaaa

SEQ ID NO: 2397971 - RNA, 19 nt, Homo sapiens
  misc_RNA (1)...(19): siRNA sense strand
auauugagagggagagcaa

SEQ ID NO: 2397972 - RNA, 19 nt, Homo sapiens
  misc_RNA (1)...(19): siRNA sense strand
aggaggagguggaggcaca

SEQ ID NO: 2397973 - RNA, 19 nt, Homo sapiens
  misc_RNA (1)...(19): siRNA sense strand
uggacgaggccaagaggaa

SEQ ID NO: 2397974 - RNA, 19 nt, Homo sapiens
  misc_RNA (1)...(19): siRNA sense strand
agaagaaggaggaggugga

SEQ ID NO: 2397975 - RNA, 19 nt, Homo sapiens
  misc_RNA (1)...(19): siRNA sense strand
agguggaggcacaggugaa

SEQ ID NO: 2397976 - RNA, 19 nt, Homo sapiens
  misc_RNA (1)...(19): siRNA sense strand
ugaagcagcugcaggagga

SEQ ID NO: 2397977 - RNA, 19 nt, Homo sapiens
  misc_RNA (1)...(19): siRNA sense strand
ggaaagaagucaauagcag

SEQ ID NO: 2397978 - RNA, 19 nt, Homo sapiens
  misc_RNA (1)...(19): siRNA sense strand
uugauaaggaugaggccaa

SEQ ID NO: 2397979 - RNA, 19 nt, Homo sapiens
  misc_RNA (1)...(19): siRNA sense strand
aggaugaggagcaggucaa

SEQ ID NO: 2397980 - RNA, 19 nt, Homo sapiens
  misc_RNA (1)...(19): siRNA sense strand
uggagaacauggaggugga

SEQ ID NO: 2397981 - RNA, 19 nt, Homo sapiens
  misc_RNA (1)...(19): siRNA sense strand
ugggaaaggccagggacua

SEQ ID NO: 2397982 - RNA, 19 nt, Homo sapiens
  misc_RNA (1)...(19): siRNA sense strand
ccacuaugugacuggaaaa

SEQ ID NO: 2397983 - RNA, 19 nt, Homo sapiens
  misc_RNA (1)...(19): siRNA sense strand
uggacagguuaaugaggau

SEQ ID NO: 2397984 - RNA, 19 nt, Homo sapiens
  misc_RNA (1)...(19): siRNA sense strand
uggacuauuuggaagggau

SEQ ID NO: 2397985 - RNA, 19 nt, Homo sapiens
  misc_RNA (1)...(19): siRNA sense strand
cgugugagaagccuggaaa

SEQ ID NO: 2397986 - RNA, 19 nt, Homo sapiens
  misc_RNA (1)...(19): siRNA sense strand
ccucaucagagcaggaaaa

SEQ ID NO: 2397987 - RNA, 19 nt, Homo sapiens
  misc_RNA (1)...(19): siRNA sense strand
ccaagaugcugcugcacga

SEQ ID NO: 2397988 - RNA, 19 nt, Homo sapiens
  misc_RNA (1)...(19): siRNA sense strand
caggaaaaguggaagcuca

SEQ ID NO: 2397989 - RNA, 19 nt, Homo sapiens
  misc_RNA (1)...(19): siRNA sense strand
cugaaggagccgucaagau

SEQ ID NO: 2397990 - RNA, 19 nt, Homo sapiens
  misc_RNA (1)...(19): siRNA sense strand
ggugugaggaggugccuga

SEQ ID NO: 2397991 - RNA, 19 nt, Homo sapiens
  misc_RNA (1)...(19): siRNA sense strand
aggaggugccugaagccua

SEQ ID NO: 2397992 - RNA, 19 nt, Homo sapiens
  misc_RNA (1)...(19): siRNA sense strand
cggccaagaugcugcugca

SEQ ID NO: 2397993 - RNA, 19 nt, Homo sapiens
  misc_RNA (1)...(19): siRNA sense strand
aagaagagccaaagggucu

SEQ ID NO: 2397994 - RNA, 19 nt, Homo sapiens
  misc_RNA (1)...(19): siRNA sense strand
accagaaagaagagccaaa

SEQ ID NO: 2397995 - RNA, 19 nt, Homo sapiens
  misc_RNA (1)...(19): siRNA sense strand
aaacagaaagagcaggcua

SEQ ID NO: 2397996 - RNA, 19 nt, Homo sapiens
  misc_RNA (1)...(19): siRNA sense strand
uggacaugccugaugaaga

SEQ ID NO: 2397997 - RNA, 19 nt, Homo sapiens
  misc_RNA (1)...(19): siRNA sense strand
ccaccagaaagaagagcca

SEQ ID NO: 2397998 - RNA, 19 nt, Homo sapiens
  misc_RNA (1)...(19): siRNA sense strand
aagaagaaaacgcggaaca

SEQ ID NO: 2397999 - RNA, 19 nt, Homo sapiens
  misc_RNA (1)...(19): siRNA sense strand
ggcaaauggaggcgagaag

SEQ ID NO: 2398000 - RNA, 19 nt, Homo sapiens
  misc_RNA (1)...(19): siRNA sense strand
cugcgaagagacagcgaaa

SEQ ID NO: 2398001 - RNA, 19 nt, Homo sapiens
  misc_RNA (1)...(19): siRNA sense strand
ccaagaugacugaggugau

SEQ ID NO: 2398002 - RNA, 19 nt, Homo sapiens
  misc_RNA (1)...(19): siRNA sense strand
gaaagaaaauaaagagcag

SEQ ID NO: 2398003 - RNA, 19 nt, Homo sapiens
  misc_RNA (1)...(19): siRNA sense strand
ggaaaauaucuaugcgaaa

SEQ ID NO: 2398004 - RNA, 19 nt, Homo sapiens
  misc_RNA (1)...(19): siRNA sense strand
ugaagcaagugaagggcaa

SEQ ID NO: 2398005 - RNA, 19 nt, Homo sapiens
  misc_RNA (1)...(19): siRNA sense strand
gggaggaagaagagaagga

SEQ ID NO: 2398006 - RNA, 19 nt, Homo sapiens
  misc_RNA (1)...(19): siRNA sense strand
aagaagagaaggagagcga

SEQ ID NO: 2398007 - RNA, 19 nt, Homo sapiens
  misc_RNA (1)...(19): siRNA sense strand
gcaaugaaguugaaccaca

SEQ ID NO: 2398008 - RNA, 19 nt, Homo sapiens
  misc_RNA (1)...(19): siRNA sense strand
acuagaaagcucagucaaa

SEQ ID NO: 2398009 - RNA, 19 nt, Homo sapiens
  misc_RNA (1)...(19): siRNA sense strand
caguccaaguagaggaaga

SEQ ID NO: 2398010 - RNA, 19 nt, Homo sapiens
  misc_RNA (1)...(19): siRNA sense strand
gcuaaaaguuccagacgau

SEQ ID NO: 2398011 - RNA, 19 nt, Homo sapiens
  misc_RNA (1)...(19): siRNA sense strand
aagaugaagaugaaagcua

SEQ ID NO: 2398012 - RNA, 19 nt, Homo sapiens
  misc_RNA (1)...(19): siRNA sense strand
guuggaagacccugagcaa

SEQ ID NO: 2398013 - RNA, 19 nt, Homo sapiens
  misc_RNA (1)...(19): siRNA sense strand
cccuggaaauggaggaaaa

SEQ ID NO: 2398014 - RNA, 19 nt, Homo sapiens
  misc_RNA (1)...(19): siRNA sense strand
augaagaagaagaggagca

SEQ ID NO: 2398015 - RNA, 19 nt, Homo sapiens
  misc_RNA (1)...(19): siRNA sense strand
auuagcaagucuuaggaaa

SEQ ID NO: 2398016 - RNA, 19 nt, Homo sapiens
  misc_RNA (1)...(19): siRNA sense strand
gaagagaaggagagcgacu

SEQ ID NO: 2398017 - RNA, 19 nt, Homo sapiens
  misc_RNA (1)...(19): siRNA sense strand
aaagcaaggaggaguggaa

SEQ ID NO: 2398018 - RNA, 19 nt, Homo sapiens
  misc_RNA (1)...(19): siRNA sense strand
aaaccagcucacagaaaua

SEQ ID NO: 2398019 - RNA, 19 nt, Homo sapiens
  misc_RNA (1)...(19): siRNA sense strand
accagaagaacuagaacaa

SEQ ID NO: 2398020 - RNA, 19 nt, Homo sapiens
  misc_RNA (1)...(19): siRNA sense strand
augaauauguagagguaac

SEQ ID NO: 2398021 - RNA, 19 nt, Homo sapiens
  misc_RNA (1)...(19): siRNA sense strand
gaggaagaagagaaggaga

SEQ ID NO: 2398022 - RNA, 19 nt, Homo sapiens
  misc_RNA (1)...(19): siRNA sense strand
cggaaaauaucuaugcgaa

SEQ ID NO: 2398023 - RNA, 19 nt, Homo sapiens
  misc_RNA (1)...(19): siRNA sense strand
agcaauaaacagugguaca

SEQ ID NO: 2398024 - RNA, 19 nt, Homo sapiens
  misc_RNA (1)...(19): siRNA sense strand
aagaagaagaggagcaaac

SEQ ID NO: 2398025 - RNA, 19 nt, Homo sapiens
  misc_RNA (1)...(19): siRNA sense strand
aaagaaacgacuaggcuca

SEQ ID NO: 2398026 - RNA, 19 nt, Homo sapiens
  misc_RNA (1)...(19): siRNA sense strand
ccaagugaugaaagagaga

SEQ ID NO: 2398027 - RNA, 19 nt, Homo sapiens
  misc_RNA (1)...(19): siRNA sense strand
ccaagaggauacuggacca

SEQ ID NO: 2398028 - RNA, 19 nt, Homo sapiens
  misc_RNA (1)...(19): siRNA sense strand
ccgagaugaagaagaugaa

SEQ ID NO: 2398029 - RNA, 19 nt, Homo sapiens
  misc_RNA (1)...(19): siRNA sense strand
ccaaguagaggaagagcca

SEQ ID NO: 2398030 - RNA, 19 nt, Homo sapiens
  misc_RNA (1)...(19): siRNA sense strand
ucauauaccuccagagccu

SEQ ID NO: 2398031 - RNA, 19 nt, Homo sapiens
  misc_RNA (1)...(19): siRNA sense strand
gaaauuaaacgucggcuca

SEQ ID NO: 2398032 - RNA, 19 nt, Homo sapiens
  misc_RNA (1)...(19): siRNA sense strand
gaaccagaguugaaccuga

SEQ ID NO: 2398033 - RNA, 19 nt, Homo sapiens
  misc_RNA (1)...(19): siRNA sense strand
aggaaagacacacuggcaa

SEQ ID NO: 2398034 - RNA, 19 nt, Homo sapiens
  misc_RNA (1)...(19): siRNA sense strand
gaugaaagagagaagagca

SEQ ID NO: 2398035 - RNA, 19 nt, Homo sapiens
  misc_RNA (1)...(19): siRNA sense strand
ugaagaagaagaggagcaa

SEQ ID NO: 2398036 - RNA, 19 nt, Homo sapiens
  misc_RNA (1)...(19): siRNA sense strand
agguucaugaagagagcaa

SEQ ID NO: 2398037 - RNA, 19 nt, Homo sapiens
  misc_RNA (1)...(19): siRNA sense strand
cuaaaccagcucacagaaa

SEQ ID NO: 2398038 - RNA, 19 nt, Homo sapiens
  misc_RNA (1)...(19): siRNA sense strand
ccagcaggaagaucagaaa

SEQ ID NO: 2398039 - RNA, 19 nt, Homo sapiens
  misc_RNA (1)...(19): siRNA sense strand
cagacgaugaagaagaaga

SEQ ID NO: 2398040 - RNA, 19 nt, Homo sapiens
  misc_RNA (1)...(19): siRNA sense strand
aaagugaagaggaaagaca

SEQ ID NO: 2398041 - RNA, 19 nt, Homo sapiens
  misc_RNA (1)...(19): siRNA sense strand
uggcaaugaaguugaacca

SEQ ID NO: 2398042 - RNA, 19 nt, Homo sapiens
  misc_RNA (1)...(19): siRNA sense strand
cuaccaaaaggaagagcaa

SEQ ID NO: 2398043 - RNA, 19 nt, Homo sapiens
  misc_RNA (1)...(19): siRNA sense strand
gcaagugaagggcaagcaa

SEQ ID NO: 2398044 - RNA, 19 nt, Homo sapiens
  misc_RNA (1)...(19): siRNA sense strand
gcgaaagccaagagaagag

SEQ ID NO: 2398045 - RNA, 19 nt, Homo sapiens
  misc_RNA (1)...(19): siRNA sense strand
guggugaggauccaggaaa

SEQ ID NO: 2398046 - RNA, 19 nt, Homo sapiens
  misc_RNA (1)...(19): siRNA sense strand
acuagaacaacgcaauaua

SEQ ID NO: 2398047 - RNA, 19 nt, Homo sapiens
  misc_RNA (1)...(19): siRNA sense strand
ucaaguugugccagaaauu

SEQ ID NO: 2398048 - RNA, 19 nt, Homo sapiens
  misc_RNA (1)...(19): siRNA sense strand
cuaaauuaccacagugucu

SEQ ID NO: 2398049 - RNA, 19 nt, Homo sapiens
  misc_RNA (1)...(19): siRNA sense strand
ggacaguguggaagcagga

SEQ ID NO: 2398050 - RNA, 19 nt, Homo sapiens
  misc_RNA (1)...(19): siRNA sense strand
caguaagauuagcaagucu

SEQ ID NO: 2398051 - RNA, 19 nt, Homo sapiens
  misc_RNA (1)...(19): siRNA sense strand
caccaagugaugaaagaga

SEQ ID NO: 2398052 - RNA, 19 nt, Homo sapiens
  misc_RNA (1)...(19): siRNA sense strand
aagaccaacaccagaagaa

SEQ ID NO: 2398053 - RNA, 19 nt, Homo sapiens
  misc_RNA (1)...(19): siRNA sense strand
agaacuagaacaacgcaau

SEQ ID NO: 2398054 - RNA, 19 nt, Homo sapiens
  misc_RNA (1)...(19): siRNA sense strand
caugaagagagcaaacauu

SEQ ID NO: 2398055 - RNA, 19 nt, Homo sapiens
  misc_RNA (1)...(19): siRNA sense strand
aaguagaggaagagccagu

SEQ ID NO: 2398056 - RNA, 19 nt, Homo sapiens
  misc_RNA (1)...(19): siRNA sense strand
agagguaacagaugcucaa

SEQ ID NO: 2398057 - RNA, 19 nt, Homo sapiens
  misc_RNA (1)...(19): siRNA sense strand
gaaagagagaagagcacgu

SEQ ID NO: 2398058 - RNA, 19 nt, Homo sapiens
  misc_RNA (1)...(19): siRNA sense strand
uguuugagccugaagggaa

SEQ ID NO: 2398059 - RNA, 19 nt, Homo sapiens
  misc_RNA (1)...(19): siRNA sense strand
acauacaauaggccagaua

SEQ ID NO: 2398060 - RNA, 19 nt, Homo sapiens
  misc_RNA (1)...(19): siRNA sense strand
uuacggaauuuaaggcaga

SEQ ID NO: 2398061 - RNA, 19 nt, Homo sapiens
  misc_RNA (1)...(19): siRNA sense strand
ccuuaaauugucagccgaa

SEQ ID NO: 2398062 - RNA, 19 nt, Homo sapiens
  misc_RNA (1)...(19): siRNA sense strand
ggacaguaccgcagaggag

SEQ ID NO: 2398063 - RNA, 19 nt, Homo sapiens
  misc_RNA (1)...(19): siRNA sense strand
gcugcauguuugagccuga

SEQ ID NO: 2398064 - RNA, 19 nt, Homo sapiens
  misc_RNA (1)...(19): siRNA sense strand
acgcaggcuuuaagaugau

SEQ ID NO: 2398065 - RNA, 19 nt, Homo sapiens
  misc_RNA (1)...(19): siRNA sense strand
gggacaggaucaaccgguu

SEQ ID NO: 2398066 - RNA, 19 nt, Homo sapiens
  misc_RNA (1)...(19): siRNA sense strand
cuuaaauugucagccgaaa

SEQ ID NO: 2398067 - RNA, 19 nt, Homo sapiens
  misc_RNA (1)...(19): siRNA sense strand
acagaguaccugaaggaaa

SEQ ID NO: 2398068 - RNA, 19 nt, Homo sapiens
  misc_RNA (1)...(19): siRNA sense strand
gguucaacgaagaaggcaa

SEQ ID NO: 2398069 - RNA, 19 nt, Homo sapiens
  misc_RNA (1)...(19): siRNA sense strand
gggaagagggagagcaaac

SEQ ID NO: 2398070 - RNA, 19 nt, Homo sapiens
  misc_RNA (1)...(19): siRNA sense strand
acccuaagacugaaagaaa

SEQ ID NO: 2398071 - RNA, 19 nt, Homo sapiens
  misc_RNA (1)...(19): siRNA sense strand
ugucagaaacuguuggaau

SEQ ID NO: 2398072 - RNA, 19 nt, Homo sapiens
  misc_RNA (1)...(19): siRNA sense strand
agacacaaagccugcgaaa

SEQ ID NO: 2398073 - RNA, 19 nt, Homo sapiens
  misc_RNA (1)...(19): siRNA sense strand
cgaccuucuacaugagaua

SEQ ID NO: 2398074 - RNA, 19 nt, Homo sapiens
  misc_RNA (1)...(19): siRNA sense strand
cugcgaaagugcucgggaa

SEQ ID NO: 2398075 - RNA, 19 nt, Homo sapiens
  misc_RNA (1)...(19): siRNA sense strand
ccauaauacugaacaggca

SEQ ID NO: 2398076 - RNA, 19 nt, Homo sapiens
  misc_RNA (1)...(19): siRNA sense strand
ucgggaagagggagagcaa

SEQ ID NO: 2398077 - RNA, 19 nt, Homo sapiens
  misc_RNA (1)...(19): siRNA sense strand
cccuaagacugaaagaaaa

SEQ ID NO: 2398078 - RNA, 19 nt, Homo sapiens
  misc_RNA (1)...(19): siRNA sense strand
cggaggaaccacugaagca

SEQ ID NO: 2398079 - RNA, 19 nt, Homo sapiens
  misc_RNA (1)...(19): siRNA sense strand
ucucagaucuggauggagu

SEQ ID NO: 2398080 - RNA, 19 nt, Homo sapiens
  misc_RNA (1)...(19): siRNA sense strand
gguaacccuaauaaagaaa

SEQ ID NO: 2398081 - RNA, 19 nt, Homo sapiens
  misc_RNA (1)...(19): siRNA sense strand
acagaaguugcuugagaau

SEQ ID NO: 2398082 - RNA, 19 nt, Homo sapiens
  misc_RNA (1)...(19): siRNA sense strand
gaagaaaaucauuagccua

SEQ ID NO: 2398083 - RNA, 19 nt, Homo sapiens
  misc_RNA (1)...(19): siRNA sense strand
aaucauuagccuaugguca

SEQ ID NO: 2398084 - RNA, 19 nt, Homo sapiens
  misc_RNA (1)...(19): siRNA sense strand
gaauuaauacucuggagga

SEQ ID NO: 2398085 - RNA, 19 nt, Homo sapiens
  misc_RNA (1)...(19): siRNA sense strand
aaauacaaguguugguaac

SEQ ID NO: 2398086 - RNA, 19 nt, Homo sapiens
  misc_RNA (1)...(19): siRNA sense strand
agaucuggauggagugguu

SEQ ID NO: 2398087 - RNA, 19 nt, Homo sapiens
  misc_RNA (1)...(19): siRNA sense strand
gcgaaagugcucgggaaga

SEQ ID NO: 2398088 - RNA, 19 nt, Homo sapiens
  misc_RNA (1)...(19): siRNA sense strand
gugcucgggaagagggaga

SEQ ID NO: 2398089 - RNA, 19 nt, Homo sapiens
  misc_RNA (1)...(19): siRNA sense strand
uagcaagugauaagaacga

SEQ ID NO: 2398090 - RNA, 19 nt, Homo sapiens
  misc_RNA (1)...(19): siRNA sense strand
ggaaaagacacaaagaucu

SEQ ID NO: 2398091 - RNA, 19 nt, Homo sapiens
  misc_RNA (1)...(19): siRNA sense strand
auggaaggauauaguaguu

SEQ ID NO: 2398092 - RNA, 19 nt, Homo sapiens
  misc_RNA (1)...(19): siRNA sense strand
ccugaggucacaaguacaa

SEQ ID NO: 2398093 - RNA, 19 nt, Homo sapiens
  misc_RNA (1)...(19): siRNA sense strand
acauuaaggcccaggggua

SEQ ID NO: 2398094 - RNA, 19 nt, Homo sapiens
  misc_RNA (1)...(19): siRNA sense strand
caggauaagaagauguuca

SEQ ID NO: 2398095 - RNA, 19 nt, Homo sapiens
  misc_RNA (1)...(19): siRNA sense strand
aggauaagaagauguucaa

SEQ ID NO: 2398096 - RNA, 19 nt, Homo sapiens
  misc_RNA (1)...(19): siRNA sense strand
uggucaagcugcuggagga

SEQ ID NO: 2398097 - RNA, 19 nt, Homo sapiens
  misc_RNA (1)...(19): siRNA sense strand
gaaaucaagccuuugguca

SEQ ID NO: 2398098 - RNA, 19 nt, Homo sapiens
  misc_RNA (1)...(19): siRNA sense strand
cuaccugcgcacugggcaa

SEQ ID NO: 2398099 - RNA, 19 nt, Homo sapiens
  misc_RNA (1)...(19): siRNA sense strand
ugguggaaacugaggagca

SEQ ID NO: 2398100 - RNA, 19 nt, Homo sapiens
  misc_RNA (1)...(19): siRNA sense strand
gaggaaagacaaagggaag

SEQ ID NO: 2398101 - RNA, 19 nt, Homo sapiens
  misc_RNA (1)...(19): siRNA sense strand
aaggaagaggaaagacaaa

SEQ ID NO: 2398102 - RNA, 19 nt, Homo sapiens
  misc_RNA (1)...(19): siRNA sense strand
agaggaaagacaaagggaa

SEQ ID NO: 2398103 - RNA, 19 nt, Homo sapiens
  misc_RNA (1)...(19): siRNA sense strand
ccagaaacaaggaagagga

SEQ ID NO: 2398104 - RNA, 19 nt, Homo sapiens
  misc_RNA (1)...(19): siRNA sense strand
acgugaugcgggagaccua

SEQ ID NO: 2398105 - RNA, 19 nt, Homo sapiens
  misc_RNA (1)...(19): siRNA sense strand
gcgggauccgaguggagaa

SEQ ID NO: 2398106 - RNA, 19 nt, Homo sapiens
  misc_RNA (1)...(19): siRNA sense strand
agaaacaaggaagaggaaa

SEQ ID NO: 2398107 - RNA, 19 nt, Homo sapiens
  misc_RNA (1)...(19): siRNA sense strand
aggcaaguucugugacaaa

SEQ ID NO: 2398108 - RNA, 19 nt, Homo sapiens
  misc_RNA (1)...(19): siRNA sense strand
gugacaaagaugaacauau

SEQ ID NO: 2398109 - RNA, 19 nt, Homo sapiens
  misc_RNA (1)...(19): siRNA sense strand
ugacaaagaugaacauauc

SEQ ID NO: 2398110 - RNA, 19 nt, Homo sapiens
  misc_RNA (1)...(19): siRNA sense strand
gaggcaagaggcugggcua

SEQ ID NO: 2398111 - RNA, 19 nt, Homo sapiens
  misc_RNA (1)...(19): siRNA sense strand
gugagguaaauguggauga

SEQ ID NO: 2398112 - RNA, 19 nt, Homo sapiens
  misc_RNA (1)...(19): siRNA sense strand
gcaggcaaguucugugaca

SEQ ID NO: 2398113 - RNA, 19 nt, Homo sapiens
  misc_RNA (1)...(19): siRNA sense strand
guucugugacaaagaugaa

SEQ ID NO: 2398114 - RNA, 19 nt, Homo sapiens
  misc_RNA (1)...(19): siRNA sense strand
gcaaguucugugacaaaga

SEQ ID NO: 2398115 - RNA, 19 nt, Homo sapiens
  misc_RNA (1)...(19): siRNA sense strand
aggcaaguucugugacaaa

SEQ ID NO: 2398116 - RNA, 19 nt, Homo sapiens
  misc_RNA (1)...(19): siRNA sense strand
gugacaaagaugaacauau

SEQ ID NO: 2398117 - RNA, 19 nt, Homo sapiens
  misc_RNA (1)...(19): siRNA sense strand
ugacaaagaugaacauauc

SEQ ID NO: 2398118 - RNA, 19 nt, Homo sapiens
  misc_RNA (1)...(19): siRNA sense strand
gaggcaagaggcugggcua

SEQ ID NO: 2398119 - RNA, 19 nt, Homo sapiens
  misc_RNA (1)...(19): siRNA sense strand
gugagguaaauguggauga

SEQ ID NO: 2398120 - RNA, 19 nt, Homo sapiens
  misc_RNA (1)...(19): siRNA sense strand
gcaggcaaguucugugaca

SEQ ID NO: 2398121 - RNA, 19 nt, Homo sapiens
  misc_RNA (1)...(19): siRNA sense strand
guucugugacaaagaugaa

SEQ ID NO: 2398122 - RNA, 19 nt, Homo sapiens
  misc_RNA (1)...(19): siRNA sense strand
gcaaguucugugacaaaga

SEQ ID NO: 2398123 - RNA, 19 nt, Homo sapiens
  misc_RNA (1)...(19): siRNA sense strand
aaggugagccugagggacu

SEQ ID NO: 2398124 - RNA, 19 nt, Homo sapiens
  misc_RNA (1)...(19): siRNA sense strand
aggaggaggaggagaggaa

SEQ ID NO: 2398125 - RNA, 19 nt, Homo sapiens
  misc_RNA (1)...(19): siRNA sense strand
aggagaaacaagcgcgaaa

SEQ ID NO: 2398126 - RNA, 19 nt, Homo sapiens
  misc_RNA (1)...(19): siRNA sense strand
gagcuaagaaacugcggaa

SEQ ID NO: 2398127 - RNA, 19 nt, Homo sapiens
  misc_RNA (1)...(19): siRNA sense strand
agaccaugacugaggaaca

SEQ ID NO: 2398128 - RNA, 19 nt, Homo sapiens
  misc_RNA (1)...(19): siRNA sense strand
cagaugagaacgaggagga

SEQ ID NO: 2398129 - RNA, 19 nt, Homo sapiens
  misc_RNA (1)...(19): siRNA sense strand
cagaggaggcugaacguga

SEQ ID NO: 2398130 - RNA, 19 nt, Homo sapiens
  misc_RNA (1)...(19): siRNA sense strand
aggaacagucccagagcuu

SEQ ID NO: 2398131 - RNA, 19 nt, Homo sapiens
  misc_RNA (1)...(19): siRNA sense strand
ccuuugugguggaggagga

SEQ ID NO: 2398132 - RNA, 19 nt, Homo sapiens
  misc_RNA (1)...(19): siRNA sense strand
gccuggaggaggagcagaa

SEQ ID NO: 2398133 - RNA, 19 nt, Homo sapiens
  misc_RNA (1)...(19): siRNA sense strand
aggaggaaggcguaggaga

SEQ ID NO: 2398134 - RNA, 19 nt, Homo sapiens
  misc_RNA (1)...(19): siRNA sense strand
aggaggaaggugucgagaa

SEQ ID NO: 2398135 - RNA, 19 nt, Homo sapiens
  misc_RNA (1)...(19): siRNA sense strand
aggaggagcagaaggagga

SEQ ID NO: 2398136 - RNA, 19 nt, Homo sapiens
  misc_RNA (1)...(19): siRNA sense strand
ggggaaaauuggagcuaag

SEQ ID NO: 2398137 - RNA, 19 nt, Homo sapiens
  misc_RNA (1)...(19): siRNA sense strand
aguggaagaaggaggagga

SEQ ID NO: 2398138 - RNA, 19 nt, Homo sapiens
  misc_RNA (1)...(19): siRNA sense strand
agcagaaggaggaggagga

SEQ ID NO: 2398139 - RNA, 19 nt, Homo sapiens
  misc_RNA (1)...(19): siRNA sense strand
ggaggaaggcguaggagag

SEQ ID NO: 2398140 - RNA, 19 nt, Homo sapiens
  misc_RNA (1)...(19): siRNA sense strand
gcggaagcuggaggagaaa

SEQ ID NO: 2398141 - RNA, 19 nt, Homo sapiens
  misc_RNA (1)...(19): siRNA sense strand
uggaggaggagcagaagga

SEQ ID NO: 2398142 - RNA, 19 nt, Homo sapiens
  misc_RNA (1)...(19): siRNA sense strand
cugaacgugaggagcggaa

SEQ ID NO: 2398143 - RNA, 19 nt, Homo sapiens
  misc_RNA (1)...(19): siRNA sense strand
agcgggagcaugaggagua

SEQ ID NO: 2398144 - RNA, 19 nt, Homo sapiens
  misc_RNA (1)...(19): siRNA sense strand
ggauggaggaccagagcca

SEQ ID NO: 2398145 - RNA, 19 nt, Homo sapiens
  misc_RNA (1)...(19): siRNA sense strand
gcaugcggauggaggacca

SEQ ID NO: 2398146 - RNA, 19 nt, Homo sapiens
  misc_RNA (1)...(19): siRNA sense strand
ggugcucauucgggagaaa

SEQ ID NO: 2398147 - RNA, 19 nt, Homo sapiens
  misc_RNA (1)...(19): siRNA sense strand
augaaagaaaugcagguaa

SEQ ID NO: 2398148 - RNA, 19 nt, Homo sapiens
  misc_RNA (1)...(19): siRNA sense strand
cugugguggucguggccaa

SEQ ID NO: 2398149 - RNA, 19 nt, Homo sapiens
  misc_RNA (1)...(19): siRNA sense strand
ucggugacuaugaaagaaa

SEQ ID NO: 2398150 - RNA, 19 nt, Homo sapiens
  misc_RNA (1)...(19): siRNA sense strand
auucagaacaugugcacca

SEQ ID NO: 2398151 - RNA, 19 nt, Homo sapiens
  misc_RNA (1)...(19): siRNA sense strand
aaguucagauagaagguga

SEQ ID NO: 2398152 - RNA, 19 nt, Homo sapiens
  misc_RNA (1)...(19): siRNA sense strand
cauuugagcuguaaggcaa

SEQ ID NO: 2398153 - RNA, 19 nt, Homo sapiens
  misc_RNA (1)...(19): siRNA sense strand
uguuugaggauuagaaaga

SEQ ID NO: 2398154 - RNA, 19 nt, Homo sapiens
  misc_RNA (1)...(19): siRNA sense strand
agaaagaguggaaggagca

SEQ ID NO: 2398155 - RNA, 19 nt, Homo sapiens
  misc_RNA (1)...(19): siRNA sense strand
aggauuagaaagaggaucu

SEQ ID NO: 2398156 - RNA, 19 nt, Homo sapiens
  misc_RNA (1)...(19): siRNA sense strand
agucagcagaggaagcaaa

SEQ ID NO: 2398157 - RNA, 19 nt, Homo sapiens
  misc_RNA (1)...(19): siRNA sense strand
acagacaagaagcuagaaa

SEQ ID NO: 2398158 - RNA, 19 nt, Homo sapiens
  misc_RNA (1)...(19): siRNA sense strand
aggaagcagggcagagaca

SEQ ID NO: 2398159 - RNA, 19 nt, Homo sapiens
  misc_RNA (1)...(19): siRNA sense strand
ggugcaaagacuggaguuu

SEQ ID NO: 2398160 - RNA, 19 nt, Homo sapiens
  misc_RNA (1)...(19): siRNA sense strand
ggaaaagguagaaggugga

SEQ ID NO: 2398161 - RNA, 19 nt, Homo sapiens
  misc_RNA (1)...(19): siRNA sense strand
acugaauggugcaaagacu

SEQ ID NO: 2398162 - RNA, 19 nt, Homo sapiens
  misc_RNA (1)...(19): siRNA sense strand
caccauagcacuaagagga

SEQ ID NO: 2398163 - RNA, 19 nt, Homo sapiens
  misc_RNA (1)...(19): siRNA sense strand
acacagugacacagccaga

SEQ ID NO: 2398164 - RNA, 19 nt, Homo sapiens
  misc_RNA (1)...(19): siRNA sense strand
uccaagaaccccagggcaa

SEQ ID NO: 2398165 - RNA, 19 nt, Homo sapiens
  misc_RNA (1)...(19): siRNA sense strand
agggcaaggcuaagaggca

SEQ ID NO: 2398166 - RNA, 19 nt, Homo sapiens
  misc_RNA (1)...(19): siRNA sense strand
aggauuucuccgaggaaga

SEQ ID NO: 2398167 - RNA, 19 nt, Homo sapiens
  misc_RNA (1)...(19): siRNA sense strand
aggaagagauggaacggcu

SEQ ID NO: 2398168 - RNA, 19 nt, Homo sapiens
  misc_RNA (1)...(19): siRNA sense strand
cugaggauguggagcagca

SEQ ID NO: 2398169 - RNA, 19 nt, Homo sapiens
  misc_RNA (1)...(19): siRNA sense strand
ccugaacguggcauggaaa

SEQ ID NO: 2398170 - RNA, 19 nt, Homo sapiens
  misc_RNA (1)...(19): siRNA sense strand
cggaggcagagguggugaa

SEQ ID NO: 2398171 - RNA, 19 nt, Homo sapiens
  misc_RNA (1)...(19): siRNA sense strand
aggagcaguuggagcggga

SEQ ID NO: 2398172 - RNA, 19 nt, Homo sapiens
  misc_RNA (1)...(19): siRNA sense strand
caagaaagauuaaggagga

SEQ ID NO: 2398173 - RNA, 19 nt, Homo sapiens
  misc_RNA (1)...(19): siRNA sense strand
agauuaaggaggaaggaau

SEQ ID NO: 2398174 - RNA, 19 nt, Homo sapiens
  misc_RNA (1)...(19): siRNA sense strand
aggaggaguuugauggcaa

SEQ ID NO: 2398175 - RNA, 19 nt, Homo sapiens
  misc_RNA (1)...(19): siRNA sense strand
gagaagaaauacagcccuu

SEQ ID NO: 2398176 - RNA, 19 nt, Homo sapiens
  misc_RNA (1)...(19): siRNA sense strand
aggaggagagggugggaga

SEQ ID NO: 2398177 - RNA, 19 nt, Homo sapiens
  misc_RNA (1)...(19): siRNA sense strand
aagaaagauuaaggaggaa

SEQ ID NO: 2398178 - RNA, 19 nt, Homo sapiens
  misc_RNA (1)...(19): siRNA sense strand
ccuugaugcuccuggcaca

SEQ ID NO: 2398179 - RNA, 19 nt, Homo sapiens
  misc_RNA (1)...(19): siRNA sense strand
cuggauaacaggaggaccu

SEQ ID NO: 2398180 - RNA, 19 nt, Homo sapiens
  misc_RNA (1)...(19): siRNA sense strand
gcaccgaacucuaccagca

SEQ ID NO: 2398181 - RNA, 19 nt, Homo sapiens
  misc_RNA (1)...(19): siRNA sense strand
agacaaauucugcaccgaa

SEQ ID NO: 2398182 - RNA, 19 nt, Homo sapiens
  misc_RNA (1)...(19): siRNA sense strand
acgaagaagaggaggagga

SEQ ID NO: 2398183 - RNA, 19 nt, Homo sapiens
  misc_RNA (1)...(19): siRNA sense strand
ccgacgaagaagaggagga

SEQ ID NO: 2398184 - RNA, 19 nt, Homo sapiens
  misc_RNA (1)...(19): siRNA sense strand
uggaguugaaggaggaaga

SEQ ID NO: 2398185 - RNA, 19 nt, Homo sapiens
  misc_RNA (1)...(19): siRNA sense strand
aggaagaggacguguuagu

SEQ ID NO: 2398186 - RNA, 19 nt, Homo sapiens
  misc_RNA (1)...(19): siRNA sense strand
gagcgaaaccgcaugcaca

SEQ ID NO: 2398187 - RNA, 19 nt, Homo sapiens
  misc_RNA (1)...(19): siRNA sense strand
ugaaggaggaagaggacgu

SEQ ID NO: 2398188 - RNA, 19 nt, Homo sapiens
  misc_RNA (1)...(19): siRNA sense strand
aguugaaggaggaagagga

SEQ ID NO: 2398189 - RNA, 19 nt, Homo sapiens
  misc_RNA (1)...(19): siRNA sense strand
ucgucaaauccgagaccuu

SEQ ID NO: 2398190 - RNA, 19 nt, Homo sapiens
  misc_RNA (1)...(19): siRNA sense strand
ucaccaagaucgagacccu

SEQ ID NO: 2398191 - RNA, 19 nt, Homo sapiens
  misc_RNA (1)...(19): siRNA sense strand
ccauaaauccugagggaga

SEQ ID NO: 2398192 - RNA, 19 nt, Homo sapiens
  misc_RNA (1)...(19): siRNA sense strand
gaaaauaucaagcggggaa

SEQ ID NO: 2398193 - RNA, 19 nt, Homo sapiens
  misc_RNA (1)...(19): siRNA sense strand
gggcaugggaucaggagga

SEQ ID NO: 2398194 - RNA, 19 nt, Homo sapiens
  misc_RNA (1)...(19): siRNA sense strand
aggccaugauugagaagau

SEQ ID NO: 2398195 - RNA, 19 nt, Homo sapiens
  misc_RNA (1)...(19): siRNA sense strand
caccauaaauccugaggga

SEQ ID NO: 2398196 - RNA, 19 nt, Homo sapiens
  misc_RNA (1)...(19): siRNA sense strand
uugagaagauccugagcga

SEQ ID NO: 2398197 - RNA, 19 nt, Homo sapiens
  misc_RNA (1)...(19): siRNA sense strand
gggaaaugacuuugccugu

SEQ ID NO: 2398198 - RNA, 19 nt, Homo sapiens
  misc_RNA (1)...(19): siRNA sense strand
cccaggaagccuugcagaa

SEQ ID NO: 2398199 - RNA, 19 nt, Homo sapiens
  misc_RNA (1)...(19): siRNA sense strand
gggaaaugccaagcggaga

SEQ ID NO: 2398200 - RNA, 19 nt, Homo sapiens
  misc_RNA (1)...(19): siRNA sense strand
ucaagaaagucaaagacca

SEQ ID NO: 2398201 - RNA, 19 nt, Homo sapiens
  misc_RNA (1)...(19): siRNA sense strand
gguaacuggcuuugggcuu

SEQ ID NO: 2398202 - RNA, 19 nt, Homo sapiens
  misc_RNA (1)...(19): siRNA sense strand
cggaguagcucaaggucuc

SEQ ID NO: 2398203 - RNA, 19 nt, Homo sapiens
  misc_RNA (1)...(19): siRNA sense strand
gagggaagauccuggugca

SEQ ID NO: 2398204 - RNA, 19 nt, Homo sapiens
  misc_RNA (1)...(19): siRNA sense strand
ugaaggaggagaagcgcua

SEQ ID NO: 2398205 - RNA, 19 nt, Homo sapiens
  misc_RNA (1)...(19): siRNA sense strand
uggcucuaaaggugagaaa

SEQ ID NO: 2398206 - RNA, 19 nt, Homo sapiens
  misc_RNA (1)...(19): siRNA sense strand
gugaguuugacaaggagaa

SEQ ID NO: 2398207 - RNA, 19 nt, Homo sapiens
  misc_RNA (1)...(19): siRNA sense strand
cuaaaggugagaaaggaga

SEQ ID NO: 2398208 - RNA, 19 nt, Homo sapiens
  misc_RNA (1)...(19): siRNA sense strand
ccaacaaugccuacgacga

SEQ ID NO: 2398209 - RNA, 19 nt, Homo sapiens
  misc_RNA (1)...(19): siRNA sense strand
aguuugacaaggagaacau

SEQ ID NO: 2398210 - RNA, 19 nt, Homo sapiens
  misc_RNA (1)...(19): siRNA sense strand
acagaaaggcagugugggu

SEQ ID NO: 2398211 - RNA, 19 nt, Homo sapiens
  misc_RNA (1)...(19): siRNA sense strand
cgggagagaagggagacaa

SEQ ID NO: 2398212 - RNA, 19 nt, Homo sapiens
  misc_RNA (1)...(19): siRNA sense strand
gacaaaggacagaaaggca

SEQ ID NO: 2398213 - RNA, 19 nt, Homo sapiens
  misc_RNA (1)...(19): siRNA sense strand
agaaaggagauuccgguga

SEQ ID NO: 2398214 - RNA, 19 nt, Homo sapiens
  misc_RNA (1)...(19): siRNA sense strand
ugaaggaggagaagcgcua

SEQ ID NO: 2398215 - RNA, 19 nt, Homo sapiens
  misc_RNA (1)...(19): siRNA sense strand
uggcucuaaaggugagaaa

SEQ ID NO: 2398216 - RNA, 19 nt, Homo sapiens
  misc_RNA (1)...(19): siRNA sense strand
gugaguuugacaaggagaa

SEQ ID NO: 2398217 - RNA, 19 nt, Homo sapiens
  misc_RNA (1)...(19): siRNA sense strand
cuaaaggugagaaaggaga

SEQ ID NO: 2398218 - RNA, 19 nt, Homo sapiens
  misc_RNA (1)...(19): siRNA sense strand
ccaacaaugccuacgacga

SEQ ID NO: 2398219 - RNA, 19 nt, Homo sapiens
  misc_RNA (1)...(19): siRNA sense strand
aguuugacaaggagaacau

SEQ ID NO: 2398220 - RNA, 19 nt, Homo sapiens
  misc_RNA (1)...(19): siRNA sense strand
acagaaaggcagugugggu

SEQ ID NO: 2398221 - RNA, 19 nt, Homo sapiens
  misc_RNA (1)...(19): siRNA sense strand
cgggagagaagggagacaa

SEQ ID NO: 2398222 - RNA, 19 nt, Homo sapiens
  misc_RNA (1)...(19): siRNA sense strand
gacaaaggacagaaaggca

SEQ ID NO: 2398223 - RNA, 19 nt, Homo sapiens
  misc_RNA (1)...(19): siRNA sense strand
agaaaggagauuccgguga

SEQ ID NO: 2398224 - RNA, 19 nt, Homo sapiens
  misc_RNA (1)...(19): siRNA sense strand
aggaagaggaugugcugaa

SEQ ID NO: 2398225 - RNA, 19 nt, Homo sapiens
  misc_RNA (1)...(19): siRNA sense strand
cugaggaggaggaggaaga

SEQ ID NO: 2398226 - RNA, 19 nt, Homo sapiens
  misc_RNA (1)...(19): siRNA sense strand
aggaggaggaagaggaugu

SEQ ID NO: 2398227 - RNA, 19 nt, Homo sapiens
  misc_RNA (1)...(19): siRNA sense strand
cugaaauacguccgggaga

SEQ ID NO: 2398228 - RNA, 19 nt, Homo sapiens
  misc_RNA (1)...(19): siRNA sense strand
ugggagcagcagugaggaa

SEQ ID NO: 2398229 - RNA, 19 nt, Homo sapiens
  misc_RNA (1)...(19): siRNA sense strand
ggacagugggaaacaggca

SEQ ID NO: 2398230 - RNA, 19 nt, Homo sapiens
  misc_RNA (1)...(19): siRNA sense strand
aggaggaggaggaagagga

SEQ ID NO: 2398231 - RNA, 19 nt, Homo sapiens
  misc_RNA (1)...(19): siRNA sense strand
acauagaaucggugaaaca

SEQ ID NO: 2398232 - RNA, 19 nt, Homo sapiens
  misc_RNA (1)...(19): siRNA sense strand
cuaucagaguauggagaaa

SEQ ID NO: 2398233 - RNA, 19 nt, Homo sapiens
  misc_RNA (1)...(19): siRNA sense strand
cuggagaaagaaaggcuaa

SEQ ID NO: 2398234 - RNA, 19 nt, Homo sapiens
  misc_RNA (1)...(19): siRNA sense strand
aaagaaaggugucugccaa

SEQ ID NO: 2398235 - RNA, 19 nt, Homo sapiens
  misc_RNA (1)...(19): siRNA sense strand
aagaaaggugucugccaaa

SEQ ID NO: 2398236 - RNA, 19 nt, Homo sapiens
  misc_RNA (1)...(19): siRNA sense strand
ucucaaggccagcggguca

SEQ ID NO: 2398237 - RNA, 19 nt, Homo sapiens
  misc_RNA (1)...(19): siRNA sense strand
gaaacaaagccguagucca

SEQ ID NO: 2398238 - RNA, 19 nt, Homo sapiens
  misc_RNA (1)...(19): siRNA sense strand
aacaaagaguccaagaaaa

SEQ ID NO: 2398239 - RNA, 19 nt, Homo sapiens
  misc_RNA (1)...(19): siRNA sense strand
cccaggacucugaagguaa

SEQ ID NO: 2398240 - RNA, 19 nt, Homo sapiens
  misc_RNA (1)...(19): siRNA sense strand
gggacaaugaaaagaauga

SEQ ID NO: 2398241 - RNA, 19 nt, Homo sapiens
  misc_RNA (1)...(19): siRNA sense strand
agaucaacaaagaguccaa

SEQ ID NO: 2398242 - RNA, 19 nt, Homo sapiens
  misc_RNA (1)...(19): siRNA sense strand
auagaaucggugaaacaaa

SEQ ID NO: 2398243 - RNA, 19 nt, Homo sapiens
  misc_RNA (1)...(19): siRNA sense strand
gcacacgauugcauggcau

SEQ ID NO: 2398244 - RNA, 19 nt, Homo sapiens
  misc_RNA (1)...(19): siRNA sense strand
guaaccaauaacuggaauu

SEQ ID NO: 2398245 - RNA, 19 nt, Homo sapiens
  misc_RNA (1)...(19): siRNA sense strand
aggaaagacaaauggcagu

SEQ ID NO: 2398246 - RNA, 19 nt, Homo sapiens
  misc_RNA (1)...(19): siRNA sense strand
ccuucaaacauacagggaa

SEQ ID NO: 2398247 - RNA, 19 nt, Homo sapiens
  misc_RNA (1)...(19): siRNA sense strand
gaaagaaaggugucugcca

SEQ ID NO: 2398248 - RNA, 19 nt, Homo sapiens
  misc_RNA (1)...(19): siRNA sense strand
ccacaacacuagagcuccu

SEQ ID NO: 2398249 - RNA, 19 nt, Homo sapiens
  misc_RNA (1)...(19): siRNA sense strand
gggaauggcuucaugaguc

SEQ ID NO: 2398250 - RNA, 19 nt, Homo sapiens
  misc_RNA (1)...(19): siRNA sense strand
gcgcugaagaggcggaaag

SEQ ID NO: 2398251 - RNA, 19 nt, Homo sapiens
  misc_RNA (1)...(19): siRNA sense strand
ggaagauggaggaggagca

SEQ ID NO: 2398252 - RNA, 19 nt, Homo sapiens
  misc_RNA (1)...(19): siRNA sense strand
ccaagaagcagaagacgga

SEQ ID NO: 2398253 - RNA, 19 nt, Homo sapiens
  misc_RNA (1)...(19): siRNA sense strand
cacuuagcuucgugggcaa

SEQ ID NO: 2398254 - RNA, 19 nt, Homo sapiens
  misc_RNA (1)...(19): siRNA sense strand
aguacauggcagaagugaa

SEQ ID NO: 2398255 - RNA, 19 nt, Homo sapiens
  misc_RNA (1)...(19): siRNA sense strand
gaagauaaauguaaggaga

SEQ ID NO: 2398256 - RNA, 19 nt, Homo sapiens
  misc_RNA (1)...(19): siRNA sense strand
ugaagaagcuggauggcau

SEQ ID NO: 2398257 - RNA, 19 nt, Homo sapiens
  misc_RNA (1)...(19): siRNA sense strand
cagaauuagaagagcaaaa

SEQ ID NO: 2398258 - RNA, 19 nt, Homo sapiens
  misc_RNA (1)...(19): siRNA sense strand
uggcagagaucaugggacu

SEQ ID NO: 2398259 - RNA, 19 nt, Homo sapiens
  misc_RNA (1)...(19): siRNA sense strand
aggagaaguacaagacuga

SEQ ID NO: 2398260 - RNA, 19 nt, Homo sapiens
  misc_RNA (1)...(19): siRNA sense strand
aguuacaggagaaguacaa

SEQ ID NO: 2398261 - RNA, 19 nt, Homo sapiens
  misc_RNA (1)...(19): siRNA sense strand
gcuucauaauguuggcaga

SEQ ID NO: 2398262 - RNA, 19 nt, Homo sapiens
  misc_RNA (1)...(19): siRNA sense strand
ucgcaaaugcacagagaag

SEQ ID NO: 2398263 - RNA, 19 nt, Homo sapiens
  misc_RNA (1)...(19): siRNA sense strand
uugcagaauuagaagagca

SEQ ID NO: 2398264 - RNA, 19 nt, Homo sapiens
  misc_RNA (1)...(19): siRNA sense strand
uuagagacaauguggaaaa

SEQ ID NO: 2398265 - RNA, 19 nt, Homo sapiens
  misc_RNA (1)...(19): siRNA sense strand
ccacaaacgugcaugcuuc

SEQ ID NO: 2398266 - RNA, 19 nt, Homo sapiens
  misc_RNA (1)...(19): siRNA sense strand
ccuuauagugaggaagauu

SEQ ID NO: 2398267 - RNA, 19 nt, Homo sapiens
  misc_RNA (1)...(19): siRNA sense strand
ugcagaauuagaagagcaa

SEQ ID NO: 2398268 - RNA, 19 nt, Homo sapiens
  misc_RNA (1)...(19): siRNA sense strand
acuagugauuuuagggaga

SEQ ID NO: 2398269 - RNA, 19 nt, Homo sapiens
  misc_RNA (1)...(19): siRNA sense strand
aacaguuacaggagaagua

SEQ ID NO: 2398270 - RNA, 19 nt, Homo sapiens
  misc_RNA (1)...(19): siRNA sense strand
ccgaaaugcucaaagaaga

SEQ ID NO: 2398271 - RNA, 19 nt, Homo sapiens
  misc_RNA (1)...(19): siRNA sense strand
agaugcugguagagggaaa

SEQ ID NO: 2398272 - RNA, 19 nt, Homo sapiens
  misc_RNA (1)...(19): siRNA sense strand
cugagaugauggaggccua

SEQ ID NO: 2398273 - RNA, 19 nt, Homo sapiens
  misc_RNA (1)...(19): siRNA sense strand
ugguagagggaaaggaaga

SEQ ID NO: 2398274 - RNA, 19 nt, Homo sapiens
  misc_RNA (1)...(19): siRNA sense strand
cccaaaaggaugagcugaa

SEQ ID NO: 2398275 - RNA, 19 nt, Homo sapiens
  misc_RNA (1)...(19): siRNA sense strand
acuucgauauggaggcuuu

SEQ ID NO: 2398276 - RNA, 19 nt, Homo sapiens
  misc_RNA (1)...(19): siRNA sense strand
gcccaucagaggagaacuu

SEQ ID NO: 2398277 - RNA, 19 nt, Homo sapiens
  misc_RNA (1)...(19): siRNA sense strand
gggacaugaugcagaagcu

SEQ ID NO: 2398278 - RNA, 19 nt, Homo sapiens
  misc_RNA (1)...(19): siRNA sense strand
agaaguacaugauggugga

SEQ ID NO: 2398279 - RNA, 19 nt, Homo sapiens
  misc_RNA (1)...(19): siRNA sense strand
gcgcugaggaggagcuucu

SEQ ID NO: 2398280 - RNA, 19 nt, Homo sapiens
  misc_RNA (1)...(19): siRNA sense strand
caacuggcgcugaggagga

SEQ ID NO: 2398281 - RNA, 19 nt, Homo sapiens
  misc_RNA (1)...(19): siRNA sense strand
gcagaugcugguagaggga

SEQ ID NO: 2398282 - RNA, 19 nt, Homo sapiens
  misc_RNA (1)...(19): siRNA sense strand
gggaagaucaguagggaac

SEQ ID NO: 2398283 - RNA, 19 nt, Homo sapiens
  misc_RNA (1)...(19): siRNA sense strand
gggaagaaaccaaagcuga

SEQ ID NO: 2398284 - RNA, 19 nt, Homo sapiens
  misc_RNA (1)...(19): siRNA sense strand
uggacgaggucgaugggua

SEQ ID NO: 2398285 - RNA, 19 nt, Homo sapiens
  misc_RNA (1)...(19): siRNA sense strand
gaaugaauugagaagggaa

SEQ ID NO: 2398286 - RNA, 19 nt, Homo sapiens
  misc_RNA (1)...(19): siRNA sense strand
ggaaaggaaagaaagcaga

SEQ ID NO: 2398287 - RNA, 19 nt, Homo sapiens
  misc_RNA (1)...(19): siRNA sense strand
ggcaagaagcagccgggaa

SEQ ID NO: 2398288 - RNA, 19 nt, Homo sapiens
  misc_RNA (1)...(19): siRNA sense strand
ugagaagggaagaaaccaa

SEQ ID NO: 2398289 - RNA, 19 nt, Homo sapiens
  misc_RNA (1)...(19): siRNA sense strand
ggguaaaagaugaaaaugu

SEQ ID NO: 2398290 - RNA, 19 nt, Homo sapiens
  misc_RNA (1)...(19): siRNA sense strand
guuacauuccagaggauga

SEQ ID NO: 2398291 - RNA, 19 nt, Homo sapiens
  misc_RNA (1)...(19): siRNA sense strand
ugggaagaucaguagggaa

SEQ ID NO: 2398292 - RNA, 19 nt, Homo sapiens
  misc_RNA (1)...(19): siRNA sense strand
gggaaaggaaagaaagcag

SEQ ID NO: 2398293 - RNA, 19 nt, Homo sapiens
  misc_RNA (1)...(19): siRNA sense strand
cuuucaagagggaaggaga

SEQ ID NO: 2398294 - RNA, 19 nt, Homo sapiens
  misc_RNA (1)...(19): siRNA sense strand
ggaaggagacgauuggagu

SEQ ID NO: 2398295 - RNA, 19 nt, Homo sapiens
  misc_RNA (1)...(19): siRNA sense strand
caguuacauuccagaggau

SEQ ID NO: 2398296 - RNA, 19 nt, Homo sapiens
  misc_RNA (1)...(19): siRNA sense strand
cuccaaagugggaagauca

SEQ ID NO: 2398297 - RNA, 19 nt, Homo sapiens
  misc_RNA (1)...(19): siRNA sense strand
ccaaaacaucagaaugaau

SEQ ID NO: 2398298 - RNA, 19 nt, Homo sapiens
  misc_RNA (1)...(19): siRNA sense strand
ggacaagggcugagcagag

SEQ ID NO: 2398299 - RNA, 19 nt, Homo sapiens
  misc_RNA (1)...(19): siRNA sense strand
agguggaagaagaugauua

SEQ ID NO: 2398300 - RNA, 19 nt, Homo sapiens
  misc_RNA (1)...(19): siRNA sense strand
acagauaugauuugggaca

SEQ ID NO: 2398301 - RNA, 19 nt, Homo sapiens
  misc_RNA (1)...(19): siRNA sense strand
ggaagaaggcuguccgagu

SEQ ID NO: 2398302 - RNA, 19 nt, Homo sapiens
  misc_RNA (1)...(19): siRNA sense strand
acugaggaguuuugugaaa

SEQ ID NO: 2398303 - RNA, 19 nt, Homo sapiens
  misc_RNA (1)...(19): siRNA sense strand
gcaagauccuggcugguga

SEQ ID NO: 2398304 - RNA, 19 nt, Homo sapiens
  misc_RNA (1)...(19): siRNA sense strand
ggacaagacgacaggcaag

SEQ ID NO: 2398305 - RNA, 19 nt, Homo sapiens
  misc_RNA (1)...(19): siRNA sense strand
ccaagaacgagauaggcau

SEQ ID NO: 2398306 - RNA, 19 nt, Homo sapiens
  misc_RNA (1)...(19): siRNA sense strand
ucacaaggcugauggaggu

SEQ ID NO: 2398307 - RNA, 19 nt, Homo sapiens
  misc_RNA (1)...(19): siRNA sense strand
aggacaagacgacaggcaa

SEQ ID NO: 2398308 - RNA, 19 nt, Homo sapiens
  misc_RNA (1)...(19): siRNA sense strand
acuacaaccggcugaagaa

SEQ ID NO: 2398309 - RNA, 19 nt, Homo sapiens
  misc_RNA (1)...(19): siRNA sense strand
cggcugaagaacucgaaga

SEQ ID NO: 2398310 - RNA, 19 nt, Homo sapiens
  misc_RNA (1)...(19): siRNA sense strand
cgugcugcaaagagugaua

SEQ ID NO: 2398311 - RNA, 19 nt, Homo sapiens
  misc_RNA (1)...(19): siRNA sense strand
gggaagaggcugcugguug

SEQ ID NO: 2398312 - RNA, 19 nt, Homo sapiens
  misc_RNA (1)...(19): siRNA sense strand
gccacugacaggagcgcua

SEQ ID NO: 2398313 - RNA, 19 nt, Homo sapiens
  misc_RNA (1)...(19): siRNA sense strand
gugacuuccaucuggcuaa

SEQ ID NO: 2398314 - RNA, 19 nt, Homo sapiens
  misc_RNA (1)...(19): siRNA sense strand
ggcgacaagaagaacuaua

SEQ ID NO: 2398315 - RNA, 19 nt, Homo sapiens
  misc_RNA (1)...(19): siRNA sense strand
aggagguggaagaagauga

SEQ ID NO: 2398316 - RNA, 19 nt, Homo sapiens
  misc_RNA (1)...(19): siRNA sense strand
caaacauccuccugcgcua

SEQ ID NO: 2398317 - RNA, 19 nt, Homo sapiens
  misc_RNA (1)...(19): siRNA sense strand
aaguggagcuggaaggcga

SEQ ID NO: 2398318 - RNA, 19 nt, Homo sapiens
  misc_RNA (1)...(19): siRNA sense strand
cugcaucagcaaugggaca

SEQ ID NO: 2398319 - RNA, 19 nt, Homo sapiens
  misc_RNA (1)...(19): siRNA sense strand
agaagagagaccaggagca

SEQ ID NO: 2398320 - RNA, 19 nt, Homo sapiens
  misc_RNA (1)...(19): siRNA sense strand
cgaaguuaucugaugacaa

SEQ ID NO: 2398321 - RNA, 19 nt, Homo sapiens
  misc_RNA (1)...(19): siRNA sense strand
guuaaaagcaauagaacca

SEQ ID NO: 2398322 - RNA, 19 nt, Homo sapiens
  misc_RNA (1)...(19): siRNA sense strand
gugcaaaagaaaaugguuu

SEQ ID NO: 2398323 - RNA, 19 nt, Homo sapiens
  misc_RNA (1)...(19): siRNA sense strand
uugcaacucaagaaggaaa

SEQ ID NO: 2398324 - RNA, 19 nt, Homo sapiens
  misc_RNA (1)...(19): siRNA sense strand
aacuuggcauggagggaua

SEQ ID NO: 2398325 - RNA, 19 nt, Homo sapiens
  misc_RNA (1)...(19): siRNA sense strand
cugaugacaaauuacgaaa

SEQ ID NO: 2398326 - RNA, 19 nt, Homo sapiens
  misc_RNA (1)...(19): siRNA sense strand
acucaagaaggaaaagaaa

SEQ ID NO: 2398327 - RNA, 19 nt, Homo sapiens
  misc_RNA (1)...(19): siRNA sense strand
guggaauguauguuguaau

SEQ ID NO: 2398328 - RNA, 19 nt, Homo sapiens
  misc_RNA (1)...(19): siRNA sense strand
guggaaggcuuuagggcca

SEQ ID NO: 2398329 - RNA, 19 nt, Homo sapiens
  misc_RNA (1)...(19): siRNA sense strand
ccuccgagcugaaggucca

SEQ ID NO: 2398330 - RNA, 19 nt, Homo sapiens
  misc_RNA (1)...(19): siRNA sense strand
caacagaaauuaaggucga

SEQ ID NO: 2398331 - RNA, 19 nt, Homo sapiens
  misc_RNA (1)...(19): siRNA sense strand
cagaacaagcagagcaaga

SEQ ID NO: 2398332 - RNA, 19 nt, Homo sapiens
  misc_RNA (1)...(19): siRNA sense strand
ugguagauguaguugcaaa

SEQ ID NO: 2398333 - RNA, 19 nt, Homo sapiens
  misc_RNA (1)...(19): siRNA sense strand
gcagcaaauugaaggcaga

SEQ ID NO: 2398334 - RNA, 19 nt, Homo sapiens
  misc_RNA (1)...(19): siRNA sense strand
agaaaguagaagcuggaaa

SEQ ID NO: 2398335 - RNA, 19 nt, Homo sapiens
  misc_RNA (1)...(19): siRNA sense strand
caaccaagugagagugaau

SEQ ID NO: 2398336 - RNA, 19 nt, Homo sapiens
  misc_RNA (1)...(19): siRNA sense strand
gguagauguaguugcaaau

SEQ ID NO: 2398337 - RNA, 19 nt, Homo sapiens
  misc_RNA (1)...(19): siRNA sense strand
gaauuaaugugguaccaga

SEQ ID NO: 2398338 - RNA, 19 nt, Homo sapiens
  misc_RNA (1)...(19): siRNA sense strand
gagacauaguagcagucaa

SEQ ID NO: 2398339 - RNA, 19 nt, Homo sapiens
  misc_RNA (1)...(19): siRNA sense strand
cuguguuaauuaagcgaau

SEQ ID NO: 2398340 - RNA, 19 nt, Homo sapiens
  misc_RNA (1)...(19): siRNA sense strand
gcagaaaguagaagcugga

SEQ ID NO: 2398341 - RNA, 19 nt, Homo sapiens
  misc_RNA (1)...(19): siRNA sense strand
gcuucaaccaagugagagu

SEQ ID NO: 2398342 - RNA, 19 nt, Homo sapiens
  misc_RNA (1)...(19): siRNA sense strand
cugcaaacaaccagggugu

SEQ ID NO: 2398343 - RNA, 19 nt, Homo sapiens
  misc_RNA (1)...(19): siRNA sense strand
cuggaaaaguagcuauuaa

SEQ ID NO: 2398344 - RNA, 19 nt, Homo sapiens
  misc_RNA (1)...(19): siRNA sense strand
ugaccagaguugaccgaga

SEQ ID NO: 2398345 - RNA, 19 nt, Homo sapiens
  misc_RNA (1)...(19): siRNA sense strand
uagccaaggaacugaucaa

SEQ ID NO: 2398346 - RNA, 19 nt, Homo sapiens
  misc_RNA (1)...(19): siRNA sense strand
cagcagaaaaccuggaaga

SEQ ID NO: 2398347 - RNA, 19 nt, Homo sapiens
  misc_RNA (1)...(19): siRNA sense strand
cacagaacaagcagagcaa

SEQ ID NO: 2398348 - RNA, 19 nt, Homo sapiens
  misc_RNA (1)...(19): siRNA sense strand
uggcauagaagguggugca

SEQ ID NO: 2398349 - RNA, 19 nt, Homo sapiens
  misc_RNA (1)...(19): siRNA sense strand
cagaguugaccgagaaaau

SEQ ID NO: 2398350 - RNA, 19 nt, Homo sapiens
  misc_RNA (1)...(19): siRNA sense strand
ucucauuuacagagcacua

SEQ ID NO: 2398351 - RNA, 19 nt, Homo sapiens
  misc_RNA (1)...(19): siRNA sense strand
ggaccuggggagagagaga

SEQ ID NO: 2398352 - RNA, 19 nt, Homo sapiens
  misc_RNA (1)...(19): siRNA sense strand
auacagauaccuuaggaga

SEQ ID NO: 2398353 - RNA, 19 nt, Homo sapiens
  misc_RNA (1)...(19): siRNA sense strand
uggucauacuugggugaaa

SEQ ID NO: 2398354 - RNA, 19 nt, Homo sapiens
  misc_RNA (1)...(19): siRNA sense strand
uuaugaaggacaaggaguu

SEQ ID NO: 2398355 - RNA, 19 nt, Homo sapiens
  misc_RNA (1)...(19): siRNA sense strand
gaugugugcaaaagaguaa

SEQ ID NO: 2398356 - RNA, 19 nt, Homo sapiens
  misc_RNA (1)...(19): siRNA sense strand
cuaacacaccugagagcca

SEQ ID NO: 2398357 - RNA, 19 nt, Homo sapiens
  misc_RNA (1)...(19): siRNA sense strand
agcaaacccuugugguaga

SEQ ID NO: 2398358 - RNA, 19 nt, Homo sapiens
  misc_RNA (1)...(19): siRNA sense strand
gggcauaucugugagagga

SEQ ID NO: 2398359 - RNA, 19 nt, Homo sapiens
  misc_RNA (1)...(19): siRNA sense strand
ugaugagggcccugaacuu

SEQ ID NO: 2398360 - RNA, 19 nt, Homo sapiens
  misc_RNA (1)...(19): siRNA sense strand
cgagaaaauauacuagcaa

SEQ ID NO: 2398361 - RNA, 19 nt, Homo sapiens
  misc_RNA (1)...(19): siRNA sense strand
cugugaacgaaucgccaua

SEQ ID NO: 2398362 - RNA, 19 nt, Homo sapiens
  misc_RNA (1)...(19): siRNA sense strand
uacagauaccuuaggagaa

SEQ ID NO: 2398363 - RNA, 19 nt, Homo sapiens
  misc_RNA (1)...(19): siRNA sense strand
gaggagacauaguagcagu

SEQ ID NO: 2398364 - RNA, 19 nt, Homo sapiens
  misc_RNA (1)...(19): siRNA sense strand
cuacauuccaacagagcaa

SEQ ID NO: 2398365 - RNA, 19 nt, Homo sapiens
  misc_RNA (1)...(19): siRNA sense strand
cugagauccuggugcacaa

SEQ ID NO: 2398366 - RNA, 19 nt, Homo sapiens
  misc_RNA (1)...(19): siRNA sense strand
uguggauuguggaggaaau

SEQ ID NO: 2398367 - RNA, 19 nt, Homo sapiens
  misc_RNA (1)...(19): siRNA sense strand
cugaacgagagcaggaaga

SEQ ID NO: 2398368 - RNA, 19 nt, Homo sapiens
  misc_RNA (1)...(19): siRNA sense strand
cuauguggauuguggagga

SEQ ID NO: 2398369 - RNA, 19 nt, Homo sapiens
  misc_RNA (1)...(19): siRNA sense strand
aggaagaagccauugcuca

SEQ ID NO: 2398370 - RNA, 19 nt, Homo sapiens
  misc_RNA (1)...(19): siRNA sense strand
guaaaugaguugguggcuu

SEQ ID NO: 2398371 - RNA, 19 nt, Homo sapiens
  misc_RNA (1)...(19): siRNA sense strand
cggcaucaaaguggugaaa

SEQ ID NO: 2398372 - RNA, 19 nt, Homo sapiens
  misc_RNA (1)...(19): siRNA sense strand
cuucaaaguuggagccguu

SEQ ID NO: 2398373 - RNA, 19 nt, Homo sapiens
  misc_RNA (1)...(19): siRNA sense strand
aagcagacguugaaggcau

SEQ ID NO: 2398374 - RNA, 19 nt, Homo sapiens
  misc_RNA (1)...(19): siRNA sense strand
gagucaggguugauggcau

SEQ ID NO: 2398375 - RNA, 19 nt, Homo sapiens
  misc_RNA (1)...(19): siRNA sense strand
agaaauugcaagugugagu

SEQ ID NO: 2398376 - RNA, 19 nt, Homo sapiens
  misc_RNA (1)...(19): siRNA sense strand
guauaaaacacuucgaaca

SEQ ID NO: 2398377 - RNA, 19 nt, Homo sapiens
  misc_RNA (1)...(19): siRNA sense strand
agcuaaugguugcagagaa

SEQ ID NO: 2398378 - RNA, 19 nt, Homo sapiens
  misc_RNA (1)...(19): siRNA sense strand
guguguaauuggaggagac

SEQ ID NO: 2398379 - RNA, 19 nt, Homo sapiens
  misc_RNA (1)...(19): siRNA sense strand
cuguggauugugaagauua

SEQ ID NO: 2398380 - RNA, 19 nt, Homo sapiens
  misc_RNA (1)...(19): siRNA sense strand
uaaugguugcagagaagaa

SEQ ID NO: 2398381 - RNA, 19 nt, Homo sapiens
  misc_RNA (1)...(19): siRNA sense strand
guccacaauuagugaaaau

SEQ ID NO: 2398382 - RNA, 19 nt, Homo sapiens
  misc_RNA (1)...(19): siRNA sense strand
cccaaagaaggccaagaaa

SEQ ID NO: 2398383 - RNA, 19 nt, Homo sapiens
  misc_RNA (1)...(19): siRNA sense strand
uugugaagauuaugugcau

SEQ ID NO: 2398384 - RNA, 19 nt, Homo sapiens
  misc_RNA (1)...(19): siRNA sense strand
ccucaagaaaugcugccua

SEQ ID NO: 2398385 - RNA, 19 nt, Homo sapiens
  misc_RNA (1)...(19): siRNA sense strand
acaagaugaagcugggcaa

SEQ ID NO: 2398386 - RNA, 19 nt, Homo sapiens
  misc_RNA (1)...(19): siRNA sense strand
cugucguguuugaccgaaa

SEQ ID NO: 2398387 - RNA, 19 nt, Homo sapiens
  misc_RNA (1)...(19): siRNA sense strand
acaucgagguccugcccaa

SEQ ID NO: 2398388 - RNA, 19 nt, Homo sapiens
  misc_RNA (1)...(19): siRNA sense strand
gcaugaagaaggugggcac

SEQ ID NO: 2398389 - RNA, 19 nt, Homo sapiens
  misc_RNA (1)...(19): siRNA sense strand
aggaggaggcagaugacca

SEQ ID NO: 2398390 - RNA, 19 nt, Homo sapiens
  misc_RNA (1)...(19): siRNA sense strand
aaugcaaagaccagaacaa

SEQ ID NO: 2398391 - RNA, 19 nt, Homo sapiens
  misc_RNA (1)...(19): siRNA sense strand
gccugaagcugcaccgcaa

SEQ ID NO: 2398392 - RNA, 19 nt, Homo sapiens
  misc_RNA (1)...(19): siRNA sense strand
gaaggaagccagcagccaa

SEQ ID NO: 2398393 - RNA, 19 nt, Homo sapiens
  misc_RNA (1)...(19): siRNA sense strand
agaaggaggaggagacaac

SEQ ID NO: 2398394 - RNA, 19 nt, Homo sapiens
  misc_RNA (1)...(19): siRNA sense strand
cagaacaaacagaaggaag

SEQ ID NO: 2398395 - RNA, 19 nt, Homo sapiens
  misc_RNA (1)...(19): siRNA sense strand
gugagaagaaccaggacaa

SEQ ID NO: 2398396 - RNA, 19 nt, Homo sapiens
  misc_RNA (1)...(19): siRNA sense strand
acuuaagacaauagagaga

SEQ ID NO: 2398397 - RNA, 19 nt, Homo sapiens
  misc_RNA (1)...(19): siRNA sense strand
cagaaaugacaguuggcua

SEQ ID NO: 2398398 - RNA, 19 nt, Homo sapiens
  misc_RNA (1)...(19): siRNA sense strand
acaauagagagaagaggaa

SEQ ID NO: 2398399 - RNA, 19 nt, Homo sapiens
  misc_RNA (1)...(19): siRNA sense strand
ggaggagauugguggccuu

SEQ ID NO: 2398400 - RNA, 19 nt, Homo sapiens
  misc_RNA (1)...(19): siRNA sense strand
ugacacaaccaaagggagu

SEQ ID NO: 2398401 - RNA, 19 nt, Homo sapiens
  misc_RNA (1)...(19): siRNA sense strand
ccacacuuaaacaaagaaa

SEQ ID NO: 2398402 - RNA, 19 nt, Homo sapiens
  misc_RNA (1)...(19): siRNA sense strand
cuugggaauuuguuagaau

SEQ ID NO: 2398403 - RNA, 19 nt, Homo sapiens
  misc_RNA (1)...(19): siRNA sense strand
ugaaugaauuagauggugu

SEQ ID NO: 2398404 - RNA, 19 nt, Homo sapiens
  misc_RNA (1)...(19): siRNA sense strand
gcguaguggcccagguguu

SEQ ID NO: 2398405 - RNA, 19 nt, Homo sapiens
  misc_RNA (1)...(19): siRNA sense strand
agaagaggaaguaaaucaa

SEQ ID NO: 2398406 - RNA, 19 nt, Homo sapiens
  misc_RNA (1)...(19): siRNA sense strand
cuggaagauuagauaagau

SEQ ID NO: 2398407 - RNA, 19 nt, Homo sapiens
  misc_RNA (1)...(19): siRNA sense strand
auuagaugguguuggacuu

SEQ ID NO: 2398408 - RNA, 19 nt, Homo sapiens
  misc_RNA (1)...(19): siRNA sense strand
agaccugauguguuagaua

SEQ ID NO: 2398409 - RNA, 19 nt, Homo sapiens
  misc_RNA (1)...(19): siRNA sense strand
cagcaagacaggaugugau

SEQ ID NO: 2398410 - RNA, 19 nt, Homo sapiens
  misc_RNA (1)...(19): siRNA sense strand
aggaaguaaaucaagucaa

SEQ ID NO: 2398411 - RNA, 19 nt, Homo sapiens
  misc_RNA (1)...(19): siRNA sense strand
aauagagagaagaggaagu

SEQ ID NO: 2398412 - RNA, 19 nt, Homo sapiens
  misc_RNA (1)...(19): siRNA sense strand
uccugugauugaugaaaua

SEQ ID NO: 2398413 - RNA, 19 nt, Homo sapiens
  misc_RNA (1)...(19): siRNA sense strand
aggaaauucugcaagugau

SEQ ID NO: 2398414 - RNA, 19 nt, Homo sapiens
  misc_RNA (1)...(19): siRNA sense strand
gauauuucgacaagcaaga

SEQ ID NO: 2398415 - RNA, 19 nt, Homo sapiens
  misc_RNA (1)...(19): siRNA sense strand
acgcaacuacagugaaaca

SEQ ID NO: 2398416 - RNA, 19 nt, Homo sapiens
  misc_RNA (1)...(19): siRNA sense strand
gacaauagagagaagagga

SEQ ID NO: 2398417 - RNA, 19 nt, Homo sapiens
  misc_RNA (1)...(19): siRNA sense strand
ccgggagauuugaccgaga

SEQ ID NO: 2398418 - RNA, 19 nt, Homo sapiens
  misc_RNA (1)...(19): siRNA sense strand
gauugguggccuugaagau

SEQ ID NO: 2398419 - RNA, 19 nt, Homo sapiens
  misc_RNA (1)...(19): siRNA sense strand
ugucaugauuauugcagca

SEQ ID NO: 2398420 - RNA, 19 nt, Homo sapiens
  misc_RNA (1)...(19): siRNA sense strand
agagcaagcacuccagcaa

SEQ ID NO: 2398421 - RNA, 19 nt, Homo sapiens
  misc_RNA (1)...(19): siRNA sense strand
aaucaagucaacaggaguu

SEQ ID NO: 2398422 - RNA, 19 nt, Homo sapiens
  misc_RNA (1)...(19): siRNA sense strand
ugaaagaauuggaagagga

SEQ ID NO: 2398423 - RNA, 19 nt, Homo sapiens
  misc_RNA (1)...(19): siRNA sense strand
ggaaugacaucuuacgcaa

SEQ ID NO: 2398424 - RNA, 19 nt, Homo sapiens
  misc_RNA (1)...(19): siRNA sense strand
cagaagaggagcagcgcau

SEQ ID NO: 2398425 - RNA, 19 nt, Homo sapiens
  misc_RNA (1)...(19): siRNA sense strand
ggagacuggcugaguggaa

SEQ ID NO: 2398426 - RNA, 19 nt, Homo sapiens
  misc_RNA (1)...(19): siRNA sense strand
aguuuaaugaggaggauga

SEQ ID NO: 2398427 - RNA, 19 nt, Homo sapiens
  misc_RNA (1)...(19): siRNA sense strand
augaagagggacagcgauu

SEQ ID NO: 2398428 - RNA, 19 nt, Homo sapiens
  misc_RNA (1)...(19): siRNA sense strand
ggaugaacgugcuauugaa

SEQ ID NO: 2398429 - RNA, 19 nt, Homo sapiens
  misc_RNA (1)...(19): siRNA sense strand
aagauaugacuuuggaaga

SEQ ID NO: 2398430 - RNA, 19 nt, Homo sapiens
  misc_RNA (1)...(19): siRNA sense strand
acgcagacacugaauggaa

SEQ ID NO: 2398431 - RNA, 19 nt, Homo sapiens
  misc_RNA (1)...(19): siRNA sense strand
cuggcugaguggaaagcaa

SEQ ID NO: 2398432 - RNA, 19 nt, Homo sapiens
  misc_RNA (1)...(19): siRNA sense strand
uuguuuaccuggaaggaga

SEQ ID NO: 2398433 - RNA, 19 nt, Homo sapiens
  misc_RNA (1)...(19): siRNA sense strand
ggaggaugaacgugcuauu

SEQ ID NO: 2398434 - RNA, 19 nt, Homo sapiens
  misc_RNA (1)...(19): siRNA sense strand
gucugaaagaauuggaaga

SEQ ID NO: 2398435 - RNA, 19 nt, Homo sapiens
  misc_RNA (1)...(19): siRNA sense strand
aauuggaagaggaggcaga

SEQ ID NO: 2398436 - RNA, 19 nt, Homo sapiens
  misc_RNA (1)...(19): siRNA sense strand
aaggagauaucaaggcuca

SEQ ID NO: 2398437 - RNA, 19 nt, Homo sapiens
  misc_RNA (1)...(19): siRNA sense strand
agaucucagggaaggauua

SEQ ID NO: 2398438 - RNA, 19 nt, Homo sapiens
  misc_RNA (1)...(19): siRNA sense strand
gaugaacgugcuauugaaa

SEQ ID NO: 2398439 - RNA, 19 nt, Homo sapiens
  misc_RNA (1)...(19): siRNA sense strand
auaucaaggcucaguuuau

SEQ ID NO: 2398440 - RNA, 19 nt, Homo sapiens
  misc_RNA (1)...(19): siRNA sense strand
acaagagaugaguuggaau

SEQ ID NO: 2398441 - RNA, 19 nt, Homo sapiens
  misc_RNA (1)...(19): siRNA sense strand
aucaugaagacgaguuuaa

SEQ ID NO: 2398442 - RNA, 19 nt, Homo sapiens
  misc_RNA (1)...(19): siRNA sense strand
acagcgauuccgaggguga

SEQ ID NO: 2398443 - RNA, 19 nt, Homo sapiens
  misc_RNA (1)...(19): siRNA sense strand
ccugcaaaguggcggacaa

SEQ ID NO: 2398444 - RNA, 19 nt, Homo sapiens
  misc_RNA (1)...(19): siRNA sense strand
aaagaaacccggaggagca

SEQ ID NO: 2398445 - RNA, 19 nt, Homo sapiens
  misc_RNA (1)...(19): siRNA sense strand
cugcagaagauuggagaau

SEQ ID NO: 2398446 - RNA, 19 nt, Homo sapiens
  misc_RNA (1)...(19): siRNA sense strand
agacaggccgagugaccaa

SEQ ID NO: 2398447 - RNA, 19 nt, Homo sapiens
  misc_RNA (1)...(19): siRNA sense strand
cugcaaaguggcggacaaa

SEQ ID NO: 2398448 - RNA, 19 nt, Homo sapiens
  misc_RNA (1)...(19): siRNA sense strand
cugagaaccagaaugggaa

SEQ ID NO: 2398449 - RNA, 19 nt, Homo sapiens
  misc_RNA (1)...(19): siRNA sense strand
cggugcagaacgacagcaa

SEQ ID NO: 2398450 - RNA, 19 nt, Homo sapiens
  misc_RNA (1)...(19): siRNA sense strand
cuaacuucagugagccaaa

SEQ ID NO: 2398451 - RNA, 19 nt, Homo sapiens
  misc_RNA (1)...(19): siRNA sense strand
ccggaggagcagcaagaga

SEQ ID NO: 2398452 - RNA, 19 nt, Homo sapiens
  misc_RNA (1)...(19): siRNA sense strand
uggaggaagaggaugaaga

SEQ ID NO: 2398453 - RNA, 19 nt, Homo sapiens
  misc_RNA (1)...(19): siRNA sense strand
agaacaugcuggaccgcuu

SEQ ID NO: 2398454 - RNA, 19 nt, Homo sapiens
  misc_RNA (1)...(19): siRNA sense strand
caggacgcugaaagggaaa

SEQ ID NO: 2398455 - RNA, 19 nt, Homo sapiens
  misc_RNA (1)...(19): siRNA sense strand
acgaggagaugacgggcga

SEQ ID NO: 2398456 - RNA, 19 nt, Homo sapiens
  misc_RNA (1)...(19): siRNA sense strand
gaggagaugacgggcgaau

SEQ ID NO: 2398457 - RNA, 19 nt, Homo sapiens
  misc_RNA (1)...(19): siRNA sense strand
gcaagaucgcggugggcau

SEQ ID NO: 2398458 - RNA, 19 nt, Homo sapiens
  misc_RNA (1)...(19): siRNA sense strand
ccaaggaggaguugagcga

SEQ ID NO: 2398459 - RNA, 19 nt, Homo sapiens
  misc_RNA (1)...(19): siRNA sense strand
ugaaggagguggugcgagu

SEQ ID NO: 2398460 - RNA, 19 nt, Homo sapiens
  misc_RNA (1)...(19): siRNA sense strand
ggucaaagguucugguguc

SEQ ID NO: 2398461 - RNA, 19 nt, Homo sapiens
  misc_RNA (1)...(19): siRNA sense strand
ccaggaagaagaaggccaa

SEQ ID NO: 2398462 - RNA, 19 nt, Homo sapiens
  misc_RNA (1)...(19): siRNA sense strand
ccgccaaguccaaggagga

SEQ ID NO: 2398463 - RNA, 19 nt, Homo sapiens
  misc_RNA (1)...(19): siRNA sense strand
ggagcuacauccuggcuga

SEQ ID NO: 2398464 - RNA, 19 nt, Homo sapiens
  misc_RNA (1)...(19): siRNA sense strand
ccaaagaggaugagaccag

SEQ ID NO: 2398465 - RNA, 19 nt, Homo sapiens
  misc_RNA (1)...(19): siRNA sense strand
ccuucaagcgccagcaaga

SEQ ID NO: 2398466 - RNA, 19 nt, Homo sapiens
  misc_RNA (1)...(19): siRNA sense strand
agaagauuacggagggcca

SEQ ID NO: 2398467 - RNA, 19 nt, Homo sapiens
  misc_RNA (1)...(19): siRNA sense strand
agugaacuccagagaccua

SEQ ID NO: 2398468 - RNA, 19 nt, Homo sapiens
  misc_RNA (1)...(19): siRNA sense strand
ccggaugacuuuaaggacu

SEQ ID NO: 2398469 - RNA, 19 nt, Homo sapiens
  misc_RNA (1)...(19): siRNA sense strand
ggaaacaugucccggcugu

SEQ ID NO: 2398470 - RNA, 19 nt, Homo sapiens
  misc_RNA (1)...(19): siRNA sense strand
aguccaagugggaaggcaa

SEQ ID NO: 2398471 - RNA, 19 nt, Homo sapiens
  misc_RNA (1)...(19): siRNA sense strand
cugaggaccaggaggagau

SEQ ID NO: 2398472 - RNA, 19 nt, Homo sapiens
  misc_RNA (1)...(19): siRNA sense strand
gagaaguccaagugggaag

SEQ ID NO: 2398473 - RNA, 19 nt, Homo sapiens
  misc_RNA (1)...(19): siRNA sense strand
gcugcaaucgcuugggaga

SEQ ID NO: 2398474 - RNA, 19 nt, Homo sapiens
  misc_RNA (1)...(19): siRNA sense strand
agucugaggaccaggagga

SEQ ID NO: 2398475 - RNA, 19 nt, Homo sapiens
  misc_RNA (1)...(19): siRNA sense strand
gagagcuguuugugggcca

SEQ ID NO: 2398476 - RNA, 19 nt, Homo sapiens
  misc_RNA (1)...(19): siRNA sense strand
gcucaagucuguagugcca

SEQ ID NO: 2398477 - RNA, 19 nt, Homo sapiens
  misc_RNA (1)...(19): siRNA sense strand
gugccaggauucaggaaaa

SEQ ID NO: 2398478 - RNA, 19 nt, Homo sapiens
  misc_RNA (1)...(19): siRNA sense strand
ucaacgagcuggagcacga

SEQ ID NO: 2398479 - RNA, 19 nt, Homo sapiens
  misc_RNA (1)...(19): siRNA sense strand
gagugaugagaguggagaa

SEQ ID NO: 2398480 - RNA, 19 nt, Homo sapiens
  misc_RNA (1)...(19): siRNA sense strand
caucacagauccuggcaca

SEQ ID NO: 2398481 - RNA, 19 nt, Homo sapiens
  misc_RNA (1)...(19): siRNA sense strand
gggagaucuuugagcucau

SEQ ID NO: 2398482 - RNA, 19 nt, Homo sapiens
  misc_RNA (1)...(19): siRNA sense strand
gaagaugggcagucggcau

SEQ ID NO: 2398483 - RNA, 19 nt, Homo sapiens
  misc_RNA (1)...(19): siRNA sense strand
agugaugagaguggagaaa

SEQ ID NO: 2398484 - RNA, 19 nt, Homo sapiens
  misc_RNA (1)...(19): siRNA sense strand
acgaagauguguuggcugu

SEQ ID NO: 2398485 - RNA, 19 nt, Homo sapiens
  misc_RNA (1)...(19): siRNA sense strand
acaugguggcacugguuaa

SEQ ID NO: 2398486 - RNA, 19 nt, Homo sapiens
  misc_RNA (1)...(19): siRNA sense strand
aguacaacuuugagcugau

SEQ ID NO: 2398487 - RNA, 19 nt, Homo sapiens
  misc_RNA (1)...(19): siRNA sense strand
ccguggaggucguuggugu

SEQ ID NO: 2398488 - RNA, 19 nt, Homo sapiens
  misc_RNA (1)...(19): siRNA sense strand
ccgggagagugaugagagu

SEQ ID NO: 2398489 - RNA, 19 nt, Homo sapiens
  misc_RNA (1)...(19): siRNA sense strand
ccucaggugcacaagguau

SEQ ID NO: 2398490 - RNA, 19 nt, Homo sapiens
  misc_RNA (1)...(19): siRNA sense strand
aguacaaggcaguguucau

SEQ ID NO: 2398491 - RNA, 19 nt, Homo sapiens
  misc_RNA (1)...(19): siRNA sense strand
aggcugaaccugagcggca

SEQ ID NO: 2398492 - RNA, 19 nt, Homo sapiens
  misc_RNA (1)...(19): siRNA sense strand
agaacuacaugguggcacu

SEQ ID NO: 2398493 - RNA, 19 nt, Homo sapiens
  misc_RNA (1)...(19): siRNA sense strand
ccuuacaaucugagucuga

SEQ ID NO: 2398494 - RNA, 19 nt, Homo sapiens
  misc_RNA (1)...(19): siRNA sense strand
cucaaugaauggagccuca

SEQ ID NO: 2398495 - RNA, 19 nt, Homo sapiens
  misc_RNA (1)...(19): siRNA sense strand
ccaagaaugcugaaggcaa

SEQ ID NO: 2398496 - RNA, 19 nt, Homo sapiens
  misc_RNA (1)...(19): siRNA sense strand
ccaugaagcugcuaggaga

SEQ ID NO: 2398497 - RNA, 19 nt, Homo sapiens
  misc_RNA (1)...(19): siRNA sense strand
agucaggagcggacgugaa

SEQ ID NO: 2398498 - RNA, 19 nt, Homo sapiens
  misc_RNA (1)...(19): siRNA sense strand
cggacgugaaccaagggaa

SEQ ID NO: 2398499 - RNA, 19 nt, Homo sapiens
  misc_RNA (1)...(19): siRNA sense strand
gaaauaaucucaugggcga

SEQ ID NO: 2398500 - RNA, 19 nt, Homo sapiens
  misc_RNA (1)...(19): siRNA sense strand
gguuaaacucaguagaaaa

SEQ ID NO: 2398501 - RNA, 19 nt, Homo sapiens
  misc_RNA (1)...(19): siRNA sense strand
gcucagauucagagagauc

SEQ ID NO: 2398502 - RNA, 19 nt, Homo sapiens
  misc_RNA (1)...(19): siRNA sense strand
cauauuugcuaguugguga

SEQ ID NO: 2398503 - RNA, 19 nt, Homo sapiens
  misc_RNA (1)...(19): siRNA sense strand
aggacaagaauuugcaaga

SEQ ID NO: 2398504 - RNA, 19 nt, Homo sapiens
  misc_RNA (1)...(19): siRNA sense strand
cuucauaguaagauacaga

SEQ ID NO: 2398505 - RNA, 19 nt, Homo sapiens
  misc_RNA (1)...(19): siRNA sense strand
ggauaugauguccgugcaa

SEQ ID NO: 2398506 - RNA, 19 nt, Homo sapiens
  misc_RNA (1)...(19): siRNA sense strand
agacagccgcaaagagaga

SEQ ID NO: 2398507 - RNA, 19 nt, Homo sapiens
  misc_RNA (1)...(19): siRNA sense strand
gugacaguguugugcugaa

SEQ ID NO: 2398508 - RNA, 19 nt, Homo sapiens
  misc_RNA (1)...(19): siRNA sense strand
uguacuugccauaggaaaa

SEQ ID NO: 2398509 - RNA, 19 nt, Homo sapiens
  misc_RNA (1)...(19): siRNA sense strand
aguggauacaucagggaau

SEQ ID NO: 2398510 - RNA, 19 nt, Homo sapiens
  misc_RNA (1)...(19): siRNA sense strand
agauuuggacagaggcaga

SEQ ID NO: 2398511 - RNA, 19 nt, Homo sapiens
  misc_RNA (1)...(19): siRNA sense strand
agguuuauaucaagacuca

SEQ ID NO: 2398512 - RNA, 19 nt, Homo sapiens
  misc_RNA (1)...(19): siRNA sense strand
ugacuagaaaggugaagau

SEQ ID NO: 2398513 - RNA, 19 nt, Homo sapiens
  misc_RNA (1)...(19): siRNA sense strand
acagaauguaugcaagcua

SEQ ID NO: 2398514 - RNA, 19 nt, Homo sapiens
  misc_RNA (1)...(19): siRNA sense strand
agcaaaagcaggacaagaa

SEQ ID NO: 2398515 - RNA, 19 nt, Homo sapiens
  misc_RNA (1)...(19): siRNA sense strand
cccaaauccgagagggcau

SEQ ID NO: 2398516 - RNA, 19 nt, Homo sapiens
  misc_RNA (1)...(19): siRNA sense strand
gaccaaagaugaacucuga

SEQ ID NO: 2398517 - RNA, 19 nt, Homo sapiens
  misc_RNA (1)...(19): siRNA sense strand
uccacagauuccaaggaua

SEQ ID NO: 2398518 - RNA, 19 nt, Homo sapiens
  misc_RNA (1)...(19): siRNA sense strand
aaauaaauaucgauggcac

SEQ ID NO: 2398519 - RNA, 19 nt, Homo sapiens
  misc_RNA (1)...(19): siRNA sense strand
cuuaaaugggcgaaagauc

SEQ ID NO: 2398520 - RNA, 19 nt, Homo sapiens
  misc_RNA (1)...(19): siRNA sense strand
ugaaaaggguagaaccaca

SEQ ID NO: 2398521 - RNA, 19 nt, Homo sapiens
  misc_RNA (1)...(19): siRNA sense strand
cugguuaaacucaguagaa

SEQ ID NO: 2398522 - RNA, 19 nt, Homo sapiens
  misc_RNA (1)...(19): siRNA sense strand
agcccggagaagagcgaaa

SEQ ID NO: 2398523 - RNA, 19 nt, Homo sapiens
  misc_RNA (1)...(19): siRNA sense strand
cagcaccagaggagcaauu

SEQ ID NO: 2398524 - RNA, 19 nt, Homo sapiens
  misc_RNA (1)...(19): siRNA sense strand
ccaucuacuaugaacauuu

SEQ ID NO: 2398525 - RNA, 19 nt, Homo sapiens
  misc_RNA (1)...(19): siRNA sense strand
acauuccaguuaagagcaa

SEQ ID NO: 2398526 - RNA, 19 nt, Homo sapiens
  misc_RNA (1)...(19): siRNA sense strand
caugaaaaggguagaacca

SEQ ID NO: 2398527 - RNA, 19 nt, Homo sapiens
  misc_RNA (1)...(19): siRNA sense strand
cuaaugaauaaacgagcaa

SEQ ID NO: 2398528 - RNA, 19 nt, Homo sapiens
  misc_RNA (1)...(19): siRNA sense strand
ggcaaaaugaggaaaacaa

SEQ ID NO: 2398529 - RNA, 19 nt, Homo sapiens
  misc_RNA (1)...(19): siRNA sense strand
ccuaaugaauaaacgagca

SEQ ID NO: 2398530 - RNA, 19 nt, Homo sapiens
  misc_RNA (1)...(19): siRNA sense strand
caguauauucggugcucuu

SEQ ID NO: 2398531 - RNA, 19 nt, Homo sapiens
  misc_RNA (1)...(19): siRNA sense strand
cugaggaagcagaagcuga

SEQ ID NO: 2398532 - RNA, 19 nt, Homo sapiens
  misc_RNA (1)...(19): siRNA sense strand
caguuugugaccaggguuu

SEQ ID NO: 2398533 - RNA, 19 nt, Homo sapiens
  misc_RNA (1)...(19): siRNA sense strand
ggcuuaugcauuugugcua

SEQ ID NO: 2398534 - RNA, 19 nt, Homo sapiens
  misc_RNA (1)...(19): siRNA sense strand
gcaaauaugucgugaggca

SEQ ID NO: 2398535 - RNA, 19 nt, Homo sapiens
  misc_RNA (1)...(19): siRNA sense strand
uuuauaagcacgauggaaa

SEQ ID NO: 2398536 - RNA, 19 nt, Homo sapiens
  misc_RNA (1)...(19): siRNA sense strand
cagucaacuuucuggcaaa

SEQ ID NO: 2398537 - RNA, 19 nt, Homo sapiens
  misc_RNA (1)...(19): siRNA sense strand
ccaaaaucgucucagaaaa

SEQ ID NO: 2398538 - RNA, 19 nt, Homo sapiens
  misc_RNA (1)...(19): siRNA sense strand
acgaauuugugaaguggaa

SEQ ID NO: 2398539 - RNA, 19 nt, Homo sapiens
  misc_RNA (1)...(19): siRNA sense strand
gcaaacacuuacuggggaa

SEQ ID NO: 2398540 - RNA, 19 nt, Homo sapiens
  misc_RNA (1)...(19): siRNA sense strand
ggagagucuuggaggcguu

SEQ ID NO: 2398541 - RNA, 19 nt, Homo sapiens
  misc_RNA (1)...(19): siRNA sense strand
gaauuugugaaguggaaaa

SEQ ID NO: 2398542 - RNA, 19 nt, Homo sapiens
  misc_RNA (1)...(19): siRNA sense strand
caguucagguugugugaca

SEQ ID NO: 2398543 - RNA, 19 nt, Homo sapiens
  misc_RNA (1)...(19): siRNA sense strand
guguauugaugguccaaaa

SEQ ID NO: 2398544 - RNA, 19 nt, Homo sapiens
  misc_RNA (1)...(19): siRNA sense strand
gcuaaaaucaagacgugaa

SEQ ID NO: 2398545 - RNA, 19 nt, Homo sapiens
  misc_RNA (1)...(19): siRNA sense strand
ccaucaugcccauuguaaa

SEQ ID NO: 2398546 - RNA, 19 nt, Homo sapiens
  misc_RNA (1)...(19): siRNA sense strand
caaaguagccuguugcuga

SEQ ID NO: 2398547 - RNA, 19 nt, Homo sapiens
  misc_RNA (1)...(19): siRNA sense strand
gaaguugucugcaggguca

SEQ ID NO: 2398548 - RNA, 19 nt, Homo sapiens
  misc_RNA (1)...(19): siRNA sense strand
ccuggugguucuugaucaa

SEQ ID NO: 2398549 - RNA, 19 nt, Homo sapiens
  misc_RNA (1)...(19): siRNA sense strand
caucaugcccauuguaaaa

SEQ ID NO: 2398550 - RNA, 19 nt, Homo sapiens
  misc_RNA (1)...(19): siRNA sense strand
accaaaugccucugcuuua

SEQ ID NO: 2398551 - RNA, 19 nt, Homo sapiens
  misc_RNA (1)...(19): siRNA sense strand
ccuuuuaggagcaagauua

SEQ ID NO: 2398552 - RNA, 19 nt, Homo sapiens
  misc_RNA (1)...(19): siRNA sense strand
ggggaaagaagcuauuaaa

SEQ ID NO: 2398553 - RNA, 19 nt, Homo sapiens
  misc_RNA (1)...(19): siRNA sense strand
cgacaggcuugaacaaaau

SEQ ID NO: 2398554 - RNA, 19 nt, Homo sapiens
  misc_RNA (1)...(19): siRNA sense strand
uaaaucaacuucaagguga

SEQ ID NO: 2398555 - RNA, 19 nt, Homo sapiens
  misc_RNA (1)...(19): siRNA sense strand
cuggaaugcccuuucuaua

SEQ ID NO: 2398556 - RNA, 19 nt, Homo sapiens
  misc_RNA (1)...(19): siRNA sense strand
ucuuggaggcguucauaua

SEQ ID NO: 2398557 - RNA, 19 nt, Homo sapiens
  misc_RNA (1)...(19): siRNA sense strand
ucugcagggucauggagua

SEQ ID NO: 2398558 - RNA, 19 nt, Homo sapiens
  misc_RNA (1)...(19): siRNA sense strand
caugagauugggaugcuaa

SEQ ID NO: 2398559 - RNA, 19 nt, Homo sapiens
  misc_RNA (1)...(19): siRNA sense strand
caucagaagaagugcuaag

SEQ ID NO: 2398560 - RNA, 19 nt, Homo sapiens
  misc_RNA (1)...(19): siRNA sense strand
aagcauuuccucugauuau

SEQ ID NO: 2398561 - RNA, 19 nt, Homo sapiens
  misc_RNA (1)...(19): siRNA sense strand
uacaaaagcccuagagcau

SEQ ID NO: 2398562 - RNA, 19 nt, Homo sapiens
  misc_RNA (1)...(19): siRNA sense strand
ccucaaugcaguggcagaa

SEQ ID NO: 2398563 - RNA, 19 nt, Homo sapiens
  misc_RNA (1)...(19): siRNA sense strand
ugaagauugggcugacuaa

SEQ ID NO: 2398564 - RNA, 19 nt, Homo sapiens
  misc_RNA (1)...(19): siRNA sense strand
gccaaaaucgucucagaaa

SEQ ID NO: 2398565 - RNA, 19 nt, Homo sapiens
  misc_RNA (1)...(19): siRNA sense strand
cuucaacggcugcaaggua

SEQ ID NO: 2398566 - RNA, 19 nt, Homo sapiens
  misc_RNA (1)...(19): siRNA sense strand
agaugaagaaggauuugua

SEQ ID NO: 2398567 - RNA, 19 nt, Homo sapiens
  misc_RNA (1)...(19): siRNA sense strand
cuuccuaaauaucaaguga

SEQ ID NO: 2398568 - RNA, 19 nt, Homo sapiens
  misc_RNA (1)...(19): siRNA sense strand
gugaagauugggcugacua

SEQ ID NO: 2398569 - RNA, 19 nt, Homo sapiens
  misc_RNA (1)...(19): siRNA sense strand
cuccaauagcaaacacuua

SEQ ID NO: 2398570 - RNA, 19 nt, Homo sapiens
  misc_RNA (1)...(19): siRNA sense strand
ggagaauagcaucuuucaa

SEQ ID NO: 2398571 - RNA, 19 nt, Homo sapiens
  misc_RNA (1)...(19): siRNA sense strand
augcaguggcagaaacuuu

SEQ ID NO: 2398572 - RNA, 19 nt, Homo sapiens
  misc_RNA (1)...(19): siRNA sense strand
ggggaaagcauguguucaa

SEQ ID NO: 2398573 - RNA, 19 nt, Homo sapiens
  misc_RNA (1)...(19): siRNA sense strand
ggccaacagaagagagaag

SEQ ID NO: 2398574 - RNA, 19 nt, Homo sapiens
  misc_RNA (1)...(19): siRNA sense strand
aagaagaggcagaggccau

SEQ ID NO: 2398575 - RNA, 19 nt, Homo sapiens
  misc_RNA (1)...(19): siRNA sense strand
agggauuugccgaagaaua

SEQ ID NO: 2398576 - RNA, 19 nt, Homo sapiens
  misc_RNA (1)...(19): siRNA sense strand
caguaaugccuuuagaaaa

SEQ ID NO: 2398577 - RNA, 19 nt, Homo sapiens
  misc_RNA (1)...(19): siRNA sense strand
uguagauggguuaaggaaa

SEQ ID NO: 2398578 - RNA, 19 nt, Homo sapiens
  misc_RNA (1)...(19): siRNA sense strand
gacuuaacgcauaggaaaa

SEQ ID NO: 2398579 - RNA, 19 nt, Homo sapiens
  misc_RNA (1)...(19): siRNA sense strand
cuguagauggguuaaggaa

SEQ ID NO: 2398580 - RNA, 19 nt, Homo sapiens
  misc_RNA (1)...(19): siRNA sense strand
uagcacuguagauggguua

SEQ ID NO: 2398581 - RNA, 19 nt, Homo sapiens
  misc_RNA (1)...(19): siRNA sense strand
acaauaaaacggaacacaa

SEQ ID NO: 2398582 - RNA, 19 nt, Homo sapiens
  misc_RNA (1)...(19): siRNA sense strand
cuccuaaagaagaggcaga

SEQ ID NO: 2398583 - RNA, 19 nt, Homo sapiens
  misc_RNA (1)...(19): siRNA sense strand
aagacagagaauggagaua

SEQ ID NO: 2398584 - RNA, 19 nt, Homo sapiens
  misc_RNA (1)...(19): siRNA sense strand
cagugaaguuaaagagagc

SEQ ID NO: 2398585 - RNA, 19 nt, Homo sapiens
  misc_RNA (1)...(19): siRNA sense strand
cuguaagauuggagguuau

SEQ ID NO: 2398586 - RNA, 19 nt, Homo sapiens
  misc_RNA (1)...(19): siRNA sense strand
cauuggagccagaggaaau

SEQ ID NO: 2398587 - RNA, 19 nt, Homo sapiens
  misc_RNA (1)...(19): siRNA sense strand
ugugauucguggugauaaa

SEQ ID NO: 2398588 - RNA, 19 nt, Homo sapiens
  misc_RNA (1)...(19): siRNA sense strand
augauuuaccugaggauaa

SEQ ID NO: 2398589 - RNA, 19 nt, Homo sapiens
  misc_RNA (1)...(19): siRNA sense strand
guuuauaauucgagaagac

SEQ ID NO: 2398590 - RNA, 19 nt, Homo sapiens
  misc_RNA (1)...(19): siRNA sense strand
ccaaguuaaagaagcuaaa

SEQ ID NO: 2398591 - RNA, 19 nt, Homo sapiens
  misc_RNA (1)...(19): siRNA sense strand
aggcaagugaggaagaaau

SEQ ID NO: 2398592 - RNA, 19 nt, Homo sapiens
  misc_RNA (1)...(19): siRNA sense strand
aggaagaaauaaugaccca

SEQ ID NO: 2398593 - RNA, 19 nt, Homo sapiens
  misc_RNA (1)...(19): siRNA sense strand
auauguagaugaaggcgaa

SEQ ID NO: 2398594 - RNA, 19 nt, Homo sapiens
  misc_RNA (1)...(19): siRNA sense strand
aggaagauucacacuguaa

SEQ ID NO: 2398595 - RNA, 19 nt, Homo sapiens
  misc_RNA (1)...(19): siRNA sense strand
cuuaaauguuaugggaaga

SEQ ID NO: 2398596 - RNA, 19 nt, Homo sapiens
  misc_RNA (1)...(19): siRNA sense strand
ucuuaaauguuaugggaag

SEQ ID NO: 2398597 - RNA, 19 nt, Homo sapiens
  misc_RNA (1)...(19): siRNA sense strand
agaagaagauauugcucca

SEQ ID NO: 2398598 - RNA, 19 nt, Homo sapiens
  misc_RNA (1)...(19): siRNA sense strand
agggagaaguggacagaag

SEQ ID NO: 2398599 - RNA, 19 nt, Homo sapiens
  misc_RNA (1)...(19): siRNA sense strand
aauucaggcaagugaggaa

SEQ ID NO: 2398600 - RNA, 19 nt, Homo sapiens
  misc_RNA (1)...(19): siRNA sense strand
agaaguggacagaagaaga

SEQ ID NO: 2398601 - RNA, 19 nt, Homo sapiens
  misc_RNA (1)...(19): siRNA sense strand
gcuuaaggguuuagcgcug

SEQ ID NO: 2398602 - RNA, 19 nt, Homo sapiens
  misc_RNA (1)...(19): siRNA sense strand
ugcugaaaguagaugauuu

SEQ ID NO: 2398603 - RNA, 19 nt, Homo sapiens
  misc_RNA (1)...(19): siRNA sense strand
gaagcaaaccauaggugca

SEQ ID NO: 2398604 - RNA, 19 nt, Homo sapiens
  misc_RNA (1)...(19): siRNA sense strand
cggaccaguugaagaagga

SEQ ID NO: 2398605 - RNA, 19 nt, Homo sapiens
  misc_RNA (1)...(19): siRNA sense strand
agccagaggaaaugauaga

SEQ ID NO: 2398606 - RNA, 19 nt, Homo sapiens
  misc_RNA (1)...(19): siRNA sense strand
gauaaaauauguagagcag

SEQ ID NO: 2398607 - RNA, 19 nt, Homo sapiens
  misc_RNA (1)...(19): siRNA sense strand
cccaauuacaaguucuaaa

SEQ ID NO: 2398608 - RNA, 19 nt, Homo sapiens
  misc_RNA (1)...(19): siRNA sense strand
uaaaauauguagagcagca

SEQ ID NO: 2398609 - RNA, 19 nt, Homo sapiens
  misc_RNA (1)...(19): siRNA sense strand
agauuuguguggagagaag

SEQ ID NO: 2398610 - RNA, 19 nt, Homo sapiens
  misc_RNA (1)...(19): siRNA sense strand
ggaaaauccauaugaagga

SEQ ID NO: 2398611 - RNA, 19 nt, Homo sapiens
  misc_RNA (1)...(19): siRNA sense strand
guucuaaaugccuguaaga

SEQ ID NO: 2398612 - RNA, 19 nt, Homo sapiens
  misc_RNA (1)...(19): siRNA sense strand
auucaaucucgcugaguuu

SEQ ID NO: 2398613 - RNA, 19 nt, Homo sapiens
  misc_RNA (1)...(19): siRNA sense strand
acgaaugcuacuucagaau

SEQ ID NO: 2398614 - RNA, 19 nt, Homo sapiens
  misc_RNA (1)...(19): siRNA sense strand
agaaauauguagaugaagg

SEQ ID NO: 2398615 - RNA, 19 nt, Homo sapiens
  misc_RNA (1)...(19): siRNA sense strand
caagaaguguggcagcaga

SEQ ID NO: 2398616 - RNA, 19 nt, Homo sapiens
  misc_RNA (1)...(19): siRNA sense strand
gugcugugcaguaaagaca

SEQ ID NO: 2398617 - RNA, 19 nt, Homo sapiens
  misc_RNA (1)...(19): siRNA sense strand
gggacuuggaacagagaaa

SEQ ID NO: 2398618 - RNA, 19 nt, Homo sapiens
  misc_RNA (1)...(19): siRNA sense strand
cugucaaugcccuggauua

SEQ ID NO: 2398619 - RNA, 19 nt, Homo sapiens
  misc_RNA (1)...(19): siRNA sense strand
gaacagagaaagaggacuc

SEQ ID NO: 2398620 - RNA, 19 nt, Homo sapiens
  misc_RNA (1)...(19): siRNA sense strand
uggaguuacuucuggaaaa

SEQ ID NO: 2398621 - RNA, 19 nt, Homo sapiens
  misc_RNA (1)...(19): siRNA sense strand
cacuuugaauugaggaaaa

SEQ ID NO: 2398622 - RNA, 19 nt, Homo sapiens
  misc_RNA (1)...(19): siRNA sense strand
cuggauuacaacaaugaua

SEQ ID NO: 2398623 - RNA, 19 nt, Homo sapiens
  misc_RNA (1)...(19): siRNA sense strand
cagagaaagaugaggcuug

SEQ ID NO: 2398624 - RNA, 19 nt, Homo sapiens
  misc_RNA (1)...(19): siRNA sense strand
aguuccaguaugugguaua

SEQ ID NO: 2398625 - RNA, 19 nt, Homo sapiens
  misc_RNA (1)...(19): siRNA sense strand
gaacugcacucauggcaca

SEQ ID NO: 2398626 - RNA, 19 nt, Homo sapiens
  misc_RNA (1)...(19): siRNA sense strand
augauaauguagaggaccu

SEQ ID NO: 2398627 - RNA, 19 nt, Homo sapiens
  misc_RNA (1)...(19): siRNA sense strand
acuaugcagcagagaaaga

SEQ ID NO: 2398628 - RNA, 19 nt, Homo sapiens
  misc_RNA (1)...(19): siRNA sense strand
cuggauggguauaaccgaa

SEQ ID NO: 2398629 - RNA, 19 nt, Homo sapiens
  misc_RNA (1)...(19): siRNA sense strand
cagagcauucagagcaaau

SEQ ID NO: 2398630 - RNA, 19 nt, Homo sapiens
  misc_RNA (1)...(19): siRNA sense strand
ugcagagcauucagagcaa

SEQ ID NO: 2398631 - RNA, 19 nt, Homo sapiens
  misc_RNA (1)...(19): siRNA sense strand
gacuuggaacagagaaaga

SEQ ID NO: 2398632 - RNA, 19 nt, Homo sapiens
  misc_RNA (1)...(19): siRNA sense strand
guggaaaaccgauggggaa

SEQ ID NO: 2398633 - RNA, 19 nt, Homo sapiens
  misc_RNA (1)...(19): siRNA sense strand
cagucauagcugagcaaau

SEQ ID NO: 2398634 - RNA, 19 nt, Homo sapiens
  misc_RNA (1)...(19): siRNA sense strand
ccaacauuugcaagaacaa

SEQ ID NO: 2398635 - RNA, 19 nt, Homo sapiens
  misc_RNA (1)...(19): siRNA sense strand
gaacaagccaggaagguac

SEQ ID NO: 2398636 - RNA, 19 nt, Homo sapiens
  misc_RNA (1)...(19): siRNA sense strand
augaggacauugagaagca

SEQ ID NO: 2398637 - RNA, 19 nt, Homo sapiens
  misc_RNA (1)...(19): siRNA sense strand
ccuuagaccucguggcgcu

SEQ ID NO: 2398638 - RNA, 19 nt, Homo sapiens
  misc_RNA (1)...(19): siRNA sense strand
aggaacgacaggagaggaa

SEQ ID NO: 2398639 - RNA, 19 nt, Homo sapiens
  misc_RNA (1)...(19): siRNA sense strand
ggaagaugaaggaacgaca

SEQ ID NO: 2398640 - RNA, 19 nt, Homo sapiens
  misc_RNA (1)...(19): siRNA sense strand
gcguccaagaaguugaaua

SEQ ID NO: 2398641 - RNA, 19 nt, Homo sapiens
  misc_RNA (1)...(19): siRNA sense strand
agaaugagcggaaggcaga

SEQ ID NO: 2398642 - RNA, 19 nt, Homo sapiens
  misc_RNA (1)...(19): siRNA sense strand
gggcaaagaagaagcagcu

SEQ ID NO: 2398643 - RNA, 19 nt, Homo sapiens
  misc_RNA (1)...(19): siRNA sense strand
gcacaucguggcagcggaa

SEQ ID NO: 2398644 - RNA, 19 nt, Homo sapiens
  misc_RNA (1)...(19): siRNA sense strand
gccuggagaaugagcggaa

SEQ ID NO: 2398645 - RNA, 19 nt, Homo sapiens
  misc_RNA (1)...(19): siRNA sense strand
cagcggaagaugaaggaac

SEQ ID NO: 2398646 - RNA, 19 nt, Homo sapiens
  misc_RNA (1)...(19): siRNA sense strand
aggagaggaagcuggccaa

SEQ ID NO: 2398647 - RNA, 19 nt, Homo sapiens
  misc_RNA (1)...(19): siRNA sense strand
gagaaugagcggaaggcag

SEQ ID NO: 2398648 - RNA, 19 nt, Homo sapiens
  misc_RNA (1)...(19): siRNA sense strand
cgaugucagccgaagccaa

SEQ ID NO: 2398649 - RNA, 19 nt, Homo sapiens
  misc_RNA (1)...(19): siRNA sense strand
cuggaggaggagaaggaga

SEQ ID NO: 2398650 - RNA, 19 nt, Homo sapiens
  misc_RNA (1)...(19): siRNA sense strand
gggcuuuggacuagaaaua

SEQ ID NO: 2398651 - RNA, 19 nt, Homo sapiens
  misc_RNA (1)...(19): siRNA sense strand
gaggaugggcuuuggacua

SEQ ID NO: 2398652 - RNA, 19 nt, Homo sapiens
  misc_RNA (1)...(19): siRNA sense strand
agaccaaagugaagagcca

SEQ ID NO: 2398653 - RNA, 19 nt, Homo sapiens
  misc_RNA (1)...(19): siRNA sense strand
ggaccaggaugaagaagau

SEQ ID NO: 2398654 - RNA, 19 nt, Homo sapiens
  misc_RNA (1)...(19): siRNA sense strand
ccuagaaguccuuuaagaa

SEQ ID NO: 2398655 - RNA, 19 nt, Homo sapiens
  misc_RNA (1)...(19): siRNA sense strand
ccagugaggugaaugaaga

SEQ ID NO: 2398656 - RNA, 19 nt, Homo sapiens
  misc_RNA (1)...(19): siRNA sense strand
cagaaagagaagacagcca

SEQ ID NO: 2398657 - RNA, 19 nt, Homo sapiens
  misc_RNA (1)...(19): siRNA sense strand
gggaagaagcgcagaaaac

SEQ ID NO: 2398658 - RNA, 19 nt, Homo sapiens
  misc_RNA (1)...(19): siRNA sense strand
uagaaguccuuuaagaaca

SEQ ID NO: 2398659 - RNA, 19 nt, Homo sapiens
  misc_RNA (1)...(19): siRNA sense strand
cggcuugcccagaaagaga

SEQ ID NO: 2398660 - RNA, 19 nt, Homo sapiens
  misc_RNA (1)...(19): siRNA sense strand
cgucuauugugguggaauc

SEQ ID NO: 2398661 - RNA, 19 nt, Homo sapiens
  misc_RNA (1)...(19): siRNA sense strand
uuggcaagguugaagguca

SEQ ID NO: 2398662 - RNA, 19 nt, Homo sapiens
  misc_RNA (1)...(19): siRNA sense strand
cuuugagggagcugaagaa

SEQ ID NO: 2398663 - RNA, 19 nt, Homo sapiens
  misc_RNA (1)...(19): siRNA sense strand
cuuccaagaccaaagugaa

SEQ ID NO: 2398664 - RNA, 19 nt, Homo sapiens
  misc_RNA (1)...(19): siRNA sense strand
ccacaggacccuagaaguc

SEQ ID NO: 2398665 - RNA, 19 nt, Homo sapiens
  misc_RNA (1)...(19): siRNA sense strand
gaaugaagagaguggggau

SEQ ID NO: 2398666 - RNA, 19 nt, Homo sapiens
  misc_RNA (1)...(19): siRNA sense strand
gugaggaagaggaugcuga

SEQ ID NO: 2398667 - RNA, 19 nt, Homo sapiens
  misc_RNA (1)...(19): siRNA sense strand
cccuagaaguccuuuaaga

SEQ ID NO: 2398668 - RNA, 19 nt, Homo sapiens
  misc_RNA (1)...(19): siRNA sense strand
aggaccaggaugaagaaga

SEQ ID NO: 2398669 - RNA, 19 nt, Homo sapiens
  misc_RNA (1)...(19): siRNA sense strand
ggaugaagaagaugcuugu

SEQ ID NO: 2398670 - RNA, 19 nt, Homo sapiens
  misc_RNA (1)...(19): siRNA sense strand
gaacagaucaagagggcca

SEQ ID NO: 2398671 - RNA, 19 nt, Homo sapiens
  misc_RNA (1)...(19): siRNA sense strand
cuaucaaguucauggccua

SEQ ID NO: 2398672 - RNA, 19 nt, Homo sapiens
  misc_RNA (1)...(19): siRNA sense strand
aagagaagcugacgggcau

SEQ ID NO: 2398673 - RNA, 19 nt, Homo sapiens
  misc_RNA (1)...(19): siRNA sense strand
cuuccagguucaagcgauu

SEQ ID NO: 2398674 - RNA, 19 nt, Homo sapiens
  misc_RNA (1)...(19): siRNA sense strand
caagagaagcugacgggca

SEQ ID NO: 2398675 - RNA, 19 nt, Homo sapiens
  misc_RNA (1)...(19): siRNA sense strand
gcuggagcaggcugagaaa

SEQ ID NO: 2398676 - RNA, 19 nt, Homo sapiens
  misc_RNA (1)...(19): siRNA sense strand
cugagauccaacagaguuu

SEQ ID NO: 2398677 - RNA, 19 nt, Homo sapiens
  misc_RNA (1)...(19): siRNA sense strand
uggaaaauguggaggacgu

SEQ ID NO: 2398678 - RNA, 19 nt, Homo sapiens
  misc_RNA (1)...(19): siRNA sense strand
caacagaguuuccgagcuc

SEQ ID NO: 2398679 - RNA, 19 nt, Homo sapiens
  misc_RNA (1)...(19): siRNA sense strand
aagcaugguccuugaggga

SEQ ID NO: 2398680 - RNA, 19 nt, Homo sapiens
  misc_RNA (1)...(19): siRNA sense strand
uggccuaugaacagaucaa

SEQ ID NO: 2398681 - RNA, 19 nt, Homo sapiens
  misc_RNA (1)...(19): siRNA sense strand
gugcugaagacgcggcuga

SEQ ID NO: 2398682 - RNA, 19 nt, Homo sapiens
  misc_RNA (1)...(19): siRNA sense strand
uggagcaggcugagaaaau

SEQ ID NO: 2398683 - RNA, 19 nt, Homo sapiens
  misc_RNA (1)...(19): siRNA sense strand
agaccaaccggcugaacau

SEQ ID NO: 2398684 - RNA, 19 nt, Homo sapiens
  misc_RNA (1)...(19): siRNA sense strand
gcucgugguggguggaaaa

SEQ ID NO: 2398685 - RNA, 19 nt, Homo sapiens
  misc_RNA (1)...(19): siRNA sense strand
guguaagauaugugggaaa

SEQ ID NO: 2398686 - RNA, 19 nt, Homo sapiens
  misc_RNA (1)...(19): siRNA sense strand
gaguuuaaucagagugaaa

SEQ ID NO: 2398687 - RNA, 19 nt, Homo sapiens
  misc_RNA (1)...(19): siRNA sense strand
auguaaggaaugugggaaa

SEQ ID NO: 2398688 - RNA, 19 nt, Homo sapiens
  misc_RNA (1)...(19): siRNA sense strand
auguaaggaaugugggaaa

SEQ ID NO: 2398689 - RNA, 19 nt, Homo sapiens
  misc_RNA (1)...(19): siRNA sense strand
auguaaggaaugugggaaa

SEQ ID NO: 2398690 - RNA, 19 nt, Homo sapiens
  misc_RNA (1)...(19): siRNA sense strand
acgugaugcuggagaacua

SEQ ID NO: 2398691 - RNA, 19 nt, Homo sapiens
  misc_RNA (1)...(19): siRNA sense strand
augcaaggagugugggaaa

SEQ ID NO: 2398692 - RNA, 19 nt, Homo sapiens
  misc_RNA (1)...(19): siRNA sense strand
ugggaaaguauuuggguau

SEQ ID NO: 2398693 - RNA, 19 nt, Homo sapiens
  misc_RNA (1)...(19): siRNA sense strand
agucauaccuucaggcaca

SEQ ID NO: 2398694 - RNA, 19 nt, Homo sapiens
  misc_RNA (1)...(19): siRNA sense strand
cuugaaacccaguggucua

SEQ ID NO: 2398695 - RNA, 19 nt, Homo sapiens
  misc_RNA (1)...(19): siRNA sense strand
caggaagaauaguggcuga

SEQ ID NO: 2398696 - RNA, 19 nt, Homo sapiens
  misc_RNA (1)...(19): siRNA sense strand
guggaaaaggcuauagaua

SEQ ID NO: 2398697 - RNA, 19 nt, Homo sapiens
  misc_RNA (1)...(19): siRNA sense strand
gugggaaaguauuugggua

SEQ ID NO: 2398698 - RNA, 19 nt, Homo sapiens
  misc_RNA (1)...(19): siRNA sense strand
gaguguaaacaauguggaa

SEQ ID NO: 2398699 - RNA, 19 nt, Homo sapiens
  misc_RNA (1)...(19): siRNA sense strand
cagcaaugcgggaaagcuu

SEQ ID NO: 2398700 - RNA, 19 nt, Homo sapiens
  misc_RNA (1)...(19): siRNA sense strand
auguaaggaauguggaaaa

SEQ ID NO: 2398701 - RNA, 19 nt, Homo sapiens
  misc_RNA (1)...(19): siRNA sense strand
cccuaugaauguaaggaau

SEQ ID NO: 2398702 - RNA, 19 nt, Homo sapiens
  misc_RNA (1)...(19): siRNA sense strand
auguguugaaugugggaaa

SEQ ID NO: 2398703 - RNA, 19 nt, Homo sapiens
  misc_RNA (1)...(19): siRNA sense strand
aacucacacuggagagaaa

SEQ ID NO: 2398704 - RNA, 19 nt, Homo sapiens
  misc_RNA (1)...(19): siRNA sense strand
ucaaauacaugaaaggacu

SEQ ID NO: 2398705 - RNA, 19 nt, Homo sapiens
  misc_RNA (1)...(19): siRNA sense strand
gcgggaaagcuuacaguca

SEQ ID NO: 2398706 - RNA, 19 nt, Homo sapiens
  misc_RNA (1)...(19): siRNA sense strand
gugacgugaugcuggagaa

SEQ ID NO: 2398707 - RNA, 19 nt, Homo sapiens
  misc_RNA (1)...(19): siRNA sense strand
ggucuauacuucagcagga

SEQ ID NO: 2398708 - RNA, 19 nt, Homo sapiens
  misc_RNA (1)...(19): siRNA sense strand
gauacaauuggaaggaaaa

SEQ ID NO: 2398709 - RNA, 19 nt, Homo sapiens
  misc_RNA (1)...(19): siRNA sense strand
guguaaacaauguggaaag

SEQ ID NO: 2398710 - RNA, 19 nt, Homo sapiens
  misc_RNA (1)...(19): siRNA sense strand
acucugugacugugagcaa

SEQ ID NO: 2398711 - RNA, 19 nt, Homo sapiens
  misc_RNA (1)...(19): siRNA sense strand
cuuaauaaucacaugcgaa

SEQ ID NO: 2398712 - RNA, 19 nt, Homo sapiens
  misc_RNA (1)...(19): siRNA sense strand
acuucgaagacaugaacaa

SEQ ID NO: 2398713 - RNA, 19 nt, Homo sapiens
  misc_RNA (1)...(19): siRNA sense strand
acacagaagagaaacccua

SEQ ID NO: 2398714 - RNA, 19 nt, Homo sapiens
  misc_RNA (1)...(19): siRNA sense strand
cccuaugaguguaaacaau

SEQ ID NO: 2398715 - RNA, 19 nt, Homo sapiens
  misc_RNA (1)...(19): siRNA sense strand
acaagaagagucaaggaca

SEQ ID NO: 2398716 - RNA, 19 nt, Homo sapiens
  misc_RNA (1)...(19): siRNA sense strand
caagaagagucaaggacag

SEQ ID NO: 2398717 - RNA, 19 nt, Homo sapiens
  misc_RNA (1)...(19): siRNA sense strand
auuguauaccagagaacua

SEQ ID NO: 2398718 - RNA, 19 nt, Homo sapiens
  misc_RNA (1)...(19): siRNA sense strand
acagauuguuaucaggauu

SEQ ID NO: 2398719 - RNA, 19 nt, Homo sapiens
  misc_RNA (1)...(19): siRNA sense strand
gagaacuagcacacaagaa

SEQ ID NO: 2398720 - RNA, 19 nt, Homo sapiens
  misc_RNA (1)...(19): siRNA sense strand
aaccucuacuggugagaaa

SEQ ID NO: 2398721 - RNA, 19 nt, Homo sapiens
  misc_RNA (1)...(19): siRNA sense strand
guggaaaauccuucauuaa

SEQ ID NO: 2398722 - RNA, 19 nt, Homo sapiens
  misc_RNA (1)...(19): siRNA sense strand
acgccuuauucaacauaua

SEQ ID NO: 2398723 - RNA, 19 nt, Homo sapiens
  misc_RNA (1)...(19): siRNA sense strand
cucaaaucuuaguggacau

SEQ ID NO: 2398724 - RNA, 19 nt, Homo sapiens
  misc_RNA (1)...(19): siRNA sense strand
auagaaacccucaaugcaa

SEQ ID NO: 2398725 - RNA, 19 nt, Homo sapiens
  misc_RNA (1)...(19): siRNA sense strand
aaauguaaggaauguggaa

SEQ ID NO: 2398726 - RNA, 19 nt, Homo sapiens
  misc_RNA (1)...(19): siRNA sense strand
cccuauguauguaaggaau

SEQ ID NO: 2398727 - RNA, 19 nt, Homo sapiens
  misc_RNA (1)...(19): siRNA sense strand
ggucagacauccauuggga

SEQ ID NO: 2398728 - RNA, 19 nt, Homo sapiens
  misc_RNA (1)...(19): siRNA sense strand
ccaacucauuucagauaca

SEQ ID NO: 2398729 - RNA, 19 nt, Homo sapiens
  misc_RNA (1)...(19): siRNA sense strand
ccucaaaucuuaguggaca

SEQ ID NO: 2398730 - RNA, 19 nt, Homo sapiens
  misc_RNA (1)...(19): siRNA sense strand
cuguaaggaaugugggaag

SEQ ID NO: 2398731 - RNA, 19 nt, Homo sapiens
  misc_RNA (1)...(19): siRNA sense strand
acucaaaguacagggaaca

SEQ ID NO: 2398732 - RNA, 19 nt, Homo sapiens
  misc_RNA (1)...(19): siRNA sense strand
cucuacgaauggaggaauu

SEQ ID NO: 2398733 - RNA, 19 nt, Homo sapiens
  misc_RNA (1)...(19): siRNA sense strand
acucaguacucgggccuua

SEQ ID NO: 2398734 - RNA, 19 nt, Homo sapiens
  misc_RNA (1)...(19): siRNA sense strand
gccugugaguguaagauau

SEQ ID NO: 2398735 - RNA, 19 nt, Homo sapiens
  misc_RNA (1)...(19): siRNA sense strand
aagauaugugggaaaguau

SEQ ID NO: 2398736 - RNA, 19 nt, Homo sapiens
  misc_RNA (1)...(19): siRNA sense strand
guuggaacaagaagaguca

SEQ ID NO: 2398737 - RNA, 19 nt, Homo sapiens
  misc_RNA (1)...(19): siRNA sense strand
gaacuagcacacaagaaaa

SEQ ID NO: 2398738 - RNA, 19 nt, Homo sapiens
  misc_RNA (1)...(19): siRNA sense strand
cccuauaaaugucagcaau

SEQ ID NO: 2398739 - RNA, 19 nt, Homo sapiens
  misc_RNA (1)...(19): siRNA sense strand
cugugagcaauguggagaa

SEQ ID NO: 2398740 - RNA, 19 nt, Homo sapiens
  misc_RNA (1)...(19): siRNA sense strand
ggccugugaguguaagaua

SEQ ID NO: 2398741 - RNA, 19 nt, Homo sapiens
  misc_RNA (1)...(19): siRNA sense strand
aggaaugugggaaggcuuu

SEQ ID NO: 2398742 - RNA, 19 nt, Homo sapiens
  misc_RNA (1)...(19): siRNA sense strand
acgauguggcuguggacuu

SEQ ID NO: 2398743 - RNA, 19 nt, Homo sapiens
  misc_RNA (1)...(19): siRNA sense strand
ugggaaaugcgacuugaaa

SEQ ID NO: 2398744 - RNA, 19 nt, Homo sapiens
  misc_RNA (1)...(19): siRNA sense strand
ccuuaagacgcacgugaga

SEQ ID NO: 2398745 - RNA, 19 nt, Homo sapiens
  misc_RNA (1)...(19): siRNA sense strand
cuguaaucaguauggaaaa

SEQ ID NO: 2398746 - RNA, 19 nt, Homo sapiens
  misc_RNA (1)...(19): siRNA sense strand
gcaaauacuucccuggaca

SEQ ID NO: 2398747 - RNA, 19 nt, Homo sapiens
  misc_RNA (1)...(19): siRNA sense strand
guaaugaggugaugguggu

SEQ ID NO: 2398748 - RNA, 19 nt, Homo sapiens
  misc_RNA (1)...(19): siRNA sense strand
gcaaauacuucccuggaca

SEQ ID NO: 2398749 - RNA, 19 nt, Homo sapiens
  misc_RNA (1)...(19): siRNA sense strand
ccgacaacugugugauuca

SEQ ID NO: 2398750 - RNA, 19 nt, Homo sapiens
  misc_RNA (1)...(19): siRNA sense strand
guaaugaggugaugguggu

SEQ ID NO: 2398751 - RNA, 19 nt, Homo sapiens
  misc_RNA (1)...(19): siRNA sense strand
aagaaagccagaugaaacu

SEQ ID NO: 2398752 - RNA, 19 nt, Homo sapiens
  misc_RNA (1)...(19): siRNA sense strand
acacggagaugguggcuga

SEQ ID NO: 2398753 - RNA, 19 nt, Homo sapiens
  misc_RNA (1)...(19): siRNA sense strand
ccuacguccugcaagacaa

SEQ ID NO: 2398754 - RNA, 19 nt, Homo sapiens
  misc_RNA (1)...(19): siRNA sense strand
aggaaguggccaugguaau

SEQ ID NO: 2398755 - RNA, 19 nt, Homo sapiens
  misc_RNA (1)...(19): siRNA sense strand
aggaaguggcugaagcuca

SEQ ID NO: 2398756 - RNA, 19 nt, Homo sapiens
  misc_RNA (1)...(19): siRNA sense strand
gagacaagguacaucccau

SEQ ID NO: 2398757 - RNA, 19 nt, Homo sapiens
  misc_RNA (1)...(19): siRNA sense strand
ccugaaugugcgagaggca

SEQ ID NO: 2398758 - RNA, 19 nt, Homo sapiens
  misc_RNA (1)...(19): siRNA sense strand
gugcaaggggagcagguaa

SEQ ID NO: 2398759 - RNA, 19 nt, Homo sapiens
  misc_RNA (1)...(19): siRNA sense strand
aggcagugcuugguggcua

SEQ ID NO: 2398760 - RNA, 19 nt, Homo sapiens
  misc_RNA (1)...(19): siRNA sense strand
ggauugugcucauggacga

SEQ ID NO: 2398761 - RNA, 19 nt, Homo sapiens
  misc_RNA (1)...(19): siRNA sense strand
cagggaagauauuagccaa

SEQ ID NO: 2398762 - RNA, 19 nt, Homo sapiens
  misc_RNA (1)...(19): siRNA sense strand
cccgaaaaguggauggaga

SEQ ID NO: 2398763 - RNA, 19 nt, Homo sapiens
  misc_RNA (1)...(19): siRNA sense strand
agggaagauauuagccaau

SEQ ID NO: 2398764 - RNA, 19 nt, Homo sapiens
  misc_RNA (1)...(19): siRNA sense strand
cuagaaaacagggaagaua

SEQ ID NO: 2398765 - RNA, 19 nt, Homo sapiens
  misc_RNA (1)...(19): siRNA sense strand
gagacagacgagucggaga

SEQ ID NO: 2398766 - RNA, 19 nt, Homo sapiens
  misc_RNA (1)...(19): siRNA sense strand
cagccaggauugugcucau

SEQ ID NO: 2398767 - RNA, 19 nt, Homo sapiens
  misc_RNA (1)...(19): siRNA sense strand
aaguggauggagagaguga

SEQ ID NO: 2398768 - RNA, 19 nt, Homo sapiens
  misc_RNA (1)...(19): siRNA sense strand
uugcugaccaugaaagaau

SEQ ID NO: 2398769 - RNA, 19 nt, Homo sapiens
  misc_RNA (1)...(19): siRNA sense strand
gcuuccgaacugugggcaa

SEQ ID NO: 2398770 - RNA, 19 nt, Homo sapiens
  misc_RNA (1)...(19): siRNA sense strand
cgauugaagaagauggcuu

SEQ ID NO: 2398771 - RNA, 19 nt, Homo sapiens
  misc_RNA (1)...(19): siRNA sense strand
gcugaggaacacugggaga

SEQ ID NO: 2398772 - RNA, 19 nt, Homo sapiens
  misc_RNA (1)...(19): siRNA sense strand
gcauaaagacaauacagca

SEQ ID NO: 2398773 - RNA, 19 nt, Homo sapiens
  misc_RNA (1)...(19): siRNA sense strand
cuaacauucgauugaagaa

SEQ ID NO: 2398774 - RNA, 19 nt, Homo sapiens
  misc_RNA (1)...(19): siRNA sense strand
cuugugaaaaucagagaaa

SEQ ID NO: 2398775 - RNA, 19 nt, Homo sapiens
  misc_RNA (1)...(19): siRNA sense strand
agagaaaccugaaugugga

SEQ ID NO: 2398776 - RNA, 19 nt, Homo sapiens
  misc_RNA (1)...(19): siRNA sense strand
agaaagaacaggucagcca

SEQ ID NO: 2398777 - RNA, 19 nt, Homo sapiens
  misc_RNA (1)...(19): siRNA sense strand
ccagaagcuuuccgggaca

SEQ ID NO: 2398778 - RNA, 19 nt, Homo sapiens
  misc_RNA (1)...(19): siRNA sense strand
cagcaaggacgaacgccaa

SEQ ID NO: 2398779 - RNA, 19 nt, Homo sapiens
  misc_RNA (1)...(19): siRNA sense strand
gcuagcaaaucuaugccaa

SEQ ID NO: 2398780 - RNA, 19 nt, Homo sapiens
  misc_RNA (1)...(19): siRNA sense strand
ggaggagaccauuggcuca

SEQ ID NO: 2398781 - RNA, 19 nt, Homo sapiens
  misc_RNA (1)...(19): siRNA sense strand
gcucagggaccuuugccaa

SEQ ID NO: 2398782 - RNA, 19 nt, Homo sapiens
  misc_RNA (1)...(19): siRNA sense strand
ccagagcaguguagggaag

SEQ ID NO: 2398783 - RNA, 19 nt, Homo sapiens
  misc_RNA (1)...(19): siRNA sense strand
ggacgaacgccaaggacag

SEQ ID NO: 2398784 - RNA, 19 nt, Homo sapiens
  misc_RNA (1)...(19): siRNA sense strand
guucugaagagcagccgaa

SEQ ID NO: 2398785 - RNA, 19 nt, Homo sapiens
  misc_RNA (1)...(19): siRNA sense strand
aagccagaacuucaggaaa

SEQ ID NO: 2398786 - RNA, 19 nt, Homo sapiens
  misc_RNA (1)...(19): siRNA sense strand
acuuagaagaagaggauau

SEQ ID NO: 2398787 - RNA, 19 nt, Homo sapiens
  misc_RNA (1)...(19): siRNA sense strand
gaaacaauuuagaagcaga

SEQ ID NO: 2398788 - RNA, 19 nt, Homo sapiens
  misc_RNA (1)...(19): siRNA sense strand
agucaacagcagaggauga

SEQ ID NO: 2398789 - RNA, 19 nt, Homo sapiens
  misc_RNA (1)...(19): siRNA sense strand
cuaaaggggagaaaagaaa

SEQ ID NO: 2398790 - RNA, 19 nt, Homo sapiens
  misc_RNA (1)...(19): siRNA sense strand
cuugcaaaucgaagugaua

SEQ ID NO: 2398791 - RNA, 19 nt, Homo sapiens
  misc_RNA (1)...(19): siRNA sense strand
auuuagaagcagaggaucu

SEQ ID NO: 2398792 - RNA, 19 nt, Homo sapiens
  misc_RNA (1)...(19): siRNA sense strand
ccuaaaggggagaaaagaa

SEQ ID NO: 2398793 - RNA, 19 nt, Homo sapiens
  misc_RNA (1)...(19): siRNA sense strand
agaccagaaggaaggagaa

SEQ ID NO: 2398794 - RNA, 19 nt, Homo sapiens
  misc_RNA (1)...(19): siRNA sense strand
cagcagaggaugaggaugc

SEQ ID NO: 2398795 - RNA, 19 nt, Homo sapiens
  misc_RNA (1)...(19): siRNA sense strand
agauucaagaacaggaaaa

SEQ ID NO: 2398796 - RNA, 19 nt, Homo sapiens
  misc_RNA (1)...(19): siRNA sense strand
ggauaguuucauaguaagu

SEQ ID NO: 2398797 - RNA, 19 nt, Homo sapiens
  misc_RNA (1)...(19): siRNA sense strand
gggaagaccagaaggaagg

SEQ ID NO: 2398798 - RNA, 19 nt, Homo sapiens
  misc_RNA (1)...(19): siRNA sense strand
augaacaccaccugaaaga

SEQ ID NO: 2398799 - RNA, 19 nt, Homo sapiens
  misc_RNA (1)...(19): siRNA sense strand
ggucagaaauucagggaag

SEQ ID NO: 2398800 - RNA, 19 nt, Homo sapiens
  misc_RNA (1)...(19): siRNA sense strand
gcaaauugacauagccaca

SEQ ID NO: 2398801 - RNA, 19 nt, Homo sapiens
  misc_RNA (1)...(19): siRNA sense strand
auuccaaauuugauggcaa

SEQ ID NO: 2398802 - RNA, 19 nt, Homo sapiens
  misc_RNA (1)...(19): siRNA sense strand
uggagacaaaguagagaua

SEQ ID NO: 2398803 - RNA, 19 nt, Homo sapiens
  misc_RNA (1)...(19): siRNA sense strand
agacaaaaccagaucaaau

SEQ ID NO: 2398804 - RNA, 19 nt, Homo sapiens
  misc_RNA (1)...(19): siRNA sense strand
caguggaaagaaagaaauu

SEQ ID NO: 2398805 - RNA, 19 nt, Homo sapiens
  misc_RNA (1)...(19): siRNA sense strand
aaucagaaagccagcacua

SEQ ID NO: 2398806 - RNA, 19 nt, Homo sapiens
  misc_RNA (1)...(19): siRNA sense strand
ucgaauaaaugcugcucau

SEQ ID NO: 2398807 - RNA, 19 nt, Homo sapiens
  misc_RNA (1)...(19): siRNA sense strand
ugaucaugauguugaccua

SEQ ID NO: 2398808 - RNA, 19 nt, Homo sapiens
  misc_RNA (1)...(19): siRNA sense strand
aagaaaaggaucccagaaa

SEQ ID NO: 2398809 - RNA, 19 nt, Homo sapiens
  misc_RNA (1)...(19): siRNA sense strand
agcacuaaguuuuggauua

SEQ ID NO: 2398810 - RNA, 19 nt, Homo sapiens
  misc_RNA (1)...(19): siRNA sense strand
auguugaccuagagaagau

SEQ ID NO: 2398811 - RNA, 19 nt, Homo sapiens
  misc_RNA (1)...(19): siRNA sense strand
aguuaaagucacuguuuga

SEQ ID NO: 2398812 - RNA, 19 nt, Homo sapiens
  misc_RNA (1)...(19): siRNA sense strand
aggacagacugcugccaau

SEQ ID NO: 2398813 - RNA, 19 nt, Homo sapiens
  misc_RNA (1)...(19): siRNA sense strand
agaaauucagggaagcaau

SEQ ID NO: 2398814 - RNA, 19 nt, Homo sapiens
  misc_RNA (1)...(19): siRNA sense strand
ggauuaagcagaaacccau

SEQ ID NO: 2398815 - RNA, 19 nt, Homo sapiens
  misc_RNA (1)...(19): siRNA sense strand
gccuggagacaguggguca

SEQ ID NO: 2398816 - RNA, 19 nt, Homo sapiens
  misc_RNA (1)...(19): siRNA sense strand
uagccacaguacaggauau

SEQ ID NO: 2398817 - RNA, 19 nt, Homo sapiens
  misc_RNA (1)...(19): siRNA sense strand
gaaaaggaucccagaaagu

SEQ ID NO: 2398818 - RNA, 19 nt, Homo sapiens
  misc_RNA (1)...(19): siRNA sense strand
cagaaauucagggaagcaa

SEQ ID NO: 2398819 - RNA, 19 nt, Homo sapiens
  misc_RNA (1)...(19): siRNA sense strand
aaaccagaucaaaugcaaa

SEQ ID NO: 2398820 - RNA, 19 nt, Homo sapiens
  misc_RNA (1)...(19): siRNA sense strand
ccagugaugacacgggaau

SEQ ID NO: 2398821 - RNA, 19 nt, Homo sapiens
  misc_RNA (1)...(19): siRNA sense strand
aagcagaaacccaucucaa

SEQ ID NO: 2398822 - RNA, 19 nt, Homo sapiens
  misc_RNA (1)...(19): siRNA sense strand
cugggaagcagucgauauu

SEQ ID NO: 2398823 - RNA, 19 nt, Homo sapiens
  misc_RNA (1)...(19): siRNA sense strand
ggauucgcaaauugacaua

SEQ ID NO: 2398824 - RNA, 19 nt, Homo sapiens
  misc_RNA (1)...(19): siRNA sense strand
gcucugugccugugaccuu

SEQ ID NO: 2398825 - RNA, 19 nt, Homo sapiens
  misc_RNA (1)...(19): siRNA sense strand
guuacgaaucagaaagcca

SEQ ID NO: 2398826 - RNA, 19 nt, Homo sapiens
  misc_RNA (1)...(19): siRNA sense strand
ugaagaagcucauggacca

SEQ ID NO: 2398827 - RNA, 19 nt, Homo sapiens
  misc_RNA (1)...(19): siRNA sense strand
uauaaugucuccagggauc

SEQ ID NO: 2398828 - RNA, 19 nt, Homo sapiens
  misc_RNA (1)...(19): siRNA sense strand
gcaagaaugagcuggccca

SEQ ID NO: 2398829 - RNA, 19 nt, Homo sapiens
  misc_RNA (1)...(19): siRNA sense strand
aggcaguucaguagcucua

SEQ ID NO: 2398830 - RNA, 19 nt, Homo sapiens
  misc_RNA (1)...(19): siRNA sense strand
aggugguuguauuggucaa

SEQ ID NO: 2398831 - RNA, 19 nt, Homo sapiens
  misc_RNA (1)...(19): siRNA sense strand
ccggaaauuugggacgcaa

SEQ ID NO: 2398832 - RNA, 19 nt, Homo sapiens
  misc_RNA (1)...(19): siRNA sense strand
guucgaugaccgcaagaau

SEQ ID NO: 2398833 - RNA, 19 nt, Homo sapiens
  misc_RNA (1)...(19): siRNA sense strand
ggacgcaaauguaugagca

SEQ ID NO: 2398834 - RNA, 19 nt, Homo sapiens
  misc_RNA (1)...(19): siRNA sense strand
cccugaucgugguggauga

SEQ ID NO: 2398835 - RNA, 19 nt, Homo sapiens
  misc_RNA (1)...(19): siRNA sense strand
uuacaugauaggauggaaa

SEQ ID NO: 2398836 - RNA, 19 nt, Homo sapiens
  misc_RNA (1)...(19): siRNA sense strand
aagguaugggugagaguaa

SEQ ID NO: 2398837 - RNA, 19 nt, Homo sapiens
  misc_RNA (1)...(19): siRNA sense strand
aguaacugugcuuggaaua

SEQ ID NO: 2398838 - RNA, 19 nt, Homo sapiens
  misc_RNA (1)...(19): siRNA sense strand
gaaucuuggccguagggaa

SEQ ID NO: 2398839 - RNA, 19 nt, Homo sapiens
  misc_RNA (1)...(19): siRNA sense strand
ugaaaaggaaacagaagaa

SEQ ID NO: 2398840 - RNA, 19 nt, Homo sapiens
  misc_RNA (1)...(19): siRNA sense strand
gcugaaagagguuccgcaa

SEQ ID NO: 2398841 - RNA, 19 nt, Homo sapiens
  misc_RNA (1)...(19): siRNA sense strand
cggaaagggaaggaggauu

SEQ ID NO: 2398842 - RNA, 19 nt, Homo sapiens
  misc_RNA (1)...(19): siRNA sense strand
uaucaugagucacaggcaa

SEQ ID NO: 2398843 - RNA, 19 nt, Homo sapiens
  misc_RNA (1)...(19): siRNA sense strand
gcggaaacggaaagggaag

SEQ ID NO: 2398844 - RNA, 19 nt, Homo sapiens
  misc_RNA (1)...(19): siRNA sense strand
cauuuggagagcuaggaaa

SEQ ID NO: 2398845 - RNA, 19 nt, Homo sapiens
  misc_RNA (1)...(19): siRNA sense strand
ggugagaguaacugugcuu

SEQ ID NO: 2398846 - RNA, 19 nt, Homo sapiens
  misc_RNA (1)...(19): siRNA sense strand
gggacaucugcuugggaga

SEQ ID NO: 2398847 - RNA, 19 nt, Homo sapiens
  misc_RNA (1)...(19): siRNA sense strand
caguuagcggaaacggaaa

SEQ ID NO: 2398848 - RNA, 19 nt, Homo sapiens
  misc_RNA (1)...(19): siRNA sense strand
ccuuacaguuagcggaaac

SEQ ID NO: 2398849 - RNA, 19 nt, Homo sapiens
  misc_RNA (1)...(19): siRNA sense strand
ugugucauuuggagagcua

SEQ ID NO: 2398850 - RNA, 19 nt, Homo sapiens
  misc_RNA (1)...(19): siRNA sense strand
gcuacauaccagaucuauu

SEQ ID NO: 2398851 - RNA, 19 nt, Homo sapiens
  misc_RNA (1)...(19): siRNA sense strand
ugaccuuccuagagcacuu

SEQ ID NO: 2398852 - RNA, 19 nt, Homo sapiens
  misc_RNA (1)...(19): siRNA sense strand
cuguggacacugaugaaau

SEQ ID NO: 2398853 - RNA, 19 nt, Homo sapiens
  misc_RNA (1)...(19): siRNA sense strand
acaugauaggauggaaaua

SEQ ID NO: 2398854 - RNA, 19 nt, Homo sapiens
  misc_RNA (1)...(19): siRNA sense strand
gaaucuuggccguagggaa

SEQ ID NO: 2398855 - RNA, 19 nt, Homo sapiens
  misc_RNA (1)...(19): siRNA sense strand
ugaaaaggaaacagaagaa

SEQ ID NO: 2398856 - RNA, 19 nt, Homo sapiens
  misc_RNA (1)...(19): siRNA sense strand
cggaaagggaaggaggauu

SEQ ID NO: 2398857 - RNA, 19 nt, Homo sapiens
  misc_RNA (1)...(19): siRNA sense strand
gcggaaacggaaagggaag

SEQ ID NO: 2398858 - RNA, 19 nt, Homo sapiens
  misc_RNA (1)...(19): siRNA sense strand
gggacaucugcuugggaga

SEQ ID NO: 2398859 - RNA, 19 nt, Homo sapiens
  misc_RNA (1)...(19): siRNA sense strand
caguuagcggaaacggaaa

SEQ ID NO: 2398860 - RNA, 19 nt, Homo sapiens
  misc_RNA (1)...(19): siRNA sense strand
ccuuacaguuagcggaaac

SEQ ID NO: 2398861 - RNA, 19 nt, Homo sapiens
  misc_RNA (1)...(19): siRNA sense strand
ugaccuuccuagagcacuu

SEQ ID NO: 2398862 - RNA, 19 nt, Homo sapiens
  misc_RNA (1)...(19): siRNA sense strand
cuguggacacugaugaaau

SEQ ID NO: 2398863 - RNA, 19 nt, Homo sapiens
  misc_RNA (1)...(19): siRNA sense strand
gaagauuuguggaaggaga

SEQ ID NO: 2398864 - RNA, 19 nt, Homo sapiens
  misc_RNA (1)...(19): siRNA sense strand
cuucaaagucuaugcagca

SEQ ID NO: 2398865 - RNA, 19 nt, Homo sapiens
  misc_RNA (1)...(19): siRNA sense strand
agccaggaaaugugaagaa

SEQ ID NO: 2398866 - RNA, 19 nt, Homo sapiens
  misc_RNA (1)...(19): siRNA sense strand
aaucgaaguauguggagga

SEQ ID NO: 2398867 - RNA, 19 nt, Homo sapiens
  misc_RNA (1)...(19): siRNA sense strand
ccgugaagguugaugagcu

SEQ ID NO: 2398868 - RNA, 19 nt, Homo sapiens
  misc_RNA (1)...(19): siRNA sense strand
aagauuuguggaaggagaa

SEQ ID NO: 2398869 - RNA, 19 nt, Homo sapiens
  misc_RNA (1)...(19): siRNA sense strand
cugaagaagugguacacga

SEQ ID NO: 2398870 - RNA, 19 nt, Homo sapiens
  misc_RNA (1)...(19): siRNA sense strand
caguaggagaggaggagua

SEQ ID NO: 2398871 - RNA, 19 nt, Homo sapiens
  misc_RNA (1)...(19): siRNA sense strand
cgguaaucaaugagcuuau

SEQ ID NO: 2398872 - RNA, 19 nt, Homo sapiens
  misc_RNA (1)...(19): siRNA sense strand
uuggaaaucugguuggaca

SEQ ID NO: 2398873 - RNA, 19 nt, Homo sapiens
  misc_RNA (1)...(19): siRNA sense strand
ggagacugguucaggagca

SEQ ID NO: 2398874 - RNA, 19 nt, Homo sapiens
  misc_RNA (1)...(19): siRNA sense strand
uggaaaucugguuggacau

SEQ ID NO: 2398875 - RNA, 19 nt, Homo sapiens
  misc_RNA (1)...(19): siRNA sense strand
aggacgaugaagaggaaga

SEQ ID NO: 2398876 - RNA, 19 nt, Homo sapiens
  misc_RNA (1)...(19): siRNA sense strand
agaagaagacaauggcuga

SEQ ID NO: 2398877 - RNA, 19 nt, Homo sapiens
  misc_RNA (1)...(19): siRNA sense strand
aggaggaggacgaugaaga

SEQ ID NO: 2398878 - RNA, 19 nt, Homo sapiens
  misc_RNA (1)...(19): siRNA sense strand
gaggagcagaagaagacaa

SEQ ID NO: 2398879 - RNA, 19 nt, Homo sapiens
  misc_RNA (1)...(19): siRNA sense strand
agguacaggaauuuagaau

SEQ ID NO: 2398880 - RNA, 19 nt, Homo sapiens
  misc_RNA (1)...(19): siRNA sense strand
aguucaagagaguaggcaa

SEQ ID NO: 2398881 - RNA, 19 nt, Homo sapiens
  misc_RNA (1)...(19): siRNA sense strand
gggagaugcaggagaagcu

SEQ ID NO: 2398882 - RNA, 19 nt, Homo sapiens
  misc_RNA (1)...(19): siRNA sense strand
aagaagaaacggaguccca

SEQ ID NO: 2398883 - RNA, 19 nt, Homo sapiens
  misc_RNA (1)...(19): siRNA sense strand
agagaguaggcaaagagaa

SEQ ID NO: 2398884 - RNA, 19 nt, Homo sapiens
  misc_RNA (1)...(19): siRNA sense strand
aguccuggcuggaggugga

SEQ ID NO: 2398885 - RNA, 19 nt, Homo sapiens
  misc_RNA (1)...(19): siRNA sense strand
aggaagaggaagaagaaga

SEQ ID NO: 2398886 - RNA, 19 nt, Homo sapiens
  misc_RNA (1)...(19): siRNA sense strand
aggaggaagaggaggaaga

SEQ ID NO: 2398887 - RNA, 19 nt, Homo sapiens
  misc_RNA (1)...(19): siRNA sense strand
aagaggaggaagaggaaga

SEQ ID NO: 2398888 - RNA, 19 nt, Homo sapiens
  misc_RNA (1)...(19): siRNA sense strand
aggaagaagaagaagagau

SEQ ID NO: 2398889 - RNA, 19 nt, Homo sapiens
  misc_RNA (1)...(19): siRNA sense strand
gaagaagaagagauggcaa

SEQ ID NO: 2398890 - RNA, 19 nt, Homo sapiens
  misc_RNA (1)...(19): siRNA sense strand
aggaagaggaggaagagga

SEQ ID NO: 2398891 - RNA, 19 nt, Homo sapiens
  misc_RNA (1)...(19): siRNA sense strand
aggaggaagaggaagaaga

SEQ ID NO: 2398892 - RNA, 19 nt, Homo sapiens
  misc_RNA (1)...(19): siRNA sense strand
aggaggaggaagaggagga

SEQ ID NO: 2398893 - RNA, 19 nt, Homo sapiens
  misc_RNA (1)...(19): siRNA sense strand
aagaggaagaagaagaaga

SEQ ID NO: 2398894 - RNA, 19 nt, Homo sapiens
  misc_RNA (1)...(19): siRNA sense strand
cucgaaagaaggaccgaaa

SEQ ID NO: 2398895 - RNA, 19 nt, Homo sapiens
  misc_RNA (1)...(19): siRNA sense strand
agaugaagcucaaggacuc

SEQ ID NO: 2398896 - RNA, 19 nt, Homo sapiens
  misc_RNA (1)...(19): siRNA sense strand
gacucagccaccagagaaa

SEQ ID NO: 2398897 - RNA, 19 nt, Homo sapiens
  misc_RNA (1)...(19): siRNA sense strand
cccuuaagccagagacuca

SEQ ID NO: 2398898 - RNA, 19 nt, Homo sapiens
  misc_RNA (1)...(19): siRNA sense strand
agaagagcaagaagcggaa

SEQ ID NO: 2398899 - RNA, 19 nt, Homo sapiens
  misc_RNA (1)...(19): siRNA sense strand
aagaagagcaagaagcgga

SEQ ID NO: 2398900 - RNA, 19 nt, Homo sapiens
  misc_RNA (1)...(19): siRNA sense strand
guuaagaaagcaaagucau

SEQ ID NO: 2398901 - RNA, 19 nt, Homo sapiens
  misc_RNA (1)...(19): siRNA sense strand
uguuaagaaagcaaaguca

SEQ ID NO: 2398902 - RNA, 19 nt, Homo sapiens
  misc_RNA (1)...(19): siRNA sense strand
aagaagaagagauggcaac

SEQ ID NO: 2398903 - RNA, 19 nt, Homo sapiens
  misc_RNA (1)...(19): siRNA sense strand
gggaaaagagaucucgaau

SEQ ID NO: 2398904 - RNA, 19 nt, Homo sapiens
  misc_RNA (1)...(19): siRNA sense strand
ucuugagagcagugggaaa

SEQ ID NO: 2398905 - RNA, 19 nt, Homo sapiens
  misc_RNA (1)...(19): siRNA sense strand
gaugaaaucuugagagcag

SEQ ID NO: 2398906 - RNA, 19 nt, Homo sapiens
  misc_RNA (1)...(19): siRNA sense strand
aauaacuaugacagggaaa

SEQ ID NO: 2398907 - RNA, 19 nt, Homo sapiens
  misc_RNA (1)...(19): siRNA sense strand
aagaaagaacggagugaag

SEQ ID NO: 2398908 - RNA, 19 nt, Homo sapiens
  misc_RNA (1)...(19): siRNA sense strand
agaagaaagaacggaguga

SEQ ID NO: 2398909 - RNA, 19 nt, Homo sapiens
  misc_RNA (1)...(19): siRNA sense strand
aauccuuguuugucggaau

SEQ ID NO: 2398910 - RNA, 19 nt, Homo sapiens
  misc_RNA (1)...(19): siRNA sense strand
ggcagcagaaagagaugaa

SEQ ID NO: 2398911 - RNA, 19 nt, Homo sapiens
  misc_RNA (1)...(19): siRNA sense strand
cuugagagcagugggaaau

SEQ ID NO: 2398912 - RNA, 19 nt, Homo sapiens
  misc_RNA (1)...(19): siRNA sense strand
acuuacuucuugagguaca

SEQ ID NO: 2398913 - RNA, 19 nt, Homo sapiens
  misc_RNA (1)...(19): siRNA sense strand
gcaaagaccuggaggaccu

SEQ ID NO: 2398914 - RNA, 19 nt, Homo sapiens
  misc_RNA (1)...(19): siRNA sense strand
cgaaauaacagaagaccca

SEQ ID NO: 2398915 - RNA, 19 nt, Homo sapiens
  misc_RNA (1)...(19): siRNA sense strand
aagaagagccucaaggaga

SEQ ID NO: 2398916 - RNA, 19 nt, Homo sapiens
  misc_RNA (1)...(19): siRNA sense strand
aggaauauauugugcagga

SEQ ID NO: 2398917 - RNA, 19 nt, Homo sapiens
  misc_RNA (1)...(19): siRNA sense strand
ccacagaucuggugagagc

SEQ ID NO: 2398918 - RNA, 19 nt, Homo sapiens
  misc_RNA (1)...(19): siRNA sense strand
ccagaugcguccaggggaa

SEQ ID NO: 2398919 - RNA, 19 nt, Homo sapiens
  misc_RNA (1)...(19): siRNA sense strand
gcaugugacgugugcgaga

SEQ ID NO: 2398920 - RNA, 19 nt, Homo sapiens
  misc_RNA (1)...(19): siRNA sense strand
ccauccaggcucugaggaa

SEQ ID NO: 2398921 - RNA, 19 nt, Homo sapiens
  misc_RNA (1)...(19): siRNA sense strand
cucauggagucuaggagaa

SEQ ID NO: 2398922 - RNA, 19 nt, Homo sapiens
  misc_RNA (1)...(19): siRNA sense strand
ccugcguuguggagagaga

SEQ ID NO: 2398923 - RNA, 19 nt, Homo sapiens
  misc_RNA (1)...(19): siRNA sense strand
ugaaggagcaccagcgcau

SEQ ID NO: 2398924 - RNA, 19 nt, Homo sapiens
  misc_RNA (1)...(19): siRNA sense strand
agaaacucaacuuggaaau

SEQ ID NO: 2398925 - RNA, 19 nt, Homo sapiens
  misc_RNA (1)...(19): siRNA sense strand
aggaaaacagggaagagaa

SEQ ID NO: 2398926 - RNA, 19 nt, Homo sapiens
  misc_RNA (1)...(19): siRNA sense strand
gccaagaagccaaggcacu

SEQ ID NO: 2398927 - RNA, 19 nt, Homo sapiens
  misc_RNA (1)...(19): siRNA sense strand
acagaucuggugagagcaa

SEQ ID NO: 2398928 - RNA, 19 nt, Homo sapiens
  misc_RNA (1)...(19): siRNA sense strand
ugaaagacguguccagcca

SEQ ID NO: 2398929 - RNA, 19 nt, Homo sapiens
  misc_RNA (1)...(19): siRNA sense strand
ggaggcagggagaggacuu

SEQ ID NO: 2398930 - RNA, 19 nt, Homo sapiens
  misc_RNA (1)...(19): siRNA sense strand
gggaagagaacccaggacu

SEQ ID NO: 2398931 - RNA, 19 nt, Homo sapiens
  misc_RNA (1)...(19): siRNA sense strand
uggaaaauguggaugcuga

SEQ ID NO: 2398932 - RNA, 19 nt, Homo sapiens
  misc_RNA (1)...(19): siRNA sense strand
gugugcgagaagagguuua

SEQ ID NO: 2398933 - RNA, 19 nt, Homo sapiens
  misc_RNA (1)...(19): siRNA sense strand
uggacaugcuggugaugga

SEQ ID NO: 2398934 - RNA, 19 nt, Homo sapiens
  misc_RNA (1)...(19): siRNA sense strand
ugacguaacaggugaccca

SEQ ID NO: 2398935 - RNA, 19 nt, Homo sapiens
  misc_RNA (1)...(19): siRNA sense strand
ccucauggagucuaggaga

SEQ ID NO: 2398936 - RNA, 19 nt, Homo sapiens
  misc_RNA (1)...(19): siRNA sense strand
gcugcaaagaccuggagga

SEQ ID NO: 2398937 - RNA, 19 nt, Homo sapiens
  misc_RNA (1)...(19): siRNA sense strand
guauugacguaacagguga

SEQ ID NO: 2398938 - RNA, 19 nt, Homo sapiens
  misc_RNA (1)...(19): siRNA sense strand
gcguagagaucaaagggaa

SEQ ID NO: 2398939 - RNA, 19 nt, Homo sapiens
  misc_RNA (1)...(19): siRNA sense strand
ggaagaacgaagagcucau

SEQ ID NO: 2398940 - RNA, 19 nt, Homo sapiens
  misc_RNA (1)...(19): siRNA sense strand
acgaagagcucauccguga

SEQ ID NO: 2398941 - RNA, 19 nt, Homo sapiens
  misc_RNA (1)...(19): siRNA sense strand
ccacuuugcucacggguca

SEQ ID NO: 2398942 - RNA, 19 nt, Homo sapiens
  misc_RNA (1)...(19): siRNA sense strand
agaucaaagggaagaacga

SEQ ID NO: 2398943 - RNA, 19 nt, Homo sapiens
  misc_RNA (1)...(19): siRNA sense strand
ggaagagucugauccgaca

SEQ ID NO: 2398944 - RNA, 19 nt, Homo sapiens
  misc_RNA (1)...(19): siRNA sense strand
cuuaaugaagagucggauu

SEQ ID NO: 2398945 - RNA, 19 nt, Homo sapiens
  misc_RNA (1)...(19): siRNA sense strand
ccaucugggccucggagaa

SEQ ID NO: 2398946 - RNA, 19 nt, Homo sapiens
  misc_RNA (1)...(19): siRNA sense strand
ccagagguuuccaaggaca

SEQ ID NO: 2398947 - RNA, 19 nt, Homo sapiens
  misc_RNA (1)...(19): siRNA sense strand
gggacagaguggugguggu

SEQ ID NO: 2398948 - RNA, 19 nt, Homo sapiens
  misc_RNA (1)...(19): siRNA sense strand
cggagaagagcucggucau

SEQ ID NO: 2398949 - RNA, 19 nt, Homo sapiens
  misc_RNA (1)...(19): siRNA sense strand
cguagagaucaaagggaag

SEQ ID NO: 2398950 - RNA, 19 nt, Homo sapiens
  misc_RNA (1)...(19): siRNA sense strand
ugacagagggacugaggca

SEQ ID NO: 2398951 - RNA, 19 nt, Homo sapiens
  misc_RNA (1)...(19): siRNA sense strand
gggacugaggcaagagcuu

SEQ ID NO: 2398952 - RNA, 19 nt, Homo sapiens
  misc_RNA (1)...(19): siRNA sense strand
aguccaugaaggagcggaa

SEQ ID NO: 2398953 - RNA, 19 nt, Homo sapiens
  misc_RNA (1)...(19): siRNA sense strand
ggaauguggacgaugggca

SEQ ID NO: 2398954 - RNA, 19 nt, Homo sapiens
  misc_RNA (1)...(19): siRNA sense strand
gggaagagcuccucaggca

SEQ ID NO: 2398955 - RNA, 19 nt, Homo sapiens
  misc_RNA (1)...(19): siRNA sense strand
cagacaguuggaagagaaa

SEQ ID NO: 2398956 - RNA, 19 nt, Homo sapiens
  misc_RNA (1)...(19): siRNA sense strand
agaaagggccgaucgggaa

SEQ ID NO: 2398957 - RNA, 19 nt, Homo sapiens
  misc_RNA (1)...(19): siRNA sense strand
gagcugaugaggaaggaga

SEQ ID NO: 2398958 - RNA, 19 nt, Homo sapiens
  misc_RNA (1)...(19): siRNA sense strand
aauaaaugacugugccgaa

SEQ ID NO: 2398959 - RNA, 19 nt, Homo sapiens
  misc_RNA (1)...(19): siRNA sense strand
agaaguugcaggaagaaaa

SEQ ID NO: 2398960 - RNA, 19 nt, Homo sapiens
  misc_RNA (1)...(19): siRNA sense strand
caggaaauugagaggcuga

SEQ ID NO: 2398961 - RNA, 19 nt, Homo sapiens
  misc_RNA (1)...(19): siRNA sense strand
cagaaagggccgaucggga

SEQ ID NO: 2398962 - RNA, 19 nt, Homo sapiens
  misc_RNA (1)...(19): siRNA sense strand
ggagagaaguccugaccag

SEQ ID NO: 2398963 - RNA, 19 nt, Homo sapiens
  misc_RNA (1)...(19): siRNA sense strand
gugccgaagugaagcagga

SEQ ID NO: 2398964 - RNA, 19 nt, Homo sapiens
  misc_RNA (1)...(19): siRNA sense strand
gauucaagaacuggaggaa

SEQ ID NO: 2398965 - RNA, 19 nt, Homo sapiens
  misc_RNA (1)...(19): siRNA sense strand
auucaagaacuggaggaaa

SEQ ID NO: 2398966 - RNA, 19 nt, Homo sapiens
  misc_RNA (1)...(19): siRNA sense strand
acaggauucucgagagcca

SEQ ID NO: 2398967 - RNA, 19 nt, Homo sapiens
  misc_RNA (1)...(19): siRNA sense strand
uggccaagugucuggauga

SEQ ID NO: 2398968 - RNA, 19 nt, Homo sapiens
  misc_RNA (1)...(19): siRNA sense strand
cccagaugcgccaggaaau

SEQ ID NO: 2398969 - RNA, 19 nt, Homo sapiens
  misc_RNA (1)...(19): siRNA sense strand
gccaggaaauugagaggcu

SEQ ID NO: 2398970 - RNA, 19 nt, Homo sapiens
  misc_RNA (1)...(19): siRNA sense strand
ggauucacgcugggagcaa

SEQ ID NO: 2398971 - RNA, 19 nt, Homo sapiens
  misc_RNA (1)...(19): siRNA sense strand
gacugagcgacuagaagaa

SEQ ID NO: 2398972 - RNA, 19 nt, Homo sapiens
  misc_RNA (1)...(19): siRNA sense strand
cguuggagcgggugcagau

SEQ ID NO: 2398973 - RNA, 19 nt, Homo sapiens
  misc_RNA (1)...(19): siRNA sense strand
ggauauaccagcauggcua

SEQ ID NO: 2398974 - RNA, 19 nt, Homo sapiens
  misc_RNA (1)...(19): siRNA sense strand
ugggagaaacagugggauu

SEQ ID NO: 2398975 - RNA, 19 nt, Homo sapiens
  misc_RNA (1)...(19): siRNA sense strand
auuuggagcagaagagaaa

SEQ ID NO: 2398976 - RNA, 19 nt, Homo sapiens
  misc_RNA (1)...(19): siRNA sense strand
ugaaaauguccuaggagaa

SEQ ID NO: 2398977 - RNA, 19 nt, Homo sapiens
  misc_RNA (1)...(19): siRNA sense strand
caguugugcuguugggcau

SEQ ID NO: 2398978 - RNA, 19 nt, Homo sapiens
  misc_RNA (1)...(19): siRNA sense strand
gcacaaggaaacugccuga

SEQ ID NO: 2398979 - RNA, 19 nt, Homo sapiens
  misc_RNA (1)...(19): siRNA sense strand
cuagcuuguucuuuggaaa

SEQ ID NO: 2398980 - RNA, 19 nt, Homo sapiens
  misc_RNA (1)...(19): siRNA sense strand
cugaaaauguccuaggaga

SEQ ID NO: 2398981 - RNA, 19 nt, Homo sapiens
  misc_RNA (1)...(19): siRNA sense strand
gcagaagagaaaagccuua

SEQ ID NO: 2398982 - RNA, 19 nt, Homo sapiens
  misc_RNA (1)...(19): siRNA sense strand
agagagugaccgaagaaca

SEQ ID NO: 2398983 - RNA, 19 nt, Homo sapiens
  misc_RNA (1)...(19): siRNA sense strand
gcuuauacaggucuggaau

SEQ ID NO: 2398984 - RNA, 19 nt, Homo sapiens
  misc_RNA (1)...(19): siRNA sense strand
uuucaucggcauuggagaa

SEQ ID NO: 2398985 - RNA, 19 nt, Homo sapiens
  misc_RNA (1)...(19): siRNA sense strand
agcuuaaauaggacagauu

SEQ ID NO: 2398986 - RNA, 19 nt, Homo sapiens
  misc_RNA (1)...(19): siRNA sense strand
aaggaaacugccugacaau

SEQ ID NO: 2398987 - RNA, 19 nt, Homo sapiens
  misc_RNA (1)...(19): siRNA sense strand
cucagauaucagagaguga

SEQ ID NO: 2398988 - RNA, 19 nt, Homo sapiens
  misc_RNA (1)...(19): siRNA sense strand
ccuaggagaagaugagucu

SEQ ID NO: 2398989 - RNA, 19 nt, Homo sapiens
  misc_RNA (1)...(19): siRNA sense strand
acaagaagaagaagcgaga

SEQ ID NO: 2398990 - RNA, 19 nt, Homo sapiens
  misc_RNA (1)...(19): siRNA sense strand
cagccauugaggagauuaa

SEQ ID NO: 2398991 - RNA, 19 nt, Homo sapiens
  misc_RNA (1)...(19): siRNA sense strand
agaagaagcgagaugguga

SEQ ID NO: 2398992 - RNA, 19 nt, Homo sapiens
  misc_RNA (1)...(19): siRNA sense strand
gaggagaagaggcgggagu

SEQ ID NO: 2398993 - RNA, 19 nt, Homo sapiens
  misc_RNA (1)...(19): siRNA sense strand
cagaugagcuggaccgguu

SEQ ID NO: 2398994 - RNA, 19 nt, Homo sapiens
  misc_RNA (1)...(19): siRNA sense strand
acuugaagaugcuggcaga

SEQ ID NO: 2398995 - RNA, 19 nt, Homo sapiens
  misc_RNA (1)...(19): siRNA sense strand
aagaagaagaagcgagaug

SEQ ID NO: 2398996 - RNA, 19 nt, Homo sapiens
  misc_RNA (1)...(19): siRNA sense strand
agaugcuggcagagagaga

SEQ ID NO: 2398997 - RNA, 19 nt, Homo sapiens
  misc_RNA (1)...(19): siRNA sense strand
aggaauacuugaagaugcu

SEQ ID NO: 2398998 - RNA, 19 nt, Homo sapiens
  misc_RNA (1)...(19): siRNA sense strand
cagcaaagacggagucggu

SEQ ID NO: 2398999 - RNA, 19 nt, Homo sapiens
  misc_RNA (1)...(19): siRNA sense strand
gagcuggaccgguugguga

SEQ ID NO: 2399000 - RNA, 19 nt, Homo sapiens
  misc_RNA (1)...(19): siRNA sense strand
aggagcgccaccaggaaua

SEQ ID NO: 2399001 - RNA, 19 nt, Homo sapiens
  misc_RNA (1)...(19): siRNA sense strand
ccgccgucucacaggcaaa

SEQ ID NO: 2399002 - RNA, 19 nt, Homo sapiens
  misc_RNA (1)...(19): siRNA sense strand
cggaagaagacgagacgga

SEQ ID NO: 2399003 - RNA, 19 nt, Homo sapiens
  misc_RNA (1)...(19): siRNA sense strand
gggcacuacaggaggguca

SEQ ID NO: 2399004 - RNA, 19 nt, Homo sapiens
  misc_RNA (1)...(19): siRNA sense strand
aagaaaagcgacaggagaa

SEQ ID NO: 2399005 - RNA, 19 nt, Homo sapiens
  misc_RNA (1)...(19): siRNA sense strand
gcaauaaagaguacgagga

SEQ ID NO: 2399006 - RNA, 19 nt, Homo sapiens
  misc_RNA (1)...(19): siRNA sense strand
aggaggagaaggagcguga

SEQ ID NO: 2399007 - RNA, 19 nt, Homo sapiens
  misc_RNA (1)...(19): siRNA sense strand
gcugcuggaggaagggaaa

SEQ ID NO: 2399008 - RNA, 19 nt, Homo sapiens
  misc_RNA (1)...(19): siRNA sense strand
aggagugaucagaggcaau

SEQ ID NO: 2399009 - RNA, 19 nt, Homo sapiens
  misc_RNA (1)...(19): siRNA sense strand
agucgcagcagaaaggaaa

SEQ ID NO: 2399010 - RNA, 19 nt, Homo sapiens
  misc_RNA (1)...(19): siRNA sense strand
aagaguacgaggaagaaaa

SEQ ID NO: 2399011 - RNA, 19 nt, Homo sapiens
  misc_RNA (1)...(19): siRNA sense strand
cggaagaaagccagacauc

SEQ ID NO: 2399012 - RNA, 19 nt, Homo sapiens
  misc_RNA (1)...(19): siRNA sense strand
gaagaaaagcgacaggaga

SEQ ID NO: 2399013 - RNA, 19 nt, Homo sapiens
  misc_RNA (1)...(19): siRNA sense strand
agaaaagcgacaggagaaa

SEQ ID NO: 2399014 - RNA, 19 nt, Homo sapiens
  misc_RNA (1)...(19): siRNA sense strand
gggaagcagcugagagguc

SEQ ID NO: 2399015 - RNA, 19 nt, Homo sapiens
  misc_RNA (1)...(19): siRNA sense strand
gacaggagaaagagaggca

SEQ ID NO: 2399016 - RNA, 19 nt, Homo sapiens
  misc_RNA (1)...(19): siRNA sense strand
aggauuacacaguggagaa

SEQ ID NO: 2399017 - RNA, 19 nt, Homo sapiens
  misc_RNA (1)...(19): siRNA sense strand
ggauaaagagggaagccca

SEQ ID NO: 2399018 - RNA, 19 nt, Homo sapiens
  misc_RNA (1)...(19): siRNA sense strand
ccgacuggauaaagaggga

SEQ ID NO: 2399019 - RNA, 19 nt, Homo sapiens
  misc_RNA (1)...(19): siRNA sense strand
ccgcugcgucugagaucaa

SEQ ID NO: 2399020 - RNA, 19 nt, Homo sapiens
  misc_RNA (1)...(19): siRNA sense strand
agaaauaacccacuggaac

SEQ ID NO: 2399021 - RNA, 19 nt, Homo sapiens
  misc_RNA (1)...(19): siRNA sense strand
ucugaugaaggaaggagaa

SEQ ID NO: 2399022 - RNA, 19 nt, Homo sapiens
  misc_RNA (1)...(19): siRNA sense strand
gaugaaggaaggagaacac

SEQ ID NO: 2399023 - RNA, 19 nt, Homo sapiens
  misc_RNA (1)...(19): siRNA sense strand
gggagaacuaccugggcaa

SEQ ID NO: 2399024 - RNA, 19 nt, Homo sapiens
  misc_RNA (1)...(19): siRNA sense strand
gcggaggaucagacggaaa

SEQ ID NO: 2399025 - RNA, 19 nt, Homo sapiens
  misc_RNA (1)...(19): siRNA sense strand
aggaaaagcaagaaggaga

SEQ ID NO: 2399026 - RNA, 19 nt, Homo sapiens
  misc_RNA (1)...(19): siRNA sense strand
gaagaaagacaaagagcac

SEQ ID NO: 2399027 - RNA, 19 nt, Homo sapiens
  misc_RNA (1)...(19): siRNA sense strand
aagaaggagaagaagaaaa

SEQ ID NO: 2399028 - RNA, 19 nt, Homo sapiens
  misc_RNA (1)...(19): siRNA sense strand
ggaaagcaguugugagagc

SEQ ID NO: 2399029 - RNA, 19 nt, Homo sapiens
  misc_RNA (1)...(19): siRNA sense strand
agcaagaaggagaagaaga

SEQ ID NO: 2399030 - RNA, 19 nt, Homo sapiens
  misc_RNA (1)...(19): siRNA sense strand
agaagaaagacaaagagca

SEQ ID NO: 2399031 - RNA, 19 nt, Homo sapiens
  misc_RNA (1)...(19): siRNA sense strand
acugacaagcagcgggaga

SEQ ID NO: 2399032 - RNA, 19 nt, Homo sapiens
  misc_RNA (1)...(19): siRNA sense strand
ccaaguuccaggagcguca

SEQ ID NO: 2399033 - RNA, 19 nt, Homo sapiens
  misc_RNA (1)...(19): siRNA sense strand
aagagaacaugaagcagca

SEQ ID NO: 2399034 - RNA, 19 nt, Homo sapiens
  misc_RNA (1)...(19): siRNA sense strand
aagaagaaagugagagcca

SEQ ID NO: 2399035 - RNA, 19 nt, Homo sapiens
  misc_RNA (1)...(19): siRNA sense strand
gcacaaagggcaagcacgu

SEQ ID NO: 2399036 - RNA, 19 nt, Homo sapiens
  misc_RNA (1)...(19): siRNA sense strand
aaggagaagaagaaaguga

SEQ ID NO: 2399037 - RNA, 19 nt, Homo sapiens
  misc_RNA (1)...(19): siRNA sense strand
acaagagcacaaagggcaa

SEQ ID NO: 2399038 - RNA, 19 nt, Homo sapiens
  misc_RNA (1)...(19): siRNA sense strand
aaacagagggagaugcaga

SEQ ID NO: 2399039 - RNA, 19 nt, Homo sapiens
  misc_RNA (1)...(19): siRNA sense strand
gaaauugguugguggaagc

SEQ ID NO: 2399040 - RNA, 19 nt, Homo sapiens
  misc_RNA (1)...(19): siRNA sense strand
gacaagagcacaaagggca

SEQ ID NO: 2399041 - RNA, 19 nt, Homo sapiens
  misc_RNA (1)...(19): siRNA sense strand
uggaagagaaauuggaaaa

SEQ ID NO: 2399042 - RNA, 19 nt, Homo sapiens
  misc_RNA (1)...(19): siRNA sense strand
uggaaaggcuagagaccca

SEQ ID NO: 2399043 - RNA, 19 nt, Homo sapiens
  misc_RNA (1)...(19): siRNA sense strand
cugaagagcugcagagcgu

SEQ ID NO: 2399044 - RNA, 19 nt, Homo sapiens
  misc_RNA (1)...(19): siRNA sense strand
agcaagaagcauuggaaga

SEQ ID NO: 2399045 - RNA, 19 nt, Homo sapiens
  misc_RNA (1)...(19): siRNA sense strand
accaaacaguggagaucaa

SEQ ID NO: 2399046 - RNA, 19 nt, Homo sapiens
  misc_RNA (1)...(19): siRNA sense strand
ggaggaaguaccaggcaga

SEQ ID NO: 2399047 - RNA, 19 nt, Homo sapiens
  misc_RNA (1)...(19): siRNA sense strand
ggaagagauagcugcaaaa

SEQ ID NO: 2399048 - RNA, 19 nt, Homo sapiens
  misc_RNA (1)...(19): siRNA sense strand
uuggaagagaaauuggaaa

SEQ ID NO: 2399049 - RNA, 19 nt, Homo sapiens
  misc_RNA (1)...(19): siRNA sense strand
cgagaugagcugagggcug

SEQ ID NO: 2399050 - RNA, 19 nt, Homo sapiens
  misc_RNA (1)...(19): siRNA sense strand
ccaaccaaacaguggagau

SEQ ID NO: 2399051 - RNA, 19 nt, Homo sapiens
  misc_RNA (1)...(19): siRNA sense strand
aguggagaucaaugagcaa

SEQ ID NO: 2399052 - RNA, 19 nt, Homo sapiens
  misc_RNA (1)...(19): siRNA sense strand
gcaucaaguguuugccuca

SEQ ID NO: 2399053 - RNA, 19 nt, Homo sapiens
  misc_RNA (1)...(19): siRNA sense strand
cagaaaguucggauggcaa

SEQ ID NO: 2399054 - RNA, 19 nt, Homo sapiens
  misc_RNA (1)...(19): siRNA sense strand
ccuucaaacagcagaaagu

SEQ ID NO: 2399055 - RNA, 19 nt, Homo sapiens
  misc_RNA (1)...(19): siRNA sense strand
cgauagaggaagcgggcuc

SEQ ID NO: 2399056 - RNA, 19 nt, Homo sapiens
  misc_RNA (1)...(19): siRNA sense strand
ccgagguggcagaggucuu

SEQ ID NO: 2399057 - RNA, 19 nt, Homo sapiens
  misc_RNA (1)...(19): siRNA sense strand
aggugaacgucuauggagu

SEQ ID NO: 2399058 - RNA, 19 nt, Homo sapiens
  misc_RNA (1)...(19): siRNA sense strand
aggcagggcuggaauggca

SEQ ID NO: 2399059 - RNA, 19 nt, Homo sapiens
  misc_RNA (1)...(19): siRNA sense strand
ggauggcaaaugagggcuu

SEQ ID NO: 2399060 - RNA, 19 nt, Homo sapiens
  misc_RNA (1)...(19): siRNA sense strand
gggaagauugccagcagca

SEQ ID NO: 2399061 - RNA, 19 nt, Homo sapiens
  misc_RNA (1)...(19): siRNA sense strand
gaagggaggaucagggaug

SEQ ID NO: 2399062 - RNA, 19 nt, Homo sapiens
  misc_RNA (1)...(19): siRNA sense strand
acuacaaaggagugaguuu

SEQ ID NO: 2399063 - RNA, 19 nt, Homo sapiens
  misc_RNA (1)...(19): siRNA sense strand
ccgcccagacagauggaua

SEQ ID NO: 2399064 - RNA, 19 nt, Homo sapiens
  misc_RNA (1)...(19): siRNA sense strand
ugaaaacauccgagccaua

SEQ ID NO: 2399065 - RNA, 19 nt, Homo sapiens
  misc_RNA (1)...(19): siRNA sense strand
aagcaguccauguggugaa

SEQ ID NO: 2399066 - RNA, 19 nt, Homo sapiens
  misc_RNA (1)...(19): siRNA sense strand
ccucgaauauuuaaaggca

SEQ ID NO: 2399067 - RNA, 19 nt, Homo sapiens
  misc_RNA (1)...(19): siRNA sense strand
gugaaagaguucugccaac

SEQ ID NO: 2399068 - RNA, 19 nt, Homo sapiens
  misc_RNA (1)...(19): siRNA sense strand
aggagugaguuuaucaaaa

SEQ ID NO: 2399069 - RNA, 19 nt, Homo sapiens
  misc_RNA (1)...(19): siRNA sense strand
ggauaaaagcaguccaugu

SEQ ID NO: 2399070 - RNA, 19 nt, Homo sapiens
  misc_RNA (1)...(19): siRNA sense strand
cuaaaggagaaaauagcaa

SEQ ID NO: 2399071 - RNA, 19 nt, Homo sapiens
  misc_RNA (1)...(19): siRNA sense strand
aggaaagguaugagagaau

SEQ ID NO: 2399072 - RNA, 19 nt, Homo sapiens
  misc_RNA (1)...(19): siRNA sense strand
aggacagacuggagcaaaa

SEQ ID NO: 2399073 - RNA, 19 nt, Homo sapiens
  misc_RNA (1)...(19): siRNA sense strand
gggccagaaggaagaggaa

SEQ ID NO: 2399074 - RNA, 19 nt, Homo sapiens
  misc_RNA (1)...(19): siRNA sense strand
agguaugagagaaucgaaa

SEQ ID NO: 2399075 - RNA, 19 nt, Homo sapiens
  misc_RNA (1)...(19): siRNA sense strand
gcguauaggaggauccaca

SEQ ID NO: 2399076 - RNA, 19 nt, Homo sapiens
  misc_RNA (1)...(19): siRNA sense strand
caggaugcguauaggagga

SEQ ID NO: 2399077 - RNA, 19 nt, Homo sapiens
  misc_RNA (1)...(19): siRNA sense strand
gaacgaugauacaaggagu

SEQ ID NO: 2399078 - RNA, 19 nt, Homo sapiens
  misc_RNA (1)...(19): siRNA sense strand
aggcagagagguuggcuga

SEQ ID NO: 2399079 - RNA, 19 nt, Homo sapiens
  misc_RNA (1)...(19): siRNA sense strand
gccagaaggaagaggaaag

SEQ ID NO: 2399080 - RNA, 19 nt, Homo sapiens
  misc_RNA (1)...(19): siRNA sense strand
acagagaaggaggaaguaa

SEQ ID NO: 2399081 - RNA, 19 nt, Homo sapiens
  misc_RNA (1)...(19): siRNA sense strand
aggaggagcaggaugcgua

SEQ ID NO: 2399082 - RNA, 19 nt, Homo sapiens
  misc_RNA (1)...(19): siRNA sense strand
agguugaugccgucagaau

SEQ ID NO: 2399083 - RNA, 19 nt, Homo sapiens
  misc_RNA (1)...(19): siRNA sense strand
cuacagugguuggaggaca

SEQ ID NO: 2399084 - RNA, 19 nt, Homo sapiens
  misc_RNA (1)...(19): siRNA sense strand
aggaaggaccgaguagaaa

SEQ ID NO: 2399085 - RNA, 19 nt, Homo sapiens
  misc_RNA (1)...(19): siRNA sense strand
ucauauaacuguuuggccu

SEQ ID NO: 2399086 - RNA, 19 nt, Homo sapiens
  misc_RNA (1)...(19): siRNA sense strand
agauaagaacacaaagacu

SEQ ID NO: 2399087 - RNA, 19 nt, Homo sapiens
  misc_RNA (1)...(19): siRNA sense strand
ccaugagaguugugggcug

SEQ ID NO: 2399088 - RNA, 19 nt, Homo sapiens
  misc_RNA (1)...(19): siRNA sense strand
ggccagaaggaagaggaaa

SEQ ID NO: 2399089 - RNA, 19 nt, Homo sapiens
  misc_RNA (1)...(19): siRNA sense strand
ucauagaagauaagaacac

SEQ ID NO: 2399090 - RNA, 19 nt, Homo sapiens
  misc_RNA (1)...(19): siRNA sense strand
gcauaggggaguugaacga

SEQ ID NO: 2399091 - RNA, 19 nt, Homo sapiens
  misc_RNA (1)...(19): siRNA sense strand
gcuucgagcaacugggcaa

SEQ ID NO: 2399092 - RNA, 19 nt, Homo sapiens
  misc_RNA (1)...(19): siRNA sense strand
cugugaagaaugaagaaau

SEQ ID NO: 2399093 - RNA, 19 nt, Homo sapiens
  misc_RNA (1)...(19): siRNA sense strand
ccaacaaggucaaggugcu

SEQ ID NO: 2399094 - RNA, 19 nt, Homo sapiens
  misc_RNA (1)...(19): siRNA sense strand
cggcuaucauugaaagcga

SEQ ID NO: 2399095 - RNA, 19 nt, Homo sapiens
  misc_RNA (1)...(19): siRNA sense strand
ugcugaacguggaggcgaa

SEQ ID NO: 2399096 - RNA, 19 nt, Homo sapiens
  misc_RNA (1)...(19): siRNA sense strand
aaucaaagauggagugacc

SEQ ID NO: 2399097 - RNA, 19 nt, Homo sapiens
  misc_RNA (1)...(19): siRNA sense strand
ccauggacagcgaggacuu

SEQ ID NO: 2399098 - RNA, 19 nt, Homo sapiens
  misc_RNA (1)...(19): siRNA sense strand
ccggaugaggacagcaaga

SEQ ID NO: 2399099 - RNA, 19 nt, Homo sapiens
  misc_RNA (1)...(19): siRNA sense strand
cugccaagcaaaucaaaga

SEQ ID NO: 2399100 - RNA, 19 nt, Homo sapiens
  misc_RNA (1)...(19): siRNA sense strand
gcugugaagaaugaagaaa

SEQ ID NO: 2399101 - RNA, 19 nt, Homo sapiens
  misc_RNA (1)...(19): siRNA sense strand
uaacaaggcaguugcagga

SEQ ID NO: 2399102 - RNA, 19 nt, Homo sapiens
  misc_RNA (1)...(19): siRNA sense strand
ccucaggcugccaagcaaa

SEQ ID NO: 2399103 - RNA, 19 nt, Homo sapiens
  misc_RNA (1)...(19): siRNA sense strand
aagaaggagacgagguauu

SEQ ID NO: 2399104 - RNA, 19 nt, Homo sapiens
  misc_RNA (1)...(19): siRNA sense strand
gggcaggugaagaaggaga

SEQ ID NO: 2399105 - RNA, 19 nt, Homo sapiens
  misc_RNA (1)...(19): siRNA sense strand
ggguagaaacugaggaguc

SEQ ID NO: 2399106 - RNA, 19 nt, Homo sapiens
  misc_RNA (1)...(19): siRNA sense strand
cuggaacggcugagcgaga

SEQ ID NO: 2399107 - RNA, 19 nt, Homo sapiens
  misc_RNA (1)...(19): siRNA sense strand
acugaggaguccagggagu

SEQ ID NO: 2399108 - RNA, 19 nt, Homo sapiens
  misc_RNA (1)...(19): siRNA sense strand
ccgaggaugggcaggugaa

SEQ ID NO: 2399109 - RNA, 19 nt, Homo sapiens
  misc_RNA (1)...(19): siRNA sense strand
aggagguguuucauagaga

SEQ ID NO: 2399110 - RNA, 19 nt, Homo sapiens
  misc_RNA (1)...(19): siRNA sense strand
ccaucuuccggcugugaaa

SEQ ID NO: 2399111 - RNA, 19 nt, Homo sapiens
  misc_RNA (1)...(19): siRNA sense strand
cauagagaacuaaggagca

SEQ ID NO: 2399112 - RNA, 19 nt, Homo sapiens
  misc_RNA (1)...(19): siRNA sense strand
augcaaugacugugggaaa

SEQ ID NO: 2399113 - RNA, 19 nt, Homo sapiens
  misc_RNA (1)...(19): siRNA sense strand
cugcagugaaugugggaaa

SEQ ID NO: 2399114 - RNA, 19 nt, Homo sapiens
  misc_RNA (1)...(19): siRNA sense strand
auguaaugagugugggaaa

SEQ ID NO: 2399115 - RNA, 19 nt, Homo sapiens
  misc_RNA (1)...(19): siRNA sense strand
gggagaaccuucaggagga

SEQ ID NO: 2399116 - RNA, 19 nt, Homo sapiens
  misc_RNA (1)...(19): siRNA sense strand
ggagaauacauaauggaga

SEQ ID NO: 2399117 - RNA, 19 nt, Homo sapiens
  misc_RNA (1)...(19): siRNA sense strand
auaugaaaauggagaggaa

SEQ ID NO: 2399118 - RNA, 19 nt, Homo sapiens
  misc_RNA (1)...(19): siRNA sense strand
guauguaaucaguguggaa

SEQ ID NO: 2399119 - RNA, 19 nt, Homo sapiens
  misc_RNA (1)...(19): siRNA sense strand
guugauaaaccuaggcuga

SEQ ID NO: 2399120 - RNA, 19 nt, Homo sapiens
  misc_RNA (1)...(19): siRNA sense strand
gaaucaucuuggagcaaca

SEQ ID NO: 2399121 - RNA, 19 nt, Homo sapiens
  misc_RNA (1)...(19): siRNA sense strand
agugaugacagaagagaga

SEQ ID NO: 2399122 - RNA, 19 nt, Homo sapiens
  misc_RNA (1)...(19): siRNA sense strand
gggaaaaccuucagcagca

SEQ ID NO: 2399123 - RNA, 19 nt, Homo sapiens
  misc_RNA (1)...(19): siRNA sense strand
gguuaaugagcuccugaaa

SEQ ID NO: 2399124 - RNA, 19 nt, Homo sapiens
  misc_RNA (1)...(19): siRNA sense strand
cuuacaauucacaggagaa

SEQ ID NO: 2399125 - RNA, 19 nt, Homo sapiens
  misc_RNA (1)...(19): siRNA sense strand
gaggaaucaucuuggagca

SEQ ID NO: 2399126 - RNA, 19 nt, Homo sapiens
  misc_RNA (1)...(19): siRNA sense strand
gagaauacauaauggagag

SEQ ID NO: 2399127 - RNA, 19 nt, Homo sapiens
  misc_RNA (1)...(19): siRNA sense strand
agcuggagcaagaagauaa

SEQ ID NO: 2399128 - RNA, 19 nt, Homo sapiens
  misc_RNA (1)...(19): siRNA sense strand
cauuuaaagccaaaggguu

SEQ ID NO: 2399129 - RNA, 19 nt, Homo sapiens
  misc_RNA (1)...(19): siRNA sense strand
augacagaagagagaggaa

SEQ ID NO: 2399130 - RNA, 19 nt, Homo sapiens
  misc_RNA (1)...(19): siRNA sense strand
cauaagaacucauacugga

SEQ ID NO: 2399131 - RNA, 19 nt, Homo sapiens
  misc_RNA (1)...(19): siRNA sense strand
ucacaggagaauacauaau

SEQ ID NO: 2399132 - RNA, 19 nt, Homo sapiens
  misc_RNA (1)...(19): siRNA sense strand
gagaauccauuuaaagcca

SEQ ID NO: 2399133 - RNA, 19 nt, Homo sapiens
  misc_RNA (1)...(19): siRNA sense strand
guucauaagagaauccaca

SEQ ID NO: 2399134 - RNA, 19 nt, Homo sapiens
  misc_RNA (1)...(19): siRNA sense strand
guucauaagagaauccaca

SEQ ID NO: 2399135 - RNA, 19 nt, Homo sapiens
  misc_RNA (1)...(19): siRNA sense strand
aggauguggccguggaguu

SEQ ID NO: 2399136 - RNA, 19 nt, Homo sapiens
  misc_RNA (1)...(19): siRNA sense strand
ugacagaagagagaggaau

SEQ ID NO: 2399137 - RNA, 19 nt, Homo sapiens
  misc_RNA (1)...(19): siRNA sense strand
aagaacucauacuggagaa

SEQ ID NO: 2399138 - RNA, 19 nt, Homo sapiens
  misc_RNA (1)...(19): siRNA sense strand
gggugaagaacaucgaaua

SEQ ID NO: 2399139 - RNA, 19 nt, Homo sapiens
  misc_RNA (1)...(19): siRNA sense strand
gcucaugaagacuguguaa

SEQ ID NO: 2399140 - RNA, 19 nt, Homo sapiens
  misc_RNA (1)...(19): siRNA sense strand
cacuaugggaucugagaaa

SEQ ID NO: 2399141 - RNA, 19 nt, Homo sapiens
  misc_RNA (1)...(19): siRNA sense strand
gaagauggguguccacaua

SEQ ID NO: 2399142 - RNA, 19 nt, Homo sapiens
  misc_RNA (1)...(19): siRNA sense strand
cuuaguaacaucaggauuu

SEQ ID NO: 2399143 - RNA, 19 nt, Homo sapiens
  misc_RNA (1)...(19): siRNA sense strand
ggugaagaacaucgaauau

SEQ ID NO: 2399144 - RNA, 19 nt, Homo sapiens
  misc_RNA (1)...(19): siRNA sense strand
ucaugaagacuguguaaau

SEQ ID NO: 2399145 - RNA, 19 nt, Homo sapiens
  misc_RNA (1)...(19): siRNA sense strand
ucaaagagaaggaguuuca

SEQ ID NO: 2399146 - RNA, 19 nt, Homo sapiens
  misc_RNA (1)...(19): siRNA sense strand
agaaggagcuccagugcga

SEQ ID NO: 2399147 - RNA, 19 nt, Homo sapiens
  misc_RNA (1)...(19): siRNA sense strand
ugaagaacaucgaauauga

SEQ ID NO: 2399148 - RNA, 19 nt, Homo sapiens
  misc_RNA (1)...(19): siRNA sense strand
caugaagacuguguaaaua

SEQ ID NO: 2399149 - RNA, 19 nt, Homo sapiens
  misc_RNA (1)...(19): siRNA sense strand
cuuuagaaguaggcagcua

SEQ ID NO: 2399150 - RNA, 19 nt, Homo sapiens
  misc_RNA (1)...(19): siRNA sense strand
gugagagugaccacggaaa

SEQ ID NO: 2399151 - RNA, 19 nt, Homo sapiens
  misc_RNA (1)...(19): siRNA sense strand
ugacacuacaauagcacua

SEQ ID NO: 2399152 - RNA, 19 nt, Homo sapiens
  misc_RNA (1)...(19): siRNA sense strand
gauucuaauucuucugaga

SEQ ID NO: 2399153 - RNA, 19 nt, Homo sapiens
  misc_RNA (1)...(19): siRNA sense strand
uaacagguauacagaagau

SEQ ID NO: 2399154 - RNA, 19 nt, Homo sapiens
  misc_RNA (1)...(19): siRNA sense strand
ucaucugguccuagaguuu

SEQ ID NO: 2399155 - RNA, 19 nt, Homo sapiens
  misc_RNA (1)...(19): siRNA sense strand
ugagaaaauugaacaccaa

SEQ ID NO: 2399156 - RNA, 19 nt, Homo sapiens
  misc_RNA (1)...(19): siRNA sense strand
cuagcugggugaagaacau

SEQ ID NO: 2399157 - RNA, 19 nt, Homo sapiens
  misc_RNA (1)...(19): siRNA sense strand
gggauucgcuuguugggau

SEQ ID NO: 2399158 - RNA, 19 nt, Homo sapiens
  misc_RNA (1)...(19): siRNA sense strand
acacuagcugggugaagaa

SEQ ID NO: 2399159 - RNA, 19 nt, Homo sapiens
  misc_RNA (1)...(19): siRNA sense strand
uuuaagagcaagaagaacu

SEQ ID NO: 2399160 - RNA, 19 nt, Homo sapiens
  misc_RNA (1)...(19): siRNA sense strand
gugccuuaguggacggguu

SEQ ID NO: 2399161 - RNA, 19 nt, Homo sapiens
  misc_RNA (1)...(19): siRNA sense strand
ugggacacuaacagguaua

SEQ ID NO: 2399162 - RNA, 19 nt, Homo sapiens
  misc_RNA (1)...(19): siRNA sense strand
acuaacagguauacagaag

SEQ ID NO: 2399163 - RNA, 19 nt, Homo sapiens
  misc_RNA (1)...(19): siRNA sense strand
guauacagaagaugggugu

SEQ ID NO: 2399164 - RNA, 19 nt, Homo sapiens
  misc_RNA (1)...(19): siRNA sense strand
ggguuacaucaaagaacuu

SEQ ID NO: 2399165 - RNA, 19 nt, Homo sapiens
  misc_RNA (1)...(19): siRNA sense strand
caacagugaugaugaggag

SEQ ID NO: 2399166 - RNA, 19 nt, Homo sapiens
  misc_RNA (1)...(19): siRNA sense strand
cuaugaauuccaagaagga

SEQ ID NO: 2399167 - RNA, 19 nt, Homo sapiens
  misc_RNA (1)...(19): siRNA sense strand
gcgaaugagguuaacacca

SEQ ID NO: 2399168 - RNA, 19 nt, Homo sapiens
  misc_RNA (1)...(19): siRNA sense strand
gcugacaguugcuugugaa

SEQ ID NO: 2399169 - RNA, 19 nt, Homo sapiens
  misc_RNA (1)...(19): siRNA sense strand
gggaaggagaggagaacaa

SEQ ID NO: 2399170 - RNA, 19 nt, Homo sapiens
  misc_RNA (1)...(19): siRNA sense strand
ccuucaagaccaagaguaa

SEQ ID NO: 2399171 - RNA, 19 nt, Homo sapiens
  misc_RNA (1)...(19): siRNA sense strand
aggaagaggaggaaagaga

SEQ ID NO: 2399172 - RNA, 19 nt, Homo sapiens
  misc_RNA (1)...(19): siRNA sense strand
uggguuaagugaagagcaa

SEQ ID NO: 2399173 - RNA, 19 nt, Homo sapiens
  misc_RNA (1)...(19): siRNA sense strand
caguaaacccucugccaaa

SEQ ID NO: 2399174 - RNA, 19 nt, Homo sapiens
  misc_RNA (1)...(19): siRNA sense strand
ggagaaagacacaggcuca

SEQ ID NO: 2399175 - RNA, 19 nt, Homo sapiens
  misc_RNA (1)...(19): siRNA sense strand
ugggaagaggccagagaaa

SEQ ID NO: 2399176 - RNA, 19 nt, Homo sapiens
  misc_RNA (1)...(19): siRNA sense strand
ccaagaaggcugagggaag

SEQ ID NO: 2399177 - RNA, 19 nt, Homo sapiens
  misc_RNA (1)...(19): siRNA sense strand
gagggaugaccaugggaaa

SEQ ID NO: 2399178 - RNA, 19 nt, Homo sapiens
  misc_RNA (1)...(19): siRNA sense strand
guucagaggcuguggagga

SEQ ID NO: 2399179 - RNA, 19 nt, Homo sapiens
  misc_RNA (1)...(19): siRNA sense strand
cgguacaagaaaagggaua

SEQ ID NO: 2399180 - RNA, 19 nt, Homo sapiens
  misc_RNA (1)...(19): siRNA sense strand
ccacagaagaggcacacaa

SEQ ID NO: 2399181 - RNA, 19 nt, Homo sapiens
  misc_RNA (1)...(19): siRNA sense strand
cugagaagacugaggaguu

SEQ ID NO: 2399182 - RNA, 19 nt, Homo sapiens
  misc_RNA (1)...(19): siRNA sense strand
cacacaagaaggagaggaa

SEQ ID NO: 2399183 - RNA, 19 nt, Homo sapiens
  misc_RNA (1)...(19): siRNA sense strand
cggacgaaguggaacccaa

SEQ ID NO: 2399184 - RNA, 19 nt, Homo sapiens
  misc_RNA (1)...(19): siRNA sense strand
ccaucugacacaaaggaaa

SEQ ID NO: 2399185 - RNA, 19 nt, Homo sapiens
  misc_RNA (1)...(19): siRNA sense strand
ccacugaggaagaggagga

SEQ ID NO: 2399186 - RNA, 19 nt, Homo sapiens
  misc_RNA (1)...(19): siRNA sense strand
ucagaagcuuugaaggaau

SEQ ID NO: 2399187 - RNA, 19 nt, Homo sapiens
  misc_RNA (1)...(19): siRNA sense strand
aaacaaaaggggugaucua

SEQ ID NO: 2399188 - RNA, 19 nt, Homo sapiens
  misc_RNA (1)...(19): siRNA sense strand
gguacaaaucaaacgaaga

SEQ ID NO: 2399189 - RNA, 19 nt, Homo sapiens
  misc_RNA (1)...(19): siRNA sense strand
uggacgaagacgaggauga

SEQ ID NO: 2399190 - RNA, 19 nt, Homo sapiens
  misc_RNA (1)...(19): siRNA sense strand
agucgaaggcccacagcaa

SEQ ID NO: 2399191 - RNA, 19 nt, Homo sapiens
  misc_RNA (1)...(19): siRNA sense strand
aagacgaggaugaggauga

SEQ ID NO: 2399192 - RNA, 19 nt, Homo sapiens
  misc_RNA (1)...(19): siRNA sense strand
cuaagcagaaagugagcaa

SEQ ID NO: 2399193 - RNA, 19 nt, Homo sapiens
  misc_RNA (1)...(19): siRNA sense strand
aggaugaggaggagagcca

SEQ ID NO: 2399194 - RNA, 19 nt, Homo sapiens
  misc_RNA (1)...(19): siRNA sense strand
gaacaaagugucaagggca

SEQ ID NO: 2399195 - RNA, 19 nt, Homo sapiens
  misc_RNA (1)...(19): siRNA sense strand
agggaagacaggagagcga

SEQ ID NO: 2399196 - RNA, 19 nt, Homo sapiens
  misc_RNA (1)...(19): siRNA sense strand
caucugacacaaaggaaau

SEQ ID NO: 2399197 - RNA, 19 nt, Homo sapiens
  misc_RNA (1)...(19): siRNA sense strand
ucuccaaacucgaggguac

SEQ ID NO: 2399198 - RNA, 19 nt, Homo sapiens
  misc_RNA (1)...(19): siRNA sense strand
gaguggagaaggaagaaga

SEQ ID NO: 2399199 - RNA, 19 nt, Homo sapiens
  misc_RNA (1)...(19): siRNA sense strand
cagaaagugagcaaagaga

SEQ ID NO: 2399200 - RNA, 19 nt, Homo sapiens
  misc_RNA (1)...(19): siRNA sense strand
aggaugaggaugaggagga

SEQ ID NO: 2399201 - RNA, 19 nt, Homo sapiens
  misc_RNA (1)...(19): siRNA sense strand
cuagaguggagaaggaaga

SEQ ID NO: 2399202 - RNA, 19 nt, Homo sapiens
  misc_RNA (1)...(19): siRNA sense strand
cuuccaaggcagaugaaaa

SEQ ID NO: 2399203 - RNA, 19 nt, Homo sapiens
  misc_RNA (1)...(19): siRNA sense strand
aggucuaagcagaaaguga

SEQ ID NO: 2399204 - RNA, 19 nt, Homo sapiens
  misc_RNA (1)...(19): siRNA sense strand
gggugaucuacgaauguaa

SEQ ID NO: 2399205 - RNA, 19 nt, Homo sapiens
  misc_RNA (1)...(19): siRNA sense strand
gggaagaguuugaggagcc

SEQ ID NO: 2399206 - RNA, 19 nt, Homo sapiens
  misc_RNA (1)...(19): siRNA sense strand
ucagggaaggagaggagaa

SEQ ID NO: 2399207 - RNA, 19 nt, Homo sapiens
  misc_RNA (1)...(19): siRNA sense strand
cggaaggacgagaggguuc

SEQ ID NO: 2399208 - RNA, 19 nt, Homo sapiens
  misc_RNA (1)...(19): siRNA sense strand
aggcauggguggcgagaug

SEQ ID NO: 2399209 - RNA, 19 nt, Homo sapiens
  misc_RNA (1)...(19): siRNA sense strand
acacagaagcacugcaagu

SEQ ID NO: 2399210 - RNA, 19 nt, Homo sapiens
  misc_RNA (1)...(19): siRNA sense strand
uggcaagugugggcgaaua

SEQ ID NO: 2399211 - RNA, 19 nt, Homo sapiens
  misc_RNA (1)...(19): siRNA sense strand
ugaagaaagaagauuccaa

SEQ ID NO: 2399212 - RNA, 19 nt, Homo sapiens
  misc_RNA (1)...(19): siRNA sense strand
aagugagcaaagagacaua

SEQ ID NO: 2399213 - RNA, 19 nt, Homo sapiens
  misc_RNA (1)...(19): siRNA sense strand
aaucaaacgaagaguaugu

SEQ ID NO: 2399214 - RNA, 19 nt, Homo sapiens
  misc_RNA (1)...(19): siRNA sense strand
gaaauauguuugugaggag

SEQ ID NO: 2399215 - RNA, 19 nt, Homo sapiens
  misc_RNA (1)...(19): siRNA sense strand
ggcuggagauggagcggau

SEQ ID NO: 2399216 - RNA, 19 nt, Homo sapiens
  misc_RNA (1)...(19): siRNA sense strand
ggaggaaagagaagagccu

SEQ ID NO: 2399217 - RNA, 19 nt, Homo sapiens
  misc_RNA (1)...(19): siRNA sense strand
ugaccaaaggagaggccau

SEQ ID NO: 2399218 - RNA, 19 nt, Homo sapiens
  misc_RNA (1)...(19): siRNA sense strand
ccgugucgccuguggcuaa

SEQ ID NO: 2399219 - RNA, 19 nt, Homo sapiens
  misc_RNA (1)...(19): siRNA sense strand
caagaguacagcagugaca

SEQ ID NO: 2399220 - RNA, 19 nt, Homo sapiens
  misc_RNA (1)...(19): siRNA sense strand
ggcaggagggagcuagaaa

SEQ ID NO: 2399221 - RNA, 19 nt, Homo sapiens
  misc_RNA (1)...(19): siRNA sense strand
aggaggagagccaggauga

SEQ ID NO: 2399222 - RNA, 19 nt, Homo sapiens
  misc_RNA (1)...(19): siRNA sense strand
agaaaucccacuuaggcaa

SEQ ID NO: 2399223 - RNA, 19 nt, Homo sapiens
  misc_RNA (1)...(19): siRNA sense strand
ccauaaaccugaagacacc

SEQ ID NO: 2399224 - RNA, 19 nt, Homo sapiens
  misc_RNA (1)...(19): siRNA sense strand
cugaggaagaggaggaaag

SEQ ID NO: 2399225 - RNA, 19 nt, Homo sapiens
  misc_RNA (1)...(19): siRNA sense strand
ggaaauauguuugugagga

SEQ ID NO: 2399226 - RNA, 19 nt, Homo sapiens
  misc_RNA (1)...(19): siRNA sense strand
gaagaggagacuagugcca

SEQ ID NO: 2399227 - RNA, 19 nt, Homo sapiens
  misc_RNA (1)...(19): siRNA sense strand
gguuaagugaagagcaaag

SEQ ID NO: 2399228 - RNA, 19 nt, Homo sapiens
  misc_RNA (1)...(19): siRNA sense strand
auggaaacccagcagcaaa

SEQ ID NO: 2399229 - RNA, 19 nt, Homo sapiens
  misc_RNA (1)...(19): siRNA sense strand
ccgaagaaggaaccaguga

SEQ ID NO: 2399230 - RNA, 19 nt, Homo sapiens
  misc_RNA (1)...(19): siRNA sense strand
ggcccaagcagcaaagaca

SEQ ID NO: 2399231 - RNA, 19 nt, Homo sapiens
  misc_RNA (1)...(19): siRNA sense strand
gcaggagggagcuagaaau

SEQ ID NO: 2399232 - RNA, 19 nt, Homo sapiens
  misc_RNA (1)...(19): siRNA sense strand
ccggaaggccagaaagauc

SEQ ID NO: 2399233 - RNA, 19 nt, Homo sapiens
  misc_RNA (1)...(19): siRNA sense strand
augcaaguacugugguaaa

SEQ ID NO: 2399234 - RNA, 19 nt, Homo sapiens
  misc_RNA (1)...(19): siRNA sense strand
ccuccaaccaagaagggaa

SEQ ID NO: 2399235 - RNA, 19 nt, Homo sapiens
  misc_RNA (1)...(19): siRNA sense strand
ccuacaaauauuacagaga

SEQ ID NO: 2399236 - RNA, 19 nt, Homo sapiens
  misc_RNA (1)...(19): siRNA sense strand
ucucaaucuuccagccuaa

SEQ ID NO: 2399237 - RNA, 19 nt, Homo sapiens
  misc_RNA (1)...(19): siRNA sense strand
uggacaagggcgauaggaa

SEQ ID NO: 2399238 - RNA, 19 nt, Homo sapiens
  misc_RNA (1)...(19): siRNA sense strand
guguucuacaugugggaaa

SEQ ID NO: 2399239 - RNA, 19 nt, Homo sapiens
  misc_RNA (1)...(19): siRNA sense strand
guucacacaaggaggauga

SEQ ID NO: 2399240 - RNA, 19 nt, Homo sapiens
  misc_RNA (1)...(19): siRNA sense strand
gccacuuuauagauggaaa

SEQ ID NO: 2399241 - RNA, 19 nt, Homo sapiens
  misc_RNA (1)...(19): siRNA sense strand
ccacuuuauagauggaaaa

SEQ ID NO: 2399242 - RNA, 19 nt, Homo sapiens
  misc_RNA (1)...(19): siRNA sense strand
uggagacugcuaugagaaa

SEQ ID NO: 2399243 - RNA, 19 nt, Homo sapiens
  misc_RNA (1)...(19): siRNA sense strand
aagugaagaccuacggaga

SEQ ID NO: 2399244 - RNA, 19 nt, Homo sapiens
  misc_RNA (1)...(19): siRNA sense strand
aggcuacagaugugaaaga

SEQ ID NO: 2399245 - RNA, 19 nt, Homo sapiens
  misc_RNA (1)...(19): siRNA sense strand
cggaggaggaccugcacuu

SEQ ID NO: 2399246 - RNA, 19 nt, Homo sapiens
  misc_RNA (1)...(19): siRNA sense strand
cagcaagcagucagaggau

SEQ ID NO: 2399247 - RNA, 19 nt, Homo sapiens
  misc_RNA (1)...(19): siRNA sense strand
gcagugaagaucugggcca

SEQ ID NO: 2399248 - RNA, 19 nt, Homo sapiens
  misc_RNA (1)...(19): siRNA sense strand
acuaagagguucacagccu

SEQ ID NO: 2399249 - RNA, 19 nt, Homo sapiens
  misc_RNA (1)...(19): siRNA sense strand
gaaaaggagguacggggaa

SEQ ID NO: 2399250 - RNA, 19 nt, Homo sapiens
  misc_RNA (1)...(19): siRNA sense strand
ggucuaugccucaugcaga

SEQ ID NO: 2399251 - RNA, 19 nt, Homo sapiens
  misc_RNA (1)...(19): siRNA sense strand
uaaacaaacacaugcgagu

SEQ ID NO: 2399252 - RNA, 19 nt, Homo sapiens
  misc_RNA (1)...(19): siRNA sense strand
gagaugaaguggaagguga

SEQ ID NO: 2399253 - RNA, 19 nt, Homo sapiens
  misc_RNA (1)...(19): siRNA sense strand
ggaacaaugaugaaggcaa

SEQ ID NO: 2399254 - RNA, 19 nt, Homo sapiens
  misc_RNA (1)...(19): siRNA sense strand
agaugaaggaggaggaaga

SEQ ID NO: 2399255 - RNA, 19 nt, Homo sapiens
  misc_RNA (1)...(19): siRNA sense strand
gggagagggcuguggaaaa

SEQ ID NO: 2399256 - RNA, 19 nt, Homo sapiens
  misc_RNA (1)...(19): siRNA sense strand
acuuagagaugaaggagga

SEQ ID NO: 2399257 - RNA, 19 nt, Homo sapiens
  misc_RNA (1)...(19): siRNA sense strand
gggaagacgaggaagagga

SEQ ID NO: 2399258 - RNA, 19 nt, Homo sapiens
  misc_RNA (1)...(19): siRNA sense strand
gauuagugagacaggagaa

SEQ ID NO: 2399259 - RNA, 19 nt, Homo sapiens
  misc_RNA (1)...(19): siRNA sense strand
gcaguggaauggcgggaga

SEQ ID NO: 2399260 - RNA, 19 nt, Homo sapiens
  misc_RNA (1)...(19): siRNA sense strand
ggcgggaagacgaggaaga

SEQ ID NO: 2399261 - RNA, 19 nt, Homo sapiens
  misc_RNA (1)...(19): siRNA sense strand
ugggccagccaaagggaaa

SEQ ID NO: 2399262 - RNA, 19 nt, Homo sapiens
  misc_RNA (1)...(19): siRNA sense strand
acgaggaagaggagggaac

SEQ ID NO: 2399263 - RNA, 19 nt, Homo sapiens
  misc_RNA (1)...(19): siRNA sense strand
gaggaagaggagggaacaa

SEQ ID NO: 2399264 - RNA, 19 nt, Homo sapiens
  misc_RNA (1)...(19): siRNA sense strand
cgggagagggcuguggaaa

SEQ ID NO: 2399265 - RNA, 19 nt, Homo sapiens
  misc_RNA (1)...(19): siRNA sense strand
aggugagggcugagaagga

SEQ ID NO: 2399266 - RNA, 19 nt, Homo sapiens
  misc_RNA (1)...(19): siRNA sense strand
gaggugcuuaggagggaaa

SEQ ID NO: 2399267 - RNA, 19 nt, Homo sapiens
  misc_RNA (1)...(19): siRNA sense strand
gggcugagaaggaggcaug

SEQ ID NO: 2399268 - RNA, 19 nt, Homo sapiens
  misc_RNA (1)...(19): siRNA sense strand
gggacuuagagaugaagga

SEQ ID NO: 2399269 - RNA, 19 nt, Homo sapiens
  misc_RNA (1)...(19): siRNA sense strand
gggaaaaggaggugcuuag

SEQ ID NO: 2399270 - RNA, 19 nt, Homo sapiens
  misc_RNA (1)...(19): siRNA sense strand
aggaagaggagggaacaau

SEQ ID NO: 2399271 - RNA, 19 nt, Homo sapiens
  misc_RNA (1)...(19): siRNA sense strand
aggaggaagagauuaguga

SEQ ID NO: 2399272 - RNA, 19 nt, Homo sapiens
  misc_RNA (1)...(19): siRNA sense strand
cguugggccucgaccacaa

SEQ ID NO: 2399273 - RNA, 19 nt, Homo sapiens
  misc_RNA (1)...(19): siRNA sense strand
acaacaaccucgagcagcu

SEQ ID NO: 2399274 - RNA, 19 nt, Homo sapiens
  misc_RNA (1)...(19): siRNA sense strand
gcguuugcucccagaccaa

SEQ ID NO: 2399275 - RNA, 19 nt, Homo sapiens
  misc_RNA (1)...(19): siRNA sense strand
ccuuaaagaaagagaaucu

SEQ ID NO: 2399276 - RNA, 19 nt, Homo sapiens
  misc_RNA (1)...(19): siRNA sense strand
gcgccuuggagaagauaaa

SEQ ID NO: 2399277 - RNA, 19 nt, Homo sapiens
  misc_RNA (1)...(19): siRNA sense strand
ggacaagauugaaaggaac

SEQ ID NO: 2399278 - RNA, 19 nt, Homo sapiens
  misc_RNA (1)...(19): siRNA sense strand
gugaaaaucuagagagacu

SEQ ID NO: 2399279 - RNA, 19 nt, Homo sapiens
  misc_RNA (1)...(19): siRNA sense strand
cagacacaccugagagaau

SEQ ID NO: 2399280 - RNA, 19 nt, Homo sapiens
  misc_RNA (1)...(19): siRNA sense strand
gagaagagcgccuuggaga

SEQ ID NO: 2399281 - RNA, 19 nt, Homo sapiens
  misc_RNA (1)...(19): siRNA sense strand
uggagaagauaaaggagga

SEQ ID NO: 2399282 - RNA, 19 nt, Homo sapiens
  misc_RNA (1)...(19): siRNA sense strand
cagaagaaggagguggaaa

SEQ ID NO: 2399283 - RNA, 19 nt, Homo sapiens
  misc_RNA (1)...(19): siRNA sense strand
ucccaaggacagaggcaaa

SEQ ID NO: 2399284 - RNA, 19 nt, Homo sapiens
  misc_RNA (1)...(19): siRNA sense strand
agaagaaggagguggaaag

SEQ ID NO: 2399285 - RNA, 19 nt, Homo sapiens
  misc_RNA (1)...(19): siRNA sense strand
agaagagcgccuuggagaa

SEQ ID NO: 2399286 - RNA, 19 nt, Homo sapiens
  misc_RNA (1)...(19): siRNA sense strand
aucagagccuugugggaaa

SEQ ID NO: 2399287 - RNA, 19 nt, Homo sapiens
  misc_RNA (1)...(19): siRNA sense strand
cauugaaggagcagacaca

SEQ ID NO: 2399288 - RNA, 19 nt, Homo sapiens
  misc_RNA (1)...(19): siRNA sense strand
ucgccaacauuuugauaaa

SEQ ID NO: 2399289 - RNA, 19 nt, Homo sapiens
  misc_RNA (1)...(19): siRNA sense strand
uggcaaugaaauaauggaa

SEQ ID NO: 2399290 - RNA, 19 nt, Homo sapiens
  misc_RNA (1)...(19): siRNA sense strand
uugaagaaccugaaagaac

SEQ ID NO: 2399291 - RNA, 19 nt, Homo sapiens
  misc_RNA (1)...(19): siRNA sense strand
uugugaaaaucuagagaga

SEQ ID NO: 2399292 - RNA, 19 nt, Homo sapiens
  misc_RNA (1)...(19): siRNA sense strand
agaaggagguggaaaggcu

SEQ ID NO: 2399293 - RNA, 19 nt, Homo sapiens
  misc_RNA (1)...(19): siRNA sense strand
cagaauugggagauuguga

SEQ ID NO: 2399294 - RNA, 19 nt, Homo sapiens
  misc_RNA (1)...(19): siRNA sense strand
gacaagauugaaaggaaca

SEQ ID NO: 2399295 - RNA, 19 nt, Homo sapiens
  misc_RNA (1)...(19): siRNA sense strand
gcaagauauagacaggcua

SEQ ID NO: 2399296 - RNA, 19 nt, Homo sapiens
  misc_RNA (1)...(19): siRNA sense strand
ccaaugugaagauggcaau

SEQ ID NO: 2399297 - RNA, 19 nt, Homo sapiens
  misc_RNA (1)...(19): siRNA sense strand
cuucuggacaagauugaaa

SEQ ID NO: 2399298 - RNA, 19 nt, Homo sapiens
  misc_RNA (1)...(19): siRNA sense strand
agagaaugguacauaagca

SEQ ID NO: 2399299 - RNA, 19 nt, Homo sapiens
  misc_RNA (1)...(19): siRNA sense strand
ggcagaagaaggaggugga

SEQ ID NO: 2399300 - RNA, 19 nt, Homo sapiens
  misc_RNA (1)...(19): siRNA sense strand
gguggaaaggcuugagaag

SEQ ID NO: 2399301 - RNA, 19 nt, Homo sapiens
  misc_RNA (1)...(19): siRNA sense strand
caucagagccuugugggaa

SEQ ID NO: 2399302 - RNA, 19 nt, Homo sapiens
  misc_RNA (1)...(19): siRNA sense strand
ggacagaggcaaacggagc

SEQ ID NO: 2399303 - RNA, 19 nt, Homo sapiens
  misc_RNA (1)...(19): siRNA sense strand
cccaaugugaagauggcaa

SEQ ID NO: 2399304 - RNA, 19 nt, Homo sapiens
  misc_RNA (1)...(19): siRNA sense strand
ugugaagauggcaaugaaa

SEQ ID NO: 2399305 - RNA, 19 nt, Homo sapiens
  misc_RNA (1)...(19): siRNA sense strand
aagaaguuaugaaagccua

SEQ ID NO: 2399306 - RNA, 19 nt, Homo sapiens
  misc_RNA (1)...(19): siRNA sense strand
ccuauauugaagaccuuaa

SEQ ID NO: 2399307 - RNA, 19 nt, Homo sapiens
  misc_RNA (1)...(19): siRNA sense strand
auaaaggaggaguggaacu

SEQ ID NO: 2399308 - RNA, 19 nt, Homo sapiens
  misc_RNA (1)...(19): siRNA sense strand
acuggauuguucuggaaau

SEQ ID NO: 2399309 - RNA, 19 nt, Homo sapiens
  misc_RNA (1)...(19): siRNA sense strand
augugaagauggcaaugaa

SEQ ID NO: 2399310 - RNA, 19 nt, Homo sapiens
  misc_RNA (1)...(19): siRNA sense strand
aauggaaagugaacgggau

SEQ ID NO: 2399311 - RNA, 19 nt, Homo sapiens
  misc_RNA (1)...(19): siRNA sense strand
ccuuaaagaaagagaaucu

SEQ ID NO: 2399312 - RNA, 19 nt, Homo sapiens
  misc_RNA (1)...(19): siRNA sense strand
gcgccuuggagaagauaaa

SEQ ID NO: 2399313 - RNA, 19 nt, Homo sapiens
  misc_RNA (1)...(19): siRNA sense strand
ggacaagauugaaaggaac

SEQ ID NO: 2399314 - RNA, 19 nt, Homo sapiens
  misc_RNA (1)...(19): siRNA sense strand
gugaaaaucuagagagacu

SEQ ID NO: 2399315 - RNA, 19 nt, Homo sapiens
  misc_RNA (1)...(19): siRNA sense strand
cagacacaccugagagaau

SEQ ID NO: 2399316 - RNA, 19 nt, Homo sapiens
  misc_RNA (1)...(19): siRNA sense strand
gagaagagcgccuuggaga

SEQ ID NO: 2399317 - RNA, 19 nt, Homo sapiens
  misc_RNA (1)...(19): siRNA sense strand
uggagaagauaaaggagga

SEQ ID NO: 2399318 - RNA, 19 nt, Homo sapiens
  misc_RNA (1)...(19): siRNA sense strand
cagaagaaggagguggaaa

SEQ ID NO: 2399319 - RNA, 19 nt, Homo sapiens
  misc_RNA (1)...(19): siRNA sense strand
ucccaaggacagaggcaaa

SEQ ID NO: 2399320 - RNA, 19 nt, Homo sapiens
  misc_RNA (1)...(19): siRNA sense strand
agaagaaggagguggaaag

SEQ ID NO: 2399321 - RNA, 19 nt, Homo sapiens
  misc_RNA (1)...(19): siRNA sense strand
agaagagcgccuuggagaa

SEQ ID NO: 2399322 - RNA, 19 nt, Homo sapiens
  misc_RNA (1)...(19): siRNA sense strand
aucagagccuugugggaaa

SEQ ID NO: 2399323 - RNA, 19 nt, Homo sapiens
  misc_RNA (1)...(19): siRNA sense strand
cauugaaggagcagacaca

SEQ ID NO: 2399324 - RNA, 19 nt, Homo sapiens
  misc_RNA (1)...(19): siRNA sense strand
ucgccaacauuuugauaaa

SEQ ID NO: 2399325 - RNA, 19 nt, Homo sapiens
  misc_RNA (1)...(19): siRNA sense strand
uggcaaugaaauaauggaa

SEQ ID NO: 2399326 - RNA, 19 nt, Homo sapiens
  misc_RNA (1)...(19): siRNA sense strand
uugaagaaccugaaagaac

SEQ ID NO: 2399327 - RNA, 19 nt, Homo sapiens
  misc_RNA (1)...(19): siRNA sense strand
uugugaaaaucuagagaga

SEQ ID NO: 2399328 - RNA, 19 nt, Homo sapiens
  misc_RNA (1)...(19): siRNA sense strand
agaaggagguggaaaggcu

SEQ ID NO: 2399329 - RNA, 19 nt, Homo sapiens
  misc_RNA (1)...(19): siRNA sense strand
cagaauugggagauuguga

SEQ ID NO: 2399330 - RNA, 19 nt, Homo sapiens
  misc_RNA (1)...(19): siRNA sense strand
gacaagauugaaaggaaca

SEQ ID NO: 2399331 - RNA, 19 nt, Homo sapiens
  misc_RNA (1)...(19): siRNA sense strand
gcaagauauagacaggcua

SEQ ID NO: 2399332 - RNA, 19 nt, Homo sapiens
  misc_RNA (1)...(19): siRNA sense strand
ccaaugugaagauggcaau

SEQ ID NO: 2399333 - RNA, 19 nt, Homo sapiens
  misc_RNA (1)...(19): siRNA sense strand
cuucuggacaagauugaaa

SEQ ID NO: 2399334 - RNA, 19 nt, Homo sapiens
  misc_RNA (1)...(19): siRNA sense strand
agagaaugguacauaagca

SEQ ID NO: 2399335 - RNA, 19 nt, Homo sapiens
  misc_RNA (1)...(19): siRNA sense strand
ggcagaagaaggaggugga

SEQ ID NO: 2399336 - RNA, 19 nt, Homo sapiens
  misc_RNA (1)...(19): siRNA sense strand
gguggaaaggcuugagaag

SEQ ID NO: 2399337 - RNA, 19 nt, Homo sapiens
  misc_RNA (1)...(19): siRNA sense strand
caucagagccuugugggaa

SEQ ID NO: 2399338 - RNA, 19 nt, Homo sapiens
  misc_RNA (1)...(19): siRNA sense strand
ggacagaggcaaacggagc

SEQ ID NO: 2399339 - RNA, 19 nt, Homo sapiens
  misc_RNA (1)...(19): siRNA sense strand
cccaaugugaagauggcaa

SEQ ID NO: 2399340 - RNA, 19 nt, Homo sapiens
  misc_RNA (1)...(19): siRNA sense strand
ugugaagauggcaaugaaa

SEQ ID NO: 2399341 - RNA, 19 nt, Homo sapiens
  misc_RNA (1)...(19): siRNA sense strand
aagaaguuaugaaagccua

SEQ ID NO: 2399342 - RNA, 19 nt, Homo sapiens
  misc_RNA (1)...(19): siRNA sense strand
ccuauauugaagaccuuaa

SEQ ID NO: 2399343 - RNA, 19 nt, Homo sapiens
  misc_RNA (1)...(19): siRNA sense strand
auaaaggaggaguggaacu

SEQ ID NO: 2399344 - RNA, 19 nt, Homo sapiens
  misc_RNA (1)...(19): siRNA sense strand
acuggauuguucuggaaau

SEQ ID NO: 2399345 - RNA, 19 nt, Homo sapiens
  misc_RNA (1)...(19): siRNA sense strand
augugaagauggcaaugaa

SEQ ID NO: 2399346 - RNA, 19 nt, Homo sapiens
  misc_RNA (1)...(19): siRNA sense strand
aauggaaagugaacgggau

SEQ ID NO: 2399347 - RNA, 19 nt, Homo sapiens
  misc_RNA (1)...(19): siRNA sense strand
gaaccaaggucgaggaggu

SEQ ID NO: 2399348 - RNA, 19 nt, Homo sapiens
  misc_RNA (1)...(19): siRNA sense strand
cugaggaagcuguggagaa

SEQ ID NO: 2399349 - RNA, 19 nt, Homo sapiens
  misc_RNA (1)...(19): siRNA sense strand
cagcagagaaggaggagga

SEQ ID NO: 2399350 - RNA, 19 nt, Homo sapiens
  misc_RNA (1)...(19): siRNA sense strand
ggggaaaggaagagcauuu

SEQ ID NO: 2399351 - RNA, 19 nt, Homo sapiens
  misc_RNA (1)...(19): siRNA sense strand
aggacaaggugcagagcca

SEQ ID NO: 2399352 - RNA, 19 nt, Homo sapiens
  misc_RNA (1)...(19): siRNA sense strand
cuagaaagggagagaacca

SEQ ID NO: 2399353 - RNA, 19 nt, Homo sapiens
  misc_RNA (1)...(19): siRNA sense strand
gguccucacagcagagaaa

SEQ ID NO: 2399354 - RNA, 19 nt, Homo sapiens
  misc_RNA (1)...(19): siRNA sense strand
agucagaugcccuggaauu

SEQ ID NO: 2399355 - RNA, 19 nt, Homo sapiens
  misc_RNA (1)...(19): siRNA sense strand
ucggagacacagaggcaaa

SEQ ID NO: 2399356 - RNA, 19 nt, Homo sapiens
  misc_RNA (1)...(19): siRNA sense strand
gcaaagaauuucaggaagc

SEQ ID NO: 2399357 - RNA, 19 nt, Homo sapiens
  misc_RNA (1)...(19): siRNA sense strand
cugcagacagagagggaga

SEQ ID NO: 2399358 - RNA, 19 nt, Homo sapiens
  misc_RNA (1)...(19): siRNA sense strand
ggaagggacaggaggcaga

SEQ ID NO: 2399359 - RNA, 19 nt, Homo sapiens
  misc_RNA (1)...(19): siRNA sense strand
acuuaagaaugcuggugaa

SEQ ID NO: 2399360 - RNA, 19 nt, Homo sapiens
  misc_RNA (1)...(19): siRNA sense strand
ccaacagggagcuggagaa

SEQ ID NO: 2399361 - RNA, 19 nt, Homo sapiens
  misc_RNA (1)...(19): siRNA sense strand
ccaccaaugcagagagcca

SEQ ID NO: 2399362 - RNA, 19 nt, Homo sapiens
  misc_RNA (1)...(19): siRNA sense strand
aggccauucuacagagcaa

SEQ ID NO: 2399363 - RNA, 19 nt, Homo sapiens
  misc_RNA (1)...(19): siRNA sense strand
ccugaaacacccacugaaa

SEQ ID NO: 2399364 - RNA, 19 nt, Homo sapiens
  misc_RNA (1)...(19): siRNA sense strand
aggagagcuugcaggagaa

SEQ ID NO: 2399365 - RNA, 19 nt, Homo sapiens
  misc_RNA (1)...(19): siRNA sense strand
ccugcaauuugaucagaaa

SEQ ID NO: 2399366 - RNA, 19 nt, Homo sapiens
  misc_RNA (1)...(19): siRNA sense strand
gcgcacugaccguggaaaa

SEQ ID NO: 2399367 - RNA, 19 nt, Homo sapiens
  misc_RNA (1)...(19): siRNA sense strand
agcaagagaaggagagcuu

SEQ ID NO: 2399368 - RNA, 19 nt, Homo sapiens
  misc_RNA (1)...(19): siRNA sense strand
aaggagagcuugcaggaga

SEQ ID NO: 2399369 - RNA, 19 nt, Homo sapiens
  misc_RNA (1)...(19): siRNA sense strand
gcucggacauugugggcca

SEQ ID NO: 2399370 - RNA, 19 nt, Homo sapiens
  misc_RNA (1)...(19): siRNA sense strand
cccuaaacaacgaggcauu

SEQ ID NO: 2399371 - RNA, 19 nt, Homo sapiens
  misc_RNA (1)...(19): siRNA sense strand
agaauguggucgggcguaa

SEQ ID NO: 2399372 - RNA, 19 nt, Homo sapiens
  misc_RNA (1)...(19): siRNA sense strand
aggagaacauccagggcca

SEQ ID NO: 2399373 - RNA, 19 nt, Homo sapiens
  misc_RNA (1)...(19): siRNA sense strand
gaucagaaagagaaggcca

SEQ ID NO: 2399374 - RNA, 19 nt, Homo sapiens
  misc_RNA (1)...(19): siRNA sense strand
ccaaggucgaggaggucaa

SEQ ID NO: 2399375 - RNA, 19 nt, Homo sapiens
  misc_RNA (1)...(19): siRNA sense strand
agagaaaggccaacaggga

SEQ ID NO: 2399376 - RNA, 19 nt, Homo sapiens
  misc_RNA (1)...(19): siRNA sense strand
caauuugaucagaaagaga

SEQ ID NO: 2399377 - RNA, 19 nt, Homo sapiens
  misc_RNA (1)...(19): siRNA sense strand
guggagaagcugaaggcca

SEQ ID NO: 2399378 - RNA, 19 nt, Homo sapiens
  misc_RNA (1)...(19): siRNA sense strand
gaugaggaauugugccaga

SEQ ID NO: 2399379 - RNA, 19 nt, Homo sapiens
  misc_RNA (1)...(19): siRNA sense strand
gcagaguugaggcgggaga

SEQ ID NO: 2399380 - RNA, 19 nt, Homo sapiens
  misc_RNA (1)...(19): siRNA sense strand
gugaagaccuagaaaggac

SEQ ID NO: 2399381 - RNA, 19 nt, Homo sapiens
  misc_RNA (1)...(19): siRNA sense strand
gaagagugcaagagccuca

SEQ ID NO: 2399382 - RNA, 19 nt, Homo sapiens
  misc_RNA (1)...(19): siRNA sense strand
aggaauugugccagauaca

SEQ ID NO: 2399383 - RNA, 19 nt, Homo sapiens
  misc_RNA (1)...(19): siRNA sense strand
aggaggaguugucugggaa

SEQ ID NO: 2399384 - RNA, 19 nt, Homo sapiens
  misc_RNA (1)...(19): siRNA sense strand
gcucggagacacagaggca

SEQ ID NO: 2399385 - RNA, 19 nt, Homo sapiens
  misc_RNA (1)...(19): siRNA sense strand
gggagagaaccaaggucga

SEQ ID NO: 2399386 - RNA, 19 nt, Homo sapiens
  misc_RNA (1)...(19): siRNA sense strand
gaaaggacccagaaggaac

SEQ ID NO: 2399387 - RNA, 19 nt, Homo sapiens
  misc_RNA (1)...(19): siRNA sense strand
agaaaggccaacagggagu

SEQ ID NO: 2399388 - RNA, 19 nt, Homo sapiens
  misc_RNA (1)...(19): siRNA sense strand
caaugaagcccgugagcug

SEQ ID NO: 2399389 - RNA, 19 nt, Homo sapiens
  misc_RNA (1)...(19): siRNA sense strand
cugcacaccaggagcucaa

SEQ ID NO: 2399390 - RNA, 19 nt, Homo sapiens
  misc_RNA (1)...(19): siRNA sense strand
gggaggaggagcuagcaga

SEQ ID NO: 2399391 - RNA, 19 nt, Homo sapiens
  misc_RNA (1)...(19): siRNA sense strand
ugagugaccuggaggagca

SEQ ID NO: 2399392 - RNA, 19 nt, Homo sapiens
  misc_RNA (1)...(19): siRNA sense strand
uggcaggugagaagaauga

SEQ ID NO: 2399393 - RNA, 19 nt, Homo sapiens
  misc_RNA (1)...(19): siRNA sense strand
gugaagagugcaagagccu

SEQ ID NO: 2399394 - RNA, 19 nt, Homo sapiens
  misc_RNA (1)...(19): siRNA sense strand
ccagagcagacuuaagaau

SEQ ID NO: 2399395 - RNA, 19 nt, Homo sapiens
  misc_RNA (1)...(19): siRNA sense strand
uccaagaguauuacaacaa

SEQ ID NO: 2399396 - RNA, 19 nt, Homo sapiens
  misc_RNA (1)...(19): siRNA sense strand
uggagaaggagcuacagaa

SEQ ID NO: 2399397 - RNA, 19 nt, Homo sapiens
  misc_RNA (1)...(19): siRNA sense strand
agaaggacuacugggauua

SEQ ID NO: 2399398 - RNA, 19 nt, Homo sapiens
  misc_RNA (1)...(19): siRNA sense strand
cuugcaagaugcugugaca

SEQ ID NO: 2399399 - RNA, 19 nt, Homo sapiens
  misc_RNA (1)...(19): siRNA sense strand
ugugacagaacuaagcaaa

SEQ ID NO: 2399400 - RNA, 19 nt, Homo sapiens
  misc_RNA (1)...(19): siRNA sense strand
ugggcaacaagaaggacua

SEQ ID NO: 2399401 - RNA, 19 nt, Homo sapiens
  misc_RNA (1)...(19): siRNA sense strand
gugaaggagcugcagacau

SEQ ID NO: 2399402 - RNA, 19 nt, Homo sapiens
  misc_RNA (1)...(19): siRNA sense strand
uggaggagcagaagaagca

SEQ ID NO: 2399403 - RNA, 19 nt, Homo sapiens
  misc_RNA (1)...(19): siRNA sense strand
agcugaaggagcagaauga

SEQ ID NO: 2399404 - RNA, 19 nt, Homo sapiens
  misc_RNA (1)...(19): siRNA sense strand
gugagaggaaugaccagaa

SEQ ID NO: 2399405 - RNA, 19 nt, Homo sapiens
  misc_RNA (1)...(19): siRNA sense strand
gagauggcucggagacaca

SEQ ID NO: 2399406 - RNA, 19 nt, Homo sapiens
  misc_RNA (1)...(19): siRNA sense strand
cagaugaggaauugugcca

SEQ ID NO: 2399407 - RNA, 19 nt, Homo sapiens
  misc_RNA (1)...(19): siRNA sense strand
cggaaaucugccugcugaa

SEQ ID NO: 2399408 - RNA, 19 nt, Homo sapiens
  misc_RNA (1)...(19): siRNA sense strand
gagcagcagagaaggagga

SEQ ID NO: 2399409 - RNA, 19 nt, Homo sapiens
  misc_RNA (1)...(19): siRNA sense strand
ccuaaaggcacaacaguaa

SEQ ID NO: 2399410 - RNA, 19 nt, Homo sapiens
  misc_RNA (1)...(19): siRNA sense strand
ugagauggaucaagguaaa

SEQ ID NO: 2399411 - RNA, 19 nt, Homo sapiens
  misc_RNA (1)...(19): siRNA sense strand
gcacaacaguaauuacaaa

SEQ ID NO: 2399412 - RNA, 19 nt, Homo sapiens
  misc_RNA (1)...(19): siRNA sense strand
ggacaaguucagaaagaga

SEQ ID NO: 2399413 - RNA, 19 nt, Homo sapiens
  misc_RNA (1)...(19): siRNA sense strand
ccucagucuucuuguauaa

SEQ ID NO: 2399414 - RNA, 19 nt, Homo sapiens
  misc_RNA (1)...(19): siRNA sense strand
guuuagaaaugcagcugua

SEQ ID NO: 2399415 - RNA, 19 nt, Homo sapiens
  misc_RNA (1)...(19): siRNA sense strand
caucauugcuggaacugaa

SEQ ID NO: 2399416 - RNA, 19 nt, Homo sapiens
  misc_RNA (1)...(19): siRNA sense strand
caacagaaagccucagcua

SEQ ID NO: 2399417 - RNA, 19 nt, Homo sapiens
  misc_RNA (1)...(19): siRNA sense strand
aaggacaaguucagaaaga

SEQ ID NO: 2399418 - RNA, 19 nt, Homo sapiens
  misc_RNA (1)...(19): siRNA sense strand
ucuaaauggcuaugaugua

SEQ ID NO: 2399419 - RNA, 19 nt, Homo sapiens
  misc_RNA (1)...(19): siRNA sense strand
acggagagaucuucaguuu

SEQ ID NO: 2399420 - RNA, 19 nt, Homo sapiens
  misc_RNA (1)...(19): siRNA sense strand
gguugaucacagacgauua

SEQ ID NO: 2399421 - RNA, 19 nt, Homo sapiens
  misc_RNA (1)...(19): siRNA sense strand
uuuagaucuuggaggcaua

SEQ ID NO: 2399422 - RNA, 19 nt, Homo sapiens
  misc_RNA (1)...(19): siRNA sense strand
aagcuucagucaacagaaa

SEQ ID NO: 2399423 - RNA, 19 nt, Homo sapiens
  misc_RNA (1)...(19): siRNA sense strand
guucagaaagagauugauu

SEQ ID NO: 2399424 - RNA, 19 nt, Homo sapiens
  misc_RNA (1)...(19): siRNA sense strand
ccucaucugugcugaaaga

SEQ ID NO: 2399425 - RNA, 19 nt, Homo sapiens
  misc_RNA (1)...(19): siRNA sense strand
cagcuguagucuaugauuu

SEQ ID NO: 2399426 - RNA, 19 nt, Homo sapiens
  misc_RNA (1)...(19): siRNA sense strand
ucaaggacaaguucagaaa

SEQ ID NO: 2399427 - RNA, 19 nt, Homo sapiens
  misc_RNA (1)...(19): siRNA sense strand
ggagagacccagaaguguu

SEQ ID NO: 2399428 - RNA, 19 nt, Homo sapiens
  misc_RNA (1)...(19): siRNA sense strand
augagauggaucaagguaa

SEQ ID NO: 2399429 - RNA, 19 nt, Homo sapiens
  misc_RNA (1)...(19): siRNA sense strand
gcuaugauguaguaaagga

SEQ ID NO: 2399430 - RNA, 19 nt, Homo sapiens
  misc_RNA (1)...(19): siRNA sense strand
cuaugauguaguaaaggaa

SEQ ID NO: 2399431 - RNA, 19 nt, Homo sapiens
  misc_RNA (1)...(19): siRNA sense strand
cuguacacuuugaugaaaa

SEQ ID NO: 2399432 - RNA, 19 nt, Homo sapiens
  misc_RNA (1)...(19): siRNA sense strand
aggaaugccuuguucauca

SEQ ID NO: 2399433 - RNA, 19 nt, Homo sapiens
  misc_RNA (1)...(19): siRNA sense strand
cggagagaucuucaguuua

SEQ ID NO: 2399434 - RNA, 19 nt, Homo sapiens
  misc_RNA (1)...(19): siRNA sense strand
ugaaacauacaaagguaga

SEQ ID NO: 2399435 - RNA, 19 nt, Homo sapiens
  misc_RNA (1)...(19): siRNA sense strand
gcaaaaugccuuauacuga

SEQ ID NO: 2399436 - RNA, 19 nt, Homo sapiens
  misc_RNA (1)...(19): siRNA sense strand
ggacagcaguggauauuuu

SEQ ID NO: 2399437 - RNA, 19 nt, Homo sapiens
  misc_RNA (1)...(19): siRNA sense strand
gaaagcagagccaggugua

SEQ ID NO: 2399438 - RNA, 19 nt, Homo sapiens
  misc_RNA (1)...(19): siRNA sense strand
uauaguuccauuagggauu

SEQ ID NO: 2399439 - RNA, 19 nt, Homo sapiens
  misc_RNA (1)...(19): siRNA sense strand
uaacgaaugcuguuucaaa

SEQ ID NO: 2399440 - RNA, 19 nt, Homo sapiens
  misc_RNA (1)...(19): siRNA sense strand
ggagagaucuucaguuuag

SEQ ID NO: 2399441 - RNA, 19 nt, Homo sapiens
  misc_RNA (1)...(19): siRNA sense strand
gaacugaaacuacaaccaa

SEQ ID NO: 2399442 - RNA, 19 nt, Homo sapiens
  misc_RNA (1)...(19): siRNA sense strand
gaaaaguacuggagagacc

SEQ ID NO: 2399443 - RNA, 19 nt, Homo sapiens
  misc_RNA (1)...(19): siRNA sense strand
aggcauaucaacugugguu

SEQ ID NO: 2399444 - RNA, 19 nt, Homo sapiens
  misc_RNA (1)...(19): siRNA sense strand
acaaguucagaaagagauu

SEQ ID NO: 2399445 - RNA, 19 nt, Homo sapiens
  misc_RNA (1)...(19): siRNA sense strand
uaucaacugugguucuaaa

SEQ ID NO: 2399446 - RNA, 19 nt, Homo sapiens
  misc_RNA (1)...(19): siRNA sense strand
gaaaugcagcuguagucua

SEQ ID NO: 2399447 - RNA, 19 nt, Homo sapiens
  misc_RNA (1)...(19): siRNA sense strand
aaaugcagcuguagucuau

SEQ ID NO: 2399448 - RNA, 19 nt, Homo sapiens
  misc_RNA (1)...(19): siRNA sense strand
auuuagaugagauggauca

SEQ ID NO: 2399449 - RNA, 19 nt, Homo sapiens
  misc_RNA (1)...(19): siRNA sense strand
ggcacaagguggagggcua

SEQ ID NO: 2399450 - RNA, 19 nt, Homo sapiens
  misc_RNA (1)...(19): siRNA sense strand
ggauauaaggacuggcaag

SEQ ID NO: 2399451 - RNA, 19 nt, Homo sapiens
  misc_RNA (1)...(19): siRNA sense strand
augagaagcuacaaggcga

SEQ ID NO: 2399452 - RNA, 19 nt, Homo sapiens
  misc_RNA (1)...(19): siRNA sense strand
uggcacagaccaauggcaa

SEQ ID NO: 2399453 - RNA, 19 nt, Homo sapiens
  misc_RNA (1)...(19): siRNA sense strand
uucaagggcuguugggaga

SEQ ID NO: 2399454 - RNA, 19 nt, Homo sapiens
  misc_RNA (1)...(19): siRNA sense strand
cuggcaaggugaugagaag

SEQ ID NO: 2399455 - RNA, 19 nt, Homo sapiens
  misc_RNA (1)...(19): siRNA sense strand
aagaagaggaagaggaaaa

SEQ ID NO: 2399456 - RNA, 19 nt, Homo sapiens
  misc_RNA (1)...(19): siRNA sense strand
acaagaagcuggaggagca

SEQ ID NO: 2399457 - RNA, 19 nt, Homo sapiens
  misc_RNA (1)...(19): siRNA sense strand
aggccaaagaagaggaaga

SEQ ID NO: 2399458 - RNA, 19 nt, Homo sapiens
  misc_RNA (1)...(19): siRNA sense strand
ccaaagaagaggaagagga

SEQ ID NO: 2399459 - RNA, 19 nt, Homo sapiens
  misc_RNA (1)...(19): siRNA sense strand
gagaggagaccgagcguga

SEQ ID NO: 2399460 - RNA, 19 nt, Homo sapiens
  misc_RNA (1)...(19): siRNA sense strand
augaggagccggaggccaa

SEQ ID NO: 2399461 - RNA, 19 nt, Homo sapiens
  misc_RNA (1)...(19): siRNA sense strand
gagaagagccugccgagga

SEQ ID NO: 2399462 - RNA, 19 nt, Homo sapiens
  misc_RNA (1)...(19): siRNA sense strand
agagcgaagaggagagauc

SEQ ID NO: 2399463 - RNA, 19 nt, Homo sapiens
  misc_RNA (1)...(19): siRNA sense strand
augaaagagaagugggaga

SEQ ID NO: 2399464 - RNA, 19 nt, Homo sapiens
  misc_RNA (1)...(19): siRNA sense strand
ggggaaaacaacuggaaau

SEQ ID NO: 2399465 - RNA, 19 nt, Homo sapiens
  misc_RNA (1)...(19): siRNA sense strand
agugugaagccgauggaua

SEQ ID NO: 2399466 - RNA, 19 nt, Homo sapiens
  misc_RNA (1)...(19): siRNA sense strand
ggugugagguccagagcca

SEQ ID NO: 2399467 - RNA, 19 nt, Homo sapiens
  misc_RNA (1)...(19): siRNA sense strand
ggaugaaagagaaguggga

SEQ ID NO: 2399468 - RNA, 19 nt, Homo sapiens
  misc_RNA (1)...(19): siRNA sense strand
ccacagaugccuggggaaa

SEQ ID NO: 2399469 - RNA, 19 nt, Homo sapiens
  misc_RNA (1)...(19): siRNA sense strand
aagagaagugggagaagga

SEQ ID NO: 2399470 - RNA, 19 nt, Homo sapiens
  misc_RNA (1)...(19): siRNA sense strand
ggagaaggauagcggacug

SEQ ID NO: 2399471 - RNA, 19 nt, Homo sapiens
  misc_RNA (1)...(19): siRNA sense strand
gccagguggaucagaagaa

SEQ ID NO: 2399472 - RNA, 19 nt, Homo sapiens
  misc_RNA (1)...(19): siRNA sense strand
ggaaagcaggugugggaca

SEQ ID NO: 2399473 - RNA, 19 nt, Homo sapiens
  misc_RNA (1)...(19): siRNA sense strand
gcgaguacacggagagcau

SEQ ID NO: 2399474 - RNA, 19 nt, Homo sapiens
  misc_RNA (1)...(19): siRNA sense strand
ccagcaggagcaagagaaa

SEQ ID NO: 2399475 - RNA, 19 nt, Homo sapiens
  misc_RNA (1)...(19): siRNA sense strand
ugacagaacugaagggccu

SEQ ID NO: 2399476 - RNA, 19 nt, Homo sapiens
  misc_RNA (1)...(19): siRNA sense strand
agagcgagcuggaggcaca

SEQ ID NO: 2399477 - RNA, 19 nt, Homo sapiens
  misc_RNA (1)...(19): siRNA sense strand
aagacgaagaugaagacaa

SEQ ID NO: 2399478 - RNA, 19 nt, Homo sapiens
  misc_RNA (1)...(19): siRNA sense strand
guggaaagcagguguggga

SEQ ID NO: 2399479 - RNA, 19 nt, Homo sapiens
  misc_RNA (1)...(19): siRNA sense strand
agggaguccaagaggaauu

SEQ ID NO: 2399480 - RNA, 19 nt, Homo sapiens
  misc_RNA (1)...(19): siRNA sense strand
agguuguggcuguggauau

SEQ ID NO: 2399481 - RNA, 19 nt, Homo sapiens
  misc_RNA (1)...(19): siRNA sense strand
augaagacgaagaugaaga

SEQ ID NO: 2399482 - RNA, 19 nt, Homo sapiens
  misc_RNA (1)...(19): siRNA sense strand
caguaugagaucugcauga

SEQ ID NO: 2399483 - RNA, 19 nt, Homo sapiens
  misc_RNA (1)...(19): siRNA sense strand
ugaaagggcuggcuggcuu

SEQ ID NO: 2399484 - RNA, 19 nt, Homo sapiens
  misc_RNA (1)...(19): siRNA sense strand
ccucaauaucauaggccca

SEQ ID NO: 2399485 - RNA, 19 nt, Homo sapiens
  misc_RNA (1)...(19): siRNA sense strand
ugcugaaggcccugagauu

SEQ ID NO: 2399486 - RNA, 19 nt, Homo sapiens
  misc_RNA (1)...(19): siRNA sense strand
ccucaaugaagacgaagau

SEQ ID NO: 2399487 - RNA, 19 nt, Homo sapiens
  misc_RNA (1)...(19): siRNA sense strand
agaugaagacaaugauguu

SEQ ID NO: 2399488 - RNA, 19 nt, Homo sapiens
  misc_RNA (1)...(19): siRNA sense strand
ccacagucaccaagcgcuu

SEQ ID NO: 2399489 - RNA, 19 nt, Homo sapiens
  misc_RNA (1)...(19): siRNA sense strand
ccuacagcaguguggagaa

SEQ ID NO: 2399490 - RNA, 19 nt, Homo sapiens
  misc_RNA (1)...(19): siRNA sense strand
augccaagcccuacccaua

SEQ ID NO: 2399491 - RNA, 19 nt, Homo sapiens
  misc_RNA (1)...(19): siRNA sense strand
cggcaaagccuacagcagu

SEQ ID NO: 2399492 - RNA, 19 nt, Homo sapiens
  misc_RNA (1)...(19): siRNA sense strand
aagagaaacuccaggggca

SEQ ID NO: 2399493 - RNA, 19 nt, Homo sapiens
  misc_RNA (1)...(19): siRNA sense strand
augagaucugcaugaaaua

SEQ ID NO: 2399494 - RNA, 19 nt, Homo sapiens
  misc_RNA (1)...(19): siRNA sense strand
aguguggagaagagggaca

SEQ ID NO: 2399495 - RNA, 19 nt, Homo sapiens
  misc_RNA (1)...(19): siRNA sense strand
gcaugaaauaugggcguca

SEQ ID NO: 2399496 - RNA, 19 nt, Homo sapiens
  misc_RNA (1)...(19): siRNA sense strand
aauugaggguaguggaaag

SEQ ID NO: 2399497 - RNA, 19 nt, Homo sapiens
  misc_RNA (1)...(19): siRNA sense strand
uggaagaacuuguggccaa

SEQ ID NO: 2399498 - RNA, 19 nt, Homo sapiens
  misc_RNA (1)...(19): siRNA sense strand
gcuaugaguuucagaggga

SEQ ID NO: 2399499 - RNA, 19 nt, Homo sapiens
  misc_RNA (1)...(19): siRNA sense strand
gcuacagcacggaggagaa

SEQ ID NO: 2399500 - RNA, 19 nt, Homo sapiens
  misc_RNA (1)...(19): siRNA sense strand
agaugaucguccugggauu

SEQ ID NO: 2399501 - RNA, 19 nt, Homo sapiens
  misc_RNA (1)...(19): siRNA sense strand
cagugaaacuuuaagagga

SEQ ID NO: 2399502 - RNA, 19 nt, Homo sapiens
  misc_RNA (1)...(19): siRNA sense strand
gggaaucagaauguggaaa

SEQ ID NO: 2399503 - RNA, 19 nt, Homo sapiens
  misc_RNA (1)...(19): siRNA sense strand
uggccaaagaggugcuaca

SEQ ID NO: 2399504 - RNA, 19 nt, Homo sapiens
  misc_RNA (1)...(19): siRNA sense strand
gugcaagcuaugaguuuca

SEQ ID NO: 2399505 - RNA, 19 nt, Homo sapiens
  misc_RNA (1)...(19): siRNA sense strand
cacaaggaguaaagccuga

SEQ ID NO: 2399506 - RNA, 19 nt, Homo sapiens
  misc_RNA (1)...(19): siRNA sense strand
gaguaaagccugacuggac

SEQ ID NO: 2399507 - RNA, 19 nt, Homo sapiens
  misc_RNA (1)...(19): siRNA sense strand
uggaggaggaggacagcuu

SEQ ID NO: 2399508 - RNA, 19 nt, Homo sapiens
  misc_RNA (1)...(19): siRNA sense strand
caagaaaaggagaaagaaa

SEQ ID NO: 2399509 - RNA, 19 nt, Homo sapiens
  misc_RNA (1)...(19): siRNA sense strand
agauuaagugagagagaga

SEQ ID NO: 2399510 - RNA, 19 nt, Homo sapiens
  misc_RNA (1)...(19): siRNA sense strand
acagaaagaccaaagggaa

SEQ ID NO: 2399511 - RNA, 19 nt, Homo sapiens
  misc_RNA (1)...(19): siRNA sense strand
gauaacaaaaggagagcaa

SEQ ID NO: 2399512 - RNA, 19 nt, Homo sapiens
  misc_RNA (1)...(19): siRNA sense strand
aggaaaagaagaagaaaca

SEQ ID NO: 2399513 - RNA, 19 nt, Homo sapiens
  misc_RNA (1)...(19): siRNA sense strand
agagauuaagugagagaga

SEQ ID NO: 2399514 - RNA, 19 nt, Homo sapiens
  misc_RNA (1)...(19): siRNA sense strand
aagaagaagucuagccguu

SEQ ID NO: 2399515 - RNA, 19 nt, Homo sapiens
  misc_RNA (1)...(19): siRNA sense strand
agaagagagacgaaagaga

SEQ ID NO: 2399516 - RNA, 19 nt, Homo sapiens
  misc_RNA (1)...(19): siRNA sense strand
agaccaaagggaaggauga

SEQ ID NO: 2399517 - RNA, 19 nt, Homo sapiens
  misc_RNA (1)...(19): siRNA sense strand
cagaaagaccaaagggaag

SEQ ID NO: 2399518 - RNA, 19 nt, Homo sapiens
  misc_RNA (1)...(19): siRNA sense strand
aggucuaagaagagcagaa

SEQ ID NO: 2399519 - RNA, 19 nt, Homo sapiens
  misc_RNA (1)...(19): siRNA sense strand
gaugaagagccaaagaaaa

SEQ ID NO: 2399520 - RNA, 19 nt, Homo sapiens
  misc_RNA (1)...(19): siRNA sense strand
gaacaaaggcugaagaacc

SEQ ID NO: 2399521 - RNA, 19 nt, Homo sapiens
  misc_RNA (1)...(19): siRNA sense strand
uggaggaugaagagccaaa

SEQ ID NO: 2399522 - RNA, 19 nt, Homo sapiens
  misc_RNA (1)...(19): siRNA sense strand
auuaagugagagagagaga

SEQ ID NO: 2399523 - RNA, 19 nt, Homo sapiens
  misc_RNA (1)...(19): siRNA sense strand
cccacgaagaggugaaauu

SEQ ID NO: 2399524 - RNA, 19 nt, Homo sapiens
  misc_RNA (1)...(19): siRNA sense strand
gaauggaggcugugcgacu

SEQ ID NO: 2399525 - RNA, 19 nt, Homo sapiens
  misc_RNA (1)...(19): siRNA sense strand
aguccgaagcccagcaaau

SEQ ID NO: 2399526 - RNA, 19 nt, Homo sapiens
  misc_RNA (1)...(19): siRNA sense strand
aagaagaaacacagaucga

SEQ ID NO: 2399527 - RNA, 19 nt, Homo sapiens
  misc_RNA (1)...(19): siRNA sense strand
agagagagaauuggagaau

SEQ ID NO: 2399528 - RNA, 19 nt, Homo sapiens
  misc_RNA (1)...(19): siRNA sense strand
aagagagacgaaagagaga

SEQ ID NO: 2399529 - RNA, 19 nt, Homo sapiens
  misc_RNA (1)...(19): siRNA sense strand
gagccaaagaaaagcacua

SEQ ID NO: 2399530 - RNA, 19 nt, Homo sapiens
  misc_RNA (1)...(19): siRNA sense strand
gagacgaaagagagagaac

SEQ ID NO: 2399531 - RNA, 19 nt, Homo sapiens
  misc_RNA (1)...(19): siRNA sense strand
caaagaauccugaaccaga

SEQ ID NO: 2399532 - RNA, 19 nt, Homo sapiens
  misc_RNA (1)...(19): siRNA sense strand
ccagugaugaagauaacaa

SEQ ID NO: 2399533 - RNA, 19 nt, Homo sapiens
  misc_RNA (1)...(19): siRNA sense strand
cugaagauagcgacaguga

SEQ ID NO: 2399534 - RNA, 19 nt, Homo sapiens
  misc_RNA (1)...(19): siRNA sense strand
aacacagaucgaagaaaua

SEQ ID NO: 2399535 - RNA, 19 nt, Homo sapiens
  misc_RNA (1)...(19): siRNA sense strand
ggugaaauuggcuugacaa

SEQ ID NO: 2399536 - RNA, 19 nt, Homo sapiens
  misc_RNA (1)...(19): siRNA sense strand
acuccagugaugaagauaa

SEQ ID NO: 2399537 - RNA, 19 nt, Homo sapiens
  misc_RNA (1)...(19): siRNA sense strand
ucgaacaaaggcugaagaa

SEQ ID NO: 2399538 - RNA, 19 nt, Homo sapiens
  misc_RNA (1)...(19): siRNA sense strand
aggcugugcgacugcgaaa

SEQ ID NO: 2399539 - RNA, 19 nt, Homo sapiens
  misc_RNA (1)...(19): siRNA sense strand
gguccaagaaaaggagaaa

SEQ ID NO: 2399540 - RNA, 19 nt, Homo sapiens
  misc_RNA (1)...(19): siRNA sense strand
cagugaugaagauaacaaa

SEQ ID NO: 2399541 - RNA, 19 nt, Homo sapiens
  misc_RNA (1)...(19): siRNA sense strand
agcaaagaaagccaagaaa

SEQ ID NO: 2399542 - RNA, 19 nt, Homo sapiens
  misc_RNA (1)...(19): siRNA sense strand
agagagagagaauuggaga

SEQ ID NO: 2399543 - RNA, 19 nt, Homo sapiens
  misc_RNA (1)...(19): siRNA sense strand
aagugaagaaauugcauca

SEQ ID NO: 2399544 - RNA, 19 nt, Homo sapiens
  misc_RNA (1)...(19): siRNA sense strand
cuuuaaccaagaagagaga

SEQ ID NO: 2399545 - RNA, 19 nt, Homo sapiens
  misc_RNA (1)...(19): siRNA sense strand
gagcagaggaagaggugga

SEQ ID NO: 2399546 - RNA, 19 nt, Homo sapiens
  misc_RNA (1)...(19): siRNA sense strand
ggucauucuuccuggguca

SEQ ID NO: 2399547 - RNA, 19 nt, Homo sapiens
  misc_RNA (1)...(19): siRNA sense strand
aggaagagguggaagaguc

SEQ ID NO: 2399548 - RNA, 19 nt, Homo sapiens
  misc_RNA (1)...(19): siRNA sense strand
caggaaaggacgagcaggu

SEQ ID NO: 2399549 - RNA, 19 nt, Homo sapiens
  misc_RNA (1)...(19): siRNA sense strand
guccagacccuaaggccua

SEQ ID NO: 2399550 - RNA, 19 nt, Homo sapiens
  misc_RNA (1)...(19): siRNA sense strand
uaagguuauuggagggaaa

SEQ ID NO: 2399551 - RNA, 19 nt, Homo sapiens
  misc_RNA (1)...(19): siRNA sense strand
aagcaauggaacaggaauu

SEQ ID NO: 2399552 - RNA, 19 nt, Homo sapiens
  misc_RNA (1)...(19): siRNA sense strand
ugacagaggcacaugggaa

SEQ ID NO: 2399553 - RNA, 19 nt, Homo sapiens
  misc_RNA (1)...(19): siRNA sense strand
ucuagauaaugcagaacaa

SEQ ID NO: 2399554 - RNA, 19 nt, Homo sapiens
  misc_RNA (1)...(19): siRNA sense strand
uuguggaacuguuggcaaa

SEQ ID NO: 2399555 - RNA, 19 nt, Homo sapiens
  misc_RNA (1)...(19): siRNA sense strand
gcgauguggacuuggguau

SEQ ID NO: 2399556 - RNA, 19 nt, Homo sapiens
  misc_RNA (1)...(19): siRNA sense strand
gaacaggaauucagugcca

SEQ ID NO: 2399557 - RNA, 19 nt, Homo sapiens
  misc_RNA (1)...(19): siRNA sense strand
acaucuagauaaugcagaa

SEQ ID NO: 2399558 - RNA, 19 nt, Homo sapiens
  misc_RNA (1)...(19): siRNA sense strand
cagucuaauugcugguuau

SEQ ID NO: 2399559 - RNA, 19 nt, Homo sapiens
  misc_RNA (1)...(19): siRNA sense strand
ccucuauagauguuacaaa

SEQ ID NO: 2399560 - RNA, 19 nt, Homo sapiens
  misc_RNA (1)...(19): siRNA sense strand
aggaucaugucuuggauau

SEQ ID NO: 2399561 - RNA, 19 nt, Homo sapiens
  misc_RNA (1)...(19): siRNA sense strand
cauccgagaaccugaagaa

SEQ ID NO: 2399562 - RNA, 19 nt, Homo sapiens
  misc_RNA (1)...(19): siRNA sense strand
ugauacaaguguuugccua

SEQ ID NO: 2399563 - RNA, 19 nt, Homo sapiens
  misc_RNA (1)...(19): siRNA sense strand
ggaucaugucuuggauaua

SEQ ID NO: 2399564 - RNA, 19 nt, Homo sapiens
  misc_RNA (1)...(19): siRNA sense strand
aaaccaaaccaaaggccuu

SEQ ID NO: 2399565 - RNA, 19 nt, Homo sapiens
  misc_RNA (1)...(19): siRNA sense strand
acaaaggucaugauggaca

SEQ ID NO: 2399566 - RNA, 19 nt, Homo sapiens
  misc_RNA (1)...(19): siRNA sense strand
caaguuucaaauagggcaa

SEQ ID NO: 2399567 - RNA, 19 nt, Homo sapiens
  misc_RNA (1)...(19): siRNA sense strand
uguaugaaaggguguggua

SEQ ID NO: 2399568 - RNA, 19 nt, Homo sapiens
  misc_RNA (1)...(19): siRNA sense strand
ccacgaagcauccgagaac

SEQ ID NO: 2399569 - RNA, 19 nt, Homo sapiens
  misc_RNA (1)...(19): siRNA sense strand
uuacaaaugaauccaggaa

SEQ ID NO: 2399570 - RNA, 19 nt, Homo sapiens
  misc_RNA (1)...(19): siRNA sense strand
ccuaaauggucugggcgau

SEQ ID NO: 2399571 - RNA, 19 nt, Homo sapiens
  misc_RNA (1)...(19): siRNA sense strand
gguuauuggagggaaauuu

SEQ ID NO: 2399572 - RNA, 19 nt, Homo sapiens
  misc_RNA (1)...(19): siRNA sense strand
ucauaaaguaacaccgcau

SEQ ID NO: 2399573 - RNA, 19 nt, Homo sapiens
  misc_RNA (1)...(19): siRNA sense strand
ccaaagcaauggaacagga

SEQ ID NO: 2399574 - RNA, 19 nt, Homo sapiens
  misc_RNA (1)...(19): siRNA sense strand
gggacuaacaacccaucaa

SEQ ID NO: 2399575 - RNA, 19 nt, Homo sapiens
  misc_RNA (1)...(19): siRNA sense strand
acaagcagaaguacagaau

SEQ ID NO: 2399576 - RNA, 19 nt, Homo sapiens
  misc_RNA (1)...(19): siRNA sense strand
cccaaggacaauucaacaa

SEQ ID NO: 2399577 - RNA, 19 nt, Homo sapiens
  misc_RNA (1)...(19): siRNA sense strand
gcucuuauggccugacaga

SEQ ID NO: 2399578 - RNA, 19 nt, Homo sapiens
  misc_RNA (1)...(19): siRNA sense strand
gaagugaagcugugggaca

SEQ ID NO: 2399579 - RNA, 19 nt, Homo sapiens
  misc_RNA (1)...(19): siRNA sense strand
caggaaagggcgagaggca

SEQ ID NO: 2399580 - RNA, 19 nt, Homo sapiens
  misc_RNA (1)...(19): siRNA sense strand
cagcaggugcagaagguca

SEQ ID NO: 2399581 - RNA, 19 nt, Homo sapiens
  misc_RNA (1)...(19): siRNA sense strand
cuuucuuccuggagugcaa

SEQ ID NO: 2399582 - RNA, 19 nt, Homo sapiens
  misc_RNA (1)...(19): siRNA sense strand
gugcagaaggucagccuca

SEQ ID NO: 2399583 - RNA, 19 nt, Homo sapiens
  misc_RNA (1)...(19): siRNA sense strand
cggcugacaggacgguaaa

SEQ ID NO: 2399584 - RNA, 19 nt, Homo sapiens
  misc_RNA (1)...(19): siRNA sense strand
gauucaaccagaugcguga

SEQ ID NO: 2399585 - RNA, 19 nt, Homo sapiens
  misc_RNA (1)...(19): siRNA sense strand
aggacaagcagcugcggau

SEQ ID NO: 2399586 - RNA, 19 nt, Homo sapiens
  misc_RNA (1)...(19): siRNA sense strand
gggacaaccagcaggugca

SEQ ID NO: 2399587 - RNA, 19 nt, Homo sapiens
  misc_RNA (1)...(19): siRNA sense strand
agggauagccggcuggcau

SEQ ID NO: 2399588 - RNA, 19 nt, Homo sapiens
  misc_RNA (1)...(19): siRNA sense strand
cgucuggagccgagaugga

SEQ ID NO: 2399589 - RNA, 19 nt, Homo sapiens
  misc_RNA (1)...(19): siRNA sense strand
aaucauugcucgugggaac

SEQ ID NO: 2399590 - RNA, 19 nt, Homo sapiens
  misc_RNA (1)...(19): siRNA sense strand
ccaaaggcaaagaagaaaa

SEQ ID NO: 2399591 - RNA, 19 nt, Homo sapiens
  misc_RNA (1)...(19): siRNA sense strand
gaggagacaaguauggcaa

SEQ ID NO: 2399592 - RNA, 19 nt, Homo sapiens
  misc_RNA (1)...(19): siRNA sense strand
gaagcgaugcugugggaga

SEQ ID NO: 2399593 - RNA, 19 nt, Homo sapiens
  misc_RNA (1)...(19): siRNA sense strand
uagucauggugauggguau

SEQ ID NO: 2399594 - RNA, 19 nt, Homo sapiens
  misc_RNA (1)...(19): siRNA sense strand
uggacgagcuggugcgguu

SEQ ID NO: 2399595 - RNA, 19 nt, Homo sapiens
  misc_RNA (1)...(19): siRNA sense strand
gaucugaagucuagaggag

SEQ ID NO: 2399596 - RNA, 19 nt, Homo sapiens
  misc_RNA (1)...(19): siRNA sense strand
cggcaaaaggcaaugucua

SEQ ID NO: 2399597 - RNA, 19 nt, Homo sapiens
  misc_RNA (1)...(19): siRNA sense strand
acgccaaaggcaaagaaga

SEQ ID NO: 2399598 - RNA, 19 nt, Homo sapiens
  misc_RNA (1)...(19): siRNA sense strand
gcgccaugcuccaagcuca

SEQ ID NO: 2399599 - RNA, 19 nt, Homo sapiens
  misc_RNA (1)...(19): siRNA sense strand
cgggugugcagguguacaa

SEQ ID NO: 2399600 - RNA, 19 nt, Homo sapiens
  misc_RNA (1)...(19): siRNA sense strand
gggaagcgaugcuguggga

SEQ ID NO: 2399601 - RNA, 19 nt, Homo sapiens
  misc_RNA (1)...(19): siRNA sense strand
gcaucaacaucaaggacag

SEQ ID NO: 2399602 - RNA, 19 nt, Homo sapiens
  misc_RNA (1)...(19): siRNA sense strand
caucaaggacagaagcagu

SEQ ID NO: 2399603 - RNA, 19 nt, Homo sapiens
  misc_RNA (1)...(19): siRNA sense strand
acgcuuauucaacggcaaa

SEQ ID NO: 2399604 - RNA, 19 nt, Homo sapiens
  misc_RNA (1)...(19): siRNA sense strand
cagaagaagugucggguac

SEQ ID NO: 2399605 - RNA, 19 nt, Homo sapiens
  misc_RNA (1)...(19): siRNA sense strand
ccagaagaagugucgggua

SEQ ID NO: 2399606 - RNA, 19 nt, Homo sapiens
  misc_RNA (1)...(19): siRNA sense strand
ucaaagagcugguucgauc

SEQ ID NO: 2399607 - RNA, 19 nt, Homo sapiens
  misc_RNA (1)...(19): siRNA sense strand
cauccagguaguacacaaa

SEQ ID NO: 2399608 - RNA, 19 nt, Homo sapiens
  misc_RNA (1)...(19): siRNA sense strand
gguuaauaucagagccauc

SEQ ID NO: 2399609 - RNA, 19 nt, Homo sapiens
  misc_RNA (1)...(19): siRNA sense strand
uggaccaguaugagcgcua

SEQ ID NO: 2399610 - RNA, 19 nt, Homo sapiens
  misc_RNA (1)...(19): siRNA sense strand
cugaaguuccuuaugucaa

SEQ ID NO: 2399611 - RNA, 19 nt, Homo sapiens
  misc_RNA (1)...(19): siRNA sense strand
aggcaggagucgagcguca

SEQ ID NO: 2399612 - RNA, 19 nt, Homo sapiens
  misc_RNA (1)...(19): siRNA sense strand
aggaggaguuccaggagca

SEQ ID NO: 2399613 - RNA, 19 nt, Homo sapiens
  misc_RNA (1)...(19): siRNA sense strand
uccaagagaccgaggagau

SEQ ID NO: 2399614 - RNA, 19 nt, Homo sapiens
  misc_RNA (1)...(19): siRNA sense strand
gagccaagccugaggacag

SEQ ID NO: 2399615 - RNA, 19 nt, Homo sapiens
  misc_RNA (1)...(19): siRNA sense strand
caggaaaaugcgugccuua

SEQ ID NO: 2399616 - RNA, 19 nt, Homo sapiens
  misc_RNA (1)...(19): siRNA sense strand
ggaccaacacagugcccuu

SEQ ID NO: 2399617 - RNA, 19 nt, Homo sapiens
  misc_RNA (1)...(19): siRNA sense strand
acagccaguuuguggaaaa

SEQ ID NO: 2399618 - RNA, 19 nt, Homo sapiens
  misc_RNA (1)...(19): siRNA sense strand
ugacacuucaggagcacaa

SEQ ID NO: 2399619 - RNA, 19 nt, Homo sapiens
  misc_RNA (1)...(19): siRNA sense strand
agaccgaggagaugcugaa

SEQ ID NO: 2399620 - RNA, 19 nt, Homo sapiens
  misc_RNA (1)...(19): siRNA sense strand
gaacccaagaagugcccua

SEQ ID NO: 2399621 - RNA, 19 nt, Homo sapiens
  misc_RNA (1)...(19): siRNA sense strand
aagaaacgcuuaacagcca

SEQ ID NO: 2399622 - RNA, 19 nt, Homo sapiens
  misc_RNA (1)...(19): siRNA sense strand
gugcggucuguuaaagaaa

SEQ ID NO: 2399623 - RNA, 19 nt, Homo sapiens
  misc_RNA (1)...(19): siRNA sense strand
cagcaggacuccagagcca

SEQ ID NO: 2399624 - RNA, 19 nt, Homo sapiens
  misc_RNA (1)...(19): siRNA sense strand
acaugaauacagugaugaa

SEQ ID NO: 2399625 - RNA, 19 nt, Homo sapiens
  misc_RNA (1)...(19): siRNA sense strand
agauauaaggcucagaaaa

SEQ ID NO: 2399626 - RNA, 19 nt, Homo sapiens
  misc_RNA (1)...(19): siRNA sense strand
ggacacaucucuuagguug

SEQ ID NO: 2399627 - RNA, 19 nt, Homo sapiens
  misc_RNA (1)...(19): siRNA sense strand
gaugagggcuuuaugggca

SEQ ID NO: 2399628 - RNA, 19 nt, Homo sapiens
  misc_RNA (1)...(19): siRNA sense strand
cgaagaggugauaaugaca

SEQ ID NO: 2399629 - RNA, 19 nt, Homo sapiens
  misc_RNA (1)...(19): siRNA sense strand
aggaacaugaauacaguga

SEQ ID NO: 2399630 - RNA, 19 nt, Homo sapiens
  misc_RNA (1)...(19): siRNA sense strand
gcaaggauuucaaggagca

SEQ ID NO: 2399631 - RNA, 19 nt, Homo sapiens
  misc_RNA (1)...(19): siRNA sense strand
aagaagggccagauggaga

SEQ ID NO: 2399632 - RNA, 19 nt, Homo sapiens
  misc_RNA (1)...(19): siRNA sense strand
ggaggcaagugaagcccaa

SEQ ID NO: 2399633 - RNA, 19 nt, Homo sapiens
  misc_RNA (1)...(19): siRNA sense strand
gaucagaccaggaggcaag

SEQ ID NO: 2399634 - RNA, 19 nt, Homo sapiens
  misc_RNA (1)...(19): siRNA sense strand
gugccaaccugcugcgcau

SEQ ID NO: 2399635 - RNA, 19 nt, Homo sapiens
  misc_RNA (1)...(19): siRNA sense strand
ggccagauggagaaggaca

SEQ ID NO: 2399636 - RNA, 19 nt, Homo sapiens
  misc_RNA (1)...(19): siRNA sense strand
augucaagcgcaaggauuu

SEQ ID NO: 2399637 - RNA, 19 nt, Homo sapiens
  misc_RNA (1)...(19): siRNA sense strand
ggacagagcuagaagaccg

SEQ ID NO: 2399638 - RNA, 19 nt, Homo sapiens
  misc_RNA (1)...(19): siRNA sense strand
cauucguagugauguagaa

SEQ ID NO: 2399639 - RNA, 19 nt, Homo sapiens
  misc_RNA (1)...(19): siRNA sense strand
cgucugaccaacaggcaca

SEQ ID NO: 2399640 - RNA, 19 nt, Homo sapiens
  misc_RNA (1)...(19): siRNA sense strand
ggaucagaccaggaggcaa

SEQ ID NO: 2399641 - RNA, 19 nt, Homo sapiens
  misc_RNA (1)...(19): siRNA sense strand
acuacgaguccaucagcaa

SEQ ID NO: 2399642 - RNA, 19 nt, Homo sapiens
  misc_RNA (1)...(19): siRNA sense strand
acugaagucaugagagaaa

SEQ ID NO: 2399643 - RNA, 19 nt, Homo sapiens
  misc_RNA (1)...(19): siRNA sense strand
cagaauauuucaagcgacu

SEQ ID NO: 2399644 - RNA, 19 nt, Homo sapiens
  misc_RNA (1)...(19): siRNA sense strand
agauggaagauucuggaaa

SEQ ID NO: 2399645 - RNA, 19 nt, Homo sapiens
  misc_RNA (1)...(19): siRNA sense strand
caguaauguucgauccaca

SEQ ID NO: 2399646 - RNA, 19 nt, Homo sapiens
  misc_RNA (1)...(19): siRNA sense strand
gguucggagaggagacgua

SEQ ID NO: 2399647 - RNA, 19 nt, Homo sapiens
  misc_RNA (1)...(19): siRNA sense strand
ucgagugggcucaggagaa

SEQ ID NO: 2399648 - RNA, 19 nt, Homo sapiens
  misc_RNA (1)...(19): siRNA sense strand
gagacguagaugaguucaa

SEQ ID NO: 2399649 - RNA, 19 nt, Homo sapiens
  misc_RNA (1)...(19): siRNA sense strand
acuaagaagccucgagaac

SEQ ID NO: 2399650 - RNA, 19 nt, Homo sapiens
  misc_RNA (1)...(19): siRNA sense strand
caggagaagcguaagcuga

SEQ ID NO: 2399651 - RNA, 19 nt, Homo sapiens
  misc_RNA (1)...(19): siRNA sense strand
agugauuggaacaggcauu

SEQ ID NO: 2399652 - RNA, 19 nt, Homo sapiens
  misc_RNA (1)...(19): siRNA sense strand
aagcguaagcugagcgugu

SEQ ID NO: 2399653 - RNA, 19 nt, Homo sapiens
  misc_RNA (1)...(19): siRNA sense strand
gcgacugacaugugagauc

SEQ ID NO: 2399654 - RNA, 19 nt, Homo sapiens
  misc_RNA (1)...(19): siRNA sense strand
gagucaaagauggaagauu

SEQ ID NO: 2399655 - RNA, 19 nt, Homo sapiens
  misc_RNA (1)...(19): siRNA sense strand
cgagaaaacaugcuggaca

SEQ ID NO: 2399656 - RNA, 19 nt, Homo sapiens
  misc_RNA (1)...(19): siRNA sense strand
cagugaaauaagaggcugu

SEQ ID NO: 2399657 - RNA, 19 nt, Homo sapiens
  misc_RNA (1)...(19): siRNA sense strand
agaacuugugcuagugauu

SEQ ID NO: 2399658 - RNA, 19 nt, Homo sapiens
  misc_RNA (1)...(19): siRNA sense strand
cagaacgugcucaggaaca

SEQ ID NO: 2399659 - RNA, 19 nt, Homo sapiens
  misc_RNA (1)...(19): siRNA sense strand
ggaaacagcuugaaucccu

SEQ ID NO: 2399660 - RNA, 19 nt, Homo sapiens
  misc_RNA (1)...(19): siRNA sense strand
ggauggugagagaagguca

SEQ ID NO: 2399661 - RNA, 19 nt, Homo sapiens
  misc_RNA (1)...(19): siRNA sense strand
gggaagaaauagaaggcuu

SEQ ID NO: 2399662 - RNA, 19 nt, Homo sapiens
  misc_RNA (1)...(19): siRNA sense strand
guuacaaacacuaaagcaa

SEQ ID NO: 2399663 - RNA, 19 nt, Homo sapiens
  misc_RNA (1)...(19): siRNA sense strand
ugaaaaugguaaaggggau

SEQ ID NO: 2399664 - RNA, 19 nt, Homo sapiens
  misc_RNA (1)...(19): siRNA sense strand
uaauaaauguugcagguca

SEQ ID NO: 2399665 - RNA, 19 nt, Homo sapiens
  misc_RNA (1)...(19): siRNA sense strand
cguaccacuuguagaagaa

SEQ ID NO: 2399666 - RNA, 19 nt, Homo sapiens
  misc_RNA (1)...(19): siRNA sense strand
ccaacugcaauuagagcaa

SEQ ID NO: 2399667 - RNA, 19 nt, Homo sapiens
  misc_RNA (1)...(19): siRNA sense strand
ggaccaaaacgcuggagaa

SEQ ID NO: 2399668 - RNA, 19 nt, Homo sapiens
  misc_RNA (1)...(19): siRNA sense strand
uggagaacgaugugaugua

SEQ ID NO: 2399669 - RNA, 19 nt, Homo sapiens
  misc_RNA (1)...(19): siRNA sense strand
ggugguuuguggaaggaau

SEQ ID NO: 2399670 - RNA, 19 nt, Homo sapiens
  misc_RNA (1)...(19): siRNA sense strand
gguacaagcccuggaccaa

SEQ ID NO: 2399671 - RNA, 19 nt, Homo sapiens
  misc_RNA (1)...(19): siRNA sense strand
cacucuguguauugagaaa

SEQ ID NO: 2399672 - RNA, 19 nt, Homo sapiens
  misc_RNA (1)...(19): siRNA sense strand
acguagaagaaaugcugaa

SEQ ID NO: 2399673 - RNA, 19 nt, Homo sapiens
  misc_RNA (1)...(19): siRNA sense strand
caagcauggcaucaagaaa

SEQ ID NO: 2399674 - RNA, 19 nt, Homo sapiens
  misc_RNA (1)...(19): siRNA sense strand
uguuaugucucgaguggau

SEQ ID NO: 2399675 - RNA, 19 nt, Homo sapiens
  misc_RNA (1)...(19): siRNA sense strand
acauggaugaagaaggcua

SEQ ID NO: 2399676 - RNA, 19 nt, Homo sapiens
  misc_RNA (1)...(19): siRNA sense strand
gaaaaugguaaaggggaua

SEQ ID NO: 2399677 - RNA, 19 nt, Homo sapiens
  misc_RNA (1)...(19): siRNA sense strand
ugucaaacagcuacccaaa

SEQ ID NO: 2399678 - RNA, 19 nt, Homo sapiens
  misc_RNA (1)...(19): siRNA sense strand
acaacacaaaccagacaaa

SEQ ID NO: 2399679 - RNA, 19 nt, Homo sapiens
  misc_RNA (1)...(19): siRNA sense strand
caccagggcaagcaggaaa

SEQ ID NO: 2399680 - RNA, 19 nt, Homo sapiens
  misc_RNA (1)...(19): siRNA sense strand
uguaauaaauguugcaggu

SEQ ID NO: 2399681 - RNA, 19 nt, Homo sapiens
  misc_RNA (1)...(19): siRNA sense strand
caucaagaaaggugacacu

SEQ ID NO: 2399682 - RNA, 19 nt, Homo sapiens
  misc_RNA (1)...(19): siRNA sense strand
cugcagugucguaaaguca

SEQ ID NO: 2399683 - RNA, 19 nt, Homo sapiens
  misc_RNA (1)...(19): siRNA sense strand
aggcuggguuguuggacau

SEQ ID NO: 2399684 - RNA, 19 nt, Homo sapiens
  misc_RNA (1)...(19): siRNA sense strand
cauuauuuguggcuggaga

SEQ ID NO: 2399685 - RNA, 19 nt, Homo sapiens
  misc_RNA (1)...(19): siRNA sense strand
gagcaaguuuuggaagaaa

SEQ ID NO: 2399686 - RNA, 19 nt, Homo sapiens
  misc_RNA (1)...(19): siRNA sense strand
ggcucgguguuuaggaaau

SEQ ID NO: 2399687 - RNA, 19 nt, Homo sapiens
  misc_RNA (1)...(19): siRNA sense strand
auuuguggcuggagaacga

SEQ ID NO: 2399688 - RNA, 19 nt, Homo sapiens
  misc_RNA (1)...(19): siRNA sense strand
uggcuggugucuuggucaa

SEQ ID NO: 2399689 - RNA, 19 nt, Homo sapiens
  misc_RNA (1)...(19): siRNA sense strand
ggugguuguuacagcauca

SEQ ID NO: 2399690 - RNA, 19 nt, Homo sapiens
  misc_RNA (1)...(19): siRNA sense strand
ugguaaaggggauaagauu

SEQ ID NO: 2399691 - RNA, 19 nt, Homo sapiens
  misc_RNA (1)...(19): siRNA sense strand
cuggaaggaggguagagua

SEQ ID NO: 2399692 - RNA, 19 nt, Homo sapiens
  misc_RNA (1)...(19): siRNA sense strand
ugggaugaagagauggcaa

SEQ ID NO: 2399693 - RNA, 19 nt, Homo sapiens
  misc_RNA (1)...(19): siRNA sense strand
aggagcaaguuuuggaaga

SEQ ID NO: 2399694 - RNA, 19 nt, Homo sapiens
  misc_RNA (1)...(19): siRNA sense strand
ggagcaaguuuuggaagaa

SEQ ID NO: 2399695 - RNA, 19 nt, Homo sapiens
  misc_RNA (1)...(19): siRNA sense strand
gaauuaaugaggagggaca

SEQ ID NO: 2399696 - RNA, 19 nt, Homo sapiens
  misc_RNA (1)...(19): siRNA sense strand
ucucauuagcuguggaaau

SEQ ID NO: 2399697 - RNA, 19 nt, Homo sapiens
  misc_RNA (1)...(19): siRNA sense strand
gugaugaugucgacgggaa

SEQ ID NO: 2399698 - RNA, 19 nt, Homo sapiens
  misc_RNA (1)...(19): siRNA sense strand
gcuaacagaaggaaggaga

SEQ ID NO: 2399699 - RNA, 19 nt, Homo sapiens
  misc_RNA (1)...(19): siRNA sense strand
acagaaggaaggagaucaa

SEQ ID NO: 2399700 - RNA, 19 nt, Homo sapiens
  misc_RNA (1)...(19): siRNA sense strand
gaucaagaggagagccaau

SEQ ID NO: 2399701 - RNA, 19 nt, Homo sapiens
  misc_RNA (1)...(19): siRNA sense strand
gaacagaagaaaagagcau

SEQ ID NO: 2399702 - RNA, 19 nt, Homo sapiens
  misc_RNA (1)...(19): siRNA sense strand
ccuagauguagaugauaaa

SEQ ID NO: 2399703 - RNA, 19 nt, Homo sapiens
  misc_RNA (1)...(19): siRNA sense strand
gggacagcagugugauaaa

SEQ ID NO: 2399704 - RNA, 19 nt, Homo sapiens
  misc_RNA (1)...(19): siRNA sense strand
aaucaaaaugggagggaga

SEQ ID NO: 2399705 - RNA, 19 nt, Homo sapiens
  misc_RNA (1)...(19): siRNA sense strand
cagaugaagcaaagaggga

SEQ ID NO: 2399706 - RNA, 19 nt, Homo sapiens
  misc_RNA (1)...(19): siRNA sense strand
ggaaggagaucaagaggag

SEQ ID NO: 2399707 - RNA, 19 nt, Homo sapiens
  misc_RNA (1)...(19): siRNA sense strand
agcaaagagggaagaaauu

SEQ ID NO: 2399708 - RNA, 19 nt, Homo sapiens
  misc_RNA (1)...(19): siRNA sense strand
gagaucaagaggagagcca

SEQ ID NO: 2399709 - RNA, 19 nt, Homo sapiens
  misc_RNA (1)...(19): siRNA sense strand
ggauagaugugcagagucc

SEQ ID NO: 2399710 - RNA, 19 nt, Homo sapiens
  misc_RNA (1)...(19): siRNA sense strand
uggaaauggcagcagucaa

SEQ ID NO: 2399711 - RNA, 19 nt, Homo sapiens
  misc_RNA (1)...(19): siRNA sense strand
gagggagaauaaugagcga

SEQ ID NO: 2399712 - RNA, 19 nt, Homo sapiens
  misc_RNA (1)...(19): siRNA sense strand
uggaagaauuaaugaggag

SEQ ID NO: 2399713 - RNA, 19 nt, Homo sapiens
  misc_RNA (1)...(19): siRNA sense strand
uagaugauaaaguggaaga

SEQ ID NO: 2399714 - RNA, 19 nt, Homo sapiens
  misc_RNA (1)...(19): siRNA sense strand
agaaggaaggagaucaaga

SEQ ID NO: 2399715 - RNA, 19 nt, Homo sapiens
  misc_RNA (1)...(19): siRNA sense strand
cugagugaacagaagaaaa

SEQ ID NO: 2399716 - RNA, 19 nt, Homo sapiens
  misc_RNA (1)...(19): siRNA sense strand
gugugauaaaagaggaaau

SEQ ID NO: 2399717 - RNA, 19 nt, Homo sapiens
  misc_RNA (1)...(19): siRNA sense strand
agagggaagaaauugcaaa

SEQ ID NO: 2399718 - RNA, 19 nt, Homo sapiens
  misc_RNA (1)...(19): siRNA sense strand
ggaagaaauugcaaacgcu

SEQ ID NO: 2399719 - RNA, 19 nt, Homo sapiens
  misc_RNA (1)...(19): siRNA sense strand
uauacagaagccaggcaaa

SEQ ID NO: 2399720 - RNA, 19 nt, Homo sapiens
  misc_RNA (1)...(19): siRNA sense strand
gaugaagcaaagagggaag

SEQ ID NO: 2399721 - RNA, 19 nt, Homo sapiens
  misc_RNA (1)...(19): siRNA sense strand
ugaugaugucgacgggaau

SEQ ID NO: 2399722 - RNA, 19 nt, Homo sapiens
  misc_RNA (1)...(19): siRNA sense strand
guggaagaauuaaugagga

SEQ ID NO: 2399723 - RNA, 19 nt, Homo sapiens
  misc_RNA (1)...(19): siRNA sense strand
guuacuucaaugagaauca

SEQ ID NO: 2399724 - RNA, 19 nt, Homo sapiens
  misc_RNA (1)...(19): siRNA sense strand
gaggagaagaagaggcaaa

SEQ ID NO: 2399725 - RNA, 19 nt, Homo sapiens
  misc_RNA (1)...(19): siRNA sense strand
aagaagaaaugcagagauu

SEQ ID NO: 2399726 - RNA, 19 nt, Homo sapiens
  misc_RNA (1)...(19): siRNA sense strand
aggaagaggcugaacauaa

SEQ ID NO: 2399727 - RNA, 19 nt, Homo sapiens
  misc_RNA (1)...(19): siRNA sense strand
gggcagaggugguuuauuu

SEQ ID NO: 2399728 - RNA, 19 nt, Homo sapiens
  misc_RNA (1)...(19): siRNA sense strand
ccaaggaagaggugggaga

SEQ ID NO: 2399729 - RNA, 19 nt, Homo sapiens
  misc_RNA (1)...(19): siRNA sense strand
gaucauagaaggaggccau

SEQ ID NO: 2399730 - RNA, 19 nt, Homo sapiens
  misc_RNA (1)...(19): siRNA sense strand
caagacagcuggugccuua

SEQ ID NO: 2399731 - RNA, 19 nt, Homo sapiens
  misc_RNA (1)...(19): siRNA sense strand
cagaagagcuggaggacag

SEQ ID NO: 2399732 - RNA, 19 nt, Homo sapiens
  misc_RNA (1)...(19): siRNA sense strand
ggagacucauagaggagaa

SEQ ID NO: 2399733 - RNA, 19 nt, Homo sapiens
  misc_RNA (1)...(19): siRNA sense strand
cauuugaacaacugguaaa

SEQ ID NO: 2399734 - RNA, 19 nt, Homo sapiens
  misc_RNA (1)...(19): siRNA sense strand
gaagaaagcaaguguucau

SEQ ID NO: 2399735 - RNA, 19 nt, Homo sapiens
  misc_RNA (1)...(19): siRNA sense strand
uagaagagggccugaagaa

SEQ ID NO: 2399736 - RNA, 19 nt, Homo sapiens
  misc_RNA (1)...(19): siRNA sense strand
ugugagaggagaagagaga

SEQ ID NO: 2399737 - RNA, 19 nt, Homo sapiens
  misc_RNA (1)...(19): siRNA sense strand
aaaugaaagaccugaguuu

SEQ ID NO: 2399738 - RNA, 19 nt, Homo sapiens
  misc_RNA (1)...(19): siRNA sense strand
gaagagggccugaagaaga

SEQ ID NO: 2399739 - RNA, 19 nt, Homo sapiens
  misc_RNA (1)...(19): siRNA sense strand
ggauauucuccaagacuau

SEQ ID NO: 2399740 - RNA, 19 nt, Homo sapiens
  misc_RNA (1)...(19): siRNA sense strand
gaaacaaagggcaagauuu

SEQ ID NO: 2399741 - RNA, 19 nt, Homo sapiens
  misc_RNA (1)...(19): siRNA sense strand
ugagaggagaagagagaca

SEQ ID NO: 2399742 - RNA, 19 nt, Homo sapiens
  misc_RNA (1)...(19): siRNA sense strand
agacacuguggaagaaaua

SEQ ID NO: 2399743 - RNA, 19 nt, Homo sapiens
  misc_RNA (1)...(19): siRNA sense strand
ggacaugccacgaaagguu

SEQ ID NO: 2399744 - RNA, 19 nt, Homo sapiens
  misc_RNA (1)...(19): siRNA sense strand
gcaacuggaaagaagaaau

SEQ ID NO: 2399745 - RNA, 19 nt, Homo sapiens
  misc_RNA (1)...(19): siRNA sense strand
gcugauuggucgagacacu

SEQ ID NO: 2399746 - RNA, 19 nt, Homo sapiens
  misc_RNA (1)...(19): siRNA sense strand
aagauggccuggugggaau

SEQ ID NO: 2399747 - RNA, 19 nt, Homo sapiens
  misc_RNA (1)...(19): siRNA sense strand
gccaagagaaggagacuca

SEQ ID NO: 2399748 - RNA, 19 nt, Homo sapiens
  misc_RNA (1)...(19): siRNA sense strand
ggugggaauccaacaauua

SEQ ID NO: 2399749 - RNA, 19 nt, Homo sapiens
  misc_RNA (1)...(19): siRNA sense strand
auuaaaugaugaagggcca

SEQ ID NO: 2399750 - RNA, 19 nt, Homo sapiens
  misc_RNA (1)...(19): siRNA sense strand
caagagaaggagacucaua

SEQ ID NO: 2399751 - RNA, 19 nt, Homo sapiens
  misc_RNA (1)...(19): siRNA sense strand
aggagggagcagagaucaa

SEQ ID NO: 2399752 - RNA, 19 nt, Homo sapiens
  misc_RNA (1)...(19): siRNA sense strand
agaaauacuacaaggccau

SEQ ID NO: 2399753 - RNA, 19 nt, Homo sapiens
  misc_RNA (1)...(19): siRNA sense strand
agaucaagaggaaggaaaa

SEQ ID NO: 2399754 - RNA, 19 nt, Homo sapiens
  misc_RNA (1)...(19): siRNA sense strand
caggauauugagaaagaau

SEQ ID NO: 2399755 - RNA, 19 nt, Homo sapiens
  misc_RNA (1)...(19): siRNA sense strand
ccuccaguugagugagaua

SEQ ID NO: 2399756 - RNA, 19 nt, Homo sapiens
  misc_RNA (1)...(19): siRNA sense strand
aucaagaaacaaagggcaa

SEQ ID NO: 2399757 - RNA, 19 nt, Homo sapiens
  misc_RNA (1)...(19): siRNA sense strand
aagaaauacuacaaggcca

SEQ ID NO: 2399758 - RNA, 19 nt, Homo sapiens
  misc_RNA (1)...(19): siRNA sense strand
ccauuaagaacuuuggaca

SEQ ID NO: 2399759 - RNA, 19 nt, Homo sapiens
  misc_RNA (1)...(19): siRNA sense strand
ggcaaaaggaagaggcuga

SEQ ID NO: 2399760 - RNA, 19 nt, Homo sapiens
  misc_RNA (1)...(19): siRNA sense strand
cagcaagugaacugcacaa

SEQ ID NO: 2399761 - RNA, 19 nt, Homo sapiens
  misc_RNA (1)...(19): siRNA sense strand
caggaagauuaaaugauga

SEQ ID NO: 2399762 - RNA, 19 nt, Homo sapiens
  misc_RNA (1)...(19): siRNA sense strand
ggauauugagaaagaaucu

SEQ ID NO: 2399763 - RNA, 19 nt, Homo sapiens
  misc_RNA (1)...(19): siRNA sense strand
gccagaggaccuugagaau

SEQ ID NO: 2399764 - RNA, 19 nt, Homo sapiens
  misc_RNA (1)...(19): siRNA sense strand
gaggacagacagaagaaaa

SEQ ID NO: 2399765 - RNA, 19 nt, Homo sapiens
  misc_RNA (1)...(19): siRNA sense strand
gaagaaaagacaagaagca

SEQ ID NO: 2399766 - RNA, 19 nt, Homo sapiens
  misc_RNA (1)...(19): siRNA sense strand
acugguaaaccuucagaaa

SEQ ID NO: 2399767 - RNA, 19 nt, Homo sapiens
  misc_RNA (1)...(19): siRNA sense strand
gggcaagauuuguuggccu

SEQ ID NO: 2399768 - RNA, 19 nt, Homo sapiens
  misc_RNA (1)...(19): siRNA sense strand
ccgaucacuccgaaauaaa

SEQ ID NO: 2399769 - RNA, 19 nt, Homo sapiens
  misc_RNA (1)...(19): siRNA sense strand
gguuuuaacugguauggua

SEQ ID NO: 2399770 - RNA, 19 nt, Homo sapiens
  misc_RNA (1)...(19): siRNA sense strand
ugagcgacuuauucggaaa

SEQ ID NO: 2399771 - RNA, 19 nt, Homo sapiens
  misc_RNA (1)...(19): siRNA sense strand
gacucauagaggagaagaa

SEQ ID NO: 2399772 - RNA, 19 nt, Homo sapiens
  misc_RNA (1)...(19): siRNA sense strand
ggcaagauuuguuggccuu

SEQ ID NO: 2399773 - RNA, 19 nt, Homo sapiens
  misc_RNA (1)...(19): siRNA sense strand
cuuaccagcuggagggagu

SEQ ID NO: 2399774 - RNA, 19 nt, Homo sapiens
  misc_RNA (1)...(19): siRNA sense strand
uauaugagcuggcugggaa

SEQ ID NO: 2399775 - RNA, 19 nt, Homo sapiens
  misc_RNA (1)...(19): siRNA sense strand
ugacuuuaauccucagaau

SEQ ID NO: 2399776 - RNA, 19 nt, Homo sapiens
  misc_RNA (1)...(19): siRNA sense strand
ggaaagaagaaaugcagag

SEQ ID NO: 2399777 - RNA, 19 nt, Homo sapiens
  misc_RNA (1)...(19): siRNA sense strand
agaaacaaagggcaagauu

SEQ ID NO: 2399778 - RNA, 19 nt, Homo sapiens
  misc_RNA (1)...(19): siRNA sense strand
ggaagaggugggagauuuu

SEQ ID NO: 2399779 - RNA, 19 nt, Homo sapiens
  misc_RNA (1)...(19): siRNA sense strand
ggaugaagcucacagguug

SEQ ID NO: 2399780 - RNA, 19 nt, Homo sapiens
  misc_RNA (1)...(19): siRNA sense strand
gagcaggacuuacggcagu

SEQ ID NO: 2399781 - RNA, 19 nt, Homo sapiens
  misc_RNA (1)...(19): siRNA sense strand
ggaagaggcugaacauaag

SEQ ID NO: 2399782 - RNA, 19 nt, Homo sapiens
  misc_RNA (1)...(19): siRNA sense strand
gcaugucagcauugcagaa

SEQ ID NO: 2399783 - RNA, 19 nt, Homo sapiens
  misc_RNA (1)...(19): siRNA sense strand
aaagauggccagugggucu

SEQ ID NO: 2399784 - RNA, 19 nt, Homo sapiens
  misc_RNA (1)...(19): siRNA sense strand
ugguaaaccuucagaaaac

SEQ ID NO: 2399785 - RNA, 19 nt, Homo sapiens
  misc_RNA (1)...(19): siRNA sense strand
gggugcaggagcaggacuu

SEQ ID NO: 2399786 - RNA, 19 nt, Homo sapiens
  misc_RNA (1)...(19): siRNA sense strand
auucuaaagagcccaguaa

SEQ ID NO: 2399787 - RNA, 19 nt, Homo sapiens
  misc_RNA (1)...(19): siRNA sense strand
gaagaagaggcaaaaggaa

SEQ ID NO: 2399788 - RNA, 19 nt, Homo sapiens
  misc_RNA (1)...(19): siRNA sense strand
gaggagaagaagaggcaaa

SEQ ID NO: 2399789 - RNA, 19 nt, Homo sapiens
  misc_RNA (1)...(19): siRNA sense strand
aggaagaggcugaacauaa

SEQ ID NO: 2399790 - RNA, 19 nt, Homo sapiens
  misc_RNA (1)...(19): siRNA sense strand
gggcagaggugguuuauuu

SEQ ID NO: 2399791 - RNA, 19 nt, Homo sapiens
  misc_RNA (1)...(19): siRNA sense strand
ccaaggaagaggugggaga

SEQ ID NO: 2399792 - RNA, 19 nt, Homo sapiens
  misc_RNA (1)...(19): siRNA sense strand
gaucauagaaggaggccau

SEQ ID NO: 2399793 - RNA, 19 nt, Homo sapiens
  misc_RNA (1)...(19): siRNA sense strand
caagacagcuggugccuua

SEQ ID NO: 2399794 - RNA, 19 nt, Homo sapiens
  misc_RNA (1)...(19): siRNA sense strand
cagaagagcuggaggacag

SEQ ID NO: 2399795 - RNA, 19 nt, Homo sapiens
  misc_RNA (1)...(19): siRNA sense strand
ggagacucauagaggagaa

SEQ ID NO: 2399796 - RNA, 19 nt, Homo sapiens
  misc_RNA (1)...(19): siRNA sense strand
cauuugaacaacugguaaa

SEQ ID NO: 2399797 - RNA, 19 nt, Homo sapiens
  misc_RNA (1)...(19): siRNA sense strand
gaagaaagcaaguguucau

SEQ ID NO: 2399798 - RNA, 19 nt, Homo sapiens
  misc_RNA (1)...(19): siRNA sense strand
uagaagagggccugaagaa

SEQ ID NO: 2399799 - RNA, 19 nt, Homo sapiens
  misc_RNA (1)...(19): siRNA sense strand
ugugagaggagaagagaga

SEQ ID NO: 2399800 - RNA, 19 nt, Homo sapiens
  misc_RNA (1)...(19): siRNA sense strand
aaaugaaagaccugaguuu

SEQ ID NO: 2399801 - RNA, 19 nt, Homo sapiens
  misc_RNA (1)...(19): siRNA sense strand
gaagagggccugaagaaga

SEQ ID NO: 2399802 - RNA, 19 nt, Homo sapiens
  misc_RNA (1)...(19): siRNA sense strand
ggauauucuccaagacuau

SEQ ID NO: 2399803 - RNA, 19 nt, Homo sapiens
  misc_RNA (1)...(19): siRNA sense strand
gaaacaaagggcaagauuu

SEQ ID NO: 2399804 - RNA, 19 nt, Homo sapiens
  misc_RNA (1)...(19): siRNA sense strand
ugagaggagaagagagaca

SEQ ID NO: 2399805 - RNA, 19 nt, Homo sapiens
  misc_RNA (1)...(19): siRNA sense strand
agacacuguggaagaaaua

SEQ ID NO: 2399806 - RNA, 19 nt, Homo sapiens
  misc_RNA (1)...(19): siRNA sense strand
ggacaugccacgaaagguu

SEQ ID NO: 2399807 - RNA, 19 nt, Homo sapiens
  misc_RNA (1)...(19): siRNA sense strand
gcugauuggucgagacacu

SEQ ID NO: 2399808 - RNA, 19 nt, Homo sapiens
  misc_RNA (1)...(19): siRNA sense strand
aagauggccuggugggaau

SEQ ID NO: 2399809 - RNA, 19 nt, Homo sapiens
  misc_RNA (1)...(19): siRNA sense strand
gccaagagaaggagacuca

SEQ ID NO: 2399810 - RNA, 19 nt, Homo sapiens
  misc_RNA (1)...(19): siRNA sense strand
ggugggaauccaacaauua

SEQ ID NO: 2399811 - RNA, 19 nt, Homo sapiens
  misc_RNA (1)...(19): siRNA sense strand
caagagaaggagacucaua

SEQ ID NO: 2399812 - RNA, 19 nt, Homo sapiens
  misc_RNA (1)...(19): siRNA sense strand
aggagggagcagagaucaa

SEQ ID NO: 2399813 - RNA, 19 nt, Homo sapiens
  misc_RNA (1)...(19): siRNA sense strand
agaaauacuacaaggccau

SEQ ID NO: 2399814 - RNA, 19 nt, Homo sapiens
  misc_RNA (1)...(19): siRNA sense strand
agaucaagaggaaggaaaa

SEQ ID NO: 2399815 - RNA, 19 nt, Homo sapiens
  misc_RNA (1)...(19): siRNA sense strand
caggauauugagaaagaau

SEQ ID NO: 2399816 - RNA, 19 nt, Homo sapiens
  misc_RNA (1)...(19): siRNA sense strand
ccuccaguugagugagaua

SEQ ID NO: 2399817 - RNA, 19 nt, Homo sapiens
  misc_RNA (1)...(19): siRNA sense strand
aucaagaaacaaagggcaa

SEQ ID NO: 2399818 - RNA, 19 nt, Homo sapiens
  misc_RNA (1)...(19): siRNA sense strand
aagaaauacuacaaggcca

SEQ ID NO: 2399819 - RNA, 19 nt, Homo sapiens
  misc_RNA (1)...(19): siRNA sense strand
ccauuaagaacuuuggaca

SEQ ID NO: 2399820 - RNA, 19 nt, Homo sapiens
  misc_RNA (1)...(19): siRNA sense strand
ggcaaaaggaagaggcuga

SEQ ID NO: 2399821 - RNA, 19 nt, Homo sapiens
  misc_RNA (1)...(19): siRNA sense strand
cagcaagugaacugcacaa

SEQ ID NO: 2399822 - RNA, 19 nt, Homo sapiens
  misc_RNA (1)...(19): siRNA sense strand
ggauauugagaaagaaucu

SEQ ID NO: 2399823 - RNA, 19 nt, Homo sapiens
  misc_RNA (1)...(19): siRNA sense strand
gccagaggaccuugagaau

SEQ ID NO: 2399824 - RNA, 19 nt, Homo sapiens
  misc_RNA (1)...(19): siRNA sense strand
gaggacagacagaagaaaa

SEQ ID NO: 2399825 - RNA, 19 nt, Homo sapiens
  misc_RNA (1)...(19): siRNA sense strand
gaagaaaagacaagaagca

SEQ ID NO: 2399826 - RNA, 19 nt, Homo sapiens
  misc_RNA (1)...(19): siRNA sense strand
acugguaaaccuucagaaa

SEQ ID NO: 2399827 - RNA, 19 nt, Homo sapiens
  misc_RNA (1)...(19): siRNA sense strand
gggcaagauuuguuggccu

SEQ ID NO: 2399828 - RNA, 19 nt, Homo sapiens
  misc_RNA (1)...(19): siRNA sense strand
ccgaucacuccgaaauaaa

SEQ ID NO: 2399829 - RNA, 19 nt, Homo sapiens
  misc_RNA (1)...(19): siRNA sense strand
gguuuuaacugguauggua

SEQ ID NO: 2399830 - RNA, 19 nt, Homo sapiens
  misc_RNA (1)...(19): siRNA sense strand
ugagcgacuuauucggaaa

SEQ ID NO: 2399831 - RNA, 19 nt, Homo sapiens
  misc_RNA (1)...(19): siRNA sense strand
gacucauagaggagaagaa

SEQ ID NO: 2399832 - RNA, 19 nt, Homo sapiens
  misc_RNA (1)...(19): siRNA sense strand
ggcaagauuuguuggccuu

SEQ ID NO: 2399833 - RNA, 19 nt, Homo sapiens
  misc_RNA (1)...(19): siRNA sense strand
uauaugagcuggcugggaa

SEQ ID NO: 2399834 - RNA, 19 nt, Homo sapiens
  misc_RNA (1)...(19): siRNA sense strand
agaaacaaagggcaagauu

SEQ ID NO: 2399835 - RNA, 19 nt, Homo sapiens
  misc_RNA (1)...(19): siRNA sense strand
ggaagaggugggagauuuu

SEQ ID NO: 2399836 - RNA, 19 nt, Homo sapiens
  misc_RNA (1)...(19): siRNA sense strand
ggaugaagcucacagguug

SEQ ID NO: 2399837 - RNA, 19 nt, Homo sapiens
  misc_RNA (1)...(19): siRNA sense strand
ggaagaggcugaacauaag

SEQ ID NO: 2399838 - RNA, 19 nt, Homo sapiens
  misc_RNA (1)...(19): siRNA sense strand
gcaugucagcauugcagaa

SEQ ID NO: 2399839 - RNA, 19 nt, Homo sapiens
  misc_RNA (1)...(19): siRNA sense strand
aaagauggccagugggucu

SEQ ID NO: 2399840 - RNA, 19 nt, Homo sapiens
  misc_RNA (1)...(19): siRNA sense strand
ugguaaaccuucagaaaac

SEQ ID NO: 2399841 - RNA, 19 nt, Homo sapiens
  misc_RNA (1)...(19): siRNA sense strand
auucuaaagagcccaguaa

SEQ ID NO: 2399842 - RNA, 19 nt, Homo sapiens
  misc_RNA (1)...(19): siRNA sense strand
gaagaagaggcaaaaggaa

SEQ ID NO: 2399843 - RNA, 19 nt, Homo sapiens
  misc_RNA (1)...(19): siRNA sense strand
cauuaagauggcagcccua

SEQ ID NO: 2399844 - RNA, 19 nt, Homo sapiens
  misc_RNA (1)...(19): siRNA sense strand
gaugaagcucacagguuga

SEQ ID NO: 2399845 - RNA, 19 nt, Homo sapiens
  misc_RNA (1)...(19): siRNA sense strand
guggagggaucuaccaaaa

SEQ ID NO: 2399846 - RNA, 19 nt, Homo sapiens
  misc_RNA (1)...(19): siRNA sense strand
uggaggacagacagaagaa

SEQ ID NO: 2399847 - RNA, 19 nt, Homo sapiens
  misc_RNA (1)...(19): siRNA sense strand
gacaagaagcagcugccaa

SEQ ID NO: 2399848 - RNA, 19 nt, Homo sapiens
  misc_RNA (1)...(19): siRNA sense strand
agaagaggcaaaaggaaga

SEQ ID NO: 2399849 - RNA, 19 nt, Homo sapiens
  misc_RNA (1)...(19): siRNA sense strand
gucgagacacuguggaaga

SEQ ID NO: 2399850 - RNA, 19 nt, Homo sapiens
  misc_RNA (1)...(19): siRNA sense strand
gaaagcaaguguucaucuu

SEQ ID NO: 2399851 - RNA, 19 nt, Homo sapiens
  misc_RNA (1)...(19): siRNA sense strand
gcucagaaggcuuuggcua

SEQ ID NO: 2399852 - RNA, 19 nt, Homo sapiens
  misc_RNA (1)...(19): siRNA sense strand
cauuaaaguggcuggaaaa

SEQ ID NO: 2399853 - RNA, 19 nt, Homo sapiens
  misc_RNA (1)...(19): siRNA sense strand
agcaaagagaagacauuaa

SEQ ID NO: 2399854 - RNA, 19 nt, Homo sapiens
  misc_RNA (1)...(19): siRNA sense strand
acagcaaagagaagacauu

SEQ ID NO: 2399855 - RNA, 19 nt, Homo sapiens
  misc_RNA (1)...(19): siRNA sense strand
cuguagaagcaaaagaaga

SEQ ID NO: 2399856 - RNA, 19 nt, Homo sapiens
  misc_RNA (1)...(19): siRNA sense strand
cuuaaagcuuccagaaccu

SEQ ID NO: 2399857 - RNA, 19 nt, Homo sapiens
  misc_RNA (1)...(19): siRNA sense strand
gugcaagauggauggagaa

SEQ ID NO: 2399858 - RNA, 19 nt, Homo sapiens
  misc_RNA (1)...(19): siRNA sense strand
ugugcaagauggauggaga

SEQ ID NO: 2399859 - RNA, 19 nt, Homo sapiens
  misc_RNA (1)...(19): siRNA sense strand
ggagagaaacucacggaag

SEQ ID NO: 2399860 - RNA, 19 nt, Homo sapiens
  misc_RNA (1)...(19): siRNA sense strand
aaguaaugcccgugguugu

SEQ ID NO: 2399861 - RNA, 19 nt, Homo sapiens
  misc_RNA (1)...(19): siRNA sense strand
uggcuaugguggugcagga

SEQ ID NO: 2399862 - RNA, 19 nt, Homo sapiens
  misc_RNA (1)...(19): siRNA sense strand
acagaaagaagcuccgaga

SEQ ID NO: 2399863 - RNA, 19 nt, Homo sapiens
  misc_RNA (1)...(19): siRNA sense strand
ggaagaagucaacucccaa

SEQ ID NO: 2399864 - RNA, 19 nt, Homo sapiens
  misc_RNA (1)...(19): siRNA sense strand
gcgcaauaaugaacggcaa

SEQ ID NO: 2399865 - RNA, 19 nt, Homo sapiens
  misc_RNA (1)...(19): siRNA sense strand
gggcaauauccgacagaga

SEQ ID NO: 2399866 - RNA, 19 nt, Homo sapiens
  misc_RNA (1)...(19): siRNA sense strand
ccgagaacggcaaggaaau

SEQ ID NO: 2399867 - RNA, 19 nt, Homo sapiens
  misc_RNA (1)...(19): siRNA sense strand
uaucauagcuggagggcuc

SEQ ID NO: 2399868 - RNA, 19 nt, Homo sapiens
  misc_RNA (1)...(19): siRNA sense strand
agauuggaccugaggaaga

SEQ ID NO: 2399869 - RNA, 19 nt, Homo sapiens
  misc_RNA (1)...(19): siRNA sense strand
gugccaaggucaaaggcga

SEQ ID NO: 2399870 - RNA, 19 nt, Homo sapiens
  misc_RNA (1)...(19): siRNA sense strand
aggugaaaugcuugcgcaa

SEQ ID NO: 2399871 - RNA, 19 nt, Homo sapiens
  misc_RNA (1)...(19): siRNA sense strand
uggagaugaccgacagcaa

SEQ ID NO: 2399872 - RNA, 19 nt, Homo sapiens
  misc_RNA (1)...(19): siRNA sense strand
auacagauauguucgguga

SEQ ID NO: 2399873 - RNA, 19 nt, Homo sapiens
  misc_RNA (1)...(19): siRNA sense strand
gggaaaucauauuagugga

SEQ ID NO: 2399874 - RNA, 19 nt, Homo sapiens
  misc_RNA (1)...(19): siRNA sense strand
gggaauguugagagcagau

SEQ ID NO: 2399875 - RNA, 19 nt, Homo sapiens
  misc_RNA (1)...(19): siRNA sense strand
cugaaguguggauggauga

SEQ ID NO: 2399876 - RNA, 19 nt, Homo sapiens
  misc_RNA (1)...(19): siRNA sense strand
accgagaacggcaaggaaa

SEQ ID NO: 2399877 - RNA, 19 nt, Homo sapiens
  misc_RNA (1)...(19): siRNA sense strand
uggagaggcccuucgggaa

SEQ ID NO: 2399878 - RNA, 19 nt, Homo sapiens
  misc_RNA (1)...(19): siRNA sense strand
gcgaagaugcaaaguccca

SEQ ID NO: 2399879 - RNA, 19 nt, Homo sapiens
  misc_RNA (1)...(19): siRNA sense strand
acgcaucugauccgggaaa

SEQ ID NO: 2399880 - RNA, 19 nt, Homo sapiens
  misc_RNA (1)...(19): siRNA sense strand
augccaacacguauauaaa

SEQ ID NO: 2399881 - RNA, 19 nt, Homo sapiens
  misc_RNA (1)...(19): siRNA sense strand
caagaauggagaugaccga

SEQ ID NO: 2399882 - RNA, 19 nt, Homo sapiens
  misc_RNA (1)...(19): siRNA sense strand
gcacagggucaaagaggac

SEQ ID NO: 2399883 - RNA, 19 nt, Homo sapiens
  misc_RNA (1)...(19): siRNA sense strand
cguauauaaagaacaccaa

SEQ ID NO: 2399884 - RNA, 19 nt, Homo sapiens
  misc_RNA (1)...(19): siRNA sense strand
gcugaaguguggauggaug

SEQ ID NO: 2399885 - RNA, 19 nt, Homo sapiens
  misc_RNA (1)...(19): siRNA sense strand
gguuaauugaacagguaaa

SEQ ID NO: 2399886 - RNA, 19 nt, Homo sapiens
  misc_RNA (1)...(19): siRNA sense strand
uugaagaccuagaugaaaa

SEQ ID NO: 2399887 - RNA, 19 nt, Homo sapiens
  misc_RNA (1)...(19): siRNA sense strand
ugcaagaaaacaagagaaa

SEQ ID NO: 2399888 - RNA, 19 nt, Homo sapiens
  misc_RNA (1)...(19): siRNA sense strand
aggaaggcguggaagcuga

SEQ ID NO: 2399889 - RNA, 19 nt, Homo sapiens
  misc_RNA (1)...(19): siRNA sense strand
aagaacuauugaagaccua

SEQ ID NO: 2399890 - RNA, 19 nt, Homo sapiens
  misc_RNA (1)...(19): siRNA sense strand
gguuauugauacauugcau

SEQ ID NO: 2399891 - RNA, 19 nt, Homo sapiens
  misc_RNA (1)...(19): siRNA sense strand
uguuacauguaucgaagaa

SEQ ID NO: 2399892 - RNA, 19 nt, Homo sapiens
  misc_RNA (1)...(19): siRNA sense strand
gcguggaagcugaaaagaa

SEQ ID NO: 2399893 - RNA, 19 nt, Homo sapiens
  misc_RNA (1)...(19): siRNA sense strand
auucauuggaagaccuaaa

SEQ ID NO: 2399894 - RNA, 19 nt, Homo sapiens
  misc_RNA (1)...(19): siRNA sense strand
cggagaggaaggcguggaa

SEQ ID NO: 2399895 - RNA, 19 nt, Homo sapiens
  misc_RNA (1)...(19): siRNA sense strand
gcaaaauuucuauggguca

SEQ ID NO: 2399896 - RNA, 19 nt, Homo sapiens
  misc_RNA (1)...(19): siRNA sense strand
uagaauaucaacagagucu

SEQ ID NO: 2399897 - RNA, 19 nt, Homo sapiens
  misc_RNA (1)...(19): siRNA sense strand
cugacugggaagaguauau

SEQ ID NO: 2399898 - RNA, 19 nt, Homo sapiens
  misc_RNA (1)...(19): siRNA sense strand
gugauuugaauuacaggaa

SEQ ID NO: 2399899 - RNA, 19 nt, Homo sapiens
  misc_RNA (1)...(19): siRNA sense strand
acagaauaccacagaucuu

SEQ ID NO: 2399900 - RNA, 19 nt, Homo sapiens
  misc_RNA (1)...(19): siRNA sense strand
guacuaaauucauuggaag

SEQ ID NO: 2399901 - RNA, 19 nt, Homo sapiens
  misc_RNA (1)...(19): siRNA sense strand
aguugacaggugacagaaa

SEQ ID NO: 2399902 - RNA, 19 nt, Homo sapiens
  misc_RNA (1)...(19): siRNA sense strand
gguaaaacacaguaaucau

SEQ ID NO: 2399903 - RNA, 19 nt, Homo sapiens
  misc_RNA (1)...(19): siRNA sense strand
cgaagaauucaugaagcaa

SEQ ID NO: 2399904 - RNA, 19 nt, Homo sapiens
  misc_RNA (1)...(19): siRNA sense strand
augaaaaucagcugaaaga

SEQ ID NO: 2399905 - RNA, 19 nt, Homo sapiens
  misc_RNA (1)...(19): siRNA sense strand
gcaagaaaacaagagaaaa

SEQ ID NO: 2399906 - RNA, 19 nt, Homo sapiens
  misc_RNA (1)...(19): siRNA sense strand
guguauauuguucucgaua

SEQ ID NO: 2399907 - RNA, 19 nt, Homo sapiens
  misc_RNA (1)...(19): siRNA sense strand
agacagaauaccacagauc

SEQ ID NO: 2399908 - RNA, 19 nt, Homo sapiens
  misc_RNA (1)...(19): siRNA sense strand
acugggaagaguauauuaa

SEQ ID NO: 2399909 - RNA, 19 nt, Homo sapiens
  misc_RNA (1)...(19): siRNA sense strand
acuuauaugcugaacuaca

SEQ ID NO: 2399910 - RNA, 19 nt, Homo sapiens
  misc_RNA (1)...(19): siRNA sense strand
guaucgaagaauucaugaa

SEQ ID NO: 2399911 - RNA, 19 nt, Homo sapiens
  misc_RNA (1)...(19): siRNA sense strand
ugcuagaguugguggaaca

SEQ ID NO: 2399912 - RNA, 19 nt, Homo sapiens
  misc_RNA (1)...(19): siRNA sense strand
uggcaagaucugugacgga

SEQ ID NO: 2399913 - RNA, 19 nt, Homo sapiens
  misc_RNA (1)...(19): siRNA sense strand
caggaagcugcuagacgaa

SEQ ID NO: 2399914 - RNA, 19 nt, Homo sapiens
  misc_RNA (1)...(19): siRNA sense strand
cccacaaggcaaagaccaa

SEQ ID NO: 2399915 - RNA, 19 nt, Homo sapiens
  misc_RNA (1)...(19): siRNA sense strand
gcgaauggauccuggcuuc

SEQ ID NO: 2399916 - RNA, 19 nt, Homo sapiens
  misc_RNA (1)...(19): siRNA sense strand
ucgcaguguuccaggacca

SEQ ID NO: 2399917 - RNA, 19 nt, Homo sapiens
  misc_RNA (1)...(19): siRNA sense strand
gaguuugagaugaagcgaa

SEQ ID NO: 2399918 - RNA, 19 nt, Homo sapiens
  misc_RNA (1)...(19): siRNA sense strand
agaaagacugggagaggau

SEQ ID NO: 2399919 - RNA, 19 nt, Homo sapiens
  misc_RNA (1)...(19): siRNA sense strand
augaagaaagacugggaga

SEQ ID NO: 2399920 - RNA, 19 nt, Homo sapiens
  misc_RNA (1)...(19): siRNA sense strand
ggaugaagaaagacuggga

SEQ ID NO: 2399921 - RNA, 19 nt, Homo sapiens
  misc_RNA (1)...(19): siRNA sense strand
aggacauaacagaagcaau

SEQ ID NO: 2399922 - RNA, 19 nt, Homo sapiens
  misc_RNA (1)...(19): siRNA sense strand
agauaauuauggagccaga

SEQ ID NO: 2399923 - RNA, 19 nt, Homo sapiens
  misc_RNA (1)...(19): siRNA sense strand
uugaagaaguggagaggcu

SEQ ID NO: 2399924 - RNA, 19 nt, Homo sapiens
  misc_RNA (1)...(19): siRNA sense strand
agggagaagccaaugguau

SEQ ID NO: 2399925 - RNA, 19 nt, Homo sapiens
  misc_RNA (1)...(19): siRNA sense strand
gaagauaauuauggagcca

SEQ ID NO: 2399926 - RNA, 19 nt, Homo sapiens
  misc_RNA (1)...(19): siRNA sense strand
aggccacugucuagaacaa

SEQ ID NO: 2399927 - RNA, 19 nt, Homo sapiens
  misc_RNA (1)...(19): siRNA sense strand
gaagaaguggagaggcuca

SEQ ID NO: 2399928 - RNA, 19 nt, Homo sapiens
  misc_RNA (1)...(19): siRNA sense strand
cugggaaggagaagcaaga

SEQ ID NO: 2399929 - RNA, 19 nt, Homo sapiens
  misc_RNA (1)...(19): siRNA sense strand
gggaaggagaagcaagagu

SEQ ID NO: 2399930 - RNA, 19 nt, Homo sapiens
  misc_RNA (1)...(19): siRNA sense strand
gcaucuuccuauaagggau

SEQ ID NO: 2399931 - RNA, 19 nt, Homo sapiens
  misc_RNA (1)...(19): siRNA sense strand
uggaauaugacagggagaa

SEQ ID NO: 2399932 - RNA, 19 nt, Homo sapiens
  misc_RNA (1)...(19): siRNA sense strand
gcaagaguccucaggccau

SEQ ID NO: 2399933 - RNA, 19 nt, Homo sapiens
  misc_RNA (1)...(19): siRNA sense strand
cuuuggaaaugcaugguga

SEQ ID NO: 2399934 - RNA, 19 nt, Homo sapiens
  misc_RNA (1)...(19): siRNA sense strand
agaccagggagucgccuaa

SEQ ID NO: 2399935 - RNA, 19 nt, Homo sapiens
  misc_RNA (1)...(19): siRNA sense strand
gcauuaauauggagggaga

SEQ ID NO: 2399936 - RNA, 19 nt, Homo sapiens
  misc_RNA (1)...(19): siRNA sense strand
gcagauacugugagggcua

SEQ ID NO: 2399937 - RNA, 19 nt, Homo sapiens
  misc_RNA (1)...(19): siRNA sense strand
agauaaaccaaguggcauu

SEQ ID NO: 2399938 - RNA, 19 nt, Homo sapiens
  misc_RNA (1)...(19): siRNA sense strand
cggaaagguuggugggaug

SEQ ID NO: 2399939 - RNA, 19 nt, Homo sapiens
  misc_RNA (1)...(19): siRNA sense strand
aggcauuggaaguaguaaa

SEQ ID NO: 2399940 - RNA, 19 nt, Homo sapiens
  misc_RNA (1)...(19): siRNA sense strand
gaaacuaugcuaagcggaa

SEQ ID NO: 2399941 - RNA, 19 nt, Homo sapiens
  misc_RNA (1)...(19): siRNA sense strand
aaguacaagaggugguuua

SEQ ID NO: 2399942 - RNA, 19 nt, Homo sapiens
  misc_RNA (1)...(19): siRNA sense strand
auggaaauucuucgagaua

SEQ ID NO: 2399943 - RNA, 19 nt, Homo sapiens
  misc_RNA (1)...(19): siRNA sense strand
gggcagaaaugggagccaa

SEQ ID NO: 2399944 - RNA, 19 nt, Homo sapiens
  misc_RNA (1)...(19): siRNA sense strand
acucuaugaugaaguacaa

SEQ ID NO: 2399945 - RNA, 19 nt, Homo sapiens
  misc_RNA (1)...(19): siRNA sense strand
cagacuuggccuugaaaga

SEQ ID NO: 2399946 - RNA, 19 nt, Homo sapiens
  misc_RNA (1)...(19): siRNA sense strand
cgagauaaaccaaguggca

SEQ ID NO: 2399947 - RNA, 19 nt, Homo sapiens
  misc_RNA (1)...(19): siRNA sense strand
ccuugaaagagcugauaca

SEQ ID NO: 2399948 - RNA, 19 nt, Homo sapiens
  misc_RNA (1)...(19): siRNA sense strand
cagucaaauuuaucaguca

SEQ ID NO: 2399949 - RNA, 19 nt, Homo sapiens
  misc_RNA (1)...(19): siRNA sense strand
gcggaaagguuggugggau

SEQ ID NO: 2399950 - RNA, 19 nt, Homo sapiens
  misc_RNA (1)...(19): siRNA sense strand
ggaaauugcacagagggua

SEQ ID NO: 2399951 - RNA, 19 nt, Homo sapiens
  misc_RNA (1)...(19): siRNA sense strand
ggcagaaaugggagccaau

SEQ ID NO: 2399952 - RNA, 19 nt, Homo sapiens
  misc_RNA (1)...(19): siRNA sense strand
caugaggaaacuggagaaa

SEQ ID NO: 2399953 - RNA, 19 nt, Homo sapiens
  misc_RNA (1)...(19): siRNA sense strand
uggaguuugcauugggaau

SEQ ID NO: 2399954 - RNA, 19 nt, Homo sapiens
  misc_RNA (1)...(19): siRNA sense strand
aggaauggaccuugucaga

SEQ ID NO: 2399955 - RNA, 19 nt, Homo sapiens
  misc_RNA (1)...(19): siRNA sense strand
acaugaggaaacuggagaa

SEQ ID NO: 2399956 - RNA, 19 nt, Homo sapiens
  misc_RNA (1)...(19): siRNA sense strand
gaaugaagcuguaugggga

SEQ ID NO: 2399957 - RNA, 19 nt, Homo sapiens
  misc_RNA (1)...(19): siRNA sense strand
ccucaagacuccagccuuc

SEQ ID NO: 2399958 - RNA, 19 nt, Homo sapiens
  misc_RNA (1)...(19): siRNA sense strand
acaugagaaacuaugcuaa

SEQ ID NO: 2399959 - RNA, 19 nt, Homo sapiens
  misc_RNA (1)...(19): siRNA sense strand
agaacuauucagagagaug

SEQ ID NO: 2399960 - RNA, 19 nt, Homo sapiens
  misc_RNA (1)...(19): siRNA sense strand
caacauuugaacuugaaga

SEQ ID NO: 2399961 - RNA, 19 nt, Homo sapiens
  misc_RNA (1)...(19): siRNA sense strand
auuaauauggagggagaau

SEQ ID NO: 2399962 - RNA, 19 nt, Homo sapiens
  misc_RNA (1)...(19): siRNA sense strand
gaaauugcacagaggguag

SEQ ID NO: 2399963 - RNA, 19 nt, Homo sapiens
  misc_RNA (1)...(19): siRNA sense strand
ggaaacuggagaaagaacu

SEQ ID NO: 2399964 - RNA, 19 nt, Homo sapiens
  misc_RNA (1)...(19): siRNA sense strand
aggaaaagcaggagaaaga

SEQ ID NO: 2399965 - RNA, 19 nt, Homo sapiens
  misc_RNA (1)...(19): siRNA sense strand
agucauaaucagugccuaa

SEQ ID NO: 2399966 - RNA, 19 nt, Homo sapiens
  misc_RNA (1)...(19): siRNA sense strand
ggaaacagcuacuggagga

SEQ ID NO: 2399967 - RNA, 19 nt, Homo sapiens
  misc_RNA (1)...(19): siRNA sense strand
caaagaaaguccaagcuga

SEQ ID NO: 2399968 - RNA, 19 nt, Homo sapiens
  misc_RNA (1)...(19): siRNA sense strand
gauugaacgaagaagacaa

SEQ ID NO: 2399969 - RNA, 19 nt, Homo sapiens
  misc_RNA (1)...(19): siRNA sense strand
agaaaagauuacuggagaa

SEQ ID NO: 2399970 - RNA, 19 nt, Homo sapiens
  misc_RNA (1)...(19): siRNA sense strand
gcauauaaaacaagcucaa

SEQ ID NO: 2399971 - RNA, 19 nt, Homo sapiens
  misc_RNA (1)...(19): siRNA sense strand
ccugagaagguauggaaca

SEQ ID NO: 2399972 - RNA, 19 nt, Homo sapiens
  misc_RNA (1)...(19): siRNA sense strand
cagcaguucaagaaggaau

SEQ ID NO: 2399973 - RNA, 19 nt, Homo sapiens
  misc_RNA (1)...(19): siRNA sense strand
gagaaaagauuacuggaga

SEQ ID NO: 2399974 - RNA, 19 nt, Homo sapiens
  misc_RNA (1)...(19): siRNA sense strand
gcccagaaacuaacggcua

SEQ ID NO: 2399975 - RNA, 19 nt, Homo sapiens
  misc_RNA (1)...(19): siRNA sense strand
ggcuacugggaaagagaaa

SEQ ID NO: 2399976 - RNA, 19 nt, Homo sapiens
  misc_RNA (1)...(19): siRNA sense strand
ugaagaguacacagagcaa

SEQ ID NO: 2399977 - RNA, 19 nt, Homo sapiens
  misc_RNA (1)...(19): siRNA sense strand
agagauugaacgaagaaga

SEQ ID NO: 2399978 - RNA, 19 nt, Homo sapiens
  misc_RNA (1)...(19): siRNA sense strand
uggagaaacaacugagcga

SEQ ID NO: 2399979 - RNA, 19 nt, Homo sapiens
  misc_RNA (1)...(19): siRNA sense strand
gcaucaacagagagaacca

SEQ ID NO: 2399980 - RNA, 19 nt, Homo sapiens
  misc_RNA (1)...(19): siRNA sense strand
gaacagugguaucuggagu

SEQ ID NO: 2399981 - RNA, 19 nt, Homo sapiens
  misc_RNA (1)...(19): siRNA sense strand
aggaggagacaaagaaagu

SEQ ID NO: 2399982 - RNA, 19 nt, Homo sapiens
  misc_RNA (1)...(19): siRNA sense strand
cuaacaaaacugaagagua

SEQ ID NO: 2399983 - RNA, 19 nt, Homo sapiens
  misc_RNA (1)...(19): siRNA sense strand
ccagggagcuacaccgaga

SEQ ID NO: 2399984 - RNA, 19 nt, Homo sapiens
  misc_RNA (1)...(19): siRNA sense strand
guggagagauugaacgaag

SEQ ID NO: 2399985 - RNA, 19 nt, Homo sapiens
  misc_RNA (1)...(19): siRNA sense strand
agacauuacaggaggagac

SEQ ID NO: 2399986 - RNA, 19 nt, Homo sapiens
  misc_RNA (1)...(19): siRNA sense strand
acaggaggagacaaagaaa

SEQ ID NO: 2399987 - RNA, 19 nt, Homo sapiens
  misc_RNA (1)...(19): siRNA sense strand
gaaacaacugagcgagcca

SEQ ID NO: 2399988 - RNA, 19 nt, Homo sapiens
  misc_RNA (1)...(19): siRNA sense strand
cuggaauaccugacuaaca

SEQ ID NO: 2399989 - RNA, 19 nt, Homo sapiens
  misc_RNA (1)...(19): siRNA sense strand
uuacaggaggagacaaaga

SEQ ID NO: 2399990 - RNA, 19 nt, Homo sapiens
  misc_RNA (1)...(19): siRNA sense strand
ccagagacauagaacgcau

SEQ ID NO: 2399991 - RNA, 19 nt, Homo sapiens
  misc_RNA (1)...(19): siRNA sense strand
gcgucaugcuguaccgcua

SEQ ID NO: 2399992 - RNA, 19 nt, Homo sapiens
  misc_RNA (1)...(19): siRNA sense strand
gugucgacuucaugcgcaa

SEQ ID NO: 2399993 - RNA, 19 nt, Homo sapiens
  misc_RNA (1)...(19): siRNA sense strand
ucuccgagucacuggguau

SEQ ID NO: 2399994 - RNA, 19 nt, Homo sapiens
  misc_RNA (1)...(19): siRNA sense strand
acauagaacgcauggugga

SEQ ID NO: 2399995 - RNA, 19 nt, Homo sapiens
  misc_RNA (1)...(19): siRNA sense strand
ccgccaagcaagagaacuu

SEQ ID NO: 2399996 - RNA, 19 nt, Homo sapiens
  misc_RNA (1)...(19): siRNA sense strand
ccagaaaccaugugagcca

SEQ ID NO: 2399997 - RNA, 19 nt, Homo sapiens
  misc_RNA (1)...(19): siRNA sense strand
uggucaacgucuacaucaa

SEQ ID NO: 2399998 - RNA, 19 nt, Homo sapiens
  misc_RNA (1)...(19): siRNA sense strand
cagaccaggugaagggugu

SEQ ID NO: 2399999 - RNA, 19 nt, Homo sapiens
  misc_RNA (1)...(19): siRNA sense strand
ccaugugagccaagccauu

SEQ ID NO: 2400000 - RNA, 19 nt, Homo sapiens
  misc_RNA (1)...(19): siRNA sense strand
aggugagccacgugcacaa

SEQ ID NO: 2400001 - RNA, 19 nt, Homo sapiens
  misc_RNA (1)...(19): siRNA sense strand
ccuuagaagaggaggaaga

SEQ ID NO: 2400002 - RNA, 19 nt, Homo sapiens
  misc_RNA (1)...(19): siRNA sense strand
cccuauacaccaaggcaaa

SEQ ID NO: 2400003 - RNA, 19 nt, Homo sapiens
  misc_RNA (1)...(19): siRNA sense strand
caaaggaacauauugggaa

SEQ ID NO: 2400004 - RNA, 19 nt, Homo sapiens
  misc_RNA (1)...(19): siRNA sense strand
acauucaacuagauggcua

SEQ ID NO: 2400005 - RNA, 19 nt, Homo sapiens
  misc_RNA (1)...(19): siRNA sense strand
uggaaauugcuuacaggaa

SEQ ID NO: 2400006 - RNA, 19 nt, Homo sapiens
  misc_RNA (1)...(19): siRNA sense strand
aaacuagagcccagcacaa

SEQ ID NO: 2400007 - RNA, 19 nt, Homo sapiens
  misc_RNA (1)...(19): siRNA sense strand
uggcaaaaguguauggcuu

SEQ ID NO: 2400008 - RNA, 19 nt, Homo sapiens
  misc_RNA (1)...(19): siRNA sense strand
cagagguagcaaaggaaca

SEQ ID NO: 2400009 - RNA, 19 nt, Homo sapiens
  misc_RNA (1)...(19): siRNA sense strand
cucuaaagacuuaugguuu

SEQ ID NO: 2400010 - RNA, 19 nt, Homo sapiens
  misc_RNA (1)...(19): siRNA sense strand
ggcuaugggaucuggaaca

SEQ ID NO: 2400011 - RNA, 19 nt, Homo sapiens
  misc_RNA (1)...(19): siRNA sense strand
gcggaugaucagggauuua

SEQ ID NO: 2400012 - RNA, 19 nt, Homo sapiens
  misc_RNA (1)...(19): siRNA sense strand
aacugaaggagguuggaua

SEQ ID NO: 2400013 - RNA, 19 nt, Homo sapiens
  misc_RNA (1)...(19): siRNA sense strand
ggaacaguguguaaggaac

SEQ ID NO: 2400014 - RNA, 19 nt, Homo sapiens
  misc_RNA (1)...(19): siRNA sense strand
aacauaaacaggagaagau

SEQ ID NO: 2400015 - RNA, 19 nt, Homo sapiens
  misc_RNA (1)...(19): siRNA sense strand
ggcuaugauaucugggaga

SEQ ID NO: 2400016 - RNA, 19 nt, Homo sapiens
  misc_RNA (1)...(19): siRNA sense strand
gagagaaacuagagcccag

SEQ ID NO: 2400017 - RNA, 19 nt, Homo sapiens
  misc_RNA (1)...(19): siRNA sense strand
acugaaggagguuggauau

SEQ ID NO: 2400018 - RNA, 19 nt, Homo sapiens
  misc_RNA (1)...(19): siRNA sense strand
ccuggaaagaugcuagcaa

SEQ ID NO: 2400019 - RNA, 19 nt, Homo sapiens
  misc_RNA (1)...(19): siRNA sense strand
uagcggaugaucagggauu

SEQ ID NO: 2400020 - RNA, 19 nt, Homo sapiens
  misc_RNA (1)...(19): siRNA sense strand
cauucuaucauaagaccua

SEQ ID NO: 2400021 - RNA, 19 nt, Homo sapiens
  misc_RNA (1)...(19): siRNA sense strand
cucagagaguacagcaaau

SEQ ID NO: 2400022 - RNA, 19 nt, Homo sapiens
  misc_RNA (1)...(19): siRNA sense strand
gggacuaugacaauggcau

SEQ ID NO: 2400023 - RNA, 19 nt, Homo sapiens
  misc_RNA (1)...(19): siRNA sense strand
acuacuauguccagccuau

SEQ ID NO: 2400024 - RNA, 19 nt, Homo sapiens
  misc_RNA (1)...(19): siRNA sense strand
ggaaaauggcacuuggguu

SEQ ID NO: 2400025 - RNA, 19 nt, Homo sapiens
  misc_RNA (1)...(19): siRNA sense strand
gcaaaggaacauauuggga

SEQ ID NO: 2400026 - RNA, 19 nt, Homo sapiens
  misc_RNA (1)...(19): siRNA sense strand
ccugauccgcuaugggaaa

SEQ ID NO: 2400027 - RNA, 19 nt, Homo sapiens
  misc_RNA (1)...(19): siRNA sense strand
caacuuaacuugguggcua

SEQ ID NO: 2400028 - RNA, 19 nt, Homo sapiens
  misc_RNA (1)...(19): siRNA sense strand
ccauguuauucucggcaau

SEQ ID NO: 2400029 - RNA, 19 nt, Homo sapiens
  misc_RNA (1)...(19): siRNA sense strand
aaauaaagcaggagugguc

SEQ ID NO: 2400030 - RNA, 19 nt, Homo sapiens
  misc_RNA (1)...(19): siRNA sense strand
cgguaugggacaaggccaa

SEQ ID NO: 2400031 - RNA, 19 nt, Homo sapiens
  misc_RNA (1)...(19): siRNA sense strand
ccuccgacaaguuggcaua

SEQ ID NO: 2400032 - RNA, 19 nt, Homo sapiens
  misc_RNA (1)...(19): siRNA sense strand
uaccaaacuagcagaacaa

SEQ ID NO: 2400033 - RNA, 19 nt, Homo sapiens
  misc_RNA (1)...(19): siRNA sense strand
cgggaggaguaugagcaaa

SEQ ID NO: 2400034 - RNA, 19 nt, Homo sapiens
  misc_RNA (1)...(19): siRNA sense strand
auaaaauucgggaggagua

SEQ ID NO: 2400035 - RNA, 19 nt, Homo sapiens
  misc_RNA (1)...(19): siRNA sense strand
guucuuaaucagagugaag

SEQ ID NO: 2400036 - RNA, 19 nt, Homo sapiens
  misc_RNA (1)...(19): siRNA sense strand
gcgcaauggagaagagauu

SEQ ID NO: 2400037 - RNA, 19 nt, Homo sapiens
  misc_RNA (1)...(19): siRNA sense strand
ccugauaaucuuaaggaaa

SEQ ID NO: 2400038 - RNA, 19 nt, Homo sapiens
  misc_RNA (1)...(19): siRNA sense strand
acgcaugcccagagggaaa

SEQ ID NO: 2400039 - RNA, 19 nt, Homo sapiens
  misc_RNA (1)...(19): siRNA sense strand
ucuaagaaggagagaacaa

SEQ ID NO: 2400040 - RNA, 19 nt, Homo sapiens
  misc_RNA (1)...(19): siRNA sense strand
cuacagaagagaaggaaaa

SEQ ID NO: 2400041 - RNA, 19 nt, Homo sapiens
  misc_RNA (1)...(19): siRNA sense strand
guuccucaguaaagagaaa

SEQ ID NO: 2400042 - RNA, 19 nt, Homo sapiens
  misc_RNA (1)...(19): siRNA sense strand
gaaaagugggagaggcaaa

SEQ ID NO: 2400043 - RNA, 19 nt, Homo sapiens
  misc_RNA (1)...(19): siRNA sense strand
cuaaagagcuacaaaggca

SEQ ID NO: 2400044 - RNA, 19 nt, Homo sapiens
  misc_RNA (1)...(19): siRNA sense strand
agagauuacaagagaugaa

SEQ ID NO: 2400045 - RNA, 19 nt, Homo sapiens
  misc_RNA (1)...(19): siRNA sense strand
ggccaagcucugugaacua

SEQ ID NO: 2400046 - RNA, 19 nt, Homo sapiens
  misc_RNA (1)...(19): siRNA sense strand
auacaguggaaguguuaaa

SEQ ID NO: 2400047 - RNA, 19 nt, Homo sapiens
  misc_RNA (1)...(19): siRNA sense strand
guaaauguaugcagcccaa

SEQ ID NO: 2400048 - RNA, 19 nt, Homo sapiens
  misc_RNA (1)...(19): siRNA sense strand
uuacaagagaugaaggaga

SEQ ID NO: 2400049 - RNA, 19 nt, Homo sapiens
  misc_RNA (1)...(19): siRNA sense strand
caugaggaauugaagaaaa

SEQ ID NO: 2400050 - RNA, 19 nt, Homo sapiens
  misc_RNA (1)...(19): siRNA sense strand
uggauaaauugaaaggcuu

SEQ ID NO: 2400051 - RNA, 19 nt, Homo sapiens
  misc_RNA (1)...(19): siRNA sense strand
ggauguggaaaucaggaaa

SEQ ID NO: 2400052 - RNA, 19 nt, Homo sapiens
  misc_RNA (1)...(19): siRNA sense strand
ggucuuuagaauuggguca

SEQ ID NO: 2400053 - RNA, 19 nt, Homo sapiens
  misc_RNA (1)...(19): siRNA sense strand
augaaggagaaaagggaaa

SEQ ID NO: 2400054 - RNA, 19 nt, Homo sapiens
  misc_RNA (1)...(19): siRNA sense strand
aaacucaggauguggaaau

SEQ ID NO: 2400055 - RNA, 19 nt, Homo sapiens
  misc_RNA (1)...(19): siRNA sense strand
ggaaaucaggaaaggaagu

SEQ ID NO: 2400056 - RNA, 19 nt, Homo sapiens
  misc_RNA (1)...(19): siRNA sense strand
agacguuugaagagaagua

SEQ ID NO: 2400057 - RNA, 19 nt, Homo sapiens
  misc_RNA (1)...(19): siRNA sense strand
uuguagacaggcugggaaa

SEQ ID NO: 2400058 - RNA, 19 nt, Homo sapiens
  misc_RNA (1)...(19): siRNA sense strand
aggagacguuugaagagaa

SEQ ID NO: 2400059 - RNA, 19 nt, Homo sapiens
  misc_RNA (1)...(19): siRNA sense strand
aaggagagaacaagcauau

SEQ ID NO: 2400060 - RNA, 19 nt, Homo sapiens
  misc_RNA (1)...(19): siRNA sense strand
ugaaagaagcgguuggucu

SEQ ID NO: 2400061 - RNA, 19 nt, Homo sapiens
  misc_RNA (1)...(19): siRNA sense strand
ucuacagaagagaaggaaa

SEQ ID NO: 2400062 - RNA, 19 nt, Homo sapiens
  misc_RNA (1)...(19): siRNA sense strand
gcuuuaaggaccucaucaa

SEQ ID NO: 2400063 - RNA, 19 nt, Homo sapiens
  misc_RNA (1)...(19): siRNA sense strand
ugaagaagcccuaaggugu

SEQ ID NO: 2400064 - RNA, 19 nt, Homo sapiens
  misc_RNA (1)...(19): siRNA sense strand
agaaaugaaagaagcgguu

SEQ ID NO: 2400065 - RNA, 19 nt, Homo sapiens
  misc_RNA (1)...(19): siRNA sense strand
aagagaaagaggagcacca

SEQ ID NO: 2400066 - RNA, 19 nt, Homo sapiens
  misc_RNA (1)...(19): siRNA sense strand
caaguaucugucugagaaa

SEQ ID NO: 2400067 - RNA, 19 nt, Homo sapiens
  misc_RNA (1)...(19): siRNA sense strand
gugaagcaccuuugaacau

SEQ ID NO: 2400068 - RNA, 19 nt, Homo sapiens
  misc_RNA (1)...(19): siRNA sense strand
ugaaaagcacacagaacaa

SEQ ID NO: 2400069 - RNA, 19 nt, Homo sapiens
  misc_RNA (1)...(19): siRNA sense strand
cauucaagacccaggaguu

SEQ ID NO: 2400070 - RNA, 19 nt, Homo sapiens
  misc_RNA (1)...(19): siRNA sense strand
aggaaagguauucagagaa

SEQ ID NO: 2400071 - RNA, 19 nt, Homo sapiens
  misc_RNA (1)...(19): siRNA sense strand
caacaagaacauuagucau

SEQ ID NO: 2400072 - RNA, 19 nt, Homo sapiens
  misc_RNA (1)...(19): siRNA sense strand
guggauaaauugaaaggcu

SEQ ID NO: 2400073 - RNA, 19 nt, Homo sapiens
  misc_RNA (1)...(19): siRNA sense strand
cauuaaaagugaugugugu

SEQ ID NO: 2400074 - RNA, 19 nt, Homo sapiens
  misc_RNA (1)...(19): siRNA sense strand
agaagagauuacaagagau

SEQ ID NO: 2400075 - RNA, 19 nt, Homo sapiens
  misc_RNA (1)...(19): siRNA sense strand
gauuacaagagaugaagga

SEQ ID NO: 2400076 - RNA, 19 nt, Homo sapiens
  misc_RNA (1)...(19): siRNA sense strand
aagaggagcaccaggagau

SEQ ID NO: 2400077 - RNA, 19 nt, Homo sapiens
  misc_RNA (1)...(19): siRNA sense strand
aaccagaacaguugacauu

SEQ ID NO: 2400078 - RNA, 19 nt, Homo sapiens
  misc_RNA (1)...(19): siRNA sense strand
cagaagagaaggaaaacuu

SEQ ID NO: 2400079 - RNA, 19 nt, Homo sapiens
  misc_RNA (1)...(19): siRNA sense strand
cggaggauacaguggaagu

SEQ ID NO: 2400080 - RNA, 19 nt, Homo sapiens
  misc_RNA (1)...(19): siRNA sense strand
cucaugaggaauugaagaa

SEQ ID NO: 2400081 - RNA, 19 nt, Homo sapiens
  misc_RNA (1)...(19): siRNA sense strand
uggaaauggugaaggccgu

SEQ ID NO: 2400082 - RNA, 19 nt, Homo sapiens
  misc_RNA (1)...(19): siRNA sense strand
caggaaaggaaguuggaag

SEQ ID NO: 2400083 - RNA, 19 nt, Homo sapiens
  misc_RNA (1)...(19): siRNA sense strand
gccuugaagaaaugaaaga

SEQ ID NO: 2400084 - RNA, 19 nt, Homo sapiens
  misc_RNA (1)...(19): siRNA sense strand
aagaaaagugggagaggca

SEQ ID NO: 2400085 - RNA, 19 nt, Homo sapiens
  misc_RNA (1)...(19): siRNA sense strand
caugauaauccaaguaacu

SEQ ID NO: 2400086 - RNA, 19 nt, Homo sapiens
  misc_RNA (1)...(19): siRNA sense strand
aaaggaaguuggaaggauc

SEQ ID NO: 2400087 - RNA, 19 nt, Homo sapiens
  misc_RNA (1)...(19): siRNA sense strand
aaauagaccaacaaggcau

SEQ ID NO: 2400088 - RNA, 19 nt, Homo sapiens
  misc_RNA (1)...(19): siRNA sense strand
aggagcaccaggagaucua

SEQ ID NO: 2400089 - RNA, 19 nt, Homo sapiens
  misc_RNA (1)...(19): siRNA sense strand
gcaauggagaagagauuac

SEQ ID NO: 2400090 - RNA, 19 nt, Homo sapiens
  misc_RNA (1)...(19): siRNA sense strand
aaaucaaguccucagaaau

SEQ ID NO: 2400091 - RNA, 19 nt, Homo sapiens
  misc_RNA (1)...(19): siRNA sense strand
uugaagagaaguaucguuu

SEQ ID NO: 2400092 - RNA, 19 nt, Homo sapiens
  misc_RNA (1)...(19): siRNA sense strand
cauucaccuccgaaggaaa

SEQ ID NO: 2400093 - RNA, 19 nt, Homo sapiens
  misc_RNA (1)...(19): siRNA sense strand
ugcaagagaaagaggagca

SEQ ID NO: 2400094 - RNA, 19 nt, Homo sapiens
  misc_RNA (1)...(19): siRNA sense strand
uggugaaggccgugcaacu

SEQ ID NO: 2400095 - RNA, 19 nt, Homo sapiens
  misc_RNA (1)...(19): siRNA sense strand
agaaagaggagcaccagga

SEQ ID NO: 2400096 - RNA, 19 nt, Homo sapiens
  misc_RNA (1)...(19): siRNA sense strand
aaggcgaagcccagaguga

SEQ ID NO: 2400097 - RNA, 19 nt, Homo sapiens
  misc_RNA (1)...(19): siRNA sense strand
aggcaaucguggauggguu

SEQ ID NO: 2400098 - RNA, 19 nt, Homo sapiens
  misc_RNA (1)...(19): siRNA sense strand
cauaugaagccaaggagga

SEQ ID NO: 2400099 - RNA, 19 nt, Homo sapiens
  misc_RNA (1)...(19): siRNA sense strand
gcgcgugcacacugagcaa

SEQ ID NO: 2400100 - RNA, 19 nt, Homo sapiens
  misc_RNA (1)...(19): siRNA sense strand
ccugaagaugacagcacaa

SEQ ID NO: 2400101 - RNA, 19 nt, Homo sapiens
  misc_RNA (1)...(19): siRNA sense strand
gcugcaagucugggaacaa

SEQ ID NO: 2400102 - RNA, 19 nt, Homo sapiens
  misc_RNA (1)...(19): siRNA sense strand
uggacagagucauggagga

SEQ ID NO: 2400103 - RNA, 19 nt, Homo sapiens
  misc_RNA (1)...(19): siRNA sense strand
cugacagugugcugaacau

SEQ ID NO: 2400104 - RNA, 19 nt, Homo sapiens
  misc_RNA (1)...(19): siRNA sense strand
aaaugaagaacgaagggaa

SEQ ID NO: 2400105 - RNA, 19 nt, Homo sapiens
  misc_RNA (1)...(19): siRNA sense strand
augaggagcugcugcgcaa

SEQ ID NO: 2400106 - RNA, 19 nt, Homo sapiens
  misc_RNA (1)...(19): siRNA sense strand
ggauuuggguugaugagga

SEQ ID NO: 2400107 - RNA, 19 nt, Homo sapiens
  misc_RNA (1)...(19): siRNA sense strand
cagaaugucucgagcccga

SEQ ID NO: 2400108 - RNA, 19 nt, Homo sapiens
  misc_RNA (1)...(19): siRNA sense strand
ccaucugggaagcgggauu

SEQ ID NO: 2400109 - RNA, 19 nt, Homo sapiens
  misc_RNA (1)...(19): siRNA sense strand
agaacgaagggaagcaaaa

SEQ ID NO: 2400110 - RNA, 19 nt, Homo sapiens
  misc_RNA (1)...(19): siRNA sense strand
cugaaauugcacagagacu

SEQ ID NO: 2400111 - RNA, 19 nt, Homo sapiens
  misc_RNA (1)...(19): siRNA sense strand
guaugacagaauagcacaa

SEQ ID NO: 2400112 - RNA, 19 nt, Homo sapiens
  misc_RNA (1)...(19): siRNA sense strand
aacaaguacaucugugaaa

SEQ ID NO: 2400113 - RNA, 19 nt, Homo sapiens
  misc_RNA (1)...(19): siRNA sense strand
gccaagaagcucaaggagu

SEQ ID NO: 2400114 - RNA, 19 nt, Homo sapiens
  misc_RNA (1)...(19): siRNA sense strand
ccaaagucaacaaguacau

SEQ ID NO: 2400115 - RNA, 19 nt, Homo sapiens
  misc_RNA (1)...(19): siRNA sense strand
aaguaaagucagaaugucu

SEQ ID NO: 2400116 - RNA, 19 nt, Homo sapiens
  misc_RNA (1)...(19): siRNA sense strand
gcaguuaugauuuggggaa

SEQ ID NO: 2400117 - RNA, 19 nt, Homo sapiens
  misc_RNA (1)...(19): siRNA sense strand
caacaggccaagaagcuca

SEQ ID NO: 2400118 - RNA, 19 nt, Homo sapiens
  misc_RNA (1)...(19): siRNA sense strand
acacgaagaacuuggcagu

SEQ ID NO: 2400119 - RNA, 19 nt, Homo sapiens
  misc_RNA (1)...(19): siRNA sense strand
aagaacgaagggaagcaaa

SEQ ID NO: 2400120 - RNA, 19 nt, Homo sapiens
  misc_RNA (1)...(19): siRNA sense strand
augcuauacucgagggaua

SEQ ID NO: 2400121 - RNA, 19 nt, Homo sapiens
  misc_RNA (1)...(19): siRNA sense strand
gggaaauaugaaagagcaa

SEQ ID NO: 2400122 - RNA, 19 nt, Homo sapiens
  misc_RNA (1)...(19): siRNA sense strand
ggaacuaagaagacagaau

SEQ ID NO: 2400123 - RNA, 19 nt, Homo sapiens
  misc_RNA (1)...(19): siRNA sense strand
gcccauagagauagaacaa

SEQ ID NO: 2400124 - RNA, 19 nt, Homo sapiens
  misc_RNA (1)...(19): siRNA sense strand
gguaaaacccauugauaau

SEQ ID NO: 2400125 - RNA, 19 nt, Homo sapiens
  misc_RNA (1)...(19): siRNA sense strand
aagucaggauugaaggaua

SEQ ID NO: 2400126 - RNA, 19 nt, Homo sapiens
  misc_RNA (1)...(19): siRNA sense strand
gauuaugaggcaugggcaa

SEQ ID NO: 2400127 - RNA, 19 nt, Homo sapiens
  misc_RNA (1)...(19): siRNA sense strand
cagaagaggaacugcaaga

SEQ ID NO: 2400128 - RNA, 19 nt, Homo sapiens
  misc_RNA (1)...(19): siRNA sense strand
acaaaugaacucaggaaaa

SEQ ID NO: 2400129 - RNA, 19 nt, Homo sapiens
  misc_RNA (1)...(19): siRNA sense strand
agugauacuccaagagcaa

SEQ ID NO: 2400130 - RNA, 19 nt, Homo sapiens
  misc_RNA (1)...(19): siRNA sense strand
aaucagagucggaagaaga

SEQ ID NO: 2400131 - RNA, 19 nt, Homo sapiens
  misc_RNA (1)...(19): siRNA sense strand
agaaggagagcgaaagcaa

SEQ ID NO: 2400132 - RNA, 19 nt, Homo sapiens
  misc_RNA (1)...(19): siRNA sense strand
gaaagcuaaaugaggcaaa

SEQ ID NO: 2400133 - RNA, 19 nt, Homo sapiens
  misc_RNA (1)...(19): siRNA sense strand
aaauagaagaagucaguga

SEQ ID NO: 2400134 - RNA, 19 nt, Homo sapiens
  misc_RNA (1)...(19): siRNA sense strand
agaaauaugaagaagcuga

SEQ ID NO: 2400135 - RNA, 19 nt, Homo sapiens
  misc_RNA (1)...(19): siRNA sense strand
aagaagaaaggcaaagcua

SEQ ID NO: 2400136 - RNA, 19 nt, Homo sapiens
  misc_RNA (1)...(19): siRNA sense strand
gggcaaaacuugaugugga

SEQ ID NO: 2400137 - RNA, 19 nt, Homo sapiens
  misc_RNA (1)...(19): siRNA sense strand
ugucgaagaacucaagaaa

SEQ ID NO: 2400138 - RNA, 19 nt, Homo sapiens
  misc_RNA (1)...(19): siRNA sense strand
agaauaagcagcaggccau

SEQ ID NO: 2400139 - RNA, 19 nt, Homo sapiens
  misc_RNA (1)...(19): siRNA sense strand
ugguaaaacccauugauaa

SEQ ID NO: 2400140 - RNA, 19 nt, Homo sapiens
  misc_RNA (1)...(19): siRNA sense strand
uugaaaaguucuccagaua

SEQ ID NO: 2400141 - RNA, 19 nt, Homo sapiens
  misc_RNA (1)...(19): siRNA sense strand
ugguguuccugaagagaau

SEQ ID NO: 2400142 - RNA, 19 nt, Homo sapiens
  misc_RNA (1)...(19): siRNA sense strand
cagaauaagcagcaggcca

SEQ ID NO: 2400143 - RNA, 19 nt, Homo sapiens
  misc_RNA (1)...(19): siRNA sense strand
gaaagcaaauugaagcaca

SEQ ID NO: 2400144 - RNA, 19 nt, Homo sapiens
  misc_RNA (1)...(19): siRNA sense strand
uugaagcacaacagaauaa

SEQ ID NO: 2400145 - RNA, 19 nt, Homo sapiens
  misc_RNA (1)...(19): siRNA sense strand
uggaaauaagcaagcagua

SEQ ID NO: 2400146 - RNA, 19 nt, Homo sapiens
  misc_RNA (1)...(19): siRNA sense strand
ccuugaugagcuugacaaa

SEQ ID NO: 2400147 - RNA, 19 nt, Homo sapiens
  misc_RNA (1)...(19): siRNA sense strand
cgauaguacccaugagucu

SEQ ID NO: 2400148 - RNA, 19 nt, Homo sapiens
  misc_RNA (1)...(19): siRNA sense strand
cggaagaagaugggauuca

SEQ ID NO: 2400149 - RNA, 19 nt, Homo sapiens
  misc_RNA (1)...(19): siRNA sense strand
auagaagaagucagugaua

SEQ ID NO: 2400150 - RNA, 19 nt, Homo sapiens
  misc_RNA (1)...(19): siRNA sense strand
agaagaagucagugauacu

SEQ ID NO: 2400151 - RNA, 19 nt, Homo sapiens
  misc_RNA (1)...(19): siRNA sense strand
gagaaaaugcccauagaga

SEQ ID NO: 2400152 - RNA, 19 nt, Homo sapiens
  misc_RNA (1)...(19): siRNA sense strand
cgaacagagcgucagcaua

SEQ ID NO: 2400153 - RNA, 19 nt, Homo sapiens
  misc_RNA (1)...(19): siRNA sense strand
aguauuagaacuagaacca

SEQ ID NO: 2400154 - RNA, 19 nt, Homo sapiens
  misc_RNA (1)...(19): siRNA sense strand
aaggagagcgaaagcaaau

SEQ ID NO: 2400155 - RNA, 19 nt, Homo sapiens
  misc_RNA (1)...(19): siRNA sense strand
aauugaagcacaacagaau

SEQ ID NO: 2400156 - RNA, 19 nt, Homo sapiens
  misc_RNA (1)...(19): siRNA sense strand
gggaaagcuaaaugaggca

SEQ ID NO: 2400157 - RNA, 19 nt, Homo sapiens
  misc_RNA (1)...(19): siRNA sense strand
gagaaaggacacugggaug

SEQ ID NO: 2400158 - RNA, 19 nt, Homo sapiens
  misc_RNA (1)...(19): siRNA sense strand
gcgaaagcaaauugaagca

SEQ ID NO: 2400159 - RNA, 19 nt, Homo sapiens
  misc_RNA (1)...(19): siRNA sense strand
ccagagaggaaaacacaaa

SEQ ID NO: 2400160 - RNA, 19 nt, Homo sapiens
  misc_RNA (1)...(19): siRNA sense strand
gauuuagaaaacugggaaa

SEQ ID NO: 2400161 - RNA, 19 nt, Homo sapiens
  misc_RNA (1)...(19): siRNA sense strand
uaagaagaauucaagccaa

SEQ ID NO: 2400162 - RNA, 19 nt, Homo sapiens
  misc_RNA (1)...(19): siRNA sense strand
cuaacagagcuauggccua

SEQ ID NO: 2400163 - RNA, 19 nt, Homo sapiens
  misc_RNA (1)...(19): siRNA sense strand
gauuaagucaacagaagga

SEQ ID NO: 2400164 - RNA, 19 nt, Homo sapiens
  misc_RNA (1)...(19): siRNA sense strand
gguaauuugauacagacua

SEQ ID NO: 2400165 - RNA, 19 nt, Homo sapiens
  misc_RNA (1)...(19): siRNA sense strand
cugcugcuccagagaauaa

SEQ ID NO: 2400166 - RNA, 19 nt, Homo sapiens
  misc_RNA (1)...(19): siRNA sense strand
aggaauuaauugagaaagg

SEQ ID NO: 2400167 - RNA, 19 nt, Homo sapiens
  misc_RNA (1)...(19): siRNA sense strand
ugucagucuuacagcgaga

SEQ ID NO: 2400168 - RNA, 19 nt, Homo sapiens
  misc_RNA (1)...(19): siRNA sense strand
uccaaaggaagcugacaua

SEQ ID NO: 2400169 - RNA, 19 nt, Homo sapiens
  misc_RNA (1)...(19): siRNA sense strand
gugauguuuaugucagaaa

SEQ ID NO: 2400170 - RNA, 19 nt, Homo sapiens
  misc_RNA (1)...(19): siRNA sense strand
ucgaagaacucaagaaaag

SEQ ID NO: 2400171 - RNA, 19 nt, Homo sapiens
  misc_RNA (1)...(19): siRNA sense strand
aggaaaauaugaugaagca

SEQ ID NO: 2400172 - RNA, 19 nt, Homo sapiens
  misc_RNA (1)...(19): siRNA sense strand
caauugacugcuacacaaa

SEQ ID NO: 2400173 - RNA, 19 nt, Homo sapiens
  misc_RNA (1)...(19): siRNA sense strand
gcuaaaugaggcaaaacaa

SEQ ID NO: 2400174 - RNA, 19 nt, Homo sapiens
  misc_RNA (1)...(19): siRNA sense strand
acaaaaggauauggaacua

SEQ ID NO: 2400175 - RNA, 19 nt, Homo sapiens
  misc_RNA (1)...(19): siRNA sense strand
aacaaaugaacucaggaaa

SEQ ID NO: 2400176 - RNA, 19 nt, Homo sapiens
  misc_RNA (1)...(19): siRNA sense strand
gauuccacacaaagacaaa

SEQ ID NO: 2400177 - RNA, 19 nt, Homo sapiens
  misc_RNA (1)...(19): siRNA sense strand
agucaggauugaaggauag

SEQ ID NO: 2400178 - RNA, 19 nt, Homo sapiens
  misc_RNA (1)...(19): siRNA sense strand
ugggauucauguagauuca

SEQ ID NO: 2400179 - RNA, 19 nt, Homo sapiens
  misc_RNA (1)...(19): siRNA sense strand
uugcugagucugauuguaa

SEQ ID NO: 2400180 - RNA, 19 nt, Homo sapiens
  misc_RNA (1)...(19): siRNA sense strand
gccuugaauagaaguuaua

SEQ ID NO: 2400181 - RNA, 19 nt, Homo sapiens
  misc_RNA (1)...(19): siRNA sense strand
ggaaauaugaaagagcaau

SEQ ID NO: 2400182 - RNA, 19 nt, Homo sapiens
  misc_RNA (1)...(19): siRNA sense strand
ggacagacguacugggaca

SEQ ID NO: 2400183 - RNA, 19 nt, Homo sapiens
  misc_RNA (1)...(19): siRNA sense strand
cggcuguccaggagaagaa

SEQ ID NO: 2400184 - RNA, 19 nt, Homo sapiens
  misc_RNA (1)...(19): siRNA sense strand
ggucaaaguguucucggaa

SEQ ID NO: 2400185 - RNA, 19 nt, Homo sapiens
  misc_RNA (1)...(19): siRNA sense strand
acugugugcucaaggacaa

SEQ ID NO: 2400186 - RNA, 19 nt, Homo sapiens
  misc_RNA (1)...(19): siRNA sense strand
cagcaagaaugaagccagu

SEQ ID NO: 2400187 - RNA, 19 nt, Homo sapiens
  misc_RNA (1)...(19): siRNA sense strand
cuguguacuacgagugcaa

SEQ ID NO: 2400188 - RNA, 19 nt, Homo sapiens
  misc_RNA (1)...(19): siRNA sense strand
uggacaucgaguacagaua

SEQ ID NO: 2400189 - RNA, 19 nt, Homo sapiens
  misc_RNA (1)...(19): siRNA sense strand
agacguacugggacagcaa

SEQ ID NO: 2400190 - RNA, 19 nt, Homo sapiens
  misc_RNA (1)...(19): siRNA sense strand
uugagaagaccgugaaaau

SEQ ID NO: 2400191 - RNA, 19 nt, Homo sapiens
  misc_RNA (1)...(19): siRNA sense strand
gcauuugagaagaccguga

SEQ ID NO: 2400192 - RNA, 19 nt, Homo sapiens
  misc_RNA (1)...(19): siRNA sense strand
gggaauauccuuugaccag

SEQ ID NO: 2400193 - RNA, 19 nt, Homo sapiens
  misc_RNA (1)...(19): siRNA sense strand
ugacgacagcagagagcga

SEQ ID NO: 2400194 - RNA, 19 nt, Homo sapiens
  misc_RNA (1)...(19): siRNA sense strand
ggacagcaacagaggcaag

SEQ ID NO: 2400195 - RNA, 19 nt, Homo sapiens
  misc_RNA (1)...(19): siRNA sense strand
gagcugacccugagccaga

SEQ ID NO: 2400196 - RNA, 19 nt, Homo sapiens
  misc_RNA (1)...(19): siRNA sense strand
cacgaagggcaaagagaga

SEQ ID NO: 2400197 - RNA, 19 nt, Homo sapiens
  misc_RNA (1)...(19): siRNA sense strand
acucagugcccaaggaagu

SEQ ID NO: 2400198 - RNA, 19 nt, Homo sapiens
  misc_RNA (1)...(19): siRNA sense strand
cccggaaggucaaggcuga

SEQ ID NO: 2400199 - RNA, 19 nt, Homo sapiens
  misc_RNA (1)...(19): siRNA sense strand
agccagaagauaaggacca

SEQ ID NO: 2400200 - RNA, 19 nt, Homo sapiens
  misc_RNA (1)...(19): siRNA sense strand
caacagacguauaggagaa

SEQ ID NO: 2400201 - RNA, 19 nt, Homo sapiens
  misc_RNA (1)...(19): siRNA sense strand
agaaaugugcgcaggauua

SEQ ID NO: 2400202 - RNA, 19 nt, Homo sapiens
  misc_RNA (1)...(19): siRNA sense strand
ggaaaagacuguuggauca

SEQ ID NO: 2400203 - RNA, 19 nt, Homo sapiens
  misc_RNA (1)...(19): siRNA sense strand
cuagacaacucaaaggaaa

SEQ ID NO: 2400204 - RNA, 19 nt, Homo sapiens
  misc_RNA (1)...(19): siRNA sense strand
ugacuaugagagagagaaa

SEQ ID NO: 2400205 - RNA, 19 nt, Homo sapiens
  misc_RNA (1)...(19): siRNA sense strand
ucacagaacuugaaacuuu

SEQ ID NO: 2400206 - RNA, 19 nt, Homo sapiens
  misc_RNA (1)...(19): siRNA sense strand
gguuaaauacgcaaagauu

SEQ ID NO: 2400207 - RNA, 19 nt, Homo sapiens
  misc_RNA (1)...(19): siRNA sense strand
agagaugggauuaaaguua

SEQ ID NO: 2400208 - RNA, 19 nt, Homo sapiens
  misc_RNA (1)...(19): siRNA sense strand
cauugaaacgucagaacaa

SEQ ID NO: 2400209 - RNA, 19 nt, Homo sapiens
  misc_RNA (1)...(19): siRNA sense strand
auaaagaugaucagggauu

SEQ ID NO: 2400210 - RNA, 19 nt, Homo sapiens
  misc_RNA (1)...(19): siRNA sense strand
ugaaagaccuaauguucua

SEQ ID NO: 2400211 - RNA, 19 nt, Homo sapiens
  misc_RNA (1)...(19): siRNA sense strand
acgcaaagauuccugcaaa

SEQ ID NO: 2400212 - RNA, 19 nt, Homo sapiens
  misc_RNA (1)...(19): siRNA sense strand
cgaagaaguuacugaguuc

SEQ ID NO: 2400213 - RNA, 19 nt, Homo sapiens
  misc_RNA (1)...(19): siRNA sense strand
ggucauaagugaaccagga

SEQ ID NO: 2400214 - RNA, 19 nt, Homo sapiens
  misc_RNA (1)...(19): siRNA sense strand
ccaagauggucauaaguga

SEQ ID NO: 2400215 - RNA, 19 nt, Homo sapiens
  misc_RNA (1)...(19): siRNA sense strand
cgcaaagauuccugcaaau

SEQ ID NO: 2400216 - RNA, 19 nt, Homo sapiens
  misc_RNA (1)...(19): siRNA sense strand
ggaugguggcccugaggaa

SEQ ID NO: 2400217 - RNA, 19 nt, Homo sapiens
  misc_RNA (1)...(19): siRNA sense strand
cugcagucuuuauggacaa

SEQ ID NO: 2400218 - RNA, 19 nt, Homo sapiens
  misc_RNA (1)...(19): siRNA sense strand
uggacuuguugguuaaaua

SEQ ID NO: 2400219 - RNA, 19 nt, Homo sapiens
  misc_RNA (1)...(19): siRNA sense strand
uacaaggaacagugggaaa

SEQ ID NO: 2400220 - RNA, 19 nt, Homo sapiens
  misc_RNA (1)...(19): siRNA sense strand
uugcauugaacaagugaaa

SEQ ID NO: 2400221 - RNA, 19 nt, Homo sapiens
  misc_RNA (1)...(19): siRNA sense strand
cgauauagcuaccauugaa

SEQ ID NO: 2400222 - RNA, 19 nt, Homo sapiens
  misc_RNA (1)...(19): siRNA sense strand
auacagaugaggaguguuu

SEQ ID NO: 2400223 - RNA, 19 nt, Homo sapiens
  misc_RNA (1)...(19): siRNA sense strand
agagagagcagaggaguua

SEQ ID NO: 2400224 - RNA, 19 nt, Homo sapiens
  misc_RNA (1)...(19): siRNA sense strand
cagagagagcagaggaguu

SEQ ID NO: 2400225 - RNA, 19 nt, Homo sapiens
  misc_RNA (1)...(19): siRNA sense strand
gaguagagaugggauuaaa

SEQ ID NO: 2400226 - RNA, 19 nt, Homo sapiens
  misc_RNA (1)...(19): siRNA sense strand
aaauaaagaugaucaggga

SEQ ID NO: 2400227 - RNA, 19 nt, Homo sapiens
  misc_RNA (1)...(19): siRNA sense strand
cugacaagccuuugauaca

SEQ ID NO: 2400228 - RNA, 19 nt, Homo sapiens
  misc_RNA (1)...(19): siRNA sense strand
cuguaggaaaccagacuaa

SEQ ID NO: 2400229 - RNA, 19 nt, Homo sapiens
  misc_RNA (1)...(19): siRNA sense strand
aaagauugguggaacgaga

SEQ ID NO: 2400230 - RNA, 19 nt, Homo sapiens
  misc_RNA (1)...(19): siRNA sense strand
caacucaagcaaaggaaaa

SEQ ID NO: 2400231 - RNA, 19 nt, Homo sapiens
  misc_RNA (1)...(19): siRNA sense strand
agaaaaugacuaugagaga

SEQ ID NO: 2400232 - RNA, 19 nt, Homo sapiens
  misc_RNA (1)...(19): siRNA sense strand
ggaccaacguacaaggaac

SEQ ID NO: 2400233 - RNA, 19 nt, Homo sapiens
  misc_RNA (1)...(19): siRNA sense strand
acuugaaacuuuuggagua

SEQ ID NO: 2400234 - RNA, 19 nt, Homo sapiens
  misc_RNA (1)...(19): siRNA sense strand
uggaaaaguuacuaggaca

SEQ ID NO: 2400235 - RNA, 19 nt, Homo sapiens
  misc_RNA (1)...(19): siRNA sense strand
cugcauuucagaagccaaa

SEQ ID NO: 2400236 - RNA, 19 nt, Homo sapiens
  misc_RNA (1)...(19): siRNA sense strand
auguggacuuguugguuaa

SEQ ID NO: 2400237 - RNA, 19 nt, Homo sapiens
  misc_RNA (1)...(19): siRNA sense strand
ucaaaggacgauauagcua

SEQ ID NO: 2400238 - RNA, 19 nt, Homo sapiens
  misc_RNA (1)...(19): siRNA sense strand
acagaugaggaguguuuaa

SEQ ID NO: 2400239 - RNA, 19 nt, Homo sapiens
  misc_RNA (1)...(19): siRNA sense strand
guaaagauccaaaugcaga

SEQ ID NO: 2400240 - RNA, 19 nt, Homo sapiens
  misc_RNA (1)...(19): siRNA sense strand
ucagaguagagaugggauu

SEQ ID NO: 2400241 - RNA, 19 nt, Homo sapiens
  misc_RNA (1)...(19): siRNA sense strand
gaagcuaugcauuaugaua

SEQ ID NO: 2400242 - RNA, 19 nt, Homo sapiens
  misc_RNA (1)...(19): siRNA sense strand
gaugaggaguguuuaauca

SEQ ID NO: 2400243 - RNA, 19 nt, Homo sapiens
  misc_RNA (1)...(19): siRNA sense strand
gcaacucaagcaaaggaaa

SEQ ID NO: 2400244 - RNA, 19 nt, Homo sapiens
  misc_RNA (1)...(19): siRNA sense strand
uggacaaaccugaagaguu

SEQ ID NO: 2400245 - RNA, 19 nt, Homo sapiens
  misc_RNA (1)...(19): siRNA sense strand
ucaccagcuuaaugggauu

SEQ ID NO: 2400246 - RNA, 19 nt, Homo sapiens
  misc_RNA (1)...(19): siRNA sense strand
cagaguagagaugggauua

SEQ ID NO: 2400247 - RNA, 19 nt, Homo sapiens
  misc_RNA (1)...(19): siRNA sense strand
ccucaaugccuauaaaguu

SEQ ID NO: 2400248 - RNA, 19 nt, Homo sapiens
  misc_RNA (1)...(19): siRNA sense strand
caagauggucauaagugaa

SEQ ID NO: 2400249 - RNA, 19 nt, Homo sapiens
  misc_RNA (1)...(19): siRNA sense strand
agaccuaauguucuagaaa

SEQ ID NO: 2400250 - RNA, 19 nt, Homo sapiens
  misc_RNA (1)...(19): siRNA sense strand
ccaggacugaauugggaua

SEQ ID NO: 2400251 - RNA, 19 nt, Homo sapiens
  misc_RNA (1)...(19): siRNA sense strand
gcugauggugaaagaccua

SEQ ID NO: 2400252 - RNA, 19 nt, Homo sapiens
  misc_RNA (1)...(19): siRNA sense strand
cguacaaggaacaguggga

SEQ ID NO: 2400253 - RNA, 19 nt, Homo sapiens
  misc_RNA (1)...(19): siRNA sense strand
ugauggaacaauugcaaaa

SEQ ID NO: 2400254 - RNA, 19 nt, Homo sapiens
  misc_RNA (1)...(19): siRNA sense strand
uagacaacucaaaggaaaa

SEQ ID NO: 2400255 - RNA, 19 nt, Homo sapiens
  misc_RNA (1)...(19): siRNA sense strand
uguugaagauacaucggaa

SEQ ID NO: 2400256 - RNA, 19 nt, Homo sapiens
  misc_RNA (1)...(19): siRNA sense strand
uuguaguccugaagaguca

SEQ ID NO: 2400257 - RNA, 19 nt, Homo sapiens
  misc_RNA (1)...(19): siRNA sense strand
ccucagaagaauuaaaaga

SEQ ID NO: 2400258 - RNA, 19 nt, Homo sapiens
  misc_RNA (1)...(19): siRNA sense strand
acgaagaaguuacugaguu

SEQ ID NO: 2400259 - RNA, 19 nt, Homo sapiens
  misc_RNA (1)...(19): siRNA sense strand
auuacaugcugauggugaa

SEQ ID NO: 2400260 - RNA, 19 nt, Homo sapiens
  misc_RNA (1)...(19): siRNA sense strand
cggaauaccuagcuccuca

SEQ ID NO: 2400261 - RNA, 19 nt, Homo sapiens
  misc_RNA (1)...(19): siRNA sense strand
uaguaaagauccaaaugca

SEQ ID NO: 2400262 - RNA, 19 nt, Homo sapiens
  misc_RNA (1)...(19): siRNA sense strand
cuaacuagucagucauuau

SEQ ID NO: 2400263 - RNA, 19 nt, Homo sapiens
  misc_RNA (1)...(19): siRNA sense strand
cugaagaguuuauaucuga

SEQ ID NO: 2400264 - RNA, 19 nt, Homo sapiens
  misc_RNA (1)...(19): siRNA sense strand
gaaaaugagccggcaguua

SEQ ID NO: 2400265 - RNA, 19 nt, Homo sapiens
  misc_RNA (1)...(19): siRNA sense strand
aagaaaugugcgcaggauu

SEQ ID NO: 2400266 - RNA, 19 nt, Homo sapiens
  misc_RNA (1)...(19): siRNA sense strand
gauauagcuaccauugaaa

SEQ ID NO: 2400267 - RNA, 19 nt, Homo sapiens
  misc_RNA (1)...(19): siRNA sense strand
gaacaauugcaaaaggaga

SEQ ID NO: 2400268 - RNA, 19 nt, Homo sapiens
  misc_RNA (1)...(19): siRNA sense strand
uauguggacuuguugguua

SEQ ID NO: 2400269 - RNA, 19 nt, Homo sapiens
  misc_RNA (1)...(19): siRNA sense strand
gcaaagauuccugcaaauu

SEQ ID NO: 2400270 - RNA, 19 nt, Homo sapiens
  misc_RNA (1)...(19): siRNA sense strand
guucagcaacucaagcaaa

SEQ ID NO: 2400271 - RNA, 19 nt, Homo sapiens
  misc_RNA (1)...(19): siRNA sense strand
uuuaagagcuugcauugaa

SEQ ID NO: 2400272 - RNA, 19 nt, Homo sapiens
  misc_RNA (1)...(19): siRNA sense strand
acaaggaacagugggaaau

SEQ ID NO: 2400273 - RNA, 19 nt, Homo sapiens
  misc_RNA (1)...(19): siRNA sense strand
ggacugaauugggauauuu

SEQ ID NO: 2400274 - RNA, 19 nt, Homo sapiens
  misc_RNA (1)...(19): siRNA sense strand
cuugaaacuuuuggaguaa

SEQ ID NO: 2400275 - RNA, 19 nt, Homo sapiens
  misc_RNA (1)...(19): siRNA sense strand
ucugcuaauucuagaaguu

SEQ ID NO: 2400276 - RNA, 19 nt, Homo sapiens
  misc_RNA (1)...(19): siRNA sense strand
ggugaaagaccuaauguuc

SEQ ID NO: 2400277 - RNA, 19 nt, Homo sapiens
  misc_RNA (1)...(19): siRNA sense strand
ggagcagaggugagggaga

SEQ ID NO: 2400278 - RNA, 19 nt, Homo sapiens
  misc_RNA (1)...(19): siRNA sense strand
ggggcuggcgggagaauaa

SEQ ID NO: 2400279 - RNA, 19 nt, Homo sapiens
  misc_RNA (1)...(19): siRNA sense strand
caguauucuuggaugcaga

SEQ ID NO: 2400280 - RNA, 19 nt, Homo sapiens
  misc_RNA (1)...(19): siRNA sense strand
cuggagaagcagauggaaa

SEQ ID NO: 2400281 - RNA, 19 nt, Homo sapiens
  misc_RNA (1)...(19): siRNA sense strand
ggacagagauggagcgggu

SEQ ID NO: 2400282 - RNA, 19 nt, Homo sapiens
  misc_RNA (1)...(19): siRNA sense strand
ccaugaaggcuguggcaga

SEQ ID NO: 2400283 - RNA, 19 nt, Homo sapiens
  misc_RNA (1)...(19): siRNA sense strand
gggcaaauggugaggccga

SEQ ID NO: 2400284 - RNA, 19 nt, Homo sapiens
  misc_RNA (1)...(19): siRNA sense strand
uggagaagcagauggaaaa

SEQ ID NO: 2400285 - RNA, 19 nt, Homo sapiens
  misc_RNA (1)...(19): siRNA sense strand
ucgaggagcugaaggcgaa

SEQ ID NO: 2400286 - RNA, 19 nt, Homo sapiens
  misc_RNA (1)...(19): siRNA sense strand
ucggagaagcugcgggaga

SEQ ID NO: 2400287 - RNA, 19 nt, Homo sapiens
  misc_RNA (1)...(19): siRNA sense strand
agaaggaccuggagagcgu

SEQ ID NO: 2400288 - RNA, 19 nt, Homo sapiens
  misc_RNA (1)...(19): siRNA sense strand
ugagcagugcagagggauu

SEQ ID NO: 2400289 - RNA, 19 nt, Homo sapiens
  misc_RNA (1)...(19): siRNA sense strand
caagagggccugagacgga

SEQ ID NO: 2400290 - RNA, 19 nt, Homo sapiens
  misc_RNA (1)...(19): siRNA sense strand
gugaggagaaggagcggga

SEQ ID NO: 2400291 - RNA, 19 nt, Homo sapiens
  misc_RNA (1)...(19): siRNA sense strand
cagcaggacugugaggaga

SEQ ID NO: 2400292 - RNA, 19 nt, Homo sapiens
  misc_RNA (1)...(19): siRNA sense strand
gccugcaccaugagguaaa

SEQ ID NO: 2400293 - RNA, 19 nt, Homo sapiens
  misc_RNA (1)...(19): siRNA sense strand
gcagagggauuucgugcga

SEQ ID NO: 2400294 - RNA, 19 nt, Homo sapiens
  misc_RNA (1)...(19): siRNA sense strand
aggagaucgaggagcugaa

SEQ ID NO: 2400295 - RNA, 19 nt, Homo sapiens
  misc_RNA (1)...(19): siRNA sense strand
gggaggagacagaggugcu

SEQ ID NO: 2400296 - RNA, 19 nt, Homo sapiens
  misc_RNA (1)...(19): siRNA sense strand
ggugaaaaugccacaguaa

SEQ ID NO: 2400297 - RNA, 19 nt, Homo sapiens
  misc_RNA (1)...(19): siRNA sense strand
aggaguuggugcugggcau

SEQ ID NO: 2400298 - RNA, 19 nt, Homo sapiens
  misc_RNA (1)...(19): siRNA sense strand
gcugaagauuccagaggag

SEQ ID NO: 2400299 - RNA, 19 nt, Homo sapiens
  misc_RNA (1)...(19): siRNA sense strand
acauauagacucagagaau

SEQ ID NO: 2400300 - RNA, 19 nt, Homo sapiens
  misc_RNA (1)...(19): siRNA sense strand
ccugagacccuuugggaaa

SEQ ID NO: 2400301 - RNA, 19 nt, Homo sapiens
  misc_RNA (1)...(19): siRNA sense strand
aggccaaggaugagaagaa

SEQ ID NO: 2400302 - RNA, 19 nt, Homo sapiens
  misc_RNA (1)...(19): siRNA sense strand
ugacauaccuggugagcca

SEQ ID NO: 2400303 - RNA, 19 nt, Homo sapiens
  misc_RNA (1)...(19): siRNA sense strand
cagcaaagugaaagcauau

SEQ ID NO: 2400304 - RNA, 19 nt, Homo sapiens
  misc_RNA (1)...(19): siRNA sense strand
aagcauaugccauggaaau

SEQ ID NO: 2400305 - RNA, 19 nt, Homo sapiens
  misc_RNA (1)...(19): siRNA sense strand
gugugaaggcuguggccaa

SEQ ID NO: 2400306 - RNA, 19 nt, Homo sapiens
  misc_RNA (1)...(19): siRNA sense strand
gaacauaaccugagacccu

SEQ ID NO: 2400307 - RNA, 19 nt, Homo sapiens
  misc_RNA (1)...(19): siRNA sense strand
ugacagaacuccuggccuu

SEQ ID NO: 2400308 - RNA, 19 nt, Homo sapiens
  misc_RNA (1)...(19): siRNA sense strand
agauaaaugcagggagcaa

SEQ ID NO: 2400309 - RNA, 19 nt, Homo sapiens
  misc_RNA (1)...(19): siRNA sense strand
agagcauacuccaagguaa

SEQ ID NO: 2400310 - RNA, 19 nt, Homo sapiens
  misc_RNA (1)...(19): siRNA sense strand
gcucauaguaacugaaaau

SEQ ID NO: 2400311 - RNA, 19 nt, Homo sapiens
  misc_RNA (1)...(19): siRNA sense strand
auaaaugcagggagcaaua

SEQ ID NO: 2400312 - RNA, 19 nt, Homo sapiens
  misc_RNA (1)...(19): siRNA sense strand
agacagacacugagagauc

SEQ ID NO: 2400313 - RNA, 19 nt, Homo sapiens
  misc_RNA (1)...(19): siRNA sense strand
agaaagggaaaguagagaa

SEQ ID NO: 2400314 - RNA, 19 nt, Homo sapiens
  misc_RNA (1)...(19): siRNA sense strand
cugagaaacuggaagaaac

SEQ ID NO: 2400315 - RNA, 19 nt, Homo sapiens
  misc_RNA (1)...(19): siRNA sense strand
aggcagaucuccuggcuga

SEQ ID NO: 2400316 - RNA, 19 nt, Homo sapiens
  misc_RNA (1)...(19): siRNA sense strand
ucuuuaaggccaaggauga

SEQ ID NO: 2400317 - RNA, 19 nt, Homo sapiens
  misc_RNA (1)...(19): siRNA sense strand
gcuggaaguggcaggagaa

SEQ ID NO: 2400318 - RNA, 19 nt, Homo sapiens
  misc_RNA (1)...(19): siRNA sense strand
ccugagaaacuggaagaaa

SEQ ID NO: 2400319 - RNA, 19 nt, Homo sapiens
  misc_RNA (1)...(19): siRNA sense strand
ggcaaugcuucaugugcaa

SEQ ID NO: 2400320 - RNA, 19 nt, Homo sapiens
  misc_RNA (1)...(19): siRNA sense strand
uuauggagcuguugggcau

SEQ ID NO: 2400321 - RNA, 19 nt, Homo sapiens
  misc_RNA (1)...(19): siRNA sense strand
ugaaaacaggggagacaua

SEQ ID NO: 2400322 - RNA, 19 nt, Homo sapiens
  misc_RNA (1)...(19): siRNA sense strand
aaggaaagucuaaagauga

SEQ ID NO: 2400323 - RNA, 19 nt, Homo sapiens
  misc_RNA (1)...(19): siRNA sense strand
cuuagaugacucugagauu

SEQ ID NO: 2400324 - RNA, 19 nt, Homo sapiens
  misc_RNA (1)...(19): siRNA sense strand
ggaaauuggaaagaagauu

SEQ ID NO: 2400325 - RNA, 19 nt, Homo sapiens
  misc_RNA (1)...(19): siRNA sense strand
uggaacagccagaacagua

SEQ ID NO: 2400326 - RNA, 19 nt, Homo sapiens
  misc_RNA (1)...(19): siRNA sense strand
uuacagaagcuuuggagca

SEQ ID NO: 2400327 - RNA, 19 nt, Homo sapiens
  misc_RNA (1)...(19): siRNA sense strand
cuuccaaugcugaaagaga

SEQ ID NO: 2400328 - RNA, 19 nt, Homo sapiens
  misc_RNA (1)...(19): siRNA sense strand
aagagauuggugagagauu

SEQ ID NO: 2400329 - RNA, 19 nt, Homo sapiens
  misc_RNA (1)...(19): siRNA sense strand
caagccaaagaaagggaaa

SEQ ID NO: 2400330 - RNA, 19 nt, Homo sapiens
  misc_RNA (1)...(19): siRNA sense strand
gagcauacuccaagguaac

SEQ ID NO: 2400331 - RNA, 19 nt, Homo sapiens
  misc_RNA (1)...(19): siRNA sense strand
aagaaaacucccaggaaga

SEQ ID NO: 2400332 - RNA, 19 nt, Homo sapiens
  misc_RNA (1)...(19): siRNA sense strand
cauugaagacacugugaga

SEQ ID NO: 2400333 - RNA, 19 nt, Homo sapiens
  misc_RNA (1)...(19): siRNA sense strand
cccaauagaacucagcaaa

SEQ ID NO: 2400334 - RNA, 19 nt, Homo sapiens
  misc_RNA (1)...(19): siRNA sense strand
cgaaaucuucacagacaau

SEQ ID NO: 2400335 - RNA, 19 nt, Homo sapiens
  misc_RNA (1)...(19): siRNA sense strand
uggaagaaaccaagcucau

SEQ ID NO: 2400336 - RNA, 19 nt, Homo sapiens
  misc_RNA (1)...(19): siRNA sense strand
caagauaaaugcagggagc

SEQ ID NO: 2400337 - RNA, 19 nt, Homo sapiens
  misc_RNA (1)...(19): siRNA sense strand
cguuuaagacagacacuga

SEQ ID NO: 2400338 - RNA, 19 nt, Homo sapiens
  misc_RNA (1)...(19): siRNA sense strand
ugugagaaguuguguagca

SEQ ID NO: 2400339 - RNA, 19 nt, Homo sapiens
  misc_RNA (1)...(19): siRNA sense strand
ucagcaaaguacagagugu

SEQ ID NO: 2400340 - RNA, 19 nt, Homo sapiens
  misc_RNA (1)...(19): siRNA sense strand
gugagaaguuguguagcaa

SEQ ID NO: 2400341 - RNA, 19 nt, Homo sapiens
  misc_RNA (1)...(19): siRNA sense strand
cagugaaacagcaggagca

SEQ ID NO: 2400342 - RNA, 19 nt, Homo sapiens
  misc_RNA (1)...(19): siRNA sense strand
acaccauguuguugagagu

SEQ ID NO: 2400343 - RNA, 19 nt, Homo sapiens
  misc_RNA (1)...(19): siRNA sense strand
gcagagacaucuuccgcau

SEQ ID NO: 2400344 - RNA, 19 nt, Homo sapiens
  misc_RNA (1)...(19): siRNA sense strand
aggaaaacuuaaagagaag

SEQ ID NO: 2400345 - RNA, 19 nt, Homo sapiens
  misc_RNA (1)...(19): siRNA sense strand
ccuaugucuuuaaggccaa

SEQ ID NO: 2400346 - RNA, 19 nt, Homo sapiens
  misc_RNA (1)...(19): siRNA sense strand
acaacagccaucagagaga

SEQ ID NO: 2400347 - RNA, 19 nt, Homo sapiens
  misc_RNA (1)...(19): siRNA sense strand
agaaacuggaagaaaccaa

SEQ ID NO: 2400348 - RNA, 19 nt, Homo sapiens
  misc_RNA (1)...(19): siRNA sense strand
cuuaaagagaagcaaguca

SEQ ID NO: 2400349 - RNA, 19 nt, Homo sapiens
  misc_RNA (1)...(19): siRNA sense strand
aaaccucagcaaagugaaa

SEQ ID NO: 2400350 - RNA, 19 nt, Homo sapiens
  misc_RNA (1)...(19): siRNA sense strand
gcccaauagaacucagcaa

SEQ ID NO: 2400351 - RNA, 19 nt, Homo sapiens
  misc_RNA (1)...(19): siRNA sense strand
agggaaaguagagaaguaa

SEQ ID NO: 2400352 - RNA, 19 nt, Homo sapiens
  misc_RNA (1)...(19): siRNA sense strand
acucagagaauuugucaga

SEQ ID NO: 2400353 - RNA, 19 nt, Homo sapiens
  misc_RNA (1)...(19): siRNA sense strand
cauggaaauuggaaagaag

SEQ ID NO: 2400354 - RNA, 19 nt, Homo sapiens
  misc_RNA (1)...(19): siRNA sense strand
ucgaaaucuucacagacaa

SEQ ID NO: 2400355 - RNA, 19 nt, Homo sapiens
  misc_RNA (1)...(19): siRNA sense strand
ggcuggaaguggcaggaga

SEQ ID NO: 2400356 - RNA, 19 nt, Homo sapiens
  misc_RNA (1)...(19): siRNA sense strand
cagaugacggcgaagauga

SEQ ID NO: 2400357 - RNA, 19 nt, Homo sapiens
  misc_RNA (1)...(19): siRNA sense strand
uggaaauuggaaagaagau

SEQ ID NO: 2400358 - RNA, 19 nt, Homo sapiens
  misc_RNA (1)...(19): siRNA sense strand
ugggaaagacgaagacacu

SEQ ID NO: 2400359 - RNA, 19 nt, Homo sapiens
  misc_RNA (1)...(19): siRNA sense strand
acuccugcuuggaacauaa

SEQ ID NO: 2400360 - RNA, 19 nt, Homo sapiens
  misc_RNA (1)...(19): siRNA sense strand
agacacuccucaugcaaaa

SEQ ID NO: 2400361 - RNA, 19 nt, Homo sapiens
  misc_RNA (1)...(19): siRNA sense strand
agacaguaucggaggagaa

SEQ ID NO: 2400362 - RNA, 19 nt, Homo sapiens
  misc_RNA (1)...(19): siRNA sense strand
ucaauguggccuugggcaa

SEQ ID NO: 2400363 - RNA, 19 nt, Homo sapiens
  misc_RNA (1)...(19): siRNA sense strand
acgcagaccucaagggccu

SEQ ID NO: 2400364 - RNA, 19 nt, Homo sapiens
  misc_RNA (1)...(19): siRNA sense strand
ugguggacgaugagggcuu

SEQ ID NO: 2400365 - RNA, 19 nt, Homo sapiens
  misc_RNA (1)...(19): siRNA sense strand
aguuaaaucagcagagaaa

SEQ ID NO: 2400366 - RNA, 19 nt, Homo sapiens
  misc_RNA (1)...(19): siRNA sense strand
ccgaaagccaucugcgaaa

SEQ ID NO: 2400367 - RNA, 19 nt, Homo sapiens
  misc_RNA (1)...(19): siRNA sense strand
ggucaaaagugcaagccua

SEQ ID NO: 2400368 - RNA, 19 nt, Homo sapiens
  misc_RNA (1)...(19): siRNA sense strand
ugaugaacuuaaagagaga

SEQ ID NO: 2400369 - RNA, 19 nt, Homo sapiens
  misc_RNA (1)...(19): siRNA sense strand
agaaagugauacaaggaga

SEQ ID NO: 2400370 - RNA, 19 nt, Homo sapiens
  misc_RNA (1)...(19): siRNA sense strand
ggaagaaagcucaggccca

SEQ ID NO: 2400371 - RNA, 19 nt, Homo sapiens
  misc_RNA (1)...(19): siRNA sense strand
aucaagaaguaaagccaua

SEQ ID NO: 2400372 - RNA, 19 nt, Homo sapiens
  misc_RNA (1)...(19): siRNA sense strand
ggaagauaucucaugacaa

SEQ ID NO: 2400373 - RNA, 19 nt, Homo sapiens
  misc_RNA (1)...(19): siRNA sense strand
gaaagauaaagcuggucaa

SEQ ID NO: 2400374 - RNA, 19 nt, Homo sapiens
  misc_RNA (1)...(19): siRNA sense strand
cauugaagaaagugauaca

SEQ ID NO: 2400375 - RNA, 19 nt, Homo sapiens
  misc_RNA (1)...(19): siRNA sense strand
cugaaaaggaagaaugcua

SEQ ID NO: 2400376 - RNA, 19 nt, Homo sapiens
  misc_RNA (1)...(19): siRNA sense strand
aggaagaaugcuaagauga

SEQ ID NO: 2400377 - RNA, 19 nt, Homo sapiens
  misc_RNA (1)...(19): siRNA sense strand
cucaagaaccaaacguaaa

SEQ ID NO: 2400378 - RNA, 19 nt, Homo sapiens
  misc_RNA (1)...(19): siRNA sense strand
gacaaaaggaagaaaucaa

SEQ ID NO: 2400379 - RNA, 19 nt, Homo sapiens
  misc_RNA (1)...(19): siRNA sense strand
gcaucaacaaagaauagaa

SEQ ID NO: 2400380 - RNA, 19 nt, Homo sapiens
  misc_RNA (1)...(19): siRNA sense strand
aaaugaagcaagugaaauc

SEQ ID NO: 2400381 - RNA, 19 nt, Homo sapiens
  misc_RNA (1)...(19): siRNA sense strand
gugaaaucgaaucuguaaa

SEQ ID NO: 2400382 - RNA, 19 nt, Homo sapiens
  misc_RNA (1)...(19): siRNA sense strand
cucugaaagcauugaagaa

SEQ ID NO: 2400383 - RNA, 19 nt, Homo sapiens
  misc_RNA (1)...(19): siRNA sense strand
gagaacuuggcaauagaaa

SEQ ID NO: 2400384 - RNA, 19 nt, Homo sapiens
  misc_RNA (1)...(19): siRNA sense strand
uggaaaugaagcaagugaa

SEQ ID NO: 2400385 - RNA, 19 nt, Homo sapiens
  misc_RNA (1)...(19): siRNA sense strand
agcuauauaugcugaugaa

SEQ ID NO: 2400386 - RNA, 19 nt, Homo sapiens
  misc_RNA (1)...(19): siRNA sense strand
agagaaaccagcugagucu

SEQ ID NO: 2400387 - RNA, 19 nt, Homo sapiens
  misc_RNA (1)...(19): siRNA sense strand
aaccaaacguaaaggaaac

SEQ ID NO: 2400388 - RNA, 19 nt, Homo sapiens
  misc_RNA (1)...(19): siRNA sense strand
cugaaagcauugaagaaag

SEQ ID NO: 2400389 - RNA, 19 nt, Homo sapiens
  misc_RNA (1)...(19): siRNA sense strand
gaagaaagcucaggcccau

SEQ ID NO: 2400390 - RNA, 19 nt, Homo sapiens
  misc_RNA (1)...(19): siRNA sense strand
ggaaugaaaaccagugaca

SEQ ID NO: 2400391 - RNA, 19 nt, Homo sapiens
  misc_RNA (1)...(19): siRNA sense strand
ugaagaaacuuaugagacc

SEQ ID NO: 2400392 - RNA, 19 nt, Homo sapiens
  misc_RNA (1)...(19): siRNA sense strand
gugaugacucugaaagcau

SEQ ID NO: 2400393 - RNA, 19 nt, Homo sapiens
  misc_RNA (1)...(19): siRNA sense strand
agaaccaaacguaaaggaa

SEQ ID NO: 2400394 - RNA, 19 nt, Homo sapiens
  misc_RNA (1)...(19): siRNA sense strand
gugaaaaugagaaagauga

SEQ ID NO: 2400395 - RNA, 19 nt, Homo sapiens
  misc_RNA (1)...(19): siRNA sense strand
aagaaaaggcagcguauga

SEQ ID NO: 2400396 - RNA, 19 nt, Homo sapiens
  misc_RNA (1)...(19): siRNA sense strand
cuucugacauugugcacau

SEQ ID NO: 2400397 - RNA, 19 nt, Homo sapiens
  misc_RNA (1)...(19): siRNA sense strand
agugaaaucgaaucuguaa

SEQ ID NO: 2400398 - RNA, 19 nt, Homo sapiens
  misc_RNA (1)...(19): siRNA sense strand
aaguuaaaucagcagagaa

SEQ ID NO: 2400399 - RNA, 19 nt, Homo sapiens
  misc_RNA (1)...(19): siRNA sense strand
guguccagaaggaaugaaa

SEQ ID NO: 2400400 - RNA, 19 nt, Homo sapiens
  misc_RNA (1)...(19): siRNA sense strand
gagaaaaguuaaaucagca

SEQ ID NO: 2400401 - RNA, 19 nt, Homo sapiens
  misc_RNA (1)...(19): siRNA sense strand
cuggaaaugaagcaaguga

SEQ ID NO: 2400402 - RNA, 19 nt, Homo sapiens
  misc_RNA (1)...(19): siRNA sense strand
ugaaaaggaagaaugcuaa

SEQ ID NO: 2400403 - RNA, 19 nt, Homo sapiens
  misc_RNA (1)...(19): siRNA sense strand
gaaaagaaaaggcagcgua

SEQ ID NO: 2400404 - RNA, 19 nt, Homo sapiens
  misc_RNA (1)...(19): siRNA sense strand
ccucauuacagguggaaau

SEQ ID NO: 2400405 - RNA, 19 nt, Homo sapiens
  misc_RNA (1)...(19): siRNA sense strand
uuguagaaguagagaggga

SEQ ID NO: 2400406 - RNA, 19 nt, Homo sapiens
  misc_RNA (1)...(19): siRNA sense strand
augaaauaccugucacaaa

SEQ ID NO: 2400407 - RNA, 19 nt, Homo sapiens
  misc_RNA (1)...(19): siRNA sense strand
ggaugaaauaccugucaca

SEQ ID NO: 2400408 - RNA, 19 nt, Homo sapiens
  misc_RNA (1)...(19): siRNA sense strand
gaagcacagaagagagaca

SEQ ID NO: 2400409 - RNA, 19 nt, Homo sapiens
  misc_RNA (1)...(19): siRNA sense strand
gguugguauuaacggguuu

SEQ ID NO: 2400410 - RNA, 19 nt, Homo sapiens
  misc_RNA (1)...(19): siRNA sense strand
gcagaaaaugaacuggaaa

SEQ ID NO: 2400411 - RNA, 19 nt, Homo sapiens
  misc_RNA (1)...(19): siRNA sense strand
gaaauugacuggauaccca

SEQ ID NO: 2400412 - RNA, 19 nt, Homo sapiens
  misc_RNA (1)...(19): siRNA sense strand
ccgccaacucgccgcuaaa

SEQ ID NO: 2400413 - RNA, 19 nt, Homo sapiens
  misc_RNA (1)...(19): siRNA sense strand
ggucaggacucuacagcag

SEQ ID NO: 2400414 - RNA, 19 nt, Homo sapiens
  misc_RNA (1)...(19): siRNA sense strand
gcucuuuaguugagugccu

SEQ ID NO: 2400415 - RNA, 19 nt, Homo sapiens
  misc_RNA (1)...(19): siRNA sense strand
gggaaaccacagucaggau

SEQ ID NO: 2400416 - RNA, 19 nt, Homo sapiens
  misc_RNA (1)...(19): siRNA sense strand
cugaagaagcacagaagag

SEQ ID NO: 2400417 - RNA, 19 nt, Homo sapiens
  misc_RNA (1)...(19): siRNA sense strand
aauaaaaggaagaggaaga

SEQ ID NO: 2400418 - RNA, 19 nt, Homo sapiens
  misc_RNA (1)...(19): siRNA sense strand
agaagaaacucaagcugga

SEQ ID NO: 2400419 - RNA, 19 nt, Homo sapiens
  misc_RNA (1)...(19): siRNA sense strand
cgaaauaaaaggaagagga

SEQ ID NO: 2400420 - RNA, 19 nt, Homo sapiens
  misc_RNA (1)...(19): siRNA sense strand
cagaagagcaucucgcaga

SEQ ID NO: 2400421 - RNA, 19 nt, Homo sapiens
  misc_RNA (1)...(19): siRNA sense strand
cgacaagagcguaaggcac

SEQ ID NO: 2400422 - RNA, 19 nt, Homo sapiens
  misc_RNA (1)...(19): siRNA sense strand
aaaaggaagaggaagacaa

SEQ ID NO: 2400423 - RNA, 19 nt, Homo sapiens
  misc_RNA (1)...(19): siRNA sense strand
uguuccagcugcaggugaa

SEQ ID NO: 2400424 - RNA, 19 nt, Homo sapiens
  misc_RNA (1)...(19): siRNA sense strand
ggaaaugacagcaaagcca

SEQ ID NO: 2400425 - RNA, 19 nt, Homo sapiens
  misc_RNA (1)...(19): siRNA sense strand
cagaaaagcaagagacugu

SEQ ID NO: 2400426 - RNA, 19 nt, Homo sapiens
  misc_RNA (1)...(19): siRNA sense strand
gguguuuguguguggaaau

SEQ ID NO: 2400427 - RNA, 19 nt, Homo sapiens
  misc_RNA (1)...(19): siRNA sense strand
auucagaagcagccaagaa

SEQ ID NO: 2400428 - RNA, 19 nt, Homo sapiens
  misc_RNA (1)...(19): siRNA sense strand
cagccaaagaaauugaaaa

SEQ ID NO: 2400429 - RNA, 19 nt, Homo sapiens
  misc_RNA (1)...(19): siRNA sense strand
uuggaagaucacugggauu

SEQ ID NO: 2400430 - RNA, 19 nt, Homo sapiens
  misc_RNA (1)...(19): siRNA sense strand
gaaaugacagcaaagccaa

SEQ ID NO: 2400431 - RNA, 19 nt, Homo sapiens
  misc_RNA (1)...(19): siRNA sense strand
guacaaaccucauaaggca

SEQ ID NO: 2400432 - RNA, 19 nt, Homo sapiens
  misc_RNA (1)...(19): siRNA sense strand
agagaaauguaaucagaga

SEQ ID NO: 2400433 - RNA, 19 nt, Homo sapiens
  misc_RNA (1)...(19): siRNA sense strand
gaagagaaauguaaucaga

SEQ ID NO: 2400434 - RNA, 19 nt, Homo sapiens
  misc_RNA (1)...(19): siRNA sense strand
gagaaauguaaucagagaa

SEQ ID NO: 2400435 - RNA, 19 nt, Homo sapiens
  misc_RNA (1)...(19): siRNA sense strand
augugauaugugugagaaa

SEQ ID NO: 2400436 - RNA, 19 nt, Homo sapiens
  misc_RNA (1)...(19): siRNA sense strand
gaauucacauggaagagaa

SEQ ID NO: 2400437 - RNA, 19 nt, Homo sapiens
  misc_RNA (1)...(19): siRNA sense strand
auguagugagugugacaaa

SEQ ID NO: 2400438 - RNA, 19 nt, Homo sapiens
  misc_RNA (1)...(19): siRNA sense strand
gucuguaaugugagugaaa

SEQ ID NO: 2400439 - RNA, 19 nt, Homo sapiens
  misc_RNA (1)...(19): siRNA sense strand
cuggaauguaugagaaguu

SEQ ID NO: 2400440 - RNA, 19 nt, Homo sapiens
  misc_RNA (1)...(19): siRNA sense strand
cuaauuaggcaccaggcaa

SEQ ID NO: 2400441 - RNA, 19 nt, Homo sapiens
  misc_RNA (1)...(19): siRNA sense strand
agagaauucacauggaaga

SEQ ID NO: 2400442 - RNA, 19 nt, Homo sapiens
  misc_RNA (1)...(19): siRNA sense strand
ucuuauuaugugugagaga

SEQ ID NO: 2400443 - RNA, 19 nt, Homo sapiens
  misc_RNA (1)...(19): siRNA sense strand
gagaagagcuuuuggcauc

SEQ ID NO: 2400444 - RNA, 19 nt, Homo sapiens
  misc_RNA (1)...(19): siRNA sense strand
ggggaaaggcccuacaaau

SEQ ID NO: 2400445 - RNA, 19 nt, Homo sapiens
  misc_RNA (1)...(19): siRNA sense strand
cucauaaggcaucgaagaa

SEQ ID NO: 2400446 - RNA, 19 nt, Homo sapiens
  misc_RNA (1)...(19): siRNA sense strand
cuauguagugagugugaca

SEQ ID NO: 2400447 - RNA, 19 nt, Homo sapiens
  misc_RNA (1)...(19): siRNA sense strand
agacaguacacauugguga

SEQ ID NO: 2400448 - RNA, 19 nt, Homo sapiens
  misc_RNA (1)...(19): siRNA sense strand
uguccaaagcucagaucuu

SEQ ID NO: 2400449 - RNA, 19 nt, Homo sapiens
  misc_RNA (1)...(19): siRNA sense strand
ccaccagaguucagcccuu

SEQ ID NO: 2400450 - RNA, 19 nt, Homo sapiens
  misc_RNA (1)...(19): siRNA sense strand
ugagaaaaccuuuguccaa

SEQ ID NO: 2400451 - RNA, 19 nt, Homo sapiens
  misc_RNA (1)...(19): siRNA sense strand
auaucuauguagugagugu

SEQ ID NO: 2400452 - RNA, 19 nt, Homo sapiens
  misc_RNA (1)...(19): siRNA sense strand
agaaauguaaucagagaac

SEQ ID NO: 2400453 - RNA, 19 nt, Homo sapiens
  misc_RNA (1)...(19): siRNA sense strand
cgucagaagccucacagau

SEQ ID NO: 2400454 - RNA, 19 nt, Homo sapiens
  misc_RNA (1)...(19): siRNA sense strand
ucagagaauucacauggaa

SEQ ID NO: 2400455 - RNA, 19 nt, Homo sapiens
  misc_RNA (1)...(19): siRNA sense strand
aauucacauggaagagaaa

SEQ ID NO: 2400456 - RNA, 19 nt, Homo sapiens
  misc_RNA (1)...(19): siRNA sense strand
aggagcuacacuauaaaua

SEQ ID NO: 2400457 - RNA, 19 nt, Homo sapiens
  misc_RNA (1)...(19): siRNA sense strand
aaucagaucuuauuagcca

SEQ ID NO: 2400458 - RNA, 19 nt, Homo sapiens
  misc_RNA (1)...(19): siRNA sense strand
gauaaaagcuuccaccaga

SEQ ID NO: 2400459 - RNA, 19 nt, Homo sapiens
  misc_RNA (1)...(19): siRNA sense strand
cuagaauagccaagaauua

SEQ ID NO: 2400460 - RNA, 19 nt, Homo sapiens
  misc_RNA (1)...(19): siRNA sense strand
cggagaaggacuugcauca

SEQ ID NO: 2400461 - RNA, 19 nt, Homo sapiens
  misc_RNA (1)...(19): siRNA sense strand
gaaucaacagugaaacaaa

SEQ ID NO: 2400462 - RNA, 19 nt, Homo sapiens
  misc_RNA (1)...(19): siRNA sense strand
cagaaucaacagugaaaca

SEQ ID NO: 2400463 - RNA, 19 nt, Homo sapiens
  misc_RNA (1)...(19): siRNA sense strand
gacagaaucaacagugaaa

SEQ ID NO: 2400464 - RNA, 19 nt, Homo sapiens
  misc_RNA (1)...(19): siRNA sense strand
gaauuauccacaagggaga

SEQ ID NO: 2400465 - RNA, 19 nt, Homo sapiens
  misc_RNA (1)...(19): siRNA sense strand
gcaaaguuucggagaagga

SEQ ID NO: 2400466 - RNA, 19 nt, Homo sapiens
  misc_RNA (1)...(19): siRNA sense strand
gcauugggacccuagaaua

SEQ ID NO: 2400467 - RNA, 19 nt, Homo sapiens
  misc_RNA (1)...(19): siRNA sense strand
ucacaucagaauugggcua

SEQ ID NO: 2400468 - RNA, 19 nt, Homo sapiens
  misc_RNA (1)...(19): siRNA sense strand
caaaagagugacagaauca

SEQ ID NO: 2400469 - RNA, 19 nt, Homo sapiens
  misc_RNA (1)...(19): siRNA sense strand
gagaaggacuugcaucauu

SEQ ID NO: 2400470 - RNA, 19 nt, Homo sapiens
  misc_RNA (1)...(19): siRNA sense strand
auccacaauuugaugguaa

SEQ ID NO: 2400471 - RNA, 19 nt, Homo sapiens
  misc_RNA (1)...(19): siRNA sense strand
caguaaggaaagagcaacu

SEQ ID NO: 2400472 - RNA, 19 nt, Homo sapiens
  misc_RNA (1)...(19): siRNA sense strand
gugacagaaucaacaguga

SEQ ID NO: 2400473 - RNA, 19 nt, Homo sapiens
  misc_RNA (1)...(19): siRNA sense strand
uagcaaucgagaugaucaa

SEQ ID NO: 2400474 - RNA, 19 nt, Homo sapiens
  misc_RNA (1)...(19): siRNA sense strand
cguccauggaacacgcaaa

SEQ ID NO: 2400475 - RNA, 19 nt, Homo sapiens
  misc_RNA (1)...(19): siRNA sense strand
uccacaauuugaugguaaa

SEQ ID NO: 2400476 - RNA, 19 nt, Homo sapiens
  misc_RNA (1)...(19): siRNA sense strand
ggaaccgaaucaaugggaa

SEQ ID NO: 2400477 - RNA, 19 nt, Homo sapiens
  misc_RNA (1)...(19): siRNA sense strand
ccaaagccucugaacuuaa

SEQ ID NO: 2400478 - RNA, 19 nt, Homo sapiens
  misc_RNA (1)...(19): siRNA sense strand
ccuagaauagccaagaauu

SEQ ID NO: 2400479 - RNA, 19 nt, Homo sapiens
  misc_RNA (1)...(19): siRNA sense strand
uauuacaguugguauggaa

SEQ ID NO: 2400480 - RNA, 19 nt, Homo sapiens
  misc_RNA (1)...(19): siRNA sense strand
ugacagaaucaacagugaa

SEQ ID NO: 2400481 - RNA, 19 nt, Homo sapiens
  misc_RNA (1)...(19): siRNA sense strand
ggaaucauccaguguuaga

SEQ ID NO: 2400482 - RNA, 19 nt, Homo sapiens
  misc_RNA (1)...(19): siRNA sense strand
uacaguaaggaaagagcaa

SEQ ID NO: 2400483 - RNA, 19 nt, Homo sapiens
  misc_RNA (1)...(19): siRNA sense strand
gaacuauucauuuggggaa

SEQ ID NO: 2400484 - RNA, 19 nt, Homo sapiens
  misc_RNA (1)...(19): siRNA sense strand
gaaccgaaucaaugggaag

SEQ ID NO: 2400485 - RNA, 19 nt, Homo sapiens
  misc_RNA (1)...(19): siRNA sense strand
augaaggaacucagauuga

SEQ ID NO: 2400486 - RNA, 19 nt, Homo sapiens
  misc_RNA (1)...(19): siRNA sense strand
agaaggacuugcaucauuu

SEQ ID NO: 2400487 - RNA, 19 nt, Homo sapiens
  misc_RNA (1)...(19): siRNA sense strand
uuccaaagccucugaacuu

SEQ ID NO: 2400488 - RNA, 19 nt, Homo sapiens
  misc_RNA (1)...(19): siRNA sense strand
uggcuuuacuuauggcuca

SEQ ID NO: 2400489 - RNA, 19 nt, Homo sapiens
  misc_RNA (1)...(19): siRNA sense strand
cggagaaggccguggcaaa

SEQ ID NO: 2400490 - RNA, 19 nt, Homo sapiens
  misc_RNA (1)...(19): siRNA sense strand
aagaguugauucuggauaa

SEQ ID NO: 2400491 - RNA, 19 nt, Homo sapiens
  misc_RNA (1)...(19): siRNA sense strand
ccaaggaaaugguuuguuu

SEQ ID NO: 2400492 - RNA, 19 nt, Homo sapiens
  misc_RNA (1)...(19): siRNA sense strand
gggagagcuuagaggagga

SEQ ID NO: 2400493 - RNA, 19 nt, Homo sapiens
  misc_RNA (1)...(19): siRNA sense strand
ccagcaagauccagaaagu

SEQ ID NO: 2400494 - RNA, 19 nt, Homo sapiens
  misc_RNA (1)...(19): siRNA sense strand
ggaacuuuggugugaggaa

SEQ ID NO: 2400495 - RNA, 19 nt, Homo sapiens
  misc_RNA (1)...(19): siRNA sense strand
cacaggaagucgugcagua

SEQ ID NO: 2400496 - RNA, 19 nt, Homo sapiens
  misc_RNA (1)...(19): siRNA sense strand
uggauaaagucuauacuca

SEQ ID NO: 2400497 - RNA, 19 nt, Homo sapiens
  misc_RNA (1)...(19): siRNA sense strand
gugugaggaaccagggcaa

SEQ ID NO: 2400498 - RNA, 19 nt, Homo sapiens
  misc_RNA (1)...(19): siRNA sense strand
agagcuuagaggaggaaau

SEQ ID NO: 2400499 - RNA, 19 nt, Homo sapiens
  misc_RNA (1)...(19): siRNA sense strand
aggaggaaauccgaagaaa

SEQ ID NO: 2400500 - RNA, 19 nt, Homo sapiens
  misc_RNA (1)...(19): siRNA sense strand
ccacauaauacaacggaag

SEQ ID NO: 2400501 - RNA, 19 nt, Homo sapiens
  misc_RNA (1)...(19): siRNA sense strand
ggacggagugggugcagau

SEQ ID NO: 2400502 - RNA, 19 nt, Homo sapiens
  misc_RNA (1)...(19): siRNA sense strand
ggugcagauccgaagacua

SEQ ID NO: 2400503 - RNA, 19 nt, Homo sapiens
  misc_RNA (1)...(19): siRNA sense strand
caaagaaacgaguuggagu

SEQ ID NO: 2400504 - RNA, 19 nt, Homo sapiens
  misc_RNA (1)...(19): siRNA sense strand
ggaggaaauccgaagaaag

SEQ ID NO: 2400505 - RNA, 19 nt, Homo sapiens
  misc_RNA (1)...(19): siRNA sense strand
agcaagauccagaaaguga

SEQ ID NO: 2400506 - RNA, 19 nt, Homo sapiens
  misc_RNA (1)...(19): siRNA sense strand
gaaacgaguuggaguggac

SEQ ID NO: 2400507 - RNA, 19 nt, Homo sapiens
  misc_RNA (1)...(19): siRNA sense strand
aaacaaaagcccggagcua

SEQ ID NO: 2400508 - RNA, 19 nt, Homo sapiens
  misc_RNA (1)...(19): siRNA sense strand
gaggaggaaauccgaagaa

SEQ ID NO: 2400509 - RNA, 19 nt, Homo sapiens
  misc_RNA (1)...(19): siRNA sense strand
cauugaaacccauggucca

SEQ ID NO: 2400510 - RNA, 19 nt, Homo sapiens
  misc_RNA (1)...(19): siRNA sense strand
agaguugauucuggauaaa

SEQ ID NO: 2400511 - RNA, 19 nt, Homo sapiens
  misc_RNA (1)...(19): siRNA sense strand
cccaaauggaacacccaaa

SEQ ID NO: 2400512 - RNA, 19 nt, Homo sapiens
  misc_RNA (1)...(19): siRNA sense strand
gauucuggauaaagucuau

SEQ ID NO: 2400513 - RNA, 19 nt, Homo sapiens
  misc_RNA (1)...(19): siRNA sense strand
caacagaaacagaagucca

SEQ ID NO: 2400514 - RNA, 19 nt, Homo sapiens
  misc_RNA (1)...(19): siRNA sense strand
ucuaaggauccgcgaagaa

SEQ ID NO: 2400515 - RNA, 19 nt, Homo sapiens
  misc_RNA (1)...(19): siRNA sense strand
gugacaguguggaggacca

SEQ ID NO: 2400516 - RNA, 19 nt, Homo sapiens
  misc_RNA (1)...(19): siRNA sense strand
cuucaagagcaguuuggaa

SEQ ID NO: 2400517 - RNA, 19 nt, Homo sapiens
  misc_RNA (1)...(19): siRNA sense strand
ucuauuacacaguggaaaa

SEQ ID NO: 2400518 - RNA, 19 nt, Homo sapiens
  misc_RNA (1)...(19): siRNA sense strand
gcgucuuggccgagcugaa

SEQ ID NO: 2400519 - RNA, 19 nt, Homo sapiens
  misc_RNA (1)...(19): siRNA sense strand
auccagaguuugugagagu

SEQ ID NO: 2400520 - RNA, 19 nt, Homo sapiens
  misc_RNA (1)...(19): siRNA sense strand
uaagaugccucuagcccua

SEQ ID NO: 2400521 - RNA, 19 nt, Homo sapiens
  misc_RNA (1)...(19): siRNA sense strand
ccaaagacuucauucacga

SEQ ID NO: 2400522 - RNA, 19 nt, Homo sapiens
  misc_RNA (1)...(19): siRNA sense strand
acuaaguguuuacgggcuu

SEQ ID NO: 2400523 - RNA, 19 nt, Homo sapiens
  misc_RNA (1)...(19): siRNA sense strand
acgacgacaucgaggccuu

SEQ ID NO: 2400524 - RNA, 19 nt, Homo sapiens
  misc_RNA (1)...(19): siRNA sense strand
uggaagaaaauguggaguu

SEQ ID NO: 2400525 - RNA, 19 nt, Homo sapiens
  misc_RNA (1)...(19): siRNA sense strand
ccauuaaagaccacagcaa

SEQ ID NO: 2400526 - RNA, 19 nt, Homo sapiens
  misc_RNA (1)...(19): siRNA sense strand
cuaucaaagaagagauuca

SEQ ID NO: 2400527 - RNA, 19 nt, Homo sapiens
  misc_RNA (1)...(19): siRNA sense strand
gauaagaacaagugcugca

SEQ ID NO: 2400528 - RNA, 19 nt, Homo sapiens
  misc_RNA (1)...(19): siRNA sense strand
acaugguggauaagaacaa

SEQ ID NO: 2400529 - RNA, 19 nt, Homo sapiens
  misc_RNA (1)...(19): siRNA sense strand
ccgauauugaucaggauuu

SEQ ID NO: 2400530 - RNA, 19 nt, Homo sapiens
  misc_RNA (1)...(19): siRNA sense strand
auuaaagaccacagcaaca

SEQ ID NO: 2400531 - RNA, 19 nt, Homo sapiens
  misc_RNA (1)...(19): siRNA sense strand
acucaauagaacaguauca

SEQ ID NO: 2400532 - RNA, 19 nt, Homo sapiens
  misc_RNA (1)...(19): siRNA sense strand
ccaucugaaaggaucuaaa

SEQ ID NO: 2400533 - RNA, 19 nt, Homo sapiens
  misc_RNA (1)...(19): siRNA sense strand
gugcagaggcuguggcaga

SEQ ID NO: 2400534 - RNA, 19 nt, Homo sapiens
  misc_RNA (1)...(19): siRNA sense strand
ccgcauaaacagcacggaa

SEQ ID NO: 2400535 - RNA, 19 nt, Homo sapiens
  misc_RNA (1)...(19): siRNA sense strand
cgucaucaccagggaggaa

SEQ ID NO: 2400536 - RNA, 19 nt, Homo sapiens
  misc_RNA (1)...(19): siRNA sense strand
acagauacuucggggauaa

SEQ ID NO: 2400537 - RNA, 19 nt, Homo sapiens
  misc_RNA (1)...(19): siRNA sense strand
gugcagaggcuguggcaga

SEQ ID NO: 2400538 - RNA, 19 nt, Homo sapiens
  misc_RNA (1)...(19): siRNA sense strand
ccgcauaaacagcacggaa

SEQ ID NO: 2400539 - RNA, 19 nt, Homo sapiens
  misc_RNA (1)...(19): siRNA sense strand
cgucaucaccagggaggaa

SEQ ID NO: 2400540 - RNA, 19 nt, Homo sapiens
  misc_RNA (1)...(19): siRNA sense strand
acagauacuucggggauaa

SEQ ID NO: 2400541 - RNA, 19 nt, Homo sapiens
  misc_RNA (1)...(19): siRNA sense strand
gaacagaggaggaggagga

SEQ ID NO: 2400542 - RNA, 19 nt, Homo sapiens
  misc_RNA (1)...(19): siRNA sense strand
gagaagaaauuacuggcaa

SEQ ID NO: 2400543 - RNA, 19 nt, Homo sapiens
  misc_RNA (1)...(19): siRNA sense strand
ggagagaauaucagcgaca

SEQ ID NO: 2400544 - RNA, 19 nt, Homo sapiens
  misc_RNA (1)...(19): siRNA sense strand
aguuccaauuccagagaaa

SEQ ID NO: 2400545 - RNA, 19 nt, Homo sapiens
  misc_RNA (1)...(19): siRNA sense strand
gcagaggagcagaccgcaa

SEQ ID NO: 2400546 - RNA, 19 nt, Homo sapiens
  misc_RNA (1)...(19): siRNA sense strand
ccagagaaaaugagugaau

SEQ ID NO: 2400547 - RNA, 19 nt, Homo sapiens
  misc_RNA (1)...(19): siRNA sense strand
cggacaaagcaguuccaau

SEQ ID NO: 2400548 - RNA, 19 nt, Homo sapiens
  misc_RNA (1)...(19): siRNA sense strand
ucaugaagaacccggacaa

SEQ ID NO: 2400549 - RNA, 19 nt, Homo sapiens
  misc_RNA (1)...(19): siRNA sense strand
cgacaggacuacauggaug

SEQ ID NO: 2400550 - RNA, 19 nt, Homo sapiens
  misc_RNA (1)...(19): siRNA sense strand
ugaaacuugaacagaagaa

SEQ ID NO: 2400551 - RNA, 19 nt, Homo sapiens
  misc_RNA (1)...(19): siRNA sense strand
gaaaaugagugaaugggca

SEQ ID NO: 2400552 - RNA, 19 nt, Homo sapiens
  misc_RNA (1)...(19): siRNA sense strand
agaaagagccgcagacgcu

SEQ ID NO: 2400553 - RNA, 19 nt, Homo sapiens
  misc_RNA (1)...(19): siRNA sense strand
cgacaagaauauuugggua

SEQ ID NO: 2400554 - RNA, 19 nt, Homo sapiens
  misc_RNA (1)...(19): siRNA sense strand
cagccagagcagagagauu

SEQ ID NO: 2400555 - RNA, 19 nt, Homo sapiens
  misc_RNA (1)...(19): siRNA sense strand
cugcaagagaccagauauu

SEQ ID NO: 2400556 - RNA, 19 nt, Homo sapiens
  misc_RNA (1)...(19): siRNA sense strand
aggaaauggcggugcgguu

SEQ ID NO: 2400557 - RNA, 19 nt, Homo sapiens
  misc_RNA (1)...(19): siRNA sense strand
agaaaugucaggagaggga

SEQ ID NO: 2400558 - RNA, 19 nt, Homo sapiens
  misc_RNA (1)...(19): siRNA sense strand
ccuugauacugcacgacaa

SEQ ID NO: 2400559 - RNA, 19 nt, Homo sapiens
  misc_RNA (1)...(19): siRNA sense strand
gauucaugcccaagcacaa

SEQ ID NO: 2400560 - RNA, 19 nt, Homo sapiens
  misc_RNA (1)...(19): siRNA sense strand
gucaagaaaugucaggaga

SEQ ID NO: 2400561 - RNA, 19 nt, Homo sapiens
  misc_RNA (1)...(19): siRNA sense strand
uugcaaguucagugcuuaa

SEQ ID NO: 2400562 - RNA, 19 nt, Homo sapiens
  misc_RNA (1)...(19): siRNA sense strand
gggugaaaucgcuccguuu

SEQ ID NO: 2400563 - RNA, 19 nt, Homo sapiens
  misc_RNA (1)...(19): siRNA sense strand
ccucacaggugguuggaag

SEQ ID NO: 2400564 - RNA, 19 nt, Homo sapiens
  misc_RNA (1)...(19): siRNA sense strand
uuucaugccugguggcuga

SEQ ID NO: 2400565 - RNA, 19 nt, Homo sapiens
  misc_RNA (1)...(19): siRNA sense strand
ugauacugcacgacaagaa

SEQ ID NO: 2400566 - RNA, 19 nt, Homo sapiens
  misc_RNA (1)...(19): siRNA sense strand
aaaugucaggagagggauu

SEQ ID NO: 2400567 - RNA, 19 nt, Homo sapiens
  misc_RNA (1)...(19): siRNA sense strand
cugaugugguuguauucaa

SEQ ID NO: 2400568 - RNA, 19 nt, Homo sapiens
  misc_RNA (1)...(19): siRNA sense strand
agcuggaggugcuggaaga

SEQ ID NO: 2400569 - RNA, 19 nt, Homo sapiens
  misc_RNA (1)...(19): siRNA sense strand
uggaugagcuggaggugcu

SEQ ID NO: 2400570 - RNA, 19 nt, Homo sapiens
  misc_RNA (1)...(19): siRNA sense strand
gggcagaugcauugcgggu

SEQ ID NO: 2400571 - RNA, 19 nt, Homo sapiens
  misc_RNA (1)...(19): siRNA sense strand
aguggaagguggugggcua

SEQ ID NO: 2400572 - RNA, 19 nt, Homo sapiens
  misc_RNA (1)...(19): siRNA sense strand
acagagagacaaagaacaa

SEQ ID NO: 2400573 - RNA, 19 nt, Homo sapiens
  misc_RNA (1)...(19): siRNA sense strand
ugaaauuuaucgagggcau

SEQ ID NO: 2400574 - RNA, 19 nt, Homo sapiens
  misc_RNA (1)...(19): siRNA sense strand
ugaagaacagagagacaaa

SEQ ID NO: 2400575 - RNA, 19 nt, Homo sapiens
  misc_RNA (1)...(19): siRNA sense strand
aaaggaaguuagaggccaa

SEQ ID NO: 2400576 - RNA, 19 nt, Homo sapiens
  misc_RNA (1)...(19): siRNA sense strand
auaugaaacugaagcggaa

SEQ ID NO: 2400577 - RNA, 19 nt, Homo sapiens
  misc_RNA (1)...(19): siRNA sense strand
acaagaaggaaguagggaa

SEQ ID NO: 2400578 - RNA, 19 nt, Homo sapiens
  misc_RNA (1)...(19): siRNA sense strand
agcaagaaguugaagaaca

SEQ ID NO: 2400579 - RNA, 19 nt, Homo sapiens
  misc_RNA (1)...(19): siRNA sense strand
guugaagaacagagagaca

SEQ ID NO: 2400580 - RNA, 19 nt, Homo sapiens
  misc_RNA (1)...(19): siRNA sense strand
gcaaaggaauuucaggaga

SEQ ID NO: 2400581 - RNA, 19 nt, Homo sapiens
  misc_RNA (1)...(19): siRNA sense strand
ccugaaaagugacaagaaa

SEQ ID NO: 2400582 - RNA, 19 nt, Homo sapiens
  misc_RNA (1)...(19): siRNA sense strand
gggacgaugaagaguggaa

SEQ ID NO: 2400583 - RNA, 19 nt, Homo sapiens
  misc_RNA (1)...(19): siRNA sense strand
agaugaagcagcaaaggaa

SEQ ID NO: 2400584 - RNA, 19 nt, Homo sapiens
  misc_RNA (1)...(19): siRNA sense strand
gggaguugaaggagagcuu

SEQ ID NO: 2400585 - RNA, 19 nt, Homo sapiens
  misc_RNA (1)...(19): siRNA sense strand
gagaauaagaccacgacga

SEQ ID NO: 2400586 - RNA, 19 nt, Homo sapiens
  misc_RNA (1)...(19): siRNA sense strand
cugaaaagugacaagaaaa

SEQ ID NO: 2400587 - RNA, 19 nt, Homo sapiens
  misc_RNA (1)...(19): siRNA sense strand
cagcgaaggauguggucau

SEQ ID NO: 2400588 - RNA, 19 nt, Homo sapiens
  misc_RNA (1)...(19): siRNA sense strand
agagcaagaaguugaagaa

SEQ ID NO: 2400589 - RNA, 19 nt, Homo sapiens
  misc_RNA (1)...(19): siRNA sense strand
aguuggggaucgaggaaaa

SEQ ID NO: 2400590 - RNA, 19 nt, Homo sapiens
  misc_RNA (1)...(19): siRNA sense strand
cugagggaguugaaggaga

SEQ ID NO: 2400591 - RNA, 19 nt, Homo sapiens
  misc_RNA (1)...(19): siRNA sense strand
cuggaaacgagcuggauuu

SEQ ID NO: 2400592 - RNA, 19 nt, Homo sapiens
  misc_RNA (1)...(19): siRNA sense strand
gggaggagcuggaagcacu

SEQ ID NO: 2400593 - RNA, 19 nt, Homo sapiens
  misc_RNA (1)...(19): siRNA sense strand
aggagaaacacaagaagga

SEQ ID NO: 2400594 - RNA, 19 nt, Homo sapiens
  misc_RNA (1)...(19): siRNA sense strand
cugccgaacgccuggauua

SEQ ID NO: 2400595 - RNA, 19 nt, Homo sapiens
  misc_RNA (1)...(19): siRNA sense strand
caggaaauucacaccguaa

SEQ ID NO: 2400596 - RNA, 19 nt, Homo sapiens
  misc_RNA (1)...(19): siRNA sense strand
cugaugaggaugaggcuga

SEQ ID NO: 2400597 - RNA, 19 nt, Homo sapiens
  misc_RNA (1)...(19): siRNA sense strand
cgaccuagaugaagcagca

SEQ ID NO: 2400598 - RNA, 19 nt, Homo sapiens
  misc_RNA (1)...(19): siRNA sense strand
aacugaagcggaagaaaua

SEQ ID NO: 2400599 - RNA, 19 nt, Homo sapiens
  misc_RNA (1)...(19): siRNA sense strand
aaggagagcuugcaggaca

SEQ ID NO: 2400600 - RNA, 19 nt, Homo sapiens
  misc_RNA (1)...(19): siRNA sense strand
cugaacuaguugugauuga

SEQ ID NO: 2400601 - RNA, 19 nt, Homo sapiens
  misc_RNA (1)...(19): siRNA sense strand
ccucaacaucacucggaua

SEQ ID NO: 2400602 - RNA, 19 nt, Homo sapiens
  misc_RNA (1)...(19): siRNA sense strand
ggaccugauuccauggaca

SEQ ID NO: 2400603 - RNA, 19 nt, Homo sapiens
  misc_RNA (1)...(19): siRNA sense strand
aaguugaagaacagagaga

SEQ ID NO: 2400604 - RNA, 19 nt, Homo sapiens
  misc_RNA (1)...(19): siRNA sense strand
aguuagaggccaaacaaga

SEQ ID NO: 2400605 - RNA, 19 nt, Homo sapiens
  misc_RNA (1)...(19): siRNA sense strand
gagugaauguauuucgaga

SEQ ID NO: 2400606 - RNA, 19 nt, Homo sapiens
  misc_RNA (1)...(19): siRNA sense strand
gaacccaaacagagcaaga

SEQ ID NO: 2400607 - RNA, 19 nt, Homo sapiens
  misc_RNA (1)...(19): siRNA sense strand
gaucuggagcugagggagu

SEQ ID NO: 2400608 - RNA, 19 nt, Homo sapiens
  misc_RNA (1)...(19): siRNA sense strand
cgaaugaccugaccggaga

SEQ ID NO: 2400609 - RNA, 19 nt, Homo sapiens
  misc_RNA (1)...(19): siRNA sense strand
aagcaauuguacacaguga

SEQ ID NO: 2400610 - RNA, 19 nt, Homo sapiens
  misc_RNA (1)...(19): siRNA sense strand
ggauguggugggaagauuu

SEQ ID NO: 2400611 - RNA, 19 nt, Homo sapiens
  misc_RNA (1)...(19): siRNA sense strand
gcaucuauuuccugaacca

SEQ ID NO: 2400612 - RNA, 19 nt, Homo sapiens
  misc_RNA (1)...(19): siRNA sense strand
cacggaauaugguggacua

SEQ ID NO: 2400613 - RNA, 19 nt, Homo sapiens
  misc_RNA (1)...(19): siRNA sense strand
caagaaggaaguagggaag

SEQ ID NO: 2400614 - RNA, 19 nt, Homo sapiens
  misc_RNA (1)...(19): siRNA sense strand
ggccaaacaagaacccaaa

SEQ ID NO: 2400615 - RNA, 19 nt, Homo sapiens
  misc_RNA (1)...(19): siRNA sense strand
cgacagcugcagaagaaaa

SEQ ID NO: 2400616 - RNA, 19 nt, Homo sapiens
  misc_RNA (1)...(19): siRNA sense strand
aggcagacuauucaguaua

SEQ ID NO: 2400617 - RNA, 19 nt, Homo sapiens
  misc_RNA (1)...(19): siRNA sense strand
guggaagggucguucgcau

SEQ ID NO: 2400618 - RNA, 19 nt, Homo sapiens
  misc_RNA (1)...(19): siRNA sense strand
ggaaaagaucaggugguaa

SEQ ID NO: 2400619 - RNA, 19 nt, Homo sapiens
  misc_RNA (1)...(19): siRNA sense strand
augaagcagcaaaggaauu

SEQ ID NO: 2400620 - RNA, 19 nt, Homo sapiens
  misc_RNA (1)...(19): siRNA sense strand
auggaacacugaacauaaa

SEQ ID NO: 2400621 - RNA, 19 nt, Homo sapiens
  misc_RNA (1)...(19): siRNA sense strand
gaacaaagcugggccgaac

SEQ ID NO: 2400622 - RNA, 19 nt, Homo sapiens
  misc_RNA (1)...(19): siRNA sense strand
ccacaagauccugggcaau

SEQ ID NO: 2400623 - RNA, 19 nt, Homo sapiens
  misc_RNA (1)...(19): siRNA sense strand
uguaagaagugucucguca

SEQ ID NO: 2400624 - RNA, 19 nt, Homo sapiens
  misc_RNA (1)...(19): siRNA sense strand
gagaaguggcugaaugacu

SEQ ID NO: 2400625 - RNA, 19 nt, Homo sapiens
  misc_RNA (1)...(19): siRNA sense strand
cagcaaaggaauuucagga

SEQ ID NO: 2400626 - RNA, 19 nt, Homo sapiens
  misc_RNA (1)...(19): siRNA sense strand
aggccaaacaagaacccaa

SEQ ID NO: 2400627 - RNA, 19 nt, Homo sapiens
  misc_RNA (1)...(19): siRNA sense strand
gggcgguggcauuugggua

SEQ ID NO: 2400628 - RNA, 19 nt, Homo sapiens
  misc_RNA (1)...(19): siRNA sense strand
cgagaacacaggcagacua

SEQ ID NO: 2400629 - RNA, 19 nt, Homo sapiens
  misc_RNA (1)...(19): siRNA sense strand
gcuuguuggaagaggucau

SEQ ID NO: 2400630 - RNA, 19 nt, Homo sapiens
  misc_RNA (1)...(19): siRNA sense strand
ggagaaacacaagaaggaa

SEQ ID NO: 2400631 - RNA, 19 nt, Homo sapiens
  misc_RNA (1)...(19): siRNA sense strand
aggaaguagggaagcugaa

SEQ ID NO: 2400632 - RNA, 19 nt, Homo sapiens
  misc_RNA (1)...(19): siRNA sense strand
aucaaguggugguggcuaa

SEQ ID NO: 2400633 - RNA, 19 nt, Homo sapiens
  misc_RNA (1)...(19): siRNA sense strand
ggcuaauauccuugaguca

SEQ ID NO: 2400634 - RNA, 19 nt, Homo sapiens
  misc_RNA (1)...(19): siRNA sense strand
cucggaaggcuuuggaaau

SEQ ID NO: 2400635 - RNA, 19 nt, Homo sapiens
  misc_RNA (1)...(19): siRNA sense strand
guaaccaaagacucggaaa

SEQ ID NO: 2400636 - RNA, 19 nt, Homo sapiens
  misc_RNA (1)...(19): siRNA sense strand
aggaagacacugagaacau

SEQ ID NO: 2400637 - RNA, 19 nt, Homo sapiens
  misc_RNA (1)...(19): siRNA sense strand
agaagauggaggagacaca

SEQ ID NO: 2400638 - RNA, 19 nt, Homo sapiens
  misc_RNA (1)...(19): siRNA sense strand
agaacauggcagagaaguu

SEQ ID NO: 2400639 - RNA, 19 nt, Homo sapiens
  misc_RNA (1)...(19): siRNA sense strand
cuaucagagcaaacggaaa

SEQ ID NO: 2400640 - RNA, 19 nt, Homo sapiens
  misc_RNA (1)...(19): siRNA sense strand
ggagccuggcagaaggaaa

SEQ ID NO: 2400641 - RNA, 19 nt, Homo sapiens
  misc_RNA (1)...(19): siRNA sense strand
ucaacgagcugcuggagga

SEQ ID NO: 2400642 - RNA, 19 nt, Homo sapiens
  misc_RNA (1)...(19): siRNA sense strand
gugcagaagauggaggaga

SEQ ID NO: 2400643 - RNA, 19 nt, Homo sapiens
  misc_RNA (1)...(19): siRNA sense strand
gggugaaaaucgagaagcu

SEQ ID NO: 2400644 - RNA, 19 nt, Homo sapiens
  misc_RNA (1)...(19): siRNA sense strand
acacugagaacauggcaga

SEQ ID NO: 2400645 - RNA, 19 nt, Homo sapiens
  misc_RNA (1)...(19): siRNA sense strand
guucagcuuaacaaagaaa

SEQ ID NO: 2400646 - RNA, 19 nt, Homo sapiens
  misc_RNA (1)...(19): siRNA sense strand
agaaauaccaggaacucca

SEQ ID NO: 2400647 - RNA, 19 nt, Homo sapiens
  misc_RNA (1)...(19): siRNA sense strand
cagaaggggccaagauuga

SEQ ID NO: 2400648 - RNA, 19 nt, Homo sapiens
  misc_RNA (1)...(19): siRNA sense strand
agauugaggaagacacuga

SEQ ID NO: 2400649 - RNA, 19 nt, Homo sapiens
  misc_RNA (1)...(19): siRNA sense strand
uguugaagaucgagggaau

SEQ ID NO: 2400650 - RNA, 19 nt, Homo sapiens
  misc_RNA (1)...(19): siRNA sense strand
agggaauaaaggagacaua

SEQ ID NO: 2400651 - RNA, 19 nt, Homo sapiens
  misc_RNA (1)...(19): siRNA sense strand
accaagaagaucuggauaa

SEQ ID NO: 2400652 - RNA, 19 nt, Homo sapiens
  misc_RNA (1)...(19): siRNA sense strand
uggauaacccagugcuuaa

SEQ ID NO: 2400653 - RNA, 19 nt, Homo sapiens
  misc_RNA (1)...(19): siRNA sense strand
ccgggaaggacaugaagaa

SEQ ID NO: 2400654 - RNA, 19 nt, Homo sapiens
  misc_RNA (1)...(19): siRNA sense strand
agaugaaggcagaagugua

SEQ ID NO: 2400655 - RNA, 19 nt, Homo sapiens
  misc_RNA (1)...(19): siRNA sense strand
acauacagaagaaggagaa

SEQ ID NO: 2400656 - RNA, 19 nt, Homo sapiens
  misc_RNA (1)...(19): siRNA sense strand
auucaaagaaagugcucua

SEQ ID NO: 2400657 - RNA, 19 nt, Homo sapiens
  misc_RNA (1)...(19): siRNA sense strand
auauaaaugcccagacaga

SEQ ID NO: 2400658 - RNA, 19 nt, Homo sapiens
  misc_RNA (1)...(19): siRNA sense strand
acuugaagcuggugcagau

SEQ ID NO: 2400659 - RNA, 19 nt, Homo sapiens
  misc_RNA (1)...(19): siRNA sense strand
acagaagaaacucaagaaa

SEQ ID NO: 2400660 - RNA, 19 nt, Homo sapiens
  misc_RNA (1)...(19): siRNA sense strand
acgaaguguccgagguuga

SEQ ID NO: 2400661 - RNA, 19 nt, Homo sapiens
  misc_RNA (1)...(19): siRNA sense strand
ggaugaagcugcugcugca

SEQ ID NO: 2400662 - RNA, 19 nt, Homo sapiens
  misc_RNA (1)...(19): siRNA sense strand
cagccacaaugcaggacaa

SEQ ID NO: 2400663 - RNA, 19 nt, Homo sapiens
  misc_RNA (1)...(19): siRNA sense strand
ucguaaauugcuagaugaa

SEQ ID NO: 2400664 - RNA, 19 nt, Homo sapiens
  misc_RNA (1)...(19): siRNA sense strand
augaagaaaugguggcacu

SEQ ID NO: 2400665 - RNA, 19 nt, Homo sapiens
  misc_RNA (1)...(19): siRNA sense strand
ugucaacugcugaugguaa

SEQ ID NO: 2400666 - RNA, 19 nt, Homo sapiens
  misc_RNA (1)...(19): siRNA sense strand
aguuaaugaugaaggauac

SEQ ID NO: 2400667 - RNA, 19 nt, Homo sapiens
  misc_RNA (1)...(19): siRNA sense strand
cagaaguguaaaugaacau

SEQ ID NO: 2400668 - RNA, 19 nt, Homo sapiens
  misc_RNA (1)...(19): siRNA sense strand
ugcagaaggagcagacuua

SEQ ID NO: 2400669 - RNA, 19 nt, Homo sapiens
  misc_RNA (1)...(19): siRNA sense strand
guuaaauauuugcuggcuu

SEQ ID NO: 2400670 - RNA, 19 nt, Homo sapiens
  misc_RNA (1)...(19): siRNA sense strand
ugguaaagcuuuugcagau

SEQ ID NO: 2400671 - RNA, 19 nt, Homo sapiens
  misc_RNA (1)...(19): siRNA sense strand
ggaauaaaggagacauaac

SEQ ID NO: 2400672 - RNA, 19 nt, Homo sapiens
  misc_RNA (1)...(19): siRNA sense strand
cgggaaggacaugaagaaa

SEQ ID NO: 2400673 - RNA, 19 nt, Homo sapiens
  misc_RNA (1)...(19): siRNA sense strand
auguagagguggcacguuu

SEQ ID NO: 2400674 - RNA, 19 nt, Homo sapiens
  misc_RNA (1)...(19): siRNA sense strand
gagcaaauauaaaugccca

SEQ ID NO: 2400675 - RNA, 19 nt, Homo sapiens
  misc_RNA (1)...(19): siRNA sense strand
aggcacgacuagaagcauu

SEQ ID NO: 2400676 - RNA, 19 nt, Homo sapiens
  misc_RNA (1)...(19): siRNA sense strand
aguggagguuacuuagaua

SEQ ID NO: 2400677 - RNA, 19 nt, Homo sapiens
  misc_RNA (1)...(19): siRNA sense strand
cacaaggagcaaauauaaa

SEQ ID NO: 2400678 - RNA, 19 nt, Homo sapiens
  misc_RNA (1)...(19): siRNA sense strand
aggcaucucaggagggaca

SEQ ID NO: 2400679 - RNA, 19 nt, Homo sapiens
  misc_RNA (1)...(19): siRNA sense strand
accuggaauugguuaaaua

SEQ ID NO: 2400680 - RNA, 19 nt, Homo sapiens
  misc_RNA (1)...(19): siRNA sense strand
guugaagaucgagggaaua

SEQ ID NO: 2400681 - RNA, 19 nt, Homo sapiens
  misc_RNA (1)...(19): siRNA sense strand
cuuaucaaguacugcagaa

SEQ ID NO: 2400682 - RNA, 19 nt, Homo sapiens
  misc_RNA (1)...(19): siRNA sense strand
ugaagcuggugcagaucaa

SEQ ID NO: 2400683 - RNA, 19 nt, Homo sapiens
  misc_RNA (1)...(19): siRNA sense strand
ggcacuacucuuagcacaa

SEQ ID NO: 2400684 - RNA, 19 nt, Homo sapiens
  misc_RNA (1)...(19): siRNA sense strand
agcacaaggagcaaauaua

SEQ ID NO: 2400685 - RNA, 19 nt, Homo sapiens
  misc_RNA (1)...(19): siRNA sense strand
aggagggacaccuggaauu

SEQ ID NO: 2400686 - RNA, 19 nt, Homo sapiens
  misc_RNA (1)...(19): siRNA sense strand
cagaagaaggagaaagccu

SEQ ID NO: 2400687 - RNA, 19 nt, Homo sapiens
  misc_RNA (1)...(19): siRNA sense strand
aggugcaaauauagaagau

SEQ ID NO: 2400688 - RNA, 19 nt, Homo sapiens
  misc_RNA (1)...(19): siRNA sense strand
uugaagaucgagggaauaa

SEQ ID NO: 2400689 - RNA, 19 nt, Homo sapiens
  misc_RNA (1)...(19): siRNA sense strand
auguuaaugcuguucguaa

SEQ ID NO: 2400690 - RNA, 19 nt, Homo sapiens
  misc_RNA (1)...(19): siRNA sense strand
gugcaggucauguggaagu

SEQ ID NO: 2400691 - RNA, 19 nt, Homo sapiens
  misc_RNA (1)...(19): siRNA sense strand
gguauuaugaauuagcaca

SEQ ID NO: 2400692 - RNA, 19 nt, Homo sapiens
  misc_RNA (1)...(19): siRNA sense strand
acucuuagcacaaggagca

SEQ ID NO: 2400693 - RNA, 19 nt, Homo sapiens
  misc_RNA (1)...(19): siRNA sense strand
ggauggacauguagaggug

SEQ ID NO: 2400694 - RNA, 19 nt, Homo sapiens
  misc_RNA (1)...(19): siRNA sense strand
guaaauugcuagaugaagg

SEQ ID NO: 2400695 - RNA, 19 nt, Homo sapiens
  misc_RNA (1)...(19): siRNA sense strand
ugaacauacagaagaagga

SEQ ID NO: 2400696 - RNA, 19 nt, Homo sapiens
  misc_RNA (1)...(19): siRNA sense strand
agacagaagaaacucaaga

SEQ ID NO: 2400697 - RNA, 19 nt, Homo sapiens
  misc_RNA (1)...(19): siRNA sense strand
cacuguggauccagagaca

SEQ ID NO: 2400698 - RNA, 19 nt, Homo sapiens
  misc_RNA (1)...(19): siRNA sense strand
uguugaagaucgagggaau

SEQ ID NO: 2400699 - RNA, 19 nt, Homo sapiens
  misc_RNA (1)...(19): siRNA sense strand
agggaauaaaggagacaua

SEQ ID NO: 2400700 - RNA, 19 nt, Homo sapiens
  misc_RNA (1)...(19): siRNA sense strand
ccgggaaggacaugaagaa

SEQ ID NO: 2400701 - RNA, 19 nt, Homo sapiens
  misc_RNA (1)...(19): siRNA sense strand
agaugaaggcagaagugua

SEQ ID NO: 2400702 - RNA, 19 nt, Homo sapiens
  misc_RNA (1)...(19): siRNA sense strand
acauacagaagaaggagaa

SEQ ID NO: 2400703 - RNA, 19 nt, Homo sapiens
  misc_RNA (1)...(19): siRNA sense strand
auucaaagaaagugcucua

SEQ ID NO: 2400704 - RNA, 19 nt, Homo sapiens
  misc_RNA (1)...(19): siRNA sense strand
auauaaaugcccagacaga

SEQ ID NO: 2400705 - RNA, 19 nt, Homo sapiens
  misc_RNA (1)...(19): siRNA sense strand
acuugaagcuggugcagau

SEQ ID NO: 2400706 - RNA, 19 nt, Homo sapiens
  misc_RNA (1)...(19): siRNA sense strand
acagaagaaacucaagaaa

SEQ ID NO: 2400707 - RNA, 19 nt, Homo sapiens
  misc_RNA (1)...(19): siRNA sense strand
cagccacaaugcaggacaa

SEQ ID NO: 2400708 - RNA, 19 nt, Homo sapiens
  misc_RNA (1)...(19): siRNA sense strand
ucguaaauugcuagaugaa

SEQ ID NO: 2400709 - RNA, 19 nt, Homo sapiens
  misc_RNA (1)...(19): siRNA sense strand
augaagaaaugguggcacu

SEQ ID NO: 2400710 - RNA, 19 nt, Homo sapiens
  misc_RNA (1)...(19): siRNA sense strand
aguuaaugaugaaggauac

SEQ ID NO: 2400711 - RNA, 19 nt, Homo sapiens
  misc_RNA (1)...(19): siRNA sense strand
cagaaguguaaaugaacau

SEQ ID NO: 2400712 - RNA, 19 nt, Homo sapiens
  misc_RNA (1)...(19): siRNA sense strand
guuaaauauuugcuggcuu

SEQ ID NO: 2400713 - RNA, 19 nt, Homo sapiens
  misc_RNA (1)...(19): siRNA sense strand
ggaauaaaggagacauaac

SEQ ID NO: 2400714 - RNA, 19 nt, Homo sapiens
  misc_RNA (1)...(19): siRNA sense strand
cgggaaggacaugaagaaa

SEQ ID NO: 2400715 - RNA, 19 nt, Homo sapiens
  misc_RNA (1)...(19): siRNA sense strand
auguagagguggcacguuu

SEQ ID NO: 2400716 - RNA, 19 nt, Homo sapiens
  misc_RNA (1)...(19): siRNA sense strand
gagcaaauauaaaugccca

SEQ ID NO: 2400717 - RNA, 19 nt, Homo sapiens
  misc_RNA (1)...(19): siRNA sense strand
aguggagguuacuuagaua

SEQ ID NO: 2400718 - RNA, 19 nt, Homo sapiens
  misc_RNA (1)...(19): siRNA sense strand
cacaaggagcaaauauaaa

SEQ ID NO: 2400719 - RNA, 19 nt, Homo sapiens
  misc_RNA (1)...(19): siRNA sense strand
aggcaucucaggagggaca

SEQ ID NO: 2400720 - RNA, 19 nt, Homo sapiens
  misc_RNA (1)...(19): siRNA sense strand
accuggaauugguuaaaua

SEQ ID NO: 2400721 - RNA, 19 nt, Homo sapiens
  misc_RNA (1)...(19): siRNA sense strand
guugaagaucgagggaaua

SEQ ID NO: 2400722 - RNA, 19 nt, Homo sapiens
  misc_RNA (1)...(19): siRNA sense strand
ugaagcuggugcagaucaa

SEQ ID NO: 2400723 - RNA, 19 nt, Homo sapiens
  misc_RNA (1)...(19): siRNA sense strand
ggcacuacucuuagcacaa

SEQ ID NO: 2400724 - RNA, 19 nt, Homo sapiens
  misc_RNA (1)...(19): siRNA sense strand
agcacaaggagcaaauaua

SEQ ID NO: 2400725 - RNA, 19 nt, Homo sapiens
  misc_RNA (1)...(19): siRNA sense strand
aggagggacaccuggaauu

SEQ ID NO: 2400726 - RNA, 19 nt, Homo sapiens
  misc_RNA (1)...(19): siRNA sense strand
cagaagaaggagaaagccu

SEQ ID NO: 2400727 - RNA, 19 nt, Homo sapiens
  misc_RNA (1)...(19): siRNA sense strand
aggugcaaauauagaagau

SEQ ID NO: 2400728 - RNA, 19 nt, Homo sapiens
  misc_RNA (1)...(19): siRNA sense strand
uugaagaucgagggaauaa

SEQ ID NO: 2400729 - RNA, 19 nt, Homo sapiens
  misc_RNA (1)...(19): siRNA sense strand
auguuaaugcuguucguaa

SEQ ID NO: 2400730 - RNA, 19 nt, Homo sapiens
  misc_RNA (1)...(19): siRNA sense strand
gugcaggucauguggaagu

SEQ ID NO: 2400731 - RNA, 19 nt, Homo sapiens
  misc_RNA (1)...(19): siRNA sense strand
gguauuaugaauuagcaca

SEQ ID NO: 2400732 - RNA, 19 nt, Homo sapiens
  misc_RNA (1)...(19): siRNA sense strand
acucuuagcacaaggagca

SEQ ID NO: 2400733 - RNA, 19 nt, Homo sapiens
  misc_RNA (1)...(19): siRNA sense strand
ggauggacauguagaggug

SEQ ID NO: 2400734 - RNA, 19 nt, Homo sapiens
  misc_RNA (1)...(19): siRNA sense strand
guaaauugcuagaugaagg

SEQ ID NO: 2400735 - RNA, 19 nt, Homo sapiens
  misc_RNA (1)...(19): siRNA sense strand
ugaacauacagaagaagga

SEQ ID NO: 2400736 - RNA, 19 nt, Homo sapiens
  misc_RNA (1)...(19): siRNA sense strand
agacagaagaaacucaaga

SEQ ID NO: 2400737 - RNA, 19 nt, Homo sapiens
  misc_RNA (1)...(19): siRNA sense strand
cuagauaaccccuggaaga

SEQ ID NO: 2400738 - RNA, 19 nt, Homo sapiens
  misc_RNA (1)...(19): siRNA sense strand
agaaagaagagcagagagc

SEQ ID NO: 2400739 - RNA, 19 nt, Homo sapiens
  misc_RNA (1)...(19): siRNA sense strand
cagaagaaggagagacggu

SEQ ID NO: 2400740 - RNA, 19 nt, Homo sapiens
  misc_RNA (1)...(19): siRNA sense strand
caaaauaucucuuaccaga

SEQ ID NO: 2400741 - RNA, 19 nt, Homo sapiens
  misc_RNA (1)...(19): siRNA sense strand
cugauaagcugcuggacag

SEQ ID NO: 2400742 - RNA, 19 nt, Homo sapiens
  misc_RNA (1)...(19): siRNA sense strand
agucgaagugagcaggauu

SEQ ID NO: 2400743 - RNA, 19 nt, Homo sapiens
  misc_RNA (1)...(19): siRNA sense strand
agaaagaauaugagcaaga

SEQ ID NO: 2400744 - RNA, 19 nt, Homo sapiens
  misc_RNA (1)...(19): siRNA sense strand
ccuaaaaggacuugaaaau

SEQ ID NO: 2400745 - RNA, 19 nt, Homo sapiens
  misc_RNA (1)...(19): siRNA sense strand
ggguaaugagccagaaauu

SEQ ID NO: 2400746 - RNA, 19 nt, Homo sapiens
  misc_RNA (1)...(19): siRNA sense strand
uggagaugaauuugagaaa

SEQ ID NO: 2400747 - RNA, 19 nt, Homo sapiens
  misc_RNA (1)...(19): siRNA sense strand
ccaacaaagcugagaguuc

SEQ ID NO: 2400748 - RNA, 19 nt, Homo sapiens
  misc_RNA (1)...(19): siRNA sense strand
aagugaauccagacagaaa

SEQ ID NO: 2400749 - RNA, 19 nt, Homo sapiens
  misc_RNA (1)...(19): siRNA sense strand
ccgcaacagagaucagaaa

SEQ ID NO: 2400750 - RNA, 19 nt, Homo sapiens
  misc_RNA (1)...(19): siRNA sense strand
guggauuaccugaggccaa

SEQ ID NO: 2400751 - RNA, 19 nt, Homo sapiens
  misc_RNA (1)...(19): siRNA sense strand
ugacgaaguggcagaggaa

SEQ ID NO: 2400752 - RNA, 19 nt, Homo sapiens
  misc_RNA (1)...(19): siRNA sense strand
auguggaagauuuggauaa

SEQ ID NO: 2400753 - RNA, 19 nt, Homo sapiens
  misc_RNA (1)...(19): siRNA sense strand
ggaaagaggccgaaaacca

SEQ ID NO: 2400754 - RNA, 19 nt, Homo sapiens
  misc_RNA (1)...(19): siRNA sense strand
cuuuaaggguaaugagcca

SEQ ID NO: 2400755 - RNA, 19 nt, Homo sapiens
  misc_RNA (1)...(19): siRNA sense strand
caaauaucguguuggcaga

SEQ ID NO: 2400756 - RNA, 19 nt, Homo sapiens
  misc_RNA (1)...(19): siRNA sense strand
ggucacaauuaguggccga

SEQ ID NO: 2400757 - RNA, 19 nt, Homo sapiens
  misc_RNA (1)...(19): siRNA sense strand
aguucauguuacagaggaa

SEQ ID NO: 2400758 - RNA, 19 nt, Homo sapiens
  misc_RNA (1)...(19): siRNA sense strand
gcaucggggaggagaauaa

SEQ ID NO: 2400759 - RNA, 19 nt, Homo sapiens
  misc_RNA (1)...(19): siRNA sense strand
uggcagagauccagccuga

SEQ ID NO: 2400760 - RNA, 19 nt, Homo sapiens
  misc_RNA (1)...(19): siRNA sense strand
agaauaugagcaagaguuu

SEQ ID NO: 2400761 - RNA, 19 nt, Homo sapiens
  misc_RNA (1)...(19): siRNA sense strand
gaguuacaguauagaggau

SEQ ID NO: 2400762 - RNA, 19 nt, Homo sapiens
  misc_RNA (1)...(19): siRNA sense strand
gcucaaagagggcaagcau

SEQ ID NO: 2400763 - RNA, 19 nt, Homo sapiens
  misc_RNA (1)...(19): siRNA sense strand
uauagaaagugaucggaga

SEQ ID NO: 2400764 - RNA, 19 nt, Homo sapiens
  misc_RNA (1)...(19): siRNA sense strand
guuacaguauagaggauca

SEQ ID NO: 2400765 - RNA, 19 nt, Homo sapiens
  misc_RNA (1)...(19): siRNA sense strand
acgaaguggcagaggaacu

SEQ ID NO: 2400766 - RNA, 19 nt, Homo sapiens
  misc_RNA (1)...(19): siRNA sense strand
aauuaguggccgaaaguuu

SEQ ID NO: 2400767 - RNA, 19 nt, Homo sapiens
  misc_RNA (1)...(19): siRNA sense strand
guuuaggauuauuguguca

SEQ ID NO: 2400768 - RNA, 19 nt, Homo sapiens
  misc_RNA (1)...(19): siRNA sense strand
cuguauacacgaacacuua

SEQ ID NO: 2400769 - RNA, 19 nt, Homo sapiens
  misc_RNA (1)...(19): siRNA sense strand
gagccagccaaauggacaa

SEQ ID NO: 2400770 - RNA, 19 nt, Homo sapiens
  misc_RNA (1)...(19): siRNA sense strand
gguuguaugauauagcuaa

SEQ ID NO: 2400771 - RNA, 19 nt, Homo sapiens
  misc_RNA (1)...(19): siRNA sense strand
auagaaagugaucggagaa

SEQ ID NO: 2400772 - RNA, 19 nt, Homo sapiens
  misc_RNA (1)...(19): siRNA sense strand
ccacauaaaaggggacuaa

SEQ ID NO: 2400773 - RNA, 19 nt, Homo sapiens
  misc_RNA (1)...(19): siRNA sense strand
uguugaacgucgacgcauu

SEQ ID NO: 2400774 - RNA, 19 nt, Homo sapiens
  misc_RNA (1)...(19): siRNA sense strand
ggaacuuaauguugaacgu

SEQ ID NO: 2400775 - RNA, 19 nt, Homo sapiens
  misc_RNA (1)...(19): siRNA sense strand
cgacacaaucucaacaaaa

SEQ ID NO: 2400776 - RNA, 19 nt, Homo sapiens
  misc_RNA (1)...(19): siRNA sense strand
guauagaggaucauaucau

SEQ ID NO: 2400777 - RNA, 19 nt, Homo sapiens
  misc_RNA (1)...(19): siRNA sense strand
gccuagaaguugcugccaa

SEQ ID NO: 2400778 - RNA, 19 nt, Homo sapiens
  misc_RNA (1)...(19): siRNA sense strand
guaaaaugcaguuagaaga

SEQ ID NO: 2400779 - RNA, 19 nt, Homo sapiens
  misc_RNA (1)...(19): siRNA sense strand
agacauguguuuuguggaa

SEQ ID NO: 2400780 - RNA, 19 nt, Homo sapiens
  misc_RNA (1)...(19): siRNA sense strand
aagugaucggagaaagaua

SEQ ID NO: 2400781 - RNA, 19 nt, Homo sapiens
  misc_RNA (1)...(19): siRNA sense strand
agacagaaagugaaaguac

SEQ ID NO: 2400782 - RNA, 19 nt, Homo sapiens
  misc_RNA (1)...(19): siRNA sense strand
uagaaagugaucggagaaa

SEQ ID NO: 2400783 - RNA, 19 nt, Homo sapiens
  misc_RNA (1)...(19): siRNA sense strand
ccagacagaaagugaaagu

SEQ ID NO: 2400784 - RNA, 19 nt, Homo sapiens
  misc_RNA (1)...(19): siRNA sense strand
gugaaaguacagcuggcaa

SEQ ID NO: 2400785 - RNA, 19 nt, Homo sapiens
  misc_RNA (1)...(19): siRNA sense strand
uaaaaggggacuaaugaaa

SEQ ID NO: 2400786 - RNA, 19 nt, Homo sapiens
  misc_RNA (1)...(19): siRNA sense strand
agugaucggagaaagauaa

SEQ ID NO: 2400787 - RNA, 19 nt, Homo sapiens
  misc_RNA (1)...(19): siRNA sense strand
cagugaaugcugagaugga

SEQ ID NO: 2400788 - RNA, 19 nt, Homo sapiens
  misc_RNA (1)...(19): siRNA sense strand
cugagaaggcagccaauga

SEQ ID NO: 2400789 - RNA, 19 nt, Homo sapiens
  misc_RNA (1)...(19): siRNA sense strand
cgugaacguccuagagagu

SEQ ID NO: 2400790 - RNA, 19 nt, Homo sapiens
  misc_RNA (1)...(19): siRNA sense strand
ccaaauggacacccagaca

SEQ ID NO: 2400791 - RNA, 19 nt, Homo sapiens
  misc_RNA (1)...(19): siRNA sense strand
gggcaagcaugcucgagga

SEQ ID NO: 2400792 - RNA, 19 nt, Homo sapiens
  misc_RNA (1)...(19): siRNA sense strand
aaagaauccaccacagcaa

SEQ ID NO: 2400793 - RNA, 19 nt, Homo sapiens
  misc_RNA (1)...(19): siRNA sense strand
agaggaacuuaauguugaa

SEQ ID NO: 2400794 - RNA, 19 nt, Homo sapiens
  misc_RNA (1)...(19): siRNA sense strand
auaaguacgccgagcagau

SEQ ID NO: 2400795 - RNA, 19 nt, Homo sapiens
  misc_RNA (1)...(19): siRNA sense strand
aggaccauguggaagauuu

SEQ ID NO: 2400796 - RNA, 19 nt, Homo sapiens
  misc_RNA (1)...(19): siRNA sense strand
aaugauaccucaaaggcca

SEQ ID NO: 2400797 - RNA, 19 nt, Homo sapiens
  misc_RNA (1)...(19): siRNA sense strand
agguguuauuccagugaca

SEQ ID NO: 2400798 - RNA, 19 nt, Homo sapiens
  misc_RNA (1)...(19): siRNA sense strand
aagaauaugagcaagaguu

SEQ ID NO: 2400799 - RNA, 19 nt, Homo sapiens
  misc_RNA (1)...(19): siRNA sense strand
acaaucaguugcugugaca

SEQ ID NO: 2400800 - RNA, 19 nt, Homo sapiens
  misc_RNA (1)...(19): siRNA sense strand
caaccaagucgaaaagaga

SEQ ID NO: 2400801 - RNA, 19 nt, Homo sapiens
  misc_RNA (1)...(19): siRNA sense strand
gcaaucaagugaauccaga

SEQ ID NO: 2400802 - RNA, 19 nt, Homo sapiens
  misc_RNA (1)...(19): siRNA sense strand
ccacugagaaggcagccaa

SEQ ID NO: 2400803 - RNA, 19 nt, Homo sapiens
  misc_RNA (1)...(19): siRNA sense strand
ugaaaacaccucugaaaga

SEQ ID NO: 2400804 - RNA, 19 nt, Homo sapiens
  misc_RNA (1)...(19): siRNA sense strand
aggcagaugcacaggagaa

SEQ ID NO: 2400805 - RNA, 19 nt, Homo sapiens
  misc_RNA (1)...(19): siRNA sense strand
gggaagagcugcagucgga

SEQ ID NO: 2400806 - RNA, 19 nt, Homo sapiens
  misc_RNA (1)...(19): siRNA sense strand
gagaaggacuacacgguca

SEQ ID NO: 2400807 - RNA, 19 nt, Homo sapiens
  misc_RNA (1)...(19): siRNA sense strand
uggaggagguggaggugga

SEQ ID NO: 2400808 - RNA, 19 nt, Homo sapiens
  misc_RNA (1)...(19): siRNA sense strand
aggaggagguggaggaggu

SEQ ID NO: 2400809 - RNA, 19 nt, Homo sapiens
  misc_RNA (1)...(19): siRNA sense strand
aggugcagguggaggcaga

SEQ ID NO: 2400810 - RNA, 19 nt, Homo sapiens
  misc_RNA (1)...(19): siRNA sense strand
aggagcagcuggaggagca

SEQ ID NO: 2400811 - RNA, 19 nt, Homo sapiens
  misc_RNA (1)...(19): siRNA sense strand
gcuucgagcagcuggugaa

SEQ ID NO: 2400812 - RNA, 19 nt, Homo sapiens
  misc_RNA (1)...(19): siRNA sense strand
aggaggaggagguggagga

SEQ ID NO: 2400813 - RNA, 19 nt, Homo sapiens
  misc_RNA (1)...(19): siRNA sense strand
aggagguggagguggaaca

SEQ ID NO: 2400814 - RNA, 19 nt, Homo sapiens
  misc_RNA (1)...(19): siRNA sense strand
uggaacaggugcaggugga

SEQ ID NO: 2400815 - RNA, 19 nt, Homo sapiens
  misc_RNA (1)...(19): siRNA sense strand
uggacaaggacauggcuga

SEQ ID NO: 2400816 - RNA, 19 nt, Homo sapiens
  misc_RNA (1)...(19): siRNA sense strand
ccaagagcacggaggagca

SEQ ID NO: 2400817 - RNA, 19 nt, Homo sapiens
  misc_RNA (1)...(19): siRNA sense strand
ggcagaugcacaggagaaa

SEQ ID NO: 2400818 - RNA, 19 nt, Homo sapiens
  misc_RNA (1)...(19): siRNA sense strand
cagaucaccuccagggacu

SEQ ID NO: 2400819 - RNA, 19 nt, Homo sapiens
  misc_RNA (1)...(19): siRNA sense strand
ggaacuuugaagagagcca

SEQ ID NO: 2400820 - RNA, 19 nt, Homo sapiens
  misc_RNA (1)...(19): siRNA sense strand
cuguagaggaggcuggaga

SEQ ID NO: 2400821 - RNA, 19 nt, Homo sapiens
  misc_RNA (1)...(19): siRNA sense strand
agaaguaucaggaccgaga

SEQ ID NO: 2400822 - RNA, 19 nt, Homo sapiens
  misc_RNA (1)...(19): siRNA sense strand
cccacaacgugcaggagau

SEQ ID NO: 2400823 - RNA, 19 nt, Homo sapiens
  misc_RNA (1)...(19): siRNA sense strand
augaagcugcaguggaaau

SEQ ID NO: 2400824 - RNA, 19 nt, Homo sapiens
  misc_RNA (1)...(19): siRNA sense strand
acaucaacgagcugacuau

SEQ ID NO: 2400825 - RNA, 19 nt, Homo sapiens
  misc_RNA (1)...(19): siRNA sense strand
caaagaugccuaaagcaga

SEQ ID NO: 2400826 - RNA, 19 nt, Homo sapiens
  misc_RNA (1)...(19): siRNA sense strand
augaauuagcaguguuuga

SEQ ID NO: 2400827 - RNA, 19 nt, Homo sapiens
  misc_RNA (1)...(19): siRNA sense strand
acuugggauuggagagaaa

SEQ ID NO: 2400828 - RNA, 19 nt, Homo sapiens
  misc_RNA (1)...(19): siRNA sense strand
agaaacaggaacugagcau

SEQ ID NO: 2400829 - RNA, 19 nt, Homo sapiens
  misc_RNA (1)...(19): siRNA sense strand
ggggcaaaugaaaguaaaa

SEQ ID NO: 2400830 - RNA, 19 nt, Homo sapiens
  misc_RNA (1)...(19): siRNA sense strand
aauacaaccuauaaggacu

SEQ ID NO: 2400831 - RNA, 19 nt, Homo sapiens
  misc_RNA (1)...(19): siRNA sense strand
cagaugaggaggaggaaga

SEQ ID NO: 2400832 - RNA, 19 nt, Homo sapiens
  misc_RNA (1)...(19): siRNA sense strand
caugauugucagaagaaua

SEQ ID NO: 2400833 - RNA, 19 nt, Homo sapiens
  misc_RNA (1)...(19): siRNA sense strand
gcaaaagaugggucagaaa

SEQ ID NO: 2400834 - RNA, 19 nt, Homo sapiens
  misc_RNA (1)...(19): siRNA sense strand
ccuguggaguugaggaauu

SEQ ID NO: 2400835 - RNA, 19 nt, Homo sapiens
  misc_RNA (1)...(19): siRNA sense strand
guacagaugaggaggagga

SEQ ID NO: 2400836 - RNA, 19 nt, Homo sapiens
  misc_RNA (1)...(19): siRNA sense strand
ucgauaagggaaagagaga

SEQ ID NO: 2400837 - RNA, 19 nt, Homo sapiens
  misc_RNA (1)...(19): siRNA sense strand
gauaagggaaagagagacu

SEQ ID NO: 2400838 - RNA, 19 nt, Homo sapiens
  misc_RNA (1)...(19): siRNA sense strand
gagaacuccacaagagcaa

SEQ ID NO: 2400839 - RNA, 19 nt, Homo sapiens
  misc_RNA (1)...(19): siRNA sense strand
ucucaagacaucaaagaau

SEQ ID NO: 2400840 - RNA, 19 nt, Homo sapiens
  misc_RNA (1)...(19): siRNA sense strand
cagaaaucacagagaccuu

SEQ ID NO: 2400841 - RNA, 19 nt, Homo sapiens
  misc_RNA (1)...(19): siRNA sense strand
cauuaaacauagagagacc

SEQ ID NO: 2400842 - RNA, 19 nt, Homo sapiens
  misc_RNA (1)...(19): siRNA sense strand
cgaugaagauagugauggu

SEQ ID NO: 2400843 - RNA, 19 nt, Homo sapiens
  misc_RNA (1)...(19): siRNA sense strand
augaagaggaauuugaaga

SEQ ID NO: 2400844 - RNA, 19 nt, Homo sapiens
  misc_RNA (1)...(19): siRNA sense strand
ugauacuuaugaagaggaa

SEQ ID NO: 2400845 - RNA, 19 nt, Homo sapiens
  misc_RNA (1)...(19): siRNA sense strand
cuagguagagauuuagaaa

SEQ ID NO: 2400846 - RNA, 19 nt, Homo sapiens
  misc_RNA (1)...(19): siRNA sense strand
aaucuuugucugagaaaca

SEQ ID NO: 2400847 - RNA, 19 nt, Homo sapiens
  misc_RNA (1)...(19): siRNA sense strand
gauacaaaugaaagacuca

SEQ ID NO: 2400848 - RNA, 19 nt, Homo sapiens
  misc_RNA (1)...(19): siRNA sense strand
cguuuagaaugcaacaauu

SEQ ID NO: 2400849 - RNA, 19 nt, Homo sapiens
  misc_RNA (1)...(19): siRNA sense strand
agaugacacuacugaucaa

SEQ ID NO: 2400850 - RNA, 19 nt, Homo sapiens
  misc_RNA (1)...(19): siRNA sense strand
cuuaaaucuuugucugaga

SEQ ID NO: 2400851 - RNA, 19 nt, Homo sapiens
  misc_RNA (1)...(19): siRNA sense strand
aggccaagcuuugaagaau

SEQ ID NO: 2400852 - RNA, 19 nt, Homo sapiens
  misc_RNA (1)...(19): siRNA sense strand
augaggaggaggaagauuu

SEQ ID NO: 2400853 - RNA, 19 nt, Homo sapiens
  misc_RNA (1)...(19): siRNA sense strand
aauccuuggaauugagcaa

SEQ ID NO: 2400854 - RNA, 19 nt, Homo sapiens
  misc_RNA (1)...(19): siRNA sense strand
aauuccaguacuaggauua

SEQ ID NO: 2400855 - RNA, 19 nt, Homo sapiens
  misc_RNA (1)...(19): siRNA sense strand
ccauagcuuaagugaauau

SEQ ID NO: 2400856 - RNA, 19 nt, Homo sapiens
  misc_RNA (1)...(19): siRNA sense strand
guauaagaggccaagcuuu

SEQ ID NO: 2400857 - RNA, 19 nt, Homo sapiens
  misc_RNA (1)...(19): siRNA sense strand
augcaauugucuugggugu

SEQ ID NO: 2400858 - RNA, 19 nt, Homo sapiens
  misc_RNA (1)...(19): siRNA sense strand
gaggccaagcuuugaagaa

SEQ ID NO: 2400859 - RNA, 19 nt, Homo sapiens
  misc_RNA (1)...(19): siRNA sense strand
gaauaugcugauaaugcaa

SEQ ID NO: 2400860 - RNA, 19 nt, Homo sapiens
  misc_RNA (1)...(19): siRNA sense strand
agauagucgaacuggauga

SEQ ID NO: 2400861 - RNA, 19 nt, Homo sapiens
  misc_RNA (1)...(19): siRNA sense strand
agaccauagcuuaagugaa

SEQ ID NO: 2400862 - RNA, 19 nt, Homo sapiens
  misc_RNA (1)...(19): siRNA sense strand
agaggaauuugaagaagca

SEQ ID NO: 2400863 - RNA, 19 nt, Homo sapiens
  misc_RNA (1)...(19): siRNA sense strand
uuaaauuagcugaugcaga

SEQ ID NO: 2400864 - RNA, 19 nt, Homo sapiens
  misc_RNA (1)...(19): siRNA sense strand
ugcaacaauuccaguacua

SEQ ID NO: 2400865 - RNA, 19 nt, Homo sapiens
  misc_RNA (1)...(19): siRNA sense strand
gaucaacauacuuuagaca

SEQ ID NO: 2400866 - RNA, 19 nt, Homo sapiens
  misc_RNA (1)...(19): siRNA sense strand
ucugaugauuccuguguau

SEQ ID NO: 2400867 - RNA, 19 nt, Homo sapiens
  misc_RNA (1)...(19): siRNA sense strand
ugaggagaccaaaguacaa

SEQ ID NO: 2400868 - RNA, 19 nt, Homo sapiens
  misc_RNA (1)...(19): siRNA sense strand
auuccagaccauagcuuaa

SEQ ID NO: 2400869 - RNA, 19 nt, Homo sapiens
  misc_RNA (1)...(19): siRNA sense strand
aagaagugcagcugcucaa

SEQ ID NO: 2400870 - RNA, 19 nt, Homo sapiens
  misc_RNA (1)...(19): siRNA sense strand
aggaauuugaagaagcaga

SEQ ID NO: 2400871 - RNA, 19 nt, Homo sapiens
  misc_RNA (1)...(19): siRNA sense strand
cguggauccugauguguau

SEQ ID NO: 2400872 - RNA, 19 nt, Homo sapiens
  misc_RNA (1)...(19): siRNA sense strand
cugcagaaguaagccuaua

SEQ ID NO: 2400873 - RNA, 19 nt, Homo sapiens
  misc_RNA (1)...(19): siRNA sense strand
aguccaucaucaaguagaa

SEQ ID NO: 2400874 - RNA, 19 nt, Homo sapiens
  misc_RNA (1)...(19): siRNA sense strand
gaccaaaguacaacacaca

SEQ ID NO: 2400875 - RNA, 19 nt, Homo sapiens
  misc_RNA (1)...(19): siRNA sense strand
uaggauuacacuugcagaa

SEQ ID NO: 2400876 - RNA, 19 nt, Homo sapiens
  misc_RNA (1)...(19): siRNA sense strand
aauuacaagugcugagauc

SEQ ID NO: 2400877 - RNA, 19 nt, Homo sapiens
  misc_RNA (1)...(19): siRNA sense strand
ccucagaagaguucccaga

SEQ ID NO: 2400878 - RNA, 19 nt, Homo sapiens
  misc_RNA (1)...(19): siRNA sense strand
agccaaucacugaauauaa

SEQ ID NO: 2400879 - RNA, 19 nt, Homo sapiens
  misc_RNA (1)...(19): siRNA sense strand
aggaagauuuucucaacaa

SEQ ID NO: 2400880 - RNA, 19 nt, Homo sapiens
  misc_RNA (1)...(19): siRNA sense strand
gugaggagaccaaaguaca

SEQ ID NO: 2400881 - RNA, 19 nt, Homo sapiens
  misc_RNA (1)...(19): siRNA sense strand
agauagugauggugaggag

SEQ ID NO: 2400882 - RNA, 19 nt, Homo sapiens
  misc_RNA (1)...(19): siRNA sense strand
gggucagaaaucacagaga

SEQ ID NO: 2400883 - RNA, 19 nt, Homo sapiens
  misc_RNA (1)...(19): siRNA sense strand
ucgaacuggaugauacuua

SEQ ID NO: 2400884 - RNA, 19 nt, Homo sapiens
  misc_RNA (1)...(19): siRNA sense strand
acacagauuuugacaacau

SEQ ID NO: 2400885 - RNA, 19 nt, Homo sapiens
  misc_RNA (1)...(19): siRNA sense strand
cagagaccuucaacagcaa

SEQ ID NO: 2400886 - RNA, 19 nt, Homo sapiens
  misc_RNA (1)...(19): siRNA sense strand
auguagaacccuugacaaa

SEQ ID NO: 2400887 - RNA, 19 nt, Homo sapiens
  misc_RNA (1)...(19): siRNA sense strand
cucaaagggcaaagaauua

SEQ ID NO: 2400888 - RNA, 19 nt, Homo sapiens
  misc_RNA (1)...(19): siRNA sense strand
ugaugaagaaccaggcaaa

SEQ ID NO: 2400889 - RNA, 19 nt, Homo sapiens
  misc_RNA (1)...(19): siRNA sense strand
aggagaaggacguagcaua

SEQ ID NO: 2400890 - RNA, 19 nt, Homo sapiens
  misc_RNA (1)...(19): siRNA sense strand
gcauaguacaacugagaga

SEQ ID NO: 2400891 - RNA, 19 nt, Homo sapiens
  misc_RNA (1)...(19): siRNA sense strand
gugcacaauuaaagaguca

SEQ ID NO: 2400892 - RNA, 19 nt, Homo sapiens
  misc_RNA (1)...(19): siRNA sense strand
caucaagauucaaagucaa

SEQ ID NO: 2400893 - RNA, 19 nt, Homo sapiens
  misc_RNA (1)...(19): siRNA sense strand
agacacagucaaagaguuu

SEQ ID NO: 2400894 - RNA, 19 nt, Homo sapiens
  misc_RNA (1)...(19): siRNA sense strand
cagaaaugcaagugaagga

SEQ ID NO: 2400895 - RNA, 19 nt, Homo sapiens
  misc_RNA (1)...(19): siRNA sense strand
aaaacuuccuagagagaaa

SEQ ID NO: 2400896 - RNA, 19 nt, Homo sapiens
  misc_RNA (1)...(19): siRNA sense strand
agguauaauaauagggcca

SEQ ID NO: 2400897 - RNA, 19 nt, Homo sapiens
  misc_RNA (1)...(19): siRNA sense strand
ccaagugcaauuagagauu

SEQ ID NO: 2400898 - RNA, 19 nt, Homo sapiens
  misc_RNA (1)...(19): siRNA sense strand
cugaagagucaccgagaga

SEQ ID NO: 2400899 - RNA, 19 nt, Homo sapiens
  misc_RNA (1)...(19): siRNA sense strand
ugcuauuggaagagauaua

SEQ ID NO: 2400900 - RNA, 19 nt, Homo sapiens
  misc_RNA (1)...(19): siRNA sense strand
cuggaaaugcaaauugaaa

SEQ ID NO: 2400901 - RNA, 19 nt, Homo sapiens
  misc_RNA (1)...(19): siRNA sense strand
aguacaacugagagaggua

SEQ ID NO: 2400902 - RNA, 19 nt, Homo sapiens
  misc_RNA (1)...(19): siRNA sense strand
ugcuauuggaagagguaua

SEQ ID NO: 2400903 - RNA, 19 nt, Homo sapiens
  misc_RNA (1)...(19): siRNA sense strand
acaucaagauucaguguca

SEQ ID NO: 2400904 - RNA, 19 nt, Homo sapiens
  misc_RNA (1)...(19): siRNA sense strand
acaucaagauucaguguca

SEQ ID NO: 2400905 - RNA, 19 nt, Homo sapiens
  misc_RNA (1)...(19): siRNA sense strand
gugaaaauccuaugcuuaa

SEQ ID NO: 2400906 - RNA, 19 nt, Homo sapiens
  misc_RNA (1)...(19): siRNA sense strand
gaugcuauuggaagagaua

SEQ ID NO: 2400907 - RNA, 19 nt, Homo sapiens
  misc_RNA (1)...(19): siRNA sense strand
ccaaaugcaagaaaagaaa

SEQ ID NO: 2400908 - RNA, 19 nt, Homo sapiens
  misc_RNA (1)...(19): siRNA sense strand
ggugaaaauccuaugcuua

SEQ ID NO: 2400909 - RNA, 19 nt, Homo sapiens
  misc_RNA (1)...(19): siRNA sense strand
auagaaagcuugagaggug

SEQ ID NO: 2400910 - RNA, 19 nt, Homo sapiens
  misc_RNA (1)...(19): siRNA sense strand
acauacagucaaagaguca

SEQ ID NO: 2400911 - RNA, 19 nt, Homo sapiens
  misc_RNA (1)...(19): siRNA sense strand
auaaggaauucuuggcaga

SEQ ID NO: 2400912 - RNA, 19 nt, Homo sapiens
  misc_RNA (1)...(19): siRNA sense strand
ugccauugguucaaguaaa

SEQ ID NO: 2400913 - RNA, 19 nt, Homo sapiens
  misc_RNA (1)...(19): siRNA sense strand
aaaugcaagugaaggaaca

SEQ ID NO: 2400914 - RNA, 19 nt, Homo sapiens
  misc_RNA (1)...(19): siRNA sense strand
gggaccaaucagugcacaa

SEQ ID NO: 2400915 - RNA, 19 nt, Homo sapiens
  misc_RNA (1)...(19): siRNA sense strand
ccagagacugauaaggaau

SEQ ID NO: 2400916 - RNA, 19 nt, Homo sapiens
  misc_RNA (1)...(19): siRNA sense strand
acgcaguuaaagagaaaga

SEQ ID NO: 2400917 - RNA, 19 nt, Homo sapiens
  misc_RNA (1)...(19): siRNA sense strand
ugaagaaucaggugaaaau

SEQ ID NO: 2400918 - RNA, 19 nt, Homo sapiens
  misc_RNA (1)...(19): siRNA sense strand
augaugaauucaagacaca

SEQ ID NO: 2400919 - RNA, 19 nt, Homo sapiens
  misc_RNA (1)...(19): siRNA sense strand
aauucaagacacagucaaa

SEQ ID NO: 2400920 - RNA, 19 nt, Homo sapiens
  misc_RNA (1)...(19): siRNA sense strand
ugcauuuggaagagauaua

SEQ ID NO: 2400921 - RNA, 19 nt, Homo sapiens
  misc_RNA (1)...(19): siRNA sense strand
ucaccgagagacugauaaa

SEQ ID NO: 2400922 - RNA, 19 nt, Homo sapiens
  misc_RNA (1)...(19): siRNA sense strand
aaaagaugcuauuggaaga

SEQ ID NO: 2400923 - RNA, 19 nt, Homo sapiens
  misc_RNA (1)...(19): siRNA sense strand
cguacaacgucaagaaggu

SEQ ID NO: 2400924 - RNA, 19 nt, Homo sapiens
  misc_RNA (1)...(19): siRNA sense strand
acguagcauaccagauaaa

SEQ ID NO: 2400925 - RNA, 19 nt, Homo sapiens
  misc_RNA (1)...(19): siRNA sense strand
guaccaaaugaaaguguga

SEQ ID NO: 2400926 - RNA, 19 nt, Homo sapiens
  misc_RNA (1)...(19): siRNA sense strand
acaaauaaauucuggagug

SEQ ID NO: 2400927 - RNA, 19 nt, Homo sapiens
  misc_RNA (1)...(19): siRNA sense strand
uggaaagacacaagacguu

SEQ ID NO: 2400928 - RNA, 19 nt, Homo sapiens
  misc_RNA (1)...(19): siRNA sense strand
ugagauaaagacacaacua

SEQ ID NO: 2400929 - RNA, 19 nt, Homo sapiens
  misc_RNA (1)...(19): siRNA sense strand
ccuagagagaaaagacaua

SEQ ID NO: 2400930 - RNA, 19 nt, Homo sapiens
  misc_RNA (1)...(19): siRNA sense strand
aauaacuccuggaagggaa

SEQ ID NO: 2400931 - RNA, 19 nt, Homo sapiens
  misc_RNA (1)...(19): siRNA sense strand
gagucaaccacgacacaau

SEQ ID NO: 2400932 - RNA, 19 nt, Homo sapiens
  misc_RNA (1)...(19): siRNA sense strand
guauaauaauagggccaau

SEQ ID NO: 2400933 - RNA, 19 nt, Homo sapiens
  misc_RNA (1)...(19): siRNA sense strand
uggaaaaccuaccuauaaa

SEQ ID NO: 2400934 - RNA, 19 nt, Homo sapiens
  misc_RNA (1)...(19): siRNA sense strand
gaugcauuuggaagagaua

SEQ ID NO: 2400935 - RNA, 19 nt, Homo sapiens
  misc_RNA (1)...(19): siRNA sense strand
ccuggaagggaaaggcgua

SEQ ID NO: 2400936 - RNA, 19 nt, Homo sapiens
  misc_RNA (1)...(19): siRNA sense strand
gacagaugcauuuggaaga

SEQ ID NO: 2400937 - RNA, 19 nt, Homo sapiens
  misc_RNA (1)...(19): siRNA sense strand
caguuaaagagaaagaguu

SEQ ID NO: 2400938 - RNA, 19 nt, Homo sapiens
  misc_RNA (1)...(19): siRNA sense strand
accaaaugaaagugugauu

SEQ ID NO: 2400939 - RNA, 19 nt, Homo sapiens
  misc_RNA (1)...(19): siRNA sense strand
cccagagacugauaaggaa

SEQ ID NO: 2400940 - RNA, 19 nt, Homo sapiens
  misc_RNA (1)...(19): siRNA sense strand
ggcuuguaguugagcauca

SEQ ID NO: 2400941 - RNA, 19 nt, Homo sapiens
  misc_RNA (1)...(19): siRNA sense strand
auucuggaguggaaagaca

SEQ ID NO: 2400942 - RNA, 19 nt, Homo sapiens
  misc_RNA (1)...(19): siRNA sense strand
gggacaucuauuugcaaga

SEQ ID NO: 2400943 - RNA, 19 nt, Homo sapiens
  misc_RNA (1)...(19): siRNA sense strand
caccagggccagagagaac

SEQ ID NO: 2400944 - RNA, 19 nt, Homo sapiens
  misc_RNA (1)...(19): siRNA sense strand
ggaaaggauucaagaggca

SEQ ID NO: 2400945 - RNA, 19 nt, Homo sapiens
  misc_RNA (1)...(19): siRNA sense strand
ugacaacagccgugagcau

SEQ ID NO: 2400946 - RNA, 19 nt, Homo sapiens
  misc_RNA (1)...(19): siRNA sense strand
guucaaaacaagacaaaga

SEQ ID NO: 2400947 - RNA, 19 nt, Homo sapiens
  misc_RNA (1)...(19): siRNA sense strand
aagacaaagacgaacaaau

SEQ ID NO: 2400948 - RNA, 19 nt, Homo sapiens
  misc_RNA (1)...(19): siRNA sense strand
aaaggauucaagaggcaaa

SEQ ID NO: 2400949 - RNA, 19 nt, Homo sapiens
  misc_RNA (1)...(19): siRNA sense strand
aagcagaaugcaugcaaaa

SEQ ID NO: 2400950 - RNA, 19 nt, Homo sapiens
  misc_RNA (1)...(19): siRNA sense strand
aaaacaagacaaagacgaa

SEQ ID NO: 2400951 - RNA, 19 nt, Homo sapiens
  misc_RNA (1)...(19): siRNA sense strand
gggcaggagugaaaggcaa

SEQ ID NO: 2400952 - RNA, 19 nt, Homo sapiens
  misc_RNA (1)...(19): siRNA sense strand
agacagagcugcugggaag

SEQ ID NO: 2400953 - RNA, 19 nt, Homo sapiens
  misc_RNA (1)...(19): siRNA sense strand
agacgguacugcagggaca

SEQ ID NO: 2400954 - RNA, 19 nt, Homo sapiens
  misc_RNA (1)...(19): siRNA sense strand
aguagaaggcacaaagaca

SEQ ID NO: 2400955 - RNA, 19 nt, Homo sapiens
  misc_RNA (1)...(19): siRNA sense strand
ccaagaagcucaaagcacu

SEQ ID NO: 2400956 - RNA, 19 nt, Homo sapiens
  misc_RNA (1)...(19): siRNA sense strand
ccgaggaagaaaaggcaaa

SEQ ID NO: 2400957 - RNA, 19 nt, Homo sapiens
  misc_RNA (1)...(19): siRNA sense strand
gcacaaagacagagcugcu

SEQ ID NO: 2400958 - RNA, 19 nt, Homo sapiens
  misc_RNA (1)...(19): siRNA sense strand
ggcaggagugaaaggcaaa

SEQ ID NO: 2400959 - RNA, 19 nt, Homo sapiens
  misc_RNA (1)...(19): siRNA sense strand
cagcaguggcagugaguuc

SEQ ID NO: 2400960 - RNA, 19 nt, Homo sapiens
  misc_RNA (1)...(19): siRNA sense strand
agugaaaggcaaaggaccu

SEQ ID NO: 2400961 - RNA, 19 nt, Homo sapiens
  misc_RNA (1)...(19): siRNA sense strand
acuacaaaggcacgaaaca

SEQ ID NO: 2400962 - RNA, 19 nt, Homo sapiens
  misc_RNA (1)...(19): siRNA sense strand
ucaaagcacuggaagccau

SEQ ID NO: 2400963 - RNA, 19 nt, Homo sapiens
  misc_RNA (1)...(19): siRNA sense strand
gcuaagaaauuaaggcugu

SEQ ID NO: 2400964 - RNA, 19 nt, Homo sapiens
  misc_RNA (1)...(19): siRNA sense strand
agagagaacuuguggcagu

SEQ ID NO: 2400965 - RNA, 19 nt, Homo sapiens
  misc_RNA (1)...(19): siRNA sense strand
gaacacagaagcagggagu

SEQ ID NO: 2400966 - RNA, 19 nt, Homo sapiens
  misc_RNA (1)...(19): siRNA sense strand
ccuuauugugagaagaauu

SEQ ID NO: 2400967 - RNA, 19 nt, Homo sapiens
  misc_RNA (1)...(19): siRNA sense strand
agcaaguaaacgauggaaa

SEQ ID NO: 2400968 - RNA, 19 nt, Homo sapiens
  misc_RNA (1)...(19): siRNA sense strand
agucauuaccacagacaga

SEQ ID NO: 2400969 - RNA, 19 nt, Homo sapiens
  misc_RNA (1)...(19): siRNA sense strand
aauuaaagaugcaugcuga

SEQ ID NO: 2400970 - RNA, 19 nt, Homo sapiens
  misc_RNA (1)...(19): siRNA sense strand
caacauacaucuuacccau

SEQ ID NO: 2400971 - RNA, 19 nt, Homo sapiens
  misc_RNA (1)...(19): siRNA sense strand
cuguaaucaaugagagacu

SEQ ID NO: 2400972 - RNA, 19 nt, Homo sapiens
  misc_RNA (1)...(19): siRNA sense strand
aagacugugcugagagaga

SEQ ID NO: 2400973 - RNA, 19 nt, Homo sapiens
  misc_RNA (1)...(19): siRNA sense strand
gacuguaaucaaugagaga

SEQ ID NO: 2400974 - RNA, 19 nt, Homo sapiens
  misc_RNA (1)...(19): siRNA sense strand
gagacugaagacagaucaa

SEQ ID NO: 2400975 - RNA, 19 nt, Homo sapiens
  misc_RNA (1)...(19): siRNA sense strand
uuccaagacaggagaaaca

SEQ ID NO: 2400976 - RNA, 19 nt, Homo sapiens
  misc_RNA (1)...(19): siRNA sense strand
acgauggaaaggugccaaa

SEQ ID NO: 2400977 - RNA, 19 nt, Homo sapiens
  misc_RNA (1)...(19): siRNA sense strand
guugaaucuuacuuggaau

SEQ ID NO: 2400978 - RNA, 19 nt, Homo sapiens
  misc_RNA (1)...(19): siRNA sense strand
ucagaucaugagugugaaa

SEQ ID NO: 2400979 - RNA, 19 nt, Homo sapiens
  misc_RNA (1)...(19): siRNA sense strand
gcgauaagucauuaccaca

SEQ ID NO: 2400980 - RNA, 19 nt, Homo sapiens
  misc_RNA (1)...(19): siRNA sense strand
agaaauuaaggcuguguca

SEQ ID NO: 2400981 - RNA, 19 nt, Homo sapiens
  misc_RNA (1)...(19): siRNA sense strand
acacagaagcagggagucu

SEQ ID NO: 2400982 - RNA, 19 nt, Homo sapiens
  misc_RNA (1)...(19): siRNA sense strand
agguugcauugaugaaauu

SEQ ID NO: 2400983 - RNA, 19 nt, Homo sapiens
  misc_RNA (1)...(19): siRNA sense strand
ucauuaccacagacagaaa

SEQ ID NO: 2400984 - RNA, 19 nt, Homo sapiens
  misc_RNA (1)...(19): siRNA sense strand
agggaagacaucaaggaaa

SEQ ID NO: 2400985 - RNA, 19 nt, Homo sapiens
  misc_RNA (1)...(19): siRNA sense strand
gaggacaagucuaagggau

SEQ ID NO: 2400986 - RNA, 19 nt, Homo sapiens
  misc_RNA (1)...(19): siRNA sense strand
cuuccaagucugucgcaaa

SEQ ID NO: 2400987 - RNA, 19 nt, Homo sapiens
  misc_RNA (1)...(19): siRNA sense strand
gagcaaagccucacagccu

SEQ ID NO: 2400988 - RNA, 19 nt, Homo sapiens
  misc_RNA (1)...(19): siRNA sense strand
ucucagagcugcaggaccu

SEQ ID NO: 2400989 - RNA, 19 nt, Homo sapiens
  misc_RNA (1)...(19): siRNA sense strand
gucuaagggaugcuggaaa

SEQ ID NO: 2400990 - RNA, 19 nt, Homo sapiens
  misc_RNA (1)...(19): siRNA sense strand
aggcgaagcugcaggacac

SEQ ID NO: 2400991 - RNA, 19 nt, Homo sapiens
  misc_RNA (1)...(19): siRNA sense strand
guuaagaaaagcacagaau

SEQ ID NO: 2400992 - RNA, 19 nt, Homo sapiens
  misc_RNA (1)...(19): siRNA sense strand
cucaaagagcggaagccaa

SEQ ID NO: 2400993 - RNA, 19 nt, Homo sapiens
  misc_RNA (1)...(19): siRNA sense strand
ccuucaggccuguuaagaa

SEQ ID NO: 2400994 - RNA, 19 nt, Homo sapiens
  misc_RNA (1)...(19): siRNA sense strand
aggaaaaccuggagcugca

SEQ ID NO: 2400995 - RNA, 19 nt, Homo sapiens
  misc_RNA (1)...(19): siRNA sense strand
gagcagaagcagacggcag

SEQ ID NO: 2400996 - RNA, 19 nt, Homo sapiens
  misc_RNA (1)...(19): siRNA sense strand
aggacaagucuaagggaug

SEQ ID NO: 2400997 - RNA, 19 nt, Homo sapiens
  misc_RNA (1)...(19): siRNA sense strand
gcacagcucugccagggaa

SEQ ID NO: 2400998 - RNA, 19 nt, Homo sapiens
  misc_RNA (1)...(19): siRNA sense strand
aaggcugggcagagagaca

SEQ ID NO: 2400999 - RNA, 19 nt, Homo sapiens
  misc_RNA (1)...(19): siRNA sense strand
cuaagaaggcgaagcugca

SEQ ID NO: 2401000 - RNA, 19 nt, Homo sapiens
  misc_RNA (1)...(19): siRNA sense strand
gggcagagagacacggaag

SEQ ID NO: 2401001 - RNA, 19 nt, Homo sapiens
  misc_RNA (1)...(19): siRNA sense strand
gaacuauggucuaugcaca

SEQ ID NO: 2401002 - RNA, 19 nt, Homo sapiens
  misc_RNA (1)...(19): siRNA sense strand
auuucaagcaggaacauaa

SEQ ID NO: 2401003 - RNA, 19 nt, Homo sapiens
  misc_RNA (1)...(19): siRNA sense strand
aggaauguugguucagaaa

SEQ ID NO: 2401004 - RNA, 19 nt, Homo sapiens
  misc_RNA (1)...(19): siRNA sense strand
cggcauuggcaaagcaacu

SEQ ID NO: 2401005 - RNA, 19 nt, Homo sapiens
  misc_RNA (1)...(19): siRNA sense strand
cagaagauggacuugaaaa

SEQ ID NO: 2401006 - RNA, 19 nt, Homo sapiens
  misc_RNA (1)...(19): siRNA sense strand
uggaggaaacagcggcauu

SEQ ID NO: 2401007 - RNA, 19 nt, Homo sapiens
  misc_RNA (1)...(19): siRNA sense strand
ccaaugaucuccaguccga

SEQ ID NO: 2401008 - RNA, 19 nt, Homo sapiens
  misc_RNA (1)...(19): siRNA sense strand
ucauauaccuucaagccau

SEQ ID NO: 2401009 - RNA, 19 nt, Homo sapiens
  misc_RNA (1)...(19): siRNA sense strand
ccauaggugugcaagcaga

SEQ ID NO: 2401010 - RNA, 19 nt, Homo sapiens
  misc_RNA (1)...(19): siRNA sense strand
gugacaugcaggagaaguu

SEQ ID NO: 2401011 - RNA, 19 nt, Homo sapiens
  misc_RNA (1)...(19): siRNA sense strand
caggagaaguuccgccaca

SEQ ID NO: 2401012 - RNA, 19 nt, Homo sapiens
  misc_RNA (1)...(19): siRNA sense strand
agaacaugaaggagguuaa

SEQ ID NO: 2401013 - RNA, 19 nt, Homo sapiens
  misc_RNA (1)...(19): siRNA sense strand
gauuaugggaacaggaaaa

SEQ ID NO: 2401014 - RNA, 19 nt, Homo sapiens
  misc_RNA (1)...(19): siRNA sense strand
gauagaagaucuuggcguu

SEQ ID NO: 2401015 - RNA, 19 nt, Homo sapiens
  misc_RNA (1)...(19): siRNA sense strand
ugugaaaagcccagauaaa

SEQ ID NO: 2401016 - RNA, 19 nt, Homo sapiens
  misc_RNA (1)...(19): siRNA sense strand
cuggagaaagagaaguaua

SEQ ID NO: 2401017 - RNA, 19 nt, Homo sapiens
  misc_RNA (1)...(19): siRNA sense strand
ggauuaugggaacaggaaa

SEQ ID NO: 2401018 - RNA, 19 nt, Homo sapiens
  misc_RNA (1)...(19): siRNA sense strand
augaaggagguuaagaaau

SEQ ID NO: 2401019 - RNA, 19 nt, Homo sapiens
  misc_RNA (1)...(19): siRNA sense strand
acaccaugauagucgaaca

SEQ ID NO: 2401020 - RNA, 19 nt, Homo sapiens
  misc_RNA (1)...(19): siRNA sense strand
auuaaguggauuaugggaa

SEQ ID NO: 2401021 - RNA, 19 nt, Homo sapiens
  misc_RNA (1)...(19): siRNA sense strand
gguaauauagcuaaggaug

SEQ ID NO: 2401022 - RNA, 19 nt, Homo sapiens
  misc_RNA (1)...(19): siRNA sense strand
gguuaagaaaucuccaaaa

SEQ ID NO: 2401023 - RNA, 19 nt, Homo sapiens
  misc_RNA (1)...(19): siRNA sense strand
gugacauggcaaauaaaga

SEQ ID NO: 2401024 - RNA, 19 nt, Homo sapiens
  misc_RNA (1)...(19): siRNA sense strand
ggauagaagaucuuggcgu

SEQ ID NO: 2401025 - RNA, 19 nt, Homo sapiens
  misc_RNA (1)...(19): siRNA sense strand
agaucuuggcguuguggua

SEQ ID NO: 2401026 - RNA, 19 nt, Homo sapiens
  misc_RNA (1)...(19): siRNA sense strand
cagaaagaaaguucaucau

SEQ ID NO: 2401027 - RNA, 19 nt, Homo sapiens
  misc_RNA (1)...(19): siRNA sense strand
caggaauaugagauugaau

SEQ ID NO: 2401028 - RNA, 19 nt, Homo sapiens
  misc_RNA (1)...(19): siRNA sense strand
cauaaauagaacaguugga

SEQ ID NO: 2401029 - RNA, 19 nt, Homo sapiens
  misc_RNA (1)...(19): siRNA sense strand
uaaauagaacaguuggaca

SEQ ID NO: 2401030 - RNA, 19 nt, Homo sapiens
  misc_RNA (1)...(19): siRNA sense strand
gcagauaaccaaagggagc

SEQ ID NO: 2401031 - RNA, 19 nt, Homo sapiens
  misc_RNA (1)...(19): siRNA sense strand
gcuucgugauggaguguca

SEQ ID NO: 2401032 - RNA, 19 nt, Homo sapiens
  misc_RNA (1)...(19): siRNA sense strand
acgaaggcucgaagauuau

SEQ ID NO: 2401033 - RNA, 19 nt, Homo sapiens
  misc_RNA (1)...(19): siRNA sense strand
aguuuaagcagauaaccaa

SEQ ID NO: 2401034 - RNA, 19 nt, Homo sapiens
  misc_RNA (1)...(19): siRNA sense strand
auaaccagggagugggcua

SEQ ID NO: 2401035 - RNA, 19 nt, Homo sapiens
  misc_RNA (1)...(19): siRNA sense strand
ugcgauaaguuuaagcaga

SEQ ID NO: 2401036 - RNA, 19 nt, Homo sapiens
  misc_RNA (1)...(19): siRNA sense strand
guuuaagcagauaaccaaa

SEQ ID NO: 2401037 - RNA, 19 nt, Homo sapiens
  misc_RNA (1)...(19): siRNA sense strand
aaaugaaacugguggcaca

SEQ ID NO: 2401038 - RNA, 19 nt, Homo sapiens
  misc_RNA (1)...(19): siRNA sense strand
gcacagaaggugaucgaca

SEQ ID NO: 2401039 - RNA, 19 nt, Homo sapiens
  misc_RNA (1)...(19): siRNA sense strand
ccacaaagaaagagggguu

SEQ ID NO: 2401040 - RNA, 19 nt, Homo sapiens
  misc_RNA (1)...(19): siRNA sense strand
gagcacuacaggagagcau

SEQ ID NO: 2401041 - RNA, 19 nt, Homo sapiens
  misc_RNA (1)...(19): siRNA sense strand
gugagguggcagaggacau

SEQ ID NO: 2401042 - RNA, 19 nt, Homo sapiens
  misc_RNA (1)...(19): siRNA sense strand
gggcagcaucuggaggaaa

SEQ ID NO: 2401043 - RNA, 19 nt, Homo sapiens
  misc_RNA (1)...(19): siRNA sense strand
ccuggaacagucugggcaa

SEQ ID NO: 2401044 - RNA, 19 nt, Homo sapiens
  misc_RNA (1)...(19): siRNA sense strand
uggagcagcuggagccuga

SEQ ID NO: 2401045 - RNA, 19 nt, Homo sapiens
  misc_RNA (1)...(19): siRNA sense strand
ugcagagccuggagagcau

SEQ ID NO: 2401046 - RNA, 19 nt, Homo sapiens
  misc_RNA (1)...(19): siRNA sense strand
gaucagaugcugcgggaca

SEQ ID NO: 2401047 - RNA, 19 nt, Homo sapiens
  misc_RNA (1)...(19): siRNA sense strand
cggaggagauacagaggca

SEQ ID NO: 2401048 - RNA, 19 nt, Homo sapiens
  misc_RNA (1)...(19): siRNA sense strand
gggagaugacgcugaggau

SEQ ID NO: 2401049 - RNA, 19 nt, Homo sapiens
  misc_RNA (1)...(19): siRNA sense strand
gugcagagcuggaaggagg

SEQ ID NO: 2401050 - RNA, 19 nt, Homo sapiens
  misc_RNA (1)...(19): siRNA sense strand
ggcaggauggagagcgaau

SEQ ID NO: 2401051 - RNA, 19 nt, Homo sapiens
  misc_RNA (1)...(19): siRNA sense strand
gcccaaaacugaagcacca

SEQ ID NO: 2401052 - RNA, 19 nt, Homo sapiens
  misc_RNA (1)...(19): siRNA sense strand
ccaccuuaacgcaggacau

SEQ ID NO: 2401053 - RNA, 19 nt, Homo sapiens
  misc_RNA (1)...(19): siRNA sense strand
ggguaaaagcaccaccuua

SEQ ID NO: 2401054 - RNA, 19 nt, Homo sapiens
  misc_RNA (1)...(19): siRNA sense strand
acgcaggacaugagcacca

SEQ ID NO: 2401055 - RNA, 19 nt, Homo sapiens
  misc_RNA (1)...(19): siRNA sense strand
ccaucagggcgcugcaaca

SEQ ID NO: 2401056 - RNA, 19 nt, Homo sapiens
  misc_RNA (1)...(19): siRNA sense strand
gugaacgaccgcagugaca

SEQ ID NO: 2401057 - RNA, 19 nt, Homo sapiens
  misc_RNA (1)...(19): siRNA sense strand
aagcaagucccuuagccaa

SEQ ID NO: 2401058 - RNA, 19 nt, Homo sapiens
  misc_RNA (1)...(19): siRNA sense strand
gaucagaugcugcgggaca

SEQ ID NO: 2401059 - RNA, 19 nt, Homo sapiens
  misc_RNA (1)...(19): siRNA sense strand
cggaggagauacagaggca

SEQ ID NO: 2401060 - RNA, 19 nt, Homo sapiens
  misc_RNA (1)...(19): siRNA sense strand
gggagaugacgcugaggau

SEQ ID NO: 2401061 - RNA, 19 nt, Homo sapiens
  misc_RNA (1)...(19): siRNA sense strand
gugcagagcuggaaggagg

SEQ ID NO: 2401062 - RNA, 19 nt, Homo sapiens
  misc_RNA (1)...(19): siRNA sense strand
ggcaggauggagagcgaau

SEQ ID NO: 2401063 - RNA, 19 nt, Homo sapiens
  misc_RNA (1)...(19): siRNA sense strand
gcccaaaacugaagcacca

SEQ ID NO: 2401064 - RNA, 19 nt, Homo sapiens
  misc_RNA (1)...(19): siRNA sense strand
ccaccuuaacgcaggacau

SEQ ID NO: 2401065 - RNA, 19 nt, Homo sapiens
  misc_RNA (1)...(19): siRNA sense strand
ggguaaaagcaccaccuua

SEQ ID NO: 2401066 - RNA, 19 nt, Homo sapiens
  misc_RNA (1)...(19): siRNA sense strand
acgcaggacaugagcacca

SEQ ID NO: 2401067 - RNA, 19 nt, Homo sapiens
  misc_RNA (1)...(19): siRNA sense strand
ccaucagggcgcugcaaca

SEQ ID NO: 2401068 - RNA, 19 nt, Homo sapiens
  misc_RNA (1)...(19): siRNA sense strand
gugaacgaccgcagugaca

SEQ ID NO: 2401069 - RNA, 19 nt, Homo sapiens
  misc_RNA (1)...(19): siRNA sense strand
aagcaagucccuuagccaa

SEQ ID NO: 2401070 - RNA, 19 nt, Homo sapiens
  misc_RNA (1)...(19): siRNA sense strand
caguaaagugggaggaaau

SEQ ID NO: 2401071 - RNA, 19 nt, Homo sapiens
  misc_RNA (1)...(19): siRNA sense strand
caauaaggaucuaggugga

SEQ ID NO: 2401072 - RNA, 19 nt, Homo sapiens
  misc_RNA (1)...(19): siRNA sense strand
agucaaacaaggaagaaaa

SEQ ID NO: 2401073 - RNA, 19 nt, Homo sapiens
  misc_RNA (1)...(19): siRNA sense strand
acaugaaagaaaugggaga

SEQ ID NO: 2401074 - RNA, 19 nt, Homo sapiens
  misc_RNA (1)...(19): siRNA sense strand
uguuauaugcugugaccaa

SEQ ID NO: 2401075 - RNA, 19 nt, Homo sapiens
  misc_RNA (1)...(19): siRNA sense strand
gagucaaacaaggaagaaa

SEQ ID NO: 2401076 - RNA, 19 nt, Homo sapiens
  misc_RNA (1)...(19): siRNA sense strand
gauacaaaugauugagcuu

SEQ ID NO: 2401077 - RNA, 19 nt, Homo sapiens
  misc_RNA (1)...(19): siRNA sense strand
cgucagaagaugggacauu

SEQ ID NO: 2401078 - RNA, 19 nt, Homo sapiens
  misc_RNA (1)...(19): siRNA sense strand
ccaucaaauuuucgagauu

SEQ ID NO: 2401079 - RNA, 19 nt, Homo sapiens
  misc_RNA (1)...(19): siRNA sense strand
acuagaaugcuuugaccaa

SEQ ID NO: 2401080 - RNA, 19 nt, Homo sapiens
  misc_RNA (1)...(19): siRNA sense strand
ggacaaugaccuuaaaaca

SEQ ID NO: 2401081 - RNA, 19 nt, Homo sapiens
  misc_RNA (1)...(19): siRNA sense strand
cuucaagugcugaggcuga

SEQ ID NO: 2401082 - RNA, 19 nt, Homo sapiens
  misc_RNA (1)...(19): siRNA sense strand
acagcggacaugaaagaaa

SEQ ID NO: 2401083 - RNA, 19 nt, Homo sapiens
  misc_RNA (1)...(19): siRNA sense strand
ggauauuagccuucgacca

SEQ ID NO: 2401084 - RNA, 19 nt, Homo sapiens
  misc_RNA (1)...(19): siRNA sense strand
caugaaagaaaugggagaa

SEQ ID NO: 2401085 - RNA, 19 nt, Homo sapiens
  misc_RNA (1)...(19): siRNA sense strand
gaacaguauugcucaggga

SEQ ID NO: 2401086 - RNA, 19 nt, Homo sapiens
  misc_RNA (1)...(19): siRNA sense strand
cugaacuugaagagcuaaa

SEQ ID NO: 2401087 - RNA, 19 nt, Homo sapiens
  misc_RNA (1)...(19): siRNA sense strand
uccugaacuugaagagcua

SEQ ID NO: 2401088 - RNA, 19 nt, Homo sapiens
  misc_RNA (1)...(19): siRNA sense strand
cugcagaagcugggcaaaa

SEQ ID NO: 2401089 - RNA, 19 nt, Homo sapiens
  misc_RNA (1)...(19): siRNA sense strand
gauuaacaacagcggacau

SEQ ID NO: 2401090 - RNA, 19 nt, Homo sapiens
  misc_RNA (1)...(19): siRNA sense strand
caaacaaggaagaaaacuu

SEQ ID NO: 2401091 - RNA, 19 nt, Homo sapiens
  misc_RNA (1)...(19): siRNA sense strand
gcugaggaaauuagaucuu

SEQ ID NO: 2401092 - RNA, 19 nt, Homo sapiens
  misc_RNA (1)...(19): siRNA sense strand
cucaguuggucaugcuaaa

SEQ ID NO: 2401093 - RNA, 19 nt, Homo sapiens
  misc_RNA (1)...(19): siRNA sense strand
ggacaugaaagaaauggga

SEQ ID NO: 2401094 - RNA, 19 nt, Homo sapiens
  misc_RNA (1)...(19): siRNA sense strand
acaguauugcucagggauu

SEQ ID NO: 2401095 - RNA, 19 nt, Homo sapiens
  misc_RNA (1)...(19): siRNA sense strand
cuuuggagagugagacuuu

SEQ ID NO: 2401096 - RNA, 19 nt, Homo sapiens
  misc_RNA (1)...(19): siRNA sense strand
aggaaugaaaagauggauu

SEQ ID NO: 2401097 - RNA, 19 nt, Homo sapiens
  misc_RNA (1)...(19): siRNA sense strand
ucagaaauggaauggagau

SEQ ID NO: 2401098 - RNA, 19 nt, Homo sapiens
  misc_RNA (1)...(19): siRNA sense strand
uugggugagcugaggaaau

SEQ ID NO: 2401099 - RNA, 19 nt, Homo sapiens
  misc_RNA (1)...(19): siRNA sense strand
gcucaguuggucaugcuaa

SEQ ID NO: 2401100 - RNA, 19 nt, Homo sapiens
  misc_RNA (1)...(19): siRNA sense strand
gacaaugaccuuaaaacaa

SEQ ID NO: 2401101 - RNA, 19 nt, Homo sapiens
  misc_RNA (1)...(19): siRNA sense strand
aggagaucuuggagcagaa

SEQ ID NO: 2401102 - RNA, 19 nt, Homo sapiens
  misc_RNA (1)...(19): siRNA sense strand
caguguuaaccgaaauaaa

SEQ ID NO: 2401103 - RNA, 19 nt, Homo sapiens
  misc_RNA (1)...(19): siRNA sense strand
ggguacagcucauggcagu

SEQ ID NO: 2401104 - RNA, 19 nt, Homo sapiens
  misc_RNA (1)...(19): siRNA sense strand
cagucagauaugaacaaua

SEQ ID NO: 2401105 - RNA, 19 nt, Homo sapiens
  misc_RNA (1)...(19): siRNA sense strand
uguaguuggagcaggaaau

SEQ ID NO: 2401106 - RNA, 19 nt, Homo sapiens
  misc_RNA (1)...(19): siRNA sense strand
gaagcaaaacguuggggua

SEQ ID NO: 2401107 - RNA, 19 nt, Homo sapiens
  misc_RNA (1)...(19): siRNA sense strand
ugaagaauguauuugcaga

SEQ ID NO: 2401108 - RNA, 19 nt, Homo sapiens
  misc_RNA (1)...(19): siRNA sense strand
acacaauagaaaagagcuu

SEQ ID NO: 2401109 - RNA, 19 nt, Homo sapiens
  misc_RNA (1)...(19): siRNA sense strand
ccguauggcccaaucaaca

SEQ ID NO: 2401110 - RNA, 19 nt, Homo sapiens
  misc_RNA (1)...(19): siRNA sense strand
cuacuaugaauuuaggaga

SEQ ID NO: 2401111 - RNA, 19 nt, Homo sapiens
  misc_RNA (1)...(19): siRNA sense strand
ucuuauuggucaaaaggaa

SEQ ID NO: 2401112 - RNA, 19 nt, Homo sapiens
  misc_RNA (1)...(19): siRNA sense strand
uauuguaguuggagcagga

SEQ ID NO: 2401113 - RNA, 19 nt, Homo sapiens
  misc_RNA (1)...(19): siRNA sense strand
cuauauuguaguuggagca

SEQ ID NO: 2401114 - RNA, 19 nt, Homo sapiens
  misc_RNA (1)...(19): siRNA sense strand
aggagagggcagugagaga

SEQ ID NO: 2401115 - RNA, 19 nt, Homo sapiens
  misc_RNA (1)...(19): siRNA sense strand
gggcagugagagauaggaa

SEQ ID NO: 2401116 - RNA, 19 nt, Homo sapiens
  misc_RNA (1)...(19): siRNA sense strand
gcuacguuugcgagaggaa

SEQ ID NO: 2401117 - RNA, 19 nt, Homo sapiens
  misc_RNA (1)...(19): siRNA sense strand
caaaguauugcuauggaga

SEQ ID NO: 2401118 - RNA, 19 nt, Homo sapiens
  misc_RNA (1)...(19): siRNA sense strand
gcaacuccauucaagggaa

SEQ ID NO: 2401119 - RNA, 19 nt, Homo sapiens
  misc_RNA (1)...(19): siRNA sense strand
ccuccagguucaugaccau

SEQ ID NO: 2401120 - RNA, 19 nt, Homo sapiens
  misc_RNA (1)...(19): siRNA sense strand
aagcaaaucaggaagaaaa

SEQ ID NO: 2401121 - RNA, 19 nt, Homo sapiens
  misc_RNA (1)...(19): siRNA sense strand
gcaaagcaaaucaggaaga

SEQ ID NO: 2401122 - RNA, 19 nt, Homo sapiens
  misc_RNA (1)...(19): siRNA sense strand
cucacaaagaggagagauu

SEQ ID NO: 2401123 - RNA, 19 nt, Homo sapiens
  misc_RNA (1)...(19): siRNA sense strand
ccgaauugcuacagaccca

SEQ ID NO: 2401124 - RNA, 19 nt, Homo sapiens
  misc_RNA (1)...(19): siRNA sense strand
ggaccgaguuaucugggaa

SEQ ID NO: 2401125 - RNA, 19 nt, Homo sapiens
  misc_RNA (1)...(19): siRNA sense strand
uuggacaccaugagagaaa

SEQ ID NO: 2401126 - RNA, 19 nt, Homo sapiens
  misc_RNA (1)...(19): siRNA sense strand
ccaauaaagaagaauggau

SEQ ID NO: 2401127 - RNA, 19 nt, Homo sapiens
  misc_RNA (1)...(19): siRNA sense strand
gaagaaaaguggagguuag

SEQ ID NO: 2401128 - RNA, 19 nt, Homo sapiens
  misc_RNA (1)...(19): siRNA sense strand
uuuacaaggcugugugcaa

SEQ ID NO: 2401129 - RNA, 19 nt, Homo sapiens
  misc_RNA (1)...(19): siRNA sense strand
ugaaugucugugugggaaa

SEQ ID NO: 2401130 - RNA, 19 nt, Homo sapiens
  misc_RNA (1)...(19): siRNA sense strand
ggguuucagacuugggaau

SEQ ID NO: 2401131 - RNA, 19 nt, Homo sapiens
  misc_RNA (1)...(19): siRNA sense strand
augaaacacagguggaaga

SEQ ID NO: 2401132 - RNA, 19 nt, Homo sapiens
  misc_RNA (1)...(19): siRNA sense strand
gguacagaacccugguauu

SEQ ID NO: 2401133 - RNA, 19 nt, Homo sapiens
  misc_RNA (1)...(19): siRNA sense strand
caauaaagaagaauggauc

SEQ ID NO: 2401134 - RNA, 19 nt, Homo sapiens
  misc_RNA (1)...(19): siRNA sense strand
cuggaugguauauggacaa

SEQ ID NO: 2401135 - RNA, 19 nt, Homo sapiens
  misc_RNA (1)...(19): siRNA sense strand
ggacaccaugagagaaaca

SEQ ID NO: 2401136 - RNA, 19 nt, Homo sapiens
  misc_RNA (1)...(19): siRNA sense strand
gguuucagacuugggaaua

SEQ ID NO: 2401137 - RNA, 19 nt, Homo sapiens
  misc_RNA (1)...(19): siRNA sense strand
acuuuguguuucaacgaua

SEQ ID NO: 2401138 - RNA, 19 nt, Homo sapiens
  misc_RNA (1)...(19): siRNA sense strand
guuucagacuugggaauau

SEQ ID NO: 2401139 - RNA, 19 nt, Homo sapiens
  misc_RNA (1)...(19): siRNA sense strand
ugggaacaaagcaggacaa

SEQ ID NO: 2401140 - RNA, 19 nt, Homo sapiens
  misc_RNA (1)...(19): siRNA sense strand
cggaaagcaaagcaaauca

SEQ ID NO: 2401141 - RNA, 19 nt, Homo sapiens
  misc_RNA (1)...(19): siRNA sense strand
ccagaaucuagaagagcca

SEQ ID NO: 2401142 - RNA, 19 nt, Homo sapiens
  misc_RNA (1)...(19): siRNA sense strand
caucagaguucagagguca

SEQ ID NO: 2401143 - RNA, 19 nt, Homo sapiens
  misc_RNA (1)...(19): siRNA sense strand
cccggaaagcaaagcaaau

SEQ ID NO: 2401144 - RNA, 19 nt, Homo sapiens
  misc_RNA (1)...(19): siRNA sense strand
caaagcaaaucaggaagaa

SEQ ID NO: 2401145 - RNA, 19 nt, Homo sapiens
  misc_RNA (1)...(19): siRNA sense strand
ggaagaaaaguggagguua

SEQ ID NO: 2401146 - RNA, 19 nt, Homo sapiens
  misc_RNA (1)...(19): siRNA sense strand
aaagcaaaucaggaagaaa

SEQ ID NO: 2401147 - RNA, 19 nt, Homo sapiens
  misc_RNA (1)...(19): siRNA sense strand
ccgaguuaucugggaacaa

SEQ ID NO: 2401148 - RNA, 19 nt, Homo sapiens
  misc_RNA (1)...(19): siRNA sense strand
ggcuggagagugagggaaa

SEQ ID NO: 2401149 - RNA, 19 nt, Homo sapiens
  misc_RNA (1)...(19): siRNA sense strand
cuucagagcaauucggcua

SEQ ID NO: 2401150 - RNA, 19 nt, Homo sapiens
  misc_RNA (1)...(19): siRNA sense strand
aggagaagggcgagggagu

SEQ ID NO: 2401151 - RNA, 19 nt, Homo sapiens
  misc_RNA (1)...(19): siRNA sense strand
gugcuaauccauaaggaca

SEQ ID NO: 2401152 - RNA, 19 nt, Homo sapiens
  misc_RNA (1)...(19): siRNA sense strand
cagaggugguggaggugga

SEQ ID NO: 2401153 - RNA, 19 nt, Homo sapiens
  misc_RNA (1)...(19): siRNA sense strand
gggcgagggaguaaagcca

SEQ ID NO: 2401154 - RNA, 19 nt, Homo sapiens
  misc_RNA (1)...(19): siRNA sense strand
ccucacucgccaaggaaca

SEQ ID NO: 2401155 - RNA, 19 nt, Homo sapiens
  misc_RNA (1)...(19): siRNA sense strand
cugaguguggcaagagcua

SEQ ID NO: 2401156 - RNA, 19 nt, Homo sapiens
  misc_RNA (1)...(19): siRNA sense strand
aggauggcgacguggauga

SEQ ID NO: 2401157 - RNA, 19 nt, Homo sapiens
  misc_RNA (1)...(19): siRNA sense strand
ggacacacacagagaggag

SEQ ID NO: 2401158 - RNA, 19 nt, Homo sapiens
  misc_RNA (1)...(19): siRNA sense strand
ccuaauggagcuagcccaa

SEQ ID NO: 2401159 - RNA, 19 nt, Homo sapiens
  misc_RNA (1)...(19): siRNA sense strand
aggaggaagaagagggaag

SEQ ID NO: 2401160 - RNA, 19 nt, Homo sapiens
  misc_RNA (1)...(19): siRNA sense strand
aggaagaagagggaagaga

SEQ ID NO: 2401161 - RNA, 19 nt, Homo sapiens
  misc_RNA (1)...(19): siRNA sense strand
ggcugaucuccgagggcua

SEQ ID NO: 2401162 - RNA, 19 nt, Homo sapiens
  misc_RNA (1)...(19): siRNA sense strand
cuggugaggaggaagaaga

SEQ ID NO: 2401163 - RNA, 19 nt, Homo sapiens
  misc_RNA (1)...(19): siRNA sense strand
ccauggaaccugagagcug

SEQ ID NO: 2401164 - RNA, 19 nt, Homo sapiens
  misc_RNA (1)...(19): siRNA sense strand
aggcuggugaggaggaaga

SEQ ID NO: 2401165 - RNA, 19 nt, Homo sapiens
  misc_RNA (1)...(19): siRNA sense strand
agugagaggccaugaggua

SEQ ID NO: 2401166 - RNA, 19 nt, Homo sapiens
  misc_RNA (1)...(19): siRNA sense strand
cuguggauucugugggaaa

SEQ ID NO: 2401167 - RNA, 19 nt, Homo sapiens
  misc_RNA (1)...(19): siRNA sense strand
augaagaagcuacaggaaa

SEQ ID NO: 2401168 - RNA, 19 nt, Homo sapiens
  misc_RNA (1)...(19): siRNA sense strand
acucaaagccuucguuaau

SEQ ID NO: 2401169 - RNA, 19 nt, Homo sapiens
  misc_RNA (1)...(19): siRNA sense strand
cguuaauugacuacaggaa

SEQ ID NO: 2401170 - RNA, 19 nt, Homo sapiens
  misc_RNA (1)...(19): siRNA sense strand
gaagauuuacugagggcuu

SEQ ID NO: 2401171 - RNA, 19 nt, Homo sapiens
  misc_RNA (1)...(19): siRNA sense strand
aagcuuugccuaaggaaau

SEQ ID NO: 2401172 - RNA, 19 nt, Homo sapiens
  misc_RNA (1)...(19): siRNA sense strand
guggagaccugauggcuga

SEQ ID NO: 2401173 - RNA, 19 nt, Homo sapiens
  misc_RNA (1)...(19): siRNA sense strand
uuacagaagaaaaggcuaa

SEQ ID NO: 2401174 - RNA, 19 nt, Homo sapiens
  misc_RNA (1)...(19): siRNA sense strand
agguaacaguauugacuca

SEQ ID NO: 2401175 - RNA, 19 nt, Homo sapiens
  misc_RNA (1)...(19): siRNA sense strand
aagaauucaccaugaucaa

SEQ ID NO: 2401176 - RNA, 19 nt, Homo sapiens
  misc_RNA (1)...(19): siRNA sense strand
ggcuuaaugucaaggucau

SEQ ID NO: 2401177 - RNA, 19 nt, Homo sapiens
  misc_RNA (1)...(19): siRNA sense strand
cuagaagagcucauaguga

SEQ ID NO: 2401178 - RNA, 19 nt, Homo sapiens
  misc_RNA (1)...(19): siRNA sense strand
cuauagaugugauuggguu

SEQ ID NO: 2401179 - RNA, 19 nt, Homo sapiens
  misc_RNA (1)...(19): siRNA sense strand
uguugaaauaagaggaacu

SEQ ID NO: 2401180 - RNA, 19 nt, Homo sapiens
  misc_RNA (1)...(19): siRNA sense strand
caugaaggccaaaggagca

SEQ ID NO: 2401181 - RNA, 19 nt, Homo sapiens
  misc_RNA (1)...(19): siRNA sense strand
cauugaaauuugagguggu

SEQ ID NO: 2401182 - RNA, 19 nt, Homo sapiens
  misc_RNA (1)...(19): siRNA sense strand
aggacagaacagaagaaaa

SEQ ID NO: 2401183 - RNA, 19 nt, Homo sapiens
  misc_RNA (1)...(19): siRNA sense strand
aauuugaggugguccauau

SEQ ID NO: 2401184 - RNA, 19 nt, Homo sapiens
  misc_RNA (1)...(19): siRNA sense strand
uugccuaaggaaauggaaa

SEQ ID NO: 2401185 - RNA, 19 nt, Homo sapiens
  misc_RNA (1)...(19): siRNA sense strand
ccaaaggagcagcuguaga

SEQ ID NO: 2401186 - RNA, 19 nt, Homo sapiens
  misc_RNA (1)...(19): siRNA sense strand
aagauagaaaagagggaau

SEQ ID NO: 2401187 - RNA, 19 nt, Homo sapiens
  misc_RNA (1)...(19): siRNA sense strand
ggccaugagguaacaguau

SEQ ID NO: 2401188 - RNA, 19 nt, Homo sapiens
  misc_RNA (1)...(19): siRNA sense strand
aaaugaugugugagagcuu

SEQ ID NO: 2401189 - RNA, 19 nt, Homo sapiens
  misc_RNA (1)...(19): siRNA sense strand
agauagaaaagagggaaua

SEQ ID NO: 2401190 - RNA, 19 nt, Homo sapiens
  misc_RNA (1)...(19): siRNA sense strand
uguccagaguucaggggaa

SEQ ID NO: 2401191 - RNA, 19 nt, Homo sapiens
  misc_RNA (1)...(19): siRNA sense strand
ugccuaaggaaauggaaaa

SEQ ID NO: 2401192 - RNA, 19 nt, Homo sapiens
  misc_RNA (1)...(19): siRNA sense strand
gugagaggccaugagguaa

SEQ ID NO: 2401193 - RNA, 19 nt, Homo sapiens
  misc_RNA (1)...(19): siRNA sense strand
aaaccaacuacgauguaau

SEQ ID NO: 2401194 - RNA, 19 nt, Homo sapiens
  misc_RNA (1)...(19): siRNA sense strand
ccuauguaccugugccuau

SEQ ID NO: 2401195 - RNA, 19 nt, Homo sapiens
  misc_RNA (1)...(19): siRNA sense strand
aaagcuuugccuaaggaaa

SEQ ID NO: 2401196 - RNA, 19 nt, Homo sapiens
  misc_RNA (1)...(19): siRNA sense strand
agaagguguuauggaggua

SEQ ID NO: 2401197 - RNA, 19 nt, Homo sapiens
  misc_RNA (1)...(19): siRNA sense strand
cacucaaagccuucguuaa

SEQ ID NO: 2401198 - RNA, 19 nt, Homo sapiens
  misc_RNA (1)...(19): siRNA sense strand
gaggcaauauggagcgaag

SEQ ID NO: 2401199 - RNA, 19 nt, Homo sapiens
  misc_RNA (1)...(19): siRNA sense strand
uaucauugcuucagcccuu

SEQ ID NO: 2401200 - RNA, 19 nt, Homo sapiens
  misc_RNA (1)...(19): siRNA sense strand
agggaaaggcaaagagcaa

SEQ ID NO: 2401201 - RNA, 19 nt, Homo sapiens
  misc_RNA (1)...(19): siRNA sense strand
gguaauuaucagcaggaaa

SEQ ID NO: 2401202 - RNA, 19 nt, Homo sapiens
  misc_RNA (1)...(19): siRNA sense strand
aauacuacagcuagagaaa

SEQ ID NO: 2401203 - RNA, 19 nt, Homo sapiens
  misc_RNA (1)...(19): siRNA sense strand
uggccaaguuaauggaaaa

SEQ ID NO: 2401204 - RNA, 19 nt, Homo sapiens
  misc_RNA (1)...(19): siRNA sense strand
uuacuaagggaaaggcaaa

SEQ ID NO: 2401205 - RNA, 19 nt, Homo sapiens
  misc_RNA (1)...(19): siRNA sense strand
ggaaacaucugaaggguug

SEQ ID NO: 2401206 - RNA, 19 nt, Homo sapiens
  misc_RNA (1)...(19): siRNA sense strand
aguagaacgaucagacaau

SEQ ID NO: 2401207 - RNA, 19 nt, Homo sapiens
  misc_RNA (1)...(19): siRNA sense strand
cccuuuggcuauugagaau

SEQ ID NO: 2401208 - RNA, 19 nt, Homo sapiens
  misc_RNA (1)...(19): siRNA sense strand
ggauguugaaauacggauu

SEQ ID NO: 2401209 - RNA, 19 nt, Homo sapiens
  misc_RNA (1)...(19): siRNA sense strand
gaaguuagucaguggacca

SEQ ID NO: 2401210 - RNA, 19 nt, Homo sapiens
  misc_RNA (1)...(19): siRNA sense strand
aggcaaagagcaaggucca

SEQ ID NO: 2401211 - RNA, 19 nt, Homo sapiens
  misc_RNA (1)...(19): siRNA sense strand
guguagaagagcaaagcga

SEQ ID NO: 2401212 - RNA, 19 nt, Homo sapiens
  misc_RNA (1)...(19): siRNA sense strand
agucaguggaccaggcuau

SEQ ID NO: 2401213 - RNA, 19 nt, Homo sapiens
  misc_RNA (1)...(19): siRNA sense strand
auuuauaggaggaccaaga

SEQ ID NO: 2401214 - RNA, 19 nt, Homo sapiens
  misc_RNA (1)...(19): siRNA sense strand
gauaaacuccgcaggcaga

SEQ ID NO: 2401215 - RNA, 19 nt, Homo sapiens
  misc_RNA (1)...(19): siRNA sense strand
cagcccaaaggaagguaaa

SEQ ID NO: 2401216 - RNA, 19 nt, Homo sapiens
  misc_RNA (1)...(19): siRNA sense strand
caggaagugccaggaguaa

SEQ ID NO: 2401217 - RNA, 19 nt, Homo sapiens
  misc_RNA (1)...(19): siRNA sense strand
augugaagucccaggugua

SEQ ID NO: 2401218 - RNA, 19 nt, Homo sapiens
  misc_RNA (1)...(19): siRNA sense strand
gugaucgagcuuugaggaa

SEQ ID NO: 2401219 - RNA, 19 nt, Homo sapiens
  misc_RNA (1)...(19): siRNA sense strand
agaggugaguagagauagu

SEQ ID NO: 2401220 - RNA, 19 nt, Homo sapiens
  misc_RNA (1)...(19): siRNA sense strand
agaaggaacuuuuggaacu

SEQ ID NO: 2401221 - RNA, 19 nt, Homo sapiens
  misc_RNA (1)...(19): siRNA sense strand
aggaagugccaggaguaaa

SEQ ID NO: 2401222 - RNA, 19 nt, Homo sapiens
  misc_RNA (1)...(19): siRNA sense strand
cuguuagagugcauaauga

SEQ ID NO: 2401223 - RNA, 19 nt, Homo sapiens
  misc_RNA (1)...(19): siRNA sense strand
aggaaacaucugaaggguu

SEQ ID NO: 2401224 - RNA, 19 nt, Homo sapiens
  misc_RNA (1)...(19): siRNA sense strand
guagaagagcaaagcgauc

SEQ ID NO: 2401225 - RNA, 19 nt, Homo sapiens
  misc_RNA (1)...(19): siRNA sense strand
ucacaucagaaaagcaaaa

SEQ ID NO: 2401226 - RNA, 19 nt, Homo sapiens
  misc_RNA (1)...(19): siRNA sense strand
uaguagaacgaucagacaa

SEQ ID NO: 2401227 - RNA, 19 nt, Homo sapiens
  misc_RNA (1)...(19): siRNA sense strand
ggagcauguguuugcagaa

SEQ ID NO: 2401228 - RNA, 19 nt, Homo sapiens
  misc_RNA (1)...(19): siRNA sense strand
ugguaacaaaucaggccaa

SEQ ID NO: 2401229 - RNA, 19 nt, Homo sapiens
  misc_RNA (1)...(19): siRNA sense strand
cugcaguaguagaacgauc

SEQ ID NO: 2401230 - RNA, 19 nt, Homo sapiens
  misc_RNA (1)...(19): siRNA sense strand
guaccagaggauucaggaa

SEQ ID NO: 2401231 - RNA, 19 nt, Homo sapiens
  misc_RNA (1)...(19): siRNA sense strand
gcucacaguacaggaagaa

SEQ ID NO: 2401232 - RNA, 19 nt, Homo sapiens
  misc_RNA (1)...(19): siRNA sense strand
ccuagaaauugaaaggcaa

SEQ ID NO: 2401233 - RNA, 19 nt, Homo sapiens
  misc_RNA (1)...(19): siRNA sense strand
ucgaagacgaagagagauu

SEQ ID NO: 2401234 - RNA, 19 nt, Homo sapiens
  misc_RNA (1)...(19): siRNA sense strand
aagaggaagauaugagaaa

SEQ ID NO: 2401235 - RNA, 19 nt, Homo sapiens
  misc_RNA (1)...(19): siRNA sense strand
gagagauugcagagagaga

SEQ ID NO: 2401236 - RNA, 19 nt, Homo sapiens
  misc_RNA (1)...(19): siRNA sense strand
gagagagcgucgagagcga

SEQ ID NO: 2401237 - RNA, 19 nt, Homo sapiens
  misc_RNA (1)...(19): siRNA sense strand
gcuuacagagagagagaga

SEQ ID NO: 2401238 - RNA, 19 nt, Homo sapiens
  misc_RNA (1)...(19): siRNA sense strand
gauccuuacuggagcgaga

SEQ ID NO: 2401239 - RNA, 19 nt, Homo sapiens
  misc_RNA (1)...(19): siRNA sense strand
cuagaaauugaaaggcaaa

SEQ ID NO: 2401240 - RNA, 19 nt, Homo sapiens
  misc_RNA (1)...(19): siRNA sense strand
gggaagaacgggaacgcuu

SEQ ID NO: 2401241 - RNA, 19 nt, Homo sapiens
  misc_RNA (1)...(19): siRNA sense strand
gggaacgcuuacagagaga

SEQ ID NO: 2401242 - RNA, 19 nt, Homo sapiens
  misc_RNA (1)...(19): siRNA sense strand
aagagagauugcagagaga

SEQ ID NO: 2401243 - RNA, 19 nt, Homo sapiens
  misc_RNA (1)...(19): siRNA sense strand
ggucaaagugaggggaaaa

SEQ ID NO: 2401244 - RNA, 19 nt, Homo sapiens
  misc_RNA (1)...(19): siRNA sense strand
uugaaaagaugaaggaaca

SEQ ID NO: 2401245 - RNA, 19 nt, Homo sapiens
  misc_RNA (1)...(19): siRNA sense strand
ugagaaaauucauggaaga

SEQ ID NO: 2401246 - RNA, 19 nt, Homo sapiens
  misc_RNA (1)...(19): siRNA sense strand
cuuacuggagcgagaauaa

SEQ ID NO: 2401247 - RNA, 19 nt, Homo sapiens
  misc_RNA (1)...(19): siRNA sense strand
gaggaagauaugagaaaau

SEQ ID NO: 2401248 - RNA, 19 nt, Homo sapiens
  misc_RNA (1)...(19): siRNA sense strand
aaggaaaaggagagagcua

SEQ ID NO: 2401249 - RNA, 19 nt, Homo sapiens
  misc_RNA (1)...(19): siRNA sense strand
agaccgaggagguggauca

SEQ ID NO: 2401250 - RNA, 19 nt, Homo sapiens
  misc_RNA (1)...(19): siRNA sense strand
auccaagcuucgaaagaua

SEQ ID NO: 2401251 - RNA, 19 nt, Homo sapiens
  misc_RNA (1)...(19): siRNA sense strand
uguacaaaucaguggcaau

SEQ ID NO: 2401252 - RNA, 19 nt, Homo sapiens
  misc_RNA (1)...(19): siRNA sense strand
aauaauucgugaacgggaa

SEQ ID NO: 2401253 - RNA, 19 nt, Homo sapiens
  misc_RNA (1)...(19): siRNA sense strand
ggagagaaguaucagggca

SEQ ID NO: 2401254 - RNA, 19 nt, Homo sapiens
  misc_RNA (1)...(19): siRNA sense strand
cuacagaaggaaagagauc

SEQ ID NO: 2401255 - RNA, 19 nt, Homo sapiens
  misc_RNA (1)...(19): siRNA sense strand
aggaacaaagguugagaga

SEQ ID NO: 2401256 - RNA, 19 nt, Homo sapiens
  misc_RNA (1)...(19): siRNA sense strand
aacuagagagagagagaau

SEQ ID NO: 2401257 - RNA, 19 nt, Homo sapiens
  misc_RNA (1)...(19): siRNA sense strand
agaggaacucagaaggcaa

SEQ ID NO: 2401258 - RNA, 19 nt, Homo sapiens
  misc_RNA (1)...(19): siRNA sense strand
cgccaacagaacagauuua

SEQ ID NO: 2401259 - RNA, 19 nt, Homo sapiens
  misc_RNA (1)...(19): siRNA sense strand
ucauggaagaaguaaggaa

SEQ ID NO: 2401260 - RNA, 19 nt, Homo sapiens
  misc_RNA (1)...(19): siRNA sense strand
acgcuuacagagagagaga

SEQ ID NO: 2401261 - RNA, 19 nt, Homo sapiens
  misc_RNA (1)...(19): siRNA sense strand
agagagagagagaauggaa

SEQ ID NO: 2401262 - RNA, 19 nt, Homo sapiens
  misc_RNA (1)...(19): siRNA sense strand
ggagcgagacgaaaggaga

SEQ ID NO: 2401263 - RNA, 19 nt, Homo sapiens
  misc_RNA (1)...(19): siRNA sense strand
aggaaguggcuccggauuu

SEQ ID NO: 2401264 - RNA, 19 nt, Homo sapiens
  misc_RNA (1)...(19): siRNA sense strand
guaaggaagcugaacggau

SEQ ID NO: 2401265 - RNA, 19 nt, Homo sapiens
  misc_RNA (1)...(19): siRNA sense strand
caucaagaagaggaagaua

SEQ ID NO: 2401266 - RNA, 19 nt, Homo sapiens
  misc_RNA (1)...(19): siRNA sense strand
gagagagaauggaacgcga

SEQ ID NO: 2401267 - RNA, 19 nt, Homo sapiens
  misc_RNA (1)...(19): siRNA sense strand
ccaaacuaaaggagaucau

SEQ ID NO: 2401268 - RNA, 19 nt, Homo sapiens
  misc_RNA (1)...(19): siRNA sense strand
guacgggagcagagaggga

SEQ ID NO: 2401269 - RNA, 19 nt, Homo sapiens
  misc_RNA (1)...(19): siRNA sense strand
agaccaucaagaagaggaa

SEQ ID NO: 2401270 - RNA, 19 nt, Homo sapiens
  misc_RNA (1)...(19): siRNA sense strand
aucaagaagaggaagauau

SEQ ID NO: 2401271 - RNA, 19 nt, Homo sapiens
  misc_RNA (1)...(19): siRNA sense strand
agaugaaggaacaaagguu

SEQ ID NO: 2401272 - RNA, 19 nt, Homo sapiens
  misc_RNA (1)...(19): siRNA sense strand
acgggaaacaagaguugaa

SEQ ID NO: 2401273 - RNA, 19 nt, Homo sapiens
  misc_RNA (1)...(19): siRNA sense strand
acaaagguugagagaacau

SEQ ID NO: 2401274 - RNA, 19 nt, Homo sapiens
  misc_RNA (1)...(19): siRNA sense strand
gacgaaaggagaacgguga

SEQ ID NO: 2401275 - RNA, 19 nt, Homo sapiens
  misc_RNA (1)...(19): siRNA sense strand
gggaaucguagcagcgcuu

SEQ ID NO: 2401276 - RNA, 19 nt, Homo sapiens
  misc_RNA (1)...(19): siRNA sense strand
cacaagcggaccaaggaaa

SEQ ID NO: 2401277 - RNA, 19 nt, Homo sapiens
  misc_RNA (1)...(19): siRNA sense strand
aaaacuagagagagagaga

SEQ ID NO: 2401278 - RNA, 19 nt, Homo sapiens
  misc_RNA (1)...(19): siRNA sense strand
cuucgaaagauaucccaaa

SEQ ID NO: 2401279 - RNA, 19 nt, Homo sapiens
  misc_RNA (1)...(19): siRNA sense strand
aguugaaaggccagaacga

SEQ ID NO: 2401280 - RNA, 19 nt, Homo sapiens
  misc_RNA (1)...(19): siRNA sense strand
gaauggaacgcgaacgcuu

SEQ ID NO: 2401281 - RNA, 19 nt, Homo sapiens
  misc_RNA (1)...(19): siRNA sense strand
uggucaaagugaggggaaa

SEQ ID NO: 2401282 - RNA, 19 nt, Homo sapiens
  misc_RNA (1)...(19): siRNA sense strand
gagagaaguaucagggcac

SEQ ID NO: 2401283 - RNA, 19 nt, Homo sapiens
  misc_RNA (1)...(19): siRNA sense strand
cgaaaggagaacggugauu

SEQ ID NO: 2401284 - RNA, 19 nt, Homo sapiens
  misc_RNA (1)...(19): siRNA sense strand
gacuacagaaggaaagaga

SEQ ID NO: 2401285 - RNA, 19 nt, Homo sapiens
  misc_RNA (1)...(19): siRNA sense strand
augaaggaacaaagguuga

SEQ ID NO: 2401286 - RNA, 19 nt, Homo sapiens
  misc_RNA (1)...(19): siRNA sense strand
gaacgcuuacagagagaga

SEQ ID NO: 2401287 - RNA, 19 nt, Homo sapiens
  misc_RNA (1)...(19): siRNA sense strand
gagaaaauucauggaagaa

SEQ ID NO: 2401288 - RNA, 19 nt, Homo sapiens
  misc_RNA (1)...(19): siRNA sense strand
gcgaacgcuuggaaaggga

SEQ ID NO: 2401289 - RNA, 19 nt, Homo sapiens
  misc_RNA (1)...(19): siRNA sense strand
aaaggagaacggugauuau

SEQ ID NO: 2401290 - RNA, 19 nt, Homo sapiens
  misc_RNA (1)...(19): siRNA sense strand
agagauaaagacuacagaa

SEQ ID NO: 2401291 - RNA, 19 nt, Homo sapiens
  misc_RNA (1)...(19): siRNA sense strand
cauucguauugaacaggaa

SEQ ID NO: 2401292 - RNA, 19 nt, Homo sapiens
  misc_RNA (1)...(19): siRNA sense strand
ugcucgagaaagagaggaa

SEQ ID NO: 2401293 - RNA, 19 nt, Homo sapiens
  misc_RNA (1)...(19): siRNA sense strand
gugccaaauuugaggccaa

SEQ ID NO: 2401294 - RNA, 19 nt, Homo sapiens
  misc_RNA (1)...(19): siRNA sense strand
ugaucauggaggagaacaa

SEQ ID NO: 2401295 - RNA, 19 nt, Homo sapiens
  misc_RNA (1)...(19): siRNA sense strand
aggaacaucugcugggaga

SEQ ID NO: 2401296 - RNA, 19 nt, Homo sapiens
  misc_RNA (1)...(19): siRNA sense strand
aggaggugcuggaggagau

SEQ ID NO: 2401297 - RNA, 19 nt, Homo sapiens
  misc_RNA (1)...(19): siRNA sense strand
agaacaaggaggaggugga

SEQ ID NO: 2401298 - RNA, 19 nt, Homo sapiens
  misc_RNA (1)...(19): siRNA sense strand
cagaagggugagcgaguau

SEQ ID NO: 2401299 - RNA, 19 nt, Homo sapiens
  misc_RNA (1)...(19): siRNA sense strand
cugcagagcuccaggacac

SEQ ID NO: 2401300 - RNA, 19 nt, Homo sapiens
  misc_RNA (1)...(19): siRNA sense strand
aggcagaggcugaggacac

SEQ ID NO: 2401301 - RNA, 19 nt, Homo sapiens
  misc_RNA (1)...(19): siRNA sense strand
ggaaagggaagaagcagca

SEQ ID NO: 2401302 - RNA, 19 nt, Homo sapiens
  misc_RNA (1)...(19): siRNA sense strand
gggaguggaagcacagcaa

SEQ ID NO: 2401303 - RNA, 19 nt, Homo sapiens
  misc_RNA (1)...(19): siRNA sense strand
ggcacguggaugagaucaa

SEQ ID NO: 2401304 - RNA, 19 nt, Homo sapiens
  misc_RNA (1)...(19): siRNA sense strand
acaccaaauugaagaggcu

SEQ ID NO: 2401305 - RNA, 19 nt, Homo sapiens
  misc_RNA (1)...(19): siRNA sense strand
gggaucaauaacaaagaga

SEQ ID NO: 2401306 - RNA, 19 nt, Homo sapiens
  misc_RNA (1)...(19): siRNA sense strand
gggacaagaaggaagcgga

SEQ ID NO: 2401307 - RNA, 19 nt, Homo sapiens
  misc_RNA (1)...(19): siRNA sense strand
gaguuaacccagggaucaa

SEQ ID NO: 2401308 - RNA, 19 nt, Homo sapiens
  misc_RNA (1)...(19): siRNA sense strand
ucaucaaguacgugaagga

SEQ ID NO: 2401309 - RNA, 19 nt, Homo sapiens
  misc_RNA (1)...(19): siRNA sense strand
cucuugacguggaggccaa

SEQ ID NO: 2401310 - RNA, 19 nt, Homo sapiens
  misc_RNA (1)...(19): siRNA sense strand
ucucagagcuccaagccga

SEQ ID NO: 2401311 - RNA, 19 nt, Homo sapiens
  misc_RNA (1)...(19): siRNA sense strand
cuggaggacaugagggcca

SEQ ID NO: 2401312 - RNA, 19 nt, Homo sapiens
  misc_RNA (1)...(19): siRNA sense strand
gggugagcgaguaugguuu

SEQ ID NO: 2401313 - RNA, 19 nt, Homo sapiens
  misc_RNA (1)...(19): siRNA sense strand
aguacacccuggaggacau

SEQ ID NO: 2401314 - RNA, 19 nt, Homo sapiens
  misc_RNA (1)...(19): siRNA sense strand
aagggaagaagcagcagaa

SEQ ID NO: 2401315 - RNA, 19 nt, Homo sapiens
  misc_RNA (1)...(19): siRNA sense strand
uuagcaagguggagcggca

SEQ ID NO: 2401316 - RNA, 19 nt, Homo sapiens
  misc_RNA (1)...(19): siRNA sense strand
cucugaucauggaggagaa

SEQ ID NO: 2401317 - RNA, 19 nt, Homo sapiens
  misc_RNA (1)...(19): siRNA sense strand
auuuagaccuggacgucau

SEQ ID NO: 2401318 - RNA, 19 nt, Homo sapiens
  misc_RNA (1)...(19): siRNA sense strand
aauugaagaggcugcacaa

SEQ ID NO: 2401319 - RNA, 19 nt, Homo sapiens
  misc_RNA (1)...(19): siRNA sense strand
ggaaugaagcauaugguga

SEQ ID NO: 2401320 - RNA, 19 nt, Homo sapiens
  misc_RNA (1)...(19): siRNA sense strand
gagaaaggcuuggagggaa

SEQ ID NO: 2401321 - RNA, 19 nt, Homo sapiens
  misc_RNA (1)...(19): siRNA sense strand
ccaaauauaacucaggcaa

SEQ ID NO: 2401322 - RNA, 19 nt, Homo sapiens
  misc_RNA (1)...(19): siRNA sense strand
acacaaccccagagagaaa

SEQ ID NO: 2401323 - RNA, 19 nt, Homo sapiens
  misc_RNA (1)...(19): siRNA sense strand
agaaaaggaaugaagcaua

SEQ ID NO: 2401324 - RNA, 19 nt, Homo sapiens
  misc_RNA (1)...(19): siRNA sense strand
gucacaagaaaucgagaaa

SEQ ID NO: 2401325 - RNA, 19 nt, Homo sapiens
  misc_RNA (1)...(19): siRNA sense strand
cgacaacaguggugccagu

SEQ ID NO: 2401326 - RNA, 19 nt, Homo sapiens
  misc_RNA (1)...(19): siRNA sense strand
ggaacauauuuacugguga

SEQ ID NO: 2401327 - RNA, 19 nt, Homo sapiens
  misc_RNA (1)...(19): siRNA sense strand
ugacacaaccccagagaga

SEQ ID NO: 2401328 - RNA, 19 nt, Homo sapiens
  misc_RNA (1)...(19): siRNA sense strand
aggcuuggagggaaacaaa

SEQ ID NO: 2401329 - RNA, 19 nt, Homo sapiens
  misc_RNA (1)...(19): siRNA sense strand
agagaaaggcuuggaggga

SEQ ID NO: 2401330 - RNA, 19 nt, Homo sapiens
  misc_RNA (1)...(19): siRNA sense strand
ggacaaaauacaaccagau

SEQ ID NO: 2401331 - RNA, 19 nt, Homo sapiens
  misc_RNA (1)...(19): siRNA sense strand
aaagacaauuugagagccu

SEQ ID NO: 2401332 - RNA, 19 nt, Homo sapiens
  misc_RNA (1)...(19): siRNA sense strand
guaucguggucaagggcua

SEQ ID NO: 2401333 - RNA, 19 nt, Homo sapiens
  misc_RNA (1)...(19): siRNA sense strand
aaggcaaagcccagagaca

SEQ ID NO: 2401334 - RNA, 19 nt, Homo sapiens
  misc_RNA (1)...(19): siRNA sense strand
ggacaaaaguguucgaggu

SEQ ID NO: 2401335 - RNA, 19 nt, Homo sapiens
  misc_RNA (1)...(19): siRNA sense strand
ccugggacccugaggacuu

SEQ ID NO: 2401336 - RNA, 19 nt, Homo sapiens
  misc_RNA (1)...(19): siRNA sense strand
cgugcaaacuggaaaagau

SEQ ID NO: 2401337 - RNA, 19 nt, Homo sapiens
  misc_RNA (1)...(19): siRNA sense strand
gggaauaaauuguaugaca

SEQ ID NO: 2401338 - RNA, 19 nt, Homo sapiens
  misc_RNA (1)...(19): siRNA sense strand
cuucagugagagugggaaa

SEQ ID NO: 2401339 - RNA, 19 nt, Homo sapiens
  misc_RNA (1)...(19): siRNA sense strand
ugagcacauuggagagaaa

SEQ ID NO: 2401340 - RNA, 19 nt, Homo sapiens
  misc_RNA (1)...(19): siRNA sense strand
gugugggauaugugggaaa

SEQ ID NO: 2401341 - RNA, 19 nt, Homo sapiens
  misc_RNA (1)...(19): siRNA sense strand
caggauuacuccagcaaga

SEQ ID NO: 2401342 - RNA, 19 nt, Homo sapiens
  misc_RNA (1)...(19): siRNA sense strand
ccuucuaagcagaguauuu

SEQ ID NO: 2401343 - RNA, 19 nt, Homo sapiens
  misc_RNA (1)...(19): siRNA sense strand
gaacacaucacaagcagaa

SEQ ID NO: 2401344 - RNA, 19 nt, Homo sapiens
  misc_RNA (1)...(19): siRNA sense strand
guggugugaaugugggaaa

SEQ ID NO: 2401345 - RNA, 19 nt, Homo sapiens
  misc_RNA (1)...(19): siRNA sense strand
gguguggaguggaagauga

SEQ ID NO: 2401346 - RNA, 19 nt, Homo sapiens
  misc_RNA (1)...(19): siRNA sense strand
gggaagucaaacagcaaaa

SEQ ID NO: 2401347 - RNA, 19 nt, Homo sapiens
  misc_RNA (1)...(19): siRNA sense strand
gggaaaggccauaugaaug

SEQ ID NO: 2401348 - RNA, 19 nt, Homo sapiens
  misc_RNA (1)...(19): siRNA sense strand
ggaggaugcaugaaacauu

SEQ ID NO: 2401349 - RNA, 19 nt, Homo sapiens
  misc_RNA (1)...(19): siRNA sense strand
aagacguggcugugaaauu

SEQ ID NO: 2401350 - RNA, 19 nt, Homo sapiens
  misc_RNA (1)...(19): siRNA sense strand
ggaauaaauuguaugacag

SEQ ID NO: 2401351 - RNA, 19 nt, Homo sapiens
  misc_RNA (1)...(19): siRNA sense strand
ggggaaaggccauaugaau

SEQ ID NO: 2401352 - RNA, 19 nt, Homo sapiens
  misc_RNA (1)...(19): siRNA sense strand
gggugcagugaaugugaaa

SEQ ID NO: 2401353 - RNA, 19 nt, Homo sapiens
  misc_RNA (1)...(19): siRNA sense strand
ccuucuguguggugugaau

SEQ ID NO: 2401354 - RNA, 19 nt, Homo sapiens
  misc_RNA (1)...(19): siRNA sense strand
gaaauuuacccaggaggaa

SEQ ID NO: 2401355 - RNA, 19 nt, Homo sapiens
  misc_RNA (1)...(19): siRNA sense strand
gugaugugacgcuggagaa

SEQ ID NO: 2401356 - RNA, 19 nt, Homo sapiens
  misc_RNA (1)...(19): siRNA sense strand
accuuauacgugugggaua

SEQ ID NO: 2401357 - RNA, 19 nt, Homo sapiens
  misc_RNA (1)...(19): siRNA sense strand
guaugacaguggaaacuuu

SEQ ID NO: 2401358 - RNA, 19 nt, Homo sapiens
  misc_RNA (1)...(19): siRNA sense strand
cugggaagucaaacagcaa

SEQ ID NO: 2401359 - RNA, 19 nt, Homo sapiens
  misc_RNA (1)...(19): siRNA sense strand
cuguggaggaugcaugaaa

SEQ ID NO: 2401360 - RNA, 19 nt, Homo sapiens
  misc_RNA (1)...(19): siRNA sense strand
gaggaugcaugaaacauuu

SEQ ID NO: 2401361 - RNA, 19 nt, Homo sapiens
  misc_RNA (1)...(19): siRNA sense strand
augcagugauugugggaag

SEQ ID NO: 2401362 - RNA, 19 nt, Homo sapiens
  misc_RNA (1)...(19): siRNA sense strand
gggaagucauuuacccaca

SEQ ID NO: 2401363 - RNA, 19 nt, Homo sapiens
  misc_RNA (1)...(19): siRNA sense strand
gcgaagagguguaaguugc

SEQ ID NO: 2401364 - RNA, 19 nt, Homo sapiens
  misc_RNA (1)...(19): siRNA sense strand
cgucaucaucagagaguuc

SEQ ID NO: 2401365 - RNA, 19 nt, Homo sapiens
  misc_RNA (1)...(19): siRNA sense strand
uggcagaucaucagggaac

SEQ ID NO: 2401366 - RNA, 19 nt, Homo sapiens
  misc_RNA (1)...(19): siRNA sense strand
acuaaacacaggagaguuc

SEQ ID NO: 2401367 - RNA, 19 nt, Homo sapiens
  misc_RNA (1)...(19): siRNA sense strand
agagaugccuguaccguga

SEQ ID NO: 2401368 - RNA, 19 nt, Homo sapiens
  misc_RNA (1)...(19): siRNA sense strand
ugaaauuuacccaggagga

SEQ ID NO: 2401369 - RNA, 19 nt, Homo sapiens
  misc_RNA (1)...(19): siRNA sense strand
uugaagacguggcugugaa

SEQ ID NO: 2401370 - RNA, 19 nt, Homo sapiens
  misc_RNA (1)...(19): siRNA sense strand
cauuacagcuguggaggau

SEQ ID NO: 2401371 - RNA, 19 nt, Homo sapiens
  misc_RNA (1)...(19): siRNA sense strand
augaaaaggccaucagaaa

SEQ ID NO: 2401372 - RNA, 19 nt, Homo sapiens
  misc_RNA (1)...(19): siRNA sense strand
cggcagguucugaagcaaa

SEQ ID NO: 2401373 - RNA, 19 nt, Homo sapiens
  misc_RNA (1)...(19): siRNA sense strand
cggacauauaugaagaaaa

SEQ ID NO: 2401374 - RNA, 19 nt, Homo sapiens
  misc_RNA (1)...(19): siRNA sense strand
acgaugggauaaugagaca

SEQ ID NO: 2401375 - RNA, 19 nt, Homo sapiens
  misc_RNA (1)...(19): siRNA sense strand
gggaauacuuuaaaccagu

SEQ ID NO: 2401376 - RNA, 19 nt, Homo sapiens
  misc_RNA (1)...(19): siRNA sense strand
ccaucagaaaugugcaaga

SEQ ID NO: 2401377 - RNA, 19 nt, Homo sapiens
  misc_RNA (1)...(19): siRNA sense strand
agacaucaucacaaggaau

SEQ ID NO: 2401378 - RNA, 19 nt, Homo sapiens
  misc_RNA (1)...(19): siRNA sense strand
uuucaguaacagaaggcaa

SEQ ID NO: 2401379 - RNA, 19 nt, Homo sapiens
  misc_RNA (1)...(19): siRNA sense strand
cuuugacaauacaggaaau

SEQ ID NO: 2401380 - RNA, 19 nt, Homo sapiens
  misc_RNA (1)...(19): siRNA sense strand
ucucucaacuggaaggaca

SEQ ID NO: 2401381 - RNA, 19 nt, Homo sapiens
  misc_RNA (1)...(19): siRNA sense strand
uguuuaagacccagaaaau

SEQ ID NO: 2401382 - RNA, 19 nt, Homo sapiens
  misc_RNA (1)...(19): siRNA sense strand
aggcaaagaaagggaaacu

SEQ ID NO: 2401383 - RNA, 19 nt, Homo sapiens
  misc_RNA (1)...(19): siRNA sense strand
uucaguaacagaaggcaaa

SEQ ID NO: 2401384 - RNA, 19 nt, Homo sapiens
  misc_RNA (1)...(19): siRNA sense strand
gcgacauguaucuguaaga

SEQ ID NO: 2401385 - RNA, 19 nt, Homo sapiens
  misc_RNA (1)...(19): siRNA sense strand
gcauaauaguggauccuug

SEQ ID NO: 2401386 - RNA, 19 nt, Homo sapiens
  misc_RNA (1)...(19): siRNA sense strand
gggaaacugaagaggaggu

SEQ ID NO: 2401387 - RNA, 19 nt, Homo sapiens
  misc_RNA (1)...(19): siRNA sense strand
uguugaugcaauaaagaga

SEQ ID NO: 2401388 - RNA, 19 nt, Homo sapiens
  misc_RNA (1)...(19): siRNA sense strand
cgaaaagagcccuggggaa

SEQ ID NO: 2401389 - RNA, 19 nt, Homo sapiens
  misc_RNA (1)...(19): siRNA sense strand
aggagaagcugguggacgu

SEQ ID NO: 2401390 - RNA, 19 nt, Homo sapiens
  misc_RNA (1)...(19): siRNA sense strand
agaagguggaagagaauga

SEQ ID NO: 2401391 - RNA, 19 nt, Homo sapiens
  misc_RNA (1)...(19): siRNA sense strand
ugguagagaccgagagggu

SEQ ID NO: 2401392 - RNA, 19 nt, Homo sapiens
  misc_RNA (1)...(19): siRNA sense strand
ugucccugcuggaggagaa

SEQ ID NO: 2401393 - RNA, 19 nt, Homo sapiens
  misc_RNA (1)...(19): siRNA sense strand
uggaagagaaugagcaccu

SEQ ID NO: 2401394 - RNA, 19 nt, Homo sapiens
  misc_RNA (1)...(19): siRNA sense strand
aagaaagauaugaggaaga

SEQ ID NO: 2401395 - RNA, 19 nt, Homo sapiens
  misc_RNA (1)...(19): siRNA sense strand
gcugcuaauccgaaggaaa

SEQ ID NO: 2401396 - RNA, 19 nt, Homo sapiens
  misc_RNA (1)...(19): siRNA sense strand
agagaguggcagaggaaaa

SEQ ID NO: 2401397 - RNA, 19 nt, Homo sapiens
  misc_RNA (1)...(19): siRNA sense strand
cggcaugguugcaggagca

SEQ ID NO: 2401398 - RNA, 19 nt, Homo sapiens
  misc_RNA (1)...(19): siRNA sense strand
cuuaaaagucuuagugaga

SEQ ID NO: 2401399 - RNA, 19 nt, Homo sapiens
  misc_RNA (1)...(19): siRNA sense strand
gggccagaggugagagguu

SEQ ID NO: 2401400 - RNA, 19 nt, Homo sapiens
  misc_RNA (1)...(19): siRNA sense strand
agugugaguuggaaggaga

SEQ ID NO: 2401401 - RNA, 19 nt, Homo sapiens
  misc_RNA (1)...(19): siRNA sense strand
aauccgaaggaaagacaaa

SEQ ID NO: 2401402 - RNA, 19 nt, Homo sapiens
  misc_RNA (1)...(19): siRNA sense strand
guguauuacuggcagcgaa

SEQ ID NO: 2401403 - RNA, 19 nt, Homo sapiens
  misc_RNA (1)...(19): siRNA sense strand
agaucaagagaguggcaga

SEQ ID NO: 2401404 - RNA, 19 nt, Homo sapiens
  misc_RNA (1)...(19): siRNA sense strand
auaacuugacugaggaaca

SEQ ID NO: 2401405 - RNA, 19 nt, Homo sapiens
  misc_RNA (1)...(19): siRNA sense strand
uggaaggagagcugacaga

SEQ ID NO: 2401406 - RNA, 19 nt, Homo sapiens
  misc_RNA (1)...(19): siRNA sense strand
uccgagagaaagagggaga

SEQ ID NO: 2401407 - RNA, 19 nt, Homo sapiens
  misc_RNA (1)...(19): siRNA sense strand
auaugaggaagaagagaga

SEQ ID NO: 2401408 - RNA, 19 nt, Homo sapiens
  misc_RNA (1)...(19): siRNA sense strand
agaagaugcugaagcucca

SEQ ID NO: 2401409 - RNA, 19 nt, Homo sapiens
  misc_RNA (1)...(19): siRNA sense strand
caauaacuugacugaggaa

SEQ ID NO: 2401410 - RNA, 19 nt, Homo sapiens
  misc_RNA (1)...(19): siRNA sense strand
aggagcagugacaggcaua

SEQ ID NO: 2401411 - RNA, 19 nt, Homo sapiens
  misc_RNA (1)...(19): siRNA sense strand
acaaagaaagauaugagga

SEQ ID NO: 2401412 - RNA, 19 nt, Homo sapiens
  misc_RNA (1)...(19): siRNA sense strand
gaccaaagcagaaaccaca

SEQ ID NO: 2401413 - RNA, 19 nt, Homo sapiens
  misc_RNA (1)...(19): siRNA sense strand
ucaccgauaaugaagggaa

SEQ ID NO: 2401414 - RNA, 19 nt, Homo sapiens
  misc_RNA (1)...(19): siRNA sense strand
gguugcaggagcagugaca

SEQ ID NO: 2401415 - RNA, 19 nt, Homo sapiens
  misc_RNA (1)...(19): siRNA sense strand
aaguuaaguaugagagaga

SEQ ID NO: 2401416 - RNA, 19 nt, Homo sapiens
  misc_RNA (1)...(19): siRNA sense strand
guaauuggcuguugaggga

SEQ ID NO: 2401417 - RNA, 19 nt, Homo sapiens
  misc_RNA (1)...(19): siRNA sense strand
agaagaagcagcagccaga

SEQ ID NO: 2401418 - RNA, 19 nt, Homo sapiens
  misc_RNA (1)...(19): siRNA sense strand
aagaagcagcagccagaaa

SEQ ID NO: 2401419 - RNA, 19 nt, Homo sapiens
  misc_RNA (1)...(19): siRNA sense strand
gcuacaaaucguuucucaa

SEQ ID NO: 2401420 - RNA, 19 nt, Homo sapiens
  misc_RNA (1)...(19): siRNA sense strand
guuaaguaugagagagaag

SEQ ID NO: 2401421 - RNA, 19 nt, Homo sapiens
  misc_RNA (1)...(19): siRNA sense strand
agagaaucaucaugggauc

SEQ ID NO: 2401422 - RNA, 19 nt, Homo sapiens
  misc_RNA (1)...(19): siRNA sense strand
cuacugugccugaugaaaa

SEQ ID NO: 2401423 - RNA, 19 nt, Homo sapiens
  misc_RNA (1)...(19): siRNA sense strand
gagagaaucaucaugggau

SEQ ID NO: 2401424 - RNA, 19 nt, Homo sapiens
  misc_RNA (1)...(19): siRNA sense strand
augagagagaagcuaguaa

SEQ ID NO: 2401425 - RNA, 19 nt, Homo sapiens
  misc_RNA (1)...(19): siRNA sense strand
aauuggcuguugagggaau

SEQ ID NO: 2401426 - RNA, 19 nt, Homo sapiens
  misc_RNA (1)...(19): siRNA sense strand
agcuggaaauaguguguuu

SEQ ID NO: 2401427 - RNA, 19 nt, Homo sapiens
  misc_RNA (1)...(19): siRNA sense strand
ggaaaugacagaugaccga

SEQ ID NO: 2401428 - RNA, 19 nt, Homo sapiens
  misc_RNA (1)...(19): siRNA sense strand
agaagaagcagaagcgguu

SEQ ID NO: 2401429 - RNA, 19 nt, Homo sapiens
  misc_RNA (1)...(19): siRNA sense strand
uaugaagugcaguuggaaa

SEQ ID NO: 2401430 - RNA, 19 nt, Homo sapiens
  misc_RNA (1)...(19): siRNA sense strand
aagugcaguuggaaagcaa

SEQ ID NO: 2401431 - RNA, 19 nt, Homo sapiens
  misc_RNA (1)...(19): siRNA sense strand
ccaaaguggacgcugccaa

SEQ ID NO: 2401432 - RNA, 19 nt, Homo sapiens
  misc_RNA (1)...(19): siRNA sense strand
ccauguaugagcagagcga

SEQ ID NO: 2401433 - RNA, 19 nt, Homo sapiens
  misc_RNA (1)...(19): siRNA sense strand
gagaagaagcagaagcggu

SEQ ID NO: 2401434 - RNA, 19 nt, Homo sapiens
  misc_RNA (1)...(19): siRNA sense strand
aagccaaggagaagaagca

SEQ ID NO: 2401435 - RNA, 19 nt, Homo sapiens
  misc_RNA (1)...(19): siRNA sense strand
ccgagagaaacgggaggaa

SEQ ID NO: 2401436 - RNA, 19 nt, Homo sapiens
  misc_RNA (1)...(19): siRNA sense strand
auguaugagcagagcgagu

SEQ ID NO: 2401437 - RNA, 19 nt, Homo sapiens
  misc_RNA (1)...(19): siRNA sense strand
gccaaggagaagaagcaga

SEQ ID NO: 2401438 - RNA, 19 nt, Homo sapiens
  misc_RNA (1)...(19): siRNA sense strand
gggagaaaguggagaggag

SEQ ID NO: 2401439 - RNA, 19 nt, Homo sapiens
  misc_RNA (1)...(19): siRNA sense strand
gcgaggugauccugggcua

SEQ ID NO: 2401440 - RNA, 19 nt, Homo sapiens
  misc_RNA (1)...(19): siRNA sense strand
gauuugagcuucucgguca

SEQ ID NO: 2401441 - RNA, 19 nt, Homo sapiens
  misc_RNA (1)...(19): siRNA sense strand
cggugaaauacuggcauua

SEQ ID NO: 2401442 - RNA, 19 nt, Homo sapiens
  misc_RNA (1)...(19): siRNA sense strand
cggaguugaagcaggacau

SEQ ID NO: 2401443 - RNA, 19 nt, Homo sapiens
  misc_RNA (1)...(19): siRNA sense strand
agccaagggacgucgggua

SEQ ID NO: 2401444 - RNA, 19 nt, Homo sapiens
  misc_RNA (1)...(19): siRNA sense strand
auggcaggacguagacaaa

SEQ ID NO: 2401445 - RNA, 19 nt, Homo sapiens
  misc_RNA (1)...(19): siRNA sense strand
aaguauaaguggagagagu

SEQ ID NO: 2401446 - RNA, 19 nt, Homo sapiens
  misc_RNA (1)...(19): siRNA sense strand
augcaaacaagaaggaaua

SEQ ID NO: 2401447 - RNA, 19 nt, Homo sapiens
  misc_RNA (1)...(19): siRNA sense strand
ugguaaagauagaagacau

SEQ ID NO: 2401448 - RNA, 19 nt, Homo sapiens
  misc_RNA (1)...(19): siRNA sense strand
cgugaaacccaaaguuaaa

SEQ ID NO: 2401449 - RNA, 19 nt, Homo sapiens
  misc_RNA (1)...(19): siRNA sense strand
cgagauggucaaagagaau

SEQ ID NO: 2401450 - RNA, 19 nt, Homo sapiens
  misc_RNA (1)...(19): siRNA sense strand
aguccaagguccaggaaca

SEQ ID NO: 2401451 - RNA, 19 nt, Homo sapiens
  misc_RNA (1)...(19): siRNA sense strand
agauauucucagaguguaa

SEQ ID NO: 2401452 - RNA, 19 nt, Homo sapiens
  misc_RNA (1)...(19): siRNA sense strand
agaaaagagcuaaaggaaa

SEQ ID NO: 2401453 - RNA, 19 nt, Homo sapiens
  misc_RNA (1)...(19): siRNA sense strand
agggcaaguuaaagaggaa

SEQ ID NO: 2401454 - RNA, 19 nt, Homo sapiens
  misc_RNA (1)...(19): siRNA sense strand
cacagaaagcggaggagaa

SEQ ID NO: 2401455 - RNA, 19 nt, Homo sapiens
  misc_RNA (1)...(19): siRNA sense strand
cuucaaaagaaaagagcua

SEQ ID NO: 2401456 - RNA, 19 nt, Homo sapiens
  misc_RNA (1)...(19): siRNA sense strand
ccgugaaacccaaaguuaa

SEQ ID NO: 2401457 - RNA, 19 nt, Homo sapiens
  misc_RNA (1)...(19): siRNA sense strand
aggaaaccuuuaagagcua

SEQ ID NO: 2401458 - RNA, 19 nt, Homo sapiens
  misc_RNA (1)...(19): siRNA sense strand
gauagaagacauagagacu

SEQ ID NO: 2401459 - RNA, 19 nt, Homo sapiens
  misc_RNA (1)...(19): siRNA sense strand
uuuaagagcuacauggaau

SEQ ID NO: 2401460 - RNA, 19 nt, Homo sapiens
  misc_RNA (1)...(19): siRNA sense strand
agaaaguguuguugguuca

SEQ ID NO: 2401461 - RNA, 19 nt, Homo sapiens
  misc_RNA (1)...(19): siRNA sense strand
ccucaagccuacaguucaa

SEQ ID NO: 2401462 - RNA, 19 nt, Homo sapiens
  misc_RNA (1)...(19): siRNA sense strand
aggaaaagggcaaguuaaa

SEQ ID NO: 2401463 - RNA, 19 nt, Homo sapiens
  misc_RNA (1)...(19): siRNA sense strand
aaguuaaagaggaagacaa

SEQ ID NO: 2401464 - RNA, 19 nt, Homo sapiens
  misc_RNA (1)...(19): siRNA sense strand
ggagaugcaaagaguaaau

SEQ ID NO: 2401465 - RNA, 19 nt, Homo sapiens
  misc_RNA (1)...(19): siRNA sense strand
gcaguaaauauucuggaaa

SEQ ID NO: 2401466 - RNA, 19 nt, Homo sapiens
  misc_RNA (1)...(19): siRNA sense strand
uuggagaugcaaagaguaa

SEQ ID NO: 2401467 - RNA, 19 nt, Homo sapiens
  misc_RNA (1)...(19): siRNA sense strand
acaagagcaaugaaggaaa

SEQ ID NO: 2401468 - RNA, 19 nt, Homo sapiens
  misc_RNA (1)...(19): siRNA sense strand
aagaggaagacaacaguaa

SEQ ID NO: 2401469 - RNA, 19 nt, Homo sapiens
  misc_RNA (1)...(19): siRNA sense strand
gguuaucagcaucaagaaa

SEQ ID NO: 2401470 - RNA, 19 nt, Homo sapiens
  misc_RNA (1)...(19): siRNA sense strand
gaucaaagagguggaggaa

SEQ ID NO: 2401471 - RNA, 19 nt, Homo sapiens
  misc_RNA (1)...(19): siRNA sense strand
uggagaaauuaaugcucaa

SEQ ID NO: 2401472 - RNA, 19 nt, Homo sapiens
  misc_RNA (1)...(19): siRNA sense strand
auacagagagcgugaugaa

SEQ ID NO: 2401473 - RNA, 19 nt, Homo sapiens
  misc_RNA (1)...(19): siRNA sense strand
guagugacgaugaggaauu

SEQ ID NO: 2401474 - RNA, 19 nt, Homo sapiens
  misc_RNA (1)...(19): siRNA sense strand
gccaaguaguagcaguaaa

SEQ ID NO: 2401475 - RNA, 19 nt, Homo sapiens
  misc_RNA (1)...(19): siRNA sense strand
gaguguaaucagaaguaau

SEQ ID NO: 2401476 - RNA, 19 nt, Homo sapiens
  misc_RNA (1)...(19): siRNA sense strand
ccaaguaguagcaguaaaa

SEQ ID NO: 2401477 - RNA, 19 nt, Homo sapiens
  misc_RNA (1)...(19): siRNA sense strand
ccaaaguuaaacagccaaa

SEQ ID NO: 2401478 - RNA, 19 nt, Homo sapiens
  misc_RNA (1)...(19): siRNA sense strand
ccaccaaagaaacggaaaa

SEQ ID NO: 2401479 - RNA, 19 nt, Homo sapiens
  misc_RNA (1)...(19): siRNA sense strand
gaugaggaggacacagaaa

SEQ ID NO: 2401480 - RNA, 19 nt, Homo sapiens
  misc_RNA (1)...(19): siRNA sense strand
ccucaaaauucugaaguua

SEQ ID NO: 2401481 - RNA, 19 nt, Homo sapiens
  misc_RNA (1)...(19): siRNA sense strand
ucgagaauguaguguuauu

SEQ ID NO: 2401482 - RNA, 19 nt, Homo sapiens
  misc_RNA (1)...(19): siRNA sense strand
ugaaagaaagcuugacuca

SEQ ID NO: 2401483 - RNA, 19 nt, Homo sapiens
  misc_RNA (1)...(19): siRNA sense strand
ucgagauggucaaagagaa

SEQ ID NO: 2401484 - RNA, 19 nt, Homo sapiens
  misc_RNA (1)...(19): siRNA sense strand
cuaaagacuuaaagcagca

SEQ ID NO: 2401485 - RNA, 19 nt, Homo sapiens
  misc_RNA (1)...(19): siRNA sense strand
ugaaauucgagauggucaa

SEQ ID NO: 2401486 - RNA, 19 nt, Homo sapiens
  misc_RNA (1)...(19): siRNA sense strand
ggaauaugucagagugugu

SEQ ID NO: 2401487 - RNA, 19 nt, Homo sapiens
  misc_RNA (1)...(19): siRNA sense strand
acacaagagcaaugaagga

SEQ ID NO: 2401488 - RNA, 19 nt, Homo sapiens
  misc_RNA (1)...(19): siRNA sense strand
cuucagaccaguuugcaaa

SEQ ID NO: 2401489 - RNA, 19 nt, Homo sapiens
  misc_RNA (1)...(19): siRNA sense strand
gagaaggccaauacagaga

SEQ ID NO: 2401490 - RNA, 19 nt, Homo sapiens
  misc_RNA (1)...(19): siRNA sense strand
ggagcaaaguucuggccca

SEQ ID NO: 2401491 - RNA, 19 nt, Homo sapiens
  misc_RNA (1)...(19): siRNA sense strand
agaucaaagagguggagga

SEQ ID NO: 2401492 - RNA, 19 nt, Homo sapiens
  misc_RNA (1)...(19): siRNA sense strand
gaagaaaacagaagcccua

SEQ ID NO: 2401493 - RNA, 19 nt, Homo sapiens
  misc_RNA (1)...(19): siRNA sense strand
aggaacagcacgaucaaau

SEQ ID NO: 2401494 - RNA, 19 nt, Homo sapiens
  misc_RNA (1)...(19): siRNA sense strand
aggcagugcuucuuaguga

SEQ ID NO: 2401495 - RNA, 19 nt, Homo sapiens
  misc_RNA (1)...(19): siRNA sense strand
aagccaaguaguagcagua

SEQ ID NO: 2401496 - RNA, 19 nt, Homo sapiens
  misc_RNA (1)...(19): siRNA sense strand
aagaaaagagcuaaaggaa

SEQ ID NO: 2401497 - RNA, 19 nt, Homo sapiens
  misc_RNA (1)...(19): siRNA sense strand
ggcaaguuaaagaggaaga

SEQ ID NO: 2401498 - RNA, 19 nt, Homo sapiens
  misc_RNA (1)...(19): siRNA sense strand
aaaugagacagaagaucaa

SEQ ID NO: 2401499 - RNA, 19 nt, Homo sapiens
  misc_RNA (1)...(19): siRNA sense strand
guuaaacagccaaaaguaa

SEQ ID NO: 2401500 - RNA, 19 nt, Homo sapiens
  misc_RNA (1)...(19): siRNA sense strand
acaacaacaucuaacaaca

SEQ ID NO: 2401501 - RNA, 19 nt, Homo sapiens
  misc_RNA (1)...(19): siRNA sense strand
ggacacagaaagcggagga

SEQ ID NO: 2401502 - RNA, 19 nt, Homo sapiens
  misc_RNA (1)...(19): siRNA sense strand
gccaauacagagagcguga

SEQ ID NO: 2401503 - RNA, 19 nt, Homo sapiens
  misc_RNA (1)...(19): siRNA sense strand
aaugcaaacaagaaggaau

SEQ ID NO: 2401504 - RNA, 19 nt, Homo sapiens
  misc_RNA (1)...(19): siRNA sense strand
uaguagugacgaugaggaa

SEQ ID NO: 2401505 - RNA, 19 nt, Homo sapiens
  misc_RNA (1)...(19): siRNA sense strand
caaagcaagaagaugguuu

SEQ ID NO: 2401506 - RNA, 19 nt, Homo sapiens
  misc_RNA (1)...(19): siRNA sense strand
gaaucaacuuauaaggugu

SEQ ID NO: 2401507 - RNA, 19 nt, Homo sapiens
  misc_RNA (1)...(19): siRNA sense strand
agcuaaaggaaaagggcaa

SEQ ID NO: 2401508 - RNA, 19 nt, Homo sapiens
  misc_RNA (1)...(19): siRNA sense strand
gagugggacaagagggaaa

SEQ ID NO: 2401509 - RNA, 19 nt, Homo sapiens
  misc_RNA (1)...(19): siRNA sense strand
cugaaagaaucaaagccaa

SEQ ID NO: 2401510 - RNA, 19 nt, Homo sapiens
  misc_RNA (1)...(19): siRNA sense strand
uuauggaaggaaagagaaa

SEQ ID NO: 2401511 - RNA, 19 nt, Homo sapiens
  misc_RNA (1)...(19): siRNA sense strand
acuaagauuacgaguggaa

SEQ ID NO: 2401512 - RNA, 19 nt, Homo sapiens
  misc_RNA (1)...(19): siRNA sense strand
cuggaugaagagaaagaaa

SEQ ID NO: 2401513 - RNA, 19 nt, Homo sapiens
  misc_RNA (1)...(19): siRNA sense strand
aggugaaagaaauggaaga

SEQ ID NO: 2401514 - RNA, 19 nt, Homo sapiens
  misc_RNA (1)...(19): siRNA sense strand
aguuaagagcagagcuaga

SEQ ID NO: 2401515 - RNA, 19 nt, Homo sapiens
  misc_RNA (1)...(19): siRNA sense strand
aguaugaagaacugaaaga

SEQ ID NO: 2401516 - RNA, 19 nt, Homo sapiens
  misc_RNA (1)...(19): siRNA sense strand
acagacaauaccaggcaaa

SEQ ID NO: 2401517 - RNA, 19 nt, Homo sapiens
  misc_RNA (1)...(19): siRNA sense strand
ugcaagaacugucaggcaa

SEQ ID NO: 2401518 - RNA, 19 nt, Homo sapiens
  misc_RNA (1)...(19): siRNA sense strand
ugaaagaaauggaagagcu

SEQ ID NO: 2401519 - RNA, 19 nt, Homo sapiens
  misc_RNA (1)...(19): siRNA sense strand
agcagggacuggagagaga

SEQ ID NO: 2401520 - RNA, 19 nt, Homo sapiens
  misc_RNA (1)...(19): siRNA sense strand
augaaaacuuagagacuga

SEQ ID NO: 2401521 - RNA, 19 nt, Homo sapiens
  misc_RNA (1)...(19): siRNA sense strand
uggucaacauaaugaugaa

SEQ ID NO: 2401522 - RNA, 19 nt, Homo sapiens
  misc_RNA (1)...(19): siRNA sense strand
agauccaggugaaagaaau

SEQ ID NO: 2401523 - RNA, 19 nt, Homo sapiens
  misc_RNA (1)...(19): siRNA sense strand
uaagauuacgaguggaaga

SEQ ID NO: 2401524 - RNA, 19 nt, Homo sapiens
  misc_RNA (1)...(19): siRNA sense strand
ucaaaaugaagcagaagua

SEQ ID NO: 2401525 - RNA, 19 nt, Homo sapiens
  misc_RNA (1)...(19): siRNA sense strand
ugaagaacugaaagaauca

SEQ ID NO: 2401526 - RNA, 19 nt, Homo sapiens
  misc_RNA (1)...(19): siRNA sense strand
cggagugggacaagaggga

SEQ ID NO: 2401527 - RNA, 19 nt, Homo sapiens
  misc_RNA (1)...(19): siRNA sense strand
cagggacuggagagagaaa

SEQ ID NO: 2401528 - RNA, 19 nt, Homo sapiens
  misc_RNA (1)...(19): siRNA sense strand
gcugaagauccaggugaaa

SEQ ID NO: 2401529 - RNA, 19 nt, Homo sapiens
  misc_RNA (1)...(19): siRNA sense strand
cuggaaacggugaaacgaa

SEQ ID NO: 2401530 - RNA, 19 nt, Homo sapiens
  misc_RNA (1)...(19): siRNA sense strand
caacaauggugguucugga

SEQ ID NO: 2401531 - RNA, 19 nt, Homo sapiens
  misc_RNA (1)...(19): siRNA sense strand
agagaaaugcgcacagcuu

SEQ ID NO: 2401532 - RNA, 19 nt, Homo sapiens
  misc_RNA (1)...(19): siRNA sense strand
ggaaaaugaaguaacugaa

SEQ ID NO: 2401533 - RNA, 19 nt, Homo sapiens
  misc_RNA (1)...(19): siRNA sense strand
gggacuggagagagaaaau

SEQ ID NO: 2401534 - RNA, 19 nt, Homo sapiens
  misc_RNA (1)...(19): siRNA sense strand
cggcuuugucucuguggaa

SEQ ID NO: 2401535 - RNA, 19 nt, Homo sapiens
  misc_RNA (1)...(19): siRNA sense strand
gauuacgaguggaagaacu

SEQ ID NO: 2401536 - RNA, 19 nt, Homo sapiens
  misc_RNA (1)...(19): siRNA sense strand
cagaacugacucaugcaaa

SEQ ID NO: 2401537 - RNA, 19 nt, Homo sapiens
  misc_RNA (1)...(19): siRNA sense strand
ucucaaaacagcaaagaca

SEQ ID NO: 2401538 - RNA, 19 nt, Homo sapiens
  misc_RNA (1)...(19): siRNA sense strand
gggacaagagggaaauacu

SEQ ID NO: 2401539 - RNA, 19 nt, Homo sapiens
  misc_RNA (1)...(19): siRNA sense strand
auuacgaguggaagaacua

SEQ ID NO: 2401540 - RNA, 19 nt, Homo sapiens
  misc_RNA (1)...(19): siRNA sense strand
ggaaacggugaaacgaaaa

SEQ ID NO: 2401541 - RNA, 19 nt, Homo sapiens
  misc_RNA (1)...(19): siRNA sense strand
aggcaauauaaaggaagaa

SEQ ID NO: 2401542 - RNA, 19 nt, Homo sapiens
  misc_RNA (1)...(19): siRNA sense strand
agagaaaauagaaggcuga

SEQ ID NO: 2401543 - RNA, 19 nt, Homo sapiens
  misc_RNA (1)...(19): siRNA sense strand
ggcugagacugaaagcaau

SEQ ID NO: 2401544 - RNA, 19 nt, Homo sapiens
  misc_RNA (1)...(19): siRNA sense strand
aagaaauggaagagcuuuu

SEQ ID NO: 2401545 - RNA, 19 nt, Homo sapiens
  misc_RNA (1)...(19): siRNA sense strand
aagagcagagcuagagaga

SEQ ID NO: 2401546 - RNA, 19 nt, Homo sapiens
  misc_RNA (1)...(19): siRNA sense strand
caauggugguucuggaaac

SEQ ID NO: 2401547 - RNA, 19 nt, Homo sapiens
  misc_RNA (1)...(19): siRNA sense strand
gagaaagaguccacgggua

SEQ ID NO: 2401548 - RNA, 19 nt, Homo sapiens
  misc_RNA (1)...(19): siRNA sense strand
gucaagaggaagaagccaa

SEQ ID NO: 2401549 - RNA, 19 nt, Homo sapiens
  misc_RNA (1)...(19): siRNA sense strand
gcaaggaaucgauagccaa

SEQ ID NO: 2401550 - RNA, 19 nt, Homo sapiens
  misc_RNA (1)...(19): siRNA sense strand
gcagcauuggugauggaaa

SEQ ID NO: 2401551 - RNA, 19 nt, Homo sapiens
  misc_RNA (1)...(19): siRNA sense strand
agaaagaguccacggguac

SEQ ID NO: 2401552 - RNA, 19 nt, Homo sapiens
  misc_RNA (1)...(19): siRNA sense strand
ugauagagaaacugccaga

SEQ ID NO: 2401553 - RNA, 19 nt, Homo sapiens
  misc_RNA (1)...(19): siRNA sense strand
guguaaaccagccagaaca

SEQ ID NO: 2401554 - RNA, 19 nt, Homo sapiens
  misc_RNA (1)...(19): siRNA sense strand
gcuacagcuugcagagaac

SEQ ID NO: 2401555 - RNA, 19 nt, Homo sapiens
  misc_RNA (1)...(19): siRNA sense strand
uguaaaccagccagaacaa

SEQ ID NO: 2401556 - RNA, 19 nt, Homo sapiens
  misc_RNA (1)...(19): siRNA sense strand
agaacucccucuuggccaa

SEQ ID NO: 2401557 - RNA, 19 nt, Homo sapiens
  misc_RNA (1)...(19): siRNA sense strand
gggcuacgcugauucgaga

SEQ ID NO: 2401558 - RNA, 19 nt, Homo sapiens
  misc_RNA (1)...(19): siRNA sense strand
acaucuaccugaaggccaa

SEQ ID NO: 2401559 - RNA, 19 nt, Homo sapiens
  misc_RNA (1)...(19): siRNA sense strand
augucagacucaugaagaa

SEQ ID NO: 2401560 - RNA, 19 nt, Homo sapiens
  misc_RNA (1)...(19): siRNA sense strand
ggaaagauccauacgugca

SEQ ID NO: 2401561 - RNA, 19 nt, Homo sapiens
  misc_RNA (1)...(19): siRNA sense strand
cauacgugcaaauggacaa

SEQ ID NO: 2401562 - RNA, 19 nt, Homo sapiens
  misc_RNA (1)...(19): siRNA sense strand
cgcaaagaagagaguucaa

SEQ ID NO: 2401563 - RNA, 19 nt, Homo sapiens
  misc_RNA (1)...(19): siRNA sense strand
acaucaagcagugaggaaa

SEQ ID NO: 2401564 - RNA, 19 nt, Homo sapiens
  misc_RNA (1)...(19): siRNA sense strand
cugaaggccaagaagauga

SEQ ID NO: 2401565 - RNA, 19 nt, Homo sapiens
  misc_RNA (1)...(19): siRNA sense strand
gagucaaagccaagagcuc

SEQ ID NO: 2401566 - RNA, 19 nt, Homo sapiens
  misc_RNA (1)...(19): siRNA sense strand
cagugaggaaagauccaua

SEQ ID NO: 2401567 - RNA, 19 nt, Homo sapiens
  misc_RNA (1)...(19): siRNA sense strand
caucaagcagugaggaaag

SEQ ID NO: 2401568 - RNA, 19 nt, Homo sapiens
  misc_RNA (1)...(19): siRNA sense strand
gcacagggagucaaagcca

SEQ ID NO: 2401569 - RNA, 19 nt, Homo sapiens
  misc_RNA (1)...(19): siRNA sense strand
gcuuaaaggugaugccaag

SEQ ID NO: 2401570 - RNA, 19 nt, Homo sapiens
  misc_RNA (1)...(19): siRNA sense strand
gcgcagucugucuggaaga

SEQ ID NO: 2401571 - RNA, 19 nt, Homo sapiens
  misc_RNA (1)...(19): siRNA sense strand
gauauaaggagguggugcu

SEQ ID NO: 2401572 - RNA, 19 nt, Homo sapiens
  misc_RNA (1)...(19): siRNA sense strand
agguggugcuuaaagguga

SEQ ID NO: 2401573 - RNA, 19 nt, Homo sapiens
  misc_RNA (1)...(19): siRNA sense strand
cagcuaaagcagcagcaca

SEQ ID NO: 2401574 - RNA, 19 nt, Homo sapiens
  misc_RNA (1)...(19): siRNA sense strand
cuguacaaggugaauggaa

SEQ ID NO: 2401575 - RNA, 19 nt, Homo sapiens
  misc_RNA (1)...(19): siRNA sense strand
ccaaaaucgaaaagagaaa

SEQ ID NO: 2401576 - RNA, 19 nt, Homo sapiens
  misc_RNA (1)...(19): siRNA sense strand
agaacaagcucaaggagga

SEQ ID NO: 2401577 - RNA, 19 nt, Homo sapiens
  misc_RNA (1)...(19): siRNA sense strand
augagaagacugaggaaga

SEQ ID NO: 2401578 - RNA, 19 nt, Homo sapiens
  misc_RNA (1)...(19): siRNA sense strand
agugaugagaauugcaaua

SEQ ID NO: 2401579 - RNA, 19 nt, Homo sapiens
  misc_RNA (1)...(19): siRNA sense strand
ggaaagaaaucggaagcga

SEQ ID NO: 2401580 - RNA, 19 nt, Homo sapiens
  misc_RNA (1)...(19): siRNA sense strand
uggaaauaaacgagacuga

SEQ ID NO: 2401581 - RNA, 19 nt, Homo sapiens
  misc_RNA (1)...(19): siRNA sense strand
gugaaauugacauggaaga

SEQ ID NO: 2401582 - RNA, 19 nt, Homo sapiens
  misc_RNA (1)...(19): siRNA sense strand
agacuaaagaccugcucaa

SEQ ID NO: 2401583 - RNA, 19 nt, Homo sapiens
  misc_RNA (1)...(19): siRNA sense strand
acauagacauccaggagga

SEQ ID NO: 2401584 - RNA, 19 nt, Homo sapiens
  misc_RNA (1)...(19): siRNA sense strand
aggaugacgauuuggaaga

SEQ ID NO: 2401585 - RNA, 19 nt, Homo sapiens
  misc_RNA (1)...(19): siRNA sense strand
ccacagacagccauggaga

SEQ ID NO: 2401586 - RNA, 19 nt, Homo sapiens
  misc_RNA (1)...(19): siRNA sense strand
acgaugaauccgacaguga

SEQ ID NO: 2401587 - RNA, 19 nt, Homo sapiens
  misc_RNA (1)...(19): siRNA sense strand
guaugagaagacugaggaa

SEQ ID NO: 2401588 - RNA, 19 nt, Homo sapiens
  misc_RNA (1)...(19): siRNA sense strand
aagaaagguuugaggaagc

SEQ ID NO: 2401589 - RNA, 19 nt, Homo sapiens
  misc_RNA (1)...(19): siRNA sense strand
augaugaugacgaggauga

SEQ ID NO: 2401590 - RNA, 19 nt, Homo sapiens
  misc_RNA (1)...(19): siRNA sense strand
auuuggaagacgagagcau

SEQ ID NO: 2401591 - RNA, 19 nt, Homo sapiens
  misc_RNA (1)...(19): siRNA sense strand
ugauacagaacaagcucaa

SEQ ID NO: 2401592 - RNA, 19 nt, Homo sapiens
  misc_RNA (1)...(19): siRNA sense strand
ccgacagugaguuggaaga

SEQ ID NO: 2401593 - RNA, 19 nt, Homo sapiens
  misc_RNA (1)...(19): siRNA sense strand
aagaaaggcggcugcccaa

SEQ ID NO: 2401594 - RNA, 19 nt, Homo sapiens
  misc_RNA (1)...(19): siRNA sense strand
uggaagaugaugaugacga

SEQ ID NO: 2401595 - RNA, 19 nt, Homo sapiens
  misc_RNA (1)...(19): siRNA sense strand
cugcagagugucaggccau

SEQ ID NO: 2401596 - RNA, 19 nt, Homo sapiens
  misc_RNA (1)...(19): siRNA sense strand
agaugaugaugacgaggau

SEQ ID NO: 2401597 - RNA, 19 nt, Homo sapiens
  misc_RNA (1)...(19): siRNA sense strand
gagaagacugaggaagaau

SEQ ID NO: 2401598 - RNA, 19 nt, Homo sapiens
  misc_RNA (1)...(19): siRNA sense strand
agcucaaggaggaagagaa

SEQ ID NO: 2401599 - RNA, 19 nt, Homo sapiens
  misc_RNA (1)...(19): siRNA sense strand
augacgaggaugacgauuu

SEQ ID NO: 2401600 - RNA, 19 nt, Homo sapiens
  misc_RNA (1)...(19): siRNA sense strand
gaagaaaggcggcugccca

SEQ ID NO: 2401601 - RNA, 19 nt, Homo sapiens
  misc_RNA (1)...(19): siRNA sense strand
uuggaagacgagagcauuu

SEQ ID NO: 2401602 - RNA, 19 nt, Homo sapiens
  misc_RNA (1)...(19): siRNA sense strand
aguaaugccaauugugaau

SEQ ID NO: 2401603 - RNA, 19 nt, Homo sapiens
  misc_RNA (1)...(19): siRNA sense strand
gagcaggucugauggccau

SEQ ID NO: 2401604 - RNA, 19 nt, Homo sapiens
  misc_RNA (1)...(19): siRNA sense strand
caguaaugccaauugugaa

SEQ ID NO: 2401605 - RNA, 19 nt, Homo sapiens
  misc_RNA (1)...(19): siRNA sense strand
uguuaggaguaguucucaa

SEQ ID NO: 2401606 - RNA, 19 nt, Homo sapiens
  misc_RNA (1)...(19): siRNA sense strand
aguaguucucaaugugaua

SEQ ID NO: 2401607 - RNA, 19 nt, Homo sapiens
  misc_RNA (1)...(19): siRNA sense strand
cccaggaauuauaggagca

SEQ ID NO: 2401608 - RNA, 19 nt, Homo sapiens
  misc_RNA (1)...(19): siRNA sense strand
uguaauucuccaagcaaca

SEQ ID NO: 2401609 - RNA, 19 nt, Homo sapiens
  misc_RNA (1)...(19): siRNA sense strand
ccuucaacuugcagugguu

SEQ ID NO: 2401610 - RNA, 19 nt, Homo sapiens
  misc_RNA (1)...(19): siRNA sense strand
uggaugggucugaggaauu

SEQ ID NO: 2401611 - RNA, 19 nt, Homo sapiens
  misc_RNA (1)...(19): siRNA sense strand
agggaaguuuagaugggaa

SEQ ID NO: 2401612 - RNA, 19 nt, Homo sapiens
  misc_RNA (1)...(19): siRNA sense strand
agguagagccaacgagcga

SEQ ID NO: 2401613 - RNA, 19 nt, Homo sapiens
  misc_RNA (1)...(19): siRNA sense strand
cgagaaaaggggagggaag

SEQ ID NO: 2401614 - RNA, 19 nt, Homo sapiens
  misc_RNA (1)...(19): siRNA sense strand
aggagagugaccugagcaa

SEQ ID NO: 2401615 - RNA, 19 nt, Homo sapiens
  misc_RNA (1)...(19): siRNA sense strand
agagccaacgagcgagaaa

SEQ ID NO: 2401616 - RNA, 19 nt, Homo sapiens
  misc_RNA (1)...(19): siRNA sense strand
aggcuuacauccagggcau

SEQ ID NO: 2401617 - RNA, 19 nt, Homo sapiens
  misc_RNA (1)...(19): siRNA sense strand
ccucgaaacgccugcccaa

SEQ ID NO: 2401618 - RNA, 19 nt, Homo sapiens
  misc_RNA (1)...(19): siRNA sense strand
gagaaaagccacauggugu

SEQ ID NO: 2401619 - RNA, 19 nt, Homo sapiens
  misc_RNA (1)...(19): siRNA sense strand
cugcccaacuggaggacca

SEQ ID NO: 2401620 - RNA, 19 nt, Homo sapiens
  misc_RNA (1)...(19): siRNA sense strand
ugcccaacgugguggugaa

SEQ ID NO: 2401621 - RNA, 19 nt, Homo sapiens
  misc_RNA (1)...(19): siRNA sense strand
cugcacaagcggaucaaga

SEQ ID NO: 2401622 - RNA, 19 nt, Homo sapiens
  misc_RNA (1)...(19): siRNA sense strand
aggcagagcccggagaaaa

SEQ ID NO: 2401623 - RNA, 19 nt, Homo sapiens
  misc_RNA (1)...(19): siRNA sense strand
gugagagaguucuggauaa

SEQ ID NO: 2401624 - RNA, 19 nt, Homo sapiens
  misc_RNA (1)...(19): siRNA sense strand
ccuuucagguggagaagua

SEQ ID NO: 2401625 - RNA, 19 nt, Homo sapiens
  misc_RNA (1)...(19): siRNA sense strand
acaucaagccugaguguga

SEQ ID NO: 2401626 - RNA, 19 nt, Homo sapiens
  misc_RNA (1)...(19): siRNA sense strand
guauauguacaguggaaga

SEQ ID NO: 2401627 - RNA, 19 nt, Homo sapiens
  misc_RNA (1)...(19): siRNA sense strand
ccucauaucaucugucuua

SEQ ID NO: 2401628 - RNA, 19 nt, Homo sapiens
  misc_RNA (1)...(19): siRNA sense strand
ggaagaugccauaaacaga

SEQ ID NO: 2401629 - RNA, 19 nt, Homo sapiens
  misc_RNA (1)...(19): siRNA sense strand
ugucuuaaggucacagaua

SEQ ID NO: 2401630 - RNA, 19 nt, Homo sapiens
  misc_RNA (1)...(19): siRNA sense strand
cuuuggaaguggagaccau

SEQ ID NO: 2401631 - RNA, 19 nt, Homo sapiens
  misc_RNA (1)...(19): siRNA sense strand
ugucagauuuccagagagu

SEQ ID NO: 2401632 - RNA, 19 nt, Homo sapiens
  misc_RNA (1)...(19): siRNA sense strand
agaaauagccagugugcuc

SEQ ID NO: 2401633 - RNA, 19 nt, Homo sapiens
  misc_RNA (1)...(19): siRNA sense strand
gcucauucaugucagauuu

SEQ ID NO: 2401634 - RNA, 19 nt, Homo sapiens
  misc_RNA (1)...(19): siRNA sense strand
gccauaaacagauuuguaa

SEQ ID NO: 2401635 - RNA, 19 nt, Homo sapiens
  misc_RNA (1)...(19): siRNA sense strand
caguggaagaugccauaaa

SEQ ID NO: 2401636 - RNA, 19 nt, Homo sapiens
  misc_RNA (1)...(19): siRNA sense strand
ugagagaguucuggauaau

SEQ ID NO: 2401637 - RNA, 19 nt, Homo sapiens
  misc_RNA (1)...(19): siRNA sense strand
guaaaguguacauaugcaa

SEQ ID NO: 2401638 - RNA, 19 nt, Homo sapiens
  misc_RNA (1)...(19): siRNA sense strand
ccagagaaauagccagugu

SEQ ID NO: 2401639 - RNA, 19 nt, Homo sapiens
  misc_RNA (1)...(19): siRNA sense strand
gguaaaguguacauaugca

SEQ ID NO: 2401640 - RNA, 19 nt, Homo sapiens
  misc_RNA (1)...(19): siRNA sense strand
cagccaguuucucgaguuu

SEQ ID NO: 2401641 - RNA, 19 nt, Homo sapiens
  misc_RNA (1)...(19): siRNA sense strand
ugugagagaguucuggaua

SEQ ID NO: 2401642 - RNA, 19 nt, Homo sapiens
  misc_RNA (1)...(19): siRNA sense strand
uuaugugccaggugguaaa

SEQ ID NO: 2401643 - RNA, 19 nt, Homo sapiens
  misc_RNA (1)...(19): siRNA sense strand
guacaguggaagaugccau

SEQ ID NO: 2401644 - RNA, 19 nt, Homo sapiens
  misc_RNA (1)...(19): siRNA sense strand
agaauccagcugugaacaa

SEQ ID NO: 2401645 - RNA, 19 nt, Homo sapiens
  misc_RNA (1)...(19): siRNA sense strand
cugccgugguagagccuua

SEQ ID NO: 2401646 - RNA, 19 nt, Homo sapiens
  misc_RNA (1)...(19): siRNA sense strand
gcagaaagacuaagcugga

SEQ ID NO: 2401647 - RNA, 19 nt, Homo sapiens
  misc_RNA (1)...(19): siRNA sense strand
ucguaaacucgguguugaa

SEQ ID NO: 2401648 - RNA, 19 nt, Homo sapiens
  misc_RNA (1)...(19): siRNA sense strand
ccuugaauguagaccuaau

SEQ ID NO: 2401649 - RNA, 19 nt, Homo sapiens
  misc_RNA (1)...(19): siRNA sense strand
gaaaggaggaugcugccaa

SEQ ID NO: 2401650 - RNA, 19 nt, Homo sapiens
  misc_RNA (1)...(19): siRNA sense strand
agaauauagcagaaagacu

SEQ ID NO: 2401651 - RNA, 19 nt, Homo sapiens
  misc_RNA (1)...(19): siRNA sense strand
guacauggccugcugccua

SEQ ID NO: 2401652 - RNA, 19 nt, Homo sapiens
  misc_RNA (1)...(19): siRNA sense strand
gccacgaagucgaggcacu

SEQ ID NO: 2401653 - RNA, 19 nt, Homo sapiens
  misc_RNA (1)...(19): siRNA sense strand
ccuucaugguggacaacga

SEQ ID NO: 2401654 - RNA, 19 nt, Homo sapiens
  misc_RNA (1)...(19): siRNA sense strand
cugacaaagccuaccauga

SEQ ID NO: 2401655 - RNA, 19 nt, Homo sapiens
  misc_RNA (1)...(19): siRNA sense strand
caggagaauauagcagaaa

SEQ ID NO: 2401656 - RNA, 19 nt, Homo sapiens
  misc_RNA (1)...(19): siRNA sense strand
uggagaggcucacaggaga

SEQ ID NO: 2401657 - RNA, 19 nt, Homo sapiens
  misc_RNA (1)...(19): siRNA sense strand
uggaggaggcacugguuca

SEQ ID NO: 2401658 - RNA, 19 nt, Homo sapiens
  misc_RNA (1)...(19): siRNA sense strand
guguaaacaauguggcaaa

SEQ ID NO: 2401659 - RNA, 19 nt, Homo sapiens
  misc_RNA (1)...(19): siRNA sense strand
auguaaggaaugugggaaa

SEQ ID NO: 2401660 - RNA, 19 nt, Homo sapiens
  misc_RNA (1)...(19): siRNA sense strand
cauucauacuggagagaga

SEQ ID NO: 2401661 - RNA, 19 nt, Homo sapiens
  misc_RNA (1)...(19): siRNA sense strand
gugugaaaguaaagaagau

SEQ ID NO: 2401662 - RNA, 19 nt, Homo sapiens
  misc_RNA (1)...(19): siRNA sense strand
gauacaaaccauauggaga

SEQ ID NO: 2401663 - RNA, 19 nt, Homo sapiens
  misc_RNA (1)...(19): siRNA sense strand
cuuuguaaccauagaagua

SEQ ID NO: 2401664 - RNA, 19 nt, Homo sapiens
  misc_RNA (1)...(19): siRNA sense strand
uguaggaagccaauggaaa

SEQ ID NO: 2401665 - RNA, 19 nt, Homo sapiens
  misc_RNA (1)...(19): siRNA sense strand
gaauguaagaaaugcggua

SEQ ID NO: 2401666 - RNA, 19 nt, Homo sapiens
  misc_RNA (1)...(19): siRNA sense strand
augcaguauuuguggaaaa

SEQ ID NO: 2401667 - RNA, 19 nt, Homo sapiens
  misc_RNA (1)...(19): siRNA sense strand
cugggaaagauauaagaaa

SEQ ID NO: 2401668 - RNA, 19 nt, Homo sapiens
  misc_RNA (1)...(19): siRNA sense strand
augugaacagugugggaaa

SEQ ID NO: 2401669 - RNA, 19 nt, Homo sapiens
  misc_RNA (1)...(19): siRNA sense strand
auguaagaaaugcgguaaa

SEQ ID NO: 2401670 - RNA, 19 nt, Homo sapiens
  misc_RNA (1)...(19): siRNA sense strand
agagaagugaugcaggaaa

SEQ ID NO: 2401671 - RNA, 19 nt, Homo sapiens
  misc_RNA (1)...(19): siRNA sense strand
ggauuaaaaccaugugaau

SEQ ID NO: 2401672 - RNA, 19 nt, Homo sapiens
  misc_RNA (1)...(19): siRNA sense strand
aacucacacuggagagaaa

SEQ ID NO: 2401673 - RNA, 19 nt, Homo sapiens
  misc_RNA (1)...(19): siRNA sense strand
cccuaugaauguaagaaau

SEQ ID NO: 2401674 - RNA, 19 nt, Homo sapiens
  misc_RNA (1)...(19): siRNA sense strand
aauggaaagaccagaauau

SEQ ID NO: 2401675 - RNA, 19 nt, Homo sapiens
  misc_RNA (1)...(19): siRNA sense strand
agaccagaauauugaagau

SEQ ID NO: 2401676 - RNA, 19 nt, Homo sapiens
  misc_RNA (1)...(19): siRNA sense strand
aggaaugggcuuugcuaga

SEQ ID NO: 2401677 - RNA, 19 nt, Homo sapiens
  misc_RNA (1)...(19): siRNA sense strand
auguacgauaugugggaaa

SEQ ID NO: 2401678 - RNA, 19 nt, Homo sapiens
  misc_RNA (1)...(19): siRNA sense strand
ccauauggagagaagcaau

SEQ ID NO: 2401679 - RNA, 19 nt, Homo sapiens
  misc_RNA (1)...(19): siRNA sense strand
uacucauaccggagagaaa

SEQ ID NO: 2401680 - RNA, 19 nt, Homo sapiens
  misc_RNA (1)...(19): siRNA sense strand
cgaaagaauucauacugga

SEQ ID NO: 2401681 - RNA, 19 nt, Homo sapiens
  misc_RNA (1)...(19): siRNA sense strand
acagagaagugaugcagga

SEQ ID NO: 2401682 - RNA, 19 nt, Homo sapiens
  misc_RNA (1)...(19): siRNA sense strand
uguuagaagacacaugaua

SEQ ID NO: 2401683 - RNA, 19 nt, Homo sapiens
  misc_RNA (1)...(19): siRNA sense strand
cccuaugaguguaaacaau

SEQ ID NO: 2401684 - RNA, 19 nt, Homo sapiens
  misc_RNA (1)...(19): siRNA sense strand
gagaacucacacaggagaa

SEQ ID NO: 2401685 - RNA, 19 nt, Homo sapiens
  misc_RNA (1)...(19): siRNA sense strand
aaaguaaagaagaugguca

SEQ ID NO: 2401686 - RNA, 19 nt, Homo sapiens
  misc_RNA (1)...(19): siRNA sense strand
uggagaaguugucagccaa

SEQ ID NO: 2401687 - RNA, 19 nt, Homo sapiens
  misc_RNA (1)...(19): siRNA sense strand
uggagaaagacccuauaaa

SEQ ID NO: 2401688 - RNA, 19 nt, Homo sapiens
  misc_RNA (1)...(19): siRNA sense strand
aggauguggcugugaacuu

SEQ ID NO: 2401689 - RNA, 19 nt, Homo sapiens
  misc_RNA (1)...(19): siRNA sense strand
aaacaaugugguaaagcau

SEQ ID NO: 2401690 - RNA, 19 nt, Homo sapiens
  misc_RNA (1)...(19): siRNA sense strand
agagacugugugaaaguaa

SEQ ID NO: 2401691 - RNA, 19 nt, Homo sapiens
  misc_RNA (1)...(19): siRNA sense strand
augauaaugcacaguggaa

SEQ ID NO: 2401692 - RNA, 19 nt, Homo sapiens
  misc_RNA (1)...(19): siRNA sense strand
aguugaaagacaucagaga

SEQ ID NO: 2401693 - RNA, 19 nt, Homo sapiens
  misc_RNA (1)...(19): siRNA sense strand
ugauauagaggcugggugu

SEQ ID NO: 2401694 - RNA, 19 nt, Homo sapiens
  misc_RNA (1)...(19): siRNA sense strand
ugauaaugcacaguggaaa

SEQ ID NO: 2401695 - RNA, 19 nt, Homo sapiens
  misc_RNA (1)...(19): siRNA sense strand
cccuaugaauguaaacaau

SEQ ID NO: 2401696 - RNA, 19 nt, Homo sapiens
  misc_RNA (1)...(19): siRNA sense strand
gccuauaaucccagcacuu

SEQ ID NO: 2401697 - RNA, 19 nt, Homo sapiens
  misc_RNA (1)...(19): siRNA sense strand
auggagaaguugucagcca

SEQ ID NO: 2401698 - RNA, 19 nt, Homo sapiens
  misc_RNA (1)...(19): siRNA sense strand
uugaaagacaucagagaac

SEQ ID NO: 2401699 - RNA, 19 nt, Homo sapiens
  misc_RNA (1)...(19): siRNA sense strand
uguaaggaaugugggaaaa

SEQ ID NO: 2401700 - RNA, 19 nt, Homo sapiens
  misc_RNA (1)...(19): siRNA sense strand
acccuaugaauguaagaaa

SEQ ID NO: 2401701 - RNA, 19 nt, Homo sapiens
  misc_RNA (1)...(19): siRNA sense strand
gccaauggaaagaccagaa

SEQ ID NO: 2401702 - RNA, 19 nt, Homo sapiens
  misc_RNA (1)...(19): siRNA sense strand
agaaaugcgguaaagccua

SEQ ID NO: 2401703 - RNA, 19 nt, Homo sapiens
  misc_RNA (1)...(19): siRNA sense strand
uggagagaagcaauauaaa

SEQ ID NO: 2401704 - RNA, 19 nt, Homo sapiens
  misc_RNA (1)...(19): siRNA sense strand
guguagugacucagccuau

SEQ ID NO: 2401705 - RNA, 19 nt, Homo sapiens
  misc_RNA (1)...(19): siRNA sense strand
ccagaauauugaagaucac

SEQ ID NO: 2401706 - RNA, 19 nt, Homo sapiens
  misc_RNA (1)...(19): siRNA sense strand
gugaacagugugggaaauu

SEQ ID NO: 2401707 - RNA, 19 nt, Homo sapiens
  misc_RNA (1)...(19): siRNA sense strand
cagaggaguuggaggcaga

SEQ ID NO: 2401708 - RNA, 19 nt, Homo sapiens
  misc_RNA (1)...(19): siRNA sense strand
agagagaggagguggcaga

SEQ ID NO: 2401709 - RNA, 19 nt, Homo sapiens
  misc_RNA (1)...(19): siRNA sense strand
gaggaaagauaaagggcuc

SEQ ID NO: 2401710 - RNA, 19 nt, Homo sapiens
  misc_RNA (1)...(19): siRNA sense strand
aagggaaggaagagggcca

SEQ ID NO: 2401711 - RNA, 19 nt, Homo sapiens
  misc_RNA (1)...(19): siRNA sense strand
ugucaggcgaggagguuga

SEQ ID NO: 2401712 - RNA, 19 nt, Homo sapiens
  misc_RNA (1)...(19): siRNA sense strand
aagaacuggcucaagaaau

SEQ ID NO: 2401713 - RNA, 19 nt, Homo sapiens
  misc_RNA (1)...(19): siRNA sense strand
agcagauuauggaguacaa

SEQ ID NO: 2401714 - RNA, 19 nt, Homo sapiens
  misc_RNA (1)...(19): siRNA sense strand
agaggaagcaaguggaaaa

SEQ ID NO: 2401715 - RNA, 19 nt, Homo sapiens
  misc_RNA (1)...(19): siRNA sense strand
gcacgagauggaagaggaa

SEQ ID NO: 2401716 - RNA, 19 nt, Homo sapiens
  misc_RNA (1)...(19): siRNA sense strand
ggggaaaaggcgagcagaa

SEQ ID NO: 2401717 - RNA, 19 nt, Homo sapiens
  misc_RNA (1)...(19): siRNA sense strand
gggaaaaggcgagcagaaa

SEQ ID NO: 2401718 - RNA, 19 nt, Homo sapiens
  misc_RNA (1)...(19): siRNA sense strand
gcuuagacgaggaggaaag

SEQ ID NO: 2401719 - RNA, 19 nt, Homo sapiens
  misc_RNA (1)...(19): siRNA sense strand
guaagaaggaggaagggca

SEQ ID NO: 2401720 - RNA, 19 nt, Homo sapiens
  misc_RNA (1)...(19): siRNA sense strand
ccgaacuggaagaguaaga

SEQ ID NO: 2401721 - RNA, 19 nt, Homo sapiens
  misc_RNA (1)...(19): siRNA sense strand
guauggagcccgacagcuu

SEQ ID NO: 2401722 - RNA, 19 nt, Homo sapiens
  misc_RNA (1)...(19): siRNA sense strand
acaaccaauagaagacaaa

SEQ ID NO: 2401723 - RNA, 19 nt, Homo sapiens
  misc_RNA (1)...(19): siRNA sense strand
ucaaaagacuccuuggaau

SEQ ID NO: 2401724 - RNA, 19 nt, Homo sapiens
  misc_RNA (1)...(19): siRNA sense strand
cgcaagagauuaugugcca

SEQ ID NO: 2401725 - RNA, 19 nt, Homo sapiens
  misc_RNA (1)...(19): siRNA sense strand
gaaaaggcgagcagaaaga

SEQ ID NO: 2401726 - RNA, 19 nt, Homo sapiens
  misc_RNA (1)...(19): siRNA sense strand
gcgaaggaaauccaaacaa

SEQ ID NO: 2401727 - RNA, 19 nt, Homo sapiens
  misc_RNA (1)...(19): siRNA sense strand
caagagauuaugugccauu

SEQ ID NO: 2401728 - RNA, 19 nt, Homo sapiens
  misc_RNA (1)...(19): siRNA sense strand
ugaagaaagaagacuuaca

SEQ ID NO: 2401729 - RNA, 19 nt, Homo sapiens
  misc_RNA (1)...(19): siRNA sense strand
agacaaauauucagaccuc

SEQ ID NO: 2401730 - RNA, 19 nt, Homo sapiens
  misc_RNA (1)...(19): siRNA sense strand
acccgaacuggaagaguaa

SEQ ID NO: 2401731 - RNA, 19 nt, Homo sapiens
  misc_RNA (1)...(19): siRNA sense strand
ggaagaguaagaaggagga

SEQ ID NO: 2401732 - RNA, 19 nt, Homo sapiens
  misc_RNA (1)...(19): siRNA sense strand
ggcaacaaccaauagaaga

SEQ ID NO: 2401733 - RNA, 19 nt, Homo sapiens
  misc_RNA (1)...(19): siRNA sense strand
gagaagucgagcagccuuu

SEQ ID NO: 2401734 - RNA, 19 nt, Homo sapiens
  misc_RNA (1)...(19): siRNA sense strand
cagcuuagacgaggaggaa

SEQ ID NO: 2401735 - RNA, 19 nt, Homo sapiens
  misc_RNA (1)...(19): siRNA sense strand
gcaacaaccaauagaagac

SEQ ID NO: 2401736 - RNA, 19 nt, Homo sapiens
  misc_RNA (1)...(19): siRNA sense strand
caggagacgucaauggaac

SEQ ID NO: 2401737 - RNA, 19 nt, Homo sapiens
  misc_RNA (1)...(19): siRNA sense strand
cagaaagagaguccacaga

SEQ ID NO: 2401738 - RNA, 19 nt, Homo sapiens
  misc_RNA (1)...(19): siRNA sense strand
agaggaagcaaguggaaaa

SEQ ID NO: 2401739 - RNA, 19 nt, Homo sapiens
  misc_RNA (1)...(19): siRNA sense strand
gcacgagauggaagaggaa

SEQ ID NO: 2401740 - RNA, 19 nt, Homo sapiens
  misc_RNA (1)...(19): siRNA sense strand
ggggaaaaggcgagcagaa

SEQ ID NO: 2401741 - RNA, 19 nt, Homo sapiens
  misc_RNA (1)...(19): siRNA sense strand
gggaaaaggcgagcagaaa

SEQ ID NO: 2401742 - RNA, 19 nt, Homo sapiens
  misc_RNA (1)...(19): siRNA sense strand
gcuuagacgaggaggaaag

SEQ ID NO: 2401743 - RNA, 19 nt, Homo sapiens
  misc_RNA (1)...(19): siRNA sense strand
guaagaaggaggaagggca

SEQ ID NO: 2401744 - RNA, 19 nt, Homo sapiens
  misc_RNA (1)...(19): siRNA sense strand
ccgaacuggaagaguaaga

SEQ ID NO: 2401745 - RNA, 19 nt, Homo sapiens
  misc_RNA (1)...(19): siRNA sense strand
guauggagcccgacagcuu

SEQ ID NO: 2401746 - RNA, 19 nt, Homo sapiens
  misc_RNA (1)...(19): siRNA sense strand
acaaccaauagaagacaaa

SEQ ID NO: 2401747 - RNA, 19 nt, Homo sapiens
  misc_RNA (1)...(19): siRNA sense strand
ucaaaagacuccuuggaau

SEQ ID NO: 2401748 - RNA, 19 nt, Homo sapiens
  misc_RNA (1)...(19): siRNA sense strand
cgcaagagauuaugugcca

SEQ ID NO: 2401749 - RNA, 19 nt, Homo sapiens
  misc_RNA (1)...(19): siRNA sense strand
gaaaaggcgagcagaaaga

SEQ ID NO: 2401750 - RNA, 19 nt, Homo sapiens
  misc_RNA (1)...(19): siRNA sense strand
gcgaaggaaauccaaacaa

SEQ ID NO: 2401751 - RNA, 19 nt, Homo sapiens
  misc_RNA (1)...(19): siRNA sense strand
caagagauuaugugccauu

SEQ ID NO: 2401752 - RNA, 19 nt, Homo sapiens
  misc_RNA (1)...(19): siRNA sense strand
ugaagaaagaagacuuaca

SEQ ID NO: 2401753 - RNA, 19 nt, Homo sapiens
  misc_RNA (1)...(19): siRNA sense strand
agacaaauauucagaccuc

SEQ ID NO: 2401754 - RNA, 19 nt, Homo sapiens
  misc_RNA (1)...(19): siRNA sense strand
acccgaacuggaagaguaa

SEQ ID NO: 2401755 - RNA, 19 nt, Homo sapiens
  misc_RNA (1)...(19): siRNA sense strand
ggaagaguaagaaggagga

SEQ ID NO: 2401756 - RNA, 19 nt, Homo sapiens
  misc_RNA (1)...(19): siRNA sense strand
ggcaacaaccaauagaaga

SEQ ID NO: 2401757 - RNA, 19 nt, Homo sapiens
  misc_RNA (1)...(19): siRNA sense strand
gagaagucgagcagccuuu

SEQ ID NO: 2401758 - RNA, 19 nt, Homo sapiens
  misc_RNA (1)...(19): siRNA sense strand
cagcuuagacgaggaggaa

SEQ ID NO: 2401759 - RNA, 19 nt, Homo sapiens
  misc_RNA (1)...(19): siRNA sense strand
gcaacaaccaauagaagac

SEQ ID NO: 2401760 - RNA, 19 nt, Homo sapiens
  misc_RNA (1)...(19): siRNA sense strand
caggagacgucaauggaac

SEQ ID NO: 2401761 - RNA, 19 nt, Homo sapiens
  misc_RNA (1)...(19): siRNA sense strand
cagaaagagaguccacaga

SEQ ID NO: 2401762 - RNA, 19 nt, Homo sapiens
  misc_RNA (1)...(19): siRNA sense strand
aagaagagacacauggcaa

SEQ ID NO: 2401763 - RNA, 19 nt, Homo sapiens
  misc_RNA (1)...(19): siRNA sense strand
gcuacuugcugcaggacga

SEQ ID NO: 2401764 - RNA, 19 nt, Homo sapiens
  misc_RNA (1)...(19): siRNA sense strand
aggacgaugcccaggccaa

SEQ ID NO: 2401765 - RNA, 19 nt, Homo sapiens
  misc_RNA (1)...(19): siRNA sense strand
gcgcaacaccucugggauc

SEQ ID NO: 2401766 - RNA, 19 nt, Homo sapiens
  misc_RNA (1)...(19): siRNA sense strand
gaagaagaagugugagccu

SEQ ID NO: 2401767 - RNA, 19 nt, Homo sapiens
  misc_RNA (1)...(19): siRNA sense strand
gauacuggugcaugcgcaa

SEQ ID NO: 2401768 - RNA, 19 nt, Homo sapiens
  misc_RNA (1)...(19): siRNA sense strand
ugaucauggucuauggguu

SEQ ID NO: 2401769 - RNA, 19 nt, Homo sapiens
  misc_RNA (1)...(19): siRNA sense strand
uagauaaagauguggaaga

SEQ ID NO: 2401770 - RNA, 19 nt, Homo sapiens
  misc_RNA (1)...(19): siRNA sense strand
ggacugaucaugaagggaa

SEQ ID NO: 2401771 - RNA, 19 nt, Homo sapiens
  misc_RNA (1)...(19): siRNA sense strand
auuaccaacuccagggaaa

SEQ ID NO: 2401772 - RNA, 19 nt, Homo sapiens
  misc_RNA (1)...(19): siRNA sense strand
guugaaagggagaaagaca

SEQ ID NO: 2401773 - RNA, 19 nt, Homo sapiens
  misc_RNA (1)...(19): siRNA sense strand
gcaaagaaagugaugcaca

SEQ ID NO: 2401774 - RNA, 19 nt, Homo sapiens
  misc_RNA (1)...(19): siRNA sense strand
gacugaucaugaagggaaa

SEQ ID NO: 2401775 - RNA, 19 nt, Homo sapiens
  misc_RNA (1)...(19): siRNA sense strand
ugaagaugaggaagauaaa

SEQ ID NO: 2401776 - RNA, 19 nt, Homo sapiens
  misc_RNA (1)...(19): siRNA sense strand
ggauguugaaagggagaaa

SEQ ID NO: 2401777 - RNA, 19 nt, Homo sapiens
  misc_RNA (1)...(19): siRNA sense strand
aguaacauucagauggaua

SEQ ID NO: 2401778 - RNA, 19 nt, Homo sapiens
  misc_RNA (1)...(19): siRNA sense strand
uuugaaaguccuagugauu

SEQ ID NO: 2401779 - RNA, 19 nt, Homo sapiens
  misc_RNA (1)...(19): siRNA sense strand
uaaagauguggaagacaaa

SEQ ID NO: 2401780 - RNA, 19 nt, Homo sapiens
  misc_RNA (1)...(19): siRNA sense strand
aaggugaagaugaggaaga

SEQ ID NO: 2401781 - RNA, 19 nt, Homo sapiens
  misc_RNA (1)...(19): siRNA sense strand
uugaaagggagaaagacaa

SEQ ID NO: 2401782 - RNA, 19 nt, Homo sapiens
  misc_RNA (1)...(19): siRNA sense strand
guggaagacaaaagacaaa

SEQ ID NO: 2401783 - RNA, 19 nt, Homo sapiens
  misc_RNA (1)...(19): siRNA sense strand
ugaaagggagaaagacaau

SEQ ID NO: 2401784 - RNA, 19 nt, Homo sapiens
  misc_RNA (1)...(19): siRNA sense strand
cuguagaaauagacccaga

SEQ ID NO: 2401785 - RNA, 19 nt, Homo sapiens
  misc_RNA (1)...(19): siRNA sense strand
aagaugaggaagauaaaga

SEQ ID NO: 2401786 - RNA, 19 nt, Homo sapiens
  misc_RNA (1)...(19): siRNA sense strand
cagaagauauucaucguca

SEQ ID NO: 2401787 - RNA, 19 nt, Homo sapiens
  misc_RNA (1)...(19): siRNA sense strand
cagagguguuggaugaaaa

SEQ ID NO: 2401788 - RNA, 19 nt, Homo sapiens
  misc_RNA (1)...(19): siRNA sense strand
ugaucaacuagcuguaaua

SEQ ID NO: 2401789 - RNA, 19 nt, Homo sapiens
  misc_RNA (1)...(19): siRNA sense strand
augcaaauaacaccagaaa

SEQ ID NO: 2401790 - RNA, 19 nt, Homo sapiens
  misc_RNA (1)...(19): siRNA sense strand
ggcuauaauacgcagaauu

SEQ ID NO: 2401791 - RNA, 19 nt, Homo sapiens
  misc_RNA (1)...(19): siRNA sense strand
agaagauauucaucgucaa

SEQ ID NO: 2401792 - RNA, 19 nt, Homo sapiens
  misc_RNA (1)...(19): siRNA sense strand
ggugaagaugaggaagaua

SEQ ID NO: 2401793 - RNA, 19 nt, Homo sapiens
  misc_RNA (1)...(19): siRNA sense strand
agacaauaacacuguggau

SEQ ID NO: 2401794 - RNA, 19 nt, Homo sapiens
  misc_RNA (1)...(19): siRNA sense strand
auguugaaagggagaaaga

SEQ ID NO: 2401795 - RNA, 19 nt, Homo sapiens
  misc_RNA (1)...(19): siRNA sense strand
agggaaauuuagauggucu

SEQ ID NO: 2401796 - RNA, 19 nt, Homo sapiens
  misc_RNA (1)...(19): siRNA sense strand
uauucaggcuagugcaaaa

SEQ ID NO: 2401797 - RNA, 19 nt, Homo sapiens
  misc_RNA (1)...(19): siRNA sense strand
aggaaucaaagaugcaaau

SEQ ID NO: 2401798 - RNA, 19 nt, Homo sapiens
  misc_RNA (1)...(19): siRNA sense strand
gauguauaguggugguacu

SEQ ID NO: 2401799 - RNA, 19 nt, Homo sapiens
  misc_RNA (1)...(19): siRNA sense strand
ucaaggugaagaugaggaa

SEQ ID NO: 2401800 - RNA, 19 nt, Homo sapiens
  misc_RNA (1)...(19): siRNA sense strand
augaggaagauaaagagaa

SEQ ID NO: 2401801 - RNA, 19 nt, Homo sapiens
  misc_RNA (1)...(19): siRNA sense strand
auaacuaauccguguauca

SEQ ID NO: 2401802 - RNA, 19 nt, Homo sapiens
  misc_RNA (1)...(19): siRNA sense strand
guaucggaccucagugauu

SEQ ID NO: 2401803 - RNA, 19 nt, Homo sapiens
  misc_RNA (1)...(19): siRNA sense strand
gaugaggaagauaaagaga

SEQ ID NO: 2401804 - RNA, 19 nt, Homo sapiens
  misc_RNA (1)...(19): siRNA sense strand
aaggaaucaaagaugcaaa

SEQ ID NO: 2401805 - RNA, 19 nt, Homo sapiens
  misc_RNA (1)...(19): siRNA sense strand
caguuggggcagaaaguua

SEQ ID NO: 2401806 - RNA, 19 nt, Homo sapiens
  misc_RNA (1)...(19): siRNA sense strand
uauucaucgucaagcuuua

SEQ ID NO: 2401807 - RNA, 19 nt, Homo sapiens
  misc_RNA (1)...(19): siRNA sense strand
agaguaaaucucaagcauu

SEQ ID NO: 2401808 - RNA, 19 nt, Homo sapiens
  misc_RNA (1)...(19): siRNA sense strand
gaggaagauaaagagaaua

SEQ ID NO: 2401809 - RNA, 19 nt, Homo sapiens
  misc_RNA (1)...(19): siRNA sense strand
ccauggaugcugcuggaau

SEQ ID NO: 2401810 - RNA, 19 nt, Homo sapiens
  misc_RNA (1)...(19): siRNA sense strand
agaugagaccacuuggauu

SEQ ID NO: 2401811 - RNA, 19 nt, Homo sapiens
  misc_RNA (1)...(19): siRNA sense strand
gggacauagcucaggcaaa

SEQ ID NO: 2401812 - RNA, 19 nt, Homo sapiens
  misc_RNA (1)...(19): siRNA sense strand
ugaauuuagaggagggcaa

SEQ ID NO: 2401813 - RNA, 19 nt, Homo sapiens
  misc_RNA (1)...(19): siRNA sense strand
gguaaaaggugcugccaga

SEQ ID NO: 2401814 - RNA, 19 nt, Homo sapiens
  misc_RNA (1)...(19): siRNA sense strand
agaugaguugugugaauaa

SEQ ID NO: 2401815 - RNA, 19 nt, Homo sapiens
  misc_RNA (1)...(19): siRNA sense strand
caauaauguuccagcucca

SEQ ID NO: 2401816 - RNA, 19 nt, Homo sapiens
  misc_RNA (1)...(19): siRNA sense strand
gagacaaggucggggauau

SEQ ID NO: 2401817 - RNA, 19 nt, Homo sapiens
  misc_RNA (1)...(19): siRNA sense strand
agcuucauguagagaauua

SEQ ID NO: 2401818 - RNA, 19 nt, Homo sapiens
  misc_RNA (1)...(19): siRNA sense strand
uggcuuacggcaagggaga

SEQ ID NO: 2401819 - RNA, 19 nt, Homo sapiens
  misc_RNA (1)...(19): siRNA sense strand
gcuauaaauccugggccaa

SEQ ID NO: 2401820 - RNA, 19 nt, Homo sapiens
  misc_RNA (1)...(19): siRNA sense strand
guuuauagcacaacugcau

SEQ ID NO: 2401821 - RNA, 19 nt, Homo sapiens
  misc_RNA (1)...(19): siRNA sense strand
aggcggaagcaucagcaaa

SEQ ID NO: 2401822 - RNA, 19 nt, Homo sapiens
  misc_RNA (1)...(19): siRNA sense strand
caguaaugucagaucccua

SEQ ID NO: 2401823 - RNA, 19 nt, Homo sapiens
  misc_RNA (1)...(19): siRNA sense strand
gggaauggacagaugccca

SEQ ID NO: 2401824 - RNA, 19 nt, Homo sapiens
  misc_RNA (1)...(19): siRNA sense strand
ugcuauaaauccugggcca

SEQ ID NO: 2401825 - RNA, 19 nt, Homo sapiens
  misc_RNA (1)...(19): siRNA sense strand
cgccagaugaguuguguga

SEQ ID NO: 2401826 - RNA, 19 nt, Homo sapiens
  misc_RNA (1)...(19): siRNA sense strand
agaucaaaccguuccucaa

SEQ ID NO: 2401827 - RNA, 19 nt, Homo sapiens
  misc_RNA (1)...(19): siRNA sense strand
cuauaaauccugggccaau

SEQ ID NO: 2401828 - RNA, 19 nt, Homo sapiens
  misc_RNA (1)...(19): siRNA sense strand
acggcaggccagauacaaa

SEQ ID NO: 2401829 - RNA, 19 nt, Homo sapiens
  misc_RNA (1)...(19): siRNA sense strand
ccagagaagaagacgaacu

SEQ ID NO: 2401830 - RNA, 19 nt, Homo sapiens
  misc_RNA (1)...(19): siRNA sense strand
aagaagacgaacugugaga

SEQ ID NO: 2401831 - RNA, 19 nt, Homo sapiens
  misc_RNA (1)...(19): siRNA sense strand
acccagagaagaagacgaa

SEQ ID NO: 2401832 - RNA, 19 nt, Homo sapiens
  misc_RNA (1)...(19): siRNA sense strand
uacccaacccagagaagaa

SEQ ID NO: 2401833 - RNA, 19 nt, Homo sapiens
  misc_RNA (1)...(19): siRNA sense strand
ugugagacccagugcccaa

SEQ ID NO: 2401834 - RNA, 19 nt, Homo sapiens
  misc_RNA (1)...(19): siRNA sense strand
ccagaaacagaauggccuu

SEQ ID NO: 2401835 - RNA, 19 nt, Homo sapiens
  misc_RNA (1)...(19): siRNA sense strand
uagaagcagcugugagaaa

SEQ ID NO: 2401836 - RNA, 19 nt, Homo sapiens
  misc_RNA (1)...(19): siRNA sense strand
cagaagaaacauugagguu

SEQ ID NO: 2401837 - RNA, 19 nt, Homo sapiens
  misc_RNA (1)...(19): siRNA sense strand
aguauggguucgagaagaa

SEQ ID NO: 2401838 - RNA, 19 nt, Homo sapiens
  misc_RNA (1)...(19): siRNA sense strand
auacaguaggucagaaaua

SEQ ID NO: 2401839 - RNA, 19 nt, Homo sapiens
  misc_RNA (1)...(19): siRNA sense strand
cugaaguuggaaagagaaa

SEQ ID NO: 2401840 - RNA, 19 nt, Homo sapiens
  misc_RNA (1)...(19): siRNA sense strand
gauuaaaagcgucagaaaa

SEQ ID NO: 2401841 - RNA, 19 nt, Homo sapiens
  misc_RNA (1)...(19): siRNA sense strand
ugucaaacucugugguuau

SEQ ID NO: 2401842 - RNA, 19 nt, Homo sapiens
  misc_RNA (1)...(19): siRNA sense strand
cuccaaacacaaagacaaa

SEQ ID NO: 2401843 - RNA, 19 nt, Homo sapiens
  misc_RNA (1)...(19): siRNA sense strand
guggaagacagaagaaaca

SEQ ID NO: 2401844 - RNA, 19 nt, Homo sapiens
  misc_RNA (1)...(19): siRNA sense strand
aaguuaaaucugaggauca

SEQ ID NO: 2401845 - RNA, 19 nt, Homo sapiens
  misc_RNA (1)...(19): siRNA sense strand
agacaaguacuuugaaaca

SEQ ID NO: 2401846 - RNA, 19 nt, Homo sapiens
  misc_RNA (1)...(19): siRNA sense strand
gugagaaagaagauugaau

SEQ ID NO: 2401847 - RNA, 19 nt, Homo sapiens
  misc_RNA (1)...(19): siRNA sense strand
ugauaguagcagugacaau

SEQ ID NO: 2401848 - RNA, 19 nt, Homo sapiens
  misc_RNA (1)...(19): siRNA sense strand
ggaagaacaaaguggccau

SEQ ID NO: 2401849 - RNA, 19 nt, Homo sapiens
  misc_RNA (1)...(19): siRNA sense strand
uaagaaaagugcagagcau

SEQ ID NO: 2401850 - RNA, 19 nt, Homo sapiens
  misc_RNA (1)...(19): siRNA sense strand
uagcagugacaaugagcaa

SEQ ID NO: 2401851 - RNA, 19 nt, Homo sapiens
  misc_RNA (1)...(19): siRNA sense strand
acuccaaacacaaagacaa

SEQ ID NO: 2401852 - RNA, 19 nt, Homo sapiens
  misc_RNA (1)...(19): siRNA sense strand
caguaaagccauuaaaaca

SEQ ID NO: 2401853 - RNA, 19 nt, Homo sapiens
  misc_RNA (1)...(19): siRNA sense strand
ccaaacacaaagacaaaga

SEQ ID NO: 2401854 - RNA, 19 nt, Homo sapiens
  misc_RNA (1)...(19): siRNA sense strand
auuagauagucaggagaaa

SEQ ID NO: 2401855 - RNA, 19 nt, Homo sapiens
  misc_RNA (1)...(19): siRNA sense strand
cagagcauuuuaagagaaa

SEQ ID NO: 2401856 - RNA, 19 nt, Homo sapiens
  misc_RNA (1)...(19): siRNA sense strand
ugucagaagaagcugggaa

SEQ ID NO: 2401857 - RNA, 19 nt, Homo sapiens
  misc_RNA (1)...(19): siRNA sense strand
acuagaagcagcugugaga

SEQ ID NO: 2401858 - RNA, 19 nt, Homo sapiens
  misc_RNA (1)...(19): siRNA sense strand
gucagaagaagcugggaau

SEQ ID NO: 2401859 - RNA, 19 nt, Homo sapiens
  misc_RNA (1)...(19): siRNA sense strand
agugauaguagcagugaca

SEQ ID NO: 2401860 - RNA, 19 nt, Homo sapiens
  misc_RNA (1)...(19): siRNA sense strand
acacaaagacaaagaacag

SEQ ID NO: 2401861 - RNA, 19 nt, Homo sapiens
  misc_RNA (1)...(19): siRNA sense strand
agauuaaaagcgucagaaa

SEQ ID NO: 2401862 - RNA, 19 nt, Homo sapiens
  misc_RNA (1)...(19): siRNA sense strand
aaaugaagaccuugaaagu

SEQ ID NO: 2401863 - RNA, 19 nt, Homo sapiens
  misc_RNA (1)...(19): siRNA sense strand
ccuugaagaauuacaucua

SEQ ID NO: 2401864 - RNA, 19 nt, Homo sapiens
  misc_RNA (1)...(19): siRNA sense strand
agaaaagugcagagcauuu

SEQ ID NO: 2401865 - RNA, 19 nt, Homo sapiens
  misc_RNA (1)...(19): siRNA sense strand
ggagaauauuacagaagag

SEQ ID NO: 2401866 - RNA, 19 nt, Homo sapiens
  misc_RNA (1)...(19): siRNA sense strand
aauuagauagucaggagaa

SEQ ID NO: 2401867 - RNA, 19 nt, Homo sapiens
  misc_RNA (1)...(19): siRNA sense strand
uagauagucaggagaaaga

SEQ ID NO: 2401868 - RNA, 19 nt, Homo sapiens
  misc_RNA (1)...(19): siRNA sense strand
cccagaaccagauuagaaa

SEQ ID NO: 2401869 - RNA, 19 nt, Homo sapiens
  misc_RNA (1)...(19): siRNA sense strand
gauuacauugggagauauu

SEQ ID NO: 2401870 - RNA, 19 nt, Homo sapiens
  misc_RNA (1)...(19): siRNA sense strand
gggagauauuuacacacaa

SEQ ID NO: 2401871 - RNA, 19 nt, Homo sapiens
  misc_RNA (1)...(19): siRNA sense strand
ccuccauucuaccaggaaa

SEQ ID NO: 2401872 - RNA, 19 nt, Homo sapiens
  misc_RNA (1)...(19): siRNA sense strand
ucucagauccagauaguca

SEQ ID NO: 2401873 - RNA, 19 nt, Homo sapiens
  misc_RNA (1)...(19): siRNA sense strand
ccgaagccucucugguuaa

SEQ ID NO: 2401874 - RNA, 19 nt, Homo sapiens
  misc_RNA (1)...(19): siRNA sense strand
uccugaaguuggaaagaga

SEQ ID NO: 2401875 - RNA, 19 nt, Homo sapiens
  misc_RNA (1)...(19): siRNA sense strand
gaguggaagacagaagaaa

SEQ ID NO: 2401876 - RNA, 19 nt, Homo sapiens
  misc_RNA (1)...(19): siRNA sense strand
acuugaugaagaugacaua

SEQ ID NO: 2401877 - RNA, 19 nt, Homo sapiens
  misc_RNA (1)...(19): siRNA sense strand
auuuagaaccagcuguuua

SEQ ID NO: 2401878 - RNA, 19 nt, Homo sapiens
  misc_RNA (1)...(19): siRNA sense strand
cuuaaaguuuugaaggaga

SEQ ID NO: 2401879 - RNA, 19 nt, Homo sapiens
  misc_RNA (1)...(19): siRNA sense strand
cgaacuuucagguuaacaa

SEQ ID NO: 2401880 - RNA, 19 nt, Homo sapiens
  misc_RNA (1)...(19): siRNA sense strand
caccaaaucacaagacuca

SEQ ID NO: 2401881 - RNA, 19 nt, Homo sapiens
  misc_RNA (1)...(19): siRNA sense strand
aauccuagccacuuugaaa

SEQ ID NO: 2401882 - RNA, 19 nt, Homo sapiens
  misc_RNA (1)...(19): siRNA sense strand
cuaccaggaaacagaccaa

SEQ ID NO: 2401883 - RNA, 19 nt, Homo sapiens
  misc_RNA (1)...(19): siRNA sense strand
gguuaaagaagaacuugau

SEQ ID NO: 2401884 - RNA, 19 nt, Homo sapiens
  misc_RNA (1)...(19): siRNA sense strand
gcugggaauuguaccaaaa

SEQ ID NO: 2401885 - RNA, 19 nt, Homo sapiens
  misc_RNA (1)...(19): siRNA sense strand
gaagcagcugugagaaaga

SEQ ID NO: 2401886 - RNA, 19 nt, Homo sapiens
  misc_RNA (1)...(19): siRNA sense strand
cuacagugaugucguggau

SEQ ID NO: 2401887 - RNA, 19 nt, Homo sapiens
  misc_RNA (1)...(19): siRNA sense strand
aaauaacucuaguaggcau

SEQ ID NO: 2401888 - RNA, 19 nt, Homo sapiens
  misc_RNA (1)...(19): siRNA sense strand
ugccaaguuacgagaauuu

SEQ ID NO: 2401889 - RNA, 19 nt, Homo sapiens
  misc_RNA (1)...(19): siRNA sense strand
acugcuaaaggaagaacaa

SEQ ID NO: 2401890 - RNA, 19 nt, Homo sapiens
  misc_RNA (1)...(19): siRNA sense strand
aguaggcauaaguaagaaa

SEQ ID NO: 2401891 - RNA, 19 nt, Homo sapiens
  misc_RNA (1)...(19): siRNA sense strand
agaacagacaguaguagau

SEQ ID NO: 2401892 - RNA, 19 nt, Homo sapiens
  misc_RNA (1)...(19): siRNA sense strand
agaaauaacucuaguaggc

SEQ ID NO: 2401893 - RNA, 19 nt, Homo sapiens
  misc_RNA (1)...(19): siRNA sense strand
aauaacucuaguaggcaua

SEQ ID NO: 2401894 - RNA, 19 nt, Homo sapiens
  misc_RNA (1)...(19): siRNA sense strand
ccgcgaacucaaagaacua

SEQ ID NO: 2401895 - RNA, 19 nt, Homo sapiens
  misc_RNA (1)...(19): siRNA sense strand
ccauaugagagcuggaaaa

SEQ ID NO: 2401896 - RNA, 19 nt, Homo sapiens
  misc_RNA (1)...(19): siRNA sense strand
cugaaaucccugagcguuu

SEQ ID NO: 2401897 - RNA, 19 nt, Homo sapiens
  misc_RNA (1)...(19): siRNA sense strand
acaagcaaacaaagcgaaa

SEQ ID NO: 2401898 - RNA, 19 nt, Homo sapiens
  misc_RNA (1)...(19): siRNA sense strand
agagagacuuacaggcuca

SEQ ID NO: 2401899 - RNA, 19 nt, Homo sapiens
  misc_RNA (1)...(19): siRNA sense strand
auaaugaagaagaacggua

SEQ ID NO: 2401900 - RNA, 19 nt, Homo sapiens
  misc_RNA (1)...(19): siRNA sense strand
gcgaagauuuccuggacac

SEQ ID NO: 2401901 - RNA, 19 nt, Homo sapiens
  misc_RNA (1)...(19): siRNA sense strand
cagacaagauauagaccgu

SEQ ID NO: 2401902 - RNA, 19 nt, Homo sapiens
  misc_RNA (1)...(19): siRNA sense strand
cuccaaacaagcaaacaaa

SEQ ID NO: 2401903 - RNA, 19 nt, Homo sapiens
  misc_RNA (1)...(19): siRNA sense strand
caacaagaaaacacagcaa

SEQ ID NO: 2401904 - RNA, 19 nt, Homo sapiens
  misc_RNA (1)...(19): siRNA sense strand
caagggugcaagagaacau

SEQ ID NO: 2401905 - RNA, 19 nt, Homo sapiens
  misc_RNA (1)...(19): siRNA sense strand
uggugaugaagaaggauuu

SEQ ID NO: 2401906 - RNA, 19 nt, Homo sapiens
  misc_RNA (1)...(19): siRNA sense strand
acaagaaaacacagcaauu

SEQ ID NO: 2401907 - RNA, 19 nt, Homo sapiens
  misc_RNA (1)...(19): siRNA sense strand
cacugaagaucaaggaacu

SEQ ID NO: 2401908 - RNA, 19 nt, Homo sapiens
  misc_RNA (1)...(19): siRNA sense strand
ucgcagacgaauuccuaua

SEQ ID NO: 2401909 - RNA, 19 nt, Homo sapiens
  misc_RNA (1)...(19): siRNA sense strand
ucuccaaacaagcaaacaa

SEQ ID NO: 2401910 - RNA, 19 nt, Homo sapiens
  misc_RNA (1)...(19): siRNA sense strand
gcgaacucaaagaacuaua

SEQ ID NO: 2401911 - RNA, 19 nt, Homo sapiens
  misc_RNA (1)...(19): siRNA sense strand
gagcaguguacacgagguu

SEQ ID NO: 2401912 - RNA, 19 nt, Homo sapiens
  misc_RNA (1)...(19): siRNA sense strand
aagaacgguaugacuguaa

SEQ ID NO: 2401913 - RNA, 19 nt, Homo sapiens
  misc_RNA (1)...(19): siRNA sense strand
cgccaaagcagcauaucau

SEQ ID NO: 2401914 - RNA, 19 nt, Homo sapiens
  misc_RNA (1)...(19): siRNA sense strand
gguauauagccaagcucca

SEQ ID NO: 2401915 - RNA, 19 nt, Homo sapiens
  misc_RNA (1)...(19): siRNA sense strand
gaagaaagguauuugggau

SEQ ID NO: 2401916 - RNA, 19 nt, Homo sapiens
  misc_RNA (1)...(19): siRNA sense strand
uggaaugagaagaaaggua

SEQ ID NO: 2401917 - RNA, 19 nt, Homo sapiens
  misc_RNA (1)...(19): siRNA sense strand
gguggaaggugauggagga

SEQ ID NO: 2401918 - RNA, 19 nt, Homo sapiens
  misc_RNA (1)...(19): siRNA sense strand
acuuggugguggagaucaa

SEQ ID NO: 2401919 - RNA, 19 nt, Homo sapiens
  misc_RNA (1)...(19): siRNA sense strand
aggaagaccugcaaagcca

SEQ ID NO: 2401920 - RNA, 19 nt, Homo sapiens
  misc_RNA (1)...(19): siRNA sense strand
cauuguguguuuacggcaa

SEQ ID NO: 2401921 - RNA, 19 nt, Homo sapiens
  misc_RNA (1)...(19): siRNA sense strand
gguauuugggauaugauca

SEQ ID NO: 2401922 - RNA, 19 nt, Homo sapiens
  misc_RNA (1)...(19): siRNA sense strand
caggaggccaagagggagu

SEQ ID NO: 2401923 - RNA, 19 nt, Homo sapiens
  misc_RNA (1)...(19): siRNA sense strand
gaugaaaacugcaaggaca

SEQ ID NO: 2401924 - RNA, 19 nt, Homo sapiens
  misc_RNA (1)...(19): siRNA sense strand
aaaccagaagagagagaau

SEQ ID NO: 2401925 - RNA, 19 nt, Homo sapiens
  misc_RNA (1)...(19): siRNA sense strand
augugaagugugugagcaa

SEQ ID NO: 2401926 - RNA, 19 nt, Homo sapiens
  misc_RNA (1)...(19): siRNA sense strand
ccacaggagaccaggggaa

SEQ ID NO: 2401927 - RNA, 19 nt, Homo sapiens
  misc_RNA (1)...(19): siRNA sense strand
gugaagugugugagcaaca

SEQ ID NO: 2401928 - RNA, 19 nt, Homo sapiens
  misc_RNA (1)...(19): siRNA sense strand
gugauuuguguuagaaaga

SEQ ID NO: 2401929 - RNA, 19 nt, Homo sapiens
  misc_RNA (1)...(19): siRNA sense strand
ugaaaccagaagagagaga

SEQ ID NO: 2401930 - RNA, 19 nt, Homo sapiens
  misc_RNA (1)...(19): siRNA sense strand
aagggaggaacgaggagaa

SEQ ID NO: 2401931 - RNA, 19 nt, Homo sapiens
  misc_RNA (1)...(19): siRNA sense strand
aggaggagggagaacagaa

SEQ ID NO: 2401932 - RNA, 19 nt, Homo sapiens
  misc_RNA (1)...(19): siRNA sense strand
ccugagaguuacugugacu

SEQ ID NO: 2401933 - RNA, 19 nt, Homo sapiens
  misc_RNA (1)...(19): siRNA sense strand
gccaagagcugguuccuca

SEQ ID NO: 2401934 - RNA, 19 nt, Homo sapiens
  misc_RNA (1)...(19): siRNA sense strand
acugcaaggacaaguacua

SEQ ID NO: 2401935 - RNA, 19 nt, Homo sapiens
  misc_RNA (1)...(19): siRNA sense strand
gaacagaaagggaggaacg

SEQ ID NO: 2401936 - RNA, 19 nt, Homo sapiens
  misc_RNA (1)...(19): siRNA sense strand
augaaaacugcaaggacaa

SEQ ID NO: 2401937 - RNA, 19 nt, Homo sapiens
  misc_RNA (1)...(19): siRNA sense strand
uggucugagugcagcaaga

SEQ ID NO: 2401938 - RNA, 19 nt, Homo sapiens
  misc_RNA (1)...(19): siRNA sense strand
cgugaugugaaguguguga

SEQ ID NO: 2401939 - RNA, 19 nt, Homo sapiens
  misc_RNA (1)...(19): siRNA sense strand
cucaccgaguggagcgaaa

SEQ ID NO: 2401940 - RNA, 19 nt, Homo sapiens
  misc_RNA (1)...(19): siRNA sense strand
augacaugacucuaaguaa

SEQ ID NO: 2401941 - RNA, 19 nt, Homo sapiens
  misc_RNA (1)...(19): siRNA sense strand
acgaggagaaggaagacuu

SEQ ID NO: 2401942 - RNA, 19 nt, Homo sapiens
  misc_RNA (1)...(19): siRNA sense strand
acgagaucuuggaugucua

SEQ ID NO: 2401943 - RNA, 19 nt, Homo sapiens
  misc_RNA (1)...(19): siRNA sense strand
ccaacaggcagacgggcuu

SEQ ID NO: 2401944 - RNA, 19 nt, Homo sapiens
  misc_RNA (1)...(19): siRNA sense strand
uggaagaccucauggccaa

SEQ ID NO: 2401945 - RNA, 19 nt, Homo sapiens
  misc_RNA (1)...(19): siRNA sense strand
gggaauuguaagcgacuau

SEQ ID NO: 2401946 - RNA, 19 nt, Homo sapiens
  misc_RNA (1)...(19): siRNA sense strand
aguagguguugguggagua

SEQ ID NO: 2401947 - RNA, 19 nt, Homo sapiens
  misc_RNA (1)...(19): siRNA sense strand
aaguaaaguucaagcagca

SEQ ID NO: 2401948 - RNA, 19 nt, Homo sapiens
  misc_RNA (1)...(19): siRNA sense strand
guggguuagaagaaggaaa

SEQ ID NO: 2401949 - RNA, 19 nt, Homo sapiens
  misc_RNA (1)...(19): siRNA sense strand
uuauacaagaagaggaaga

SEQ ID NO: 2401950 - RNA, 19 nt, Homo sapiens
  misc_RNA (1)...(19): siRNA sense strand
cagacuuaccugaaggaau

SEQ ID NO: 2401951 - RNA, 19 nt, Homo sapiens
  misc_RNA (1)...(19): siRNA sense strand
gcugacaagauguggcauu

SEQ ID NO: 2401952 - RNA, 19 nt, Homo sapiens
  misc_RNA (1)...(19): siRNA sense strand
caggaggaauauaagaaaa

SEQ ID NO: 2401953 - RNA, 19 nt, Homo sapiens
  misc_RNA (1)...(19): siRNA sense strand
uggaguagguagugugacu

SEQ ID NO: 2401954 - RNA, 19 nt, Homo sapiens
  misc_RNA (1)...(19): siRNA sense strand
gcaggaagcagcaggagga

SEQ ID NO: 2401955 - RNA, 19 nt, Homo sapiens
  misc_RNA (1)...(19): siRNA sense strand
aaggaauuacaguggcaua

SEQ ID NO: 2401956 - RNA, 19 nt, Homo sapiens
  misc_RNA (1)...(19): siRNA sense strand
uggccaaaaugaagaauau

SEQ ID NO: 2401957 - RNA, 19 nt, Homo sapiens
  misc_RNA (1)...(19): siRNA sense strand
gaagauaaugaauggggua

SEQ ID NO: 2401958 - RNA, 19 nt, Homo sapiens
  misc_RNA (1)...(19): siRNA sense strand
agguccaguuccagacuua

SEQ ID NO: 2401959 - RNA, 19 nt, Homo sapiens
  misc_RNA (1)...(19): siRNA sense strand
cugaguuaacaguggaaga

SEQ ID NO: 2401960 - RNA, 19 nt, Homo sapiens
  misc_RNA (1)...(19): siRNA sense strand
aauaguagguguuggugga

SEQ ID NO: 2401961 - RNA, 19 nt, Homo sapiens
  misc_RNA (1)...(19): siRNA sense strand
ugccuaaacaagagguuau

SEQ ID NO: 2401962 - RNA, 19 nt, Homo sapiens
  misc_RNA (1)...(19): siRNA sense strand
ugacagaaauugcaggaag

SEQ ID NO: 2401963 - RNA, 19 nt, Homo sapiens
  misc_RNA (1)...(19): siRNA sense strand
uguaaugaacuuggacaaa

SEQ ID NO: 2401964 - RNA, 19 nt, Homo sapiens
  misc_RNA (1)...(19): siRNA sense strand
gaaugggaauuguaagcga

SEQ ID NO: 2401965 - RNA, 19 nt, Homo sapiens
  misc_RNA (1)...(19): siRNA sense strand
uggguuagaagaaggaaaa

SEQ ID NO: 2401966 - RNA, 19 nt, Homo sapiens
  misc_RNA (1)...(19): siRNA sense strand
ugaaggaauuacaguggca

SEQ ID NO: 2401967 - RNA, 19 nt, Homo sapiens
  misc_RNA (1)...(19): siRNA sense strand
uaaugguggguuagaagaa

SEQ ID NO: 2401968 - RNA, 19 nt, Homo sapiens
  misc_RNA (1)...(19): siRNA sense strand
cagugugaugacagaaauu

SEQ ID NO: 2401969 - RNA, 19 nt, Homo sapiens
  misc_RNA (1)...(19): siRNA sense strand
gggugugguugcugggauc

SEQ ID NO: 2401970 - RNA, 19 nt, Homo sapiens
  misc_RNA (1)...(19): siRNA sense strand
agauucugucacugaguua

SEQ ID NO: 2401971 - RNA, 19 nt, Homo sapiens
  misc_RNA (1)...(19): siRNA sense strand
gugaaagcuuggaagaccu

SEQ ID NO: 2401972 - RNA, 19 nt, Homo sapiens
  misc_RNA (1)...(19): siRNA sense strand
ggauagaauaaguaauggu

SEQ ID NO: 2401973 - RNA, 19 nt, Homo sapiens
  misc_RNA (1)...(19): siRNA sense strand
gaaucuggggucagugaaa

SEQ ID NO: 2401974 - RNA, 19 nt, Homo sapiens
  misc_RNA (1)...(19): siRNA sense strand
uggaagaccucauggccaa

SEQ ID NO: 2401975 - RNA, 19 nt, Homo sapiens
  misc_RNA (1)...(19): siRNA sense strand
gggaauuguaagcgacuau

SEQ ID NO: 2401976 - RNA, 19 nt, Homo sapiens
  misc_RNA (1)...(19): siRNA sense strand
aguagguguugguggagua

SEQ ID NO: 2401977 - RNA, 19 nt, Homo sapiens
  misc_RNA (1)...(19): siRNA sense strand
aaguaaaguucaagcagca

SEQ ID NO: 2401978 - RNA, 19 nt, Homo sapiens
  misc_RNA (1)...(19): siRNA sense strand
guggguuagaagaaggaaa

SEQ ID NO: 2401979 - RNA, 19 nt, Homo sapiens
  misc_RNA (1)...(19): siRNA sense strand
uuauacaagaagaggaaga

SEQ ID NO: 2401980 - RNA, 19 nt, Homo sapiens
  misc_RNA (1)...(19): siRNA sense strand
cagacuuaccugaaggaau

SEQ ID NO: 2401981 - RNA, 19 nt, Homo sapiens
  misc_RNA (1)...(19): siRNA sense strand
gcugacaagauguggcauu

SEQ ID NO: 2401982 - RNA, 19 nt, Homo sapiens
  misc_RNA (1)...(19): siRNA sense strand
caggaggaauauaagaaaa

SEQ ID NO: 2401983 - RNA, 19 nt, Homo sapiens
  misc_RNA (1)...(19): siRNA sense strand
uggaguagguagugugacu

SEQ ID NO: 2401984 - RNA, 19 nt, Homo sapiens
  misc_RNA (1)...(19): siRNA sense strand
gcaggaagcagcaggagga

SEQ ID NO: 2401985 - RNA, 19 nt, Homo sapiens
  misc_RNA (1)...(19): siRNA sense strand
aaggaauuacaguggcaua

SEQ ID NO: 2401986 - RNA, 19 nt, Homo sapiens
  misc_RNA (1)...(19): siRNA sense strand
uggccaaaaugaagaauau

SEQ ID NO: 2401987 - RNA, 19 nt, Homo sapiens
  misc_RNA (1)...(19): siRNA sense strand
gaagauaaugaauggggua

SEQ ID NO: 2401988 - RNA, 19 nt, Homo sapiens
  misc_RNA (1)...(19): siRNA sense strand
agguccaguuccagacuua

SEQ ID NO: 2401989 - RNA, 19 nt, Homo sapiens
  misc_RNA (1)...(19): siRNA sense strand
cugaguuaacaguggaaga

SEQ ID NO: 2401990 - RNA, 19 nt, Homo sapiens
  misc_RNA (1)...(19): siRNA sense strand
aauaguagguguuggugga

SEQ ID NO: 2401991 - RNA, 19 nt, Homo sapiens
  misc_RNA (1)...(19): siRNA sense strand
ugccuaaacaagagguuau

SEQ ID NO: 2401992 - RNA, 19 nt, Homo sapiens
  misc_RNA (1)...(19): siRNA sense strand
ugacagaaauugcaggaag

SEQ ID NO: 2401993 - RNA, 19 nt, Homo sapiens
  misc_RNA (1)...(19): siRNA sense strand
uguaaugaacuuggacaaa

SEQ ID NO: 2401994 - RNA, 19 nt, Homo sapiens
  misc_RNA (1)...(19): siRNA sense strand
uggguuagaagaaggaaaa

SEQ ID NO: 2401995 - RNA, 19 nt, Homo sapiens
  misc_RNA (1)...(19): siRNA sense strand
gaaugggaauuguaagcga

SEQ ID NO: 2401996 - RNA, 19 nt, Homo sapiens
  misc_RNA (1)...(19): siRNA sense strand
ugaaggaauuacaguggca

SEQ ID NO: 2401997 - RNA, 19 nt, Homo sapiens
  misc_RNA (1)...(19): siRNA sense strand
uaaugguggguuagaagaa

SEQ ID NO: 2401998 - RNA, 19 nt, Homo sapiens
  misc_RNA (1)...(19): siRNA sense strand
cagugugaugacagaaauu

SEQ ID NO: 2401999 - RNA, 19 nt, Homo sapiens
  misc_RNA (1)...(19): siRNA sense strand
gggugugguugcugggauc

SEQ ID NO: 2402000 - RNA, 19 nt, Homo sapiens
  misc_RNA (1)...(19): siRNA sense strand
agauucugucacugaguua

SEQ ID NO: 2402001 - RNA, 19 nt, Homo sapiens
  misc_RNA (1)...(19): siRNA sense strand
gugaaagcuuggaagaccu

SEQ ID NO: 2402002 - RNA, 19 nt, Homo sapiens
  misc_RNA (1)...(19): siRNA sense strand
ggauagaauaaguaauggu

SEQ ID NO: 2402003 - RNA, 19 nt, Homo sapiens
  misc_RNA (1)...(19): siRNA sense strand
gaaucuggggucagugaaa

SEQ ID NO: 2402004 - RNA, 19 nt, Homo sapiens
  misc_RNA (1)...(19): siRNA sense strand
cuguaaagaccaaagcaaa

SEQ ID NO: 2402005 - RNA, 19 nt, Homo sapiens
  misc_RNA (1)...(19): siRNA sense strand
ccggaaaggaaguggagca

SEQ ID NO: 2402006 - RNA, 19 nt, Homo sapiens
  misc_RNA (1)...(19): siRNA sense strand
cggaaaggaaguggagcaa

SEQ ID NO: 2402007 - RNA, 19 nt, Homo sapiens
  misc_RNA (1)...(19): siRNA sense strand
uuaagagaccaaagagcaa

SEQ ID NO: 2402008 - RNA, 19 nt, Homo sapiens
  misc_RNA (1)...(19): siRNA sense strand
guacgcuggcagugacaaa

SEQ ID NO: 2402009 - RNA, 19 nt, Homo sapiens
  misc_RNA (1)...(19): siRNA sense strand
gggaauaaaagaggugaaa

SEQ ID NO: 2402010 - RNA, 19 nt, Homo sapiens
  misc_RNA (1)...(19): siRNA sense strand
uggcagauuacacgacaaa

SEQ ID NO: 2402011 - RNA, 19 nt, Homo sapiens
  misc_RNA (1)...(19): siRNA sense strand
cugaagaacaggcugaaaa

SEQ ID NO: 2402012 - RNA, 19 nt, Homo sapiens
  misc_RNA (1)...(19): siRNA sense strand
acuguaaagaccaaagcaa

SEQ ID NO: 2402013 - RNA, 19 nt, Homo sapiens
  misc_RNA (1)...(19): siRNA sense strand
ucgcaaaagaucaugcaaa

SEQ ID NO: 2402014 - RNA, 19 nt, Homo sapiens
  misc_RNA (1)...(19): siRNA sense strand
guuaagagaccaaagagca

SEQ ID NO: 2402015 - RNA, 19 nt, Homo sapiens
  misc_RNA (1)...(19): siRNA sense strand
ccugaggugcagaggcaau

SEQ ID NO: 2402016 - RNA, 19 nt, Homo sapiens
  misc_RNA (1)...(19): siRNA sense strand
aggaaaucaacaugggcga

SEQ ID NO: 2402017 - RNA, 19 nt, Homo sapiens
  misc_RNA (1)...(19): siRNA sense strand
auggagaaagucagaaaca

SEQ ID NO: 2402018 - RNA, 19 nt, Homo sapiens
  misc_RNA (1)...(19): siRNA sense strand
ccagaagagcagcugccaa

SEQ ID NO: 2402019 - RNA, 19 nt, Homo sapiens
  misc_RNA (1)...(19): siRNA sense strand
gccugauaccagagaacuu

SEQ ID NO: 2402020 - RNA, 19 nt, Homo sapiens
  misc_RNA (1)...(19): siRNA sense strand
ggaauaaaagaggugaaaa

SEQ ID NO: 2402021 - RNA, 19 nt, Homo sapiens
  misc_RNA (1)...(19): siRNA sense strand
gcaaacagagauucggguu

SEQ ID NO: 2402022 - RNA, 19 nt, Homo sapiens
  misc_RNA (1)...(19): siRNA sense strand
aguuuaauggagaaaguca

SEQ ID NO: 2402023 - RNA, 19 nt, Homo sapiens
  misc_RNA (1)...(19): siRNA sense strand
cagaauauuuuguggcugu

SEQ ID NO: 2402024 - RNA, 19 nt, Homo sapiens
  misc_RNA (1)...(19): siRNA sense strand
acuccacauccuacagaaa

SEQ ID NO: 2402025 - RNA, 19 nt, Homo sapiens
  misc_RNA (1)...(19): siRNA sense strand
agaaagaggagaagcggaa

SEQ ID NO: 2402026 - RNA, 19 nt, Homo sapiens
  misc_RNA (1)...(19): siRNA sense strand
gaggagaagcggaaggaga

SEQ ID NO: 2402027 - RNA, 19 nt, Homo sapiens
  misc_RNA (1)...(19): siRNA sense strand
aggagaagcggaaggagau

SEQ ID NO: 2402028 - RNA, 19 nt, Homo sapiens
  misc_RNA (1)...(19): siRNA sense strand
ucuuuaaggugcuggagga

SEQ ID NO: 2402029 - RNA, 19 nt, Homo sapiens
  misc_RNA (1)...(19): siRNA sense strand
gcgauguggugcugcgcuu

SEQ ID NO: 2402030 - RNA, 19 nt, Homo sapiens
  misc_RNA (1)...(19): siRNA sense strand
gggagcagcuguuggcacu

SEQ ID NO: 2402031 - RNA, 19 nt, Homo sapiens
  misc_RNA (1)...(19): siRNA sense strand
gcuggggaucagugagaaa

SEQ ID NO: 2402032 - RNA, 19 nt, Homo sapiens
  misc_RNA (1)...(19): siRNA sense strand
uccagaaggcccugagaga

SEQ ID NO: 2402033 - RNA, 19 nt, Homo sapiens
  misc_RNA (1)...(19): siRNA sense strand
gaagaagagaaacgccgaa

SEQ ID NO: 2402034 - RNA, 19 nt, Homo sapiens
  misc_RNA (1)...(19): siRNA sense strand
ccgaaaaggcccaaggauc

SEQ ID NO: 2402035 - RNA, 19 nt, Homo sapiens
  misc_RNA (1)...(19): siRNA sense strand
ccaacaucuuugauaguaa

SEQ ID NO: 2402036 - RNA, 19 nt, Homo sapiens
  misc_RNA (1)...(19): siRNA sense strand
cgacuaaugucaacaguga

SEQ ID NO: 2402037 - RNA, 19 nt, Homo sapiens
  misc_RNA (1)...(19): siRNA sense strand
gagcuuauguugaugaaga

SEQ ID NO: 2402038 - RNA, 19 nt, Homo sapiens
  misc_RNA (1)...(19): siRNA sense strand
ccuucaaacaagagcaauu

SEQ ID NO: 2402039 - RNA, 19 nt, Homo sapiens
  misc_RNA (1)...(19): siRNA sense strand
gcaugaagcugcagugcca

SEQ ID NO: 2402040 - RNA, 19 nt, Homo sapiens
  misc_RNA (1)...(19): siRNA sense strand
gcuuguaagaagauggaau

SEQ ID NO: 2402041 - RNA, 19 nt, Homo sapiens
  misc_RNA (1)...(19): siRNA sense strand
ccauuaaagaagaggaaac

SEQ ID NO: 2402042 - RNA, 19 nt, Homo sapiens
  misc_RNA (1)...(19): siRNA sense strand
augcagaguaguuggguau

SEQ ID NO: 2402043 - RNA, 19 nt, Homo sapiens
  misc_RNA (1)...(19): siRNA sense strand
auggagaagaggaggaaga

SEQ ID NO: 2402044 - RNA, 19 nt, Homo sapiens
  misc_RNA (1)...(19): siRNA sense strand
acuaaugucaacagugaaa

SEQ ID NO: 2402045 - RNA, 19 nt, Homo sapiens
  misc_RNA (1)...(19): siRNA sense strand
caacagaggcaauuauuau

SEQ ID NO: 2402046 - RNA, 19 nt, Homo sapiens
  misc_RNA (1)...(19): siRNA sense strand
cugaagaugugauugauau

SEQ ID NO: 2402047 - RNA, 19 nt, Homo sapiens
  misc_RNA (1)...(19): siRNA sense strand
ggacaugugcuuugaagga

SEQ ID NO: 2402048 - RNA, 19 nt, Homo sapiens
  misc_RNA (1)...(19): siRNA sense strand
gaaugaaacccguaaacca

SEQ ID NO: 2402049 - RNA, 19 nt, Homo sapiens
  misc_RNA (1)...(19): siRNA sense strand
auucaaucaugauggagaa

SEQ ID NO: 2402050 - RNA, 19 nt, Homo sapiens
  misc_RNA (1)...(19): siRNA sense strand
cagugaaaccuuugaggga

SEQ ID NO: 2402051 - RNA, 19 nt, Homo sapiens
  misc_RNA (1)...(19): siRNA sense strand
ccucugaagaugugauuga

SEQ ID NO: 2402052 - RNA, 19 nt, Homo sapiens
  misc_RNA (1)...(19): siRNA sense strand
cucaagaauccguaacaaa

SEQ ID NO: 2402053 - RNA, 19 nt, Homo sapiens
  misc_RNA (1)...(19): siRNA sense strand
gcagaugagucaagauuac

SEQ ID NO: 2402054 - RNA, 19 nt, Homo sapiens
  misc_RNA (1)...(19): siRNA sense strand
gugcuuugaaggaaugaaa

SEQ ID NO: 2402055 - RNA, 19 nt, Homo sapiens
  misc_RNA (1)...(19): siRNA sense strand
aagaagaauugcuagcaga

SEQ ID NO: 2402056 - RNA, 19 nt, Homo sapiens
  misc_RNA (1)...(19): siRNA sense strand
ggaacucaacagaggcaau

SEQ ID NO: 2402057 - RNA, 19 nt, Homo sapiens
  misc_RNA (1)...(19): siRNA sense strand
cuacaguuccacagaaaca

SEQ ID NO: 2402058 - RNA, 19 nt, Homo sapiens
  misc_RNA (1)...(19): siRNA sense strand
agaagaauugcuagcagaa

SEQ ID NO: 2402059 - RNA, 19 nt, Homo sapiens
  misc_RNA (1)...(19): siRNA sense strand
gacacgagaucuuguacaa

SEQ ID NO: 2402060 - RNA, 19 nt, Homo sapiens
  misc_RNA (1)...(19): siRNA sense strand
cuucaugguguauuagaua

SEQ ID NO: 2402061 - RNA, 19 nt, Homo sapiens
  misc_RNA (1)...(19): siRNA sense strand
cagaucaagaggaggacau

SEQ ID NO: 2402062 - RNA, 19 nt, Homo sapiens
  misc_RNA (1)...(19): siRNA sense strand
aaaccaaacugcagccuca

SEQ ID NO: 2402063 - RNA, 19 nt, Homo sapiens
  misc_RNA (1)...(19): siRNA sense strand
ugucagaucaagaggagga

SEQ ID NO: 2402064 - RNA, 19 nt, Homo sapiens
  misc_RNA (1)...(19): siRNA sense strand
cucuacaguuccacagaaa

SEQ ID NO: 2402065 - RNA, 19 nt, Homo sapiens
  misc_RNA (1)...(19): siRNA sense strand
cugcaaaucgacccaguaa

SEQ ID NO: 2402066 - RNA, 19 nt, Homo sapiens
  misc_RNA (1)...(19): siRNA sense strand
ggaacaacacaauucgauu

SEQ ID NO: 2402067 - RNA, 19 nt, Homo sapiens
  misc_RNA (1)...(19): siRNA sense strand
cauuuaaacagguugcaau

SEQ ID NO: 2402068 - RNA, 19 nt, Homo sapiens
  misc_RNA (1)...(19): siRNA sense strand
acaagaauuaggagcuuau

SEQ ID NO: 2402069 - RNA, 19 nt, Homo sapiens
  misc_RNA (1)...(19): siRNA sense strand
aggaggaagaagaugauga

SEQ ID NO: 2402070 - RNA, 19 nt, Homo sapiens
  misc_RNA (1)...(19): siRNA sense strand
cauuaaagaagaggaaaca

SEQ ID NO: 2402071 - RNA, 19 nt, Homo sapiens
  misc_RNA (1)...(19): siRNA sense strand
ucuuguacaaccagauaaa

SEQ ID NO: 2402072 - RNA, 19 nt, Homo sapiens
  misc_RNA (1)...(19): siRNA sense strand
acaugugcuuugaaggaau

SEQ ID NO: 2402073 - RNA, 19 nt, Homo sapiens
  misc_RNA (1)...(19): siRNA sense strand
aaugaaacccguaaaccaa

SEQ ID NO: 2402074 - RNA, 19 nt, Homo sapiens
  misc_RNA (1)...(19): siRNA sense strand
aaaagagauuccagaguuu

SEQ ID NO: 2402075 - RNA, 19 nt, Homo sapiens
  misc_RNA (1)...(19): siRNA sense strand
cuucuaaacaagcuaacaa

SEQ ID NO: 2402076 - RNA, 19 nt, Homo sapiens
  misc_RNA (1)...(19): siRNA sense strand
ggacccaaaugguagcuuu

SEQ ID NO: 2402077 - RNA, 19 nt, Homo sapiens
  misc_RNA (1)...(19): siRNA sense strand
aaguaguaguggcaccaaa

SEQ ID NO: 2402078 - RNA, 19 nt, Homo sapiens
  misc_RNA (1)...(19): siRNA sense strand
ccugcaagucccaaguuua

SEQ ID NO: 2402079 - RNA, 19 nt, Homo sapiens
  misc_RNA (1)...(19): siRNA sense strand
ccguauggcuucauggugu

SEQ ID NO: 2402080 - RNA, 19 nt, Homo sapiens
  misc_RNA (1)...(19): siRNA sense strand
ggagaugagaggaggcaug

SEQ ID NO: 2402081 - RNA, 19 nt, Homo sapiens
  misc_RNA (1)...(19): siRNA sense strand
gaagaaacguauaguccgu

SEQ ID NO: 2402082 - RNA, 19 nt, Homo sapiens
  misc_RNA (1)...(19): siRNA sense strand
cguauggcuucauggugua

SEQ ID NO: 2402083 - RNA, 19 nt, Homo sapiens
  misc_RNA (1)...(19): siRNA sense strand
ugguaaguucaguuguuaa

SEQ ID NO: 2402084 - RNA, 19 nt, Homo sapiens
  misc_RNA (1)...(19): siRNA sense strand
cugcaaagccugaaaggag

SEQ ID NO: 2402085 - RNA, 19 nt, Homo sapiens
  misc_RNA (1)...(19): siRNA sense strand
cugcagaugagucaagauu

SEQ ID NO: 2402086 - RNA, 19 nt, Homo sapiens
  misc_RNA (1)...(19): siRNA sense strand
uuagaaacaacucggagaa

SEQ ID NO: 2402087 - RNA, 19 nt, Homo sapiens
  misc_RNA (1)...(19): siRNA sense strand
ccugauuacauuaugguga

SEQ ID NO: 2402088 - RNA, 19 nt, Homo sapiens
  misc_RNA (1)...(19): siRNA sense strand
ugcaaagccugaaaggaga

SEQ ID NO: 2402089 - RNA, 19 nt, Homo sapiens
  misc_RNA (1)...(19): siRNA sense strand
gccaaagcugucugaggaa

SEQ ID NO: 2402090 - RNA, 19 nt, Homo sapiens
  misc_RNA (1)...(19): siRNA sense strand
uggugaugguggccaacaa

SEQ ID NO: 2402091 - RNA, 19 nt, Homo sapiens
  misc_RNA (1)...(19): siRNA sense strand
cugcaagucccaaguuuau

SEQ ID NO: 2402092 - RNA, 19 nt, Homo sapiens
  misc_RNA (1)...(19): siRNA sense strand
caggauacaugucagauca

SEQ ID NO: 2402093 - RNA, 19 nt, Homo sapiens
  misc_RNA (1)...(19): siRNA sense strand
cgcaagauccggagugcca

SEQ ID NO: 2402094 - RNA, 19 nt, Homo sapiens
  misc_RNA (1)...(19): siRNA sense strand
caaguucgcaggagucaaa

SEQ ID NO: 2402095 - RNA, 19 nt, Homo sapiens
  misc_RNA (1)...(19): siRNA sense strand
ucugaagaugugauugaua

SEQ ID NO: 2402096 - RNA, 19 nt, Homo sapiens
  misc_RNA (1)...(19): siRNA sense strand
uuucaacagcagcagaaua

SEQ ID NO: 2402097 - RNA, 19 nt, Homo sapiens
  misc_RNA (1)...(19): siRNA sense strand
cuugauaugcagaguaguu

SEQ ID NO: 2402098 - RNA, 19 nt, Homo sapiens
  misc_RNA (1)...(19): siRNA sense strand
gaugguggccaacaagaaa

SEQ ID NO: 2402099 - RNA, 19 nt, Homo sapiens
  misc_RNA (1)...(19): siRNA sense strand
uagaaacaacucggagaaa

SEQ ID NO: 2402100 - RNA, 19 nt, Homo sapiens
  misc_RNA (1)...(19): siRNA sense strand
agaagaggaggaagaagau

SEQ ID NO: 2402101 - RNA, 19 nt, Homo sapiens
  misc_RNA (1)...(19): siRNA sense strand
cugauuacauuauggugau

SEQ ID NO: 2402102 - RNA, 19 nt, Homo sapiens
  misc_RNA (1)...(19): siRNA sense strand
gugaaccagaggugcuuaa

SEQ ID NO: 2402103 - RNA, 19 nt, Homo sapiens
  misc_RNA (1)...(19): siRNA sense strand
accaagugauggagaucuu

SEQ ID NO: 2402104 - RNA, 19 nt, Homo sapiens
  misc_RNA (1)...(19): siRNA sense strand
cccucaaccuccacaacaa

SEQ ID NO: 2402105 - RNA, 19 nt, Homo sapiens
  misc_RNA (1)...(19): siRNA sense strand
caccaggaucugagggaaa

SEQ ID NO: 2402106 - RNA, 19 nt, Homo sapiens
  misc_RNA (1)...(19): siRNA sense strand
gcauacaauuagaagcuga

SEQ ID NO: 2402107 - RNA, 19 nt, Homo sapiens
  misc_RNA (1)...(19): siRNA sense strand
agggaaacgcaucuggaaa

SEQ ID NO: 2402108 - RNA, 19 nt, Homo sapiens
  misc_RNA (1)...(19): siRNA sense strand
uggccaaggaguauguuaa

SEQ ID NO: 2402109 - RNA, 19 nt, Homo sapiens
  misc_RNA (1)...(19): siRNA sense strand
ccuugaaaucagaugaaaa

SEQ ID NO: 2402110 - RNA, 19 nt, Homo sapiens
  misc_RNA (1)...(19): siRNA sense strand
gacuacugcaguugagaaa

SEQ ID NO: 2402111 - RNA, 19 nt, Homo sapiens
  misc_RNA (1)...(19): siRNA sense strand
agaaaaggcaaaagcggaa

SEQ ID NO: 2402112 - RNA, 19 nt, Homo sapiens
  misc_RNA (1)...(19): siRNA sense strand
uugaagaagaaaaggcaaa

SEQ ID NO: 2402113 - RNA, 19 nt, Homo sapiens
  misc_RNA (1)...(19): siRNA sense strand
accaauaaaucaaacggua

SEQ ID NO: 2402114 - RNA, 19 nt, Homo sapiens
  misc_RNA (1)...(19): siRNA sense strand
acaaauucuuggagauucu

SEQ ID NO: 2402115 - RNA, 19 nt, Homo sapiens
  misc_RNA (1)...(19): siRNA sense strand
cuuugacagugaugagauu

SEQ ID NO: 2402116 - RNA, 19 nt, Homo sapiens
  misc_RNA (1)...(19): siRNA sense strand
ugagcuaauaagagcaauu

SEQ ID NO: 2402117 - RNA, 19 nt, Homo sapiens
  misc_RNA (1)...(19): siRNA sense strand
aggaugaggaauuugaaaa

SEQ ID NO: 2402118 - RNA, 19 nt, Homo sapiens
  misc_RNA (1)...(19): siRNA sense strand
ucaaaauaaggaugaggaa

SEQ ID NO: 2402119 - RNA, 19 nt, Homo sapiens
  misc_RNA (1)...(19): siRNA sense strand
uggacuagaagauaaagaa

SEQ ID NO: 2402120 - RNA, 19 nt, Homo sapiens
  misc_RNA (1)...(19): siRNA sense strand
ggaugaugacagaacaguu

SEQ ID NO: 2402121 - RNA, 19 nt, Homo sapiens
  misc_RNA (1)...(19): siRNA sense strand
gcaaugggcaugagcgaga

SEQ ID NO: 2402122 - RNA, 19 nt, Homo sapiens
  misc_RNA (1)...(19): siRNA sense strand
gggcaaugggcaugagcga

SEQ ID NO: 2402123 - RNA, 19 nt, Homo sapiens
  misc_RNA (1)...(19): siRNA sense strand
augaugaguaccuggauaa

SEQ ID NO: 2402124 - RNA, 19 nt, Homo sapiens
  misc_RNA (1)...(19): siRNA sense strand
gagggcaucuccagggcua

SEQ ID NO: 2402125 - RNA, 19 nt, Homo sapiens
  misc_RNA (1)...(19): siRNA sense strand
acgacaagcguguguacau

SEQ ID NO: 2402126 - RNA, 19 nt, Homo sapiens
  misc_RNA (1)...(19): siRNA sense strand
ccuucaugggccuggagaa

SEQ ID NO: 2402127 - RNA, 19 nt, Homo sapiens
  misc_RNA (1)...(19): siRNA sense strand
cuguauuauaggagagaaa

SEQ ID NO: 2402128 - RNA, 19 nt, Homo sapiens
  misc_RNA (1)...(19): siRNA sense strand
gaacuugagaugagggcaa

SEQ ID NO: 2402129 - RNA, 19 nt, Homo sapiens
  misc_RNA (1)...(19): siRNA sense strand
agauagaugaccuggagaa

SEQ ID NO: 2402130 - RNA, 19 nt, Homo sapiens
  misc_RNA (1)...(19): siRNA sense strand
cauccgugagagagaauaa

SEQ ID NO: 2402131 - RNA, 19 nt, Homo sapiens
  misc_RNA (1)...(19): siRNA sense strand
ugauuuagucagucagcaa

SEQ ID NO: 2402132 - RNA, 19 nt, Homo sapiens
  misc_RNA (1)...(19): siRNA sense strand
gagaugagggcaagagcga

SEQ ID NO: 2402133 - RNA, 19 nt, Homo sapiens
  misc_RNA (1)...(19): siRNA sense strand
cgugagagagaauaagcaa

SEQ ID NO: 2402134 - RNA, 19 nt, Homo sapiens
  misc_RNA (1)...(19): siRNA sense strand
aaaacaaggaaaaggggaa

SEQ ID NO: 2402135 - RNA, 19 nt, Homo sapiens
  misc_RNA (1)...(19): siRNA sense strand
gcuucauccgugagagaga

SEQ ID NO: 2402136 - RNA, 19 nt, Homo sapiens
  misc_RNA (1)...(19): siRNA sense strand
aggggaagauagugaugua

SEQ ID NO: 2402137 - RNA, 19 nt, Homo sapiens
  misc_RNA (1)...(19): siRNA sense strand
ccuaaugaaagcuggugau

SEQ ID NO: 2402138 - RNA, 19 nt, Homo sapiens
  misc_RNA (1)...(19): siRNA sense strand
cuggcagagucuagcccaa

SEQ ID NO: 2402139 - RNA, 19 nt, Homo sapiens
  misc_RNA (1)...(19): siRNA sense strand
aggaaaaggggaagauagu

SEQ ID NO: 2402140 - RNA, 19 nt, Homo sapiens
  misc_RNA (1)...(19): siRNA sense strand
ggagcaaagaagagggcua

SEQ ID NO: 2402141 - RNA, 19 nt, Homo sapiens
  misc_RNA (1)...(19): siRNA sense strand
uggcagaggucuacaacuu

SEQ ID NO: 2402142 - RNA, 19 nt, Homo sapiens
  misc_RNA (1)...(19): siRNA sense strand
ccugaauaguguuggagau

SEQ ID NO: 2402143 - RNA, 19 nt, Homo sapiens
  misc_RNA (1)...(19): siRNA sense strand
ggacaaagccaaugacccu

SEQ ID NO: 2402144 - RNA, 19 nt, Homo sapiens
  misc_RNA (1)...(19): siRNA sense strand
acacaaaccucuacccaca

SEQ ID NO: 2402145 - RNA, 19 nt, Homo sapiens
  misc_RNA (1)...(19): siRNA sense strand
agagaugggacaugggaca

SEQ ID NO: 2402146 - RNA, 19 nt, Homo sapiens
  misc_RNA (1)...(19): siRNA sense strand
uguacauuguggagcaaau

SEQ ID NO: 2402147 - RNA, 19 nt, Homo sapiens
  misc_RNA (1)...(19): siRNA sense strand
ccggcgugaccaagggaaa

SEQ ID NO: 2402148 - RNA, 19 nt, Homo sapiens
  misc_RNA (1)...(19): siRNA sense strand
gauaaguggacccggaaaa

SEQ ID NO: 2402149 - RNA, 19 nt, Homo sapiens
  misc_RNA (1)...(19): siRNA sense strand
ggcuauauuagaagggaca

SEQ ID NO: 2402150 - RNA, 19 nt, Homo sapiens
  misc_RNA (1)...(19): siRNA sense strand
cuauauuagaagggacaaa

SEQ ID NO: 2402151 - RNA, 19 nt, Homo sapiens
  misc_RNA (1)...(19): siRNA sense strand
cggaaaggauauuggcccu

SEQ ID NO: 2402152 - RNA, 19 nt, Homo sapiens
  misc_RNA (1)...(19): siRNA sense strand
gauucauuuuggagacaua

SEQ ID NO: 2402153 - RNA, 19 nt, Homo sapiens
  misc_RNA (1)...(19): siRNA sense strand
auauauaaacacugggacu

SEQ ID NO: 2402154 - RNA, 19 nt, Homo sapiens
  misc_RNA (1)...(19): siRNA sense strand
caagauaaguggacccgga

SEQ ID NO: 2402155 - RNA, 19 nt, Homo sapiens
  misc_RNA (1)...(19): siRNA sense strand
agggcauggcagaggucua

SEQ ID NO: 2402156 - RNA, 19 nt, Homo sapiens
  misc_RNA (1)...(19): siRNA sense strand
agaaaguaaagcugaacca

SEQ ID NO: 2402157 - RNA, 19 nt, Homo sapiens
  misc_RNA (1)...(19): siRNA sense strand
aacugauguucuacggaaa

SEQ ID NO: 2402158 - RNA, 19 nt, Homo sapiens
  misc_RNA (1)...(19): siRNA sense strand
agauaaguggacccggaaa

SEQ ID NO: 2402159 - RNA, 19 nt, Homo sapiens
  misc_RNA (1)...(19): siRNA sense strand
gugcaggauuuuauggaga

SEQ ID NO: 2402160 - RNA, 19 nt, Homo sapiens
  misc_RNA (1)...(19): siRNA sense strand
agauaaagauaccagcagu

SEQ ID NO: 2402161 - RNA, 19 nt, Homo sapiens
  misc_RNA (1)...(19): siRNA sense strand
aaacugauguucuacggaa

SEQ ID NO: 2402162 - RNA, 19 nt, Homo sapiens
  misc_RNA (1)...(19): siRNA sense strand
ggauauuggcccuccuaca

SEQ ID NO: 2402163 - RNA, 19 nt, Homo sapiens
  misc_RNA (1)...(19): siRNA sense strand
uuggagacauacaggcuau

SEQ ID NO: 2402164 - RNA, 19 nt, Homo sapiens
  misc_RNA (1)...(19): siRNA sense strand
uagaagggacaaagccaau

SEQ ID NO: 2402165 - RNA, 19 nt, Homo sapiens
  misc_RNA (1)...(19): siRNA sense strand
cugaagaaaguaaagcuga

SEQ ID NO: 2402166 - RNA, 19 nt, Homo sapiens
  misc_RNA (1)...(19): siRNA sense strand
ggauugauauugcugcaga

SEQ ID NO: 2402167 - RNA, 19 nt, Homo sapiens
  misc_RNA (1)...(19): siRNA sense strand
guguaacgaaugugggaaa

SEQ ID NO: 2402168 - RNA, 19 nt, Homo sapiens
  misc_RNA (1)...(19): siRNA sense strand
gggaaagguaggagagacu

SEQ ID NO: 2402169 - RNA, 19 nt, Homo sapiens
  misc_RNA (1)...(19): siRNA sense strand
ggauaugacuucagccaca

SEQ ID NO: 2402170 - RNA, 19 nt, Homo sapiens
  misc_RNA (1)...(19): siRNA sense strand
ccuuaugaguguaacgaau

SEQ ID NO: 2402171 - RNA, 19 nt, Homo sapiens
  misc_RNA (1)...(19): siRNA sense strand
ggagagaauucauccggaa

SEQ ID NO: 2402172 - RNA, 19 nt, Homo sapiens
  misc_RNA (1)...(19): siRNA sense strand
gggaaaagccaggcagaaa

SEQ ID NO: 2402173 - RNA, 19 nt, Homo sapiens
  misc_RNA (1)...(19): siRNA sense strand
guguggugaaugugggaaa

SEQ ID NO: 2402174 - RNA, 19 nt, Homo sapiens
  misc_RNA (1)...(19): siRNA sense strand
ccauacgagugcagcgaau

SEQ ID NO: 2402175 - RNA, 19 nt, Homo sapiens
  misc_RNA (1)...(19): siRNA sense strand
guguagcagaugugguaaa

SEQ ID NO: 2402176 - RNA, 19 nt, Homo sapiens
  misc_RNA (1)...(19): siRNA sense strand
gggaaagaguucagucgga

SEQ ID NO: 2402177 - RNA, 19 nt, Homo sapiens
  misc_RNA (1)...(19): siRNA sense strand
ccuuauguaugcagcgaau

SEQ ID NO: 2402178 - RNA, 19 nt, Homo sapiens
  misc_RNA (1)...(19): siRNA sense strand
agugagugcgggagagaau

SEQ ID NO: 2402179 - RNA, 19 nt, Homo sapiens
  misc_RNA (1)...(19): siRNA sense strand
augcagcgaaugugggaaa

SEQ ID NO: 2402180 - RNA, 19 nt, Homo sapiens
  misc_RNA (1)...(19): siRNA sense strand
ggagaagagcccugggugu

SEQ ID NO: 2402181 - RNA, 19 nt, Homo sapiens
  misc_RNA (1)...(19): siRNA sense strand
ccacagaaagagaggccca

SEQ ID NO: 2402182 - RNA, 19 nt, Homo sapiens
  misc_RNA (1)...(19): siRNA sense strand
ggagaaaggccauacgagu

SEQ ID NO: 2402183 - RNA, 19 nt, Homo sapiens
  misc_RNA (1)...(19): siRNA sense strand
ggaaagaguucagucggaa

SEQ ID NO: 2402184 - RNA, 19 nt, Homo sapiens
  misc_RNA (1)...(19): siRNA sense strand
ccuuaugagugcagcaagu

SEQ ID NO: 2402185 - RNA, 19 nt, Homo sapiens
  misc_RNA (1)...(19): siRNA sense strand
gugcagcaagugcgggaaa

SEQ ID NO: 2402186 - RNA, 19 nt, Homo sapiens
  misc_RNA (1)...(19): siRNA sense strand
augugaugcuggagaacuu

SEQ ID NO: 2402187 - RNA, 19 nt, Homo sapiens
  misc_RNA (1)...(19): siRNA sense strand
agucaugaaacuagagcga

SEQ ID NO: 2402188 - RNA, 19 nt, Homo sapiens
  misc_RNA (1)...(19): siRNA sense strand
guguggcaaaugugggaaa

SEQ ID NO: 2402189 - RNA, 19 nt, Homo sapiens
  misc_RNA (1)...(19): siRNA sense strand
ccagcccaauggagggaaa

SEQ ID NO: 2402190 - RNA, 19 nt, Homo sapiens
  misc_RNA (1)...(19): siRNA sense strand
ugggaaauucuuuagacaa

SEQ ID NO: 2402191 - RNA, 19 nt, Homo sapiens
  misc_RNA (1)...(19): siRNA sense strand
cuuaauguacacuggagaa

SEQ ID NO: 2402192 - RNA, 19 nt, Homo sapiens
  misc_RNA (1)...(19): siRNA sense strand
ccuuauguguguagugagu

SEQ ID NO: 2402193 - RNA, 19 nt, Homo sapiens
  misc_RNA (1)...(19): siRNA sense strand
guguaugaccagguggaua

SEQ ID NO: 2402194 - RNA, 19 nt, Homo sapiens
  misc_RNA (1)...(19): siRNA sense strand
guacagacuuugaccagca

SEQ ID NO: 2402195 - RNA, 19 nt, Homo sapiens
  misc_RNA (1)...(19): siRNA sense strand
gacccucacaugugggaaa

SEQ ID NO: 2402196 - RNA, 19 nt, Homo sapiens
  misc_RNA (1)...(19): siRNA sense strand
cgaacucacacuggagaaa

SEQ ID NO: 2402197 - RNA, 19 nt, Homo sapiens
  misc_RNA (1)...(19): siRNA sense strand
augaugugaugcuggagaa

SEQ ID NO: 2402198 - RNA, 19 nt, Homo sapiens
  misc_RNA (1)...(19): siRNA sense strand
guguagugagugcgggaga

SEQ ID NO: 2402199 - RNA, 19 nt, Homo sapiens
  misc_RNA (1)...(19): siRNA sense strand
ggacagagguaucacaggu

SEQ ID NO: 2402200 - RNA, 19 nt, Homo sapiens
  misc_RNA (1)...(19): siRNA sense strand
aggaaggagggcagagacu

SEQ ID NO: 2402201 - RNA, 19 nt, Homo sapiens
  misc_RNA (1)...(19): siRNA sense strand
gugcagugaaugugggaag

SEQ ID NO: 2402202 - RNA, 19 nt, Homo sapiens
  misc_RNA (1)...(19): siRNA sense strand
cugcagaguccaugugcca

SEQ ID NO: 2402203 - RNA, 19 nt, Homo sapiens
  misc_RNA (1)...(19): siRNA sense strand
acucuaucaguguggcaaa

SEQ ID NO: 2402204 - RNA, 19 nt, Homo sapiens
  misc_RNA (1)...(19): siRNA sense strand
ugggaaggccuuuagccaa

SEQ ID NO: 2402205 - RNA, 19 nt, Homo sapiens
  misc_RNA (1)...(19): siRNA sense strand
gugaaaagcugcagagucc

SEQ ID NO: 2402206 - RNA, 19 nt, Homo sapiens
  misc_RNA (1)...(19): siRNA sense strand
gcagaguccaugugccaga

SEQ ID NO: 2402207 - RNA, 19 nt, Homo sapiens
  misc_RNA (1)...(19): siRNA sense strand
agucuaaucucauucgaca

SEQ ID NO: 2402208 - RNA, 19 nt, Homo sapiens
  misc_RNA (1)...(19): siRNA sense strand
auaccuuacaccuggcuaa

SEQ ID NO: 2402209 - RNA, 19 nt, Homo sapiens
  misc_RNA (1)...(19): siRNA sense strand
ccucaucaggcacuggaaa

SEQ ID NO: 2402210 - RNA, 19 nt, Homo sapiens
  misc_RNA (1)...(19): siRNA sense strand
uuaacaaagaggagagcaa

SEQ ID NO: 2402211 - RNA, 19 nt, Homo sapiens
  misc_RNA (1)...(19): siRNA sense strand
gaauaaugaugaaagggau

SEQ ID NO: 2402212 - RNA, 19 nt, Homo sapiens
  misc_RNA (1)...(19): siRNA sense strand
aaggaaaagcugaaggaaa

SEQ ID NO: 2402213 - RNA, 19 nt, Homo sapiens
  misc_RNA (1)...(19): siRNA sense strand
cagcagaggagcagagagu

SEQ ID NO: 2402214 - RNA, 19 nt, Homo sapiens
  misc_RNA (1)...(19): siRNA sense strand
cuucauuagugccgagaau

SEQ ID NO: 2402215 - RNA, 19 nt, Homo sapiens
  misc_RNA (1)...(19): siRNA sense strand
ggggaaucuacguggguaa

SEQ ID NO: 2402216 - RNA, 19 nt, Homo sapiens
  misc_RNA (1)...(19): siRNA sense strand
guuuaugaagauugggauu

SEQ ID NO: 2402217 - RNA, 19 nt, Homo sapiens
  misc_RNA (1)...(19): siRNA sense strand
ccacaagaggaguuaugaa

SEQ ID NO: 2402218 - RNA, 19 nt, Homo sapiens
  misc_RNA (1)...(19): siRNA sense strand
gcagaggagcagagaguac

SEQ ID NO: 2402219 - RNA, 19 nt, Homo sapiens
  misc_RNA (1)...(19): siRNA sense strand
gagccaaaacguuuagaaa

SEQ ID NO: 2402220 - RNA, 19 nt, Homo sapiens
  misc_RNA (1)...(19): siRNA sense strand
augacauucuugagcuaua

SEQ ID NO: 2402221 - RNA, 19 nt, Homo sapiens
  misc_RNA (1)...(19): siRNA sense strand
ccaauaagcagaaagacca

SEQ ID NO: 2402222 - RNA, 19 nt, Homo sapiens
  misc_RNA (1)...(19): siRNA sense strand
caauaagcagaaagaccaa

SEQ ID NO: 2402223 - RNA, 19 nt, Homo sapiens
  misc_RNA (1)...(19): siRNA sense strand
cuauagagaacaugaacca

SEQ ID NO: 2402224 - RNA, 19 nt, Homo sapiens
  misc_RNA (1)...(19): siRNA sense strand
cguggcagaagguggauua

SEQ ID NO: 2402225 - RNA, 19 nt, Homo sapiens
  misc_RNA (1)...(19): siRNA sense strand
cugcagaugacuauagaga

SEQ ID NO: 2402226 - RNA, 19 nt, Homo sapiens
  misc_RNA (1)...(19): siRNA sense strand
uugugaagguuuaugaaga

SEQ ID NO: 2402227 - RNA, 19 nt, Homo sapiens
  misc_RNA (1)...(19): siRNA sense strand
gaacgaggcuucagcagca

SEQ ID NO: 2402228 - RNA, 19 nt, Homo sapiens
  misc_RNA (1)...(19): siRNA sense strand
augaagaugaugacgauau

SEQ ID NO: 2402229 - RNA, 19 nt, Homo sapiens
  misc_RNA (1)...(19): siRNA sense strand
caaacauggaggaguacau

SEQ ID NO: 2402230 - RNA, 19 nt, Homo sapiens
  misc_RNA (1)...(19): siRNA sense strand
uggaaaugcggaagaacga

SEQ ID NO: 2402231 - RNA, 19 nt, Homo sapiens
  misc_RNA (1)...(19): siRNA sense strand
guugcaugauucaggauau

SEQ ID NO: 2402232 - RNA, 19 nt, Homo sapiens
  misc_RNA (1)...(19): siRNA sense strand
ccgauggagugcacagaca

SEQ ID NO: 2402233 - RNA, 19 nt, Homo sapiens
  misc_RNA (1)...(19): siRNA sense strand
cgagaauucaugugaucuu

SEQ ID NO: 2402234 - RNA, 19 nt, Homo sapiens
  misc_RNA (1)...(19): siRNA sense strand
agaacgacccucagagcau

SEQ ID NO: 2402235 - RNA, 19 nt, Homo sapiens
  misc_RNA (1)...(19): siRNA sense strand
gugaaauuucguugcauga

SEQ ID NO: 2402236 - RNA, 19 nt, Homo sapiens
  misc_RNA (1)...(19): siRNA sense strand
ccaacaugcaggugccaga

SEQ ID NO: 2402237 - RNA, 19 nt, Homo sapiens
  misc_RNA (1)...(19): siRNA sense strand
ugaauaaugaugaaaggga

SEQ ID NO: 2402238 - RNA, 19 nt, Homo sapiens
  misc_RNA (1)...(19): siRNA sense strand
gacugggagaagaaaguaa

SEQ ID NO: 2402239 - RNA, 19 nt, Homo sapiens
  misc_RNA (1)...(19): siRNA sense strand
agggaguguugguggucuu

SEQ ID NO: 2402240 - RNA, 19 nt, Homo sapiens
  misc_RNA (1)...(19): siRNA sense strand
ucaaugguguggagagcca

SEQ ID NO: 2402241 - RNA, 19 nt, Homo sapiens
  misc_RNA (1)...(19): siRNA sense strand
acgaaauaccacuuuggaa

SEQ ID NO: 2402242 - RNA, 19 nt, Homo sapiens
  misc_RNA (1)...(19): siRNA sense strand
uggauuaugacuucagcua

SEQ ID NO: 2402243 - RNA, 19 nt, Homo sapiens
  misc_RNA (1)...(19): siRNA sense strand
guuaugaagaugaugacga

SEQ ID NO: 2402244 - RNA, 19 nt, Homo sapiens
  misc_RNA (1)...(19): siRNA sense strand
gaguguugguggucuucaa

SEQ ID NO: 2402245 - RNA, 19 nt, Homo sapiens
  misc_RNA (1)...(19): siRNA sense strand
gcacagacacagcagagga

SEQ ID NO: 2402246 - RNA, 19 nt, Homo sapiens
  misc_RNA (1)...(19): siRNA sense strand
aacaaagaggagagcaaaa

SEQ ID NO: 2402247 - RNA, 19 nt, Homo sapiens
  misc_RNA (1)...(19): siRNA sense strand
agaugacuauagagaacau

SEQ ID NO: 2402248 - RNA, 19 nt, Homo sapiens
  misc_RNA (1)...(19): siRNA sense strand
ccuuguaaucgaugagacu

SEQ ID NO: 2402249 - RNA, 19 nt, Homo sapiens
  misc_RNA (1)...(19): siRNA sense strand
ugugaauggaaaugaacuu

SEQ ID NO: 2402250 - RNA, 19 nt, Homo sapiens
  misc_RNA (1)...(19): siRNA sense strand
uaugaaacgguuaaccaaa

SEQ ID NO: 2402251 - RNA, 19 nt, Homo sapiens
  misc_RNA (1)...(19): siRNA sense strand
auuuaaacucuccacgaaa

SEQ ID NO: 2402252 - RNA, 19 nt, Homo sapiens
  misc_RNA (1)...(19): siRNA sense strand
gggaaucuacguggguaaa

SEQ ID NO: 2402253 - RNA, 19 nt, Homo sapiens
  misc_RNA (1)...(19): siRNA sense strand
cuauguuaaugcaaaccaa

SEQ ID NO: 2402254 - RNA, 19 nt, Homo sapiens
  misc_RNA (1)...(19): siRNA sense strand
cacaaagacuacacagcca

SEQ ID NO: 2402255 - RNA, 19 nt, Homo sapiens
  misc_RNA (1)...(19): siRNA sense strand
auauggaccuacagcccaa

SEQ ID NO: 2402256 - RNA, 19 nt, Homo sapiens
  misc_RNA (1)...(19): siRNA sense strand
gugaagacaaagaggauga

SEQ ID NO: 2402257 - RNA, 19 nt, Homo sapiens
  misc_RNA (1)...(19): siRNA sense strand
uguuaaaucucgauggaca

SEQ ID NO: 2402258 - RNA, 19 nt, Homo sapiens
  misc_RNA (1)...(19): siRNA sense strand
acaaagaggaugaugguga

SEQ ID NO: 2402259 - RNA, 19 nt, Homo sapiens
  misc_RNA (1)...(19): siRNA sense strand
ugguagugauuguggauau

SEQ ID NO: 2402260 - RNA, 19 nt, Homo sapiens
  misc_RNA (1)...(19): siRNA sense strand
cgugacaagaccaaagaua

SEQ ID NO: 2402261 - RNA, 19 nt, Homo sapiens
  misc_RNA (1)...(19): siRNA sense strand
ggguauuagcagauuggaa

SEQ ID NO: 2402262 - RNA, 19 nt, Homo sapiens
  misc_RNA (1)...(19): siRNA sense strand
caugcaaagacaauagaua

SEQ ID NO: 2402263 - RNA, 19 nt, Homo sapiens
  misc_RNA (1)...(19): siRNA sense strand
aauaagugugugugugaua

SEQ ID NO: 2402264 - RNA, 19 nt, Homo sapiens
  misc_RNA (1)...(19): siRNA sense strand
aguaagagaacucaagcaa

SEQ ID NO: 2402265 - RNA, 19 nt, Homo sapiens
  misc_RNA (1)...(19): siRNA sense strand
cuuacaaacagcagaugaa

SEQ ID NO: 2402266 - RNA, 19 nt, Homo sapiens
  misc_RNA (1)...(19): siRNA sense strand
guacuucagaugaggaaau

SEQ ID NO: 2402267 - RNA, 19 nt, Homo sapiens
  misc_RNA (1)...(19): siRNA sense strand
gcuuguagagucuggaaau

SEQ ID NO: 2402268 - RNA, 19 nt, Homo sapiens
  misc_RNA (1)...(19): siRNA sense strand
aaacggaagaauagacgaa

SEQ ID NO: 2402269 - RNA, 19 nt, Homo sapiens
  misc_RNA (1)...(19): siRNA sense strand
cuguaaugguagugauugu

SEQ ID NO: 2402270 - RNA, 19 nt, Homo sapiens
  misc_RNA (1)...(19): siRNA sense strand
augaaagacugcaucgaau

SEQ ID NO: 2402271 - RNA, 19 nt, Homo sapiens
  misc_RNA (1)...(19): siRNA sense strand
acggaagaauagacgaaaa

SEQ ID NO: 2402272 - RNA, 19 nt, Homo sapiens
  misc_RNA (1)...(19): siRNA sense strand
cagucuuucuacagcaaua

SEQ ID NO: 2402273 - RNA, 19 nt, Homo sapiens
  misc_RNA (1)...(19): siRNA sense strand
cgacagcaucugaaggaga

SEQ ID NO: 2402274 - RNA, 19 nt, Homo sapiens
  misc_RNA (1)...(19): siRNA sense strand
ucagaagaggaacgaguaa

SEQ ID NO: 2402275 - RNA, 19 nt, Homo sapiens
  misc_RNA (1)...(19): siRNA sense strand
agaagaggaacgaguaaga

SEQ ID NO: 2402276 - RNA, 19 nt, Homo sapiens
  misc_RNA (1)...(19): siRNA sense strand
cauggaagggagugaaaca

SEQ ID NO: 2402277 - RNA, 19 nt, Homo sapiens
  misc_RNA (1)...(19): siRNA sense strand
ucgagagaccucaggaaau

SEQ ID NO: 2402278 - RNA, 19 nt, Homo sapiens
  misc_RNA (1)...(19): siRNA sense strand
uagaaacauaucugcgaaa

SEQ ID NO: 2402279 - RNA, 19 nt, Homo sapiens
  misc_RNA (1)...(19): siRNA sense strand
gcagcaaagaaaagggcua

SEQ ID NO: 2402280 - RNA, 19 nt, Homo sapiens
  misc_RNA (1)...(19): siRNA sense strand
gaacgacacaaaaggaaaa

SEQ ID NO: 2402281 - RNA, 19 nt, Homo sapiens
  misc_RNA (1)...(19): siRNA sense strand
caguagggcccaagggagu

SEQ ID NO: 2402282 - RNA, 19 nt, Homo sapiens
  misc_RNA (1)...(19): siRNA sense strand
cugugaagacaaagaggau

SEQ ID NO: 2402283 - RNA, 19 nt, Homo sapiens
  misc_RNA (1)...(19): siRNA sense strand
gauacugaaaugugaugaa

SEQ ID NO: 2402284 - RNA, 19 nt, Homo sapiens
  misc_RNA (1)...(19): siRNA sense strand
uguguugaauguugggcaa

SEQ ID NO: 2402285 - RNA, 19 nt, Homo sapiens
  misc_RNA (1)...(19): siRNA sense strand
auacagucauuuauggcua

SEQ ID NO: 2402286 - RNA, 19 nt, Homo sapiens
  misc_RNA (1)...(19): siRNA sense strand
guuaaaucucgauggacau

SEQ ID NO: 2402287 - RNA, 19 nt, Homo sapiens
  misc_RNA (1)...(19): siRNA sense strand
guacaggguauuagcagau

SEQ ID NO: 2402288 - RNA, 19 nt, Homo sapiens
  misc_RNA (1)...(19): siRNA sense strand
uggugauaguuguguugaa

SEQ ID NO: 2402289 - RNA, 19 nt, Homo sapiens
  misc_RNA (1)...(19): siRNA sense strand
ugguuugagcauaggaaaa

SEQ ID NO: 2402290 - RNA, 19 nt, Homo sapiens
  misc_RNA (1)...(19): siRNA sense strand
agaggaacgaguaagagaa

SEQ ID NO: 2402291 - RNA, 19 nt, Homo sapiens
  misc_RNA (1)...(19): siRNA sense strand
caagaaaagaaacgccaaa

SEQ ID NO: 2402292 - RNA, 19 nt, Homo sapiens
  misc_RNA (1)...(19): siRNA sense strand
guucugaccugcuugggaa

SEQ ID NO: 2402293 - RNA, 19 nt, Homo sapiens
  misc_RNA (1)...(19): siRNA sense strand
ggaauuuucagaagaggaa

SEQ ID NO: 2402294 - RNA, 19 nt, Homo sapiens
  misc_RNA (1)...(19): siRNA sense strand
aaguaagccaagagaagga

SEQ ID NO: 2402295 - RNA, 19 nt, Homo sapiens
  misc_RNA (1)...(19): siRNA sense strand
agaacaauaccgacagcau

SEQ ID NO: 2402296 - RNA, 19 nt, Homo sapiens
  misc_RNA (1)...(19): siRNA sense strand
aagaggaacgaguaagaga

SEQ ID NO: 2402297 - RNA, 19 nt, Homo sapiens
  misc_RNA (1)...(19): siRNA sense strand
agaaaauagcagcugcaaa

SEQ ID NO: 2402298 - RNA, 19 nt, Homo sapiens
  misc_RNA (1)...(19): siRNA sense strand
ggaucuaaguauugccaug

SEQ ID NO: 2402299 - RNA, 19 nt, Homo sapiens
  misc_RNA (1)...(19): siRNA sense strand
cgcaggagggcgaagagaa

SEQ ID NO: 2402300 - RNA, 19 nt, Homo sapiens
  misc_RNA (1)...(19): siRNA sense strand
aggaaguaagccaagagaa

SEQ ID NO: 2402301 - RNA, 19 nt, Homo sapiens
  misc_RNA (1)...(19): siRNA sense strand
uugagaugaccguggaaaa

SEQ ID NO: 2402302 - RNA, 19 nt, Homo sapiens
  misc_RNA (1)...(19): siRNA sense strand
agagaacucaagcaagaaa

SEQ ID NO: 2402303 - RNA, 19 nt, Homo sapiens
  misc_RNA (1)...(19): siRNA sense strand
gaaaaggugccaagagcuu

SEQ ID NO: 2402304 - RNA, 19 nt, Homo sapiens
  misc_RNA (1)...(19): siRNA sense strand
uuggauggauguaugggaa

SEQ ID NO: 2402305 - RNA, 19 nt, Homo sapiens
  misc_RNA (1)...(19): siRNA sense strand
gggaugaaguaguuuuaau

SEQ ID NO: 2402306 - RNA, 19 nt, Homo sapiens
  misc_RNA (1)...(19): siRNA sense strand
aaacagacuucauugcaca

SEQ ID NO: 2402307 - RNA, 19 nt, Homo sapiens
  misc_RNA (1)...(19): siRNA sense strand
cgaagagaaaggcaugcaa

SEQ ID NO: 2402308 - RNA, 19 nt, Homo sapiens
  misc_RNA (1)...(19): siRNA sense strand
agacaauagauauagcuca

SEQ ID NO: 2402309 - RNA, 19 nt, Homo sapiens
  misc_RNA (1)...(19): siRNA sense strand
gaacauauccagaagcuug

SEQ ID NO: 2402310 - RNA, 19 nt, Homo sapiens
  misc_RNA (1)...(19): siRNA sense strand
gauccagguaaucgagaga

SEQ ID NO: 2402311 - RNA, 19 nt, Homo sapiens
  misc_RNA (1)...(19): siRNA sense strand
ggacaaagcuuccgccaca

SEQ ID NO: 2402312 - RNA, 19 nt, Homo sapiens
  misc_RNA (1)...(19): siRNA sense strand
gcucagugcugcugcgaca

SEQ ID NO: 2402313 - RNA, 19 nt, Homo sapiens
  misc_RNA (1)...(19): siRNA sense strand
ggcaagagcucuacgcuga

SEQ ID NO: 2402314 - RNA, 19 nt, Homo sapiens
  misc_RNA (1)...(19): siRNA sense strand
ggcaagugcuucagccaca

SEQ ID NO: 2402315 - RNA, 19 nt, Homo sapiens
  misc_RNA (1)...(19): siRNA sense strand
cugcagugagugcggacaa

SEQ ID NO: 2402316 - RNA, 19 nt, Homo sapiens
  misc_RNA (1)...(19): siRNA sense strand
ccuuacucgugcagcgaau

SEQ ID NO: 2402317 - RNA, 19 nt, Homo sapiens
  misc_RNA (1)...(19): siRNA sense strand
gcggcaagugcuuuggcaa

SEQ ID NO: 2402318 - RNA, 19 nt, Homo sapiens
  misc_RNA (1)...(19): siRNA sense strand
ggcaagggcuuccuggaga

SEQ ID NO: 2402319 - RNA, 19 nt, Homo sapiens
  misc_RNA (1)...(19): siRNA sense strand
cacuacaacccuugccaaa

SEQ ID NO: 2402320 - RNA, 19 nt, Homo sapiens
  misc_RNA (1)...(19): siRNA sense strand
aggagaaaaugcagacuca

SEQ ID NO: 2402321 - RNA, 19 nt, Homo sapiens
  misc_RNA (1)...(19): siRNA sense strand
gcauugagguucuggcuga

SEQ ID NO: 2402322 - RNA, 19 nt, Homo sapiens
  misc_RNA (1)...(19): siRNA sense strand
gggaagccuaccuggagaa

SEQ ID NO: 2402323 - RNA, 19 nt, Homo sapiens
  misc_RNA (1)...(19): siRNA sense strand
aggccagcagugagaacaa

SEQ ID NO: 2402324 - RNA, 19 nt, Homo sapiens
  misc_RNA (1)...(19): siRNA sense strand
uagucuugcugaaggugaa

SEQ ID NO: 2402325 - RNA, 19 nt, Homo sapiens
  misc_RNA (1)...(19): siRNA sense strand
cucuaugcccugaacgaaa

SEQ ID NO: 2402326 - RNA, 19 nt, Homo sapiens
  misc_RNA (1)...(19): siRNA sense strand
uuguggaggagaagaucaa

SEQ ID NO: 2402327 - RNA, 19 nt, Homo sapiens
  misc_RNA (1)...(19): siRNA sense strand
ccgacaacccugacggacu

SEQ ID NO: 2402328 - RNA, 19 nt, Homo sapiens
  misc_RNA (1)...(19): siRNA sense strand
ggcccaagugagaguuauu

SEQ ID NO: 2402329 - RNA, 19 nt, Homo sapiens
  misc_RNA (1)...(19): siRNA sense strand
aggugacuguccugaacua

SEQ ID NO: 2402330 - RNA, 19 nt, Homo sapiens
  misc_RNA (1)...(19): siRNA sense strand
gcgugaauuccaagaagaa

SEQ ID NO: 2402331 - RNA, 19 nt, Homo sapiens
  misc_RNA (1)...(19): siRNA sense strand
ccaugaaagccguccgcaa

SEQ ID NO: 2402332 - RNA, 19 nt, Homo sapiens
  misc_RNA (1)...(19): siRNA sense strand
ugacagaccugcuggacca

SEQ ID NO: 2402333 - RNA, 19 nt, Homo sapiens
  misc_RNA (1)...(19): siRNA sense strand
aauuauaagagaaggcuca

SEQ ID NO: 2402334 - RNA, 19 nt, Homo sapiens
  misc_RNA (1)...(19): siRNA sense strand
ugcuaaagauccagccaau

SEQ ID NO: 2402335 - RNA, 19 nt, Homo sapiens
  misc_RNA (1)...(19): siRNA sense strand
ugaagauuaugcugggaga

SEQ ID NO: 2402336 - RNA, 19 nt, Homo sapiens
  misc_RNA (1)...(19): siRNA sense strand
uguuagagcagaaggaacu

SEQ ID NO: 2402337 - RNA, 19 nt, Homo sapiens
  misc_RNA (1)...(19): siRNA sense strand
gauuaugcugggagacgaa

SEQ ID NO: 2402338 - RNA, 19 nt, Homo sapiens
  misc_RNA (1)...(19): siRNA sense strand
acgaggaaugugagcggua

SEQ ID NO: 2402339 - RNA, 19 nt, Homo sapiens
  misc_RNA (1)...(19): siRNA sense strand
gcagcaucgcccugagcaa

SEQ ID NO: 2402340 - RNA, 19 nt, Homo sapiens
  misc_RNA (1)...(19): siRNA sense strand
ucaaugaaucccauggaau

SEQ ID NO: 2402341 - RNA, 19 nt, Homo sapiens
  misc_RNA (1)...(19): siRNA sense strand
gguuccaacaugagagagu

SEQ ID NO: 2402342 - RNA, 19 nt, Homo sapiens
  misc_RNA (1)...(19): siRNA sense strand
agguggaaaugcugagacu

SEQ ID NO: 2402343 - RNA, 19 nt, Homo sapiens
  misc_RNA (1)...(19): siRNA sense strand
cgaucagucaucagagcau

SEQ ID NO: 2402344 - RNA, 19 nt, Homo sapiens
  misc_RNA (1)...(19): siRNA sense strand
aaucagagauggugccaag

SEQ ID NO: 2402345 - RNA, 19 nt, Homo sapiens
  misc_RNA (1)...(19): siRNA sense strand
cgaagaguugacuggaaaa

SEQ ID NO: 2402346 - RNA, 19 nt, Homo sapiens
  misc_RNA (1)...(19): siRNA sense strand
aauugguucgagugaguaa

SEQ ID NO: 2402347 - RNA, 19 nt, Homo sapiens
  misc_RNA (1)...(19): siRNA sense strand
gucaagaagaccugugcau

SEQ ID NO: 2402348 - RNA, 19 nt, Homo sapiens
  misc_RNA (1)...(19): siRNA sense strand
gaaauuaagaacaggacca

SEQ ID NO: 2402349 - RNA, 19 nt, Homo sapiens
  misc_RNA (1)...(19): siRNA sense strand
acauagacacugugaagca

SEQ ID NO: 2402350 - RNA, 19 nt, Homo sapiens
  misc_RNA (1)...(19): siRNA sense strand
auuaagaacaggaccaaaa

SEQ ID NO: 2402351 - RNA, 19 nt, Homo sapiens
  misc_RNA (1)...(19): siRNA sense strand
cuugaaaguuuaaaggauc

SEQ ID NO: 2402352 - RNA, 19 nt, Homo sapiens
  misc_RNA (1)...(19): siRNA sense strand
ugggaaugauaguagcuga

SEQ ID NO: 2402353 - RNA, 19 nt, Homo sapiens
  misc_RNA (1)...(19): siRNA sense strand
acagagacuucaagcagca

SEQ ID NO: 2402354 - RNA, 19 nt, Homo sapiens
  misc_RNA (1)...(19): siRNA sense strand
gggaaauugccaagagcga

SEQ ID NO: 2402355 - RNA, 19 nt, Homo sapiens
  misc_RNA (1)...(19): siRNA sense strand
auaugaaggagaauggaaa

SEQ ID NO: 2402356 - RNA, 19 nt, Homo sapiens
  misc_RNA (1)...(19): siRNA sense strand
acggagagaucacgggaga

SEQ ID NO: 2402357 - RNA, 19 nt, Homo sapiens
  misc_RNA (1)...(19): siRNA sense strand
gaaauugccaagagcgaga

SEQ ID NO: 2402358 - RNA, 19 nt, Homo sapiens
  misc_RNA (1)...(19): siRNA sense strand
cagccuacucugaggucaa

SEQ ID NO: 2402359 - RNA, 19 nt, Homo sapiens
  misc_RNA (1)...(19): siRNA sense strand
gggcguuuguggacggaga

SEQ ID NO: 2402360 - RNA, 19 nt, Homo sapiens
  misc_RNA (1)...(19): siRNA sense strand
ggaaguggcccaagggucu

SEQ ID NO: 2402361 - RNA, 19 nt, Homo sapiens
  misc_RNA (1)...(19): siRNA sense strand
cuuucgauaugaaggagaa

SEQ ID NO: 2402362 - RNA, 19 nt, Homo sapiens
  misc_RNA (1)...(19): siRNA sense strand
gugucuacguauacccaaa

SEQ ID NO: 2402363 - RNA, 19 nt, Homo sapiens
  misc_RNA (1)...(19): siRNA sense strand
caagaaggcaggcggcaga

SEQ ID NO: 2402364 - RNA, 19 nt, Homo sapiens
  misc_RNA (1)...(19): siRNA sense strand
gagacaaccaagagacacu

SEQ ID NO: 2402365 - RNA, 19 nt, Homo sapiens
  misc_RNA (1)...(19): siRNA sense strand
cagagacaaccaagagaca

SEQ ID NO: 2402366 - RNA, 19 nt, Homo sapiens
  misc_RNA (1)...(19): siRNA sense strand
gugacaaguacgacggcga

SEQ ID NO: 2402367 - RNA, 19 nt, Homo sapiens
  misc_RNA (1)...(19): siRNA sense strand
gcuccuuccaugacaacaa

SEQ ID NO: 2402368 - RNA, 19 nt, Homo sapiens
  misc_RNA (1)...(19): siRNA sense strand
ccucaaggcuacggcguca

SEQ ID NO: 2402369 - RNA, 19 nt, Homo sapiens
  misc_RNA (1)...(19): siRNA sense strand
gacaguuuguucugggaga

SEQ ID NO: 2402370 - RNA, 19 nt, Homo sapiens
  misc_RNA (1)...(19): siRNA sense strand
gguuauggugucuacguau

SEQ ID NO: 2402371 - RNA, 19 nt, Homo sapiens
  misc_RNA (1)...(19): siRNA sense strand
ggauauguugauagagaca

SEQ ID NO: 2402372 - RNA, 19 nt, Homo sapiens
  misc_RNA (1)...(19): siRNA sense strand
aguguaagcgagagagaga

SEQ ID NO: 2402373 - RNA, 19 nt, Homo sapiens
  misc_RNA (1)...(19): siRNA sense strand
ggagaagaaagcacggaca

SEQ ID NO: 2402374 - RNA, 19 nt, Homo sapiens
  misc_RNA (1)...(19): siRNA sense strand
augcagaggccauggaagu

SEQ ID NO: 2402375 - RNA, 19 nt, Homo sapiens
  misc_RNA (1)...(19): siRNA sense strand
caguaucaaggcaggacaa

SEQ ID NO: 2402376 - RNA, 19 nt, Homo sapiens
  misc_RNA (1)...(19): siRNA sense strand
gaucagagaugcucccaca

SEQ ID NO: 2402377 - RNA, 19 nt, Homo sapiens
  misc_RNA (1)...(19): siRNA sense strand
ggaaacacgcaguggaggu

SEQ ID NO: 2402378 - RNA, 19 nt, Homo sapiens
  misc_RNA (1)...(19): siRNA sense strand
ccaguguaagcgagagaga

SEQ ID NO: 2402379 - RNA, 19 nt, Homo sapiens
  misc_RNA (1)...(19): siRNA sense strand
uccacagacuccaggacaa

SEQ ID NO: 2402380 - RNA, 19 nt, Homo sapiens
  misc_RNA (1)...(19): siRNA sense strand
ggacaggaucagagaugcu

SEQ ID NO: 2402381 - RNA, 19 nt, Homo sapiens
  misc_RNA (1)...(19): siRNA sense strand
gaauaaugaucauagggaa

SEQ ID NO: 2402382 - RNA, 19 nt, Homo sapiens
  misc_RNA (1)...(19): siRNA sense strand
ugguauugcacuugaguua

SEQ ID NO: 2402383 - RNA, 19 nt, Homo sapiens
  misc_RNA (1)...(19): siRNA sense strand
agguuguacugcugggaaa

SEQ ID NO: 2402384 - RNA, 19 nt, Homo sapiens
  misc_RNA (1)...(19): siRNA sense strand
gguuauagaaucuggcgua

SEQ ID NO: 2402385 - RNA, 19 nt, Homo sapiens
  misc_RNA (1)...(19): siRNA sense strand
cuucaaagcucauugcuga

SEQ ID NO: 2402386 - RNA, 19 nt, Homo sapiens
  misc_RNA (1)...(19): siRNA sense strand
aagauaaagcuauagggaa

SEQ ID NO: 2402387 - RNA, 19 nt, Homo sapiens
  misc_RNA (1)...(19): siRNA sense strand
ggcuaaaauugcacauaaa

SEQ ID NO: 2402388 - RNA, 19 nt, Homo sapiens
  misc_RNA (1)...(19): siRNA sense strand
aguugauaugugaaggaaa

SEQ ID NO: 2402389 - RNA, 19 nt, Homo sapiens
  misc_RNA (1)...(19): siRNA sense strand
cuugaaucuuaaaggaaca

SEQ ID NO: 2402390 - RNA, 19 nt, Homo sapiens
  misc_RNA (1)...(19): siRNA sense strand
ucaaagucgucaugcaaaa

SEQ ID NO: 2402391 - RNA, 19 nt, Homo sapiens
  misc_RNA (1)...(19): siRNA sense strand
guuacaaauuucaagcaga

SEQ ID NO: 2402392 - RNA, 19 nt, Homo sapiens
  misc_RNA (1)...(19): siRNA sense strand
guaugaaauugaaggcugu

SEQ ID NO: 2402393 - RNA, 19 nt, Homo sapiens
  misc_RNA (1)...(19): siRNA sense strand
gaucaugaauuaaugcuga

SEQ ID NO: 2402394 - RNA, 19 nt, Homo sapiens
  misc_RNA (1)...(19): siRNA sense strand
ucugugugcuggagcuaaa

SEQ ID NO: 2402395 - RNA, 19 nt, Homo sapiens
  misc_RNA (1)...(19): siRNA sense strand
cagacagugcucaggaauu

SEQ ID NO: 2402396 - RNA, 19 nt, Homo sapiens
  misc_RNA (1)...(19): siRNA sense strand
gcguaaagcaacugaagag

SEQ ID NO: 2402397 - RNA, 19 nt, Homo sapiens
  misc_RNA (1)...(19): siRNA sense strand
ugaaacuaugugugaagua

SEQ ID NO: 2402398 - RNA, 19 nt, Homo sapiens
  misc_RNA (1)...(19): siRNA sense strand
caguuuugaucuaggagaa

SEQ ID NO: 2402399 - RNA, 19 nt, Homo sapiens
  misc_RNA (1)...(19): siRNA sense strand
cugcauuguaacagaagau

SEQ ID NO: 2402400 - RNA, 19 nt, Homo sapiens
  misc_RNA (1)...(19): siRNA sense strand
cauagggaacggugguauu

SEQ ID NO: 2402401 - RNA, 19 nt, Homo sapiens
  misc_RNA (1)...(19): siRNA sense strand
ccugaaaguggaugaucau

SEQ ID NO: 2402402 - RNA, 19 nt, Homo sapiens
  misc_RNA (1)...(19): siRNA sense strand
aauaaugaucauagggaac

SEQ ID NO: 2402403 - RNA, 19 nt, Homo sapiens
  misc_RNA (1)...(19): siRNA sense strand
gccauuaaagauaaagcua

SEQ ID NO: 2402404 - RNA, 19 nt, Homo sapiens
  misc_RNA (1)...(19): siRNA sense strand
ggcuugaaucuuaaaggaa

SEQ ID NO: 2402405 - RNA, 19 nt, Homo sapiens
  misc_RNA (1)...(19): siRNA sense strand
gcuugaaucuuaaaggaac

SEQ ID NO: 2402406 - RNA, 19 nt, Homo sapiens
  misc_RNA (1)...(19): siRNA sense strand
gagauguaccaaaggacga

SEQ ID NO: 2402407 - RNA, 19 nt, Homo sapiens
  misc_RNA (1)...(19): siRNA sense strand
aggcuaaaauugcacauaa

SEQ ID NO: 2402408 - RNA, 19 nt, Homo sapiens
  misc_RNA (1)...(19): siRNA sense strand
uguaacagaagauggcaau

SEQ ID NO: 2402409 - RNA, 19 nt, Homo sapiens
  misc_RNA (1)...(19): siRNA sense strand
cagauuggcaugaaggcuu

SEQ ID NO: 2402410 - RNA, 19 nt, Homo sapiens
  misc_RNA (1)...(19): siRNA sense strand
gcuuugaacuguuugcuca

SEQ ID NO: 2402411 - RNA, 19 nt, Homo sapiens
  misc_RNA (1)...(19): siRNA sense strand
aggacgaggaauacaucaa

SEQ ID NO: 2402412 - RNA, 19 nt, Homo sapiens
  misc_RNA (1)...(19): siRNA sense strand
gaagcaaaucuaaagcaga

SEQ ID NO: 2402413 - RNA, 19 nt, Homo sapiens
  misc_RNA (1)...(19): siRNA sense strand
aauacaaugcacagggcuu

SEQ ID NO: 2402414 - RNA, 19 nt, Homo sapiens
  misc_RNA (1)...(19): siRNA sense strand
aagaauucgauguugaaga

SEQ ID NO: 2402415 - RNA, 19 nt, Homo sapiens
  misc_RNA (1)...(19): siRNA sense strand
auuaggaauccgugauaca

SEQ ID NO: 2402416 - RNA, 19 nt, Homo sapiens
  misc_RNA (1)...(19): siRNA sense strand
gggaauacuuucuucgaug

SEQ ID NO: 2402417 - RNA, 19 nt, Homo sapiens
  misc_RNA (1)...(19): siRNA sense strand
agaaucuggcguaaagcaa

SEQ ID NO: 2402418 - RNA, 19 nt, Homo sapiens
  misc_RNA (1)...(19): siRNA sense strand
ugguaacaguuuugaucua

SEQ ID NO: 2402419 - RNA, 19 nt, Homo sapiens
  misc_RNA (1)...(19): siRNA sense strand
augaauuaaugcugagaug

SEQ ID NO: 2402420 - RNA, 19 nt, Homo sapiens
  misc_RNA (1)...(19): siRNA sense strand
cagauauacaacugaagga

SEQ ID NO: 2402421 - RNA, 19 nt, Homo sapiens
  misc_RNA (1)...(19): siRNA sense strand
auacaaugcacagggcuua

SEQ ID NO: 2402422 - RNA, 19 nt, Homo sapiens
  misc_RNA (1)...(19): siRNA sense strand
uuguaacagaagauggcaa

SEQ ID NO: 2402423 - RNA, 19 nt, Homo sapiens
  misc_RNA (1)...(19): siRNA sense strand
acaacugaaggaaggaaaa

SEQ ID NO: 2402424 - RNA, 19 nt, Homo sapiens
  misc_RNA (1)...(19): siRNA sense strand
cggacgacgcucaagaaga

SEQ ID NO: 2402425 - RNA, 19 nt, Homo sapiens
  misc_RNA (1)...(19): siRNA sense strand
gcaccguugguuagagaca

SEQ ID NO: 2402426 - RNA, 19 nt, Homo sapiens
  misc_RNA (1)...(19): siRNA sense strand
gcaaauggcuaacuggcaa

SEQ ID NO: 2402427 - RNA, 19 nt, Homo sapiens
  misc_RNA (1)...(19): siRNA sense strand
aggaagaagaggaugaaaa

SEQ ID NO: 2402428 - RNA, 19 nt, Homo sapiens
  misc_RNA (1)...(19): siRNA sense strand
uggaggaagaagaggauga

SEQ ID NO: 2402429 - RNA, 19 nt, Homo sapiens
  misc_RNA (1)...(19): siRNA sense strand
uggagaaggauuuggccaa

SEQ ID NO: 2402430 - RNA, 19 nt, Homo sapiens
  misc_RNA (1)...(19): siRNA sense strand
uuucaacacuuaugggcaa

SEQ ID NO: 2402431 - RNA, 19 nt, Homo sapiens
  misc_RNA (1)...(19): siRNA sense strand
ggugacaguucgugaggca

SEQ ID NO: 2402432 - RNA, 19 nt, Homo sapiens
  misc_RNA (1)...(19): siRNA sense strand
agguaccacuggaggaaga

SEQ ID NO: 2402433 - RNA, 19 nt, Homo sapiens
  misc_RNA (1)...(19): siRNA sense strand
auaaggaagucuaugcgaa

SEQ ID NO: 2402434 - RNA, 19 nt, Homo sapiens
  misc_RNA (1)...(19): siRNA sense strand
ucagagagcuuaaagacca

SEQ ID NO: 2402435 - RNA, 19 nt, Homo sapiens
  misc_RNA (1)...(19): siRNA sense strand
acuuaugggcaaauggcua

SEQ ID NO: 2402436 - RNA, 19 nt, Homo sapiens
  misc_RNA (1)...(19): siRNA sense strand
aaacucagcuggagggaac

SEQ ID NO: 2402437 - RNA, 19 nt, Homo sapiens
  misc_RNA (1)...(19): siRNA sense strand
guguacgagcgcugggauu

SEQ ID NO: 2402438 - RNA, 19 nt, Homo sapiens
  misc_RNA (1)...(19): siRNA sense strand
gcucaaagcaucguggaga

SEQ ID NO: 2402439 - RNA, 19 nt, Homo sapiens
  misc_RNA (1)...(19): siRNA sense strand
aaacugaagcugaaaggca

SEQ ID NO: 2402440 - RNA, 19 nt, Homo sapiens
  misc_RNA (1)...(19): siRNA sense strand
caguaauaaggaagucuau

SEQ ID NO: 2402441 - RNA, 19 nt, Homo sapiens
  misc_RNA (1)...(19): siRNA sense strand
aggccguggagaaggauuu

SEQ ID NO: 2402442 - RNA, 19 nt, Homo sapiens
  misc_RNA (1)...(19): siRNA sense strand
ucuagaauacucugcgaau

SEQ ID NO: 2402443 - RNA, 19 nt, Homo sapiens
  misc_RNA (1)...(19): siRNA sense strand
acaaauauucccaagcuca

SEQ ID NO: 2402444 - RNA, 19 nt, Homo sapiens
  misc_RNA (1)...(19): siRNA sense strand
gcccauuccuaaaggccau

SEQ ID NO: 2402445 - RNA, 19 nt, Homo sapiens
  misc_RNA (1)...(19): siRNA sense strand
cgcuauggucagaagauga

SEQ ID NO: 2402446 - RNA, 19 nt, Homo sapiens
  misc_RNA (1)...(19): siRNA sense strand
gagaagaauccucagccaa

SEQ ID NO: 2402447 - RNA, 19 nt, Homo sapiens
  misc_RNA (1)...(19): siRNA sense strand
agagaauagugucgcaaaa

SEQ ID NO: 2402448 - RNA, 19 nt, Homo sapiens
  misc_RNA (1)...(19): siRNA sense strand
augauagauuucagagaca

SEQ ID NO: 2402449 - RNA, 19 nt, Homo sapiens
  misc_RNA (1)...(19): siRNA sense strand
aaaucuaagagguggcaga

SEQ ID NO: 2402450 - RNA, 19 nt, Homo sapiens
  misc_RNA (1)...(19): siRNA sense strand
gauagauuucagagacaga

SEQ ID NO: 2402451 - RNA, 19 nt, Homo sapiens
  misc_RNA (1)...(19): siRNA sense strand
caccagucccaaaggcaaa

SEQ ID NO: 2402452 - RNA, 19 nt, Homo sapiens
  misc_RNA (1)...(19): siRNA sense strand
ccaccagucccaaaggcaa

SEQ ID NO: 2402453 - RNA, 19 nt, Homo sapiens
  misc_RNA (1)...(19): siRNA sense strand
caaugauagauuucagaga

SEQ ID NO: 2402454 - RNA, 19 nt, Homo sapiens
  misc_RNA (1)...(19): siRNA sense strand
gcuacaaacaggugaagac

SEQ ID NO: 2402455 - RNA, 19 nt, Homo sapiens
  misc_RNA (1)...(19): siRNA sense strand
aacaacuggccgaagaaua

SEQ ID NO: 2402456 - RNA, 19 nt, Homo sapiens
  misc_RNA (1)...(19): siRNA sense strand
aagaaacagaagaccagaa

SEQ ID NO: 2402457 - RNA, 19 nt, Homo sapiens
  misc_RNA (1)...(19): siRNA sense strand
gucaagaaacagaagacca

SEQ ID NO: 2402458 - RNA, 19 nt, Homo sapiens
  misc_RNA (1)...(19): siRNA sense strand
gaaugaaaucuaagaggug

SEQ ID NO: 2402459 - RNA, 19 nt, Homo sapiens
  misc_RNA (1)...(19): siRNA sense strand
agaaugaaaucuaagaggu

SEQ ID NO: 2402460 - RNA, 19 nt, Homo sapiens
  misc_RNA (1)...(19): siRNA sense strand
ccaaggugguguuugccaa

SEQ ID NO: 2402461 - RNA, 19 nt, Homo sapiens
  misc_RNA (1)...(19): siRNA sense strand
acagggaggugcaggcuga

SEQ ID NO: 2402462 - RNA, 19 nt, Homo sapiens
  misc_RNA (1)...(19): siRNA sense strand
cugcacaguggauggagaa

SEQ ID NO: 2402463 - RNA, 19 nt, Homo sapiens
  misc_RNA (1)...(19): siRNA sense strand
cgugguacaaggaugggaa

SEQ ID NO: 2402464 - RNA, 19 nt, Homo sapiens
  misc_RNA (1)...(19): siRNA sense strand
ugucggugguggagcgcaa

SEQ ID NO: 2402465 - RNA, 19 nt, Homo sapiens
  misc_RNA (1)...(19): siRNA sense strand
ccaaguaugucaagacgca

SEQ ID NO: 2402466 - RNA, 19 nt, Homo sapiens
  misc_RNA (1)...(19): siRNA sense strand
ugaacaaagagaacgccaa

SEQ ID NO: 2402467 - RNA, 19 nt, Homo sapiens
  misc_RNA (1)...(19): siRNA sense strand
aagagaacgccaagggcca

SEQ ID NO: 2402468 - RNA, 19 nt, Homo sapiens
  misc_RNA (1)...(19): siRNA sense strand
ugucggagaaggagcgcuu

SEQ ID NO: 2402469 - RNA, 19 nt, Homo sapiens
  misc_RNA (1)...(19): siRNA sense strand
cgucguacagacaggaauu

SEQ ID NO: 2402470 - RNA, 19 nt, Homo sapiens
  misc_RNA (1)...(19): siRNA sense strand
aggcagguuucaaggccaa

SEQ ID NO: 2402471 - RNA, 19 nt, Homo sapiens
  misc_RNA (1)...(19): siRNA sense strand
ggcaagaagugcuggcgga

SEQ ID NO: 2402472 - RNA, 19 nt, Homo sapiens
  misc_RNA (1)...(19): siRNA sense strand
ccacccacguccaggaaaa

SEQ ID NO: 2402473 - RNA, 19 nt, Homo sapiens
  misc_RNA (1)...(19): siRNA sense strand
gcaagaagugcuggcggaa

SEQ ID NO: 2402474 - RNA, 19 nt, Homo sapiens
  misc_RNA (1)...(19): siRNA sense strand
ggaaaaugcaccuggccga

SEQ ID NO: 2402475 - RNA, 19 nt, Homo sapiens
  misc_RNA (1)...(19): siRNA sense strand
aggccaagcuggugacccu

SEQ ID NO: 2402476 - RNA, 19 nt, Homo sapiens
  misc_RNA (1)...(19): siRNA sense strand
cuccaagagaagagcauaa

SEQ ID NO: 2402477 - RNA, 19 nt, Homo sapiens
  misc_RNA (1)...(19): siRNA sense strand
cuacaagggcagcggccaa

SEQ ID NO: 2402478 - RNA, 19 nt, Homo sapiens
  misc_RNA (1)...(19): siRNA sense strand
gaacaggauugcaagcuca

SEQ ID NO: 2402479 - RNA, 19 nt, Homo sapiens
  misc_RNA (1)...(19): siRNA sense strand
gguaugugguggaagguac

SEQ ID NO: 2402480 - RNA, 19 nt, Homo sapiens
  misc_RNA (1)...(19): siRNA sense strand
agacgaagaacucgcccaa

SEQ ID NO: 2402481 - RNA, 19 nt, Homo sapiens
  misc_RNA (1)...(19): siRNA sense strand
ugacaaagccccagaccca

SEQ ID NO: 2402482 - RNA, 19 nt, Homo sapiens
  misc_RNA (1)...(19): siRNA sense strand
ugguacagaaccuggauga

SEQ ID NO: 2402483 - RNA, 19 nt, Homo sapiens
  misc_RNA (1)...(19): siRNA sense strand
cggcaaagcaccggagcau

SEQ ID NO: 2402484 - RNA, 19 nt, Homo sapiens
  misc_RNA (1)...(19): siRNA sense strand
ugagaaaacuggaggacag

SEQ ID NO: 2402485 - RNA, 19 nt, Homo sapiens
  misc_RNA (1)...(19): siRNA sense strand
acagaguggccucgaguca

SEQ ID NO: 2402486 - RNA, 19 nt, Homo sapiens
  misc_RNA (1)...(19): siRNA sense strand
gagcaaggccuguuggauc

SEQ ID NO: 2402487 - RNA, 19 nt, Homo sapiens
  misc_RNA (1)...(19): siRNA sense strand
cuguacaggccacgaagaa

SEQ ID NO: 2402488 - RNA, 19 nt, Homo sapiens
  misc_RNA (1)...(19): siRNA sense strand
gaucaaggaaggagagcug

SEQ ID NO: 2402489 - RNA, 19 nt, Homo sapiens
  misc_RNA (1)...(19): siRNA sense strand
cuguuggaucccagugaua

SEQ ID NO: 2402490 - RNA, 19 nt, Homo sapiens
  misc_RNA (1)...(19): siRNA sense strand
caacaagcuagcugagacu

SEQ ID NO: 2402491 - RNA, 19 nt, Homo sapiens
  misc_RNA (1)...(19): siRNA sense strand
ccaagaagugccaggugga

SEQ ID NO: 2402492 - RNA, 19 nt, Homo sapiens
  misc_RNA (1)...(19): siRNA sense strand
cagaggagcggaagaggca

SEQ ID NO: 2402493 - RNA, 19 nt, Homo sapiens
  misc_RNA (1)...(19): siRNA sense strand
caucauaaaggcaggccca

SEQ ID NO: 2402494 - RNA, 19 nt, Homo sapiens
  misc_RNA (1)...(19): siRNA sense strand
uggaagaaaaggagaaacu

SEQ ID NO: 2402495 - RNA, 19 nt, Homo sapiens
  misc_RNA (1)...(19): siRNA sense strand
ugauggaagaaaaggagaa

SEQ ID NO: 2402496 - RNA, 19 nt, Homo sapiens
  misc_RNA (1)...(19): siRNA sense strand
acucacagggcuucaacaa

SEQ ID NO: 2402497 - RNA, 19 nt, Homo sapiens
  misc_RNA (1)...(19): siRNA sense strand
gagcaaggccuguuggauc

SEQ ID NO: 2402498 - RNA, 19 nt, Homo sapiens
  misc_RNA (1)...(19): siRNA sense strand
cuguacaggccacgaagaa

SEQ ID NO: 2402499 - RNA, 19 nt, Homo sapiens
  misc_RNA (1)...(19): siRNA sense strand
gaucaaggaaggagagcug

SEQ ID NO: 2402500 - RNA, 19 nt, Homo sapiens
  misc_RNA (1)...(19): siRNA sense strand
cuguuggaucccagugaua

SEQ ID NO: 2402501 - RNA, 19 nt, Homo sapiens
  misc_RNA (1)...(19): siRNA sense strand
caacaagcuagcugagacu

SEQ ID NO: 2402502 - RNA, 19 nt, Homo sapiens
  misc_RNA (1)...(19): siRNA sense strand
ccaagaagugccaggugga

SEQ ID NO: 2402503 - RNA, 19 nt, Homo sapiens
  misc_RNA (1)...(19): siRNA sense strand
cagaggagcggaagaggca

SEQ ID NO: 2402504 - RNA, 19 nt, Homo sapiens
  misc_RNA (1)...(19): siRNA sense strand
caucauaaaggcaggccca

SEQ ID NO: 2402505 - RNA, 19 nt, Homo sapiens
  misc_RNA (1)...(19): siRNA sense strand
uggaagaaaaggagaaacu

SEQ ID NO: 2402506 - RNA, 19 nt, Homo sapiens
  misc_RNA (1)...(19): siRNA sense strand
ugauggaagaaaaggagaa

SEQ ID NO: 2402507 - RNA, 19 nt, Homo sapiens
  misc_RNA (1)...(19): siRNA sense strand
acucacagggcuucaacaa

SEQ ID NO: 2402508 - RNA, 19 nt, Homo sapiens
  misc_RNA (1)...(19): siRNA sense strand
aggaagaggaggaggacga

SEQ ID NO: 2402509 - RNA, 19 nt, Homo sapiens
  misc_RNA (1)...(19): siRNA sense strand
aggaagaggaggaggacga

SEQ ID NO: 2402510 - RNA, 19 nt, Homo sapiens
  misc_RNA (1)...(19): siRNA sense strand
aggaagaggaggaggagga

SEQ ID NO: 2402511 - RNA, 19 nt, Homo sapiens
  misc_RNA (1)...(19): siRNA sense strand
acgaagaggaagaggagga

SEQ ID NO: 2402512 - RNA, 19 nt, Homo sapiens
  misc_RNA (1)...(19): siRNA sense strand
uggcggaggaggaggaaga

SEQ ID NO: 2402513 - RNA, 19 nt, Homo sapiens
  misc_RNA (1)...(19): siRNA sense strand
aggaggacgaagaggaaga

SEQ ID NO: 2402514 - RNA, 19 nt, Homo sapiens
  misc_RNA (1)...(19): siRNA sense strand
cagcagaauaagucgguga

SEQ ID NO: 2402515 - RNA, 19 nt, Homo sapiens
  misc_RNA (1)...(19): siRNA sense strand
aggaggaggaagaggagga

SEQ ID NO: 2402516 - RNA, 19 nt, Homo sapiens
  misc_RNA (1)...(19): siRNA sense strand
aggaggaagaggaggagga

SEQ ID NO: 2402517 - RNA, 19 nt, Homo sapiens
  misc_RNA (1)...(19): siRNA sense strand
aggaggaggaagaggagga

SEQ ID NO: 2402518 - RNA, 19 nt, Homo sapiens
  misc_RNA (1)...(19): siRNA sense strand
aggaggaagaggaggagga

SEQ ID NO: 2402519 - RNA, 19 nt, Homo sapiens
  misc_RNA (1)...(19): siRNA sense strand
gagaagaccucgcugggca

SEQ ID NO: 2402520 - RNA, 19 nt, Homo sapiens
  misc_RNA (1)...(19): siRNA sense strand
cggaggaggaggaagagga

SEQ ID NO: 2402521 - RNA, 19 nt, Homo sapiens
  misc_RNA (1)...(19): siRNA sense strand
aagaggaagaggaggagga

SEQ ID NO: 2402522 - RNA, 19 nt, Homo sapiens
  misc_RNA (1)...(19): siRNA sense strand
agaauaagucggugagcac

SEQ ID NO: 2402523 - RNA, 19 nt, Homo sapiens
  misc_RNA (1)...(19): siRNA sense strand
gagaagaacaagaucccga

SEQ ID NO: 2402524 - RNA, 19 nt, Homo sapiens
  misc_RNA (1)...(19): siRNA sense strand
ugcccuacguggagaccaa

SEQ ID NO: 2402525 - RNA, 19 nt, Homo sapiens
  misc_RNA (1)...(19): siRNA sense strand
cagaauaagucggugagca

SEQ ID NO: 2402526 - RNA, 19 nt, Homo sapiens
  misc_RNA (1)...(19): siRNA sense strand
ucaugguggccgagggcau

SEQ ID NO: 2402527 - RNA, 19 nt, Homo sapiens
  misc_RNA (1)...(19): siRNA sense strand
agaccaacgaggagcucau

SEQ ID NO: 2402528 - RNA, 19 nt, Homo sapiens
  misc_RNA (1)...(19): siRNA sense strand
aacaagaucccgaaggaca

SEQ ID NO: 2402529 - RNA, 19 nt, Homo sapiens
  misc_RNA (1)...(19): siRNA sense strand
aggaggaggacgaagagga

SEQ ID NO: 2402530 - RNA, 19 nt, Homo sapiens
  misc_RNA (1)...(19): siRNA sense strand
aggaggaggaggaagagga

SEQ ID NO: 2402531 - RNA, 19 nt, Homo sapiens
  misc_RNA (1)...(19): siRNA sense strand
ggacgaagaggaagaggag

SEQ ID NO: 2402532 - RNA, 19 nt, Homo sapiens
  misc_RNA (1)...(19): siRNA sense strand
ccgccagcaucgugaccau

SEQ ID NO: 2402533 - RNA, 19 nt, Homo sapiens
  misc_RNA (1)...(19): siRNA sense strand
ccaagcagcucaucagcga

SEQ ID NO: 2402534 - RNA, 19 nt, Homo sapiens
  misc_RNA (1)...(19): siRNA sense strand
ggagaguagauaagggaca

SEQ ID NO: 2402535 - RNA, 19 nt, Homo sapiens
  misc_RNA (1)...(19): siRNA sense strand
aguagauaagggacaguua

SEQ ID NO: 2402536 - RNA, 19 nt, Homo sapiens
  misc_RNA (1)...(19): siRNA sense strand
caagguggaugaaggguca

SEQ ID NO: 2402537 - RNA, 19 nt, Homo sapiens
  misc_RNA (1)...(19): siRNA sense strand
ggaugaagggucagagcgu

SEQ ID NO: 2402538 - RNA, 19 nt, Homo sapiens
  misc_RNA (1)...(19): siRNA sense strand
aggaagaggaagaggaaga

SEQ ID NO: 2402539 - RNA, 19 nt, Homo sapiens
  misc_RNA (1)...(19): siRNA sense strand
aaggagaggaagaggaaga

SEQ ID NO: 2402540 - RNA, 19 nt, Homo sapiens
  misc_RNA (1)...(19): siRNA sense strand
aggaggagcucgaagcaau

SEQ ID NO: 2402541 - RNA, 19 nt, Homo sapiens
  misc_RNA (1)...(19): siRNA sense strand
cggagaugcugcaggagau

SEQ ID NO: 2402542 - RNA, 19 nt, Homo sapiens
  misc_RNA (1)...(19): siRNA sense strand
uggagaagauccugcagaa

SEQ ID NO: 2402543 - RNA, 19 nt, Homo sapiens
  misc_RNA (1)...(19): siRNA sense strand
ccuccaugauccugggcaa

SEQ ID NO: 2402544 - RNA, 19 nt, Homo sapiens
  misc_RNA (1)...(19): siRNA sense strand
aggaagaggaagauggcau

SEQ ID NO: 2402545 - RNA, 19 nt, Homo sapiens
  misc_RNA (1)...(19): siRNA sense strand
aggaggagcuggagcaguu

SEQ ID NO: 2402546 - RNA, 19 nt, Homo sapiens
  misc_RNA (1)...(19): siRNA sense strand
gcugaauccuccacaagaa

SEQ ID NO: 2402547 - RNA, 19 nt, Homo sapiens
  misc_RNA (1)...(19): siRNA sense strand
gcaaaggagaggaagagga

SEQ ID NO: 2402548 - RNA, 19 nt, Homo sapiens
  misc_RNA (1)...(19): siRNA sense strand
gcaaacugugccugugaaa

SEQ ID NO: 2402549 - RNA, 19 nt, Homo sapiens
  misc_RNA (1)...(19): siRNA sense strand
acaagaaggugguggagcu

SEQ ID NO: 2402550 - RNA, 19 nt, Homo sapiens
  misc_RNA (1)...(19): siRNA sense strand
cgaagcaauuguagagucu

SEQ ID NO: 2402551 - RNA, 19 nt, Homo sapiens
  misc_RNA (1)...(19): siRNA sense strand
cggagaaguucgcggugga

SEQ ID NO: 2402552 - RNA, 19 nt, Homo sapiens
  misc_RNA (1)...(19): siRNA sense strand
caugaugaccugcgagaga

SEQ ID NO: 2402553 - RNA, 19 nt, Homo sapiens
  misc_RNA (1)...(19): siRNA sense strand
gcucaaggagaaccaguua

SEQ ID NO: 2402554 - RNA, 19 nt, Homo sapiens
  misc_RNA (1)...(19): siRNA sense strand
agaagauccugcagaaguu

SEQ ID NO: 2402555 - RNA, 19 nt, Homo sapiens
  misc_RNA (1)...(19): siRNA sense strand
ucacggaccuugagaccau

SEQ ID NO: 2402556 - RNA, 19 nt, Homo sapiens
  misc_RNA (1)...(19): siRNA sense strand
uggagcacaucaagagcua

SEQ ID NO: 2402557 - RNA, 19 nt, Homo sapiens
  misc_RNA (1)...(19): siRNA sense strand
gcacggagaugcugcagga

SEQ ID NO: 2402558 - RNA, 19 nt, Homo sapiens
  misc_RNA (1)...(19): siRNA sense strand
gagaggaagaggaagagga

SEQ ID NO: 2402559 - RNA, 19 nt, Homo sapiens
  misc_RNA (1)...(19): siRNA sense strand
ccacagcccaugacgcaaa

SEQ ID NO: 2402560 - RNA, 19 nt, Homo sapiens
  misc_RNA (1)...(19): siRNA sense strand
ccagccaccucuuggaaau

SEQ ID NO: 2402561 - RNA, 19 nt, Homo sapiens
  misc_RNA (1)...(19): siRNA sense strand
aaggagaaccaguuaguga

SEQ ID NO: 2402562 - RNA, 19 nt, Homo sapiens
  misc_RNA (1)...(19): siRNA sense strand
ccaacaaccgcaagcugua

SEQ ID NO: 2402563 - RNA, 19 nt, Homo sapiens
  misc_RNA (1)...(19): siRNA sense strand
gugcaggacuacaaggugu

SEQ ID NO: 2402564 - RNA, 19 nt, Homo sapiens
  misc_RNA (1)...(19): siRNA sense strand
gcagcaaccucacggagau

SEQ ID NO: 2402565 - RNA, 19 nt, Homo sapiens
  misc_RNA (1)...(19): siRNA sense strand
acaucaagagcuacgacaa

SEQ ID NO: 2402566 - RNA, 19 nt, Homo sapiens
  misc_RNA (1)...(19): siRNA sense strand
ccaugaugacccagcucaa

SEQ ID NO: 2402567 - RNA, 19 nt, Homo sapiens
  misc_RNA (1)...(19): siRNA sense strand
ggucuggguuucugggacu

SEQ ID NO: 2402568 - RNA, 19 nt, Homo sapiens
  misc_RNA (1)...(19): siRNA sense strand
gagaagauccugcagaagu

SEQ ID NO: 2402569 - RNA, 19 nt, Homo sapiens
  misc_RNA (1)...(19): siRNA sense strand
ggaggagcucgaagcaauu

SEQ ID NO: 2402570 - RNA, 19 nt, Homo sapiens
  misc_RNA (1)...(19): siRNA sense strand
ccagcaugcacaaggccua

SEQ ID NO: 2402571 - RNA, 19 nt, Homo sapiens
  misc_RNA (1)...(19): siRNA sense strand
cgcacugcaucaagggcua

SEQ ID NO: 2402572 - RNA, 19 nt, Homo sapiens
  misc_RNA (1)...(19): siRNA sense strand
gccaggacacagaggugaa

SEQ ID NO: 2402573 - RNA, 19 nt, Homo sapiens
  misc_RNA (1)...(19): siRNA sense strand
ggugaaagccagcgauccu

SEQ ID NO: 2402574 - RNA, 19 nt, Homo sapiens
  misc_RNA (1)...(19): siRNA sense strand
gagucugccuuguacaaau

SEQ ID NO: 2402575 - RNA, 19 nt, Homo sapiens
  misc_RNA (1)...(19): siRNA sense strand
aagaagaagcccuccauga

SEQ ID NO: 2402576 - RNA, 19 nt, Homo sapiens
  misc_RNA (1)...(19): siRNA sense strand
uguacagccuggagaugau

SEQ ID NO: 2402577 - RNA, 19 nt, Homo sapiens
  misc_RNA (1)...(19): siRNA sense strand
ugcagcagcucaaggagaa

SEQ ID NO: 2402578 - RNA, 19 nt, Homo sapiens
  misc_RNA (1)...(19): siRNA sense strand
cugcagaaguucaccagca

SEQ ID NO: 2402579 - RNA, 19 nt, Homo sapiens
  misc_RNA (1)...(19): siRNA sense strand
uuggcaaaggagaggaaga

SEQ ID NO: 2402580 - RNA, 19 nt, Homo sapiens
  misc_RNA (1)...(19): siRNA sense strand
cgagcugucgguaggaaau

SEQ ID NO: 2402581 - RNA, 19 nt, Homo sapiens
  misc_RNA (1)...(19): siRNA sense strand
aggaagaaaagucgauauu

SEQ ID NO: 2402582 - RNA, 19 nt, Homo sapiens
  misc_RNA (1)...(19): siRNA sense strand
ccaacaaagccguggccaa

SEQ ID NO: 2402583 - RNA, 19 nt, Homo sapiens
  misc_RNA (1)...(19): siRNA sense strand
ccuacgauguggaggagga

SEQ ID NO: 2402584 - RNA, 19 nt, Homo sapiens
  misc_RNA (1)...(19): siRNA sense strand
ccagaaacuugauggccga

SEQ ID NO: 2402585 - RNA, 19 nt, Homo sapiens
  misc_RNA (1)...(19): siRNA sense strand
uggaggaggaggaggaguu

SEQ ID NO: 2402586 - RNA, 19 nt, Homo sapiens
  misc_RNA (1)...(19): siRNA sense strand
ucauugaacagaagagcau

SEQ ID NO: 2402587 - RNA, 19 nt, Homo sapiens
  misc_RNA (1)...(19): siRNA sense strand
ucgaguacccggaugggaa

SEQ ID NO: 2402588 - RNA, 19 nt, Homo sapiens
  misc_RNA (1)...(19): siRNA sense strand
gcuucuggccucugggcau

SEQ ID NO: 2402589 - RNA, 19 nt, Homo sapiens
  misc_RNA (1)...(19): siRNA sense strand
cagcagauucagagauaaa

SEQ ID NO: 2402590 - RNA, 19 nt, Homo sapiens
  misc_RNA (1)...(19): siRNA sense strand
aggugaaacugaugguaaa

SEQ ID NO: 2402591 - RNA, 19 nt, Homo sapiens
  misc_RNA (1)...(19): siRNA sense strand
cgaagaauuagaagagaau

SEQ ID NO: 2402592 - RNA, 19 nt, Homo sapiens
  misc_RNA (1)...(19): siRNA sense strand
aggaagaagaggagaagca

SEQ ID NO: 2402593 - RNA, 19 nt, Homo sapiens
  misc_RNA (1)...(19): siRNA sense strand
agaugaagagagugaagaa

SEQ ID NO: 2402594 - RNA, 19 nt, Homo sapiens
  misc_RNA (1)...(19): siRNA sense strand
aaguagaugaagagaguga

SEQ ID NO: 2402595 - RNA, 19 nt, Homo sapiens
  misc_RNA (1)...(19): siRNA sense strand
ggguugaagaggucaggaa

SEQ ID NO: 2402596 - RNA, 19 nt, Homo sapiens
  misc_RNA (1)...(19): siRNA sense strand
cuucaaagauucugccaca

SEQ ID NO: 2402597 - RNA, 19 nt, Homo sapiens
  misc_RNA (1)...(19): siRNA sense strand
caaccacagggcagggaaa

SEQ ID NO: 2402598 - RNA, 19 nt, Homo sapiens
  misc_RNA (1)...(19): siRNA sense strand
uugaggaagaagaggagaa

SEQ ID NO: 2402599 - RNA, 19 nt, Homo sapiens
  misc_RNA (1)...(19): siRNA sense strand
aagcagaaacugaugaaca

SEQ ID NO: 2402600 - RNA, 19 nt, Homo sapiens
  misc_RNA (1)...(19): siRNA sense strand
cagaaaucuacauggaaaa

SEQ ID NO: 2402601 - RNA, 19 nt, Homo sapiens
  misc_RNA (1)...(19): siRNA sense strand
augaagagagugaagaauu

SEQ ID NO: 2402602 - RNA, 19 nt, Homo sapiens
  misc_RNA (1)...(19): siRNA sense strand
ggaagagccggaaggaaaa

SEQ ID NO: 2402603 - RNA, 19 nt, Homo sapiens
  misc_RNA (1)...(19): siRNA sense strand
ccuuggagccagagcauga

SEQ ID NO: 2402604 - RNA, 19 nt, Homo sapiens
  misc_RNA (1)...(19): siRNA sense strand
cugagaaacuacaucgaca

SEQ ID NO: 2402605 - RNA, 19 nt, Homo sapiens
  misc_RNA (1)...(19): siRNA sense strand
ccguaggagaauugaacuu

SEQ ID NO: 2402606 - RNA, 19 nt, Homo sapiens
  misc_RNA (1)...(19): siRNA sense strand
ccugaagucaagacacaaa

SEQ ID NO: 2402607 - RNA, 19 nt, Homo sapiens
  misc_RNA (1)...(19): siRNA sense strand
aaggugaaacugaugguaa

SEQ ID NO: 2402608 - RNA, 19 nt, Homo sapiens
  misc_RNA (1)...(19): siRNA sense strand
gaagaagaggagaagcaga

SEQ ID NO: 2402609 - RNA, 19 nt, Homo sapiens
  misc_RNA (1)...(19): siRNA sense strand
gugaagauuuacagccuca

SEQ ID NO: 2402610 - RNA, 19 nt, Homo sapiens
  misc_RNA (1)...(19): siRNA sense strand
ggaagaagagagcgcuaca

SEQ ID NO: 2402611 - RNA, 19 nt, Homo sapiens
  misc_RNA (1)...(19): siRNA sense strand
ccacuauuaaggugucaaa

SEQ ID NO: 2402612 - RNA, 19 nt, Homo sapiens
  misc_RNA (1)...(19): siRNA sense strand
ggacaguacauuuuagcaa

SEQ ID NO: 2402613 - RNA, 19 nt, Homo sapiens
  misc_RNA (1)...(19): siRNA sense strand
cugaugcugcggagaauaa

SEQ ID NO: 2402614 - RNA, 19 nt, Homo sapiens
  misc_RNA (1)...(19): siRNA sense strand
cagaaaguucggagaguuc

SEQ ID NO: 2402615 - RNA, 19 nt, Homo sapiens
  misc_RNA (1)...(19): siRNA sense strand
agaagaaagauguagaugu

SEQ ID NO: 2402616 - RNA, 19 nt, Homo sapiens
  misc_RNA (1)...(19): siRNA sense strand
acaucgacaagaaaggaaa

SEQ ID NO: 2402617 - RNA, 19 nt, Homo sapiens
  misc_RNA (1)...(19): siRNA sense strand
ccugaguggcuuucugaua

SEQ ID NO: 2402618 - RNA, 19 nt, Homo sapiens
  misc_RNA (1)...(19): siRNA sense strand
aaacuuagaacaaggacga

SEQ ID NO: 2402619 - RNA, 19 nt, Homo sapiens
  misc_RNA (1)...(19): siRNA sense strand
acaacuugaccgaagaauu

SEQ ID NO: 2402620 - RNA, 19 nt, Homo sapiens
  misc_RNA (1)...(19): siRNA sense strand
gagugaagaauuuaggcuu

SEQ ID NO: 2402621 - RNA, 19 nt, Homo sapiens
  misc_RNA (1)...(19): siRNA sense strand
agccagagcaugaccuuaa

SEQ ID NO: 2402622 - RNA, 19 nt, Homo sapiens
  misc_RNA (1)...(19): siRNA sense strand
aggaacgacucaaggagga

SEQ ID NO: 2402623 - RNA, 19 nt, Homo sapiens
  misc_RNA (1)...(19): siRNA sense strand
cguuaaagaggucugaaca

SEQ ID NO: 2402624 - RNA, 19 nt, Homo sapiens
  misc_RNA (1)...(19): siRNA sense strand
ugagaaacuacaucgacaa

SEQ ID NO: 2402625 - RNA, 19 nt, Homo sapiens
  misc_RNA (1)...(19): siRNA sense strand
caccugaagucaagacaca

SEQ ID NO: 2402626 - RNA, 19 nt, Homo sapiens
  misc_RNA (1)...(19): siRNA sense strand
uaggaagaagagagcgcua

SEQ ID NO: 2402627 - RNA, 19 nt, Homo sapiens
  misc_RNA (1)...(19): siRNA sense strand
auucagaaguugucaccuu

SEQ ID NO: 2402628 - RNA, 19 nt, Homo sapiens
  misc_RNA (1)...(19): siRNA sense strand
uuagaagagaauccagaaa

SEQ ID NO: 2402629 - RNA, 19 nt, Homo sapiens
  misc_RNA (1)...(19): siRNA sense strand
cgacagaaaauagaagaaa

SEQ ID NO: 2402630 - RNA, 19 nt, Homo sapiens
  misc_RNA (1)...(19): siRNA sense strand
agaagcaacaggaggcuga

SEQ ID NO: 2402631 - RNA, 19 nt, Homo sapiens
  misc_RNA (1)...(19): siRNA sense strand
cugaacagcagaagaagca

SEQ ID NO: 2402632 - RNA, 19 nt, Homo sapiens
  misc_RNA (1)...(19): siRNA sense strand
acuuagaacaaggacgaua

SEQ ID NO: 2402633 - RNA, 19 nt, Homo sapiens
  misc_RNA (1)...(19): siRNA sense strand
caguuaaagaaauugccaa

SEQ ID NO: 2402634 - RNA, 19 nt, Homo sapiens
  misc_RNA (1)...(19): siRNA sense strand
aagaagaaacuaagacucu

SEQ ID NO: 2402635 - RNA, 19 nt, Homo sapiens
  misc_RNA (1)...(19): siRNA sense strand
ugaccgaagaauuagaaga

SEQ ID NO: 2402636 - RNA, 19 nt, Homo sapiens
  misc_RNA (1)...(19): siRNA sense strand
ucaaagcaggagaagaauu

SEQ ID NO: 2402637 - RNA, 19 nt, Homo sapiens
  misc_RNA (1)...(19): siRNA sense strand
gaggaagagccggaaggaa

SEQ ID NO: 2402638 - RNA, 19 nt, Homo sapiens
  misc_RNA (1)...(19): siRNA sense strand
gaacaaggacgauaccuga

SEQ ID NO: 2402639 - RNA, 19 nt, Homo sapiens
  misc_RNA (1)...(19): siRNA sense strand
caacauacuaagauggcaa

SEQ ID NO: 2402640 - RNA, 19 nt, Homo sapiens
  misc_RNA (1)...(19): siRNA sense strand
cuggagaagaacuggauuu

SEQ ID NO: 2402641 - RNA, 19 nt, Homo sapiens
  misc_RNA (1)...(19): siRNA sense strand
cuggauuuguugagcgaga

SEQ ID NO: 2402642 - RNA, 19 nt, Homo sapiens
  misc_RNA (1)...(19): siRNA sense strand
uauugaacacagugggaga

SEQ ID NO: 2402643 - RNA, 19 nt, Homo sapiens
  misc_RNA (1)...(19): siRNA sense strand
ucaccgaggcagaggaacu

SEQ ID NO: 2402644 - RNA, 19 nt, Homo sapiens
  misc_RNA (1)...(19): siRNA sense strand
ggaccaagucaccgaggca

SEQ ID NO: 2402645 - RNA, 19 nt, Homo sapiens
  misc_RNA (1)...(19): siRNA sense strand
cagaucaauucgagcagga

SEQ ID NO: 2402646 - RNA, 19 nt, Homo sapiens
  misc_RNA (1)...(19): siRNA sense strand
cagucaaggccaagaccca

SEQ ID NO: 2402647 - RNA, 19 nt, Homo sapiens
  misc_RNA (1)...(19): siRNA sense strand
ggauuuguugagcgagauu

SEQ ID NO: 2402648 - RNA, 19 nt, Homo sapiens
  misc_RNA (1)...(19): siRNA sense strand
gaucaauucgagcaggaga

SEQ ID NO: 2402649 - RNA, 19 nt, Homo sapiens
  misc_RNA (1)...(19): siRNA sense strand
cagaggaggcacagaggca

SEQ ID NO: 2402650 - RNA, 19 nt, Homo sapiens
  misc_RNA (1)...(19): siRNA sense strand
gcuuuguagcucaggccaa

SEQ ID NO: 2402651 - RNA, 19 nt, Homo sapiens
  misc_RNA (1)...(19): siRNA sense strand
aggagugggcgaagcucua

SEQ ID NO: 2402652 - RNA, 19 nt, Homo sapiens
  misc_RNA (1)...(19): siRNA sense strand
caguaaggcaacagcguga

SEQ ID NO: 2402653 - RNA, 19 nt, Homo sapiens
  misc_RNA (1)...(19): siRNA sense strand
uuacaaggcaacagagcau

SEQ ID NO: 2402654 - RNA, 19 nt, Homo sapiens
  misc_RNA (1)...(19): siRNA sense strand
ugaaagaguccaagcagca

SEQ ID NO: 2402655 - RNA, 19 nt, Homo sapiens
  misc_RNA (1)...(19): siRNA sense strand
aagaagauguucaagcuga

SEQ ID NO: 2402656 - RNA, 19 nt, Homo sapiens
  misc_RNA (1)...(19): siRNA sense strand
agucauaacugcaagcugu

SEQ ID NO: 2402657 - RNA, 19 nt, Homo sapiens
  misc_RNA (1)...(19): siRNA sense strand
aaucaugaauaaagaccca

SEQ ID NO: 2402658 - RNA, 19 nt, Homo sapiens
  misc_RNA (1)...(19): siRNA sense strand
uggugguguuacaaggcaa

SEQ ID NO: 2402659 - RNA, 19 nt, Homo sapiens
  misc_RNA (1)...(19): siRNA sense strand
ggagaaagcuugacgucac

SEQ ID NO: 2402660 - RNA, 19 nt, Homo sapiens
  misc_RNA (1)...(19): siRNA sense strand
ugguccggauccagagaaa

SEQ ID NO: 2402661 - RNA, 19 nt, Homo sapiens
  misc_RNA (1)...(19): siRNA sense strand
agagaaauacacagcacau

SEQ ID NO: 2402662 - RNA, 19 nt, Homo sapiens
  misc_RNA (1)...(19): siRNA sense strand
agaacaucgucuggaggaa

SEQ ID NO: 2402663 - RNA, 19 nt, Homo sapiens
  misc_RNA (1)...(19): siRNA sense strand
aggaagagacugaagaaca

SEQ ID NO: 2402664 - RNA, 19 nt, Homo sapiens
  misc_RNA (1)...(19): siRNA sense strand
ggucaaugcgauuacuaaa

SEQ ID NO: 2402665 - RNA, 19 nt, Homo sapiens
  misc_RNA (1)...(19): siRNA sense strand
aagaagccuaagagagaaa

SEQ ID NO: 2402666 - RNA, 19 nt, Homo sapiens
  misc_RNA (1)...(19): siRNA sense strand
guaacaagcuacaacccaa

SEQ ID NO: 2402667 - RNA, 19 nt, Homo sapiens
  misc_RNA (1)...(19): siRNA sense strand
ccacuuuaauaguaggaca

SEQ ID NO: 2402668 - RNA, 19 nt, Homo sapiens
  misc_RNA (1)...(19): siRNA sense strand
gauuggauguagaagguca

SEQ ID NO: 2402669 - RNA, 19 nt, Homo sapiens
  misc_RNA (1)...(19): siRNA sense strand
guagaaggucaaugcgauu

SEQ ID NO: 2402670 - RNA, 19 nt, Homo sapiens
  misc_RNA (1)...(19): siRNA sense strand
gugaaaugauagagaagag

SEQ ID NO: 2402671 - RNA, 19 nt, Homo sapiens
  misc_RNA (1)...(19): siRNA sense strand
ccaaaagaaagaagccuaa

SEQ ID NO: 2402672 - RNA, 19 nt, Homo sapiens
  misc_RNA (1)...(19): siRNA sense strand
ccuccugggccuuuagaaa

SEQ ID NO: 2402673 - RNA, 19 nt, Homo sapiens
  misc_RNA (1)...(19): siRNA sense strand
cugaaaaucaagaagacaa

SEQ ID NO: 2402674 - RNA, 19 nt, Homo sapiens
  misc_RNA (1)...(19): siRNA sense strand
ggagguaauuccagcggga

SEQ ID NO: 2402675 - RNA, 19 nt, Homo sapiens
  misc_RNA (1)...(19): siRNA sense strand
cccaaaucccuaucagaaa

SEQ ID NO: 2402676 - RNA, 19 nt, Homo sapiens
  misc_RNA (1)...(19): siRNA sense strand
aaaugauagagaagagaca

SEQ ID NO: 2402677 - RNA, 19 nt, Homo sapiens
  misc_RNA (1)...(19): siRNA sense strand
gguguauagaaaugaaaga

SEQ ID NO: 2402678 - RNA, 19 nt, Homo sapiens
  misc_RNA (1)...(19): siRNA sense strand
ucucaguguugauguggaa

SEQ ID NO: 2402679 - RNA, 19 nt, Homo sapiens
  misc_RNA (1)...(19): siRNA sense strand
gcguguaagaagacuaaaa

SEQ ID NO: 2402680 - RNA, 19 nt, Homo sapiens
  misc_RNA (1)...(19): siRNA sense strand
ccaucagaaacuagaacuu

SEQ ID NO: 2402681 - RNA, 19 nt, Homo sapiens
  misc_RNA (1)...(19): siRNA sense strand
ccuaaauccaaaagaaaga

SEQ ID NO: 2402682 - RNA, 19 nt, Homo sapiens
  misc_RNA (1)...(19): siRNA sense strand
acugccggauugagggaua

SEQ ID NO: 2402683 - RNA, 19 nt, Homo sapiens
  misc_RNA (1)...(19): siRNA sense strand
gcauucguuugguggagaa

SEQ ID NO: 2402684 - RNA, 19 nt, Homo sapiens
  misc_RNA (1)...(19): siRNA sense strand
aaaggaagagacugaagaa

SEQ ID NO: 2402685 - RNA, 19 nt, Homo sapiens
  misc_RNA (1)...(19): siRNA sense strand
cagaugaagguaaaugaau

SEQ ID NO: 2402686 - RNA, 19 nt, Homo sapiens
  misc_RNA (1)...(19): siRNA sense strand
aagaaaacuugcagaagga

SEQ ID NO: 2402687 - RNA, 19 nt, Homo sapiens
  misc_RNA (1)...(19): siRNA sense strand
aaaacuugcagaaggauua

SEQ ID NO: 2402688 - RNA, 19 nt, Homo sapiens
  misc_RNA (1)...(19): siRNA sense strand
uguggaaaguagucaggau

SEQ ID NO: 2402689 - RNA, 19 nt, Homo sapiens
  misc_RNA (1)...(19): siRNA sense strand
aagccaaguaguaagaaca

SEQ ID NO: 2402690 - RNA, 19 nt, Homo sapiens
  misc_RNA (1)...(19): siRNA sense strand
gcgauugaauuccaggaga

SEQ ID NO: 2402691 - RNA, 19 nt, Homo sapiens
  misc_RNA (1)...(19): siRNA sense strand
agaaaucuuccaugagaca

SEQ ID NO: 2402692 - RNA, 19 nt, Homo sapiens
  misc_RNA (1)...(19): siRNA sense strand
ggauugucacccuacgaaa

SEQ ID NO: 2402693 - RNA, 19 nt, Homo sapiens
  misc_RNA (1)...(19): siRNA sense strand
aagaaagaagccuaagaga

SEQ ID NO: 2402694 - RNA, 19 nt, Homo sapiens
  misc_RNA (1)...(19): siRNA sense strand
ccuaaagaagauggaguuu

SEQ ID NO: 2402695 - RNA, 19 nt, Homo sapiens
  misc_RNA (1)...(19): siRNA sense strand
acauacugucacugagcua

SEQ ID NO: 2402696 - RNA, 19 nt, Homo sapiens
  misc_RNA (1)...(19): siRNA sense strand
ccuucgacuucuuggcaga

SEQ ID NO: 2402697 - RNA, 19 nt, Homo sapiens
  misc_RNA (1)...(19): siRNA sense strand
cugaacauacaaagagcau

SEQ ID NO: 2402698 - RNA, 19 nt, Homo sapiens
  misc_RNA (1)...(19): siRNA sense strand
ccgugaaaugauagagaag

SEQ ID NO: 2402699 - RNA, 19 nt, Homo sapiens
  misc_RNA (1)...(19): siRNA sense strand
ccuccuaaauccaaaagaa

SEQ ID NO: 2402700 - RNA, 19 nt, Homo sapiens
  misc_RNA (1)...(19): siRNA sense strand
ccagaugaagguaaaugaa

SEQ ID NO: 2402701 - RNA, 19 nt, Homo sapiens
  misc_RNA (1)...(19): siRNA sense strand
ggucauuagugaagauacc

SEQ ID NO: 2402702 - RNA, 19 nt, Homo sapiens
  misc_RNA (1)...(19): siRNA sense strand
acucaguaauuaccagcua

SEQ ID NO: 2402703 - RNA, 19 nt, Homo sapiens
  misc_RNA (1)...(19): siRNA sense strand
uacgaaaggaagagacuga

SEQ ID NO: 2402704 - RNA, 19 nt, Homo sapiens
  misc_RNA (1)...(19): siRNA sense strand
uguagaaggucaaugcgau

SEQ ID NO: 2402705 - RNA, 19 nt, Homo sapiens
  misc_RNA (1)...(19): siRNA sense strand
aagacaacaaugaacgauu

SEQ ID NO: 2402706 - RNA, 19 nt, Homo sapiens
  misc_RNA (1)...(19): siRNA sense strand
gcaggaaugagcaagccaa

SEQ ID NO: 2402707 - RNA, 19 nt, Homo sapiens
  misc_RNA (1)...(19): siRNA sense strand
auuaaaagcuacaaagcca

SEQ ID NO: 2402708 - RNA, 19 nt, Homo sapiens
  misc_RNA (1)...(19): siRNA sense strand
uggcauggucauuagugaa

SEQ ID NO: 2402709 - RNA, 19 nt, Homo sapiens
  misc_RNA (1)...(19): siRNA sense strand
agaaagaagccuaagagag

SEQ ID NO: 2402710 - RNA, 19 nt, Homo sapiens
  misc_RNA (1)...(19): siRNA sense strand
agaacacugagaagggauu

SEQ ID NO: 2402711 - RNA, 19 nt, Homo sapiens
  misc_RNA (1)...(19): siRNA sense strand
ccaguucuucuaugggaaa

SEQ ID NO: 2402712 - RNA, 19 nt, Homo sapiens
  misc_RNA (1)...(19): siRNA sense strand
aaacaagaagacuguguca

SEQ ID NO: 2402713 - RNA, 19 nt, Homo sapiens
  misc_RNA (1)...(19): siRNA sense strand
uggagacagugaugaagau

SEQ ID NO: 2402714 - RNA, 19 nt, Homo sapiens
  misc_RNA (1)...(19): siRNA sense strand
cugcaagacuccgugaaau

SEQ ID NO: 2402715 - RNA, 19 nt, Homo sapiens
  misc_RNA (1)...(19): siRNA sense strand
uaagagagaaaaugggauu

SEQ ID NO: 2402716 - RNA, 19 nt, Homo sapiens
  misc_RNA (1)...(19): siRNA sense strand
ccaagagagcagagggaga

SEQ ID NO: 2402717 - RNA, 19 nt, Homo sapiens
  misc_RNA (1)...(19): siRNA sense strand
uuauagaugaacugggcaa

SEQ ID NO: 2402718 - RNA, 19 nt, Homo sapiens
  misc_RNA (1)...(19): siRNA sense strand
guuuauauucucaaggaca

SEQ ID NO: 2402719 - RNA, 19 nt, Homo sapiens
  misc_RNA (1)...(19): siRNA sense strand
cucuagugaccgagaauuu

SEQ ID NO: 2402720 - RNA, 19 nt, Homo sapiens
  misc_RNA (1)...(19): siRNA sense strand
cugccaaggcccagaaucu

SEQ ID NO: 2402721 - RNA, 19 nt, Homo sapiens
  misc_RNA (1)...(19): siRNA sense strand
ggaucacggugcuggacca

SEQ ID NO: 2402722 - RNA, 19 nt, Homo sapiens
  misc_RNA (1)...(19): siRNA sense strand
gcuccuaucacuagugcau

SEQ ID NO: 2402723 - RNA, 19 nt, Homo sapiens
  misc_RNA (1)...(19): siRNA sense strand
guuucaucaaaguuggaua

SEQ ID NO: 2402724 - RNA, 19 nt, Homo sapiens
  misc_RNA (1)...(19): siRNA sense strand
ggaaccagcuggagggcaa

SEQ ID NO: 2402725 - RNA, 19 nt, Homo sapiens
  misc_RNA (1)...(19): siRNA sense strand
ccgggauggccgagaagaa

SEQ ID NO: 2402726 - RNA, 19 nt, Homo sapiens
  misc_RNA (1)...(19): siRNA sense strand
ggcuggagaacguggagaa

SEQ ID NO: 2402727 - RNA, 19 nt, Homo sapiens
  misc_RNA (1)...(19): siRNA sense strand
ccgagaagaagcuggcuga

SEQ ID NO: 2402728 - RNA, 19 nt, Homo sapiens
  misc_RNA (1)...(19): siRNA sense strand
uggagaacguggagaaccu

SEQ ID NO: 2402729 - RNA, 19 nt, Homo sapiens
  misc_RNA (1)...(19): siRNA sense strand
gggaaggagcccugcaacu

SEQ ID NO: 2402730 - RNA, 19 nt, Homo sapiens
  misc_RNA (1)...(19): siRNA sense strand
augcagaaacugaggccca

SEQ ID NO: 2402731 - RNA, 19 nt, Homo sapiens
  misc_RNA (1)...(19): siRNA sense strand
auggagaggaagauugaau

SEQ ID NO: 2402732 - RNA, 19 nt, Homo sapiens
  misc_RNA (1)...(19): siRNA sense strand
ccagauugaacaagggaag

SEQ ID NO: 2402733 - RNA, 19 nt, Homo sapiens
  misc_RNA (1)...(19): siRNA sense strand
agacuaaugaagagagaaa

SEQ ID NO: 2402734 - RNA, 19 nt, Homo sapiens
  misc_RNA (1)...(19): siRNA sense strand
guguaaggaaugugggaaa

SEQ ID NO: 2402735 - RNA, 19 nt, Homo sapiens
  misc_RNA (1)...(19): siRNA sense strand
ccauaugaguguaaggaau

SEQ ID NO: 2402736 - RNA, 19 nt, Homo sapiens
  misc_RNA (1)...(19): siRNA sense strand
augcaagguaugugggaaa

SEQ ID NO: 2402737 - RNA, 19 nt, Homo sapiens
  misc_RNA (1)...(19): siRNA sense strand
aggacucacuggagagaua

SEQ ID NO: 2402738 - RNA, 19 nt, Homo sapiens
  misc_RNA (1)...(19): siRNA sense strand
auguaagauaugugggaaa

SEQ ID NO: 2402739 - RNA, 19 nt, Homo sapiens
  misc_RNA (1)...(19): siRNA sense strand
agagaugugaugugggaaa

SEQ ID NO: 2402740 - RNA, 19 nt, Homo sapiens
  misc_RNA (1)...(19): siRNA sense strand
uuguaaggaaugugggaaa

SEQ ID NO: 2402741 - RNA, 19 nt, Homo sapiens
  misc_RNA (1)...(19): siRNA sense strand
ugaaaugggaagacacaaa

SEQ ID NO: 2402742 - RNA, 19 nt, Homo sapiens
  misc_RNA (1)...(19): siRNA sense strand
ggacuguauaggaaugaaa

SEQ ID NO: 2402743 - RNA, 19 nt, Homo sapiens
  misc_RNA (1)...(19): siRNA sense strand
auguaaacgauguggaaga

SEQ ID NO: 2402744 - RNA, 19 nt, Homo sapiens
  misc_RNA (1)...(19): siRNA sense strand
augcaagcagugugggaaa

SEQ ID NO: 2402745 - RNA, 19 nt, Homo sapiens
  misc_RNA (1)...(19): siRNA sense strand
ccucacaaaugcaagguau

SEQ ID NO: 2402746 - RNA, 19 nt, Homo sapiens
  misc_RNA (1)...(19): siRNA sense strand
augcaugaauguaaggaau

SEQ ID NO: 2402747 - RNA, 19 nt, Homo sapiens
  misc_RNA (1)...(19): siRNA sense strand
ccagaugagugucaggaau

SEQ ID NO: 2402748 - RNA, 19 nt, Homo sapiens
  misc_RNA (1)...(19): siRNA sense strand
auguaaguugugugggaaa

SEQ ID NO: 2402749 - RNA, 19 nt, Homo sapiens
  misc_RNA (1)...(19): siRNA sense strand
augcaagcaaugcgggaaa

SEQ ID NO: 2402750 - RNA, 19 nt, Homo sapiens
  misc_RNA (1)...(19): siRNA sense strand
acugcaaagucaugaaaga

SEQ ID NO: 2402751 - RNA, 19 nt, Homo sapiens
  misc_RNA (1)...(19): siRNA sense strand
uugaagaucagcacagaaa

SEQ ID NO: 2402752 - RNA, 19 nt, Homo sapiens
  misc_RNA (1)...(19): siRNA sense strand
agagagauuuagugaaagu

SEQ ID NO: 2402753 - RNA, 19 nt, Homo sapiens
  misc_RNA (1)...(19): siRNA sense strand
cgcuaugauuguaaggaau

SEQ ID NO: 2402754 - RNA, 19 nt, Homo sapiens
  misc_RNA (1)...(19): siRNA sense strand
acgcuaugauuguaaggaa

SEQ ID NO: 2402755 - RNA, 19 nt, Homo sapiens
  misc_RNA (1)...(19): siRNA sense strand
gggagaagacagaagugau

SEQ ID NO: 2402756 - RNA, 19 nt, Homo sapiens
  misc_RNA (1)...(19): siRNA sense strand
cuaucuaagacaugaaaga

SEQ ID NO: 2402757 - RNA, 19 nt, Homo sapiens
  misc_RNA (1)...(19): siRNA sense strand
cccuaugaauguaaagaau

SEQ ID NO: 2402758 - RNA, 19 nt, Homo sapiens
  misc_RNA (1)...(19): siRNA sense strand
gucauaucauagagagauu

SEQ ID NO: 2402759 - RNA, 19 nt, Homo sapiens
  misc_RNA (1)...(19): siRNA sense strand
cuuucgaagucauaugaua

SEQ ID NO: 2402760 - RNA, 19 nt, Homo sapiens
  misc_RNA (1)...(19): siRNA sense strand
aacucacacuggagagaaa

SEQ ID NO: 2402761 - RNA, 19 nt, Homo sapiens
  misc_RNA (1)...(19): siRNA sense strand
aacucacacuggagagaaa

SEQ ID NO: 2402762 - RNA, 19 nt, Homo sapiens
  misc_RNA (1)...(19): siRNA sense strand
aacucacacuggagagaaa

SEQ ID NO: 2402763 - RNA, 19 nt, Homo sapiens
  misc_RNA (1)...(19): siRNA sense strand
caguguauuucaaggacau

SEQ ID NO: 2402764 - RNA, 19 nt, Homo sapiens
  misc_RNA (1)...(19): siRNA sense strand
aacucacacuggagagaaa

SEQ ID NO: 2402765 - RNA, 19 nt, Homo sapiens
  misc_RNA (1)...(19): siRNA sense strand
auguaaggaaugcaggaaa

SEQ ID NO: 2402766 - RNA, 19 nt, Homo sapiens
  misc_RNA (1)...(19): siRNA sense strand
agacacaaacauugaagau

SEQ ID NO: 2402767 - RNA, 19 nt, Homo sapiens
  misc_RNA (1)...(19): siRNA sense strand
aagcaguguguguggagaa

SEQ ID NO: 2402768 - RNA, 19 nt, Homo sapiens
  misc_RNA (1)...(19): siRNA sense strand
aguacaacguggaggugga

SEQ ID NO: 2402769 - RNA, 19 nt, Homo sapiens
  misc_RNA (1)...(19): siRNA sense strand
augucaacaaugugguaaa

SEQ ID NO: 2402770 - RNA, 19 nt, Homo sapiens
  misc_RNA (1)...(19): siRNA sense strand
gcagugugggaaagcguua

SEQ ID NO: 2402771 - RNA, 19 nt, Homo sapiens
  misc_RNA (1)...(19): siRNA sense strand
ccuucgaagacaugaaaca

SEQ ID NO: 2402772 - RNA, 19 nt, Homo sapiens
  misc_RNA (1)...(19): siRNA sense strand
gccagauaguacugugaau

SEQ ID NO: 2402773 - RNA, 19 nt, Homo sapiens
  misc_RNA (1)...(19): siRNA sense strand
aaauguaaacgauguggaa

SEQ ID NO: 2402774 - RNA, 19 nt, Homo sapiens
  misc_RNA (1)...(19): siRNA sense strand
guggagaaaucauggguug

SEQ ID NO: 2402775 - RNA, 19 nt, Homo sapiens
  misc_RNA (1)...(19): siRNA sense strand
ccuucgaauacaugaaaga

SEQ ID NO: 2402776 - RNA, 19 nt, Homo sapiens
  misc_RNA (1)...(19): siRNA sense strand
ugguaaagccuuccguauu

SEQ ID NO: 2402777 - RNA, 19 nt, Homo sapiens
  misc_RNA (1)...(19): siRNA sense strand
auauguaaguuguguggga

SEQ ID NO: 2402778 - RNA, 19 nt, Homo sapiens
  misc_RNA (1)...(19): siRNA sense strand
gauaaugcacacuggagau

SEQ ID NO: 2402779 - RNA, 19 nt, Homo sapiens
  misc_RNA (1)...(19): siRNA sense strand
ucagacuaaugaagagaga

SEQ ID NO: 2402780 - RNA, 19 nt, Homo sapiens
  misc_RNA (1)...(19): siRNA sense strand
ccuucaguucuucgggaaa

SEQ ID NO: 2402781 - RNA, 19 nt, Homo sapiens
  misc_RNA (1)...(19): siRNA sense strand
aggauguggcggugaacuu

SEQ ID NO: 2402782 - RNA, 19 nt, Homo sapiens
  misc_RNA (1)...(19): siRNA sense strand
uguaagacaugaaagaacu

SEQ ID NO: 2402783 - RNA, 19 nt, Homo sapiens
  misc_RNA (1)...(19): siRNA sense strand
cugcaaagucaugaaagaa

SEQ ID NO: 2402784 - RNA, 19 nt, Homo sapiens
  misc_RNA (1)...(19): siRNA sense strand
uguaaggaaugcaggaaag

SEQ ID NO: 2402785 - RNA, 19 nt, Homo sapiens
  misc_RNA (1)...(19): siRNA sense strand
acaaaggagcagaaagaaa

SEQ ID NO: 2402786 - RNA, 19 nt, Homo sapiens
  misc_RNA (1)...(19): siRNA sense strand
gaugaaagaagaagggaca

SEQ ID NO: 2402787 - RNA, 19 nt, Homo sapiens
  misc_RNA (1)...(19): siRNA sense strand
aagcgauaucugagaaaua

SEQ ID NO: 2402788 - RNA, 19 nt, Homo sapiens
  misc_RNA (1)...(19): siRNA sense strand
gccaagaagaccaggagaa

SEQ ID NO: 2402789 - RNA, 19 nt, Homo sapiens
  misc_RNA (1)...(19): siRNA sense strand
ugaaagaagaagggacaaa

SEQ ID NO: 2402790 - RNA, 19 nt, Homo sapiens
  misc_RNA (1)...(19): siRNA sense strand
uuacagaagaagagugaca

SEQ ID NO: 2402791 - RNA, 19 nt, Homo sapiens
  misc_RNA (1)...(19): siRNA sense strand
augaagagcagaagcagaa

SEQ ID NO: 2402792 - RNA, 19 nt, Homo sapiens
  misc_RNA (1)...(19): siRNA sense strand
ggaagcgauaucugagaaa

SEQ ID NO: 2402793 - RNA, 19 nt, Homo sapiens
  misc_RNA (1)...(19): siRNA sense strand
agaagauagcaaagcuuua

SEQ ID NO: 2402794 - RNA, 19 nt, Homo sapiens
  misc_RNA (1)...(19): siRNA sense strand
uggugaaagcugaagauuu

SEQ ID NO: 2402795 - RNA, 19 nt, Homo sapiens
  misc_RNA (1)...(19): siRNA sense strand
ccgauuacaaggagagcuu

SEQ ID NO: 2402796 - RNA, 19 nt, Homo sapiens
  misc_RNA (1)...(19): siRNA sense strand
acaacaucaucgagcacua

SEQ ID NO: 2402797 - RNA, 19 nt, Homo sapiens
  misc_RNA (1)...(19): siRNA sense strand
uggugaacauggaugacaa

SEQ ID NO: 2402798 - RNA, 19 nt, Homo sapiens
  misc_RNA (1)...(19): siRNA sense strand
gagaaauuucggagugcuu

SEQ ID NO: 2402799 - RNA, 19 nt, Homo sapiens
  misc_RNA (1)...(19): siRNA sense strand
gggccugauggaagcgaua

SEQ ID NO: 2402800 - RNA, 19 nt, Homo sapiens
  misc_RNA (1)...(19): siRNA sense strand
agagcaugguggagggcuu

SEQ ID NO: 2402801 - RNA, 19 nt, Homo sapiens
  misc_RNA (1)...(19): siRNA sense strand
gaucagacaucaaguggca

SEQ ID NO: 2402802 - RNA, 19 nt, Homo sapiens
  misc_RNA (1)...(19): siRNA sense strand
gagcagaagcagaacagga

SEQ ID NO: 2402803 - RNA, 19 nt, Homo sapiens
  misc_RNA (1)...(19): siRNA sense strand
uggcaguguccuuguuaaa

SEQ ID NO: 2402804 - RNA, 19 nt, Homo sapiens
  misc_RNA (1)...(19): siRNA sense strand
ccaccaaggccaugaugau

SEQ ID NO: 2402805 - RNA, 19 nt, Homo sapiens
  misc_RNA (1)...(19): siRNA sense strand
aggagaaaaccgagugcaa

SEQ ID NO: 2402806 - RNA, 19 nt, Homo sapiens
  misc_RNA (1)...(19): siRNA sense strand
gaugaagagcagaagcaga

SEQ ID NO: 2402807 - RNA, 19 nt, Homo sapiens
  misc_RNA (1)...(19): siRNA sense strand
cagaagcagaacaggaaga

SEQ ID NO: 2402808 - RNA, 19 nt, Homo sapiens
  misc_RNA (1)...(19): siRNA sense strand
cagcauacggcgaagcaga

SEQ ID NO: 2402809 - RNA, 19 nt, Homo sapiens
  misc_RNA (1)...(19): siRNA sense strand
gagaugaagagcagaagca

SEQ ID NO: 2402810 - RNA, 19 nt, Homo sapiens
  misc_RNA (1)...(19): siRNA sense strand
agugaagcccagaguaauu

SEQ ID NO: 2402811 - RNA, 19 nt, Homo sapiens
  misc_RNA (1)...(19): siRNA sense strand
cgggaacaguacagcauca

SEQ ID NO: 2402812 - RNA, 19 nt, Homo sapiens
  misc_RNA (1)...(19): siRNA sense strand
ggagaagauagcaaagcuu

SEQ ID NO: 2402813 - RNA, 19 nt, Homo sapiens
  misc_RNA (1)...(19): siRNA sense strand
gggagauggggaagagcaa

SEQ ID NO: 2402814 - RNA, 19 nt, Homo sapiens
  misc_RNA (1)...(19): siRNA sense strand
acgugaaugaagaggcgaa

SEQ ID NO: 2402815 - RNA, 19 nt, Homo sapiens
  misc_RNA (1)...(19): siRNA sense strand
cuuuacagaagaagaguga

SEQ ID NO: 2402816 - RNA, 19 nt, Homo sapiens
  misc_RNA (1)...(19): siRNA sense strand
guggagggcuucaagguca

SEQ ID NO: 2402817 - RNA, 19 nt, Homo sapiens
  misc_RNA (1)...(19): siRNA sense strand
cauugaagagauugcauau

SEQ ID NO: 2402818 - RNA, 19 nt, Homo sapiens
  misc_RNA (1)...(19): siRNA sense strand
gagcuuauugccagaucaa

SEQ ID NO: 2402819 - RNA, 19 nt, Homo sapiens
  misc_RNA (1)...(19): siRNA sense strand
agcaaagcuuuacaagaaa

SEQ ID NO: 2402820 - RNA, 19 nt, Homo sapiens
  misc_RNA (1)...(19): siRNA sense strand
aggucacgcucauggaaau

SEQ ID NO: 2402821 - RNA, 19 nt, Homo sapiens
  misc_RNA (1)...(19): siRNA sense strand
ccguggagaagauagcaaa

SEQ ID NO: 2402822 - RNA, 19 nt, Homo sapiens
  misc_RNA (1)...(19): siRNA sense strand
ugaaugaagaggcgaagau

SEQ ID NO: 2402823 - RNA, 19 nt, Homo sapiens
  misc_RNA (1)...(19): siRNA sense strand
ggaagaacgggaaaggcca

SEQ ID NO: 2402824 - RNA, 19 nt, Homo sapiens
  misc_RNA (1)...(19): siRNA sense strand
cauuaauggugaugaggac

SEQ ID NO: 2402825 - RNA, 19 nt, Homo sapiens
  misc_RNA (1)...(19): siRNA sense strand
gcgccuaucucaaagacga

SEQ ID NO: 2402826 - RNA, 19 nt, Homo sapiens
  misc_RNA (1)...(19): siRNA sense strand
acgcagccacagagaaauu

SEQ ID NO: 2402827 - RNA, 19 nt, Homo sapiens
  misc_RNA (1)...(19): siRNA sense strand
uuggaaacauugaagagau

SEQ ID NO: 2402828 - RNA, 19 nt, Homo sapiens
  misc_RNA (1)...(19): siRNA sense strand
acauugaagagauugcaua

SEQ ID NO: 2402829 - RNA, 19 nt, Homo sapiens
  misc_RNA (1)...(19): siRNA sense strand
aaugaagaggcgaagauuu

SEQ ID NO: 2402830 - RNA, 19 nt, Homo sapiens
  misc_RNA (1)...(19): siRNA sense strand
cuuugaugauucagauuga

SEQ ID NO: 2402831 - RNA, 19 nt, Homo sapiens
  misc_RNA (1)...(19): siRNA sense strand
agaagaagggacaaagcga

SEQ ID NO: 2402832 - RNA, 19 nt, Homo sapiens
  misc_RNA (1)...(19): siRNA sense strand
ucaacaaaggacaguucua

SEQ ID NO: 2402833 - RNA, 19 nt, Homo sapiens
  misc_RNA (1)...(19): siRNA sense strand
augaagaggcgaagauuuu

SEQ ID NO: 2402834 - RNA, 19 nt, Homo sapiens
  misc_RNA (1)...(19): siRNA sense strand
acagagaugaacagcucaa

SEQ ID NO: 2402835 - RNA, 19 nt, Homo sapiens
  misc_RNA (1)...(19): siRNA sense strand
ggaugaugaacgagaaggu

SEQ ID NO: 2402836 - RNA, 19 nt, Homo sapiens
  misc_RNA (1)...(19): siRNA sense strand
agaacaggaagaacgggaa

SEQ ID NO: 2402837 - RNA, 19 nt, Homo sapiens
  misc_RNA (1)...(19): siRNA sense strand
gcuucaaggucacgcucau

SEQ ID NO: 2402838 - RNA, 19 nt, Homo sapiens
  misc_RNA (1)...(19): siRNA sense strand
agucauacuuggagaaucc

SEQ ID NO: 2402839 - RNA, 19 nt, Homo sapiens
  misc_RNA (1)...(19): siRNA sense strand
gccauaacacucagcgaga

SEQ ID NO: 2402840 - RNA, 19 nt, Homo sapiens
  misc_RNA (1)...(19): siRNA sense strand
agcagaagcagaacaggaa

SEQ ID NO: 2402841 - RNA, 19 nt, Homo sapiens
  misc_RNA (1)...(19): siRNA sense strand
ccauaccuuuacagaagaa

SEQ ID NO: 2402842 - RNA, 19 nt, Homo sapiens
  misc_RNA (1)...(19): siRNA sense strand
gaguaauuugaguggagga

SEQ ID NO: 2402843 - RNA, 19 nt, Homo sapiens
  misc_RNA (1)...(19): siRNA sense strand
cuucaaggacgcagccaca

SEQ ID NO: 2402844 - RNA, 19 nt, Homo sapiens
  misc_RNA (1)...(19): siRNA sense strand
cagaguaauuugaguggag

SEQ ID NO: 2402845 - RNA, 19 nt, Homo sapiens
  misc_RNA (1)...(19): siRNA sense strand
gagaaaaccgagugcaagu

SEQ ID NO: 2402846 - RNA, 19 nt, Homo sapiens
  misc_RNA (1)...(19): siRNA sense strand
ugaacauggaugacaacau

SEQ ID NO: 2402847 - RNA, 19 nt, Homo sapiens
  misc_RNA (1)...(19): siRNA sense strand
acuucauacuggagagaaa

SEQ ID NO: 2402848 - RNA, 19 nt, Homo sapiens
  misc_RNA (1)...(19): siRNA sense strand
augugaagaaugugacaaa

SEQ ID NO: 2402849 - RNA, 19 nt, Homo sapiens
  misc_RNA (1)...(19): siRNA sense strand
auguaaugagaguggcaaa

SEQ ID NO: 2402850 - RNA, 19 nt, Homo sapiens
  misc_RNA (1)...(19): siRNA sense strand
aauccauuuaggagagaaa

SEQ ID NO: 2402851 - RNA, 19 nt, Homo sapiens
  misc_RNA (1)...(19): siRNA sense strand
aagcauaucuugcaaguca

SEQ ID NO: 2402852 - RNA, 19 nt, Homo sapiens
  misc_RNA (1)...(19): siRNA sense strand
agauaauccauuuaggaga

SEQ ID NO: 2402853 - RNA, 19 nt, Homo sapiens
  misc_RNA (1)...(19): siRNA sense strand
ccuuacaaaugugaagaau

SEQ ID NO: 2402854 - RNA, 19 nt, Homo sapiens
  misc_RNA (1)...(19): siRNA sense strand
ggaaauggguucaagggau

SEQ ID NO: 2402855 - RNA, 19 nt, Homo sapiens
  misc_RNA (1)...(19): siRNA sense strand
gggaagaagaagaggauac

SEQ ID NO: 2402856 - RNA, 19 nt, Homo sapiens
  misc_RNA (1)...(19): siRNA sense strand
aagaaaugggccaaagaaa

SEQ ID NO: 2402857 - RNA, 19 nt, Homo sapiens
  misc_RNA (1)...(19): siRNA sense strand
aagaagaaagguaggaaga

SEQ ID NO: 2402858 - RNA, 19 nt, Homo sapiens
  misc_RNA (1)...(19): siRNA sense strand
agaaaugggccaaagaaaa

SEQ ID NO: 2402859 - RNA, 19 nt, Homo sapiens
  misc_RNA (1)...(19): siRNA sense strand
cugaauauugggaaggcaa

SEQ ID NO: 2402860 - RNA, 19 nt, Homo sapiens
  misc_RNA (1)...(19): siRNA sense strand
cuaaagaacucaucaggca

SEQ ID NO: 2402861 - RNA, 19 nt, Homo sapiens
  misc_RNA (1)...(19): siRNA sense strand
ccaaagagacccuucgaga

SEQ ID NO: 2402862 - RNA, 19 nt, Homo sapiens
  misc_RNA (1)...(19): siRNA sense strand
ucgucaagaugauguacaa

SEQ ID NO: 2402863 - RNA, 19 nt, Homo sapiens
  misc_RNA (1)...(19): siRNA sense strand
cagaagaggaaaauuguaa

SEQ ID NO: 2402864 - RNA, 19 nt, Homo sapiens
  misc_RNA (1)...(19): siRNA sense strand
gaaauggguucaagggauc

SEQ ID NO: 2402865 - RNA, 19 nt, Homo sapiens
  misc_RNA (1)...(19): siRNA sense strand
guauaaacaagcugaagca

SEQ ID NO: 2402866 - RNA, 19 nt, Homo sapiens
  misc_RNA (1)...(19): siRNA sense strand
cugcuagauaacagggaau

SEQ ID NO: 2402867 - RNA, 19 nt, Homo sapiens
  misc_RNA (1)...(19): siRNA sense strand
gcagagcagcugaggcaga

SEQ ID NO: 2402868 - RNA, 19 nt, Homo sapiens
  misc_RNA (1)...(19): siRNA sense strand
cguacagcacacugacaaa

SEQ ID NO: 2402869 - RNA, 19 nt, Homo sapiens
  misc_RNA (1)...(19): siRNA sense strand
caaagugagaagaugaaaa

SEQ ID NO: 2402870 - RNA, 19 nt, Homo sapiens
  misc_RNA (1)...(19): siRNA sense strand
ugaauauugggaaggcaaa

SEQ ID NO: 2402871 - RNA, 19 nt, Homo sapiens
  misc_RNA (1)...(19): siRNA sense strand
ggaugucacagaagaucaa

SEQ ID NO: 2402872 - RNA, 19 nt, Homo sapiens
  misc_RNA (1)...(19): siRNA sense strand
gcgaauacugcuagauaac

SEQ ID NO: 2402873 - RNA, 19 nt, Homo sapiens
  misc_RNA (1)...(19): siRNA sense strand
aggcagaacucaaaagcuu

SEQ ID NO: 2402874 - RNA, 19 nt, Homo sapiens
  misc_RNA (1)...(19): siRNA sense strand
agguaacacccaaguagaa

SEQ ID NO: 2402875 - RNA, 19 nt, Homo sapiens
  misc_RNA (1)...(19): siRNA sense strand
uggcagagcagcugaggca

SEQ ID NO: 2402876 - RNA, 19 nt, Homo sapiens
  misc_RNA (1)...(19): siRNA sense strand
ucuuaaagccuguaaccau

SEQ ID NO: 2402877 - RNA, 19 nt, Homo sapiens
  misc_RNA (1)...(19): siRNA sense strand
cuaauuuguggauuggaua

SEQ ID NO: 2402878 - RNA, 19 nt, Homo sapiens
  misc_RNA (1)...(19): siRNA sense strand
accaagaagcuauagauau

SEQ ID NO: 2402879 - RNA, 19 nt, Homo sapiens
  misc_RNA (1)...(19): siRNA sense strand
gcuuaagcaauuugaugau

SEQ ID NO: 2402880 - RNA, 19 nt, Homo sapiens
  misc_RNA (1)...(19): siRNA sense strand
gcucuggaggaauacgaaa

SEQ ID NO: 2402881 - RNA, 19 nt, Homo sapiens
  misc_RNA (1)...(19): siRNA sense strand
gcuauuacccuguuggagu

SEQ ID NO: 2402882 - RNA, 19 nt, Homo sapiens
  misc_RNA (1)...(19): siRNA sense strand
gcguacagcacacugacaa

SEQ ID NO: 2402883 - RNA, 19 nt, Homo sapiens
  misc_RNA (1)...(19): siRNA sense strand
ggaggaucagcuagugaau

SEQ ID NO: 2402884 - RNA, 19 nt, Homo sapiens
  misc_RNA (1)...(19): siRNA sense strand
cgaaaaugcuacagaagag

SEQ ID NO: 2402885 - RNA, 19 nt, Homo sapiens
  misc_RNA (1)...(19): siRNA sense strand
ucagcuagugaaugugaua

SEQ ID NO: 2402886 - RNA, 19 nt, Homo sapiens
  misc_RNA (1)...(19): siRNA sense strand
cuacaagaugggccaguuu

SEQ ID NO: 2402887 - RNA, 19 nt, Homo sapiens
  misc_RNA (1)...(19): siRNA sense strand
ccaguuggugggaggauca

SEQ ID NO: 2402888 - RNA, 19 nt, Homo sapiens
  misc_RNA (1)...(19): siRNA sense strand
cugacaaaagaaagaagaa

SEQ ID NO: 2402889 - RNA, 19 nt, Homo sapiens
  misc_RNA (1)...(19): siRNA sense strand
gaugaucauagcugggaga

SEQ ID NO: 2402890 - RNA, 19 nt, Homo sapiens
  misc_RNA (1)...(19): siRNA sense strand
cgauaauggugacgaccga

SEQ ID NO: 2402891 - RNA, 19 nt, Homo sapiens
  misc_RNA (1)...(19): siRNA sense strand
gcucauaaagccaggguug

SEQ ID NO: 2402892 - RNA, 19 nt, Homo sapiens
  misc_RNA (1)...(19): siRNA sense strand
aaccagagccucagggaaa

SEQ ID NO: 2402893 - RNA, 19 nt, Homo sapiens
  misc_RNA (1)...(19): siRNA sense strand
ggacauuucucuacuauca

SEQ ID NO: 2402894 - RNA, 19 nt, Homo sapiens
  misc_RNA (1)...(19): siRNA sense strand
gcgcagaccucaaugcuca

SEQ ID NO: 2402895 - RNA, 19 nt, Homo sapiens
  misc_RNA (1)...(19): siRNA sense strand
ucuacuaccugcuggagaa

SEQ ID NO: 2402896 - RNA, 19 nt, Homo sapiens
  misc_RNA (1)...(19): siRNA sense strand
cuuuggagaagaagggaau

SEQ ID NO: 2402897 - RNA, 19 nt, Homo sapiens
  misc_RNA (1)...(19): siRNA sense strand
ccguggaccugcugaccaa

SEQ ID NO: 2402898 - RNA, 19 nt, Homo sapiens
  misc_RNA (1)...(19): siRNA sense strand
ggacuuugcccgugagaug

SEQ ID NO: 2402899 - RNA, 19 nt, Homo sapiens
  misc_RNA (1)...(19): siRNA sense strand
agaaaggggagaagggaga

SEQ ID NO: 2402900 - RNA, 19 nt, Homo sapiens
  misc_RNA (1)...(19): siRNA sense strand
acaacuaccugauugagua

SEQ ID NO: 2402901 - RNA, 19 nt, Homo sapiens
  misc_RNA (1)...(19): siRNA sense strand
ggagaaaggcgcagaccuc

SEQ ID NO: 2402902 - RNA, 19 nt, Homo sapiens
  misc_RNA (1)...(19): siRNA sense strand
gcuccaugcagcaggcgaa

SEQ ID NO: 2402903 - RNA, 19 nt, Homo sapiens
  misc_RNA (1)...(19): siRNA sense strand
ccaccgacgacaagggcuu

SEQ ID NO: 2402904 - RNA, 19 nt, Homo sapiens
  misc_RNA (1)...(19): siRNA sense strand
gugugaagguccuggugca

SEQ ID NO: 2402905 - RNA, 19 nt, Homo sapiens
  misc_RNA (1)...(19): siRNA sense strand
gcuacaaacccauugacuu

SEQ ID NO: 2402906 - RNA, 19 nt, Homo sapiens
  misc_RNA (1)...(19): siRNA sense strand
gaaccagagccucagggaa

SEQ ID NO: 2402907 - RNA, 19 nt, Homo sapiens
  misc_RNA (1)...(19): siRNA sense strand
ugguagaggaguacaaguu

SEQ ID NO: 2402908 - RNA, 19 nt, Homo sapiens
  misc_RNA (1)...(19): siRNA sense strand
cuacaaacccauugacuuc

SEQ ID NO: 2402909 - RNA, 19 nt, Homo sapiens
  misc_RNA (1)...(19): siRNA sense strand
ugaaggaugccauguggaa

SEQ ID NO: 2402910 - RNA, 19 nt, Homo sapiens
  misc_RNA (1)...(19): siRNA sense strand
gggagaagggagaggugcu

SEQ ID NO: 2402911 - RNA, 19 nt, Homo sapiens
  misc_RNA (1)...(19): siRNA sense strand
aaggaugccauguggaaaa

SEQ ID NO: 2402912 - RNA, 19 nt, Homo sapiens
  misc_RNA (1)...(19): siRNA sense strand
ggauuccuuuggagaagaa

SEQ ID NO: 2402913 - RNA, 19 nt, Homo sapiens
  misc_RNA (1)...(19): siRNA sense strand
agaaaggcgcagaccucaa

SEQ ID NO: 2402914 - RNA, 19 nt, Homo sapiens
  misc_RNA (1)...(19): siRNA sense strand
guaucaaggucaaggaugc

SEQ ID NO: 2402915 - RNA, 19 nt, Homo sapiens
  misc_RNA (1)...(19): siRNA sense strand
ugacgaaaaugaagauguu

SEQ ID NO: 2402916 - RNA, 19 nt, Homo sapiens
  misc_RNA (1)...(19): siRNA sense strand
ggaagugcuuggugagguu

SEQ ID NO: 2402917 - RNA, 19 nt, Homo sapiens
  misc_RNA (1)...(19): siRNA sense strand
gagccgaagagcagccaau

SEQ ID NO: 2402918 - RNA, 19 nt, Homo sapiens
  misc_RNA (1)...(19): siRNA sense strand
augucgaaguggaggcuca

SEQ ID NO: 2402919 - RNA, 19 nt, Homo sapiens
  misc_RNA (1)...(19): siRNA sense strand
aaauggaagugcuugguga

SEQ ID NO: 2402920 - RNA, 19 nt, Homo sapiens
  misc_RNA (1)...(19): siRNA sense strand
cagggaagaauuugagcaa

SEQ ID NO: 2402921 - RNA, 19 nt, Homo sapiens
  misc_RNA (1)...(19): siRNA sense strand
acaaagaagaggagacagu

SEQ ID NO: 2402922 - RNA, 19 nt, Homo sapiens
  misc_RNA (1)...(19): siRNA sense strand
caguaauucugauaggcua

SEQ ID NO: 2402923 - RNA, 19 nt, Homo sapiens
  misc_RNA (1)...(19): siRNA sense strand
augaagacgaugaagaaau

SEQ ID NO: 2402924 - RNA, 19 nt, Homo sapiens
  misc_RNA (1)...(19): siRNA sense strand
ccaaagaagcagaagcacu

SEQ ID NO: 2402925 - RNA, 19 nt, Homo sapiens
  misc_RNA (1)...(19): siRNA sense strand
gaaagaauguagaagccga

SEQ ID NO: 2402926 - RNA, 19 nt, Homo sapiens
  misc_RNA (1)...(19): siRNA sense strand
cuguggagaaagaggauuu

SEQ ID NO: 2402927 - RNA, 19 nt, Homo sapiens
  misc_RNA (1)...(19): siRNA sense strand
agguggaggaucuggacaa

SEQ ID NO: 2402928 - RNA, 19 nt, Homo sapiens
  misc_RNA (1)...(19): siRNA sense strand
gaauucauaugcugggcaa

SEQ ID NO: 2402929 - RNA, 19 nt, Homo sapiens
  misc_RNA (1)...(19): siRNA sense strand
ccuuaaugaauguguguca

SEQ ID NO: 2402930 - RNA, 19 nt, Homo sapiens
  misc_RNA (1)...(19): siRNA sense strand
caguuaaugaaauggaaga

SEQ ID NO: 2402931 - RNA, 19 nt, Homo sapiens
  misc_RNA (1)...(19): siRNA sense strand
gcaacaaagaagaggagac

SEQ ID NO: 2402932 - RNA, 19 nt, Homo sapiens
  misc_RNA (1)...(19): siRNA sense strand
cuagacaagcugcuggaaa

SEQ ID NO: 2402933 - RNA, 19 nt, Homo sapiens
  misc_RNA (1)...(19): siRNA sense strand
cugcagaugucaaacccaa

SEQ ID NO: 2402934 - RNA, 19 nt, Homo sapiens
  misc_RNA (1)...(19): siRNA sense strand
augaaauggaagaugauga

SEQ ID NO: 2402935 - RNA, 19 nt, Homo sapiens
  misc_RNA (1)...(19): siRNA sense strand
uuaaggacucucagugaaa

SEQ ID NO: 2402936 - RNA, 19 nt, Homo sapiens
  misc_RNA (1)...(19): siRNA sense strand
ccagaaaaugggacaacua

SEQ ID NO: 2402937 - RNA, 19 nt, Homo sapiens
  misc_RNA (1)...(19): siRNA sense strand
aaauggaagaugaugaaga

SEQ ID NO: 2402938 - RNA, 19 nt, Homo sapiens
  misc_RNA (1)...(19): siRNA sense strand
cuuaucugcuggaaagaau

SEQ ID NO: 2402939 - RNA, 19 nt, Homo sapiens
  misc_RNA (1)...(19): siRNA sense strand
acucuuuggcggagggcau

SEQ ID NO: 2402940 - RNA, 19 nt, Homo sapiens
  misc_RNA (1)...(19): siRNA sense strand
gcaucgaaaaucagaggaa

SEQ ID NO: 2402941 - RNA, 19 nt, Homo sapiens
  misc_RNA (1)...(19): siRNA sense strand
agcuaacaguugccagaaa

SEQ ID NO: 2402942 - RNA, 19 nt, Homo sapiens
  misc_RNA (1)...(19): siRNA sense strand
uggaagaugaugaagacga

SEQ ID NO: 2402943 - RNA, 19 nt, Homo sapiens
  misc_RNA (1)...(19): siRNA sense strand
gugcuguggacaagcgauu

SEQ ID NO: 2402944 - RNA, 19 nt, Homo sapiens
  misc_RNA (1)...(19): siRNA sense strand
cacauuaacuugaagcuca

SEQ ID NO: 2402945 - RNA, 19 nt, Homo sapiens
  misc_RNA (1)...(19): siRNA sense strand
cugaaagcuaugcaagaau

SEQ ID NO: 2402946 - RNA, 19 nt, Homo sapiens
  misc_RNA (1)...(19): siRNA sense strand
ccuuaaggacucucaguga

SEQ ID NO: 2402947 - RNA, 19 nt, Homo sapiens
  misc_RNA (1)...(19): siRNA sense strand
augaugaagacgaugaaga

SEQ ID NO: 2402948 - RNA, 19 nt, Homo sapiens
  misc_RNA (1)...(19): siRNA sense strand
gaugaagacgaugaagaaa

SEQ ID NO: 2402949 - RNA, 19 nt, Homo sapiens
  misc_RNA (1)...(19): siRNA sense strand
uuguaucggcuguggagaa

SEQ ID NO: 2402950 - RNA, 19 nt, Homo sapiens
  misc_RNA (1)...(19): siRNA sense strand
aggaguuagaccaguaauu

SEQ ID NO: 2402951 - RNA, 19 nt, Homo sapiens
  misc_RNA (1)...(19): siRNA sense strand
aagauuugguaaaccgcua

SEQ ID NO: 2402952 - RNA, 19 nt, Homo sapiens
  misc_RNA (1)...(19): siRNA sense strand
agauuaauugccagcguau

SEQ ID NO: 2402953 - RNA, 19 nt, Homo sapiens
  misc_RNA (1)...(19): siRNA sense strand
gcagcuaacaguugccaga

SEQ ID NO: 2402954 - RNA, 19 nt, Homo sapiens
  misc_RNA (1)...(19): siRNA sense strand
aacccaagguggaggaucu

SEQ ID NO: 2402955 - RNA, 19 nt, Homo sapiens
  misc_RNA (1)...(19): siRNA sense strand
agccaaagaagcagaagca

SEQ ID NO: 2402956 - RNA, 19 nt, Homo sapiens
  misc_RNA (1)...(19): siRNA sense strand
ggugaauugcuacaagauu

SEQ ID NO: 2402957 - RNA, 19 nt, Homo sapiens
  misc_RNA (1)...(19): siRNA sense strand
uaccagaugaucauggaaa

SEQ ID NO: 2402958 - RNA, 19 nt, Homo sapiens
  misc_RNA (1)...(19): siRNA sense strand
ggagggaagggcagugcau

SEQ ID NO: 2402959 - RNA, 19 nt, Homo sapiens
  misc_RNA (1)...(19): siRNA sense strand
ccacacaaaaccuggauuu

SEQ ID NO: 2402960 - RNA, 19 nt, Homo sapiens
  misc_RNA (1)...(19): siRNA sense strand
ccacucagccaaagaagca

SEQ ID NO: 2402961 - RNA, 19 nt, Homo sapiens
  misc_RNA (1)...(19): siRNA sense strand
cuaugcaucaggagaucaa

SEQ ID NO: 2402962 - RNA, 19 nt, Homo sapiens
  misc_RNA (1)...(19): siRNA sense strand
gugugguaguguuagguca

SEQ ID NO: 2402963 - RNA, 19 nt, Homo sapiens
  misc_RNA (1)...(19): siRNA sense strand
aggugauaaagcagaaaua

SEQ ID NO: 2402964 - RNA, 19 nt, Homo sapiens
  misc_RNA (1)...(19): siRNA sense strand
ccaccauggcacaggguuu

SEQ ID NO: 2402965 - RNA, 19 nt, Homo sapiens
  misc_RNA (1)...(19): siRNA sense strand
guguacacauggugcucaa

SEQ ID NO: 2402966 - RNA, 19 nt, Homo sapiens
  misc_RNA (1)...(19): siRNA sense strand
aggugaugaaggagcgcua

SEQ ID NO: 2402967 - RNA, 19 nt, Homo sapiens
  misc_RNA (1)...(19): siRNA sense strand
ccgaagugcagcaggucuu

SEQ ID NO: 2402968 - RNA, 19 nt, Homo sapiens
  misc_RNA (1)...(19): siRNA sense strand
ggguuuaggacuggagaca

SEQ ID NO: 2402969 - RNA, 19 nt, Homo sapiens
  misc_RNA (1)...(19): siRNA sense strand
gggaagaccaagugauccu

SEQ ID NO: 2402970 - RNA, 19 nt, Homo sapiens
  misc_RNA (1)...(19): siRNA sense strand
ggcagcagcuauugcgaca

SEQ ID NO: 2402971 - RNA, 19 nt, Homo sapiens
  misc_RNA (1)...(19): siRNA sense strand
uuucgaagcccgaggugau

SEQ ID NO: 2402972 - RNA, 19 nt, Homo sapiens
  misc_RNA (1)...(19): siRNA sense strand
caacggacgugcuuggcuu

SEQ ID NO: 2402973 - RNA, 19 nt, Homo sapiens
  misc_RNA (1)...(19): siRNA sense strand
gcagaaauggcgaggcccu

SEQ ID NO: 2402974 - RNA, 19 nt, Homo sapiens
  misc_RNA (1)...(19): siRNA sense strand
agucaaagaaauuggaaca

SEQ ID NO: 2402975 - RNA, 19 nt, Homo sapiens
  misc_RNA (1)...(19): siRNA sense strand
cugcaguggcugaacuuaa

SEQ ID NO: 2402976 - RNA, 19 nt, Homo sapiens
  misc_RNA (1)...(19): siRNA sense strand
caucauuaagggaguaaca

SEQ ID NO: 2402977 - RNA, 19 nt, Homo sapiens
  misc_RNA (1)...(19): siRNA sense strand
acguuugggucaagagcau

SEQ ID NO: 2402978 - RNA, 19 nt, Homo sapiens
  misc_RNA (1)...(19): siRNA sense strand
ccauuaaaguggaaagcug

SEQ ID NO: 2402979 - RNA, 19 nt, Homo sapiens
  misc_RNA (1)...(19): siRNA sense strand
uuuacaaugcagagaguga

SEQ ID NO: 2402980 - RNA, 19 nt, Homo sapiens
  misc_RNA (1)...(19): siRNA sense strand
ucaccuauguuuauggaga

SEQ ID NO: 2402981 - RNA, 19 nt, Homo sapiens
  misc_RNA (1)...(19): siRNA sense strand
aggugaaaggggaagguua

SEQ ID NO: 2402982 - RNA, 19 nt, Homo sapiens
  misc_RNA (1)...(19): siRNA sense strand
cuuaagacuaacagacaca

SEQ ID NO: 2402983 - RNA, 19 nt, Homo sapiens
  misc_RNA (1)...(19): siRNA sense strand
cauuaaaguggaaagcuga

SEQ ID NO: 2402984 - RNA, 19 nt, Homo sapiens
  misc_RNA (1)...(19): siRNA sense strand
ccguaaaccuugaagaacc

SEQ ID NO: 2402985 - RNA, 19 nt, Homo sapiens
  misc_RNA (1)...(19): siRNA sense strand
gguugucuuuggaggcaau

SEQ ID NO: 2402986 - RNA, 19 nt, Homo sapiens
  misc_RNA (1)...(19): siRNA sense strand
caaagaaauuggaacacac

SEQ ID NO: 2402987 - RNA, 19 nt, Homo sapiens
  misc_RNA (1)...(19): siRNA sense strand
ggcuuaagacuaacagaca

SEQ ID NO: 2402988 - RNA, 19 nt, Homo sapiens
  misc_RNA (1)...(19): siRNA sense strand
cugccuaaagccaaagaau

SEQ ID NO: 2402989 - RNA, 19 nt, Homo sapiens
  misc_RNA (1)...(19): siRNA sense strand
agugaaaggacuauggauc

SEQ ID NO: 2402990 - RNA, 19 nt, Homo sapiens
  misc_RNA (1)...(19): siRNA sense strand
uggaaaugugcaauaccaa

SEQ ID NO: 2402991 - RNA, 19 nt, Homo sapiens
  misc_RNA (1)...(19): siRNA sense strand
ugaugaaguauuucuggaa

SEQ ID NO: 2402992 - RNA, 19 nt, Homo sapiens
  misc_RNA (1)...(19): siRNA sense strand
auauggaacugauggaaaa

SEQ ID NO: 2402993 - RNA, 19 nt, Homo sapiens
  misc_RNA (1)...(19): siRNA sense strand
ccuuaggaaccuuaaacaa

SEQ ID NO: 2402994 - RNA, 19 nt, Homo sapiens
  misc_RNA (1)...(19): siRNA sense strand
aauauggaacugauggaaa

SEQ ID NO: 2402995 - RNA, 19 nt, Homo sapiens
  misc_RNA (1)...(19): siRNA sense strand
cagcaagaaauauggaagu

SEQ ID NO: 2402996 - RNA, 19 nt, Homo sapiens
  misc_RNA (1)...(19): siRNA sense strand
uguuggaauggaagagcaa

SEQ ID NO: 2402997 - RNA, 19 nt, Homo sapiens
  misc_RNA (1)...(19): siRNA sense strand
acauuaugacucuggagaa

SEQ ID NO: 2402998 - RNA, 19 nt, Homo sapiens
  misc_RNA (1)...(19): siRNA sense strand
caguugauggauaugguua

SEQ ID NO: 2402999 - RNA, 19 nt, Homo sapiens
  misc_RNA (1)...(19): siRNA sense strand
ccaagcuugaugaguguaa

SEQ ID NO: 2403000 - RNA, 19 nt, Homo sapiens
  misc_RNA (1)...(19): siRNA sense strand
agaccgagugucaggaaaa

SEQ ID NO: 2403001 - RNA, 19 nt, Homo sapiens
  misc_RNA (1)...(19): siRNA sense strand
uggugauuuugaagagaaa

SEQ ID NO: 2403002 - RNA, 19 nt, Homo sapiens
  misc_RNA (1)...(19): siRNA sense strand
cauuuuaaguucagcaaga

SEQ ID NO: 2403003 - RNA, 19 nt, Homo sapiens
  misc_RNA (1)...(19): siRNA sense strand
ggcgaaaggcagugugugu

SEQ ID NO: 2403004 - RNA, 19 nt, Homo sapiens
  misc_RNA (1)...(19): siRNA sense strand
ggaacugauggaaaagaaa

SEQ ID NO: 2403005 - RNA, 19 nt, Homo sapiens
  misc_RNA (1)...(19): siRNA sense strand
aagagaaaccacaacgaca

SEQ ID NO: 2403006 - RNA, 19 nt, Homo sapiens
  misc_RNA (1)...(19): siRNA sense strand
aaagaaaguaagugacaac

SEQ ID NO: 2403007 - RNA, 19 nt, Homo sapiens
  misc_RNA (1)...(19): siRNA sense strand
cccugauggaggugaagaa

SEQ ID NO: 2403008 - RNA, 19 nt, Homo sapiens
  misc_RNA (1)...(19): siRNA sense strand
ccagaauuuauguagucaa

SEQ ID NO: 2403009 - RNA, 19 nt, Homo sapiens
  misc_RNA (1)...(19): siRNA sense strand
gggaaauaagaccgagugu

SEQ ID NO: 2403010 - RNA, 19 nt, Homo sapiens
  misc_RNA (1)...(19): siRNA sense strand
cugauggaggugaagaaau

SEQ ID NO: 2403011 - RNA, 19 nt, Homo sapiens
  misc_RNA (1)...(19): siRNA sense strand
aguguguguucaucaguaa

SEQ ID NO: 2403012 - RNA, 19 nt, Homo sapiens
  misc_RNA (1)...(19): siRNA sense strand
caagcauaugauuggacua

SEQ ID NO: 2403013 - RNA, 19 nt, Homo sapiens
  misc_RNA (1)...(19): siRNA sense strand
aguguaaaguuaugccuca

SEQ ID NO: 2403014 - RNA, 19 nt, Homo sapiens
  misc_RNA (1)...(19): siRNA sense strand
ccuggaugacagugaacau

SEQ ID NO: 2403015 - RNA, 19 nt, Homo sapiens
  misc_RNA (1)...(19): siRNA sense strand
ugcucuaggaucaaggaua

SEQ ID NO: 2403016 - RNA, 19 nt, Homo sapiens
  misc_RNA (1)...(19): siRNA sense strand
acugccugguggagagaau

SEQ ID NO: 2403017 - RNA, 19 nt, Homo sapiens
  misc_RNA (1)...(19): siRNA sense strand
aauucuggauacaagcaua

SEQ ID NO: 2403018 - RNA, 19 nt, Homo sapiens
  misc_RNA (1)...(19): siRNA sense strand
guguaaaguuaugccucaa

SEQ ID NO: 2403019 - RNA, 19 nt, Homo sapiens
  misc_RNA (1)...(19): siRNA sense strand
uggcagagucauagagaca

SEQ ID NO: 2403020 - RNA, 19 nt, Homo sapiens
  misc_RNA (1)...(19): siRNA sense strand
gcaaaauacuugaaggcca

SEQ ID NO: 2403021 - RNA, 19 nt, Homo sapiens
  misc_RNA (1)...(19): siRNA sense strand
ucggagaaacugagagcau

SEQ ID NO: 2403022 - RNA, 19 nt, Homo sapiens
  misc_RNA (1)...(19): siRNA sense strand
cugcaaccaguaagggaaa

SEQ ID NO: 2403023 - RNA, 19 nt, Homo sapiens
  misc_RNA (1)...(19): siRNA sense strand
uugaccacuuggaggaaua

SEQ ID NO: 2403024 - RNA, 19 nt, Homo sapiens
  misc_RNA (1)...(19): siRNA sense strand
aggccagagaagagugcaa

SEQ ID NO: 2403025 - RNA, 19 nt, Homo sapiens
  misc_RNA (1)...(19): siRNA sense strand
gaucaacaaucauggagga

SEQ ID NO: 2403026 - RNA, 19 nt, Homo sapiens
  misc_RNA (1)...(19): siRNA sense strand
uucaagacaccgaaagaaa

SEQ ID NO: 2403027 - RNA, 19 nt, Homo sapiens
  misc_RNA (1)...(19): siRNA sense strand
aggaucaauggaagugaaa

SEQ ID NO: 2403028 - RNA, 19 nt, Homo sapiens
  misc_RNA (1)...(19): siRNA sense strand
aguaagggaaacucagauu

SEQ ID NO: 2403029 - RNA, 19 nt, Homo sapiens
  misc_RNA (1)...(19): siRNA sense strand
gaucaauggaagugaaagc

SEQ ID NO: 2403030 - RNA, 19 nt, Homo sapiens
  misc_RNA (1)...(19): siRNA sense strand
auggaauacccgaaugauu

SEQ ID NO: 2403031 - RNA, 19 nt, Homo sapiens
  misc_RNA (1)...(19): siRNA sense strand
ucaauggaagugaaagcaa

SEQ ID NO: 2403032 - RNA, 19 nt, Homo sapiens
  misc_RNA (1)...(19): siRNA sense strand
agcaaggagaaaucgauaa

SEQ ID NO: 2403033 - RNA, 19 nt, Homo sapiens
  misc_RNA (1)...(19): siRNA sense strand
acaccgaaagaaagaacau

SEQ ID NO: 2403034 - RNA, 19 nt, Homo sapiens
  misc_RNA (1)...(19): siRNA sense strand
acuuguagaaucauggaau

SEQ ID NO: 2403035 - RNA, 19 nt, Homo sapiens
  misc_RNA (1)...(19): siRNA sense strand
caugaagaucacuugguau

SEQ ID NO: 2403036 - RNA, 19 nt, Homo sapiens
  misc_RNA (1)...(19): siRNA sense strand
cggaauauuucaagacacc

SEQ ID NO: 2403037 - RNA, 19 nt, Homo sapiens
  misc_RNA (1)...(19): siRNA sense strand
cagaaagaacagauggaaa

SEQ ID NO: 2403038 - RNA, 19 nt, Homo sapiens
  misc_RNA (1)...(19): siRNA sense strand
cgaucgaaguauagagaga

SEQ ID NO: 2403039 - RNA, 19 nt, Homo sapiens
  misc_RNA (1)...(19): siRNA sense strand
cagaaaugaaacagucaaa

SEQ ID NO: 2403040 - RNA, 19 nt, Homo sapiens
  misc_RNA (1)...(19): siRNA sense strand
aguuacagcugaagcacaa

SEQ ID NO: 2403041 - RNA, 19 nt, Homo sapiens
  misc_RNA (1)...(19): siRNA sense strand
aaauacagggaauggaaua

SEQ ID NO: 2403042 - RNA, 19 nt, Homo sapiens
  misc_RNA (1)...(19): siRNA sense strand
ucguacaaauacagggaau

SEQ ID NO: 2403043 - RNA, 19 nt, Homo sapiens
  misc_RNA (1)...(19): siRNA sense strand
agauggaaacuaaggaauu

SEQ ID NO: 2403044 - RNA, 19 nt, Homo sapiens
  misc_RNA (1)...(19): siRNA sense strand
cagaaaaggaguucacaaa

SEQ ID NO: 2403045 - RNA, 19 nt, Homo sapiens
  misc_RNA (1)...(19): siRNA sense strand
aaucuaaagaagcgguuaa

SEQ ID NO: 2403046 - RNA, 19 nt, Homo sapiens
  misc_RNA (1)...(19): siRNA sense strand
auguagacuuuguggauga

SEQ ID NO: 2403047 - RNA, 19 nt, Homo sapiens
  misc_RNA (1)...(19): siRNA sense strand
agaaaagaacuuagagaca

SEQ ID NO: 2403048 - RNA, 19 nt, Homo sapiens
  misc_RNA (1)...(19): siRNA sense strand
uggcauuacaagauguuaa

SEQ ID NO: 2403049 - RNA, 19 nt, Homo sapiens
  misc_RNA (1)...(19): siRNA sense strand
agaaagaacagauggaaac

SEQ ID NO: 2403050 - RNA, 19 nt, Homo sapiens
  misc_RNA (1)...(19): siRNA sense strand
gaaaaggaguucacaaauu

SEQ ID NO: 2403051 - RNA, 19 nt, Homo sapiens
  misc_RNA (1)...(19): siRNA sense strand
agacuuuguggaugaaaua

SEQ ID NO: 2403052 - RNA, 19 nt, Homo sapiens
  misc_RNA (1)...(19): siRNA sense strand
aguguuaggaggugaagua

SEQ ID NO: 2403053 - RNA, 19 nt, Homo sapiens
  misc_RNA (1)...(19): siRNA sense strand
agaggaaagaauacaacaa

SEQ ID NO: 2403054 - RNA, 19 nt, Homo sapiens
  misc_RNA (1)...(19): siRNA sense strand
cuggaaggguugcagaaau

SEQ ID NO: 2403055 - RNA, 19 nt, Homo sapiens
  misc_RNA (1)...(19): siRNA sense strand
cagaaaugucaaagagauc

SEQ ID NO: 2403056 - RNA, 19 nt, Homo sapiens
  misc_RNA (1)...(19): siRNA sense strand
uaaauagagagguggucaa

SEQ ID NO: 2403057 - RNA, 19 nt, Homo sapiens
  misc_RNA (1)...(19): siRNA sense strand
cuuacugaucugagggauu

SEQ ID NO: 2403058 - RNA, 19 nt, Homo sapiens
  misc_RNA (1)...(19): siRNA sense strand
aagaauaugcccaagaaaa

SEQ ID NO: 2403059 - RNA, 19 nt, Homo sapiens
  misc_RNA (1)...(19): siRNA sense strand
cugcauacucccagauaca

SEQ ID NO: 2403060 - RNA, 19 nt, Homo sapiens
  misc_RNA (1)...(19): siRNA sense strand
acaaauacagggaauggaa

SEQ ID NO: 2403061 - RNA, 19 nt, Homo sapiens
  misc_RNA (1)...(19): siRNA sense strand
ucaucagagaauagcauua

SEQ ID NO: 2403062 - RNA, 19 nt, Homo sapiens
  misc_RNA (1)...(19): siRNA sense strand
agucaggcccaaaugaaua

SEQ ID NO: 2403063 - RNA, 19 nt, Homo sapiens
  misc_RNA (1)...(19): siRNA sense strand
agugaaagugaaagcauuu

SEQ ID NO: 2403064 - RNA, 19 nt, Homo sapiens
  misc_RNA (1)...(19): siRNA sense strand
gaaaguguuaggaggugaa

SEQ ID NO: 2403065 - RNA, 19 nt, Homo sapiens
  misc_RNA (1)...(19): siRNA sense strand
ugaucuaguuacagcugaa

SEQ ID NO: 2403066 - RNA, 19 nt, Homo sapiens
  misc_RNA (1)...(19): siRNA sense strand
ccagcaaaccaaaggaagu

SEQ ID NO: 2403067 - RNA, 19 nt, Homo sapiens
  misc_RNA (1)...(19): siRNA sense strand
ugugacuaguauugcauua

SEQ ID NO: 2403068 - RNA, 19 nt, Homo sapiens
  misc_RNA (1)...(19): siRNA sense strand
acauguaauggauggagaa

SEQ ID NO: 2403069 - RNA, 19 nt, Homo sapiens
  misc_RNA (1)...(19): siRNA sense strand
aaguugagaggaaagaaua

SEQ ID NO: 2403070 - RNA, 19 nt, Homo sapiens
  misc_RNA (1)...(19): siRNA sense strand
aaaagaacuuagagacaga

SEQ ID NO: 2403071 - RNA, 19 nt, Homo sapiens
  misc_RNA (1)...(19): siRNA sense strand
gaguauaacugcaaaggug

SEQ ID NO: 2403072 - RNA, 19 nt, Homo sapiens
  misc_RNA (1)...(19): siRNA sense strand
agaaauuccaaaaggagaa

SEQ ID NO: 2403073 - RNA, 19 nt, Homo sapiens
  misc_RNA (1)...(19): siRNA sense strand
cagauggaaacuaaggaau

SEQ ID NO: 2403074 - RNA, 19 nt, Homo sapiens
  misc_RNA (1)...(19): siRNA sense strand
aaugaugagcuuacaacaa

SEQ ID NO: 2403075 - RNA, 19 nt, Homo sapiens
  misc_RNA (1)...(19): siRNA sense strand
ucucaguaccagaaaugaa

SEQ ID NO: 2403076 - RNA, 19 nt, Homo sapiens
  misc_RNA (1)...(19): siRNA sense strand
ggaauggaauaucagccua

SEQ ID NO: 2403077 - RNA, 19 nt, Homo sapiens
  misc_RNA (1)...(19): siRNA sense strand
gaauggaauaucagccuau

SEQ ID NO: 2403078 - RNA, 19 nt, Homo sapiens
  misc_RNA (1)...(19): siRNA sense strand
aaacauucccagaguuaca

SEQ ID NO: 2403079 - RNA, 19 nt, Homo sapiens
  misc_RNA (1)...(19): siRNA sense strand
agauuaauuccuugguuga

SEQ ID NO: 2403080 - RNA, 19 nt, Homo sapiens
  misc_RNA (1)...(19): siRNA sense strand
auggagaauuagaugacuu

SEQ ID NO: 2403081 - RNA, 19 nt, Homo sapiens
  misc_RNA (1)...(19): siRNA sense strand
cucaaguucuggugguauu

SEQ ID NO: 2403082 - RNA, 19 nt, Homo sapiens
  misc_RNA (1)...(19): siRNA sense strand
cugauggaaucguacaaau

SEQ ID NO: 2403083 - RNA, 19 nt, Homo sapiens
  misc_RNA (1)...(19): siRNA sense strand
ugaugaaaaugaugagcuu

SEQ ID NO: 2403084 - RNA, 19 nt, Homo sapiens
  misc_RNA (1)...(19): siRNA sense strand
cagaaaugccgaucgaagu

SEQ ID NO: 2403085 - RNA, 19 nt, Homo sapiens
  misc_RNA (1)...(19): siRNA sense strand
guuacaacagugaaaguga

SEQ ID NO: 2403086 - RNA, 19 nt, Homo sapiens
  misc_RNA (1)...(19): siRNA sense strand
uauggaacaccuugagaau

SEQ ID NO: 2403087 - RNA, 19 nt, Homo sapiens
  misc_RNA (1)...(19): siRNA sense strand
cgugaaaguguuaggaggu

SEQ ID NO: 2403088 - RNA, 19 nt, Homo sapiens
  misc_RNA (1)...(19): siRNA sense strand
aucgaaguauagagagauu

SEQ ID NO: 2403089 - RNA, 19 nt, Homo sapiens
  misc_RNA (1)...(19): siRNA sense strand
ccagaaaugaaacagucaa

SEQ ID NO: 2403090 - RNA, 19 nt, Homo sapiens
  misc_RNA (1)...(19): siRNA sense strand
gagucaggcccaaaugaau

SEQ ID NO: 2403091 - RNA, 19 nt, Homo sapiens
  misc_RNA (1)...(19): siRNA sense strand
cagaaaacgugaaaguguu

SEQ ID NO: 2403092 - RNA, 19 nt, Homo sapiens
  misc_RNA (1)...(19): siRNA sense strand
agauguagacuuuguggau

SEQ ID NO: 2403093 - RNA, 19 nt, Homo sapiens
  misc_RNA (1)...(19): siRNA sense strand
acaagaaggaaguggaaaa

SEQ ID NO: 2403094 - RNA, 19 nt, Homo sapiens
  misc_RNA (1)...(19): siRNA sense strand
cugaaagaacugaaggaau

SEQ ID NO: 2403095 - RNA, 19 nt, Homo sapiens
  misc_RNA (1)...(19): siRNA sense strand
aagaagaaugggagaaagu

SEQ ID NO: 2403096 - RNA, 19 nt, Homo sapiens
  misc_RNA (1)...(19): siRNA sense strand
aaagcaacgaagagaagaa

SEQ ID NO: 2403097 - RNA, 19 nt, Homo sapiens
  misc_RNA (1)...(19): siRNA sense strand
cuacaggaacagaaggaca

SEQ ID NO: 2403098 - RNA, 19 nt, Homo sapiens
  misc_RNA (1)...(19): siRNA sense strand
aggaacagaaggacaggaa

SEQ ID NO: 2403099 - RNA, 19 nt, Homo sapiens
  misc_RNA (1)...(19): siRNA sense strand
aggcaagaagaaugggaga

SEQ ID NO: 2403100 - RNA, 19 nt, Homo sapiens
  misc_RNA (1)...(19): siRNA sense strand
ccugcaagucucucggaaa

SEQ ID NO: 2403101 - RNA, 19 nt, Homo sapiens
  misc_RNA (1)...(19): siRNA sense strand
ggaacuaauagaaaagcaa

SEQ ID NO: 2403102 - RNA, 19 nt, Homo sapiens
  misc_RNA (1)...(19): siRNA sense strand
ccaucaaugccaccggaaa

SEQ ID NO: 2403103 - RNA, 19 nt, Homo sapiens
  misc_RNA (1)...(19): siRNA sense strand
aacugaaggaauacagaaa

SEQ ID NO: 2403104 - RNA, 19 nt, Homo sapiens
  misc_RNA (1)...(19): siRNA sense strand
ggcaagaagaaugggagaa

SEQ ID NO: 2403105 - RNA, 19 nt, Homo sapiens
  misc_RNA (1)...(19): siRNA sense strand
caagagaacaagaaggaag

SEQ ID NO: 2403106 - RNA, 19 nt, Homo sapiens
  misc_RNA (1)...(19): siRNA sense strand
auaugaaaggcuacaggaa

SEQ ID NO: 2403107 - RNA, 19 nt, Homo sapiens
  misc_RNA (1)...(19): siRNA sense strand
uggcaggagcugugaagca

SEQ ID NO: 2403108 - RNA, 19 nt, Homo sapiens
  misc_RNA (1)...(19): siRNA sense strand
agcaggaguacgaggaaca

SEQ ID NO: 2403109 - RNA, 19 nt, Homo sapiens
  misc_RNA (1)...(19): siRNA sense strand
agaaaagcaacgaagagaa

SEQ ID NO: 2403110 - RNA, 19 nt, Homo sapiens
  misc_RNA (1)...(19): siRNA sense strand
gaacagaaggacaggaagc

SEQ ID NO: 2403111 - RNA, 19 nt, Homo sapiens
  misc_RNA (1)...(19): siRNA sense strand
ucgaaaaccugaagaucca

SEQ ID NO: 2403112 - RNA, 19 nt, Homo sapiens
  misc_RNA (1)...(19): siRNA sense strand
agaagaauguccagaggag

SEQ ID NO: 2403113 - RNA, 19 nt, Homo sapiens
  misc_RNA (1)...(19): siRNA sense strand
agccagaugacaagaauca

SEQ ID NO: 2403114 - RNA, 19 nt, Homo sapiens
  misc_RNA (1)...(19): siRNA sense strand
ccuauagaaaccaagaaca

SEQ ID NO: 2403115 - RNA, 19 nt, Homo sapiens
  misc_RNA (1)...(19): siRNA sense strand
agaacaagaaggaagugga

SEQ ID NO: 2403116 - RNA, 19 nt, Homo sapiens
  misc_RNA (1)...(19): siRNA sense strand
aggaaagacaacugaggaa

SEQ ID NO: 2403117 - RNA, 19 nt, Homo sapiens
  misc_RNA (1)...(19): siRNA sense strand
guuucaugguuaagaggaa

SEQ ID NO: 2403118 - RNA, 19 nt, Homo sapiens
  misc_RNA (1)...(19): siRNA sense strand
aggaagagcagaaggaacu

SEQ ID NO: 2403119 - RNA, 19 nt, Homo sapiens
  misc_RNA (1)...(19): siRNA sense strand
gggauuguucagaggaaga

SEQ ID NO: 2403120 - RNA, 19 nt, Homo sapiens
  misc_RNA (1)...(19): siRNA sense strand
cugacaaagggcauugaaa

SEQ ID NO: 2403121 - RNA, 19 nt, Homo sapiens
  misc_RNA (1)...(19): siRNA sense strand
cgaaauugaagaugcaagu

SEQ ID NO: 2403122 - RNA, 19 nt, Homo sapiens
  misc_RNA (1)...(19): siRNA sense strand
uauuaaacgcugucugcaa

SEQ ID NO: 2403123 - RNA, 19 nt, Homo sapiens
  misc_RNA (1)...(19): siRNA sense strand
cagaggaagagcagaagga

SEQ ID NO: 2403124 - RNA, 19 nt, Homo sapiens
  misc_RNA (1)...(19): siRNA sense strand
cugcaaaccaaauggccau

SEQ ID NO: 2403125 - RNA, 19 nt, Homo sapiens
  misc_RNA (1)...(19): siRNA sense strand
gaggaagagcagaaggaac

SEQ ID NO: 2403126 - RNA, 19 nt, Homo sapiens
  misc_RNA (1)...(19): siRNA sense strand
ccgcuggacgcaaggguuu

SEQ ID NO: 2403127 - RNA, 19 nt, Homo sapiens
  misc_RNA (1)...(19): siRNA sense strand
ugguuaagaggaaagacaa

SEQ ID NO: 2403128 - RNA, 19 nt, Homo sapiens
  misc_RNA (1)...(19): siRNA sense strand
gguuaagaggaaagacaac

SEQ ID NO: 2403129 - RNA, 19 nt, Homo sapiens
  misc_RNA (1)...(19): siRNA sense strand
acaugaacaagcagcagua

SEQ ID NO: 2403130 - RNA, 19 nt, Homo sapiens
  misc_RNA (1)...(19): siRNA sense strand
gauuguuggcagugagacu

SEQ ID NO: 2403131 - RNA, 19 nt, Homo sapiens
  misc_RNA (1)...(19): siRNA sense strand
guuuguguuuagugaauca

SEQ ID NO: 2403132 - RNA, 19 nt, Homo sapiens
  misc_RNA (1)...(19): siRNA sense strand
cguagaagggacugcaguu

SEQ ID NO: 2403133 - RNA, 19 nt, Homo sapiens
  misc_RNA (1)...(19): siRNA sense strand
acccagaagauaauggauu

SEQ ID NO: 2403134 - RNA, 19 nt, Homo sapiens
  misc_RNA (1)...(19): siRNA sense strand
ugucgaagagcuuggcuuu

SEQ ID NO: 2403135 - RNA, 19 nt, Homo sapiens
  misc_RNA (1)...(19): siRNA sense strand
cgaacugacuaaagagcug

SEQ ID NO: 2403136 - RNA, 19 nt, Homo sapiens
  misc_RNA (1)...(19): siRNA sense strand
guuuagugaaucagaggga

SEQ ID NO: 2403137 - RNA, 19 nt, Homo sapiens
  misc_RNA (1)...(19): siRNA sense strand
ugacuaaagagcugaugga

SEQ ID NO: 2403138 - RNA, 19 nt, Homo sapiens
  misc_RNA (1)...(19): siRNA sense strand
caguauucaauguggggaa

SEQ ID NO: 2403139 - RNA, 19 nt, Homo sapiens
  misc_RNA (1)...(19): siRNA sense strand
ugguauacaugaacaagca

SEQ ID NO: 2403140 - RNA, 19 nt, Homo sapiens
  misc_RNA (1)...(19): siRNA sense strand
cugcauuagaacaguuuga

SEQ ID NO: 2403141 - RNA, 19 nt, Homo sapiens
  misc_RNA (1)...(19): siRNA sense strand
augguuaagaggaaagaca

SEQ ID NO: 2403142 - RNA, 19 nt, Homo sapiens
  misc_RNA (1)...(19): siRNA sense strand
ggaaauuaggagagaaguu

SEQ ID NO: 2403143 - RNA, 19 nt, Homo sapiens
  misc_RNA (1)...(19): siRNA sense strand
agauagaagcugaggcuga

SEQ ID NO: 2403144 - RNA, 19 nt, Homo sapiens
  misc_RNA (1)...(19): siRNA sense strand
gaaaauaaaugcauggcua

SEQ ID NO: 2403145 - RNA, 19 nt, Homo sapiens
  misc_RNA (1)...(19): siRNA sense strand
guuuauagaagaucggaua

SEQ ID NO: 2403146 - RNA, 19 nt, Homo sapiens
  misc_RNA (1)...(19): siRNA sense strand
auugauguauggagggaaa

SEQ ID NO: 2403147 - RNA, 19 nt, Homo sapiens
  misc_RNA (1)...(19): siRNA sense strand
gggugauccagaagaauua

SEQ ID NO: 2403148 - RNA, 19 nt, Homo sapiens
  misc_RNA (1)...(19): siRNA sense strand
cgacaccaacagaggauaa

SEQ ID NO: 2403149 - RNA, 19 nt, Homo sapiens
  misc_RNA (1)...(19): siRNA sense strand
cgauuuauugagaaggaua

SEQ ID NO: 2403150 - RNA, 19 nt, Homo sapiens
  misc_RNA (1)...(19): siRNA sense strand
ggaucauauuaaagggcuu

SEQ ID NO: 2403151 - RNA, 19 nt, Homo sapiens
  misc_RNA (1)...(19): siRNA sense strand
uauuaaagggcuugaaaca

SEQ ID NO: 2403152 - RNA, 19 nt, Homo sapiens
  misc_RNA (1)...(19): siRNA sense strand
ccuuagaggaggagaccuu

SEQ ID NO: 2403153 - RNA, 19 nt, Homo sapiens
  misc_RNA (1)...(19): siRNA sense strand
cugaagaacauaagaaacu

SEQ ID NO: 2403154 - RNA, 19 nt, Homo sapiens
  misc_RNA (1)...(19): siRNA sense strand
uggacuggaauuugggaaa

SEQ ID NO: 2403155 - RNA, 19 nt, Homo sapiens
  misc_RNA (1)...(19): siRNA sense strand
gcagguggccagagugcaa

SEQ ID NO: 2403156 - RNA, 19 nt, Homo sapiens
  misc_RNA (1)...(19): siRNA sense strand
cagaaagauaccucagaau

SEQ ID NO: 2403157 - RNA, 19 nt, Homo sapiens
  misc_RNA (1)...(19): siRNA sense strand
ugggaagauuugcgagaca

SEQ ID NO: 2403158 - RNA, 19 nt, Homo sapiens
  misc_RNA (1)...(19): siRNA sense strand
aggacaagauagaagcuga

SEQ ID NO: 2403159 - RNA, 19 nt, Homo sapiens
  misc_RNA (1)...(19): siRNA sense strand
gaaaguaccaggaggccuu

SEQ ID NO: 2403160 - RNA, 19 nt, Homo sapiens
  misc_RNA (1)...(19): siRNA sense strand
gagauucagagucgggaaa

SEQ ID NO: 2403161 - RNA, 19 nt, Homo sapiens
  misc_RNA (1)...(19): siRNA sense strand
gaaccuuaggccagaagaa

SEQ ID NO: 2403162 - RNA, 19 nt, Homo sapiens
  misc_RNA (1)...(19): siRNA sense strand
cggagaagacugccgagaa

SEQ ID NO: 2403163 - RNA, 19 nt, Homo sapiens
  misc_RNA (1)...(19): siRNA sense strand
aggaacaggcugaauaauu

SEQ ID NO: 2403164 - RNA, 19 nt, Homo sapiens
  misc_RNA (1)...(19): siRNA sense strand
acuugagaccacaaagaaa

SEQ ID NO: 2403165 - RNA, 19 nt, Homo sapiens
  misc_RNA (1)...(19): siRNA sense strand
cugugaaguuuauagaaga

SEQ ID NO: 2403166 - RNA, 19 nt, Homo sapiens
  misc_RNA (1)...(19): siRNA sense strand
gcuaaauuggagcugauua

SEQ ID NO: 2403167 - RNA, 19 nt, Homo sapiens
  misc_RNA (1)...(19): siRNA sense strand
gggaaggugcagagcaguu

SEQ ID NO: 2403168 - RNA, 19 nt, Homo sapiens
  misc_RNA (1)...(19): siRNA sense strand
gagaaguugacaagugaga

SEQ ID NO: 2403169 - RNA, 19 nt, Homo sapiens
  misc_RNA (1)...(19): siRNA sense strand
uagaaggagaaguacauua

SEQ ID NO: 2403170 - RNA, 19 nt, Homo sapiens
  misc_RNA (1)...(19): siRNA sense strand
agcagaaaguauaaaguca

SEQ ID NO: 2403171 - RNA, 19 nt, Homo sapiens
  misc_RNA (1)...(19): siRNA sense strand
guauaaagucaaugaaccu

SEQ ID NO: 2403172 - RNA, 19 nt, Homo sapiens
  misc_RNA (1)...(19): siRNA sense strand
agacuauguuacugggcuu

SEQ ID NO: 2403173 - RNA, 19 nt, Homo sapiens
  misc_RNA (1)...(19): siRNA sense strand
ugaagaaacauaaggaucu

SEQ ID NO: 2403174 - RNA, 19 nt, Homo sapiens
  misc_RNA (1)...(19): siRNA sense strand
cagaagaauuaauguucca

SEQ ID NO: 2403175 - RNA, 19 nt, Homo sapiens
  misc_RNA (1)...(19): siRNA sense strand
ggaaacaggugaugagacc

SEQ ID NO: 2403176 - RNA, 19 nt, Homo sapiens
  misc_RNA (1)...(19): siRNA sense strand
agccaaagaacucggagaa

SEQ ID NO: 2403177 - RNA, 19 nt, Homo sapiens
  misc_RNA (1)...(19): siRNA sense strand
aaauggugaaagaggacaa

SEQ ID NO: 2403178 - RNA, 19 nt, Homo sapiens
  misc_RNA (1)...(19): siRNA sense strand
guacaaacugggugaucca

SEQ ID NO: 2403179 - RNA, 19 nt, Homo sapiens
  misc_RNA (1)...(19): siRNA sense strand
ggccagaagaagaugacau

SEQ ID NO: 2403180 - RNA, 19 nt, Homo sapiens
  misc_RNA (1)...(19): siRNA sense strand
ccaguuuagcagaaaguau

SEQ ID NO: 2403181 - RNA, 19 nt, Homo sapiens
  misc_RNA (1)...(19): siRNA sense strand
gggaagauuugcgagacaa

SEQ ID NO: 2403182 - RNA, 19 nt, Homo sapiens
  misc_RNA (1)...(19): siRNA sense strand
ggauuaacccauagcccuu

SEQ ID NO: 2403183 - RNA, 19 nt, Homo sapiens
  misc_RNA (1)...(19): siRNA sense strand
gagccaaagaacucggaga

SEQ ID NO: 2403184 - RNA, 19 nt, Homo sapiens
  misc_RNA (1)...(19): siRNA sense strand
aggaccacaucuagcuaaa

SEQ ID NO: 2403185 - RNA, 19 nt, Homo sapiens
  misc_RNA (1)...(19): siRNA sense strand
cuauaucggcacaggauga

SEQ ID NO: 2403186 - RNA, 19 nt, Homo sapiens
  misc_RNA (1)...(19): siRNA sense strand
cugagagaauggucgaaaa

SEQ ID NO: 2403187 - RNA, 19 nt, Homo sapiens
  misc_RNA (1)...(19): siRNA sense strand
aggauacaauggagauuca

SEQ ID NO: 2403188 - RNA, 19 nt, Homo sapiens
  misc_RNA (1)...(19): siRNA sense strand
ccaauagugaggaguauca

SEQ ID NO: 2403189 - RNA, 19 nt, Homo sapiens
  misc_RNA (1)...(19): siRNA sense strand
gagacaacagagacuuaaa

SEQ ID NO: 2403190 - RNA, 19 nt, Homo sapiens
  misc_RNA (1)...(19): siRNA sense strand
gugcaggacccuaacgaca

SEQ ID NO: 2403191 - RNA, 19 nt, Homo sapiens
  misc_RNA (1)...(19): siRNA sense strand
cuuuagaaggagaaguaca

SEQ ID NO: 2403192 - RNA, 19 nt, Homo sapiens
  misc_RNA (1)...(19): siRNA sense strand
ccagagugggugaauacaa

SEQ ID NO: 2403193 - RNA, 19 nt, Homo sapiens
  misc_RNA (1)...(19): siRNA sense strand
agggaaauuaggagagaag

SEQ ID NO: 2403194 - RNA, 19 nt, Homo sapiens
  misc_RNA (1)...(19): siRNA sense strand
cucuuuagaaggagaagua

SEQ ID NO: 2403195 - RNA, 19 nt, Homo sapiens
  misc_RNA (1)...(19): siRNA sense strand
ggacuggaauuugggaaaa

SEQ ID NO: 2403196 - RNA, 19 nt, Homo sapiens
  misc_RNA (1)...(19): siRNA sense strand
gccagaagaagaugacauu

SEQ ID NO: 2403197 - RNA, 19 nt, Homo sapiens
  misc_RNA (1)...(19): siRNA sense strand
gcuaagguuuuaaaggcaa

SEQ ID NO: 2403198 - RNA, 19 nt, Homo sapiens
  misc_RNA (1)...(19): siRNA sense strand
acuccagccucgaugcuaa

SEQ ID NO: 2403199 - RNA, 19 nt, Homo sapiens
  misc_RNA (1)...(19): siRNA sense strand
caaagacugugcaagggaa

SEQ ID NO: 2403200 - RNA, 19 nt, Homo sapiens
  misc_RNA (1)...(19): siRNA sense strand
agaaaguucccaauaguga

SEQ ID NO: 2403201 - RNA, 19 nt, Homo sapiens
  misc_RNA (1)...(19): siRNA sense strand
cuucauugugcuaagguuu

SEQ ID NO: 2403202 - RNA, 19 nt, Homo sapiens
  misc_RNA (1)...(19): siRNA sense strand
gggaugagccagagcagca

SEQ ID NO: 2403203 - RNA, 19 nt, Homo sapiens
  misc_RNA (1)...(19): siRNA sense strand
ccagcguggaggauggcaa

SEQ ID NO: 2403204 - RNA, 19 nt, Homo sapiens
  misc_RNA (1)...(19): siRNA sense strand
caugaaguggagaaggaaa

SEQ ID NO: 2403205 - RNA, 19 nt, Homo sapiens
  misc_RNA (1)...(19): siRNA sense strand
cggacaaggaugaccagaa

SEQ ID NO: 2403206 - RNA, 19 nt, Homo sapiens
  misc_RNA (1)...(19): siRNA sense strand
augaaguggagaaggaaau

SEQ ID NO: 2403207 - RNA, 19 nt, Homo sapiens
  misc_RNA (1)...(19): siRNA sense strand
cuauggugucuaugagaua

SEQ ID NO: 2403208 - RNA, 19 nt, Homo sapiens
  misc_RNA (1)...(19): siRNA sense strand
acacagaagugaagcugga

SEQ ID NO: 2403209 - RNA, 19 nt, Homo sapiens
  misc_RNA (1)...(19): siRNA sense strand
uggacuaccuggaaggcau

SEQ ID NO: 2403210 - RNA, 19 nt, Homo sapiens
  misc_RNA (1)...(19): siRNA sense strand
ucaacauccucgugggugu

SEQ ID NO: 2403211 - RNA, 19 nt, Homo sapiens
  misc_RNA (1)...(19): siRNA sense strand
ggaccaacccugacugcca

SEQ ID NO: 2403212 - RNA, 19 nt, Homo sapiens
  misc_RNA (1)...(19): siRNA sense strand
uggagaaggaaaucagcau

SEQ ID NO: 2403213 - RNA, 19 nt, Homo sapiens
  misc_RNA (1)...(19): siRNA sense strand
agugguggccggaggcauu

SEQ ID NO: 2403214 - RNA, 19 nt, Homo sapiens
  misc_RNA (1)...(19): siRNA sense strand
aucacaaacuagagagaaa

SEQ ID NO: 2403215 - RNA, 19 nt, Homo sapiens
  misc_RNA (1)...(19): siRNA sense strand
auguaaggaaugugggaaa

SEQ ID NO: 2403216 - RNA, 19 nt, Homo sapiens
  misc_RNA (1)...(19): siRNA sense strand
gugcaagcagugugggaaa

SEQ ID NO: 2403217 - RNA, 19 nt, Homo sapiens
  misc_RNA (1)...(19): siRNA sense strand
gcguuaaagacaagcacaa

SEQ ID NO: 2403218 - RNA, 19 nt, Homo sapiens
  misc_RNA (1)...(19): siRNA sense strand
augugaaacgugugggaaa

SEQ ID NO: 2403219 - RNA, 19 nt, Homo sapiens
  misc_RNA (1)...(19): siRNA sense strand
ccuacagacgcaugagaaa

SEQ ID NO: 2403220 - RNA, 19 nt, Homo sapiens
  misc_RNA (1)...(19): siRNA sense strand
agguaauaaacguggaaga

SEQ ID NO: 2403221 - RNA, 19 nt, Homo sapiens
  misc_RNA (1)...(19): siRNA sense strand
guggagagaccguguaaaa

SEQ ID NO: 2403222 - RNA, 19 nt, Homo sapiens
  misc_RNA (1)...(19): siRNA sense strand
cuuucaaggucaugugaga

SEQ ID NO: 2403223 - RNA, 19 nt, Homo sapiens
  misc_RNA (1)...(19): siRNA sense strand
aacucacaguggagagaaa

SEQ ID NO: 2403224 - RNA, 19 nt, Homo sapiens
  misc_RNA (1)...(19): siRNA sense strand
cuauaaaugugaaacgugu

SEQ ID NO: 2403225 - RNA, 19 nt, Homo sapiens
  misc_RNA (1)...(19): siRNA sense strand
ggguggagagaccguguaa

SEQ ID NO: 2403226 - RNA, 19 nt, Homo sapiens
  misc_RNA (1)...(19): siRNA sense strand
guaaaagcaguaaagguaa

SEQ ID NO: 2403227 - RNA, 19 nt, Homo sapiens
  misc_RNA (1)...(19): siRNA sense strand
guguggaaaaugcgggaaa

SEQ ID NO: 2403228 - RNA, 19 nt, Homo sapiens
  misc_RNA (1)...(19): siRNA sense strand
aagucacacaggaaagaaa

SEQ ID NO: 2403229 - RNA, 19 nt, Homo sapiens
  misc_RNA (1)...(19): siRNA sense strand
agaaagaauauaugggccu

SEQ ID NO: 2403230 - RNA, 19 nt, Homo sapiens
  misc_RNA (1)...(19): siRNA sense strand
cgcgagaacgcaugcuaaa

SEQ ID NO: 2403231 - RNA, 19 nt, Homo sapiens
  misc_RNA (1)...(19): siRNA sense strand
ugugaaacgugugggaaaa

SEQ ID NO: 2403232 - RNA, 19 nt, Homo sapiens
  misc_RNA (1)...(19): siRNA sense strand
aagacaagcacaacaccaa

SEQ ID NO: 2403233 - RNA, 19 nt, Homo sapiens
  misc_RNA (1)...(19): siRNA sense strand
aagcacaacaccaaggaga

SEQ ID NO: 2403234 - RNA, 19 nt, Homo sapiens
  misc_RNA (1)...(19): siRNA sense strand
cuucagaaagacucgaaau

SEQ ID NO: 2403235 - RNA, 19 nt, Homo sapiens
  misc_RNA (1)...(19): siRNA sense strand
gggaaagccuucagguguc

SEQ ID NO: 2403236 - RNA, 19 nt, Homo sapiens
  misc_RNA (1)...(19): siRNA sense strand
guuaaagacaagcacaaca

SEQ ID NO: 2403237 - RNA, 19 nt, Homo sapiens
  misc_RNA (1)...(19): siRNA sense strand
aguguaagacgguacgaau

SEQ ID NO: 2403238 - RNA, 19 nt, Homo sapiens
  misc_RNA (1)...(19): siRNA sense strand
augcagccagugugggaaa

SEQ ID NO: 2403239 - RNA, 19 nt, Homo sapiens
  misc_RNA (1)...(19): siRNA sense strand
gagcagaaauccaagggug

SEQ ID NO: 2403240 - RNA, 19 nt, Homo sapiens
  misc_RNA (1)...(19): siRNA sense strand
ggagaccguaugagugcaa

SEQ ID NO: 2403241 - RNA, 19 nt, Homo sapiens
  misc_RNA (1)...(19): siRNA sense strand
ggagaccguaugagugcaa

SEQ ID NO: 2403242 - RNA, 19 nt, Homo sapiens
  misc_RNA (1)...(19): siRNA sense strand
ccguaugagugcaagcagu

SEQ ID NO: 2403243 - RNA, 19 nt, Homo sapiens
  misc_RNA (1)...(19): siRNA sense strand
aaacaugagagaaagcaca

SEQ ID NO: 2403244 - RNA, 19 nt, Homo sapiens
  misc_RNA (1)...(19): siRNA sense strand
gaaugugggcaguguggga

SEQ ID NO: 2403245 - RNA, 19 nt, Homo sapiens
  misc_RNA (1)...(19): siRNA sense strand
aggagugggccuugcugaa

SEQ ID NO: 2403246 - RNA, 19 nt, Homo sapiens
  misc_RNA (1)...(19): siRNA sense strand
ggaaagagacuauucacca

SEQ ID NO: 2403247 - RNA, 19 nt, Homo sapiens
  misc_RNA (1)...(19): siRNA sense strand
caccgagggaggagacaaa

SEQ ID NO: 2403248 - RNA, 19 nt, Homo sapiens
  misc_RNA (1)...(19): siRNA sense strand
gaucauaguuaguuggaca

SEQ ID NO: 2403249 - RNA, 19 nt, Homo sapiens
  misc_RNA (1)...(19): siRNA sense strand
acaaauacuuggacaggua

SEQ ID NO: 2403250 - RNA, 19 nt, Homo sapiens
  misc_RNA (1)...(19): siRNA sense strand
ggaaauacuuacacuguuu

SEQ ID NO: 2403251 - RNA, 19 nt, Homo sapiens
  misc_RNA (1)...(19): siRNA sense strand
cccaaacacucuagaagaa

SEQ ID NO: 2403252 - RNA, 19 nt, Homo sapiens
  misc_RNA (1)...(19): siRNA sense strand
ugguaaugcuggaaguuau

SEQ ID NO: 2403253 - RNA, 19 nt, Homo sapiens
  misc_RNA (1)...(19): siRNA sense strand
aaaucaacgugguaagcaa

SEQ ID NO: 2403254 - RNA, 19 nt, Homo sapiens
  misc_RNA (1)...(19): siRNA sense strand
guuaaauacaaauggccua

SEQ ID NO: 2403255 - RNA, 19 nt, Homo sapiens
  misc_RNA (1)...(19): siRNA sense strand
auaaagaagccaaaccaua

SEQ ID NO: 2403256 - RNA, 19 nt, Homo sapiens
  misc_RNA (1)...(19): siRNA sense strand
gcuccaucuuccacagaaa

SEQ ID NO: 2403257 - RNA, 19 nt, Homo sapiens
  misc_RNA (1)...(19): siRNA sense strand
ccaucauaccagugccuua

SEQ ID NO: 2403258 - RNA, 19 nt, Homo sapiens
  misc_RNA (1)...(19): siRNA sense strand
cauguaaaccuuuggcauu

SEQ ID NO: 2403259 - RNA, 19 nt, Homo sapiens
  misc_RNA (1)...(19): siRNA sense strand
cgguacgaggugacaguua

SEQ ID NO: 2403260 - RNA, 19 nt, Homo sapiens
  misc_RNA (1)...(19): siRNA sense strand
ccuaaagauaucaagauga

SEQ ID NO: 2403261 - RNA, 19 nt, Homo sapiens
  misc_RNA (1)...(19): siRNA sense strand
acucaaaauuccaagaaga

SEQ ID NO: 2403262 - RNA, 19 nt, Homo sapiens
  misc_RNA (1)...(19): siRNA sense strand
cuaccauguuggauaaaga

SEQ ID NO: 2403263 - RNA, 19 nt, Homo sapiens
  misc_RNA (1)...(19): siRNA sense strand
ucauaaagacuccucaaua

SEQ ID NO: 2403264 - RNA, 19 nt, Homo sapiens
  misc_RNA (1)...(19): siRNA sense strand
aaacaauugcaguugacua

SEQ ID NO: 2403265 - RNA, 19 nt, Homo sapiens
  misc_RNA (1)...(19): siRNA sense strand
guaaauuguugaagacuac

SEQ ID NO: 2403266 - RNA, 19 nt, Homo sapiens
  misc_RNA (1)...(19): siRNA sense strand
cagcagucaaagaagaaau

SEQ ID NO: 2403267 - RNA, 19 nt, Homo sapiens
  misc_RNA (1)...(19): siRNA sense strand
ggauaaagaagccaaacca

SEQ ID NO: 2403268 - RNA, 19 nt, Homo sapiens
  misc_RNA (1)...(19): siRNA sense strand
cugcuuaugucguaucuaa

SEQ ID NO: 2403269 - RNA, 19 nt, Homo sapiens
  misc_RNA (1)...(19): siRNA sense strand
gguuuaaagaauuguggga

SEQ ID NO: 2403270 - RNA, 19 nt, Homo sapiens
  misc_RNA (1)...(19): siRNA sense strand
gaaaagacccucugaacuu

SEQ ID NO: 2403271 - RNA, 19 nt, Homo sapiens
  misc_RNA (1)...(19): siRNA sense strand
aguuguaucuuuauggaga

SEQ ID NO: 2403272 - RNA, 19 nt, Homo sapiens
  misc_RNA (1)...(19): siRNA sense strand
uuccaaagaaacuggcaaa

SEQ ID NO: 2403273 - RNA, 19 nt, Homo sapiens
  misc_RNA (1)...(19): siRNA sense strand
uuuaaagaauugugggaug

SEQ ID NO: 2403274 - RNA, 19 nt, Homo sapiens
  misc_RNA (1)...(19): siRNA sense strand
gcuccauugcacuuagaaa

SEQ ID NO: 2403275 - RNA, 19 nt, Homo sapiens
  misc_RNA (1)...(19): siRNA sense strand
gguguaaacaauugcaguu

SEQ ID NO: 2403276 - RNA, 19 nt, Homo sapiens
  misc_RNA (1)...(19): siRNA sense strand
agaauuagaugccgucauu

SEQ ID NO: 2403277 - RNA, 19 nt, Homo sapiens
  misc_RNA (1)...(19): siRNA sense strand
gcacauuuauauaggcuuc

SEQ ID NO: 2403278 - RNA, 19 nt, Homo sapiens
  misc_RNA (1)...(19): siRNA sense strand
uuagaaaagcagaggacau

SEQ ID NO: 2403279 - RNA, 19 nt, Homo sapiens
  misc_RNA (1)...(19): siRNA sense strand
gucuauugucagagcacua

SEQ ID NO: 2403280 - RNA, 19 nt, Homo sapiens
  misc_RNA (1)...(19): siRNA sense strand
cuaauauccuucuugcuua

SEQ ID NO: 2403281 - RNA, 19 nt, Homo sapiens
  misc_RNA (1)...(19): siRNA sense strand
augcuaccauguuggauaa

SEQ ID NO: 2403282 - RNA, 19 nt, Homo sapiens
  misc_RNA (1)...(19): siRNA sense strand
cauaaagacuccucaauac

SEQ ID NO: 2403283 - RNA, 19 nt, Homo sapiens
  misc_RNA (1)...(19): siRNA sense strand
cuucaaggaaagugguguu

SEQ ID NO: 2403284 - RNA, 19 nt, Homo sapiens
  misc_RNA (1)...(19): siRNA sense strand
ccucugaacuuccuaaaga

SEQ ID NO: 2403285 - RNA, 19 nt, Homo sapiens
  misc_RNA (1)...(19): siRNA sense strand
uuguggagcacuagccaua

SEQ ID NO: 2403286 - RNA, 19 nt, Homo sapiens
  misc_RNA (1)...(19): siRNA sense strand
cagcaugccuucucuaauu

SEQ ID NO: 2403287 - RNA, 19 nt, Homo sapiens
  misc_RNA (1)...(19): siRNA sense strand
cuucauauuccuuggucuu

SEQ ID NO: 2403288 - RNA, 19 nt, Homo sapiens
  misc_RNA (1)...(19): siRNA sense strand
aagaauagccagccuguga

SEQ ID NO: 2403289 - RNA, 19 nt, Homo sapiens
  misc_RNA (1)...(19): siRNA sense strand
ccauguaaaccuuuggcau

SEQ ID NO: 2403290 - RNA, 19 nt, Homo sapiens
  misc_RNA (1)...(19): siRNA sense strand
ucggcuucgaggagaauaa

SEQ ID NO: 2403291 - RNA, 19 nt, Homo sapiens
  misc_RNA (1)...(19): siRNA sense strand
auacuacaaucuagagcuu

SEQ ID NO: 2403292 - RNA, 19 nt, Homo sapiens
  misc_RNA (1)...(19): siRNA sense strand
uuggacagguaguuagauu

SEQ ID NO: 2403293 - RNA, 19 nt, Homo sapiens
  misc_RNA (1)...(19): siRNA sense strand
guaucuuuauggagaggga

SEQ ID NO: 2403294 - RNA, 19 nt, Homo sapiens
  misc_RNA (1)...(19): siRNA sense strand
aucuagagcuucugaacuu

SEQ ID NO: 2403295 - RNA, 19 nt, Homo sapiens
  misc_RNA (1)...(19): siRNA sense strand
ugaacuuuggacagauaua

SEQ ID NO: 2403296 - RNA, 19 nt, Homo sapiens
  misc_RNA (1)...(19): siRNA sense strand
ccgcauaugaguuguaucu

SEQ ID NO: 2403297 - RNA, 19 nt, Homo sapiens
  misc_RNA (1)...(19): siRNA sense strand
aaacaauacccauguggca

SEQ ID NO: 2403298 - RNA, 19 nt, Homo sapiens
  misc_RNA (1)...(19): siRNA sense strand
gggucagcacauuuauaua

SEQ ID NO: 2403299 - RNA, 19 nt, Homo sapiens
  misc_RNA (1)...(19): siRNA sense strand
aagcagaggacauugacuu

SEQ ID NO: 2403300 - RNA, 19 nt, Homo sapiens
  misc_RNA (1)...(19): siRNA sense strand
cuggaggauuccgggauua

SEQ ID NO: 2403301 - RNA, 19 nt, Homo sapiens
  misc_RNA (1)...(19): siRNA sense strand
gcuuaugucguaucuaaua

SEQ ID NO: 2403302 - RNA, 19 nt, Homo sapiens
  misc_RNA (1)...(19): siRNA sense strand
agguuguugcuuagaauau

SEQ ID NO: 2403303 - RNA, 19 nt, Homo sapiens
  misc_RNA (1)...(19): siRNA sense strand
agaauugugggauguauua

SEQ ID NO: 2403304 - RNA, 19 nt, Homo sapiens
  misc_RNA (1)...(19): siRNA sense strand
ggauuguauuacucagcau

SEQ ID NO: 2403305 - RNA, 19 nt, Homo sapiens
  misc_RNA (1)...(19): siRNA sense strand
auguaaaccuuuggcauuu

SEQ ID NO: 2403306 - RNA, 19 nt, Homo sapiens
  misc_RNA (1)...(19): siRNA sense strand
caaguaaauuguugaagac

SEQ ID NO: 2403307 - RNA, 19 nt, Homo sapiens
  misc_RNA (1)...(19): siRNA sense strand
ucuucggcuucgaggagaa

SEQ ID NO: 2403308 - RNA, 19 nt, Homo sapiens
  misc_RNA (1)...(19): siRNA sense strand
aguuagauuucauggugga

SEQ ID NO: 2403309 - RNA, 19 nt, Homo sapiens
  misc_RNA (1)...(19): siRNA sense strand
gcuuauagaggacaguuau

SEQ ID NO: 2403310 - RNA, 19 nt, Homo sapiens
  misc_RNA (1)...(19): siRNA sense strand
aagaauugugggauguauu

SEQ ID NO: 2403311 - RNA, 19 nt, Homo sapiens
  misc_RNA (1)...(19): siRNA sense strand
ggacaguuauauucucuuu

SEQ ID NO: 2403312 - RNA, 19 nt, Homo sapiens
  misc_RNA (1)...(19): siRNA sense strand
cuauggcaauucuuggaaa

SEQ ID NO: 2403313 - RNA, 19 nt, Homo sapiens
  misc_RNA (1)...(19): siRNA sense strand
cgaaauucaugcaggaggu

SEQ ID NO: 2403314 - RNA, 19 nt, Homo sapiens
  misc_RNA (1)...(19): siRNA sense strand
uugugaaguggcuggauua

SEQ ID NO: 2403315 - RNA, 19 nt, Homo sapiens
  misc_RNA (1)...(19): siRNA sense strand
ucacgaaauucaugcagga

SEQ ID NO: 2403316 - RNA, 19 nt, Homo sapiens
  misc_RNA (1)...(19): siRNA sense strand
aauucaugcaggaggucua

SEQ ID NO: 2403317 - RNA, 19 nt, Homo sapiens
  misc_RNA (1)...(19): siRNA sense strand
uccuaugggcagaaggcaa

SEQ ID NO: 2403318 - RNA, 19 nt, Homo sapiens
  misc_RNA (1)...(19): siRNA sense strand
ucaugaggguucuggggaa

SEQ ID NO: 2403319 - RNA, 19 nt, Homo sapiens
  misc_RNA (1)...(19): siRNA sense strand
auuaaaagccugaagcaca

SEQ ID NO: 2403320 - RNA, 19 nt, Homo sapiens
  misc_RNA (1)...(19): siRNA sense strand
uggaagaagauuggagaaa

SEQ ID NO: 2403321 - RNA, 19 nt, Homo sapiens
  misc_RNA (1)...(19): siRNA sense strand
gggaagacagagugcagaa

SEQ ID NO: 2403322 - RNA, 19 nt, Homo sapiens
  misc_RNA (1)...(19): siRNA sense strand
gcauaaaaccaguagaaga

SEQ ID NO: 2403323 - RNA, 19 nt, Homo sapiens
  misc_RNA (1)...(19): siRNA sense strand
cauaaaaccaguagaagaa

SEQ ID NO: 2403324 - RNA, 19 nt, Homo sapiens
  misc_RNA (1)...(19): siRNA sense strand
agacaaaacccgagacaca

SEQ ID NO: 2403325 - RNA, 19 nt, Homo sapiens
  misc_RNA (1)...(19): siRNA sense strand
gauaaaaggcaaagugaca

SEQ ID NO: 2403326 - RNA, 19 nt, Homo sapiens
  misc_RNA (1)...(19): siRNA sense strand
acaucaaauccaacagaua

SEQ ID NO: 2403327 - RNA, 19 nt, Homo sapiens
  misc_RNA (1)...(19): siRNA sense strand
ugaaggaauagcugauaaa

SEQ ID NO: 2403328 - RNA, 19 nt, Homo sapiens
  misc_RNA (1)...(19): siRNA sense strand
auaacuaggacgacugaaa

SEQ ID NO: 2403329 - RNA, 19 nt, Homo sapiens
  misc_RNA (1)...(19): siRNA sense strand
acuaauaacaacagccauu

SEQ ID NO: 2403330 - RNA, 19 nt, Homo sapiens
  misc_RNA (1)...(19): siRNA sense strand
augccagagucuacaguaa

SEQ ID NO: 2403331 - RNA, 19 nt, Homo sapiens
  misc_RNA (1)...(19): siRNA sense strand
aggcuaugauuuuggauaa

SEQ ID NO: 2403332 - RNA, 19 nt, Homo sapiens
  misc_RNA (1)...(19): siRNA sense strand
agaaauaagcaugaaggaa

SEQ ID NO: 2403333 - RNA, 19 nt, Homo sapiens
  misc_RNA (1)...(19): siRNA sense strand
ccuucuaacccuuccgaaa

SEQ ID NO: 2403334 - RNA, 19 nt, Homo sapiens
  misc_RNA (1)...(19): siRNA sense strand
augaaggaauagcugauaa

SEQ ID NO: 2403335 - RNA, 19 nt, Homo sapiens
  misc_RNA (1)...(19): siRNA sense strand
uugcaaauucagaggcuau

SEQ ID NO: 2403336 - RNA, 19 nt, Homo sapiens
  misc_RNA (1)...(19): siRNA sense strand
cccagaagccugagcucaa

SEQ ID NO: 2403337 - RNA, 19 nt, Homo sapiens
  misc_RNA (1)...(19): siRNA sense strand
gcaugaaggaauagcugau

SEQ ID NO: 2403338 - RNA, 19 nt, Homo sapiens
  misc_RNA (1)...(19): siRNA sense strand
agauagaaguaaacggaag

SEQ ID NO: 2403339 - RNA, 19 nt, Homo sapiens
  misc_RNA (1)...(19): siRNA sense strand
gcucaaagugaaacggguu

SEQ ID NO: 2403340 - RNA, 19 nt, Homo sapiens
  misc_RNA (1)...(19): siRNA sense strand
gcugaauaagucaaggaau

SEQ ID NO: 2403341 - RNA, 19 nt, Homo sapiens
  misc_RNA (1)...(19): siRNA sense strand
aggcaaagugacaacauuu

SEQ ID NO: 2403342 - RNA, 19 nt, Homo sapiens
  misc_RNA (1)...(19): siRNA sense strand
ugauucagcaggagaucua

SEQ ID NO: 2403343 - RNA, 19 nt, Homo sapiens
  misc_RNA (1)...(19): siRNA sense strand
aaguccagauagaaguaaa

SEQ ID NO: 2403344 - RNA, 19 nt, Homo sapiens
  misc_RNA (1)...(19): siRNA sense strand
cuucaaacucaaaggaaac

SEQ ID NO: 2403345 - RNA, 19 nt, Homo sapiens
  misc_RNA (1)...(19): siRNA sense strand
aguaauguuccaagcggua

SEQ ID NO: 2403346 - RNA, 19 nt, Homo sapiens
  misc_RNA (1)...(19): siRNA sense strand
cagaaauaagcaugaagga

SEQ ID NO: 2403347 - RNA, 19 nt, Homo sapiens
  misc_RNA (1)...(19): siRNA sense strand
ucacaugauaaaaggcaaa

SEQ ID NO: 2403348 - RNA, 19 nt, Homo sapiens
  misc_RNA (1)...(19): siRNA sense strand
uugugaaagugcagacuca

SEQ ID NO: 2403349 - RNA, 19 nt, Homo sapiens
  misc_RNA (1)...(19): siRNA sense strand
guguaaguuuggaaaggca

SEQ ID NO: 2403350 - RNA, 19 nt, Homo sapiens
  misc_RNA (1)...(19): siRNA sense strand
ggaagauauuaaaagccaa

SEQ ID NO: 2403351 - RNA, 19 nt, Homo sapiens
  misc_RNA (1)...(19): siRNA sense strand
aaguugauuuggaagaaga

SEQ ID NO: 2403352 - RNA, 19 nt, Homo sapiens
  misc_RNA (1)...(19): siRNA sense strand
gcugauaaacuuuuggcaa

SEQ ID NO: 2403353 - RNA, 19 nt, Homo sapiens
  misc_RNA (1)...(19): siRNA sense strand
ugucaugagaacucuaaua

SEQ ID NO: 2403354 - RNA, 19 nt, Homo sapiens
  misc_RNA (1)...(19): siRNA sense strand
gcaucagacaaauguaaca

SEQ ID NO: 2403355 - RNA, 19 nt, Homo sapiens
  misc_RNA (1)...(19): siRNA sense strand
uaucaaaagaagaggaugu

SEQ ID NO: 2403356 - RNA, 19 nt, Homo sapiens
  misc_RNA (1)...(19): siRNA sense strand
gaaaacagcaauugggagu

SEQ ID NO: 2403357 - RNA, 19 nt, Homo sapiens
  misc_RNA (1)...(19): siRNA sense strand
gaugaguguaguagaacca

SEQ ID NO: 2403358 - RNA, 19 nt, Homo sapiens
  misc_RNA (1)...(19): siRNA sense strand
aggaaaauguuaaacgcau

SEQ ID NO: 2403359 - RNA, 19 nt, Homo sapiens
  misc_RNA (1)...(19): siRNA sense strand
aguuauggcuguacagaag

SEQ ID NO: 2403360 - RNA, 19 nt, Homo sapiens
  misc_RNA (1)...(19): siRNA sense strand
aacuaggacgacugaaaua

SEQ ID NO: 2403361 - RNA, 19 nt, Homo sapiens
  misc_RNA (1)...(19): siRNA sense strand
caguagaagaaauuguuca

SEQ ID NO: 2403362 - RNA, 19 nt, Homo sapiens
  misc_RNA (1)...(19): siRNA sense strand
ccaaaagccaaguagaaca

SEQ ID NO: 2403363 - RNA, 19 nt, Homo sapiens
  misc_RNA (1)...(19): siRNA sense strand
ggaagacagagugcagaaa

SEQ ID NO: 2403364 - RNA, 19 nt, Homo sapiens
  misc_RNA (1)...(19): siRNA sense strand
ggccuauccaacugcaaua

SEQ ID NO: 2403365 - RNA, 19 nt, Homo sapiens
  misc_RNA (1)...(19): siRNA sense strand
uggaccauucugugauaua

SEQ ID NO: 2403366 - RNA, 19 nt, Homo sapiens
  misc_RNA (1)...(19): siRNA sense strand
cagaaaacgaggaaaaugu

SEQ ID NO: 2403367 - RNA, 19 nt, Homo sapiens
  misc_RNA (1)...(19): siRNA sense strand
uuggaaaggcaaacagcau

SEQ ID NO: 2403368 - RNA, 19 nt, Homo sapiens
  misc_RNA (1)...(19): siRNA sense strand
cggaagauauuaaaagcca

SEQ ID NO: 2403369 - RNA, 19 nt, Homo sapiens
  misc_RNA (1)...(19): siRNA sense strand
caucaggaaauucuagcaa

SEQ ID NO: 2403370 - RNA, 19 nt, Homo sapiens
  misc_RNA (1)...(19): siRNA sense strand
ccagauagaaguaaacgga

SEQ ID NO: 2403371 - RNA, 19 nt, Homo sapiens
  misc_RNA (1)...(19): siRNA sense strand
uagaaguaaacggaagaua

SEQ ID NO: 2403372 - RNA, 19 nt, Homo sapiens
  misc_RNA (1)...(19): siRNA sense strand
ugaaaacgauucugagcau

SEQ ID NO: 2403373 - RNA, 19 nt, Homo sapiens
  misc_RNA (1)...(19): siRNA sense strand
accugaauuaguagacaaa

SEQ ID NO: 2403374 - RNA, 19 nt, Homo sapiens
  misc_RNA (1)...(19): siRNA sense strand
guaccgugggugacaagaa

SEQ ID NO: 2403375 - RNA, 19 nt, Homo sapiens
  misc_RNA (1)...(19): siRNA sense strand
gggaagaagaagaaaccau

SEQ ID NO: 2403376 - RNA, 19 nt, Homo sapiens
  misc_RNA (1)...(19): siRNA sense strand
cuuucaaaauuguggacua

SEQ ID NO: 2403377 - RNA, 19 nt, Homo sapiens
  misc_RNA (1)...(19): siRNA sense strand
aagacaauucccuggcaaa

SEQ ID NO: 2403378 - RNA, 19 nt, Homo sapiens
  misc_RNA (1)...(19): siRNA sense strand
aauaauacauguuggucca

SEQ ID NO: 2403379 - RNA, 19 nt, Homo sapiens
  misc_RNA (1)...(19): siRNA sense strand
agaagaaacagaaaggagu

SEQ ID NO: 2403380 - RNA, 19 nt, Homo sapiens
  misc_RNA (1)...(19): siRNA sense strand
cuucuggacgggugguaaa

SEQ ID NO: 2403381 - RNA, 19 nt, Homo sapiens
  misc_RNA (1)...(19): siRNA sense strand
acauagagcagaaacccaa

SEQ ID NO: 2403382 - RNA, 19 nt, Homo sapiens
  misc_RNA (1)...(19): siRNA sense strand
acuaugaagaugaguuaga

SEQ ID NO: 2403383 - RNA, 19 nt, Homo sapiens
  misc_RNA (1)...(19): siRNA sense strand
ugguccaaaucaagucaaa

SEQ ID NO: 2403384 - RNA, 19 nt, Homo sapiens
  misc_RNA (1)...(19): siRNA sense strand
cuguaaugaauauggaacu

SEQ ID NO: 2403385 - RNA, 19 nt, Homo sapiens
  misc_RNA (1)...(19): siRNA sense strand
gaacaaaccuuucagcaga

SEQ ID NO: 2403386 - RNA, 19 nt, Homo sapiens
  misc_RNA (1)...(19): siRNA sense strand
aggaauaagaggagaguug

SEQ ID NO: 2403387 - RNA, 19 nt, Homo sapiens
  misc_RNA (1)...(19): siRNA sense strand
uggaagaggaagaacaaaa

SEQ ID NO: 2403388 - RNA, 19 nt, Homo sapiens
  misc_RNA (1)...(19): siRNA sense strand
ugagaaagggaaagaagau

SEQ ID NO: 2403389 - RNA, 19 nt, Homo sapiens
  misc_RNA (1)...(19): siRNA sense strand
ccgaaagaaaccucgaaau

SEQ ID NO: 2403390 - RNA, 19 nt, Homo sapiens
  misc_RNA (1)...(19): siRNA sense strand
aacaagaagcuuugaaaca

SEQ ID NO: 2403391 - RNA, 19 nt, Homo sapiens
  misc_RNA (1)...(19): siRNA sense strand
gcaaggacguguuggcagu

SEQ ID NO: 2403392 - RNA, 19 nt, Homo sapiens
  misc_RNA (1)...(19): siRNA sense strand
gcccaggcucuuagugaaa

SEQ ID NO: 2403393 - RNA, 19 nt, Homo sapiens
  misc_RNA (1)...(19): siRNA sense strand
cuuucuuaccagagaggaa

SEQ ID NO: 2403394 - RNA, 19 nt, Homo sapiens
  misc_RNA (1)...(19): siRNA sense strand
ccagaugauggaaggaaaa

SEQ ID NO: 2403395 - RNA, 19 nt, Homo sapiens
  misc_RNA (1)...(19): siRNA sense strand
cagcaggaccagcaggcua

SEQ ID NO: 2403396 - RNA, 19 nt, Homo sapiens
  misc_RNA (1)...(19): siRNA sense strand
gaaacaaguuaaauaccga

SEQ ID NO: 2403397 - RNA, 19 nt, Homo sapiens
  misc_RNA (1)...(19): siRNA sense strand
augaagagaaucagaacga

SEQ ID NO: 2403398 - RNA, 19 nt, Homo sapiens
  misc_RNA (1)...(19): siRNA sense strand
ugauggaagaggaagaaca

SEQ ID NO: 2403399 - RNA, 19 nt, Homo sapiens
  misc_RNA (1)...(19): siRNA sense strand
ccauugagccagaaggcca

SEQ ID NO: 2403400 - RNA, 19 nt, Homo sapiens
  misc_RNA (1)...(19): siRNA sense strand
agcccagaguauugagcua

SEQ ID NO: 2403401 - RNA, 19 nt, Homo sapiens
  misc_RNA (1)...(19): siRNA sense strand
cugagaggaacgaggcuau

SEQ ID NO: 2403402 - RNA, 19 nt, Homo sapiens
  misc_RNA (1)...(19): siRNA sense strand
agaacuaaaggaacagcua

SEQ ID NO: 2403403 - RNA, 19 nt, Homo sapiens
  misc_RNA (1)...(19): siRNA sense strand
cagggugauuugacaggaa

SEQ ID NO: 2403404 - RNA, 19 nt, Homo sapiens
  misc_RNA (1)...(19): siRNA sense strand
ggaaccugacuaugaggaa

SEQ ID NO: 2403405 - RNA, 19 nt, Homo sapiens
  misc_RNA (1)...(19): siRNA sense strand
ugcugaaagcccagaguau

SEQ ID NO: 2403406 - RNA, 19 nt, Homo sapiens
  misc_RNA (1)...(19): siRNA sense strand
ucaccagguaguucggaaa

SEQ ID NO: 2403407 - RNA, 19 nt, Homo sapiens
  misc_RNA (1)...(19): siRNA sense strand
uagaggaugaagagaauca

SEQ ID NO: 2403408 - RNA, 19 nt, Homo sapiens
  misc_RNA (1)...(19): siRNA sense strand
cagugcuggcugagaggaa

SEQ ID NO: 2403409 - RNA, 19 nt, Homo sapiens
  misc_RNA (1)...(19): siRNA sense strand
agagaaucagaacgaauua

SEQ ID NO: 2403410 - RNA, 19 nt, Homo sapiens
  misc_RNA (1)...(19): siRNA sense strand
ucuagaagcccaaggugau

SEQ ID NO: 2403411 - RNA, 19 nt, Homo sapiens
  misc_RNA (1)...(19): siRNA sense strand
ucccuaaagaccagaguau

SEQ ID NO: 2403412 - RNA, 19 nt, Homo sapiens
  misc_RNA (1)...(19): siRNA sense strand
gggaguauuguguugaaaa

SEQ ID NO: 2403413 - RNA, 19 nt, Homo sapiens
  misc_RNA (1)...(19): siRNA sense strand
gaagaagaacuaaaggaac

SEQ ID NO: 2403414 - RNA, 19 nt, Homo sapiens
  misc_RNA (1)...(19): siRNA sense strand
ugggaaguauggcccgaaa

SEQ ID NO: 2403415 - RNA, 19 nt, Homo sapiens
  misc_RNA (1)...(19): siRNA sense strand
augagaaagggaaagaaga

SEQ ID NO: 2403416 - RNA, 19 nt, Homo sapiens
  misc_RNA (1)...(19): siRNA sense strand
aggaugaagagaaucagaa

SEQ ID NO: 2403417 - RNA, 19 nt, Homo sapiens
  misc_RNA (1)...(19): siRNA sense strand
auggaauagaggaugaaga

SEQ ID NO: 2403418 - RNA, 19 nt, Homo sapiens
  misc_RNA (1)...(19): siRNA sense strand
agaagauuuguuugggaga

SEQ ID NO: 2403419 - RNA, 19 nt, Homo sapiens
  misc_RNA (1)...(19): siRNA sense strand
uaacugaugagaaagggaa

SEQ ID NO: 2403420 - RNA, 19 nt, Homo sapiens
  misc_RNA (1)...(19): siRNA sense strand
gugauuugcuggaaaccca

SEQ ID NO: 2403421 - RNA, 19 nt, Homo sapiens
  misc_RNA (1)...(19): siRNA sense strand
agagagaagcagaggcaga

SEQ ID NO: 2403422 - RNA, 19 nt, Homo sapiens
  misc_RNA (1)...(19): siRNA sense strand
gcagagagaagcagaggca

SEQ ID NO: 2403423 - RNA, 19 nt, Homo sapiens
  misc_RNA (1)...(19): siRNA sense strand
ccucaaauuccgaacccua

SEQ ID NO: 2403424 - RNA, 19 nt, Homo sapiens
  misc_RNA (1)...(19): siRNA sense strand
guaacaagagucaggcaga

SEQ ID NO: 2403425 - RNA, 19 nt, Homo sapiens
  misc_RNA (1)...(19): siRNA sense strand
gcagaggcagagagggcau

SEQ ID NO: 2403426 - RNA, 19 nt, Homo sapiens
  misc_RNA (1)...(19): siRNA sense strand
gauuauguguacuggguag

SEQ ID NO: 2403427 - RNA, 19 nt, Homo sapiens
  misc_RNA (1)...(19): siRNA sense strand
uguuggagaaagagagcaa

SEQ ID NO: 2403428 - RNA, 19 nt, Homo sapiens
  misc_RNA (1)...(19): siRNA sense strand
gggugagagacuauagcaa

SEQ ID NO: 2403429 - RNA, 19 nt, Homo sapiens
  misc_RNA (1)...(19): siRNA sense strand
gcaaauugaugaaccgguu

SEQ ID NO: 2403430 - RNA, 19 nt, Homo sapiens
  misc_RNA (1)...(19): siRNA sense strand
acucaaacuguuggagaaa

SEQ ID NO: 2403431 - RNA, 19 nt, Homo sapiens
  misc_RNA (1)...(19): siRNA sense strand
aagaaaugugcacgugaaa

SEQ ID NO: 2403432 - RNA, 19 nt, Homo sapiens
  misc_RNA (1)...(19): siRNA sense strand
gcguaugcaaauugaugaa

SEQ ID NO: 2403433 - RNA, 19 nt, Homo sapiens
  misc_RNA (1)...(19): siRNA sense strand
cuguagagagaaaguauau

SEQ ID NO: 2403434 - RNA, 19 nt, Homo sapiens
  misc_RNA (1)...(19): siRNA sense strand
aaugaaacugagagaacau

SEQ ID NO: 2403435 - RNA, 19 nt, Homo sapiens
  misc_RNA (1)...(19): siRNA sense strand
aaguuagcaaugauggaaa

SEQ ID NO: 2403436 - RNA, 19 nt, Homo sapiens
  misc_RNA (1)...(19): siRNA sense strand
agcaaagcuaagaaugaaa

SEQ ID NO: 2403437 - RNA, 19 nt, Homo sapiens
  misc_RNA (1)...(19): siRNA sense strand
auagcaagcagguaggauu

SEQ ID NO: 2403438 - RNA, 19 nt, Homo sapiens
  misc_RNA (1)...(19): siRNA sense strand
auucagaccaacacguuaa

SEQ ID NO: 2403439 - RNA, 19 nt, Homo sapiens
  misc_RNA (1)...(19): siRNA sense strand
cuacaagaaaaguuagcaa

SEQ ID NO: 2403440 - RNA, 19 nt, Homo sapiens
  misc_RNA (1)...(19): siRNA sense strand
uagacgaagcaaaggacua

SEQ ID NO: 2403441 - RNA, 19 nt, Homo sapiens
  misc_RNA (1)...(19): siRNA sense strand
augaauagcaagagaaggu

SEQ ID NO: 2403442 - RNA, 19 nt, Homo sapiens
  misc_RNA (1)...(19): siRNA sense strand
cgggaugagcugaauguca

SEQ ID NO: 2403443 - RNA, 19 nt, Homo sapiens
  misc_RNA (1)...(19): siRNA sense strand
cagaagaguuccuggcccu

SEQ ID NO: 2403444 - RNA, 19 nt, Homo sapiens
  misc_RNA (1)...(19): siRNA sense strand
gggagcaugaauagcaaga

SEQ ID NO: 2403445 - RNA, 19 nt, Homo sapiens
  misc_RNA (1)...(19): siRNA sense strand
aggauaugacggcaagcua

SEQ ID NO: 2403446 - RNA, 19 nt, Homo sapiens
  misc_RNA (1)...(19): siRNA sense strand
ccuuggaagacgugcuuga

SEQ ID NO: 2403447 - RNA, 19 nt, Homo sapiens
  misc_RNA (1)...(19): siRNA sense strand
ggaugagcugaaugucaaa

SEQ ID NO: 2403448 - RNA, 19 nt, Homo sapiens
  misc_RNA (1)...(19): siRNA sense strand
gagacagacacauggacca

SEQ ID NO: 2403449 - RNA, 19 nt, Homo sapiens
  misc_RNA (1)...(19): siRNA sense strand
cccugaaugugguggaagu

SEQ ID NO: 2403450 - RNA, 19 nt, Homo sapiens
  misc_RNA (1)...(19): siRNA sense strand
cagacagaauacagcagga

SEQ ID NO: 2403451 - RNA, 19 nt, Homo sapiens
  misc_RNA (1)...(19): siRNA sense strand
gcacaggacuucagggcuu

SEQ ID NO: 2403452 - RNA, 19 nt, Homo sapiens
  misc_RNA (1)...(19): siRNA sense strand
ccuucaugguggacaacaa

SEQ ID NO: 2403453 - RNA, 19 nt, Homo sapiens
  misc_RNA (1)...(19): siRNA sense strand
gugccuucaugguggacaa

SEQ ID NO: 2403454 - RNA, 19 nt, Homo sapiens
  misc_RNA (1)...(19): siRNA sense strand
gcaaggaagaugcugccaa

SEQ ID NO: 2403455 - RNA, 19 nt, Homo sapiens
  misc_RNA (1)...(19): siRNA sense strand
gcaccagcagacagagaga

SEQ ID NO: 2403456 - RNA, 19 nt, Homo sapiens
  misc_RNA (1)...(19): siRNA sense strand
gaacauaccuacagggagc

SEQ ID NO: 2403457 - RNA, 19 nt, Homo sapiens
  misc_RNA (1)...(19): siRNA sense strand
gcauaaguuugggugggaa

SEQ ID NO: 2403458 - RNA, 19 nt, Homo sapiens
  misc_RNA (1)...(19): siRNA sense strand
ccgaggagauggagcugua

SEQ ID NO: 2403459 - RNA, 19 nt, Homo sapiens
  misc_RNA (1)...(19): siRNA sense strand
gacccgagggagaaacaaa

SEQ ID NO: 2403460 - RNA, 19 nt, Homo sapiens
  misc_RNA (1)...(19): siRNA sense strand
uugguaaagcugaaagaaa

SEQ ID NO: 2403461 - RNA, 19 nt, Homo sapiens
  misc_RNA (1)...(19): siRNA sense strand
uugaaagacuuaaaggaga

SEQ ID NO: 2403462 - RNA, 19 nt, Homo sapiens
  misc_RNA (1)...(19): siRNA sense strand
aagugaaggagaaggaaca

SEQ ID NO: 2403463 - RNA, 19 nt, Homo sapiens
  misc_RNA (1)...(19): siRNA sense strand
agcuacaagugaaggagaa

SEQ ID NO: 2403464 - RNA, 19 nt, Homo sapiens
  misc_RNA (1)...(19): siRNA sense strand
gagaacagauugaggcuuc

SEQ ID NO: 2403465 - RNA, 19 nt, Homo sapiens
  misc_RNA (1)...(19): siRNA sense strand
agagacuggaugaggaaau

SEQ ID NO: 2403466 - RNA, 19 nt, Homo sapiens
  misc_RNA (1)...(19): siRNA sense strand
gguaaagcugaaagaaaau

SEQ ID NO: 2403467 - RNA, 19 nt, Homo sapiens
  misc_RNA (1)...(19): siRNA sense strand
gcuuuaagaaauaggguuc

SEQ ID NO: 2403468 - RNA, 19 nt, Homo sapiens
  misc_RNA (1)...(19): siRNA sense strand
uggugaaaugguugaaaga

SEQ ID NO: 2403469 - RNA, 19 nt, Homo sapiens
  misc_RNA (1)...(19): siRNA sense strand
gaagagauucaaaggcuca

SEQ ID NO: 2403470 - RNA, 19 nt, Homo sapiens
  misc_RNA (1)...(19): siRNA sense strand
ccuacagaaagcaaaggaa

SEQ ID NO: 2403471 - RNA, 19 nt, Homo sapiens
  misc_RNA (1)...(19): siRNA sense strand
uacagaaagcaaaggaaca

SEQ ID NO: 2403472 - RNA, 19 nt, Homo sapiens
  misc_RNA (1)...(19): siRNA sense strand
ugaaagacuuaaaggagag

SEQ ID NO: 2403473 - RNA, 19 nt, Homo sapiens
  misc_RNA (1)...(19): siRNA sense strand
aagaaauaggguucgauca

SEQ ID NO: 2403474 - RNA, 19 nt, Homo sapiens
  misc_RNA (1)...(19): siRNA sense strand
cuacagaaagcaaaggaac

SEQ ID NO: 2403475 - RNA, 19 nt, Homo sapiens
  misc_RNA (1)...(19): siRNA sense strand
cuuccauguuagagccuga

SEQ ID NO: 2403476 - RNA, 19 nt, Homo sapiens
  misc_RNA (1)...(19): siRNA sense strand
aguuggucauggauggaaa

SEQ ID NO: 2403477 - RNA, 19 nt, Homo sapiens
  misc_RNA (1)...(19): siRNA sense strand
aggagaacacagauggaga

SEQ ID NO: 2403478 - RNA, 19 nt, Homo sapiens
  misc_RNA (1)...(19): siRNA sense strand
aggcaucaggaaaggagaa

SEQ ID NO: 2403479 - RNA, 19 nt, Homo sapiens
  misc_RNA (1)...(19): siRNA sense strand
agacagagaugggaggcau

SEQ ID NO: 2403480 - RNA, 19 nt, Homo sapiens
  misc_RNA (1)...(19): siRNA sense strand
ucccaagucauguggaaau

SEQ ID NO: 2403481 - RNA, 19 nt, Homo sapiens
  misc_RNA (1)...(19): siRNA sense strand
uggaaugaagcaacagaga

SEQ ID NO: 2403482 - RNA, 19 nt, Homo sapiens
  misc_RNA (1)...(19): siRNA sense strand
guguaauguaugugggaaa

SEQ ID NO: 2403483 - RNA, 19 nt, Homo sapiens
  misc_RNA (1)...(19): siRNA sense strand
guguaaagaguguggcaaa

SEQ ID NO: 2403484 - RNA, 19 nt, Homo sapiens
  misc_RNA (1)...(19): siRNA sense strand
aauucauacuggugagaaa

SEQ ID NO: 2403485 - RNA, 19 nt, Homo sapiens
  misc_RNA (1)...(19): siRNA sense strand
auguaaugaaugugggaaa

SEQ ID NO: 2403486 - RNA, 19 nt, Homo sapiens
  misc_RNA (1)...(19): siRNA sense strand
gcgaaaucacacuggagaa

SEQ ID NO: 2403487 - RNA, 19 nt, Homo sapiens
  misc_RNA (1)...(19): siRNA sense strand
ucaaagaacucauacguga

SEQ ID NO: 2403488 - RNA, 19 nt, Homo sapiens
  misc_RNA (1)...(19): siRNA sense strand
ggaaaggcauucagccaga

SEQ ID NO: 2403489 - RNA, 19 nt, Homo sapiens
  misc_RNA (1)...(19): siRNA sense strand
guacaaaccuuacacgaca

SEQ ID NO: 2403490 - RNA, 19 nt, Homo sapiens
  misc_RNA (1)...(19): siRNA sense strand
guguaaugaaugcggaaaa

SEQ ID NO: 2403491 - RNA, 19 nt, Homo sapiens
  misc_RNA (1)...(19): siRNA sense strand
guguaugguguguggaaaa

SEQ ID NO: 2403492 - RNA, 19 nt, Homo sapiens
  misc_RNA (1)...(19): siRNA sense strand
caaugaauguggaaaggca

SEQ ID NO: 2403493 - RNA, 19 nt, Homo sapiens
  misc_RNA (1)...(19): siRNA sense strand
cgggaaauccuuuagccaa

SEQ ID NO: 2403494 - RNA, 19 nt, Homo sapiens
  misc_RNA (1)...(19): siRNA sense strand
gaaugugaucaguguggaa

SEQ ID NO: 2403495 - RNA, 19 nt, Homo sapiens
  misc_RNA (1)...(19): siRNA sense strand
auguaacaaaugcgggaaa

SEQ ID NO: 2403496 - RNA, 19 nt, Homo sapiens
  misc_RNA (1)...(19): siRNA sense strand
cuguaauucacauggagaa

SEQ ID NO: 2403497 - RNA, 19 nt, Homo sapiens
  misc_RNA (1)...(19): siRNA sense strand
aacucauacaggagagaaa

SEQ ID NO: 2403498 - RNA, 19 nt, Homo sapiens
  misc_RNA (1)...(19): siRNA sense strand
gaauguaaccagugcagca

SEQ ID NO: 2403499 - RNA, 19 nt, Homo sapiens
  misc_RNA (1)...(19): siRNA sense strand
guggaaaagccuucauuaa

SEQ ID NO: 2403500 - RNA, 19 nt, Homo sapiens
  misc_RNA (1)...(19): siRNA sense strand
ccuuaugaguguauggugu

SEQ ID NO: 2403501 - RNA, 19 nt, Homo sapiens
  misc_RNA (1)...(19): siRNA sense strand
gugcaaugaauguggaaag

SEQ ID NO: 2403502 - RNA, 19 nt, Homo sapiens
  misc_RNA (1)...(19): siRNA sense strand
uuauagaacaucagagacu

SEQ ID NO: 2403503 - RNA, 19 nt, Homo sapiens
  misc_RNA (1)...(19): siRNA sense strand
gaguguaugguguguggaa

SEQ ID NO: 2403504 - RNA, 19 nt, Homo sapiens
  misc_RNA (1)...(19): siRNA sense strand
guggcaaagccuuccauaa

SEQ ID NO: 2403505 - RNA, 19 nt, Homo sapiens
  misc_RNA (1)...(19): siRNA sense strand
guggaaaggcauucagcca

SEQ ID NO: 2403506 - RNA, 19 nt, Homo sapiens
  misc_RNA (1)...(19): siRNA sense strand
gcauucagccagagugcuu

SEQ ID NO: 2403507 - RNA, 19 nt, Homo sapiens
  misc_RNA (1)...(19): siRNA sense strand
gauucauacuggggagaaa

SEQ ID NO: 2403508 - RNA, 19 nt, Homo sapiens
  misc_RNA (1)...(19): siRNA sense strand
ucuuauagaacaucagaga

SEQ ID NO: 2403509 - RNA, 19 nt, Homo sapiens
  misc_RNA (1)...(19): siRNA sense strand
gccuuuagucagagcauga

SEQ ID NO: 2403510 - RNA, 19 nt, Homo sapiens
  misc_RNA (1)...(19): siRNA sense strand
aagaauguuuguaggaaag

SEQ ID NO: 2403511 - RNA, 19 nt, Homo sapiens
  misc_RNA (1)...(19): siRNA sense strand
caguguaaugaaugcggaa

SEQ ID NO: 2403512 - RNA, 19 nt, Homo sapiens
  misc_RNA (1)...(19): siRNA sense strand
gccuuuaguaagagcucaa

SEQ ID NO: 2403513 - RNA, 19 nt, Homo sapiens
  misc_RNA (1)...(19): siRNA sense strand
aacucacaccggagagaaa

SEQ ID NO: 2403514 - RNA, 19 nt, Homo sapiens
  misc_RNA (1)...(19): siRNA sense strand
uguaacaaaugcgggaaau

SEQ ID NO: 2403515 - RNA, 19 nt, Homo sapiens
  misc_RNA (1)...(19): siRNA sense strand
acuucauucuggaguaaaa

SEQ ID NO: 2403516 - RNA, 19 nt, Homo sapiens
  misc_RNA (1)...(19): siRNA sense strand
uggaaaagccuucagucaa

SEQ ID NO: 2403517 - RNA, 19 nt, Homo sapiens
  misc_RNA (1)...(19): siRNA sense strand
agagaaaccuuaugagugc

SEQ ID NO: 2403518 - RNA, 19 nt, Homo sapiens
  misc_RNA (1)...(19): siRNA sense strand
gagcucaacucuuacccua

SEQ ID NO: 2403519 - RNA, 19 nt, Homo sapiens
  misc_RNA (1)...(19): siRNA sense strand
guuuauuggaggugagaaa

SEQ ID NO: 2403520 - RNA, 19 nt, Homo sapiens
  misc_RNA (1)...(19): siRNA sense strand
augcagugauugugagaaa

SEQ ID NO: 2403521 - RNA, 19 nt, Homo sapiens
  misc_RNA (1)...(19): siRNA sense strand
gugcaaugaauguggaaaa

SEQ ID NO: 2403522 - RNA, 19 nt, Homo sapiens
  misc_RNA (1)...(19): siRNA sense strand
ccacaaagucaguacucaa

SEQ ID NO: 2403523 - RNA, 19 nt, Homo sapiens
  misc_RNA (1)...(19): siRNA sense strand
augcaaugaaugugguaaa

SEQ ID NO: 2403524 - RNA, 19 nt, Homo sapiens
  misc_RNA (1)...(19): siRNA sense strand
augcaaugaaugugguaaa

SEQ ID NO: 2403525 - RNA, 19 nt, Homo sapiens
  misc_RNA (1)...(19): siRNA sense strand
gguaaagccuucagccaga

SEQ ID NO: 2403526 - RNA, 19 nt, Homo sapiens
  misc_RNA (1)...(19): siRNA sense strand
augugaugguggagaacua

SEQ ID NO: 2403527 - RNA, 19 nt, Homo sapiens
  misc_RNA (1)...(19): siRNA sense strand
aacucauaguggagagaaa

SEQ ID NO: 2403528 - RNA, 19 nt, Homo sapiens
  misc_RNA (1)...(19): siRNA sense strand
aacucauacuggagagaaa

SEQ ID NO: 2403529 - RNA, 19 nt, Homo sapiens
  misc_RNA (1)...(19): siRNA sense strand
cuguauacccaaugaauau

SEQ ID NO: 2403530 - RNA, 19 nt, Homo sapiens
  misc_RNA (1)...(19): siRNA sense strand
ccuuaugugugcaaagaau

SEQ ID NO: 2403531 - RNA, 19 nt, Homo sapiens
  misc_RNA (1)...(19): siRNA sense strand
gugcagugaauguggaaaa

SEQ ID NO: 2403532 - RNA, 19 nt, Homo sapiens
  misc_RNA (1)...(19): siRNA sense strand
agagaaauggguagaauca

SEQ ID NO: 2403533 - RNA, 19 nt, Homo sapiens
  misc_RNA (1)...(19): siRNA sense strand
ggucaaugugagaaauuau

SEQ ID NO: 2403534 - RNA, 19 nt, Homo sapiens
  misc_RNA (1)...(19): siRNA sense strand
gcgaacucauacaggagaa

SEQ ID NO: 2403535 - RNA, 19 nt, Homo sapiens
  misc_RNA (1)...(19): siRNA sense strand
cccuauaugugcagugaau

SEQ ID NO: 2403536 - RNA, 19 nt, Homo sapiens
  misc_RNA (1)...(19): siRNA sense strand
gcuuuaccgugaagagcaa

SEQ ID NO: 2403537 - RNA, 19 nt, Homo sapiens
  misc_RNA (1)...(19): siRNA sense strand
aggauguggcuguggaauu

SEQ ID NO: 2403538 - RNA, 19 nt, Homo sapiens
  misc_RNA (1)...(19): siRNA sense strand
aauucacacaggagagaaa

SEQ ID NO: 2403539 - RNA, 19 nt, Homo sapiens
  misc_RNA (1)...(19): siRNA sense strand
ggguagaaucagucaaguu

SEQ ID NO: 2403540 - RNA, 19 nt, Homo sapiens
  misc_RNA (1)...(19): siRNA sense strand
cuauauaugcagugaaugu

SEQ ID NO: 2403541 - RNA, 19 nt, Homo sapiens
  misc_RNA (1)...(19): siRNA sense strand
aagagaagacauggaauaa

SEQ ID NO: 2403542 - RNA, 19 nt, Homo sapiens
  misc_RNA (1)...(19): siRNA sense strand
cccuauauaugcagugaau

SEQ ID NO: 2403543 - RNA, 19 nt, Homo sapiens
  misc_RNA (1)...(19): siRNA sense strand
gagagaugucauacaggaa

SEQ ID NO: 2403544 - RNA, 19 nt, Homo sapiens
  misc_RNA (1)...(19): siRNA sense strand
gcaucagaggacucagaaa

SEQ ID NO: 2403545 - RNA, 19 nt, Homo sapiens
  misc_RNA (1)...(19): siRNA sense strand
aagcaugaacguacgcaua

SEQ ID NO: 2403546 - RNA, 19 nt, Homo sapiens
  misc_RNA (1)...(19): siRNA sense strand
caucagaggacucagaaaa

SEQ ID NO: 2403547 - RNA, 19 nt, Homo sapiens
  misc_RNA (1)...(19): siRNA sense strand
aacucauacaggagagaaa

SEQ ID NO: 2403548 - RNA, 19 nt, Homo sapiens
  misc_RNA (1)...(19): siRNA sense strand
ccucauuacccaucagaga

SEQ ID NO: 2403549 - RNA, 19 nt, Homo sapiens
  misc_RNA (1)...(19): siRNA sense strand
ccaugagaacauuuguaua

SEQ ID NO: 2403550 - RNA, 19 nt, Homo sapiens
  misc_RNA (1)...(19): siRNA sense strand
guauguaccgagugcggaa

SEQ ID NO: 2403551 - RNA, 19 nt, Homo sapiens
  misc_RNA (1)...(19): siRNA sense strand
aaguggucaaugugagaaa

SEQ ID NO: 2403552 - RNA, 19 nt, Homo sapiens
  misc_RNA (1)...(19): siRNA sense strand
augcagugaauguggaaaa

SEQ ID NO: 2403553 - RNA, 19 nt, Homo sapiens
  misc_RNA (1)...(19): siRNA sense strand
aacccauacagaagagaaa

SEQ ID NO: 2403554 - RNA, 19 nt, Homo sapiens
  misc_RNA (1)...(19): siRNA sense strand
guaucaaacuagcaaacca

SEQ ID NO: 2403555 - RNA, 19 nt, Homo sapiens
  misc_RNA (1)...(19): siRNA sense strand
acaagagaauccuggaagu

SEQ ID NO: 2403556 - RNA, 19 nt, Homo sapiens
  misc_RNA (1)...(19): siRNA sense strand
gagaaauccuauaugugca

SEQ ID NO: 2403557 - RNA, 19 nt, Homo sapiens
  misc_RNA (1)...(19): siRNA sense strand
ggaaaauccuauucacaca

SEQ ID NO: 2403558 - RNA, 19 nt, Homo sapiens
  misc_RNA (1)...(19): siRNA sense strand
cugaagagcgugcagcaau

SEQ ID NO: 2403559 - RNA, 19 nt, Homo sapiens
  misc_RNA (1)...(19): siRNA sense strand
cuauaugugcagugagugu

SEQ ID NO: 2403560 - RNA, 19 nt, Homo sapiens
  misc_RNA (1)...(19): siRNA sense strand
agagaagacauggaauaaa

SEQ ID NO: 2403561 - RNA, 19 nt, Homo sapiens
  misc_RNA (1)...(19): siRNA sense strand
ucucauuacacaucaacaa

SEQ ID NO: 2403562 - RNA, 19 nt, Homo sapiens
  misc_RNA (1)...(19): siRNA sense strand
ucuuacauaugcagcgaau

SEQ ID NO: 2403563 - RNA, 19 nt, Homo sapiens
  misc_RNA (1)...(19): siRNA sense strand
gcgcuaucuuguuguacau

SEQ ID NO: 2403564 - RNA, 19 nt, Homo sapiens
  misc_RNA (1)...(19): siRNA sense strand
cuauaugugcagugaaugu

SEQ ID NO: 2403565 - RNA, 19 nt, Homo sapiens
  misc_RNA (1)...(19): siRNA sense strand
agagaugucauacaggaaa

SEQ ID NO: 2403566 - RNA, 19 nt, Homo sapiens
  misc_RNA (1)...(19): siRNA sense strand
agaagaaccuguaccggga

SEQ ID NO: 2403567 - RNA, 19 nt, Homo sapiens
  misc_RNA (1)...(19): siRNA sense strand
acacaagagaaauggguag

SEQ ID NO: 2403568 - RNA, 19 nt, Homo sapiens
  misc_RNA (1)...(19): siRNA sense strand
ucuaauugcucaucagcga

SEQ ID NO: 2403569 - RNA, 19 nt, Homo sapiens
  misc_RNA (1)...(19): siRNA sense strand
auacagaagagaaauccua

SEQ ID NO: 2403570 - RNA, 19 nt, Homo sapiens
  misc_RNA (1)...(19): siRNA sense strand
acagaagagaaauccuaua

SEQ ID NO: 2403571 - RNA, 19 nt, Homo sapiens
  misc_RNA (1)...(19): siRNA sense strand
agggugaaacugagaguca

SEQ ID NO: 2403572 - RNA, 19 nt, Homo sapiens
  misc_RNA (1)...(19): siRNA sense strand
gggucuugaggcuggcuua

SEQ ID NO: 2403573 - RNA, 19 nt, Homo sapiens
  misc_RNA (1)...(19): siRNA sense strand
guacagacaaacagcgacu

SEQ ID NO: 2403574 - RNA, 19 nt, Homo sapiens
  misc_RNA (1)...(19): siRNA sense strand
cuggauuugugaagagcca

SEQ ID NO: 2403575 - RNA, 19 nt, Homo sapiens
  misc_RNA (1)...(19): siRNA sense strand
ccacaugaaaucaagagga

SEQ ID NO: 2403576 - RNA, 19 nt, Homo sapiens
  misc_RNA (1)...(19): siRNA sense strand
ugucaauuucugugagaga

SEQ ID NO: 2403577 - RNA, 19 nt, Homo sapiens
  misc_RNA (1)...(19): siRNA sense strand
uauagagauuccaaggaga

SEQ ID NO: 2403578 - RNA, 19 nt, Homo sapiens
  misc_RNA (1)...(19): siRNA sense strand
gcaacagccugaauggagu

SEQ ID NO: 2403579 - RNA, 19 nt, Homo sapiens
  misc_RNA (1)...(19): siRNA sense strand
acaucuaggcccagucgaa

SEQ ID NO: 2403580 - RNA, 19 nt, Homo sapiens
  misc_RNA (1)...(19): siRNA sense strand
aggcccagucgaagaauau

SEQ ID NO: 2403581 - RNA, 19 nt, Homo sapiens
  misc_RNA (1)...(19): siRNA sense strand
cugugagagaacaaagauu

SEQ ID NO: 2403582 - RNA, 19 nt, Homo sapiens
  misc_RNA (1)...(19): siRNA sense strand
cugcuauauacuccaaaua

SEQ ID NO: 2403583 - RNA, 19 nt, Homo sapiens
  misc_RNA (1)...(19): siRNA sense strand
ggauagaggaacagggaga

SEQ ID NO: 2403584 - RNA, 19 nt, Homo sapiens
  misc_RNA (1)...(19): siRNA sense strand
cugaaaggccagagcaucu

SEQ ID NO: 2403585 - RNA, 19 nt, Homo sapiens
  misc_RNA (1)...(19): siRNA sense strand
ggggugggauagaggaaca

SEQ ID NO: 2403586 - RNA, 19 nt, Homo sapiens
  misc_RNA (1)...(19): siRNA sense strand
cagcagacuuugugcgcau

SEQ ID NO: 2403587 - RNA, 19 nt, Homo sapiens
  misc_RNA (1)...(19): siRNA sense strand
acuucaagguguugcuuau

SEQ ID NO: 2403588 - RNA, 19 nt, Homo sapiens
  misc_RNA (1)...(19): siRNA sense strand
ucgcgauaucaaaggaaau

SEQ ID NO: 2403589 - RNA, 19 nt, Homo sapiens
  misc_RNA (1)...(19): siRNA sense strand
ugagauggcuacagggaag

SEQ ID NO: 2403590 - RNA, 19 nt, Homo sapiens
  misc_RNA (1)...(19): siRNA sense strand
cuggaauaauaaagcugau

SEQ ID NO: 2403591 - RNA, 19 nt, Homo sapiens
  misc_RNA (1)...(19): siRNA sense strand
uuguugaggcagugagaua

SEQ ID NO: 2403592 - RNA, 19 nt, Homo sapiens
  misc_RNA (1)...(19): siRNA sense strand
aaucacagauccaggccaa

SEQ ID NO: 2403593 - RNA, 19 nt, Homo sapiens
  misc_RNA (1)...(19): siRNA sense strand
agaauuaaucacagaucca

SEQ ID NO: 2403594 - RNA, 19 nt, Homo sapiens
  misc_RNA (1)...(19): siRNA sense strand
guuacaagagcaagaaacu

SEQ ID NO: 2403595 - RNA, 19 nt, Homo sapiens
  misc_RNA (1)...(19): siRNA sense strand
gauacuuuguugaggcagu

SEQ ID NO: 2403596 - RNA, 19 nt, Homo sapiens
  misc_RNA (1)...(19): siRNA sense strand
acgcaaugauagagaacca

SEQ ID NO: 2403597 - RNA, 19 nt, Homo sapiens
  misc_RNA (1)...(19): siRNA sense strand
uugaaggaaauguggauau

SEQ ID NO: 2403598 - RNA, 19 nt, Homo sapiens
  misc_RNA (1)...(19): siRNA sense strand
gugugaagaagcuggccaa

SEQ ID NO: 2403599 - RNA, 19 nt, Homo sapiens
  misc_RNA (1)...(19): siRNA sense strand
ccugggagcagaaggaaaa

SEQ ID NO: 2403600 - RNA, 19 nt, Homo sapiens
  misc_RNA (1)...(19): siRNA sense strand
cagaacauuugauggcaga

SEQ ID NO: 2403601 - RNA, 19 nt, Homo sapiens
  misc_RNA (1)...(19): siRNA sense strand
uuuuaaaacugcagcaaca

SEQ ID NO: 2403602 - RNA, 19 nt, Homo sapiens
  misc_RNA (1)...(19): siRNA sense strand
agaugaaggacagggaaau

SEQ ID NO: 2403603 - RNA, 19 nt, Homo sapiens
  misc_RNA (1)...(19): siRNA sense strand
gaaauguggauauuggaga

SEQ ID NO: 2403604 - RNA, 19 nt, Homo sapiens
  misc_RNA (1)...(19): siRNA sense strand
agguagaaauugacaagcu

SEQ ID NO: 2403605 - RNA, 19 nt, Homo sapiens
  misc_RNA (1)...(19): siRNA sense strand
cauuauaagcagauagcac

SEQ ID NO: 2403606 - RNA, 19 nt, Homo sapiens
  misc_RNA (1)...(19): siRNA sense strand
aggaagcauuauaagcaga

SEQ ID NO: 2403607 - RNA, 19 nt, Homo sapiens
  misc_RNA (1)...(19): siRNA sense strand
uuauaagcagauagcacaa

SEQ ID NO: 2403608 - RNA, 19 nt, Homo sapiens
  misc_RNA (1)...(19): siRNA sense strand
gcacuaagccugagaggaa

SEQ ID NO: 2403609 - RNA, 19 nt, Homo sapiens
  misc_RNA (1)...(19): siRNA sense strand
gcucaggucuggugggcua

SEQ ID NO: 2403610 - RNA, 19 nt, Homo sapiens
  misc_RNA (1)...(19): siRNA sense strand
gagcaagcuucaagaaagu

SEQ ID NO: 2403611 - RNA, 19 nt, Homo sapiens
  misc_RNA (1)...(19): siRNA sense strand
ccgccaagcagcugcacaa

SEQ ID NO: 2403612 - RNA, 19 nt, Homo sapiens
  misc_RNA (1)...(19): siRNA sense strand
gagagcaagcuucaagaaa

SEQ ID NO: 2403613 - RNA, 19 nt, Homo sapiens
  misc_RNA (1)...(19): siRNA sense strand
cggcgaauacagugaagau

SEQ ID NO: 2403614 - RNA, 19 nt, Homo sapiens
  misc_RNA (1)...(19): siRNA sense strand
agaacauggagaaggaacu

SEQ ID NO: 2403615 - RNA, 19 nt, Homo sapiens
  misc_RNA (1)...(19): siRNA sense strand
caucacugcuucaggccau

SEQ ID NO: 2403616 - RNA, 19 nt, Homo sapiens
  misc_RNA (1)...(19): siRNA sense strand
cagugugucaagagaugua

SEQ ID NO: 2403617 - RNA, 19 nt, Homo sapiens
  misc_RNA (1)...(19): siRNA sense strand
acaaggaagaggugaccca

SEQ ID NO: 2403618 - RNA, 19 nt, Homo sapiens
  misc_RNA (1)...(19): siRNA sense strand
uggaugugguccugggcga

SEQ ID NO: 2403619 - RNA, 19 nt, Homo sapiens
  misc_RNA (1)...(19): siRNA sense strand
aagagagacuggagagcaa

SEQ ID NO: 2403620 - RNA, 19 nt, Homo sapiens
  misc_RNA (1)...(19): siRNA sense strand
gagaagaguuugaaggcca

SEQ ID NO: 2403621 - RNA, 19 nt, Homo sapiens
  misc_RNA (1)...(19): siRNA sense strand
auggagagcuacaaggaaa

SEQ ID NO: 2403622 - RNA, 19 nt, Homo sapiens
  misc_RNA (1)...(19): siRNA sense strand
caaaagaaaaugaggagaa

SEQ ID NO: 2403623 - RNA, 19 nt, Homo sapiens
  misc_RNA (1)...(19): siRNA sense strand
gcaaaagcuagcagagaaa

SEQ ID NO: 2403624 - RNA, 19 nt, Homo sapiens
  misc_RNA (1)...(19): siRNA sense strand
cccacaauuugcagagaaa

SEQ ID NO: 2403625 - RNA, 19 nt, Homo sapiens
  misc_RNA (1)...(19): siRNA sense strand
cccagaaagcagagaauau

SEQ ID NO: 2403626 - RNA, 19 nt, Homo sapiens
  misc_RNA (1)...(19): siRNA sense strand
agaagaagguggagaggcu

SEQ ID NO: 2403627 - RNA, 19 nt, Homo sapiens
  misc_RNA (1)...(19): siRNA sense strand
gagaauaaagaaagggcca

SEQ ID NO: 2403628 - RNA, 19 nt, Homo sapiens
  misc_RNA (1)...(19): siRNA sense strand
augcagucauugagaacaa

SEQ ID NO: 2403629 - RNA, 19 nt, Homo sapiens
  misc_RNA (1)...(19): siRNA sense strand
gaacaugaggcuaaggaga

SEQ ID NO: 2403630 - RNA, 19 nt, Homo sapiens
  misc_RNA (1)...(19): siRNA sense strand
agaugugacuacugggcaa

SEQ ID NO: 2403631 - RNA, 19 nt, Homo sapiens
  misc_RNA (1)...(19): siRNA sense strand
gcagagaauauguuggaga

SEQ ID NO: 2403632 - RNA, 19 nt, Homo sapiens
  misc_RNA (1)...(19): siRNA sense strand
ugacacaccuggaggcaga

SEQ ID NO: 2403633 - RNA, 19 nt, Homo sapiens
  misc_RNA (1)...(19): siRNA sense strand
uuggagaagauucgagaaa

SEQ ID NO: 2403634 - RNA, 19 nt, Homo sapiens
  misc_RNA (1)...(19): siRNA sense strand
auaaagaaagggccagaaa

SEQ ID NO: 2403635 - RNA, 19 nt, Homo sapiens
  misc_RNA (1)...(19): siRNA sense strand
cuccuguacugaagagaaa

SEQ ID NO: 2403636 - RNA, 19 nt, Homo sapiens
  misc_RNA (1)...(19): siRNA sense strand
cuggagaagaugaaggaga

SEQ ID NO: 2403637 - RNA, 19 nt, Homo sapiens
  misc_RNA (1)...(19): siRNA sense strand
agcuaaagacacagaaaga

SEQ ID NO: 2403638 - RNA, 19 nt, Homo sapiens
  misc_RNA (1)...(19): siRNA sense strand
ggagaagaugaaggagaaa

SEQ ID NO: 2403639 - RNA, 19 nt, Homo sapiens
  misc_RNA (1)...(19): siRNA sense strand
agaaagagaagcugaacca

SEQ ID NO: 2403640 - RNA, 19 nt, Homo sapiens
  misc_RNA (1)...(19): siRNA sense strand
gaagcagaaaagagagaaa

SEQ ID NO: 2403641 - RNA, 19 nt, Homo sapiens
  misc_RNA (1)...(19): siRNA sense strand
gagaaaagcagcuggcaga

SEQ ID NO: 2403642 - RNA, 19 nt, Homo sapiens
  misc_RNA (1)...(19): siRNA sense strand
aggagaaccaggaauuaaa

SEQ ID NO: 2403643 - RNA, 19 nt, Homo sapiens
  misc_RNA (1)...(19): siRNA sense strand
ucaaaaugcucgaagugaa

SEQ ID NO: 2403644 - RNA, 19 nt, Homo sapiens
  misc_RNA (1)...(19): siRNA sense strand
acuggagagcaaagaauua

SEQ ID NO: 2403645 - RNA, 19 nt, Homo sapiens
  misc_RNA (1)...(19): siRNA sense strand
ccauugaagaucuaaacaa

SEQ ID NO: 2403646 - RNA, 19 nt, Homo sapiens
  misc_RNA (1)...(19): siRNA sense strand
gaacagaaaucacagcuca

SEQ ID NO: 2403647 - RNA, 19 nt, Homo sapiens
  misc_RNA (1)...(19): siRNA sense strand
agacacagaaagagagacu

SEQ ID NO: 2403648 - RNA, 19 nt, Homo sapiens
  misc_RNA (1)...(19): siRNA sense strand
aaacuuuggaacagacuaa

SEQ ID NO: 2403649 - RNA, 19 nt, Homo sapiens
  misc_RNA (1)...(19): siRNA sense strand
accaaugaacugaagauua

SEQ ID NO: 2403650 - RNA, 19 nt, Homo sapiens
  misc_RNA (1)...(19): siRNA sense strand
aguuaaaccacuaucggaa

SEQ ID NO: 2403651 - RNA, 19 nt, Homo sapiens
  misc_RNA (1)...(19): siRNA sense strand
acaccgagcucaaagccaa

SEQ ID NO: 2403652 - RNA, 19 nt, Homo sapiens
  misc_RNA (1)...(19): siRNA sense strand
gcugaaauggagagcuaca

SEQ ID NO: 2403653 - RNA, 19 nt, Homo sapiens
  misc_RNA (1)...(19): siRNA sense strand
aggcuaaggagaauaaaga

SEQ ID NO: 2403654 - RNA, 19 nt, Homo sapiens
  misc_RNA (1)...(19): siRNA sense strand
accaggaauuaaagaagaa

SEQ ID NO: 2403655 - RNA, 19 nt, Homo sapiens
  misc_RNA (1)...(19): siRNA sense strand
aagagaaagagaagcugaa

SEQ ID NO: 2403656 - RNA, 19 nt, Homo sapiens
  misc_RNA (1)...(19): siRNA sense strand
cugaguuggagaagaguuu

SEQ ID NO: 2403657 - RNA, 19 nt, Homo sapiens
  misc_RNA (1)...(19): siRNA sense strand
ccuuggugguugagaggga

SEQ ID NO: 2403658 - RNA, 19 nt, Homo sapiens
  misc_RNA (1)...(19): siRNA sense strand
aggaaaacaaugccagaaa

SEQ ID NO: 2403659 - RNA, 19 nt, Homo sapiens
  misc_RNA (1)...(19): siRNA sense strand
gaaaacaaugccagaaaau

SEQ ID NO: 2403660 - RNA, 19 nt, Homo sapiens
  misc_RNA (1)...(19): siRNA sense strand
agaaauggacagccgggaa

SEQ ID NO: 2403661 - RNA, 19 nt, Homo sapiens
  misc_RNA (1)...(19): siRNA sense strand
uucaaagaauugcaggaaa

SEQ ID NO: 2403662 - RNA, 19 nt, Homo sapiens
  misc_RNA (1)...(19): siRNA sense strand
gaagagaaagagaagcuga

SEQ ID NO: 2403663 - RNA, 19 nt, Homo sapiens
  misc_RNA (1)...(19): siRNA sense strand
agaauauguuggagacucu

SEQ ID NO: 2403664 - RNA, 19 nt, Homo sapiens
  misc_RNA (1)...(19): siRNA sense strand
ccaaacuggccgacaccaa

SEQ ID NO: 2403665 - RNA, 19 nt, Homo sapiens
  misc_RNA (1)...(19): siRNA sense strand
gucaagaacugaaagcuga

SEQ ID NO: 2403666 - RNA, 19 nt, Homo sapiens
  misc_RNA (1)...(19): siRNA sense strand
ccagaugagaggaaugaca

SEQ ID NO: 2403667 - RNA, 19 nt, Homo sapiens
  misc_RNA (1)...(19): siRNA sense strand
augaauucgugaaaggaca

SEQ ID NO: 2403668 - RNA, 19 nt, Homo sapiens
  misc_RNA (1)...(19): siRNA sense strand
gaauaaagaaagggccaga

SEQ ID NO: 2403669 - RNA, 19 nt, Homo sapiens
  misc_RNA (1)...(19): siRNA sense strand
cugaagagaaagagaagcu

SEQ ID NO: 2403670 - RNA, 19 nt, Homo sapiens
  misc_RNA (1)...(19): siRNA sense strand
aagugagccuccugaagaa

SEQ ID NO: 2403671 - RNA, 19 nt, Homo sapiens
  misc_RNA (1)...(19): siRNA sense strand
cugcaaucaaggagaacca

SEQ ID NO: 2403672 - RNA, 19 nt, Homo sapiens
  misc_RNA (1)...(19): siRNA sense strand
augaggagaauaagaaaca

SEQ ID NO: 2403673 - RNA, 19 nt, Homo sapiens
  misc_RNA (1)...(19): siRNA sense strand
gggccagaaacaugauaga

SEQ ID NO: 2403674 - RNA, 19 nt, Homo sapiens
  misc_RNA (1)...(19): siRNA sense strand
ccgaggaaacuuacgauca

SEQ ID NO: 2403675 - RNA, 19 nt, Homo sapiens
  misc_RNA (1)...(19): siRNA sense strand
cagaugagaggaaugacaa

SEQ ID NO: 2403676 - RNA, 19 nt, Homo sapiens
  misc_RNA (1)...(19): siRNA sense strand
cagaaagagagacuggaga

SEQ ID NO: 2403677 - RNA, 19 nt, Homo sapiens
  misc_RNA (1)...(19): siRNA sense strand
ccaucaggaacuugcagaa

SEQ ID NO: 2403678 - RNA, 19 nt, Homo sapiens
  misc_RNA (1)...(19): siRNA sense strand
gugaaaugaagacacuaaa

SEQ ID NO: 2403679 - RNA, 19 nt, Homo sapiens
  misc_RNA (1)...(19): siRNA sense strand
aacaugaggcuaaggagaa

SEQ ID NO: 2403680 - RNA, 19 nt, Homo sapiens
  misc_RNA (1)...(19): siRNA sense strand
uugcaggaaacaugaggaa

SEQ ID NO: 2403681 - RNA, 19 nt, Homo sapiens
  misc_RNA (1)...(19): siRNA sense strand
gcuuagagaccugcgcaaa

SEQ ID NO: 2403682 - RNA, 19 nt, Homo sapiens
  misc_RNA (1)...(19): siRNA sense strand
aggaaaugcucguguggau

SEQ ID NO: 2403683 - RNA, 19 nt, Homo sapiens
  misc_RNA (1)...(19): siRNA sense strand
agagaauaauggugaucau

SEQ ID NO: 2403684 - RNA, 19 nt, Homo sapiens
  misc_RNA (1)...(19): siRNA sense strand
guguggaugaguaaagaua

SEQ ID NO: 2403685 - RNA, 19 nt, Homo sapiens
  misc_RNA (1)...(19): siRNA sense strand
acauaaaguuaacagccua

SEQ ID NO: 2403686 - RNA, 19 nt, Homo sapiens
  misc_RNA (1)...(19): siRNA sense strand
acauugaggacauggagaa

SEQ ID NO: 2403687 - RNA, 19 nt, Homo sapiens
  misc_RNA (1)...(19): siRNA sense strand
gcuaaaacucucagugaau

SEQ ID NO: 2403688 - RNA, 19 nt, Homo sapiens
  misc_RNA (1)...(19): siRNA sense strand
guugaagauaauagaguca

SEQ ID NO: 2403689 - RNA, 19 nt, Homo sapiens
  misc_RNA (1)...(19): siRNA sense strand
ucugcaagacagugugaaa

SEQ ID NO: 2403690 - RNA, 19 nt, Homo sapiens
  misc_RNA (1)...(19): siRNA sense strand
augaguacauugaggacau

SEQ ID NO: 2403691 - RNA, 19 nt, Homo sapiens
  misc_RNA (1)...(19): siRNA sense strand
aaacaagcaucauugggaa

SEQ ID NO: 2403692 - RNA, 19 nt, Homo sapiens
  misc_RNA (1)...(19): siRNA sense strand
ucuacaaacuacagaucuu

SEQ ID NO: 2403693 - RNA, 19 nt, Homo sapiens
  misc_RNA (1)...(19): siRNA sense strand
caagagagaauaaugguga

SEQ ID NO: 2403694 - RNA, 19 nt, Homo sapiens
  misc_RNA (1)...(19): siRNA sense strand
cauaucugcaagagagaau

SEQ ID NO: 2403695 - RNA, 19 nt, Homo sapiens
  misc_RNA (1)...(19): siRNA sense strand
ggaacaaauaagccuacaa

SEQ ID NO: 2403696 - RNA, 19 nt, Homo sapiens
  misc_RNA (1)...(19): siRNA sense strand
cucuaaugaaggagaauuu

SEQ ID NO: 2403697 - RNA, 19 nt, Homo sapiens
  misc_RNA (1)...(19): siRNA sense strand
guggaugaguaaagauagu

SEQ ID NO: 2403698 - RNA, 19 nt, Homo sapiens
  misc_RNA (1)...(19): siRNA sense strand
guaaaauagcucagagagu

SEQ ID NO: 2403699 - RNA, 19 nt, Homo sapiens
  misc_RNA (1)...(19): siRNA sense strand
uggagaauuuauaccacaa

SEQ ID NO: 2403700 - RNA, 19 nt, Homo sapiens
  misc_RNA (1)...(19): siRNA sense strand
ugucagaacgauauuggaa

SEQ ID NO: 2403701 - RNA, 19 nt, Homo sapiens
  misc_RNA (1)...(19): siRNA sense strand
uucaacaagacgaaaguaa

SEQ ID NO: 2403702 - RNA, 19 nt, Homo sapiens
  misc_RNA (1)...(19): siRNA sense strand
gaaaggaaagccuggggaa

SEQ ID NO: 2403703 - RNA, 19 nt, Homo sapiens
  misc_RNA (1)...(19): siRNA sense strand
acuacagaucuuaaaggaa

SEQ ID NO: 2403704 - RNA, 19 nt, Homo sapiens
  misc_RNA (1)...(19): siRNA sense strand
ccucacgugcugaagacaa

SEQ ID NO: 2403705 - RNA, 19 nt, Homo sapiens
  misc_RNA (1)...(19): siRNA sense strand
auguuauguugcagguuau

SEQ ID NO: 2403706 - RNA, 19 nt, Homo sapiens
  misc_RNA (1)...(19): siRNA sense strand
cauaaaguuaacagccuau

SEQ ID NO: 2403707 - RNA, 19 nt, Homo sapiens
  misc_RNA (1)...(19): siRNA sense strand
gggaaauggaggacaccgu

SEQ ID NO: 2403708 - RNA, 19 nt, Homo sapiens
  misc_RNA (1)...(19): siRNA sense strand
agaaagaccaggagcccaa

SEQ ID NO: 2403709 - RNA, 19 nt, Homo sapiens
  misc_RNA (1)...(19): siRNA sense strand
ccauugagcuggacgccaa

SEQ ID NO: 2403710 - RNA, 19 nt, Homo sapiens
  misc_RNA (1)...(19): siRNA sense strand
gggagcuggacaagaaaga

SEQ ID NO: 2403711 - RNA, 19 nt, Homo sapiens
  misc_RNA (1)...(19): siRNA sense strand
ggaucuaacccaaggacac

SEQ ID NO: 2403712 - RNA, 19 nt, Homo sapiens
  misc_RNA (1)...(19): siRNA sense strand
ggaaagcaguucaggugga

SEQ ID NO: 2403713 - RNA, 19 nt, Homo sapiens
  misc_RNA (1)...(19): siRNA sense strand
gggagaagugaugaggaaa

SEQ ID NO: 2403714 - RNA, 19 nt, Homo sapiens
  misc_RNA (1)...(19): siRNA sense strand
gagacuugcaacaggaaaa

SEQ ID NO: 2403715 - RNA, 19 nt, Homo sapiens
  misc_RNA (1)...(19): siRNA sense strand
aggaaauauuagcccaauu

SEQ ID NO: 2403716 - RNA, 19 nt, Homo sapiens
  misc_RNA (1)...(19): siRNA sense strand
acaggaaaacagagagcua

SEQ ID NO: 2403717 - RNA, 19 nt, Homo sapiens
  misc_RNA (1)...(19): siRNA sense strand
uggaacuuaucaugagcaa

SEQ ID NO: 2403718 - RNA, 19 nt, Homo sapiens
  misc_RNA (1)...(19): siRNA sense strand
aaggaaaacucaauggaca

SEQ ID NO: 2403719 - RNA, 19 nt, Homo sapiens
  misc_RNA (1)...(19): siRNA sense strand
acaguuaaugguugcuaaa

SEQ ID NO: 2403720 - RNA, 19 nt, Homo sapiens
  misc_RNA (1)...(19): siRNA sense strand
gugaaaugggagaagugau

SEQ ID NO: 2403721 - RNA, 19 nt, Homo sapiens
  misc_RNA (1)...(19): siRNA sense strand
agauuagagacuugcaaca

SEQ ID NO: 2403722 - RNA, 19 nt, Homo sapiens
  misc_RNA (1)...(19): siRNA sense strand
gaaucugugaaaugggaga

SEQ ID NO: 2403723 - RNA, 19 nt, Homo sapiens
  misc_RNA (1)...(19): siRNA sense strand
ucaggaaauauuagcccaa

SEQ ID NO: 2403724 - RNA, 19 nt, Homo sapiens
  misc_RNA (1)...(19): siRNA sense strand
gccaagacgcugcuggaga

SEQ ID NO: 2403725 - RNA, 19 nt, Homo sapiens
  misc_RNA (1)...(19): siRNA sense strand
gggaaaagaauuagagcau

SEQ ID NO: 2403726 - RNA, 19 nt, Homo sapiens
  misc_RNA (1)...(19): siRNA sense strand
cgacgaaguuauacggaag

SEQ ID NO: 2403727 - RNA, 19 nt, Homo sapiens
  misc_RNA (1)...(19): siRNA sense strand
gaauaugaugcuuuggcaa

SEQ ID NO: 2403728 - RNA, 19 nt, Homo sapiens
  misc_RNA (1)...(19): siRNA sense strand
gcuggaauugagacggaaa

SEQ ID NO: 2403729 - RNA, 19 nt, Homo sapiens
  misc_RNA (1)...(19): siRNA sense strand
agauggugcuggaggugau

SEQ ID NO: 2403730 - RNA, 19 nt, Homo sapiens
  misc_RNA (1)...(19): siRNA sense strand
ggauauagccaguaccaac

SEQ ID NO: 2403731 - RNA, 19 nt, Homo sapiens
  misc_RNA (1)...(19): siRNA sense strand
aagcaaaacgaauacgaaa

SEQ ID NO: 2403732 - RNA, 19 nt, Homo sapiens
  misc_RNA (1)...(19): siRNA sense strand
acgacgaaguuauacggaa

SEQ ID NO: 2403733 - RNA, 19 nt, Homo sapiens
  misc_RNA (1)...(19): siRNA sense strand
agcaaaacgaauacgaaaa

SEQ ID NO: 2403734 - RNA, 19 nt, Homo sapiens
  misc_RNA (1)...(19): siRNA sense strand
agacauuaaaggaacuaga

SEQ ID NO: 2403735 - RNA, 19 nt, Homo sapiens
  misc_RNA (1)...(19): siRNA sense strand
ggaaucagauccuaagcca

SEQ ID NO: 2403736 - RNA, 19 nt, Homo sapiens
  misc_RNA (1)...(19): siRNA sense strand
cuucagcaaacauuggaaa

SEQ ID NO: 2403737 - RNA, 19 nt, Homo sapiens
  misc_RNA (1)...(19): siRNA sense strand
ggaaaauggugaacuaaaa

SEQ ID NO: 2403738 - RNA, 19 nt, Homo sapiens
  misc_RNA (1)...(19): siRNA sense strand
ccuccaaacuacauguaua

SEQ ID NO: 2403739 - RNA, 19 nt, Homo sapiens
  misc_RNA (1)...(19): siRNA sense strand
cagaaauacccaccaguaa

SEQ ID NO: 2403740 - RNA, 19 nt, Homo sapiens
  misc_RNA (1)...(19): siRNA sense strand
ccaggaaaauggugaacua

SEQ ID NO: 2403741 - RNA, 19 nt, Homo sapiens
  misc_RNA (1)...(19): siRNA sense strand
caucggagguguauggaga

SEQ ID NO: 2403742 - RNA, 19 nt, Homo sapiens
  misc_RNA (1)...(19): siRNA sense strand
agaaauacccaccaguaaa

SEQ ID NO: 2403743 - RNA, 19 nt, Homo sapiens
  misc_RNA (1)...(19): siRNA sense strand
ugaaccacuaagagagaaa

SEQ ID NO: 2403744 - RNA, 19 nt, Homo sapiens
  misc_RNA (1)...(19): siRNA sense strand
gcacaugaacgaugggcga

SEQ ID NO: 2403745 - RNA, 19 nt, Homo sapiens
  misc_RNA (1)...(19): siRNA sense strand
ggaucggacaugagaacuu

SEQ ID NO: 2403746 - RNA, 19 nt, Homo sapiens
  misc_RNA (1)...(19): siRNA sense strand
gaaaaggaucggaaaagaa

SEQ ID NO: 2403747 - RNA, 19 nt, Homo sapiens
  misc_RNA (1)...(19): siRNA sense strand
ggaagagaaacguggagca

SEQ ID NO: 2403748 - RNA, 19 nt, Homo sapiens
  misc_RNA (1)...(19): siRNA sense strand
aagcaagauugaagagaug

SEQ ID NO: 2403749 - RNA, 19 nt, Homo sapiens
  misc_RNA (1)...(19): siRNA sense strand
ucagaaaaggaucggaaaa

SEQ ID NO: 2403750 - RNA, 19 nt, Homo sapiens
  misc_RNA (1)...(19): siRNA sense strand
caucgagguugaccagaua

SEQ ID NO: 2403751 - RNA, 19 nt, Homo sapiens
  misc_RNA (1)...(19): siRNA sense strand
cugacaaacucaugaugga

SEQ ID NO: 2403752 - RNA, 19 nt, Homo sapiens
  misc_RNA (1)...(19): siRNA sense strand
cuccaaacuacauguauaa

SEQ ID NO: 2403753 - RNA, 19 nt, Homo sapiens
  misc_RNA (1)...(19): siRNA sense strand
ccguaaagaacucgaguac

SEQ ID NO: 2403754 - RNA, 19 nt, Homo sapiens
  misc_RNA (1)...(19): siRNA sense strand
aggugaccgugguggacaa

SEQ ID NO: 2403755 - RNA, 19 nt, Homo sapiens
  misc_RNA (1)...(19): siRNA sense strand
ugguagcggaagugaaauu

SEQ ID NO: 2403756 - RNA, 19 nt, Homo sapiens
  misc_RNA (1)...(19): siRNA sense strand
aaagcaagauugaagagau

SEQ ID NO: 2403757 - RNA, 19 nt, Homo sapiens
  misc_RNA (1)...(19): siRNA sense strand
ugaccgugguggacaauuu

SEQ ID NO: 2403758 - RNA, 19 nt, Homo sapiens
  misc_RNA (1)...(19): siRNA sense strand
aggcaaauaaucaguacau

SEQ ID NO: 2403759 - RNA, 19 nt, Homo sapiens
  misc_RNA (1)...(19): siRNA sense strand
aggaaaauggugaacuaaa

SEQ ID NO: 2403760 - RNA, 19 nt, Homo sapiens
  misc_RNA (1)...(19): siRNA sense strand
aaagaaaaccagacaucaa

SEQ ID NO: 2403761 - RNA, 19 nt, Homo sapiens
  misc_RNA (1)...(19): siRNA sense strand
ccagaaauacccaccagua

SEQ ID NO: 2403762 - RNA, 19 nt, Homo sapiens
  misc_RNA (1)...(19): siRNA sense strand
agauugaagagaugguuga

SEQ ID NO: 2403763 - RNA, 19 nt, Homo sapiens
  misc_RNA (1)...(19): siRNA sense strand
ccugcuacgaugaaggcaa

SEQ ID NO: 2403764 - RNA, 19 nt, Homo sapiens
  misc_RNA (1)...(19): siRNA sense strand
ucacgggcaggaagagaaa

SEQ ID NO: 2403765 - RNA, 19 nt, Homo sapiens
  misc_RNA (1)...(19): siRNA sense strand
agagaaacguggagcacug

SEQ ID NO: 2403766 - RNA, 19 nt, Homo sapiens
  misc_RNA (1)...(19): siRNA sense strand
ucuccgaagcccaggauga

SEQ ID NO: 2403767 - RNA, 19 nt, Homo sapiens
  misc_RNA (1)...(19): siRNA sense strand
aaagcuuuacccagaaaua

SEQ ID NO: 2403768 - RNA, 19 nt, Homo sapiens
  misc_RNA (1)...(19): siRNA sense strand
cuucaacaccuuugggcca

SEQ ID NO: 2403769 - RNA, 19 nt, Homo sapiens
  misc_RNA (1)...(19): siRNA sense strand
guugaaccacuaagagaga

SEQ ID NO: 2403770 - RNA, 19 nt, Homo sapiens
  misc_RNA (1)...(19): siRNA sense strand
acaucgagguugaccagau

SEQ ID NO: 2403771 - RNA, 19 nt, Homo sapiens
  misc_RNA (1)...(19): siRNA sense strand
ucgagguugaccagauaua

SEQ ID NO: 2403772 - RNA, 19 nt, Homo sapiens
  misc_RNA (1)...(19): siRNA sense strand
ccuuguugguagcggaagu

SEQ ID NO: 2403773 - RNA, 19 nt, Homo sapiens
  misc_RNA (1)...(19): siRNA sense strand
aauaaagaaaggacggacu

SEQ ID NO: 2403774 - RNA, 19 nt, Homo sapiens
  misc_RNA (1)...(19): siRNA sense strand
ccacuaagagagaaaauca

SEQ ID NO: 2403775 - RNA, 19 nt, Homo sapiens
  misc_RNA (1)...(19): siRNA sense strand
ccaacacggugcuggguga

SEQ ID NO: 2403776 - RNA, 19 nt, Homo sapiens
  misc_RNA (1)...(19): siRNA sense strand
ggaaaugcaccuaugggau

SEQ ID NO: 2403777 - RNA, 19 nt, Homo sapiens
  misc_RNA (1)...(19): siRNA sense strand
gggaauuugaggacagcca

SEQ ID NO: 2403778 - RNA, 19 nt, Homo sapiens
  misc_RNA (1)...(19): siRNA sense strand
accaugagucugugggaau

SEQ ID NO: 2403779 - RNA, 19 nt, Homo sapiens
  misc_RNA (1)...(19): siRNA sense strand
ccuacgagucugacgggau

SEQ ID NO: 2403780 - RNA, 19 nt, Homo sapiens
  misc_RNA (1)...(19): siRNA sense strand
ggcuauucauccacggaga

SEQ ID NO: 2403781 - RNA, 19 nt, Homo sapiens
  misc_RNA (1)...(19): siRNA sense strand
cccaagagccucaagggaa

SEQ ID NO: 2403782 - RNA, 19 nt, Homo sapiens
  misc_RNA (1)...(19): siRNA sense strand
caaacaaggacgauagcca

SEQ ID NO: 2403783 - RNA, 19 nt, Homo sapiens
  misc_RNA (1)...(19): siRNA sense strand
cugcagaagaauagugagu

SEQ ID NO: 2403784 - RNA, 19 nt, Homo sapiens
  misc_RNA (1)...(19): siRNA sense strand
aggaggaaacagaggcuga

SEQ ID NO: 2403785 - RNA, 19 nt, Homo sapiens
  misc_RNA (1)...(19): siRNA sense strand
caagagagcaguugcggca

SEQ ID NO: 2403786 - RNA, 19 nt, Homo sapiens
  misc_RNA (1)...(19): siRNA sense strand
gacgauagccagagggcgu

SEQ ID NO: 2403787 - RNA, 19 nt, Homo sapiens
  misc_RNA (1)...(19): siRNA sense strand
gugggcacuuggaggaaca

SEQ ID NO: 2403788 - RNA, 19 nt, Homo sapiens
  misc_RNA (1)...(19): siRNA sense strand
caggaaguugaguggccaa

SEQ ID NO: 2403789 - RNA, 19 nt, Homo sapiens
  misc_RNA (1)...(19): siRNA sense strand
auggagaagcugcaggaaa

SEQ ID NO: 2403790 - RNA, 19 nt, Homo sapiens
  misc_RNA (1)...(19): siRNA sense strand
uguugcagcuugugggaga

SEQ ID NO: 2403791 - RNA, 19 nt, Homo sapiens
  misc_RNA (1)...(19): siRNA sense strand
gggcagugucagagacgca

SEQ ID NO: 2403792 - RNA, 19 nt, Homo sapiens
  misc_RNA (1)...(19): siRNA sense strand
caggaggagaugaagguga

SEQ ID NO: 2403793 - RNA, 19 nt, Homo sapiens
  misc_RNA (1)...(19): siRNA sense strand
aggaccaggaggagaugaa

SEQ ID NO: 2403794 - RNA, 19 nt, Homo sapiens
  misc_RNA (1)...(19): siRNA sense strand
caggaggagcaaagggugu

SEQ ID NO: 2403795 - RNA, 19 nt, Homo sapiens
  misc_RNA (1)...(19): siRNA sense strand
caggaaaguacaucagcca

SEQ ID NO: 2403796 - RNA, 19 nt, Homo sapiens
  misc_RNA (1)...(19): siRNA sense strand
cagaaauucagauggcaaa

SEQ ID NO: 2403797 - RNA, 19 nt, Homo sapiens
  misc_RNA (1)...(19): siRNA sense strand
aagugauauuucugggaua

SEQ ID NO: 2403798 - RNA, 19 nt, Homo sapiens
  misc_RNA (1)...(19): siRNA sense strand
ccguuaacauuucgggcaa

SEQ ID NO: 2403799 - RNA, 19 nt, Homo sapiens
  misc_RNA (1)...(19): siRNA sense strand
auaaagccuaugagagaaa

SEQ ID NO: 2403800 - RNA, 19 nt, Homo sapiens
  misc_RNA (1)...(19): siRNA sense strand
ccuuauuaacucagggaca

SEQ ID NO: 2403801 - RNA, 19 nt, Homo sapiens
  misc_RNA (1)...(19): siRNA sense strand
gggauuaggacuacggcau

SEQ ID NO: 2403802 - RNA, 19 nt, Homo sapiens
  misc_RNA (1)...(19): siRNA sense strand
cccacuaauuauagagaca

SEQ ID NO: 2403803 - RNA, 19 nt, Homo sapiens
  misc_RNA (1)...(19): siRNA sense strand
ucagaaauucagauggcaa

SEQ ID NO: 2403804 - RNA, 19 nt, Homo sapiens
  misc_RNA (1)...(19): siRNA sense strand
gugugggauuguugggauu

SEQ ID NO: 2403805 - RNA, 19 nt, Homo sapiens
  misc_RNA (1)...(19): siRNA sense strand
caaugaaacaggugcagau

SEQ ID NO: 2403806 - RNA, 19 nt, Homo sapiens
  misc_RNA (1)...(19): siRNA sense strand
gggacaaacccugggaaaa

SEQ ID NO: 2403807 - RNA, 19 nt, Homo sapiens
  misc_RNA (1)...(19): siRNA sense strand
cuuauuaacucagggacaa

SEQ ID NO: 2403808 - RNA, 19 nt, Homo sapiens
  misc_RNA (1)...(19): siRNA sense strand
cugcaguaaaccugaagaa

SEQ ID NO: 2403809 - RNA, 19 nt, Homo sapiens
  misc_RNA (1)...(19): siRNA sense strand
uuauagagacaaccagaaa

SEQ ID NO: 2403810 - RNA, 19 nt, Homo sapiens
  misc_RNA (1)...(19): siRNA sense strand
uaacaauuuuggagaguga

SEQ ID NO: 2403811 - RNA, 19 nt, Homo sapiens
  misc_RNA (1)...(19): siRNA sense strand
ucuggaaauugguuaacaa

SEQ ID NO: 2403812 - RNA, 19 nt, Homo sapiens
  misc_RNA (1)...(19): siRNA sense strand
ggugcagauuucauaacaa

SEQ ID NO: 2403813 - RNA, 19 nt, Homo sapiens
  misc_RNA (1)...(19): siRNA sense strand
caguaaaccugaagaaaag

SEQ ID NO: 2403814 - RNA, 19 nt, Homo sapiens
  misc_RNA (1)...(19): siRNA sense strand
gagaaauccucuuggaguc

SEQ ID NO: 2403815 - RNA, 19 nt, Homo sapiens
  misc_RNA (1)...(19): siRNA sense strand
auggcaaugugaaggauau

SEQ ID NO: 2403816 - RNA, 19 nt, Homo sapiens
  misc_RNA (1)...(19): siRNA sense strand
gacaaugaaggguggucua

SEQ ID NO: 2403817 - RNA, 19 nt, Homo sapiens
  misc_RNA (1)...(19): siRNA sense strand
gguccaagcacaagguauc

SEQ ID NO: 2403818 - RNA, 19 nt, Homo sapiens
  misc_RNA (1)...(19): siRNA sense strand
ccauguggcuaggggaaaa

SEQ ID NO: 2403819 - RNA, 19 nt, Homo sapiens
  misc_RNA (1)...(19): siRNA sense strand
gcucaaugaaacaggugca

SEQ ID NO: 2403820 - RNA, 19 nt, Homo sapiens
  misc_RNA (1)...(19): siRNA sense strand
gggauggccucuagaccca

SEQ ID NO: 2403821 - RNA, 19 nt, Homo sapiens
  misc_RNA (1)...(19): siRNA sense strand
gguuacaggaacagcuuca

SEQ ID NO: 2403822 - RNA, 19 nt, Homo sapiens
  misc_RNA (1)...(19): siRNA sense strand
ucaggaagucauuugcaaa

SEQ ID NO: 2403823 - RNA, 19 nt, Homo sapiens
  misc_RNA (1)...(19): siRNA sense strand
ggaacaaugacuuaaccau

SEQ ID NO: 2403824 - RNA, 19 nt, Homo sapiens
  misc_RNA (1)...(19): siRNA sense strand
gggauuauggcuuugucaa

SEQ ID NO: 2403825 - RNA, 19 nt, Homo sapiens
  misc_RNA (1)...(19): siRNA sense strand
ggcuauugcuguuucaaaa

SEQ ID NO: 2403826 - RNA, 19 nt, Homo sapiens
  misc_RNA (1)...(19): siRNA sense strand
uugugaaaucugagcauca

SEQ ID NO: 2403827 - RNA, 19 nt, Homo sapiens
  misc_RNA (1)...(19): siRNA sense strand
ucacauugaccguuaacau

SEQ ID NO: 2403828 - RNA, 19 nt, Homo sapiens
  misc_RNA (1)...(19): siRNA sense strand
acugaugguucuugcgcuu

SEQ ID NO: 2403829 - RNA, 19 nt, Homo sapiens
  misc_RNA (1)...(19): siRNA sense strand
ucuuguuguucuacgcaua

SEQ ID NO: 2403830 - RNA, 19 nt, Homo sapiens
  misc_RNA (1)...(19): siRNA sense strand
gaaaaguagcucuaaucaa

SEQ ID NO: 2403831 - RNA, 19 nt, Homo sapiens
  misc_RNA (1)...(19): siRNA sense strand
aagauacccaauugugaaa

SEQ ID NO: 2403832 - RNA, 19 nt, Homo sapiens
  misc_RNA (1)...(19): siRNA sense strand
gcucacugaacauggcaau

SEQ ID NO: 2403833 - RNA, 19 nt, Homo sapiens
  misc_RNA (1)...(19): siRNA sense strand
cauggcaaugugaaggaua

SEQ ID NO: 2403834 - RNA, 19 nt, Homo sapiens
  misc_RNA (1)...(19): siRNA sense strand
gguuuggauaugacaauga

SEQ ID NO: 2403835 - RNA, 19 nt, Homo sapiens
  misc_RNA (1)...(19): siRNA sense strand
ggcugaucagguuggguua

SEQ ID NO: 2403836 - RNA, 19 nt, Homo sapiens
  misc_RNA (1)...(19): siRNA sense strand
gaggcuaggacgugggacu

SEQ ID NO: 2403837 - RNA, 19 nt, Homo sapiens
  misc_RNA (1)...(19): siRNA sense strand
gcagcuauuucgagaggcu

SEQ ID NO: 2403838 - RNA, 19 nt, Homo sapiens
  misc_RNA (1)...(19): siRNA sense strand
agguuugcccugaggacau

SEQ ID NO: 2403839 - RNA, 19 nt, Homo sapiens
  misc_RNA (1)...(19): siRNA sense strand
ccucuaagaugaagcgcuu

SEQ ID NO: 2403840 - RNA, 19 nt, Homo sapiens
  misc_RNA (1)...(19): siRNA sense strand
aguaaagaacaaagcagaa

SEQ ID NO: 2403841 - RNA, 19 nt, Homo sapiens
  misc_RNA (1)...(19): siRNA sense strand
ugccauaauucuagcaaaa

SEQ ID NO: 2403842 - RNA, 19 nt, Homo sapiens
  misc_RNA (1)...(19): siRNA sense strand
gggucauauuagugcuuau

SEQ ID NO: 2403843 - RNA, 19 nt, Homo sapiens
  misc_RNA (1)...(19): siRNA sense strand
aaaccaaguuguaucccaa

SEQ ID NO: 2403844 - RNA, 19 nt, Homo sapiens
  misc_RNA (1)...(19): siRNA sense strand
cugccauaauucuagcaaa

SEQ ID NO: 2403845 - RNA, 19 nt, Homo sapiens
  misc_RNA (1)...(19): siRNA sense strand
uaguaaagaacaaagcaga

SEQ ID NO: 2403846 - RNA, 19 nt, Homo sapiens
  misc_RNA (1)...(19): siRNA sense strand
agacaguuuaugaagaaga

SEQ ID NO: 2403847 - RNA, 19 nt, Homo sapiens
  misc_RNA (1)...(19): siRNA sense strand
agaacaaagcagaaacagu

SEQ ID NO: 2403848 - RNA, 19 nt, Homo sapiens
  misc_RNA (1)...(19): siRNA sense strand
uuauagugguucaagccaa

SEQ ID NO: 2403849 - RNA, 19 nt, Homo sapiens
  misc_RNA (1)...(19): siRNA sense strand
uugugaaauccgauacuua

SEQ ID NO: 2403850 - RNA, 19 nt, Homo sapiens
  misc_RNA (1)...(19): siRNA sense strand
aagccaaagaagaugccua

SEQ ID NO: 2403851 - RNA, 19 nt, Homo sapiens
  misc_RNA (1)...(19): siRNA sense strand
gcagaaacagucuucggaa

SEQ ID NO: 2403852 - RNA, 19 nt, Homo sapiens
  misc_RNA (1)...(19): siRNA sense strand
aagcaauauuauacccaga

SEQ ID NO: 2403853 - RNA, 19 nt, Homo sapiens
  misc_RNA (1)...(19): siRNA sense strand
aauuggagggagcuggaaa

SEQ ID NO: 2403854 - RNA, 19 nt, Homo sapiens
  misc_RNA (1)...(19): siRNA sense strand
gaacaaagcagaaacaguc

SEQ ID NO: 2403855 - RNA, 19 nt, Homo sapiens
  misc_RNA (1)...(19): siRNA sense strand
caaacaagucauugccuga

SEQ ID NO: 2403856 - RNA, 19 nt, Homo sapiens
  misc_RNA (1)...(19): siRNA sense strand
uugaaagcucccaggauau

SEQ ID NO: 2403857 - RNA, 19 nt, Homo sapiens
  misc_RNA (1)...(19): siRNA sense strand
gggcuguguccuagagagu

SEQ ID NO: 2403858 - RNA, 19 nt, Homo sapiens
  misc_RNA (1)...(19): siRNA sense strand
auuagaaccuccucggcua

SEQ ID NO: 2403859 - RNA, 19 nt, Homo sapiens
  misc_RNA (1)...(19): siRNA sense strand
caccaauguuguuugaaaa

SEQ ID NO: 2403860 - RNA, 19 nt, Homo sapiens
  misc_RNA (1)...(19): siRNA sense strand
cgaccugcucagugacaau

SEQ ID NO: 2403861 - RNA, 19 nt, Homo sapiens
  misc_RNA (1)...(19): siRNA sense strand
cguggugaccuguaggaau

SEQ ID NO: 2403862 - RNA, 19 nt, Homo sapiens
  misc_RNA (1)...(19): siRNA sense strand
agaaggugugugaagcuaa

SEQ ID NO: 2403863 - RNA, 19 nt, Homo sapiens
  misc_RNA (1)...(19): siRNA sense strand
caacuugagucuucagcca

SEQ ID NO: 2403864 - RNA, 19 nt, Homo sapiens
  misc_RNA (1)...(19): siRNA sense strand
gcucaaaaugaucgagaaa

SEQ ID NO: 2403865 - RNA, 19 nt, Homo sapiens
  misc_RNA (1)...(19): siRNA sense strand
aauggaagagagagagaaa

SEQ ID NO: 2403866 - RNA, 19 nt, Homo sapiens
  misc_RNA (1)...(19): siRNA sense strand
cagaagugucgaagaagaa

SEQ ID NO: 2403867 - RNA, 19 nt, Homo sapiens
  misc_RNA (1)...(19): siRNA sense strand
ucaaaaugaucgagaaaca

SEQ ID NO: 2403868 - RNA, 19 nt, Homo sapiens
  misc_RNA (1)...(19): siRNA sense strand
uuacauagcaccagcggaa

SEQ ID NO: 2403869 - RNA, 19 nt, Homo sapiens
  misc_RNA (1)...(19): siRNA sense strand
cgguauugcugcaugaaaa

SEQ ID NO: 2403870 - RNA, 19 nt, Homo sapiens
  misc_RNA (1)...(19): siRNA sense strand
cugaaagacaagcgaaaga

SEQ ID NO: 2403871 - RNA, 19 nt, Homo sapiens
  misc_RNA (1)...(19): siRNA sense strand
ucaccaaucaagagcuaaa

SEQ ID NO: 2403872 - RNA, 19 nt, Homo sapiens
  misc_RNA (1)...(19): siRNA sense strand
acauggauuuagaggaaca

SEQ ID NO: 2403873 - RNA, 19 nt, Homo sapiens
  misc_RNA (1)...(19): siRNA sense strand
aggcacagauagaagccaa

SEQ ID NO: 2403874 - RNA, 19 nt, Homo sapiens
  misc_RNA (1)...(19): siRNA sense strand
aaugauugcagaagacaaa

SEQ ID NO: 2403875 - RNA, 19 nt, Homo sapiens
  misc_RNA (1)...(19): siRNA sense strand
ccaauggaagagagagaga

SEQ ID NO: 2403876 - RNA, 19 nt, Homo sapiens
  misc_RNA (1)...(19): siRNA sense strand
agaaaauaauggagaagca

SEQ ID NO: 2403877 - RNA, 19 nt, Homo sapiens
  misc_RNA (1)...(19): siRNA sense strand
aauuacaucaggagagaau

SEQ ID NO: 2403878 - RNA, 19 nt, Homo sapiens
  misc_RNA (1)...(19): siRNA sense strand
aagaagaaauugaacagga

SEQ ID NO: 2403879 - RNA, 19 nt, Homo sapiens
  misc_RNA (1)...(19): siRNA sense strand
agacaaaagcauaggaucu

SEQ ID NO: 2403880 - RNA, 19 nt, Homo sapiens
  misc_RNA (1)...(19): siRNA sense strand
agauacacuucaacaacaa

SEQ ID NO: 2403881 - RNA, 19 nt, Homo sapiens
  misc_RNA (1)...(19): siRNA sense strand
gaagcaaaacauagaguau

SEQ ID NO: 2403882 - RNA, 19 nt, Homo sapiens
  misc_RNA (1)...(19): siRNA sense strand
guggcaacaccuugagcaa

SEQ ID NO: 2403883 - RNA, 19 nt, Homo sapiens
  misc_RNA (1)...(19): siRNA sense strand
acaaaguacagcucagaau

SEQ ID NO: 2403884 - RNA, 19 nt, Homo sapiens
  misc_RNA (1)...(19): siRNA sense strand
uacugaaagacaagcgaaa

SEQ ID NO: 2403885 - RNA, 19 nt, Homo sapiens
  misc_RNA (1)...(19): siRNA sense strand
gagaaauuacuuaagcaga

SEQ ID NO: 2403886 - RNA, 19 nt, Homo sapiens
  misc_RNA (1)...(19): siRNA sense strand
ggugaaaugaaccagaaau

SEQ ID NO: 2403887 - RNA, 19 nt, Homo sapiens
  misc_RNA (1)...(19): siRNA sense strand
aaguaagaugacugaagaa

SEQ ID NO: 2403888 - RNA, 19 nt, Homo sapiens
  misc_RNA (1)...(19): siRNA sense strand
aaccaagagucaagagagu

SEQ ID NO: 2403889 - RNA, 19 nt, Homo sapiens
  misc_RNA (1)...(19): siRNA sense strand
ccagaaauacaaggagcua

SEQ ID NO: 2403890 - RNA, 19 nt, Homo sapiens
  misc_RNA (1)...(19): siRNA sense strand
ucgaagaagaaauugaaca

SEQ ID NO: 2403891 - RNA, 19 nt, Homo sapiens
  misc_RNA (1)...(19): siRNA sense strand
cagaaauacaaggagcuaa

SEQ ID NO: 2403892 - RNA, 19 nt, Homo sapiens
  misc_RNA (1)...(19): siRNA sense strand
acaaauuuggagagaaagu

SEQ ID NO: 2403893 - RNA, 19 nt, Homo sapiens
  misc_RNA (1)...(19): siRNA sense strand
aauacaaggagcuaaagaa

SEQ ID NO: 2403894 - RNA, 19 nt, Homo sapiens
  misc_RNA (1)...(19): siRNA sense strand
agugauuaccagccaauua

SEQ ID NO: 2403895 - RNA, 19 nt, Homo sapiens
  misc_RNA (1)...(19): siRNA sense strand
uggaaagacaguuaacaga

SEQ ID NO: 2403896 - RNA, 19 nt, Homo sapiens
  misc_RNA (1)...(19): siRNA sense strand
agaaaagggaggaacauau

SEQ ID NO: 2403897 - RNA, 19 nt, Homo sapiens
  misc_RNA (1)...(19): siRNA sense strand
uggagcuucuagaaaguaa

SEQ ID NO: 2403898 - RNA, 19 nt, Homo sapiens
  misc_RNA (1)...(19): siRNA sense strand
caggugaagaaaagauaaa

SEQ ID NO: 2403899 - RNA, 19 nt, Homo sapiens
  misc_RNA (1)...(19): siRNA sense strand
guuacaggaauuagauaca

SEQ ID NO: 2403900 - RNA, 19 nt, Homo sapiens
  misc_RNA (1)...(19): siRNA sense strand
cagaauuugacuucagaca

SEQ ID NO: 2403901 - RNA, 19 nt, Homo sapiens
  misc_RNA (1)...(19): siRNA sense strand
cgaagaagaaauugaacag

SEQ ID NO: 2403902 - RNA, 19 nt, Homo sapiens
  misc_RNA (1)...(19): siRNA sense strand
aaaugauugcagaagacaa

SEQ ID NO: 2403903 - RNA, 19 nt, Homo sapiens
  misc_RNA (1)...(19): siRNA sense strand
aggugaaaugaaccagaaa

SEQ ID NO: 2403904 - RNA, 19 nt, Homo sapiens
  misc_RNA (1)...(19): siRNA sense strand
aacgaaaggcacagauaga

SEQ ID NO: 2403905 - RNA, 19 nt, Homo sapiens
  misc_RNA (1)...(19): siRNA sense strand
uaaagaaaagggaggaaca

SEQ ID NO: 2403906 - RNA, 19 nt, Homo sapiens
  misc_RNA (1)...(19): siRNA sense strand
uuacaucaggagagaauga

SEQ ID NO: 2403907 - RNA, 19 nt, Homo sapiens
  misc_RNA (1)...(19): siRNA sense strand
uauuaucaacccacagaaa

SEQ ID NO: 2403908 - RNA, 19 nt, Homo sapiens
  misc_RNA (1)...(19): siRNA sense strand
acaaaucagaagugucgaa

SEQ ID NO: 2403909 - RNA, 19 nt, Homo sapiens
  misc_RNA (1)...(19): siRNA sense strand
ggaacugaaacgaaaggca

SEQ ID NO: 2403910 - RNA, 19 nt, Homo sapiens
  misc_RNA (1)...(19): siRNA sense strand
uugaggaaacaaagaauca

SEQ ID NO: 2403911 - RNA, 19 nt, Homo sapiens
  misc_RNA (1)...(19): siRNA sense strand
agcuaaagaugaugcagga

SEQ ID NO: 2403912 - RNA, 19 nt, Homo sapiens
  misc_RNA (1)...(19): siRNA sense strand
cuuacaaauuuggagagaa

SEQ ID NO: 2403913 - RNA, 19 nt, Homo sapiens
  misc_RNA (1)...(19): siRNA sense strand
aguuggaucugcagaaaau

SEQ ID NO: 2403914 - RNA, 19 nt, Homo sapiens
  misc_RNA (1)...(19): siRNA sense strand
gaagugucgaagaagaaau

SEQ ID NO: 2403915 - RNA, 19 nt, Homo sapiens
  misc_RNA (1)...(19): siRNA sense strand
cagaacaugcagacagcuu

SEQ ID NO: 2403916 - RNA, 19 nt, Homo sapiens
  misc_RNA (1)...(19): siRNA sense strand
cugcagaacuauuagccaa

SEQ ID NO: 2403917 - RNA, 19 nt, Homo sapiens
  misc_RNA (1)...(19): siRNA sense strand
uggacagagugaaggaaau

SEQ ID NO: 2403918 - RNA, 19 nt, Homo sapiens
  misc_RNA (1)...(19): siRNA sense strand
augaagaguguguccgaaa

SEQ ID NO: 2403919 - RNA, 19 nt, Homo sapiens
  misc_RNA (1)...(19): siRNA sense strand
ccaugaugugaaagagauu

SEQ ID NO: 2403920 - RNA, 19 nt, Homo sapiens
  misc_RNA (1)...(19): siRNA sense strand
gagaaaaugaaguguaaca

SEQ ID NO: 2403921 - RNA, 19 nt, Homo sapiens
  misc_RNA (1)...(19): siRNA sense strand
gggaaguauuucugugacu

SEQ ID NO: 2403922 - RNA, 19 nt, Homo sapiens
  misc_RNA (1)...(19): siRNA sense strand
cuggacagagugaaggaaa

SEQ ID NO: 2403923 - RNA, 19 nt, Homo sapiens
  misc_RNA (1)...(19): siRNA sense strand
ccaaagagcuguaccgcgu

SEQ ID NO: 2403924 - RNA, 19 nt, Homo sapiens
  misc_RNA (1)...(19): siRNA sense strand
agaaguacuacgucagcaa

SEQ ID NO: 2403925 - RNA, 19 nt, Homo sapiens
  misc_RNA (1)...(19): siRNA sense strand
cagacagagagcuggagua

SEQ ID NO: 2403926 - RNA, 19 nt, Homo sapiens
  misc_RNA (1)...(19): siRNA sense strand
agucaacagcagacagaga

SEQ ID NO: 2403927 - RNA, 19 nt, Homo sapiens
  misc_RNA (1)...(19): siRNA sense strand
ugugaaagagauuugcaaa

SEQ ID NO: 2403928 - RNA, 19 nt, Homo sapiens
  misc_RNA (1)...(19): siRNA sense strand
ggccaaagccuguaugcga

SEQ ID NO: 2403929 - RNA, 19 nt, Homo sapiens
  misc_RNA (1)...(19): siRNA sense strand
gccaaagccuguaugcgaa

SEQ ID NO: 2403930 - RNA, 19 nt, Homo sapiens
  misc_RNA (1)...(19): siRNA sense strand
ggaucacagcgaggagaaa

SEQ ID NO: 2403931 - RNA, 19 nt, Homo sapiens
  misc_RNA (1)...(19): siRNA sense strand
ucguaaaugaagagugugu

SEQ ID NO: 2403932 - RNA, 19 nt, Homo sapiens
  misc_RNA (1)...(19): siRNA sense strand
uguucaagucaguagaaga

SEQ ID NO: 2403933 - RNA, 19 nt, Homo sapiens
  misc_RNA (1)...(19): siRNA sense strand
guaaagaagucaguggguu

SEQ ID NO: 2403934 - RNA, 19 nt, Homo sapiens
  misc_RNA (1)...(19): siRNA sense strand
caauuagacaucaggcuca

SEQ ID NO: 2403935 - RNA, 19 nt, Homo sapiens
  misc_RNA (1)...(19): siRNA sense strand
acaucaggcucaugaggca

SEQ ID NO: 2403936 - RNA, 19 nt, Homo sapiens
  misc_RNA (1)...(19): siRNA sense strand
uuauaucagcaauggagaa

SEQ ID NO: 2403937 - RNA, 19 nt, Homo sapiens
  misc_RNA (1)...(19): siRNA sense strand
caacguugucugaggauac

SEQ ID NO: 2403938 - RNA, 19 nt, Homo sapiens
  misc_RNA (1)...(19): siRNA sense strand
cuuaugagccagacuucaa

SEQ ID NO: 2403939 - RNA, 19 nt, Homo sapiens
  misc_RNA (1)...(19): siRNA sense strand
aggaucacagcgaggagaa

SEQ ID NO: 2403940 - RNA, 19 nt, Homo sapiens
  misc_RNA (1)...(19): siRNA sense strand
agucaguagaagaaccauu

SEQ ID NO: 2403941 - RNA, 19 nt, Homo sapiens
  misc_RNA (1)...(19): siRNA sense strand
cuuugaauccaguaugaau

SEQ ID NO: 2403942 - RNA, 19 nt, Homo sapiens
  misc_RNA (1)...(19): siRNA sense strand
cuaaagaggcugagagaac

SEQ ID NO: 2403943 - RNA, 19 nt, Homo sapiens
  misc_RNA (1)...(19): siRNA sense strand
uuacauaaccuaagggaga

SEQ ID NO: 2403944 - RNA, 19 nt, Homo sapiens
  misc_RNA (1)...(19): siRNA sense strand
auagagaauuggaggacau

SEQ ID NO: 2403945 - RNA, 19 nt, Homo sapiens
  misc_RNA (1)...(19): siRNA sense strand
uggaaguaaaugagcuaaa

SEQ ID NO: 2403946 - RNA, 19 nt, Homo sapiens
  misc_RNA (1)...(19): siRNA sense strand
caaauuaagaagagagaac

SEQ ID NO: 2403947 - RNA, 19 nt, Homo sapiens
  misc_RNA (1)...(19): siRNA sense strand
gguggaaguaaaugagcua

SEQ ID NO: 2403948 - RNA, 19 nt, Homo sapiens
  misc_RNA (1)...(19): siRNA sense strand
uggaaaaggaguuggagaa

SEQ ID NO: 2403949 - RNA, 19 nt, Homo sapiens
  misc_RNA (1)...(19): siRNA sense strand
agaucgagagauugaaaua

SEQ ID NO: 2403950 - RNA, 19 nt, Homo sapiens
  misc_RNA (1)...(19): siRNA sense strand
uugaaugucuagaggaaga

SEQ ID NO: 2403951 - RNA, 19 nt, Homo sapiens
  misc_RNA (1)...(19): siRNA sense strand
aguuggagaaagagaagaa

SEQ ID NO: 2403952 - RNA, 19 nt, Homo sapiens
  misc_RNA (1)...(19): siRNA sense strand
ccagaaacaaauagauuca

SEQ ID NO: 2403953 - RNA, 19 nt, Homo sapiens
  misc_RNA (1)...(19): siRNA sense strand
cgaaaugaggaggcagaaa

SEQ ID NO: 2403954 - RNA, 19 nt, Homo sapiens
  misc_RNA (1)...(19): siRNA sense strand
caacagacucauaugaaaa

SEQ ID NO: 2403955 - RNA, 19 nt, Homo sapiens
  misc_RNA (1)...(19): siRNA sense strand
cuggagaagaacaagcaaa

SEQ ID NO: 2403956 - RNA, 19 nt, Homo sapiens
  misc_RNA (1)...(19): siRNA sense strand
ggaaaaggaguuggagaaa

SEQ ID NO: 2403957 - RNA, 19 nt, Homo sapiens
  misc_RNA (1)...(19): siRNA sense strand
gaggcugaugcuagggaaa

SEQ ID NO: 2403958 - RNA, 19 nt, Homo sapiens
  misc_RNA (1)...(19): siRNA sense strand
ggcucaagaaagaggaaaa

SEQ ID NO: 2403959 - RNA, 19 nt, Homo sapiens
  misc_RNA (1)...(19): siRNA sense strand
ggagaagaugacugaugaa

SEQ ID NO: 2403960 - RNA, 19 nt, Homo sapiens
  misc_RNA (1)...(19): siRNA sense strand
agaagaaaguuaaugagca

SEQ ID NO: 2403961 - RNA, 19 nt, Homo sapiens
  misc_RNA (1)...(19): siRNA sense strand
aagaauuaguugaggcucu

SEQ ID NO: 2403962 - RNA, 19 nt, Homo sapiens
  misc_RNA (1)...(19): siRNA sense strand
uggagaagaacaagcaaaa

SEQ ID NO: 2403963 - RNA, 19 nt, Homo sapiens
  misc_RNA (1)...(19): siRNA sense strand
uggagaaagagaagaaagu

SEQ ID NO: 2403964 - RNA, 19 nt, Homo sapiens
  misc_RNA (1)...(19): siRNA sense strand
cuguacaggaaauggagaa

SEQ ID NO: 2403965 - RNA, 19 nt, Homo sapiens
  misc_RNA (1)...(19): siRNA sense strand
gaauuggaggacauggaaa

SEQ ID NO: 2403966 - RNA, 19 nt, Homo sapiens
  misc_RNA (1)...(19): siRNA sense strand
agacuuuaacagaagcuaa

SEQ ID NO: 2403967 - RNA, 19 nt, Homo sapiens
  misc_RNA (1)...(19): siRNA sense strand
cagaaaaugaaaacagcaa

SEQ ID NO: 2403968 - RNA, 19 nt, Homo sapiens
  misc_RNA (1)...(19): siRNA sense strand
caggaaauggagaagauga

SEQ ID NO: 2403969 - RNA, 19 nt, Homo sapiens
  misc_RNA (1)...(19): siRNA sense strand
agaagaacuggcagauaau

SEQ ID NO: 2403970 - RNA, 19 nt, Homo sapiens
  misc_RNA (1)...(19): siRNA sense strand
agucacuaaugaagaugaa

SEQ ID NO: 2403971 - RNA, 19 nt, Homo sapiens
  misc_RNA (1)...(19): siRNA sense strand
caccgaacaaguagaacaa

SEQ ID NO: 2403972 - RNA, 19 nt, Homo sapiens
  misc_RNA (1)...(19): siRNA sense strand
gugaaaagcaagaaaaugu

SEQ ID NO: 2403973 - RNA, 19 nt, Homo sapiens
  misc_RNA (1)...(19): siRNA sense strand
uagaagaauggaagcuaau

SEQ ID NO: 2403974 - RNA, 19 nt, Homo sapiens
  misc_RNA (1)...(19): siRNA sense strand
uaaugaaaguugacccaga

SEQ ID NO: 2403975 - RNA, 19 nt, Homo sapiens
  misc_RNA (1)...(19): siRNA sense strand
caauuaugguagcugucaa

SEQ ID NO: 2403976 - RNA, 19 nt, Homo sapiens
  misc_RNA (1)...(19): siRNA sense strand
acagcaggguauacaggaa

SEQ ID NO: 2403977 - RNA, 19 nt, Homo sapiens
  misc_RNA (1)...(19): siRNA sense strand
augcugucguugaaauaaa

SEQ ID NO: 2403978 - RNA, 19 nt, Homo sapiens
  misc_RNA (1)...(19): siRNA sense strand
agaugcugucguugaaaua

SEQ ID NO: 2403979 - RNA, 19 nt, Homo sapiens
  misc_RNA (1)...(19): siRNA sense strand
acuuaaaacagcagcagua

SEQ ID NO: 2403980 - RNA, 19 nt, Homo sapiens
  misc_RNA (1)...(19): siRNA sense strand
agggaaaaggauaaagaau

SEQ ID NO: 2403981 - RNA, 19 nt, Homo sapiens
  misc_RNA (1)...(19): siRNA sense strand
augaagaagaugauccaau

SEQ ID NO: 2403982 - RNA, 19 nt, Homo sapiens
  misc_RNA (1)...(19): siRNA sense strand
ccaaagaaacaaaggugcu

SEQ ID NO: 2403983 - RNA, 19 nt, Homo sapiens
  misc_RNA (1)...(19): siRNA sense strand
ccaagguggaaguaaauga

SEQ ID NO: 2403984 - RNA, 19 nt, Homo sapiens
  misc_RNA (1)...(19): siRNA sense strand
gagaauuggaggacaugga

SEQ ID NO: 2403985 - RNA, 19 nt, Homo sapiens
  misc_RNA (1)...(19): siRNA sense strand
aauuggaggacauggaaaa

SEQ ID NO: 2403986 - RNA, 19 nt, Homo sapiens
  misc_RNA (1)...(19): siRNA sense strand
gccuugaaccaaagacaau

SEQ ID NO: 2403987 - RNA, 19 nt, Homo sapiens
  misc_RNA (1)...(19): siRNA sense strand
gucaagaagaacuggcaga

SEQ ID NO: 2403988 - RNA, 19 nt, Homo sapiens
  misc_RNA (1)...(19): siRNA sense strand
agaugaaagcucaagaagu

SEQ ID NO: 2403989 - RNA, 19 nt, Homo sapiens
  misc_RNA (1)...(19): siRNA sense strand
aacuaaagaggcugagaga

SEQ ID NO: 2403990 - RNA, 19 nt, Homo sapiens
  misc_RNA (1)...(19): siRNA sense strand
gugugggccuugaaccaaa

SEQ ID NO: 2403991 - RNA, 19 nt, Homo sapiens
  misc_RNA (1)...(19): siRNA sense strand
aagaaguggagcuggcuuu

SEQ ID NO: 2403992 - RNA, 19 nt, Homo sapiens
  misc_RNA (1)...(19): siRNA sense strand
uaaugaagaugaaagcuca

SEQ ID NO: 2403993 - RNA, 19 nt, Homo sapiens
  misc_RNA (1)...(19): siRNA sense strand
ucuuaaacuguuagggaaa

SEQ ID NO: 2403994 - RNA, 19 nt, Homo sapiens
  misc_RNA (1)...(19): siRNA sense strand
gaaaggagauggagcucga

SEQ ID NO: 2403995 - RNA, 19 nt, Homo sapiens
  misc_RNA (1)...(19): siRNA sense strand
gagaaaaugaagaugagaa

SEQ ID NO: 2403996 - RNA, 19 nt, Homo sapiens
  misc_RNA (1)...(19): siRNA sense strand
uagcaaaagcccuggagaa

SEQ ID NO: 2403997 - RNA, 19 nt, Homo sapiens
  misc_RNA (1)...(19): siRNA sense strand
gcaagaaaccugccggcuu

SEQ ID NO: 2403998 - RNA, 19 nt, Homo sapiens
  misc_RNA (1)...(19): siRNA sense strand
gcggaaugccggagacacu

SEQ ID NO: 2403999 - RNA, 19 nt, Homo sapiens
  misc_RNA (1)...(19): siRNA sense strand
gggaaaguugagacugcua

SEQ ID NO: 2404000 - RNA, 19 nt, Homo sapiens
  misc_RNA (1)...(19): siRNA sense strand
aguugagacugcuaagaau

SEQ ID NO: 2404001 - RNA, 19 nt, Homo sapiens
  misc_RNA (1)...(19): siRNA sense strand
cuaauuuguccgaggaguu

SEQ ID NO: 2404002 - RNA, 19 nt, Homo sapiens
  misc_RNA (1)...(19): siRNA sense strand
ugaagaugagaaagggaga

SEQ ID NO: 2404003 - RNA, 19 nt, Homo sapiens
  misc_RNA (1)...(19): siRNA sense strand
uggugaacuauaucagaaa

SEQ ID NO: 2404004 - RNA, 19 nt, Homo sapiens
  misc_RNA (1)...(19): siRNA sense strand
ccuaaaacuucucaugcaa

SEQ ID NO: 2404005 - RNA, 19 nt, Homo sapiens
  misc_RNA (1)...(19): siRNA sense strand
auuccuacauggagaaaau

SEQ ID NO: 2404006 - RNA, 19 nt, Homo sapiens
  misc_RNA (1)...(19): siRNA sense strand
cuuaaagaggcuggagaga

SEQ ID NO: 2404007 - RNA, 19 nt, Homo sapiens
  misc_RNA (1)...(19): siRNA sense strand
agaacaaaauccugggugu

SEQ ID NO: 2404008 - RNA, 19 nt, Homo sapiens
  misc_RNA (1)...(19): siRNA sense strand
gguucgagguggcugacga

SEQ ID NO: 2404009 - RNA, 19 nt, Homo sapiens
  misc_RNA (1)...(19): siRNA sense strand
gcacagagcugcaagaggu

SEQ ID NO: 2404010 - RNA, 19 nt, Homo sapiens
  misc_RNA (1)...(19): siRNA sense strand
gccacaaggaggaggagca

SEQ ID NO: 2404011 - RNA, 19 nt, Homo sapiens
  misc_RNA (1)...(19): siRNA sense strand
cggaauuugaagaggucua

SEQ ID NO: 2404012 - RNA, 19 nt, Homo sapiens
  misc_RNA (1)...(19): siRNA sense strand
uggaggagcugaaggccaa

SEQ ID NO: 2404013 - RNA, 19 nt, Homo sapiens
  misc_RNA (1)...(19): siRNA sense strand
gugaagagcuggaagccca

SEQ ID NO: 2404014 - RNA, 19 nt, Homo sapiens
  misc_RNA (1)...(19): siRNA sense strand
ugaaagugaaagagaacga

SEQ ID NO: 2404015 - RNA, 19 nt, Homo sapiens
  misc_RNA (1)...(19): siRNA sense strand
agaaguaccuggaggagcu

SEQ ID NO: 2404016 - RNA, 19 nt, Homo sapiens
  misc_RNA (1)...(19): siRNA sense strand
agaagaaguaccuggagga

SEQ ID NO: 2404017 - RNA, 19 nt, Homo sapiens
  misc_RNA (1)...(19): siRNA sense strand
agcugaaggccaagaguca

SEQ ID NO: 2404018 - RNA, 19 nt, Homo sapiens
  misc_RNA (1)...(19): siRNA sense strand
aagugaaagagaacgaaaa

SEQ ID NO: 2404019 - RNA, 19 nt, Homo sapiens
  misc_RNA (1)...(19): siRNA sense strand
acugaaagugaaagagaac

SEQ ID NO: 2404020 - RNA, 19 nt, Homo sapiens
  misc_RNA (1)...(19): siRNA sense strand
gaaaagaugugaagagcug

SEQ ID NO: 2404021 - RNA, 19 nt, Homo sapiens
  misc_RNA (1)...(19): siRNA sense strand
ccgccaagaagaagcucau

SEQ ID NO: 2404022 - RNA, 19 nt, Homo sapiens
  misc_RNA (1)...(19): siRNA sense strand
ugauauugcuguaggugca

SEQ ID NO: 2404023 - RNA, 19 nt, Homo sapiens
  misc_RNA (1)...(19): siRNA sense strand
cuuugagauuauugagaca

SEQ ID NO: 2404024 - RNA, 19 nt, Homo sapiens
  misc_RNA (1)...(19): siRNA sense strand
agaacuacuauaagaggau

SEQ ID NO: 2404025 - RNA, 19 nt, Homo sapiens
  misc_RNA (1)...(19): siRNA sense strand
aguuuggcuuugagauuau

SEQ ID NO: 2404026 - RNA, 19 nt, Homo sapiens
  misc_RNA (1)...(19): siRNA sense strand
gcucaugugcugcagaaaa

SEQ ID NO: 2404027 - RNA, 19 nt, Homo sapiens
  misc_RNA (1)...(19): siRNA sense strand
gggaggaaaagguggaaaa

SEQ ID NO: 2404028 - RNA, 19 nt, Homo sapiens
  misc_RNA (1)...(19): siRNA sense strand
ggaaaagaaaagaagacaa

SEQ ID NO: 2404029 - RNA, 19 nt, Homo sapiens
  misc_RNA (1)...(19): siRNA sense strand
cagacaucaucgugggaau

SEQ ID NO: 2404030 - RNA, 19 nt, Homo sapiens
  misc_RNA (1)...(19): siRNA sense strand
gcuuggauggagagacaaa

SEQ ID NO: 2404031 - RNA, 19 nt, Homo sapiens
  misc_RNA (1)...(19): siRNA sense strand
gcagaaaagagcagaccua

SEQ ID NO: 2404032 - RNA, 19 nt, Homo sapiens
  misc_RNA (1)...(19): siRNA sense strand
agacgaaagccaugcugaa

SEQ ID NO: 2404033 - RNA, 19 nt, Homo sapiens
  misc_RNA (1)...(19): siRNA sense strand
ggacccugacagagaacaa

SEQ ID NO: 2404034 - RNA, 19 nt, Homo sapiens
  misc_RNA (1)...(19): siRNA sense strand
cagaagugcuggaaggaug

SEQ ID NO: 2404035 - RNA, 19 nt, Homo sapiens
  misc_RNA (1)...(19): siRNA sense strand
cggagguacaaaucggaua

SEQ ID NO: 2404036 - RNA, 19 nt, Homo sapiens
  misc_RNA (1)...(19): siRNA sense strand
gguacaaaucggauaaagu

SEQ ID NO: 2404037 - RNA, 19 nt, Homo sapiens
  misc_RNA (1)...(19): siRNA sense strand
ucgcagaggacuugggcca

SEQ ID NO: 2404038 - RNA, 19 nt, Homo sapiens
  misc_RNA (1)...(19): siRNA sense strand
cgguacaaacgcagcaaga

SEQ ID NO: 2404039 - RNA, 19 nt, Homo sapiens
  misc_RNA (1)...(19): siRNA sense strand
ucucacagcaggagguaca

SEQ ID NO: 2404040 - RNA, 19 nt, Homo sapiens
  misc_RNA (1)...(19): siRNA sense strand
gugccuuauuggagcugua

SEQ ID NO: 2404041 - RNA, 19 nt, Homo sapiens
  misc_RNA (1)...(19): siRNA sense strand
aaguguucuucuugagcaa

SEQ ID NO: 2404042 - RNA, 19 nt, Homo sapiens
  misc_RNA (1)...(19): siRNA sense strand
ggauaugccaucuggaaac

SEQ ID NO: 2404043 - RNA, 19 nt, Homo sapiens
  misc_RNA (1)...(19): siRNA sense strand
agaaaaugguauagaagcu

SEQ ID NO: 2404044 - RNA, 19 nt, Homo sapiens
  misc_RNA (1)...(19): siRNA sense strand
gugcagaagugcuggaagg

SEQ ID NO: 2404045 - RNA, 19 nt, Homo sapiens
  misc_RNA (1)...(19): siRNA sense strand
augcaggccaugagacgaa

SEQ ID NO: 2404046 - RNA, 19 nt, Homo sapiens
  misc_RNA (1)...(19): siRNA sense strand
agguacaguucgaaccaga

SEQ ID NO: 2404047 - RNA, 19 nt, Homo sapiens
  misc_RNA (1)...(19): siRNA sense strand
ucuuagaggcuguguggca

SEQ ID NO: 2404048 - RNA, 19 nt, Homo sapiens
  misc_RNA (1)...(19): siRNA sense strand
ggccaugagacgaaagcca

SEQ ID NO: 2404049 - RNA, 19 nt, Homo sapiens
  misc_RNA (1)...(19): siRNA sense strand
ucaacaucgcagaggacuu

SEQ ID NO: 2404050 - RNA, 19 nt, Homo sapiens
  misc_RNA (1)...(19): siRNA sense strand
acagagaacaagauggugu

SEQ ID NO: 2404051 - RNA, 19 nt, Homo sapiens
  misc_RNA (1)...(19): siRNA sense strand
uaccaucgugugugagaaa

SEQ ID NO: 2404052 - RNA, 19 nt, Homo sapiens
  misc_RNA (1)...(19): siRNA sense strand
ggucaaugcuuuccagccu

SEQ ID NO: 2404053 - RNA, 19 nt, Homo sapiens
  misc_RNA (1)...(19): siRNA sense strand
uggcuuuggcugugagagu

SEQ ID NO: 2404054 - RNA, 19 nt, Homo sapiens
  misc_RNA (1)...(19): siRNA sense strand
aagaagacaagaagcgagu

SEQ ID NO: 2404055 - RNA, 19 nt, Homo sapiens
  misc_RNA (1)...(19): siRNA sense strand
caucaauaaccgagagugc

SEQ ID NO: 2404056 - RNA, 19 nt, Homo sapiens
  misc_RNA (1)...(19): siRNA sense strand
cugccagcuuggauggaga

SEQ ID NO: 2404057 - RNA, 19 nt, Homo sapiens
  misc_RNA (1)...(19): siRNA sense strand
aguacaucuucuccgauaa

SEQ ID NO: 2404058 - RNA, 19 nt, Homo sapiens
  misc_RNA (1)...(19): siRNA sense strand
ggagaguauuggaaggaca

SEQ ID NO: 2404059 - RNA, 19 nt, Homo sapiens
  misc_RNA (1)...(19): siRNA sense strand
ccacagaucaggagcacca

SEQ ID NO: 2404060 - RNA, 19 nt, Homo sapiens
  misc_RNA (1)...(19): siRNA sense strand
gcuaagugucagagaugga

SEQ ID NO: 2404061 - RNA, 19 nt, Homo sapiens
  misc_RNA (1)...(19): siRNA sense strand
gaauuggccuagauggcau

SEQ ID NO: 2404062 - RNA, 19 nt, Homo sapiens
  misc_RNA (1)...(19): siRNA sense strand
cuuugaggauucagagcga

SEQ ID NO: 2404063 - RNA, 19 nt, Homo sapiens
  misc_RNA (1)...(19): siRNA sense strand
agauauggucagcugaaga

SEQ ID NO: 2404064 - RNA, 19 nt, Homo sapiens
  misc_RNA (1)...(19): siRNA sense strand
uugucaaggaauuggccua

SEQ ID NO: 2404065 - RNA, 19 nt, Homo sapiens
  misc_RNA (1)...(19): siRNA sense strand
cucaaaagccagagauaua

SEQ ID NO: 2404066 - RNA, 19 nt, Homo sapiens
  misc_RNA (1)...(19): siRNA sense strand
aaaaggaagaggagacaaa

SEQ ID NO: 2404067 - RNA, 19 nt, Homo sapiens
  misc_RNA (1)...(19): siRNA sense strand
agcagaagucagagaguca

SEQ ID NO: 2404068 - RNA, 19 nt, Homo sapiens
  misc_RNA (1)...(19): siRNA sense strand
gggaaaaggaagaggagac

SEQ ID NO: 2404069 - RNA, 19 nt, Homo sapiens
  misc_RNA (1)...(19): siRNA sense strand
aaacaguacauuauggaca

SEQ ID NO: 2404070 - RNA, 19 nt, Homo sapiens
  misc_RNA (1)...(19): siRNA sense strand
aacaagcaucaaagagaaa

SEQ ID NO: 2404071 - RNA, 19 nt, Homo sapiens
  misc_RNA (1)...(19): siRNA sense strand
gaauauggcccuuugcuga

SEQ ID NO: 2404072 - RNA, 19 nt, Homo sapiens
  misc_RNA (1)...(19): siRNA sense strand
aaggaagaggagacaaauu

SEQ ID NO: 2404073 - RNA, 19 nt, Homo sapiens
  misc_RNA (1)...(19): siRNA sense strand
cuugaguacuggaaugaca

SEQ ID NO: 2404074 - RNA, 19 nt, Homo sapiens
  misc_RNA (1)...(19): siRNA sense strand
agagagaagaaucuggaga

SEQ ID NO: 2404075 - RNA, 19 nt, Homo sapiens
  misc_RNA (1)...(19): siRNA sense strand
agaagaaucuggagaccuc

SEQ ID NO: 2404076 - RNA, 19 nt, Homo sapiens
  misc_RNA (1)...(19): siRNA sense strand
ucucaguauagcaauguaa

SEQ ID NO: 2404077 - RNA, 19 nt, Homo sapiens
  misc_RNA (1)...(19): siRNA sense strand
guuccaucuucuugcaaaa

SEQ ID NO: 2404078 - RNA, 19 nt, Homo sapiens
  misc_RNA (1)...(19): siRNA sense strand
caucaucaguucagggaca

SEQ ID NO: 2404079 - RNA, 19 nt, Homo sapiens
  misc_RNA (1)...(19): siRNA sense strand
aggauuuacaagagggaga

SEQ ID NO: 2404080 - RNA, 19 nt, Homo sapiens
  misc_RNA (1)...(19): siRNA sense strand
agcaagaagaugaggacau

SEQ ID NO: 2404081 - RNA, 19 nt, Homo sapiens
  misc_RNA (1)...(19): siRNA sense strand
cccaaguuacagagaagaa

SEQ ID NO: 2404082 - RNA, 19 nt, Homo sapiens
  misc_RNA (1)...(19): siRNA sense strand
ccacuguagaacuggaaga

SEQ ID NO: 2404083 - RNA, 19 nt, Homo sapiens
  misc_RNA (1)...(19): siRNA sense strand
agacaagauaauccaggaa

SEQ ID NO: 2404084 - RNA, 19 nt, Homo sapiens
  misc_RNA (1)...(19): siRNA sense strand
caagaaacguucagugccu

SEQ ID NO: 2404085 - RNA, 19 nt, Homo sapiens
  misc_RNA (1)...(19): siRNA sense strand
gcuuggaccuugugugcca

SEQ ID NO: 2404086 - RNA, 19 nt, Homo sapiens
  misc_RNA (1)...(19): siRNA sense strand
aggcuauucugaaggagau

SEQ ID NO: 2404087 - RNA, 19 nt, Homo sapiens
  misc_RNA (1)...(19): siRNA sense strand
agagcugggagcagagauu

SEQ ID NO: 2404088 - RNA, 19 nt, Homo sapiens
  misc_RNA (1)...(19): siRNA sense strand
cagaacagcaacaugccua

SEQ ID NO: 2404089 - RNA, 19 nt, Homo sapiens
  misc_RNA (1)...(19): siRNA sense strand
gaggaaaagaacaggggca

SEQ ID NO: 2404090 - RNA, 19 nt, Homo sapiens
  misc_RNA (1)...(19): siRNA sense strand
gaggcuauucugaaggaga

SEQ ID NO: 2404091 - RNA, 19 nt, Homo sapiens
  misc_RNA (1)...(19): siRNA sense strand
gccggaaacgucuggacaa

SEQ ID NO: 2404092 - RNA, 19 nt, Homo sapiens
  misc_RNA (1)...(19): siRNA sense strand
agcugggagcagagauuaa

SEQ ID NO: 2404093 - RNA, 19 nt, Homo sapiens
  misc_RNA (1)...(19): siRNA sense strand
caagggagcacauggcaca

SEQ ID NO: 2404094 - RNA, 19 nt, Homo sapiens
  misc_RNA (1)...(19): siRNA sense strand
agcaggacuuugagacaga

SEQ ID NO: 2404095 - RNA, 19 nt, Homo sapiens
  misc_RNA (1)...(19): siRNA sense strand
uuuacaagagggagaagau

SEQ ID NO: 2404096 - RNA, 19 nt, Homo sapiens
  misc_RNA (1)...(19): siRNA sense strand
gcacauggcacagugggaa

SEQ ID NO: 2404097 - RNA, 19 nt, Homo sapiens
  misc_RNA (1)...(19): siRNA sense strand
ugagcaggacuuugagaca

SEQ ID NO: 2404098 - RNA, 19 nt, Homo sapiens
  misc_RNA (1)...(19): siRNA sense strand
ucauagagcugggagcaga

SEQ ID NO: 2404099 - RNA, 19 nt, Homo sapiens
  misc_RNA (1)...(19): siRNA sense strand
aagcaguacccaaguuaca

SEQ ID NO: 2404100 - RNA, 19 nt, Homo sapiens
  misc_RNA (1)...(19): siRNA sense strand
guaaaguagaagagguuau

SEQ ID NO: 2404101 - RNA, 19 nt, Homo sapiens
  misc_RNA (1)...(19): siRNA sense strand
guuagaaguuuuagaggaa

SEQ ID NO: 2404102 - RNA, 19 nt, Homo sapiens
  misc_RNA (1)...(19): siRNA sense strand
gguuaauugcacagggaga

SEQ ID NO: 2404103 - RNA, 19 nt, Homo sapiens
  misc_RNA (1)...(19): siRNA sense strand
gcaccagagaagaggcaau

SEQ ID NO: 2404104 - RNA, 19 nt, Homo sapiens
  misc_RNA (1)...(19): siRNA sense strand
uggcauggaagucgggaaa

SEQ ID NO: 2404105 - RNA, 19 nt, Homo sapiens
  misc_RNA (1)...(19): siRNA sense strand
cuguaaaguagaagagguu

SEQ ID NO: 2404106 - RNA, 19 nt, Homo sapiens
  misc_RNA (1)...(19): siRNA sense strand
gagcaagauaccuggguca

SEQ ID NO: 2404107 - RNA, 19 nt, Homo sapiens
  misc_RNA (1)...(19): siRNA sense strand
agaaagagaacggcggaaa

SEQ ID NO: 2404108 - RNA, 19 nt, Homo sapiens
  misc_RNA (1)...(19): siRNA sense strand
ucaccauguuacugauaaa

SEQ ID NO: 2404109 - RNA, 19 nt, Homo sapiens
  misc_RNA (1)...(19): siRNA sense strand
caagagagacagugaaaau

SEQ ID NO: 2404110 - RNA, 19 nt, Homo sapiens
  misc_RNA (1)...(19): siRNA sense strand
aauuaggaauggagcaaga

SEQ ID NO: 2404111 - RNA, 19 nt, Homo sapiens
  misc_RNA (1)...(19): siRNA sense strand
uuucaaaggguguaagauu

SEQ ID NO: 2404112 - RNA, 19 nt, Homo sapiens
  misc_RNA (1)...(19): siRNA sense strand
gugucauggcuguuggaaa

SEQ ID NO: 2404113 - RNA, 19 nt, Homo sapiens
  misc_RNA (1)...(19): siRNA sense strand
ggcuaaaagugaugagcau

SEQ ID NO: 2404114 - RNA, 19 nt, Homo sapiens
  misc_RNA (1)...(19): siRNA sense strand
gaaaugagaugcaggacgu

SEQ ID NO: 2404115 - RNA, 19 nt, Homo sapiens
  misc_RNA (1)...(19): siRNA sense strand
cacaaagccaagagagaca

SEQ ID NO: 2404116 - RNA, 19 nt, Homo sapiens
  misc_RNA (1)...(19): siRNA sense strand
uuaucaaggugaauggaau

SEQ ID NO: 2404117 - RNA, 19 nt, Homo sapiens
  misc_RNA (1)...(19): siRNA sense strand
agugcaaugugguggaaaa

SEQ ID NO: 2404118 - RNA, 19 nt, Homo sapiens
  misc_RNA (1)...(19): siRNA sense strand
aggugauggaaguggagaa

SEQ ID NO: 2404119 - RNA, 19 nt, Homo sapiens
  misc_RNA (1)...(19): siRNA sense strand
acuccagugauaagagaua

SEQ ID NO: 2404120 - RNA, 19 nt, Homo sapiens
  misc_RNA (1)...(19): siRNA sense strand
gggugagaaacuuuauaaa

SEQ ID NO: 2404121 - RNA, 19 nt, Homo sapiens
  misc_RNA (1)...(19): siRNA sense strand
ccuacaaaucuguggucau

SEQ ID NO: 2404122 - RNA, 19 nt, Homo sapiens
  misc_RNA (1)...(19): siRNA sense strand
guguggagucuuacugaaa

SEQ ID NO: 2404123 - RNA, 19 nt, Homo sapiens
  misc_RNA (1)...(19): siRNA sense strand
augaaugguuugaagcuau

SEQ ID NO: 2404124 - RNA, 19 nt, Homo sapiens
  misc_RNA (1)...(19): siRNA sense strand
agcacaaagccaagagaga

SEQ ID NO: 2404125 - RNA, 19 nt, Homo sapiens
  misc_RNA (1)...(19): siRNA sense strand
agaaggagcaugugagucu

SEQ ID NO: 2404126 - RNA, 19 nt, Homo sapiens
  misc_RNA (1)...(19): siRNA sense strand
aagcaagauuccauacaau

SEQ ID NO: 2404127 - RNA, 19 nt, Homo sapiens
  misc_RNA (1)...(19): siRNA sense strand
gggaagaaggagcauguga

SEQ ID NO: 2404128 - RNA, 19 nt, Homo sapiens
  misc_RNA (1)...(19): siRNA sense strand
ugugcaugcuguaggaaga

SEQ ID NO: 2404129 - RNA, 19 nt, Homo sapiens
  misc_RNA (1)...(19): siRNA sense strand
ucgcuaugaugauggaaca

SEQ ID NO: 2404130 - RNA, 19 nt, Homo sapiens
  misc_RNA (1)...(19): siRNA sense strand
gaguaaauucagugcccuu

SEQ ID NO: 2404131 - RNA, 19 nt, Homo sapiens
  misc_RNA (1)...(19): siRNA sense strand
uguuaauggauggaagaua

SEQ ID NO: 2404132 - RNA, 19 nt, Homo sapiens
  misc_RNA (1)...(19): siRNA sense strand
cguuggacucugugacaau

SEQ ID NO: 2404133 - RNA, 19 nt, Homo sapiens
  misc_RNA (1)...(19): siRNA sense strand
augaggaaauggagggauc

SEQ ID NO: 2404134 - RNA, 19 nt, Homo sapiens
  misc_RNA (1)...(19): siRNA sense strand
cucugaacagggugagaaa

SEQ ID NO: 2404135 - RNA, 19 nt, Homo sapiens
  misc_RNA (1)...(19): siRNA sense strand
cugaacagggugagaaacu

SEQ ID NO: 2404136 - RNA, 19 nt, Homo sapiens
  misc_RNA (1)...(19): siRNA sense strand
cggccaacgaagcaagauu

SEQ ID NO: 2404137 - RNA, 19 nt, Homo sapiens
  misc_RNA (1)...(19): siRNA sense strand
uggaaauuggagagauuca

SEQ ID NO: 2404138 - RNA, 19 nt, Homo sapiens
  misc_RNA (1)...(19): siRNA sense strand
ugcuauuaauggugaccua

SEQ ID NO: 2404139 - RNA, 19 nt, Homo sapiens
  misc_RNA (1)...(19): siRNA sense strand
cagcuggcaucaagugcaa

SEQ ID NO: 2404140 - RNA, 19 nt, Homo sapiens
  misc_RNA (1)...(19): siRNA sense strand
caccuaugucagagaauau

SEQ ID NO: 2404141 - RNA, 19 nt, Homo sapiens
  misc_RNA (1)...(19): siRNA sense strand
gauacauaacacagcaaaa

SEQ ID NO: 2404142 - RNA, 19 nt, Homo sapiens
  misc_RNA (1)...(19): siRNA sense strand
caugaaugguuugaagcua

SEQ ID NO: 2404143 - RNA, 19 nt, Homo sapiens
  misc_RNA (1)...(19): siRNA sense strand
agagaagaggcaaugauau

SEQ ID NO: 2404144 - RNA, 19 nt, Homo sapiens
  misc_RNA (1)...(19): siRNA sense strand
cuaaaagugaugagcauuu

SEQ ID NO: 2404145 - RNA, 19 nt, Homo sapiens
  misc_RNA (1)...(19): siRNA sense strand
aaucuguggucauggccaa

SEQ ID NO: 2404146 - RNA, 19 nt, Homo sapiens
  misc_RNA (1)...(19): siRNA sense strand
ggaaaauguuauagcuaag

SEQ ID NO: 2404147 - RNA, 19 nt, Homo sapiens
  misc_RNA (1)...(19): siRNA sense strand
aaguagaagagguuauuga

SEQ ID NO: 2404148 - RNA, 19 nt, Homo sapiens
  misc_RNA (1)...(19): siRNA sense strand
uugaagaacagcaaggcau

SEQ ID NO: 2404149 - RNA, 19 nt, Homo sapiens
  misc_RNA (1)...(19): siRNA sense strand
ggugauggaaguggagaau

SEQ ID NO: 2404150 - RNA, 19 nt, Homo sapiens
  misc_RNA (1)...(19): siRNA sense strand
gacaaggaaaucugaucaa

SEQ ID NO: 2404151 - RNA, 19 nt, Homo sapiens
  misc_RNA (1)...(19): siRNA sense strand
uggaauauggugucgugua

SEQ ID NO: 2404152 - RNA, 19 nt, Homo sapiens
  misc_RNA (1)...(19): siRNA sense strand
caagaaaugagaugcagga

SEQ ID NO: 2404153 - RNA, 19 nt, Homo sapiens
  misc_RNA (1)...(19): siRNA sense strand
gaggaaauggagggaucaa

SEQ ID NO: 2404154 - RNA, 19 nt, Homo sapiens
  misc_RNA (1)...(19): siRNA sense strand
gcaaugugguggaaaagau

SEQ ID NO: 2404155 - RNA, 19 nt, Homo sapiens
  misc_RNA (1)...(19): siRNA sense strand
gugaaagaauugaacaccu

SEQ ID NO: 2404156 - RNA, 19 nt, Homo sapiens
  misc_RNA (1)...(19): siRNA sense strand
guuacagccugcaggaagu

SEQ ID NO: 2404157 - RNA, 19 nt, Homo sapiens
  misc_RNA (1)...(19): siRNA sense strand
ggacauucucggagggcua

SEQ ID NO: 2404158 - RNA, 19 nt, Homo sapiens
  misc_RNA (1)...(19): siRNA sense strand
ccuaaagauaagaaagaca

SEQ ID NO: 2404159 - RNA, 19 nt, Homo sapiens
  misc_RNA (1)...(19): siRNA sense strand
ggauaacaaggaugggaca

SEQ ID NO: 2404160 - RNA, 19 nt, Homo sapiens
  misc_RNA (1)...(19): siRNA sense strand
guaccuaggcuguggccau

SEQ ID NO: 2404161 - RNA, 19 nt, Homo sapiens
  misc_RNA (1)...(19): siRNA sense strand
uaaaagacuugaaaggcua

SEQ ID NO: 2404162 - RNA, 19 nt, Homo sapiens
  misc_RNA (1)...(19): siRNA sense strand
auaacaaggaugggacaua

SEQ ID NO: 2404163 - RNA, 19 nt, Homo sapiens
  misc_RNA (1)...(19): siRNA sense strand
ugagaaaucugaaugcaca

SEQ ID NO: 2404164 - RNA, 19 nt, Homo sapiens
  misc_RNA (1)...(19): siRNA sense strand
ugucagaccugcaaagcca

SEQ ID NO: 2404165 - RNA, 19 nt, Homo sapiens
  misc_RNA (1)...(19): siRNA sense strand
gcuaugaaauuuaugguac

SEQ ID NO: 2404166 - RNA, 19 nt, Homo sapiens
  misc_RNA (1)...(19): siRNA sense strand
gcaucaaagaacagcaugu

SEQ ID NO: 2404167 - RNA, 19 nt, Homo sapiens
  misc_RNA (1)...(19): siRNA sense strand
gugccguggcuaugaaauu

SEQ ID NO: 2404168 - RNA, 19 nt, Homo sapiens
  misc_RNA (1)...(19): siRNA sense strand
caaacucacuagugggacu

SEQ ID NO: 2404169 - RNA, 19 nt, Homo sapiens
  misc_RNA (1)...(19): siRNA sense strand
ugguagaacggcucaggaa

SEQ ID NO: 2404170 - RNA, 19 nt, Homo sapiens
  misc_RNA (1)...(19): siRNA sense strand
ccguugucccuaaagauaa

SEQ ID NO: 2404171 - RNA, 19 nt, Homo sapiens
  misc_RNA (1)...(19): siRNA sense strand
ucccuaaagauaagaaaga

SEQ ID NO: 2404172 - RNA, 19 nt, Homo sapiens
  misc_RNA (1)...(19): siRNA sense strand
acgacagggaaguagagaa

SEQ ID NO: 2404173 - RNA, 19 nt, Homo sapiens
  misc_RNA (1)...(19): siRNA sense strand
gcagaggaacugaggcugu

SEQ ID NO: 2404174 - RNA, 19 nt, Homo sapiens
  misc_RNA (1)...(19): siRNA sense strand
guaaggaugccgcaggaga

SEQ ID NO: 2404175 - RNA, 19 nt, Homo sapiens
  misc_RNA (1)...(19): siRNA sense strand
gggucugcaucaaagaaca

SEQ ID NO: 2404176 - RNA, 19 nt, Homo sapiens
  misc_RNA (1)...(19): siRNA sense strand
cugugacggugaggagaaa

SEQ ID NO: 2404177 - RNA, 19 nt, Homo sapiens
  misc_RNA (1)...(19): siRNA sense strand
ccuucucaguaguggacau

SEQ ID NO: 2404178 - RNA, 19 nt, Homo sapiens
  misc_RNA (1)...(19): siRNA sense strand
gggaaguagagaagaggug

SEQ ID NO: 2404179 - RNA, 19 nt, Homo sapiens
  misc_RNA (1)...(19): siRNA sense strand
caggagaaaucaugggcag

SEQ ID NO: 2404180 - RNA, 19 nt, Homo sapiens
  misc_RNA (1)...(19): siRNA sense strand
acugugacggugaggagaa

SEQ ID NO: 2404181 - RNA, 19 nt, Homo sapiens
  misc_RNA (1)...(19): siRNA sense strand
caaugguccaggauaacaa

SEQ ID NO: 2404182 - RNA, 19 nt, Homo sapiens
  misc_RNA (1)...(19): siRNA sense strand
gagaaaucugaaugcacau

SEQ ID NO: 2404183 - RNA, 19 nt, Homo sapiens
  misc_RNA (1)...(19): siRNA sense strand
ggacagagcuggaaacgca

SEQ ID NO: 2404184 - RNA, 19 nt, Homo sapiens
  misc_RNA (1)...(19): siRNA sense strand
ggucagagcuggagacgac

SEQ ID NO: 2404185 - RNA, 19 nt, Homo sapiens
  misc_RNA (1)...(19): siRNA sense strand
uggaagaccuccuggcuga

SEQ ID NO: 2404186 - RNA, 19 nt, Homo sapiens
  misc_RNA (1)...(19): siRNA sense strand
ggaccuaucuggaagagga

SEQ ID NO: 2404187 - RNA, 19 nt, Homo sapiens
  misc_RNA (1)...(19): siRNA sense strand
ggaugauagacuucggcaa

SEQ ID NO: 2404188 - RNA, 19 nt, Homo sapiens
  misc_RNA (1)...(19): siRNA sense strand
cagacugccucuugggaga

SEQ ID NO: 2404189 - RNA, 19 nt, Homo sapiens
  misc_RNA (1)...(19): siRNA sense strand
ugacaaaagugcuggagga

SEQ ID NO: 2404190 - RNA, 19 nt, Homo sapiens
  misc_RNA (1)...(19): siRNA sense strand
ccgagaggcccaagcaaaa

SEQ ID NO: 2404191 - RNA, 19 nt, Homo sapiens
  misc_RNA (1)...(19): siRNA sense strand
ucgacgagucugaggauga

SEQ ID NO: 2404192 - RNA, 19 nt, Homo sapiens
  misc_RNA (1)...(19): siRNA sense strand
gcuggaaacgcauggguca

SEQ ID NO: 2404193 - RNA, 19 nt, Homo sapiens
  misc_RNA (1)...(19): siRNA sense strand
ggucacagacucagccaga

SEQ ID NO: 2404194 - RNA, 19 nt, Homo sapiens
  misc_RNA (1)...(19): siRNA sense strand
aggacauguaugagaagau

SEQ ID NO: 2404195 - RNA, 19 nt, Homo sapiens
  misc_RNA (1)...(19): siRNA sense strand
aggacuucguggauggaga

SEQ ID NO: 2404196 - RNA, 19 nt, Homo sapiens
  misc_RNA (1)...(19): siRNA sense strand
augagaagaugguggcugu

SEQ ID NO: 2404197 - RNA, 19 nt, Homo sapiens
  misc_RNA (1)...(19): siRNA sense strand
gcuuccggaucgagggcau

SEQ ID NO: 2404198 - RNA, 19 nt, Homo sapiens
  misc_RNA (1)...(19): siRNA sense strand
accgagaggcccaagcaaa

SEQ ID NO: 2404199 - RNA, 19 nt, Homo sapiens
  misc_RNA (1)...(19): siRNA sense strand
ggccagaccuucaaccaga

SEQ ID NO: 2404200 - RNA, 19 nt, Homo sapiens
  misc_RNA (1)...(19): siRNA sense strand
agggaaaccaugagcucca

SEQ ID NO: 2404201 - RNA, 19 nt, Homo sapiens
  misc_RNA (1)...(19): siRNA sense strand
cguggcaugccuagaagaa

SEQ ID NO: 2404202 - RNA, 19 nt, Homo sapiens
  misc_RNA (1)...(19): siRNA sense strand
ggaagugauccuuggggaa

SEQ ID NO: 2404203 - RNA, 19 nt, Homo sapiens
  misc_RNA (1)...(19): siRNA sense strand
uuaaacacuaccaggacaa

SEQ ID NO: 2404204 - RNA, 19 nt, Homo sapiens
  misc_RNA (1)...(19): siRNA sense strand
cauuacuggcauuguggaa

SEQ ID NO: 2404205 - RNA, 19 nt, Homo sapiens
  misc_RNA (1)...(19): siRNA sense strand
gagaaggacuuuggggaca

SEQ ID NO: 2404206 - RNA, 19 nt, Homo sapiens
  misc_RNA (1)...(19): siRNA sense strand
aggucaaguuggaggaaca

SEQ ID NO: 2404207 - RNA, 19 nt, Homo sapiens
  misc_RNA (1)...(19): siRNA sense strand
uggaagaggacauggguca

SEQ ID NO: 2404208 - RNA, 19 nt, Homo sapiens
  misc_RNA (1)...(19): siRNA sense strand
gccagaaauugguggagga

SEQ ID NO: 2404209 - RNA, 19 nt, Homo sapiens
  misc_RNA (1)...(19): siRNA sense strand
gaggaacagcugaaggaga

SEQ ID NO: 2404210 - RNA, 19 nt, Homo sapiens
  misc_RNA (1)...(19): siRNA sense strand
aggcaaaauuauacggcau

SEQ ID NO: 2404211 - RNA, 19 nt, Homo sapiens
  misc_RNA (1)...(19): siRNA sense strand
aauugguggaggaggcaaa

SEQ ID NO: 2404212 - RNA, 19 nt, Homo sapiens
  misc_RNA (1)...(19): siRNA sense strand
ggguggugaaggaagcuua

SEQ ID NO: 2404213 - RNA, 19 nt, Homo sapiens
  misc_RNA (1)...(19): siRNA sense strand
acugagaacuuacggcaga

SEQ ID NO: 2404214 - RNA, 19 nt, Homo sapiens
  misc_RNA (1)...(19): siRNA sense strand
cuuaugaacaugaggccuu

SEQ ID NO: 2404215 - RNA, 19 nt, Homo sapiens
  misc_RNA (1)...(19): siRNA sense strand
aggacaugggucagaguga

SEQ ID NO: 2404216 - RNA, 19 nt, Homo sapiens
  misc_RNA (1)...(19): siRNA sense strand
agagugaacagaaggcaga

SEQ ID NO: 2404217 - RNA, 19 nt, Homo sapiens
  misc_RNA (1)...(19): siRNA sense strand
aggaacagcugaaggagac

SEQ ID NO: 2404218 - RNA, 19 nt, Homo sapiens
  misc_RNA (1)...(19): siRNA sense strand
cugaaggagacuguggaaa

SEQ ID NO: 2404219 - RNA, 19 nt, Homo sapiens
  misc_RNA (1)...(19): siRNA sense strand
acacaccgguugaggggaa

SEQ ID NO: 2404220 - RNA, 19 nt, Homo sapiens
  misc_RNA (1)...(19): siRNA sense strand
agaaauugguggaggaggc

SEQ ID NO: 2404221 - RNA, 19 nt, Homo sapiens
  misc_RNA (1)...(19): siRNA sense strand
aguugaaagcugagcaaga

SEQ ID NO: 2404222 - RNA, 19 nt, Homo sapiens
  misc_RNA (1)...(19): siRNA sense strand
ccaguaaguuugaagcaga

SEQ ID NO: 2404223 - RNA, 19 nt, Homo sapiens
  misc_RNA (1)...(19): siRNA sense strand
uccagaaacucaaggccaa

SEQ ID NO: 2404224 - RNA, 19 nt, Homo sapiens
  misc_RNA (1)...(19): siRNA sense strand
aagcagaguugaaagcuga

SEQ ID NO: 2404225 - RNA, 19 nt, Homo sapiens
  misc_RNA (1)...(19): siRNA sense strand
augaggacuucgauggcaa

SEQ ID NO: 2404226 - RNA, 19 nt, Homo sapiens
  misc_RNA (1)...(19): siRNA sense strand
aguuugaagcagaguugaa

SEQ ID NO: 2404227 - RNA, 19 nt, Homo sapiens
  misc_RNA (1)...(19): siRNA sense strand
ucaaggagguggaugagga

SEQ ID NO: 2404228 - RNA, 19 nt, Homo sapiens
  misc_RNA (1)...(19): siRNA sense strand
cugagcaagaugagcggaa

SEQ ID NO: 2404229 - RNA, 19 nt, Homo sapiens
  misc_RNA (1)...(19): siRNA sense strand
ggcugauggcgcuggcaaa

SEQ ID NO: 2404230 - RNA, 19 nt, Homo sapiens
  misc_RNA (1)...(19): siRNA sense strand
aggagguggaugaggacuu

SEQ ID NO: 2404231 - RNA, 19 nt, Homo sapiens
  misc_RNA (1)...(19): siRNA sense strand
agaguugaaagcugagcaa

SEQ ID NO: 2404232 - RNA, 19 nt, Homo sapiens
  misc_RNA (1)...(19): siRNA sense strand
gccugaagagcaugaucaa

SEQ ID NO: 2404233 - RNA, 19 nt, Homo sapiens
  misc_RNA (1)...(19): siRNA sense strand
agguaaaggcagacaucaa

SEQ ID NO: 2404234 - RNA, 19 nt, Homo sapiens
  misc_RNA (1)...(19): siRNA sense strand
aacauaagucugaggguaa

SEQ ID NO: 2404235 - RNA, 19 nt, Homo sapiens
  misc_RNA (1)...(19): siRNA sense strand
ugucuaaggagguggaaau

SEQ ID NO: 2404236 - RNA, 19 nt, Homo sapiens
  misc_RNA (1)...(19): siRNA sense strand
ugaaagaccaaaagggaua

SEQ ID NO: 2404237 - RNA, 19 nt, Homo sapiens
  misc_RNA (1)...(19): siRNA sense strand
caacauaagucugagggua

SEQ ID NO: 2404238 - RNA, 19 nt, Homo sapiens
  misc_RNA (1)...(19): siRNA sense strand
cugcauaaugggaagaaau

SEQ ID NO: 2404239 - RNA, 19 nt, Homo sapiens
  misc_RNA (1)...(19): siRNA sense strand
gcaaauucgauuagagaac

SEQ ID NO: 2404240 - RNA, 19 nt, Homo sapiens
  misc_RNA (1)...(19): siRNA sense strand
ccaccuaacaguaaagaca

SEQ ID NO: 2404241 - RNA, 19 nt, Homo sapiens
  misc_RNA (1)...(19): siRNA sense strand
cugaugauucccagguaaa

SEQ ID NO: 2404242 - RNA, 19 nt, Homo sapiens
  misc_RNA (1)...(19): siRNA sense strand
cgauuagagaacacugaaa

SEQ ID NO: 2404243 - RNA, 19 nt, Homo sapiens
  misc_RNA (1)...(19): siRNA sense strand
ggaguugggaaaaggaaaa

SEQ ID NO: 2404244 - RNA, 19 nt, Homo sapiens
  misc_RNA (1)...(19): siRNA sense strand
gagucaagcaaauggcuga

SEQ ID NO: 2404245 - RNA, 19 nt, Homo sapiens
  misc_RNA (1)...(19): siRNA sense strand
cuuacaaagugaaaaggaa

SEQ ID NO: 2404246 - RNA, 19 nt, Homo sapiens
  misc_RNA (1)...(19): siRNA sense strand
gagaacacugaaagaccaa

SEQ ID NO: 2404247 - RNA, 19 nt, Homo sapiens
  misc_RNA (1)...(19): siRNA sense strand
uugugagauuagaggauca

SEQ ID NO: 2404248 - RNA, 19 nt, Homo sapiens
  misc_RNA (1)...(19): siRNA sense strand
gcuucucugugaugguaaa

SEQ ID NO: 2404249 - RNA, 19 nt, Homo sapiens
  misc_RNA (1)...(19): siRNA sense strand
cuucacagccacacaggaa

SEQ ID NO: 2404250 - RNA, 19 nt, Homo sapiens
  misc_RNA (1)...(19): siRNA sense strand
agucacuauuccaggcauu

SEQ ID NO: 2404251 - RNA, 19 nt, Homo sapiens
  misc_RNA (1)...(19): siRNA sense strand
cuuacaaaccgucugcaua

SEQ ID NO: 2404252 - RNA, 19 nt, Homo sapiens
  misc_RNA (1)...(19): siRNA sense strand
ugagauuagaggaucacua

SEQ ID NO: 2404253 - RNA, 19 nt, Homo sapiens
  misc_RNA (1)...(19): siRNA sense strand
ucugaugauucccagguaa

SEQ ID NO: 2404254 - RNA, 19 nt, Homo sapiens
  misc_RNA (1)...(19): siRNA sense strand
ccguuaaccuucacagcca

SEQ ID NO: 2404255 - RNA, 19 nt, Homo sapiens
  misc_RNA (1)...(19): siRNA sense strand
aaggacuacuugacaggaa

SEQ ID NO: 2404256 - RNA, 19 nt, Homo sapiens
  misc_RNA (1)...(19): siRNA sense strand
agcuugauuguuagagaaa

SEQ ID NO: 2404257 - RNA, 19 nt, Homo sapiens
  misc_RNA (1)...(19): siRNA sense strand
cuggaagaacacuuauuaa

SEQ ID NO: 2404258 - RNA, 19 nt, Homo sapiens
  misc_RNA (1)...(19): siRNA sense strand
gaugguaaacuaaggcuca

SEQ ID NO: 2404259 - RNA, 19 nt, Homo sapiens
  misc_RNA (1)...(19): siRNA sense strand
caguaugccauuagcuuga

SEQ ID NO: 2404260 - RNA, 19 nt, Homo sapiens
  misc_RNA (1)...(19): siRNA sense strand
ggcuuaaaugcaucugaaa

SEQ ID NO: 2404261 - RNA, 19 nt, Homo sapiens
  misc_RNA (1)...(19): siRNA sense strand
aaguacgcucuauggauaa

SEQ ID NO: 2404262 - RNA, 19 nt, Homo sapiens
  misc_RNA (1)...(19): siRNA sense strand
acauaagucugaggguaau

SEQ ID NO: 2404263 - RNA, 19 nt, Homo sapiens
  misc_RNA (1)...(19): siRNA sense strand
ccucaaagaaagaacuuac

SEQ ID NO: 2404264 - RNA, 19 nt, Homo sapiens
  misc_RNA (1)...(19): siRNA sense strand
ggaaugaauuacagcggaa

SEQ ID NO: 2404265 - RNA, 19 nt, Homo sapiens
  misc_RNA (1)...(19): siRNA sense strand
uugacaaagcugaggcauu

SEQ ID NO: 2404266 - RNA, 19 nt, Homo sapiens
  misc_RNA (1)...(19): siRNA sense strand
gcaaguuaucaaagaggau

SEQ ID NO: 2404267 - RNA, 19 nt, Homo sapiens
  misc_RNA (1)...(19): siRNA sense strand
uguccagaaaccagagcaa

SEQ ID NO: 2404268 - RNA, 19 nt, Homo sapiens
  misc_RNA (1)...(19): siRNA sense strand
cugaagccaacgugagcaa

SEQ ID NO: 2404269 - RNA, 19 nt, Homo sapiens
  misc_RNA (1)...(19): siRNA sense strand
ggaaagaugcacuagucca

SEQ ID NO: 2404270 - RNA, 19 nt, Homo sapiens
  misc_RNA (1)...(19): siRNA sense strand
guccagaagcacuugacaa

SEQ ID NO: 2404271 - RNA, 19 nt, Homo sapiens
  misc_RNA (1)...(19): siRNA sense strand
ggaagaaauucgaaccggu

SEQ ID NO: 2404272 - RNA, 19 nt, Homo sapiens
  misc_RNA (1)...(19): siRNA sense strand
agaggaugugucagaacua

SEQ ID NO: 2404273 - RNA, 19 nt, Homo sapiens
  misc_RNA (1)...(19): siRNA sense strand
auugcaagacagacagaau

SEQ ID NO: 2404274 - RNA, 19 nt, Homo sapiens
  misc_RNA (1)...(19): siRNA sense strand
acgaauacgccucgauaaa

SEQ ID NO: 2404275 - RNA, 19 nt, Homo sapiens
  misc_RNA (1)...(19): siRNA sense strand
aagccaaacuacugcuaaa

SEQ ID NO: 2404276 - RNA, 19 nt, Homo sapiens
  misc_RNA (1)...(19): siRNA sense strand
ucccagaggcagaaaguaa

SEQ ID NO: 2404277 - RNA, 19 nt, Homo sapiens
  misc_RNA (1)...(19): siRNA sense strand
ccggaauggagaaggaaga

SEQ ID NO: 2404278 - RNA, 19 nt, Homo sapiens
  misc_RNA (1)...(19): siRNA sense strand
aggaagaggagucggaaca

SEQ ID NO: 2404279 - RNA, 19 nt, Homo sapiens
  misc_RNA (1)...(19): siRNA sense strand
ccgaacaggaacagcacaa

SEQ ID NO: 2404280 - RNA, 19 nt, Homo sapiens
  misc_RNA (1)...(19): siRNA sense strand
gcuaaaagaagaugaugaa

SEQ ID NO: 2404281 - RNA, 19 nt, Homo sapiens
  misc_RNA (1)...(19): siRNA sense strand
aguauaaaccgaacaggaa

SEQ ID NO: 2404282 - RNA, 19 nt, Homo sapiens
  misc_RNA (1)...(19): siRNA sense strand
gggaauuuaagaugccaaa

SEQ ID NO: 2404283 - RNA, 19 nt, Homo sapiens
  misc_RNA (1)...(19): siRNA sense strand
ggguuuagaaagaacacua

SEQ ID NO: 2404284 - RNA, 19 nt, Homo sapiens
  misc_RNA (1)...(19): siRNA sense strand
gauuaggggaugugcgaua

SEQ ID NO: 2404285 - RNA, 19 nt, Homo sapiens
  misc_RNA (1)...(19): siRNA sense strand
ccgaaacggaaauaugaaa

SEQ ID NO: 2404286 - RNA, 19 nt, Homo sapiens
  misc_RNA (1)...(19): siRNA sense strand
cagcaagcaaauaguaauu

SEQ ID NO: 2404287 - RNA, 19 nt, Homo sapiens
  misc_RNA (1)...(19): siRNA sense strand
cgaucuuauccgaccgaaa

SEQ ID NO: 2404288 - RNA, 19 nt, Homo sapiens
  misc_RNA (1)...(19): siRNA sense strand
uuuagaaggcguacugaaa

SEQ ID NO: 2404289 - RNA, 19 nt, Homo sapiens
  misc_RNA (1)...(19): siRNA sense strand
ugaacaacauagcagacaa

SEQ ID NO: 2404290 - RNA, 19 nt, Homo sapiens
  misc_RNA (1)...(19): siRNA sense strand
agaucuaagucgagcuguu

SEQ ID NO: 2404291 - RNA, 19 nt, Homo sapiens
  misc_RNA (1)...(19): siRNA sense strand
aagcaauggaugugaagga

SEQ ID NO: 2404292 - RNA, 19 nt, Homo sapiens
  misc_RNA (1)...(19): siRNA sense strand
gaguauaaaccgaacagga

SEQ ID NO: 2404293 - RNA, 19 nt, Homo sapiens
  misc_RNA (1)...(19): siRNA sense strand
gaaacaaauaccucggaca

SEQ ID NO: 2404294 - RNA, 19 nt, Homo sapiens
  misc_RNA (1)...(19): siRNA sense strand
ccaccggaauggagaagga

SEQ ID NO: 2404295 - RNA, 19 nt, Homo sapiens
  misc_RNA (1)...(19): siRNA sense strand
ccuacaugacagugacaau

SEQ ID NO: 2404296 - RNA, 19 nt, Homo sapiens
  misc_RNA (1)...(19): siRNA sense strand
ugacagugacaaugaugaa

SEQ ID NO: 2404297 - RNA, 19 nt, Homo sapiens
  misc_RNA (1)...(19): siRNA sense strand
acacuggaaauuauggaaa

SEQ ID NO: 2404298 - RNA, 19 nt, Homo sapiens
  misc_RNA (1)...(19): siRNA sense strand
agguuauggcacagagaca

SEQ ID NO: 2404299 - RNA, 19 nt, Homo sapiens
  misc_RNA (1)...(19): siRNA sense strand
agacuaugacaguguguuu

SEQ ID NO: 2404300 - RNA, 19 nt, Homo sapiens
  misc_RNA (1)...(19): siRNA sense strand
gcaucuaaccagcagaaaa

SEQ ID NO: 2404301 - RNA, 19 nt, Homo sapiens
  misc_RNA (1)...(19): siRNA sense strand
agaucaugucugagguuau

SEQ ID NO: 2404302 - RNA, 19 nt, Homo sapiens
  misc_RNA (1)...(19): siRNA sense strand
ugucugagguuauggcaca

SEQ ID NO: 2404303 - RNA, 19 nt, Homo sapiens
  misc_RNA (1)...(19): siRNA sense strand
ccgaacaauaccagcaaca

SEQ ID NO: 2404304 - RNA, 19 nt, Homo sapiens
  misc_RNA (1)...(19): siRNA sense strand
cccaauaaaugcacgacau

SEQ ID NO: 2404305 - RNA, 19 nt, Homo sapiens
  misc_RNA (1)...(19): siRNA sense strand
cggacaaaucuuucucuaa

SEQ ID NO: 2404306 - RNA, 19 nt, Homo sapiens
  misc_RNA (1)...(19): siRNA sense strand
cggaagcugaggaagacaa

SEQ ID NO: 2404307 - RNA, 19 nt, Homo sapiens
  misc_RNA (1)...(19): siRNA sense strand
cauugcaauuugaggagau

SEQ ID NO: 2404308 - RNA, 19 nt, Homo sapiens
  misc_RNA (1)...(19): siRNA sense strand
ggcaacuggccuuggacua

SEQ ID NO: 2404309 - RNA, 19 nt, Homo sapiens
  misc_RNA (1)...(19): siRNA sense strand
cauuuacagccgaacaaua

SEQ ID NO: 2404310 - RNA, 19 nt, Homo sapiens
  misc_RNA (1)...(19): siRNA sense strand
augcuaaagaucugaauca

SEQ ID NO: 2404311 - RNA, 19 nt, Homo sapiens
  misc_RNA (1)...(19): siRNA sense strand
ccaauaccucagaaacaaa

SEQ ID NO: 2404312 - RNA, 19 nt, Homo sapiens
  misc_RNA (1)...(19): siRNA sense strand
aggaagcaauggaugugaa

SEQ ID NO: 2404313 - RNA, 19 nt, Homo sapiens
  misc_RNA (1)...(19): siRNA sense strand
ugccaauaccucagaaaca

SEQ ID NO: 2404314 - RNA, 19 nt, Homo sapiens
  misc_RNA (1)...(19): siRNA sense strand
guuucuaagacuuuggauu

SEQ ID NO: 2404315 - RNA, 19 nt, Homo sapiens
  misc_RNA (1)...(19): siRNA sense strand
cacuggaaauuauggaaaa

SEQ ID NO: 2404316 - RNA, 19 nt, Homo sapiens
  misc_RNA (1)...(19): siRNA sense strand
cgaaacggaaauaugaaaa

SEQ ID NO: 2404317 - RNA, 19 nt, Homo sapiens
  misc_RNA (1)...(19): siRNA sense strand
acagagacagccaaugaaa

SEQ ID NO: 2404318 - RNA, 19 nt, Homo sapiens
  misc_RNA (1)...(19): siRNA sense strand
gaauggagaaggaagagga

SEQ ID NO: 2404319 - RNA, 19 nt, Homo sapiens
  misc_RNA (1)...(19): siRNA sense strand
aagcugaggaagacaauga

SEQ ID NO: 2404320 - RNA, 19 nt, Homo sapiens
  misc_RNA (1)...(19): siRNA sense strand
ucuaaagaccucagucaga

SEQ ID NO: 2404321 - RNA, 19 nt, Homo sapiens
  misc_RNA (1)...(19): siRNA sense strand
ggagaugauugaccgccua

SEQ ID NO: 2404322 - RNA, 19 nt, Homo sapiens
  misc_RNA (1)...(19): siRNA sense strand
gaaaagaagcccaaagucu

SEQ ID NO: 2404323 - RNA, 19 nt, Homo sapiens
  misc_RNA (1)...(19): siRNA sense strand
gaaacagcagcuugcacaa

SEQ ID NO: 2404324 - RNA, 19 nt, Homo sapiens
  misc_RNA (1)...(19): siRNA sense strand
acaaauucagcaacagcaa

SEQ ID NO: 2404325 - RNA, 19 nt, Homo sapiens
  misc_RNA (1)...(19): siRNA sense strand
agaaagaacacuacagggu

SEQ ID NO: 2404326 - RNA, 19 nt, Homo sapiens
  misc_RNA (1)...(19): siRNA sense strand
gggaaaaucaugaaucaga

SEQ ID NO: 2404327 - RNA, 19 nt, Homo sapiens
  misc_RNA (1)...(19): siRNA sense strand
gucagauacuagucaauau

SEQ ID NO: 2404328 - RNA, 19 nt, Homo sapiens
  misc_RNA (1)...(19): siRNA sense strand
ccuuccagccucaggagua

SEQ ID NO: 2404329 - RNA, 19 nt, Homo sapiens
  misc_RNA (1)...(19): siRNA sense strand
aaacaagagaagcgagaug

SEQ ID NO: 2404330 - RNA, 19 nt, Homo sapiens
  misc_RNA (1)...(19): siRNA sense strand
ggacagagcucauucagac

SEQ ID NO: 2404331 - RNA, 19 nt, Homo sapiens
  misc_RNA (1)...(19): siRNA sense strand
gcaaauaguaauuccucca

SEQ ID NO: 2404332 - RNA, 19 nt, Homo sapiens
  misc_RNA (1)...(19): siRNA sense strand
aguaauuccuccaccaaca

SEQ ID NO: 2404333 - RNA, 19 nt, Homo sapiens
  misc_RNA (1)...(19): siRNA sense strand
caggaguauacaagggcuu

SEQ ID NO: 2404334 - RNA, 19 nt, Homo sapiens
  misc_RNA (1)...(19): siRNA sense strand
auggaaagccaguuggaaa

SEQ ID NO: 2404335 - RNA, 19 nt, Homo sapiens
  misc_RNA (1)...(19): siRNA sense strand
uggaaaaguaggauggaaa

SEQ ID NO: 2404336 - RNA, 19 nt, Homo sapiens
  misc_RNA (1)...(19): siRNA sense strand
guguaaugcguguggaaaa

SEQ ID NO: 2404337 - RNA, 19 nt, Homo sapiens
  misc_RNA (1)...(19): siRNA sense strand
gugcaguauguguggcaaa

SEQ ID NO: 2404338 - RNA, 19 nt, Homo sapiens
  misc_RNA (1)...(19): siRNA sense strand
cugaguaaacacaggagaa

SEQ ID NO: 2404339 - RNA, 19 nt, Homo sapiens
  misc_RNA (1)...(19): siRNA sense strand
cuacaaagaaagcagaaaa

SEQ ID NO: 2404340 - RNA, 19 nt, Homo sapiens
  misc_RNA (1)...(19): siRNA sense strand
agggcaggcuacaaagaaa

SEQ ID NO: 2404341 - RNA, 19 nt, Homo sapiens
  misc_RNA (1)...(19): siRNA sense strand
agaauuaagugaaagcaca

SEQ ID NO: 2404342 - RNA, 19 nt, Homo sapiens
  misc_RNA (1)...(19): siRNA sense strand
uggaaagccaguuggaaaa

SEQ ID NO: 2404343 - RNA, 19 nt, Homo sapiens
  misc_RNA (1)...(19): siRNA sense strand
cagaaaaggagcaugggaa

SEQ ID NO: 2404344 - RNA, 19 nt, Homo sapiens
  misc_RNA (1)...(19): siRNA sense strand
augugaagaguguggcaaa

SEQ ID NO: 2404345 - RNA, 19 nt, Homo sapiens
  misc_RNA (1)...(19): siRNA sense strand
gguuguugaaaguggaaga

SEQ ID NO: 2404346 - RNA, 19 nt, Homo sapiens
  misc_RNA (1)...(19): siRNA sense strand
ugguggugcuauuggagua

SEQ ID NO: 2404347 - RNA, 19 nt, Homo sapiens
  misc_RNA (1)...(19): siRNA sense strand
uggaguauuuggagaggca

SEQ ID NO: 2404348 - RNA, 19 nt, Homo sapiens
  misc_RNA (1)...(19): siRNA sense strand
gcuacaaagaaagcagaaa

SEQ ID NO: 2404349 - RNA, 19 nt, Homo sapiens
  misc_RNA (1)...(19): siRNA sense strand
uggaaagaguuuugcucaa

SEQ ID NO: 2404350 - RNA, 19 nt, Homo sapiens
  misc_RNA (1)...(19): siRNA sense strand
auguaaugagugugaaaga

SEQ ID NO: 2404351 - RNA, 19 nt, Homo sapiens
  misc_RNA (1)...(19): siRNA sense strand
agagaagccauguagggaa

SEQ ID NO: 2404352 - RNA, 19 nt, Homo sapiens
  misc_RNA (1)...(19): siRNA sense strand
aggaggugguggugcuauu

SEQ ID NO: 2404353 - RNA, 19 nt, Homo sapiens
  misc_RNA (1)...(19): siRNA sense strand
uguugaaaguggaagaugu

SEQ ID NO: 2404354 - RNA, 19 nt, Homo sapiens
  misc_RNA (1)...(19): siRNA sense strand
caguguaaugcguguggaa

SEQ ID NO: 2404355 - RNA, 19 nt, Homo sapiens
  misc_RNA (1)...(19): siRNA sense strand
ggaaaaggcuucacccgaa

SEQ ID NO: 2404356 - RNA, 19 nt, Homo sapiens
  misc_RNA (1)...(19): siRNA sense strand
augaaaagcaggagaacca

SEQ ID NO: 2404357 - RNA, 19 nt, Homo sapiens
  misc_RNA (1)...(19): siRNA sense strand
ggcuagagaauuaagugaa

SEQ ID NO: 2404358 - RNA, 19 nt, Homo sapiens
  misc_RNA (1)...(19): siRNA sense strand
cagacuaagagcagggacu

SEQ ID NO: 2404359 - RNA, 19 nt, Homo sapiens
  misc_RNA (1)...(19): siRNA sense strand
ccaccugagagaagacauu

SEQ ID NO: 2404360 - RNA, 19 nt, Homo sapiens
  misc_RNA (1)...(19): siRNA sense strand
gagaugaaaagcaggagaa

SEQ ID NO: 2404361 - RNA, 19 nt, Homo sapiens
  misc_RNA (1)...(19): siRNA sense strand
gccauaugagugugaagaa

SEQ ID NO: 2404362 - RNA, 19 nt, Homo sapiens
  misc_RNA (1)...(19): siRNA sense strand
augaauguggaaagaguuu

SEQ ID NO: 2404363 - RNA, 19 nt, Homo sapiens
  misc_RNA (1)...(19): siRNA sense strand
cuauuggaguauuuggaga

SEQ ID NO: 2404364 - RNA, 19 nt, Homo sapiens
  misc_RNA (1)...(19): siRNA sense strand
agccugagaugcacagcaa

SEQ ID NO: 2404365 - RNA, 19 nt, Homo sapiens
  misc_RNA (1)...(19): siRNA sense strand
cauaaagguggaggaagaa

SEQ ID NO: 2404366 - RNA, 19 nt, Homo sapiens
  misc_RNA (1)...(19): siRNA sense strand
gugcagaagcuggugaaca

SEQ ID NO: 2404367 - RNA, 19 nt, Homo sapiens
  misc_RNA (1)...(19): siRNA sense strand
ugaguaaacacaggagaau

SEQ ID NO: 2404368 - RNA, 19 nt, Homo sapiens
  misc_RNA (1)...(19): siRNA sense strand
gccaagaagaagaggaaaa

SEQ ID NO: 2404369 - RNA, 19 nt, Homo sapiens
  misc_RNA (1)...(19): siRNA sense strand
augugaagagcuaaagaaa

SEQ ID NO: 2404370 - RNA, 19 nt, Homo sapiens
  misc_RNA (1)...(19): siRNA sense strand
ugugaagagcuaaagaaaa

SEQ ID NO: 2404371 - RNA, 19 nt, Homo sapiens
  misc_RNA (1)...(19): siRNA sense strand
uggaagaacacgaggaauu

SEQ ID NO: 2404372 - RNA, 19 nt, Homo sapiens
  misc_RNA (1)...(19): siRNA sense strand
ggaagaagcagaaugggaa

SEQ ID NO: 2404373 - RNA, 19 nt, Homo sapiens
  misc_RNA (1)...(19): siRNA sense strand
cugaagaccuccagagcau

SEQ ID NO: 2404374 - RNA, 19 nt, Homo sapiens
  misc_RNA (1)...(19): siRNA sense strand
auacaggagcuuauagaaa

SEQ ID NO: 2404375 - RNA, 19 nt, Homo sapiens
  misc_RNA (1)...(19): siRNA sense strand
gagcuaaugacuuggaaca

SEQ ID NO: 2404376 - RNA, 19 nt, Homo sapiens
  misc_RNA (1)...(19): siRNA sense strand
aagaaaacgacuacagaaa

SEQ ID NO: 2404377 - RNA, 19 nt, Homo sapiens
  misc_RNA (1)...(19): siRNA sense strand
ugaagaagcaggaugaaaa

SEQ ID NO: 2404378 - RNA, 19 nt, Homo sapiens
  misc_RNA (1)...(19): siRNA sense strand
cccuaauugaccagagaua

SEQ ID NO: 2404379 - RNA, 19 nt, Homo sapiens
  misc_RNA (1)...(19): siRNA sense strand
aguaagcacuguuggaaaa

SEQ ID NO: 2404380 - RNA, 19 nt, Homo sapiens
  misc_RNA (1)...(19): siRNA sense strand
ucuacaaauuggaagaaca

SEQ ID NO: 2404381 - RNA, 19 nt, Homo sapiens
  misc_RNA (1)...(19): siRNA sense strand
cugaggacacagagaagaa

SEQ ID NO: 2404382 - RNA, 19 nt, Homo sapiens
  misc_RNA (1)...(19): siRNA sense strand
ucaaauuacaggagcuuau

SEQ ID NO: 2404383 - RNA, 19 nt, Homo sapiens
  misc_RNA (1)...(19): siRNA sense strand
aggugaagugccagcauua

SEQ ID NO: 2404384 - RNA, 19 nt, Homo sapiens
  misc_RNA (1)...(19): siRNA sense strand
gaaaauaaggaaaaggaca

SEQ ID NO: 2404385 - RNA, 19 nt, Homo sapiens
  misc_RNA (1)...(19): siRNA sense strand
uaguaagcacuguuggaaa

SEQ ID NO: 2404386 - RNA, 19 nt, Homo sapiens
  misc_RNA (1)...(19): siRNA sense strand
ggaaagugugaaauccaaa

SEQ ID NO: 2404387 - RNA, 19 nt, Homo sapiens
  misc_RNA (1)...(19): siRNA sense strand
acaaaggaugagacagaau

SEQ ID NO: 2404388 - RNA, 19 nt, Homo sapiens
  misc_RNA (1)...(19): siRNA sense strand
aaucaagaacaacgagcua

SEQ ID NO: 2404389 - RNA, 19 nt, Homo sapiens
  misc_RNA (1)...(19): siRNA sense strand
agaaaugugggcagaucaa

SEQ ID NO: 2404390 - RNA, 19 nt, Homo sapiens
  misc_RNA (1)...(19): siRNA sense strand
cuucaaaaggagcagaaaa

SEQ ID NO: 2404391 - RNA, 19 nt, Homo sapiens
  misc_RNA (1)...(19): siRNA sense strand
ggcaauauaaagaagauga

SEQ ID NO: 2404392 - RNA, 19 nt, Homo sapiens
  misc_RNA (1)...(19): siRNA sense strand
aaagaugagcccagcaaau

SEQ ID NO: 2404393 - RNA, 19 nt, Homo sapiens
  misc_RNA (1)...(19): siRNA sense strand
aggugaagaagcuggaaaa

SEQ ID NO: 2404394 - RNA, 19 nt, Homo sapiens
  misc_RNA (1)...(19): siRNA sense strand
ucaagaacaacgagcuaau

SEQ ID NO: 2404395 - RNA, 19 nt, Homo sapiens
  misc_RNA (1)...(19): siRNA sense strand
uauacuaggcuuggagaaa

SEQ ID NO: 2404396 - RNA, 19 nt, Homo sapiens
  misc_RNA (1)...(19): siRNA sense strand
aggaagaagcagaauggga

SEQ ID NO: 2404397 - RNA, 19 nt, Homo sapiens
  misc_RNA (1)...(19): siRNA sense strand
auucauacacaaaggcaau

SEQ ID NO: 2404398 - RNA, 19 nt, Homo sapiens
  misc_RNA (1)...(19): siRNA sense strand
cagaagaagaaaacgacua

SEQ ID NO: 2404399 - RNA, 19 nt, Homo sapiens
  misc_RNA (1)...(19): siRNA sense strand
cagaaucaacucaaggaau

SEQ ID NO: 2404400 - RNA, 19 nt, Homo sapiens
  misc_RNA (1)...(19): siRNA sense strand
aaggaaaaggacagcaaua

SEQ ID NO: 2404401 - RNA, 19 nt, Homo sapiens
  misc_RNA (1)...(19): siRNA sense strand
aagcagaaugggaaagcau

SEQ ID NO: 2404402 - RNA, 19 nt, Homo sapiens
  misc_RNA (1)...(19): siRNA sense strand
ugaaagucagucagaagaa

SEQ ID NO: 2404403 - RNA, 19 nt, Homo sapiens
  misc_RNA (1)...(19): siRNA sense strand
uuuauaaacagcaggugaa

SEQ ID NO: 2404404 - RNA, 19 nt, Homo sapiens
  misc_RNA (1)...(19): siRNA sense strand
caggugaagaagcuggaaa

SEQ ID NO: 2404405 - RNA, 19 nt, Homo sapiens
  misc_RNA (1)...(19): siRNA sense strand
ggaaaacucuguaggcuga

SEQ ID NO: 2404406 - RNA, 19 nt, Homo sapiens
  misc_RNA (1)...(19): siRNA sense strand
uuggugaauuggaggauga

SEQ ID NO: 2404407 - RNA, 19 nt, Homo sapiens
  misc_RNA (1)...(19): siRNA sense strand
cuuuauaaacagcagguga

SEQ ID NO: 2404408 - RNA, 19 nt, Homo sapiens
  misc_RNA (1)...(19): siRNA sense strand
agaaagaugagcccagcaa

SEQ ID NO: 2404409 - RNA, 19 nt, Homo sapiens
  misc_RNA (1)...(19): siRNA sense strand
ccauuguaccugcaguaaa

SEQ ID NO: 2404410 - RNA, 19 nt, Homo sapiens
  misc_RNA (1)...(19): siRNA sense strand
gaugaaagucagucagaag

SEQ ID NO: 2404411 - RNA, 19 nt, Homo sapiens
  misc_RNA (1)...(19): siRNA sense strand
gcuggaagaaguugaaaau

SEQ ID NO: 2404412 - RNA, 19 nt, Homo sapiens
  misc_RNA (1)...(19): siRNA sense strand
ccacaauccaagagcucca

SEQ ID NO: 2404413 - RNA, 19 nt, Homo sapiens
  misc_RNA (1)...(19): siRNA sense strand
acaacaggaagaagcagaa

SEQ ID NO: 2404414 - RNA, 19 nt, Homo sapiens
  misc_RNA (1)...(19): siRNA sense strand
acaugauacaggagcuuau

SEQ ID NO: 2404415 - RNA, 19 nt, Homo sapiens
  misc_RNA (1)...(19): siRNA sense strand
cagucaaccaucagacaga

SEQ ID NO: 2404416 - RNA, 19 nt, Homo sapiens
  misc_RNA (1)...(19): siRNA sense strand
uggaacaaauuauggaaag

SEQ ID NO: 2404417 - RNA, 19 nt, Homo sapiens
  misc_RNA (1)...(19): siRNA sense strand
auacuaugcuggaagaagu

SEQ ID NO: 2404418 - RNA, 19 nt, Homo sapiens
  misc_RNA (1)...(19): siRNA sense strand
cccgaaugaaugaaguuua

SEQ ID NO: 2404419 - RNA, 19 nt, Homo sapiens
  misc_RNA (1)...(19): siRNA sense strand
auaagaaggcugaggacac

SEQ ID NO: 2404420 - RNA, 19 nt, Homo sapiens
  misc_RNA (1)...(19): siRNA sense strand
auuugaagaagcaggauga

SEQ ID NO: 2404421 - RNA, 19 nt, Homo sapiens
  misc_RNA (1)...(19): siRNA sense strand
uugaagaagcaggaugaaa

SEQ ID NO: 2404422 - RNA, 19 nt, Homo sapiens
  misc_RNA (1)...(19): siRNA sense strand
ggaugaaaaugaagguauc

SEQ ID NO: 2404423 - RNA, 19 nt, Homo sapiens
  misc_RNA (1)...(19): siRNA sense strand
acaaauuggaagaacacga

SEQ ID NO: 2404424 - RNA, 19 nt, Homo sapiens
  misc_RNA (1)...(19): siRNA sense strand
ucaacagcuuagaaaugaa

SEQ ID NO: 2404425 - RNA, 19 nt, Homo sapiens
  misc_RNA (1)...(19): siRNA sense strand
caaaaggagcagaaaacuu

SEQ ID NO: 2404426 - RNA, 19 nt, Homo sapiens
  misc_RNA (1)...(19): siRNA sense strand
cggagcaagaagaaacuau

SEQ ID NO: 2404427 - RNA, 19 nt, Homo sapiens
  misc_RNA (1)...(19): siRNA sense strand
cuaauugaccagagauacu

SEQ ID NO: 2404428 - RNA, 19 nt, Homo sapiens
  misc_RNA (1)...(19): siRNA sense strand
uaauagaaaugugggcaga

SEQ ID NO: 2404429 - RNA, 19 nt, Homo sapiens
  misc_RNA (1)...(19): siRNA sense strand
agaaacuaaucaacagcuu

SEQ ID NO: 2404430 - RNA, 19 nt, Homo sapiens
  misc_RNA (1)...(19): siRNA sense strand
gugaauuggaggaugaauc

SEQ ID NO: 2404431 - RNA, 19 nt, Homo sapiens
  misc_RNA (1)...(19): siRNA sense strand
agauuguggauuugagcau

SEQ ID NO: 2404432 - RNA, 19 nt, Homo sapiens
  misc_RNA (1)...(19): siRNA sense strand
gcaaggagcugguggguga

SEQ ID NO: 2404433 - RNA, 19 nt, Homo sapiens
  misc_RNA (1)...(19): siRNA sense strand
cugucaaguuccaggagaa

SEQ ID NO: 2404434 - RNA, 19 nt, Homo sapiens
  misc_RNA (1)...(19): siRNA sense strand
ggaacagcgcaaagaggaa

SEQ ID NO: 2404435 - RNA, 19 nt, Homo sapiens
  misc_RNA (1)...(19): siRNA sense strand
ggaagaucauagaacgcua

SEQ ID NO: 2404436 - RNA, 19 nt, Homo sapiens
  misc_RNA (1)...(19): siRNA sense strand
ccugagagccuuugagcau

SEQ ID NO: 2404437 - RNA, 19 nt, Homo sapiens
  misc_RNA (1)...(19): siRNA sense strand
ucguggagcuaguggaaca

SEQ ID NO: 2404438 - RNA, 19 nt, Homo sapiens
  misc_RNA (1)...(19): siRNA sense strand
agcaaggcguggagaacua

SEQ ID NO: 2404439 - RNA, 19 nt, Homo sapiens
  misc_RNA (1)...(19): siRNA sense strand
aagaugaggaggagaugaa

SEQ ID NO: 2404440 - RNA, 19 nt, Homo sapiens
  misc_RNA (1)...(19): siRNA sense strand
cccgagagcuucagggaca

SEQ ID NO: 2404441 - RNA, 19 nt, Homo sapiens
  misc_RNA (1)...(19): siRNA sense strand
aggaggaggugucggaaaa

SEQ ID NO: 2404442 - RNA, 19 nt, Homo sapiens
  misc_RNA (1)...(19): siRNA sense strand
uggagaagaucgagcggga

SEQ ID NO: 2404443 - RNA, 19 nt, Homo sapiens
  misc_RNA (1)...(19): siRNA sense strand
ccaggauggcagugaguuu

SEQ ID NO: 2404444 - RNA, 19 nt, Homo sapiens
  misc_RNA (1)...(19): siRNA sense strand
cgagaaaaucaaagcggaa

SEQ ID NO: 2404445 - RNA, 19 nt, Homo sapiens
  misc_RNA (1)...(19): siRNA sense strand
cggaagaagcugggcgaga

SEQ ID NO: 2404446 - RNA, 19 nt, Homo sapiens
  misc_RNA (1)...(19): siRNA sense strand
ugagugaggacaagggcaa

SEQ ID NO: 2404447 - RNA, 19 nt, Homo sapiens
  misc_RNA (1)...(19): siRNA sense strand
ccucaucagcaaucagaaa

SEQ ID NO: 2404448 - RNA, 19 nt, Homo sapiens
  misc_RNA (1)...(19): siRNA sense strand
uggaggaggccuugaaaca

SEQ ID NO: 2404449 - RNA, 19 nt, Homo sapiens
  misc_RNA (1)...(19): siRNA sense strand
ucaaagcggaacagagcaa

SEQ ID NO: 2404450 - RNA, 19 nt, Homo sapiens
  misc_RNA (1)...(19): siRNA sense strand
cugaugagauccaggcaca

SEQ ID NO: 2404451 - RNA, 19 nt, Homo sapiens
  misc_RNA (1)...(19): siRNA sense strand
cuggagaagaaccaagaaa

SEQ ID NO: 2404452 - RNA, 19 nt, Homo sapiens
  misc_RNA (1)...(19): siRNA sense strand
aggcaaaagaugaggagga

SEQ ID NO: 2404453 - RNA, 19 nt, Homo sapiens
  misc_RNA (1)...(19): siRNA sense strand
acgaagcgaucgaggcaga

SEQ ID NO: 2404454 - RNA, 19 nt, Homo sapiens
  misc_RNA (1)...(19): siRNA sense strand
cggugcugcugguggagaa

SEQ ID NO: 2404455 - RNA, 19 nt, Homo sapiens
  misc_RNA (1)...(19): siRNA sense strand
ggagaaagaggcaggccca

SEQ ID NO: 2404456 - RNA, 19 nt, Homo sapiens
  misc_RNA (1)...(19): siRNA sense strand
caaaagaugaggaggagau

SEQ ID NO: 2404457 - RNA, 19 nt, Homo sapiens
  misc_RNA (1)...(19): siRNA sense strand
ggcuguggcaucugggaua

SEQ ID NO: 2404458 - RNA, 19 nt, Homo sapiens
  misc_RNA (1)...(19): siRNA sense strand
uggacuggauggaggagau

SEQ ID NO: 2404459 - RNA, 19 nt, Homo sapiens
  misc_RNA (1)...(19): siRNA sense strand
ggcaagagucagucgauca

SEQ ID NO: 2404460 - RNA, 19 nt, Homo sapiens
  misc_RNA (1)...(19): siRNA sense strand
uggaggagaugcaggcuca

SEQ ID NO: 2404461 - RNA, 19 nt, Homo sapiens
  misc_RNA (1)...(19): siRNA sense strand
aauaaggaguggcuggaga

SEQ ID NO: 2404462 - RNA, 19 nt, Homo sapiens
  misc_RNA (1)...(19): siRNA sense strand
cggccaggacuuugagcau

SEQ ID NO: 2404463 - RNA, 19 nt, Homo sapiens
  misc_RNA (1)...(19): siRNA sense strand
gaagaaacacgaagcgauc

SEQ ID NO: 2404464 - RNA, 19 nt, Homo sapiens
  misc_RNA (1)...(19): siRNA sense strand
uggagaagaaccaagaaaa

SEQ ID NO: 2404465 - RNA, 19 nt, Homo sapiens
  misc_RNA (1)...(19): siRNA sense strand
aaggaggaggugucggaaa

SEQ ID NO: 2404466 - RNA, 19 nt, Homo sapiens
  misc_RNA (1)...(19): siRNA sense strand
auggacugcuggagggaga

SEQ ID NO: 2404467 - RNA, 19 nt, Homo sapiens
  misc_RNA (1)...(19): siRNA sense strand
acaagauccugcagggcga

SEQ ID NO: 2404468 - RNA, 19 nt, Homo sapiens
  misc_RNA (1)...(19): siRNA sense strand
ggcauaaacugcucggcuu

SEQ ID NO: 2404469 - RNA, 19 nt, Homo sapiens
  misc_RNA (1)...(19): siRNA sense strand
aggacaagggcaaggacga

SEQ ID NO: 2404470 - RNA, 19 nt, Homo sapiens
  misc_RNA (1)...(19): siRNA sense strand
agaacuacgaggaaagcau

SEQ ID NO: 2404471 - RNA, 19 nt, Homo sapiens
  misc_RNA (1)...(19): siRNA sense strand
ggacgguguaugcggguga

SEQ ID NO: 2404472 - RNA, 19 nt, Homo sapiens
  misc_RNA (1)...(19): siRNA sense strand
cgugagaagcggagagcug

SEQ ID NO: 2404473 - RNA, 19 nt, Homo sapiens
  misc_RNA (1)...(19): siRNA sense strand
ucaaggaggagguggacca

SEQ ID NO: 2404474 - RNA, 19 nt, Homo sapiens
  misc_RNA (1)...(19): siRNA sense strand
cggugcugcaggagaaauu

SEQ ID NO: 2404475 - RNA, 19 nt, Homo sapiens
  misc_RNA (1)...(19): siRNA sense strand
acugaggacaacagagaga

SEQ ID NO: 2404476 - RNA, 19 nt, Homo sapiens
  misc_RNA (1)...(19): siRNA sense strand
ugaagaaacacgaagcgau

SEQ ID NO: 2404477 - RNA, 19 nt, Homo sapiens
  misc_RNA (1)...(19): siRNA sense strand
gugaacaugccgaggccau

SEQ ID NO: 2404478 - RNA, 19 nt, Homo sapiens
  misc_RNA (1)...(19): siRNA sense strand
cagccugggaagagagguu

SEQ ID NO: 2404479 - RNA, 19 nt, Homo sapiens
  misc_RNA (1)...(19): siRNA sense strand
cacuggagaacguggacaa

SEQ ID NO: 2404480 - RNA, 19 nt, Homo sapiens
  misc_RNA (1)...(19): siRNA sense strand
ucuucagcauccagagcaa

SEQ ID NO: 2404481 - RNA, 19 nt, Homo sapiens
  misc_RNA (1)...(19): siRNA sense strand
aggagaagcuggaacuacu

SEQ ID NO: 2404482 - RNA, 19 nt, Homo sapiens
  misc_RNA (1)...(19): siRNA sense strand
gcaaaagcuacaugaccaa

SEQ ID NO: 2404483 - RNA, 19 nt, Homo sapiens
  misc_RNA (1)...(19): siRNA sense strand
ccacaagcugcauaagaga

SEQ ID NO: 2404484 - RNA, 19 nt, Homo sapiens
  misc_RNA (1)...(19): siRNA sense strand
gguguaugcgggugaacau

SEQ ID NO: 2404485 - RNA, 19 nt, Homo sapiens
  misc_RNA (1)...(19): siRNA sense strand
ggaaggaggaggugucgga

SEQ ID NO: 2404486 - RNA, 19 nt, Homo sapiens
  misc_RNA (1)...(19): siRNA sense strand
ggaccaucauccugcgcuu

SEQ ID NO: 2404487 - RNA, 19 nt, Homo sapiens
  misc_RNA (1)...(19): siRNA sense strand
ccgaaggcuacuacgauau

SEQ ID NO: 2404488 - RNA, 19 nt, Homo sapiens
  misc_RNA (1)...(19): siRNA sense strand
cagugacgcccgagagcuu

SEQ ID NO: 2404489 - RNA, 19 nt, Homo sapiens
  misc_RNA (1)...(19): siRNA sense strand
gagcacacacgguggggaa

SEQ ID NO: 2404490 - RNA, 19 nt, Homo sapiens
  misc_RNA (1)...(19): siRNA sense strand
aggcugagcaugagcggga

SEQ ID NO: 2404491 - RNA, 19 nt, Homo sapiens
  misc_RNA (1)...(19): siRNA sense strand
gcacagagguuugaccaca

SEQ ID NO: 2404492 - RNA, 19 nt, Homo sapiens
  misc_RNA (1)...(19): siRNA sense strand
uggagcaaggcguggagaa

SEQ ID NO: 2404493 - RNA, 19 nt, Homo sapiens
  misc_RNA (1)...(19): siRNA sense strand
ggaacagcugcaggagaaa

SEQ ID NO: 2404494 - RNA, 19 nt, Homo sapiens
  misc_RNA (1)...(19): siRNA sense strand
caguggaaucgguggagga

SEQ ID NO: 2404495 - RNA, 19 nt, Homo sapiens
  misc_RNA (1)...(19): siRNA sense strand
gcaucugggauauugacaa

SEQ ID NO: 2404496 - RNA, 19 nt, Homo sapiens
  misc_RNA (1)...(19): siRNA sense strand
cgcucguggugcugcguaa

SEQ ID NO: 2404497 - RNA, 19 nt, Homo sapiens
  misc_RNA (1)...(19): siRNA sense strand
auaaggaguggcuggagaa

SEQ ID NO: 2404498 - RNA, 19 nt, Homo sapiens
  misc_RNA (1)...(19): siRNA sense strand
uggacaacauggagggccu

SEQ ID NO: 2404499 - RNA, 19 nt, Homo sapiens
  misc_RNA (1)...(19): siRNA sense strand
ugaccacgaucgagaaaau

SEQ ID NO: 2404500 - RNA, 19 nt, Homo sapiens
  misc_RNA (1)...(19): siRNA sense strand
uggaccagcgcgaggaaga

SEQ ID NO: 2404501 - RNA, 19 nt, Homo sapiens
  misc_RNA (1)...(19): siRNA sense strand
gcagagagccuuccgcaca

SEQ ID NO: 2404502 - RNA, 19 nt, Homo sapiens
  misc_RNA (1)...(19): siRNA sense strand
ccuauugcacgcuggagaa

SEQ ID NO: 2404503 - RNA, 19 nt, Homo sapiens
  misc_RNA (1)...(19): siRNA sense strand
gcaaggagcugguggguga

SEQ ID NO: 2404504 - RNA, 19 nt, Homo sapiens
  misc_RNA (1)...(19): siRNA sense strand
cugucaaguuccaggagaa

SEQ ID NO: 2404505 - RNA, 19 nt, Homo sapiens
  misc_RNA (1)...(19): siRNA sense strand
ggaacagcgcaaagaggaa

SEQ ID NO: 2404506 - RNA, 19 nt, Homo sapiens
  misc_RNA (1)...(19): siRNA sense strand
ggaagaucauagaacgcua

SEQ ID NO: 2404507 - RNA, 19 nt, Homo sapiens
  misc_RNA (1)...(19): siRNA sense strand
ccugagagccuuugagcau

SEQ ID NO: 2404508 - RNA, 19 nt, Homo sapiens
  misc_RNA (1)...(19): siRNA sense strand
ucguggagcuaguggaaca

SEQ ID NO: 2404509 - RNA, 19 nt, Homo sapiens
  misc_RNA (1)...(19): siRNA sense strand
agcaaggcguggagaacua

SEQ ID NO: 2404510 - RNA, 19 nt, Homo sapiens
  misc_RNA (1)...(19): siRNA sense strand
aagaugaggaggagaugaa

SEQ ID NO: 2404511 - RNA, 19 nt, Homo sapiens
  misc_RNA (1)...(19): siRNA sense strand
cccgagagcuucagggaca

SEQ ID NO: 2404512 - RNA, 19 nt, Homo sapiens
  misc_RNA (1)...(19): siRNA sense strand
aggaggaggugucggaaaa

SEQ ID NO: 2404513 - RNA, 19 nt, Homo sapiens
  misc_RNA (1)...(19): siRNA sense strand
uggagaagaucgagcggga

SEQ ID NO: 2404514 - RNA, 19 nt, Homo sapiens
  misc_RNA (1)...(19): siRNA sense strand
ccaggauggcagugaguuu

SEQ ID NO: 2404515 - RNA, 19 nt, Homo sapiens
  misc_RNA (1)...(19): siRNA sense strand
cgagaaaaucaaagcggaa

SEQ ID NO: 2404516 - RNA, 19 nt, Homo sapiens
  misc_RNA (1)...(19): siRNA sense strand
cggaagaagcugggcgaga

SEQ ID NO: 2404517 - RNA, 19 nt, Homo sapiens
  misc_RNA (1)...(19): siRNA sense strand
ugagugaggacaagggcaa

SEQ ID NO: 2404518 - RNA, 19 nt, Homo sapiens
  misc_RNA (1)...(19): siRNA sense strand
ccucaucagcaaucagaaa

SEQ ID NO: 2404519 - RNA, 19 nt, Homo sapiens
  misc_RNA (1)...(19): siRNA sense strand
uggaggaggccuugaaaca

SEQ ID NO: 2404520 - RNA, 19 nt, Homo sapiens
  misc_RNA (1)...(19): siRNA sense strand
ucaaagcggaacagagcaa

SEQ ID NO: 2404521 - RNA, 19 nt, Homo sapiens
  misc_RNA (1)...(19): siRNA sense strand
cugaugagauccaggcaca

SEQ ID NO: 2404522 - RNA, 19 nt, Homo sapiens
  misc_RNA (1)...(19): siRNA sense strand
cuggagaagaaccaagaaa

SEQ ID NO: 2404523 - RNA, 19 nt, Homo sapiens
  misc_RNA (1)...(19): siRNA sense strand
aggcaaaagaugaggagga

SEQ ID NO: 2404524 - RNA, 19 nt, Homo sapiens
  misc_RNA (1)...(19): siRNA sense strand
acgaagcgaucgaggcaga

SEQ ID NO: 2404525 - RNA, 19 nt, Homo sapiens
  misc_RNA (1)...(19): siRNA sense strand
cggugcugcugguggagaa

SEQ ID NO: 2404526 - RNA, 19 nt, Homo sapiens
  misc_RNA (1)...(19): siRNA sense strand
ggagaaagaggcaggccca

SEQ ID NO: 2404527 - RNA, 19 nt, Homo sapiens
  misc_RNA (1)...(19): siRNA sense strand
caaaagaugaggaggagau

SEQ ID NO: 2404528 - RNA, 19 nt, Homo sapiens
  misc_RNA (1)...(19): siRNA sense strand
ggcuguggcaucugggaua

SEQ ID NO: 2404529 - RNA, 19 nt, Homo sapiens
  misc_RNA (1)...(19): siRNA sense strand
uggacuggauggaggagau

SEQ ID NO: 2404530 - RNA, 19 nt, Homo sapiens
  misc_RNA (1)...(19): siRNA sense strand
ggcaagagucagucgauca

SEQ ID NO: 2404531 - RNA, 19 nt, Homo sapiens
  misc_RNA (1)...(19): siRNA sense strand
agguauuggagguggggaa

SEQ ID NO: 2404532 - RNA, 19 nt, Homo sapiens
  misc_RNA (1)...(19): siRNA sense strand
uggaggagaugcaggcuca

SEQ ID NO: 2404533 - RNA, 19 nt, Homo sapiens
  misc_RNA (1)...(19): siRNA sense strand
aauaaggaguggcuggaga

SEQ ID NO: 2404534 - RNA, 19 nt, Homo sapiens
  misc_RNA (1)...(19): siRNA sense strand
cggccaggacuuugagcau

SEQ ID NO: 2404535 - RNA, 19 nt, Homo sapiens
  misc_RNA (1)...(19): siRNA sense strand
gaagaaacacgaagcgauc

SEQ ID NO: 2404536 - RNA, 19 nt, Homo sapiens
  misc_RNA (1)...(19): siRNA sense strand
uggagaagaaccaagaaaa

SEQ ID NO: 2404537 - RNA, 19 nt, Homo sapiens
  misc_RNA (1)...(19): siRNA sense strand
aaggaggaggugucggaaa

SEQ ID NO: 2404538 - RNA, 19 nt, Homo sapiens
  misc_RNA (1)...(19): siRNA sense strand
auggacugcuggagggaga

SEQ ID NO: 2404539 - RNA, 19 nt, Homo sapiens
  misc_RNA (1)...(19): siRNA sense strand
acaagauccugcagggcga

SEQ ID NO: 2404540 - RNA, 19 nt, Homo sapiens
  misc_RNA (1)...(19): siRNA sense strand
ggcauaaacugcucggcuu

SEQ ID NO: 2404541 - RNA, 19 nt, Homo sapiens
  misc_RNA (1)...(19): siRNA sense strand
aggacaagggcaaggacga

SEQ ID NO: 2404542 - RNA, 19 nt, Homo sapiens
  misc_RNA (1)...(19): siRNA sense strand
agaacuacgaggaaagcau

SEQ ID NO: 2404543 - RNA, 19 nt, Homo sapiens
  misc_RNA (1)...(19): siRNA sense strand
ggacgguguaugcggguga

SEQ ID NO: 2404544 - RNA, 19 nt, Homo sapiens
  misc_RNA (1)...(19): siRNA sense strand
cgugagaagcggagagcug

SEQ ID NO: 2404545 - RNA, 19 nt, Homo sapiens
  misc_RNA (1)...(19): siRNA sense strand
ucaaggaggagguggacca

SEQ ID NO: 2404546 - RNA, 19 nt, Homo sapiens
  misc_RNA (1)...(19): siRNA sense strand
cggugcugcaggagaaauu

SEQ ID NO: 2404547 - RNA, 19 nt, Homo sapiens
  misc_RNA (1)...(19): siRNA sense strand
acugaggacaacagagaga

SEQ ID NO: 2404548 - RNA, 19 nt, Homo sapiens
  misc_RNA (1)...(19): siRNA sense strand
ugaagaaacacgaagcgau

SEQ ID NO: 2404549 - RNA, 19 nt, Homo sapiens
  misc_RNA (1)...(19): siRNA sense strand
gugaacaugccgaggccau

SEQ ID NO: 2404550 - RNA, 19 nt, Homo sapiens
  misc_RNA (1)...(19): siRNA sense strand
cagccugggaagagagguu

SEQ ID NO: 2404551 - RNA, 19 nt, Homo sapiens
  misc_RNA (1)...(19): siRNA sense strand
cacuggagaacguggacaa

SEQ ID NO: 2404552 - RNA, 19 nt, Homo sapiens
  misc_RNA (1)...(19): siRNA sense strand
ucuucagcauccagagcaa

SEQ ID NO: 2404553 - RNA, 19 nt, Homo sapiens
  misc_RNA (1)...(19): siRNA sense strand
aggagaagcuggaacuacu

SEQ ID NO: 2404554 - RNA, 19 nt, Homo sapiens
  misc_RNA (1)...(19): siRNA sense strand
gcaaaagcuacaugaccaa

SEQ ID NO: 2404555 - RNA, 19 nt, Homo sapiens
  misc_RNA (1)...(19): siRNA sense strand
ccacaagcugcauaagaga

SEQ ID NO: 2404556 - RNA, 19 nt, Homo sapiens
  misc_RNA (1)...(19): siRNA sense strand
gguguaugcgggugaacau

SEQ ID NO: 2404557 - RNA, 19 nt, Homo sapiens
  misc_RNA (1)...(19): siRNA sense strand
ggaaggaggaggugucgga

SEQ ID NO: 2404558 - RNA, 19 nt, Homo sapiens
  misc_RNA (1)...(19): siRNA sense strand
ggaccaucauccugcgcuu

SEQ ID NO: 2404559 - RNA, 19 nt, Homo sapiens
  misc_RNA (1)...(19): siRNA sense strand
ccgaaggcuacuacgauau

SEQ ID NO: 2404560 - RNA, 19 nt, Homo sapiens
  misc_RNA (1)...(19): siRNA sense strand
cagugacgcccgagagcuu

SEQ ID NO: 2404561 - RNA, 19 nt, Homo sapiens
  misc_RNA (1)...(19): siRNA sense strand
gagcacacacgguggggaa

SEQ ID NO: 2404562 - RNA, 19 nt, Homo sapiens
  misc_RNA (1)...(19): siRNA sense strand
aggcugagcaugagcggga

SEQ ID NO: 2404563 - RNA, 19 nt, Homo sapiens
  misc_RNA (1)...(19): siRNA sense strand
gcacagagguuugaccaca

SEQ ID NO: 2404564 - RNA, 19 nt, Homo sapiens
  misc_RNA (1)...(19): siRNA sense strand
uggagcaaggcguggagaa

SEQ ID NO: 2404565 - RNA, 19 nt, Homo sapiens
  misc_RNA (1)...(19): siRNA sense strand
ggaacagcugcaggagaaa

SEQ ID NO: 2404566 - RNA, 19 nt, Homo sapiens
  misc_RNA (1)...(19): siRNA sense strand
caguggaaucgguggagga

SEQ ID NO: 2404567 - RNA, 19 nt, Homo sapiens
  misc_RNA (1)...(19): siRNA sense strand
gcaucugggauauugacaa

SEQ ID NO: 2404568 - RNA, 19 nt, Homo sapiens
  misc_RNA (1)...(19): siRNA sense strand
cgcucguggugcugcguaa

SEQ ID NO: 2404569 - RNA, 19 nt, Homo sapiens
  misc_RNA (1)...(19): siRNA sense strand
auaaggaguggcuggagaa

SEQ ID NO: 2404570 - RNA, 19 nt, Homo sapiens
  misc_RNA (1)...(19): siRNA sense strand
uggacaacauggagggccu

SEQ ID NO: 2404571 - RNA, 19 nt, Homo sapiens
  misc_RNA (1)...(19): siRNA sense strand
ugaccacgaucgagaaaau

SEQ ID NO: 2404572 - RNA, 19 nt, Homo sapiens
  misc_RNA (1)...(19): siRNA sense strand
uggaccagcgcgaggaaga

SEQ ID NO: 2404573 - RNA, 19 nt, Homo sapiens
  misc_RNA (1)...(19): siRNA sense strand
aaucugaagaagugagaaa

SEQ ID NO: 2404574 - RNA, 19 nt, Homo sapiens
  misc_RNA (1)...(19): siRNA sense strand
ggauaagauggaagauaau

SEQ ID NO: 2404575 - RNA, 19 nt, Homo sapiens
  misc_RNA (1)...(19): siRNA sense strand
agagaauggaaaaggaaaa

SEQ ID NO: 2404576 - RNA, 19 nt, Homo sapiens
  misc_RNA (1)...(19): siRNA sense strand
ucugaaacuccuaggacaa

SEQ ID NO: 2404577 - RNA, 19 nt, Homo sapiens
  misc_RNA (1)...(19): siRNA sense strand
guugauuagguuacggaaa

SEQ ID NO: 2404578 - RNA, 19 nt, Homo sapiens
  misc_RNA (1)...(19): siRNA sense strand
gaaagaagcaggaggacag

SEQ ID NO: 2404579 - RNA, 19 nt, Homo sapiens
  misc_RNA (1)...(19): siRNA sense strand
agggauaagauggaagaua

SEQ ID NO: 2404580 - RNA, 19 nt, Homo sapiens
  misc_RNA (1)...(19): siRNA sense strand
cagagaagcaggagcagca

SEQ ID NO: 2404581 - RNA, 19 nt, Homo sapiens
  misc_RNA (1)...(19): siRNA sense strand
uuacagaauuggagaaccu

SEQ ID NO: 2404582 - RNA, 19 nt, Homo sapiens
  misc_RNA (1)...(19): siRNA sense strand
acucaaauccagugcuaca

SEQ ID NO: 2404583 - RNA, 19 nt, Homo sapiens
  misc_RNA (1)...(19): siRNA sense strand
ugagaaagaagcaggagga

SEQ ID NO: 2404584 - RNA, 19 nt, Homo sapiens
  misc_RNA (1)...(19): siRNA sense strand
augcaaagcacuguggaaa

SEQ ID NO: 2404585 - RNA, 19 nt, Homo sapiens
  misc_RNA (1)...(19): siRNA sense strand
aucacaaacuagaugcaaa

SEQ ID NO: 2404586 - RNA, 19 nt, Homo sapiens
  misc_RNA (1)...(19): siRNA sense strand
gaugcaaagcacuguggaa

SEQ ID NO: 2404587 - RNA, 19 nt, Homo sapiens
  misc_RNA (1)...(19): siRNA sense strand
ucugaagaagugagaaaga

SEQ ID NO: 2404588 - RNA, 19 nt, Homo sapiens
  misc_RNA (1)...(19): siRNA sense strand
agaaagaagcaggaggaca

SEQ ID NO: 2404589 - RNA, 19 nt, Homo sapiens
  misc_RNA (1)...(19): siRNA sense strand
gugacagugaccacagaaa

SEQ ID NO: 2404590 - RNA, 19 nt, Homo sapiens
  misc_RNA (1)...(19): siRNA sense strand
uacuugaagcccagaauaa

SEQ ID NO: 2404591 - RNA, 19 nt, Homo sapiens
  misc_RNA (1)...(19): siRNA sense strand
uggaaaaggaaaagagaac

SEQ ID NO: 2404592 - RNA, 19 nt, Homo sapiens
  misc_RNA (1)...(19): siRNA sense strand
ggaaaagagaacacuacua

SEQ ID NO: 2404593 - RNA, 19 nt, Homo sapiens
  misc_RNA (1)...(19): siRNA sense strand
cagagaauggaaaaggaaa

SEQ ID NO: 2404594 - RNA, 19 nt, Homo sapiens
  misc_RNA (1)...(19): siRNA sense strand
agcccagaauaaagaacua

SEQ ID NO: 2404595 - RNA, 19 nt, Homo sapiens
  misc_RNA (1)...(19): siRNA sense strand
acuccuaggacaaagguau

SEQ ID NO: 2404596 - RNA, 19 nt, Homo sapiens
  misc_RNA (1)...(19): siRNA sense strand
caagugaauugaagaccga

SEQ ID NO: 2404597 - RNA, 19 nt, Homo sapiens
  misc_RNA (1)...(19): siRNA sense strand
uugaagaaaccgaguaugu

SEQ ID NO: 2404598 - RNA, 19 nt, Homo sapiens
  misc_RNA (1)...(19): siRNA sense strand
agaaccuuguacagagaau

SEQ ID NO: 2404599 - RNA, 19 nt, Homo sapiens
  misc_RNA (1)...(19): siRNA sense strand
caggaggacaguaaacaau

SEQ ID NO: 2404600 - RNA, 19 nt, Homo sapiens
  misc_RNA (1)...(19): siRNA sense strand
accuacagcucuuagaaau

SEQ ID NO: 2404601 - RNA, 19 nt, Homo sapiens
  misc_RNA (1)...(19): siRNA sense strand
caggaucuucagagggaga

SEQ ID NO: 2404602 - RNA, 19 nt, Homo sapiens
  misc_RNA (1)...(19): siRNA sense strand
aaauaagacaugacaguac

SEQ ID NO: 2404603 - RNA, 19 nt, Homo sapiens
  misc_RNA (1)...(19): siRNA sense strand
gccaggaucuucagaggga

SEQ ID NO: 2404604 - RNA, 19 nt, Homo sapiens
  misc_RNA (1)...(19): siRNA sense strand
cagagaaaagguuaacaua

SEQ ID NO: 2404605 - RNA, 19 nt, Homo sapiens
  misc_RNA (1)...(19): siRNA sense strand
cccagaauaaagaacuaaa

SEQ ID NO: 2404606 - RNA, 19 nt, Homo sapiens
  misc_RNA (1)...(19): siRNA sense strand
guguuaaccacaaggccaa

SEQ ID NO: 2404607 - RNA, 19 nt, Homo sapiens
  misc_RNA (1)...(19): siRNA sense strand
ugggaagaacaaacugaaa

SEQ ID NO: 2404608 - RNA, 19 nt, Homo sapiens
  misc_RNA (1)...(19): siRNA sense strand
augacagagaagugggaga

SEQ ID NO: 2404609 - RNA, 19 nt, Homo sapiens
  misc_RNA (1)...(19): siRNA sense strand
ggaagaaagucaaugucac

SEQ ID NO: 2404610 - RNA, 19 nt, Homo sapiens
  misc_RNA (1)...(19): siRNA sense strand
agaacagggaugugaccau

SEQ ID NO: 2404611 - RNA, 19 nt, Homo sapiens
  misc_RNA (1)...(19): siRNA sense strand
cugugaggcuggagggaga

SEQ ID NO: 2404612 - RNA, 19 nt, Homo sapiens
  misc_RNA (1)...(19): siRNA sense strand
ucucagaucuugugcggaa

SEQ ID NO: 2404613 - RNA, 19 nt, Homo sapiens
  misc_RNA (1)...(19): siRNA sense strand
ccuucagaggcgugcgaua

SEQ ID NO: 2404614 - RNA, 19 nt, Homo sapiens
  misc_RNA (1)...(19): siRNA sense strand
ugaacuucuucuugggcaa

SEQ ID NO: 2404615 - RNA, 19 nt, Homo sapiens
  misc_RNA (1)...(19): siRNA sense strand
cagcagagaccaaagcaga

SEQ ID NO: 2404616 - RNA, 19 nt, Homo sapiens
  misc_RNA (1)...(19): siRNA sense strand
gguggauacaugagcaaga

SEQ ID NO: 2404617 - RNA, 19 nt, Homo sapiens
  misc_RNA (1)...(19): siRNA sense strand
gagaugagcugcuagacca

SEQ ID NO: 2404618 - RNA, 19 nt, Homo sapiens
  misc_RNA (1)...(19): siRNA sense strand
agugaagaaaugaaagaca

SEQ ID NO: 2404619 - RNA, 19 nt, Homo sapiens
  misc_RNA (1)...(19): siRNA sense strand
cuugcuacccauuaggaua

SEQ ID NO: 2404620 - RNA, 19 nt, Homo sapiens
  misc_RNA (1)...(19): siRNA sense strand
aaugaaagacaaaggugga

SEQ ID NO: 2404621 - RNA, 19 nt, Homo sapiens
  misc_RNA (1)...(19): siRNA sense strand
uggauggaggagugaguga

SEQ ID NO: 2404622 - RNA, 19 nt, Homo sapiens
  misc_RNA (1)...(19): siRNA sense strand
acugagugaagaaaugaaa

SEQ ID NO: 2404623 - RNA, 19 nt, Homo sapiens
  misc_RNA (1)...(19): siRNA sense strand
gcuaugagcagaaggccaa

SEQ ID NO: 2404624 - RNA, 19 nt, Homo sapiens
  misc_RNA (1)...(19): siRNA sense strand
aggcaagagauccgugaaa

SEQ ID NO: 2404625 - RNA, 19 nt, Homo sapiens
  misc_RNA (1)...(19): siRNA sense strand
agcuagaggagaagggcaa

SEQ ID NO: 2404626 - RNA, 19 nt, Homo sapiens
  misc_RNA (1)...(19): siRNA sense strand
aagacaaacugaaggggaa

SEQ ID NO: 2404627 - RNA, 19 nt, Homo sapiens
  misc_RNA (1)...(19): siRNA sense strand
cuaacgaaguggagccuga

SEQ ID NO: 2404628 - RNA, 19 nt, Homo sapiens
  misc_RNA (1)...(19): siRNA sense strand
acagggagcuggagagcca

SEQ ID NO: 2404629 - RNA, 19 nt, Homo sapiens
  misc_RNA (1)...(19): siRNA sense strand
gcuucaagaacaggagaaa

SEQ ID NO: 2404630 - RNA, 19 nt, Homo sapiens
  misc_RNA (1)...(19): siRNA sense strand
accuggagcuagaggagaa

SEQ ID NO: 2404631 - RNA, 19 nt, Homo sapiens
  misc_RNA (1)...(19): siRNA sense strand
ggguacagggaaggagaaa

SEQ ID NO: 2404632 - RNA, 19 nt, Homo sapiens
  misc_RNA (1)...(19): siRNA sense strand
ccuuagaaaaccagcuaua

SEQ ID NO: 2404633 - RNA, 19 nt, Homo sapiens
  misc_RNA (1)...(19): siRNA sense strand
gagcagaaggccaaggagu

SEQ ID NO: 2404634 - RNA, 19 nt, Homo sapiens
  misc_RNA (1)...(19): siRNA sense strand
cgagaagagcugaaccaga

SEQ ID NO: 2404635 - RNA, 19 nt, Homo sapiens
  misc_RNA (1)...(19): siRNA sense strand
cagcaguucuucaggagga

SEQ ID NO: 2404636 - RNA, 19 nt, Homo sapiens
  misc_RNA (1)...(19): siRNA sense strand
ggugauucuccaagaccua

SEQ ID NO: 2404637 - RNA, 19 nt, Homo sapiens
  misc_RNA (1)...(19): siRNA sense strand
agacaaaggcagaaggacc

SEQ ID NO: 2404638 - RNA, 19 nt, Homo sapiens
  misc_RNA (1)...(19): siRNA sense strand
gacaaaggcagaaggacca

SEQ ID NO: 2404639 - RNA, 19 nt, Homo sapiens
  misc_RNA (1)...(19): siRNA sense strand
cagaaggcaaugugggcga

SEQ ID NO: 2404640 - RNA, 19 nt, Homo sapiens
  misc_RNA (1)...(19): siRNA sense strand
cuuggaagggacagcuuaa

SEQ ID NO: 2404641 - RNA, 19 nt, Homo sapiens
  misc_RNA (1)...(19): siRNA sense strand
cuuugcagcuccaggccaa

SEQ ID NO: 2404642 - RNA, 19 nt, Homo sapiens
  misc_RNA (1)...(19): siRNA sense strand
cugagagcuaugaggccaa

SEQ ID NO: 2404643 - RNA, 19 nt, Homo sapiens
  misc_RNA (1)...(19): siRNA sense strand
aguaugaggcucugaagga

SEQ ID NO: 2404644 - RNA, 19 nt, Homo sapiens
  misc_RNA (1)...(19): siRNA sense strand
gggacuuacagaugaacca

SEQ ID NO: 2404645 - RNA, 19 nt, Homo sapiens
  misc_RNA (1)...(19): siRNA sense strand
ggaaggagaaagacuggga

SEQ ID NO: 2404646 - RNA, 19 nt, Homo sapiens
  misc_RNA (1)...(19): siRNA sense strand
aaggucagaggcagagaaa

SEQ ID NO: 2404647 - RNA, 19 nt, Homo sapiens
  misc_RNA (1)...(19): siRNA sense strand
aaguggagccugaggguac

SEQ ID NO: 2404648 - RNA, 19 nt, Homo sapiens
  misc_RNA (1)...(19): siRNA sense strand
guacucagacaaaggcaga

SEQ ID NO: 2404649 - RNA, 19 nt, Homo sapiens
  misc_RNA (1)...(19): siRNA sense strand
agacaaacugaaggggaaa

SEQ ID NO: 2404650 - RNA, 19 nt, Homo sapiens
  misc_RNA (1)...(19): siRNA sense strand
gaggaggaaccuggagcua

SEQ ID NO: 2404651 - RNA, 19 nt, Homo sapiens
  misc_RNA (1)...(19): siRNA sense strand
guacagcaguugcaggguu

SEQ ID NO: 2404652 - RNA, 19 nt, Homo sapiens
  misc_RNA (1)...(19): siRNA sense strand
auguaaagaaugugggaaa

SEQ ID NO: 2404653 - RNA, 19 nt, Homo sapiens
  misc_RNA (1)...(19): siRNA sense strand
gggcagaucagaauggcaa

SEQ ID NO: 2404654 - RNA, 19 nt, Homo sapiens
  misc_RNA (1)...(19): siRNA sense strand
ggugauaaaacuaggacua

SEQ ID NO: 2404655 - RNA, 19 nt, Homo sapiens
  misc_RNA (1)...(19): siRNA sense strand
cuuaguaaacacaggagaa

SEQ ID NO: 2404656 - RNA, 19 nt, Homo sapiens
  misc_RNA (1)...(19): siRNA sense strand
augugaugaaugugggaaa

SEQ ID NO: 2404657 - RNA, 19 nt, Homo sapiens
  misc_RNA (1)...(19): siRNA sense strand
uaauuaaggcagaggacca

SEQ ID NO: 2404658 - RNA, 19 nt, Homo sapiens
  misc_RNA (1)...(19): siRNA sense strand
cagaauggcaacagaggga

SEQ ID NO: 2404659 - RNA, 19 nt, Homo sapiens
  misc_RNA (1)...(19): siRNA sense strand
ugggaaaccacaaaggaau

SEQ ID NO: 2404660 - RNA, 19 nt, Homo sapiens
  misc_RNA (1)...(19): siRNA sense strand
ccuaaagaccugcaagcau

SEQ ID NO: 2404661 - RNA, 19 nt, Homo sapiens
  misc_RNA (1)...(19): siRNA sense strand
gaaagcaggucccaggcaa

SEQ ID NO: 2404662 - RNA, 19 nt, Homo sapiens
  misc_RNA (1)...(19): siRNA sense strand
caaagaauucauaccgcaa

SEQ ID NO: 2404663 - RNA, 19 nt, Homo sapiens
  misc_RNA (1)...(19): siRNA sense strand
ggaucuggagagagagcuu

SEQ ID NO: 2404664 - RNA, 19 nt, Homo sapiens
  misc_RNA (1)...(19): siRNA sense strand
aagauaugcccaaagacaa

SEQ ID NO: 2404665 - RNA, 19 nt, Homo sapiens
  misc_RNA (1)...(19): siRNA sense strand
gcucacaucucauuggaca

SEQ ID NO: 2404666 - RNA, 19 nt, Homo sapiens
  misc_RNA (1)...(19): siRNA sense strand
agaaggaagauaugcccaa

SEQ ID NO: 2404667 - RNA, 19 nt, Homo sapiens
  misc_RNA (1)...(19): siRNA sense strand
cugggaaaccacaaaggaa

SEQ ID NO: 2404668 - RNA, 19 nt, Homo sapiens
  misc_RNA (1)...(19): siRNA sense strand
ugcccaaagacaaggaauu

SEQ ID NO: 2404669 - RNA, 19 nt, Homo sapiens
  misc_RNA (1)...(19): siRNA sense strand
gaaugugaugaguguggaa

SEQ ID NO: 2404670 - RNA, 19 nt, Homo sapiens
  misc_RNA (1)...(19): siRNA sense strand
gggagauaaaugacagacu

SEQ ID NO: 2404671 - RNA, 19 nt, Homo sapiens
  misc_RNA (1)...(19): siRNA sense strand
aagaauucauaccgcaaau

SEQ ID NO: 2404672 - RNA, 19 nt, Homo sapiens
  misc_RNA (1)...(19): siRNA sense strand
agacccagcuggagcagga

SEQ ID NO: 2404673 - RNA, 19 nt, Homo sapiens
  misc_RNA (1)...(19): siRNA sense strand
ggagaacucacacgggaga

SEQ ID NO: 2404674 - RNA, 19 nt, Homo sapiens
  misc_RNA (1)...(19): siRNA sense strand
cagaaagacgggacauacu

SEQ ID NO: 2404675 - RNA, 19 nt, Homo sapiens
  misc_RNA (1)...(19): siRNA sense strand
aaaugagggcagaucagaa

SEQ ID NO: 2404676 - RNA, 19 nt, Homo sapiens
  misc_RNA (1)...(19): siRNA sense strand
ugguguggaaagugggaaa

SEQ ID NO: 2404677 - RNA, 19 nt, Homo sapiens
  misc_RNA (1)...(19): siRNA sense strand
aggaacucaugucgggaaa

SEQ ID NO: 2404678 - RNA, 19 nt, Homo sapiens
  misc_RNA (1)...(19): siRNA sense strand
ugauauugcaacuggaaaa

SEQ ID NO: 2404679 - RNA, 19 nt, Homo sapiens
  misc_RNA (1)...(19): siRNA sense strand
aguggagucuggagggaca

SEQ ID NO: 2404680 - RNA, 19 nt, Homo sapiens
  misc_RNA (1)...(19): siRNA sense strand
ucuuuggacacgagaggaa

SEQ ID NO: 2404681 - RNA, 19 nt, Homo sapiens
  misc_RNA (1)...(19): siRNA sense strand
cgucuuugggacuuggaaa

SEQ ID NO: 2404682 - RNA, 19 nt, Homo sapiens
  misc_RNA (1)...(19): siRNA sense strand
cauauaguccugaugggaa

SEQ ID NO: 2404683 - RNA, 19 nt, Homo sapiens
  misc_RNA (1)...(19): siRNA sense strand
ggacuuggaaaauggcaaa

SEQ ID NO: 2404684 - RNA, 19 nt, Homo sapiens
  misc_RNA (1)...(19): siRNA sense strand
aaggaauauucuuuggaca

SEQ ID NO: 2404685 - RNA, 19 nt, Homo sapiens
  misc_RNA (1)...(19): siRNA sense strand
auacaauggaaaugguuca

SEQ ID NO: 2404686 - RNA, 19 nt, Homo sapiens
  misc_RNA (1)...(19): siRNA sense strand
uuggagaugaccaggaaau

SEQ ID NO: 2404687 - RNA, 19 nt, Homo sapiens
  misc_RNA (1)...(19): siRNA sense strand
cgguauucucuucaaacaa

SEQ ID NO: 2404688 - RNA, 19 nt, Homo sapiens
  misc_RNA (1)...(19): siRNA sense strand
cuggugaaggucuggaaau

SEQ ID NO: 2404689 - RNA, 19 nt, Homo sapiens
  misc_RNA (1)...(19): siRNA sense strand
aggaaaacucugagacagu

SEQ ID NO: 2404690 - RNA, 19 nt, Homo sapiens
  misc_RNA (1)...(19): siRNA sense strand
caaacaagagcaagcccau

SEQ ID NO: 2404691 - RNA, 19 nt, Homo sapiens
  misc_RNA (1)...(19): siRNA sense strand
aagaaugaugccacggaaa

SEQ ID NO: 2404692 - RNA, 19 nt, Homo sapiens
  misc_RNA (1)...(19): siRNA sense strand
caagaaugaugccacggaa

SEQ ID NO: 2404693 - RNA, 19 nt, Homo sapiens
  misc_RNA (1)...(19): siRNA sense strand
acaaccagucggagcucaa

SEQ ID NO: 2404694 - RNA, 19 nt, Homo sapiens
  misc_RNA (1)...(19): siRNA sense strand
ccauagagauccugcccaa

SEQ ID NO: 2404695 - RNA, 19 nt, Homo sapiens
  misc_RNA (1)...(19): siRNA sense strand
gcuaacacauucaggguca

SEQ ID NO: 2404696 - RNA, 19 nt, Homo sapiens
  misc_RNA (1)...(19): siRNA sense strand
acucaguauucgagaaagu

SEQ ID NO: 2404697 - RNA, 19 nt, Homo sapiens
  misc_RNA (1)...(19): siRNA sense strand
acugaugacaauugaggaa

SEQ ID NO: 2404698 - RNA, 19 nt, Homo sapiens
  misc_RNA (1)...(19): siRNA sense strand
caucaauagauuccagcaa

SEQ ID NO: 2404699 - RNA, 19 nt, Homo sapiens
  misc_RNA (1)...(19): siRNA sense strand
caauaagugcagaaggguu

SEQ ID NO: 2404700 - RNA, 19 nt, Homo sapiens
  misc_RNA (1)...(19): siRNA sense strand
cuuuaguugugaugggaca

SEQ ID NO: 2404701 - RNA, 19 nt, Homo sapiens
  misc_RNA (1)...(19): siRNA sense strand
gugcaguuuuagagagaga

SEQ ID NO: 2404702 - RNA, 19 nt, Homo sapiens
  misc_RNA (1)...(19): siRNA sense strand
ggguuuacugauauugaua

SEQ ID NO: 2404703 - RNA, 19 nt, Homo sapiens
  misc_RNA (1)...(19): siRNA sense strand
acucggagcugcugagcga

SEQ ID NO: 2404704 - RNA, 19 nt, Homo sapiens
  misc_RNA (1)...(19): siRNA sense strand
aguucaaauugguccagaa

SEQ ID NO: 2404705 - RNA, 19 nt, Homo sapiens
  misc_RNA (1)...(19): siRNA sense strand
uucaauagaagauggacaa

SEQ ID NO: 2404706 - RNA, 19 nt, Homo sapiens
  misc_RNA (1)...(19): siRNA sense strand
cauucagggucauguucaa

SEQ ID NO: 2404707 - RNA, 19 nt, Homo sapiens
  misc_RNA (1)...(19): siRNA sense strand
guagaaagccgcugggguu

SEQ ID NO: 2404708 - RNA, 19 nt, Homo sapiens
  misc_RNA (1)...(19): siRNA sense strand
cuuuauacugccaagaaau

SEQ ID NO: 2404709 - RNA, 19 nt, Homo sapiens
  misc_RNA (1)...(19): siRNA sense strand
uggcaauaauaauggcacu

SEQ ID NO: 2404710 - RNA, 19 nt, Homo sapiens
  misc_RNA (1)...(19): siRNA sense strand
cagaucgugaagugguaaa

SEQ ID NO: 2404711 - RNA, 19 nt, Homo sapiens
  misc_RNA (1)...(19): siRNA sense strand
auacauugaccgaccaaga

SEQ ID NO: 2404712 - RNA, 19 nt, Homo sapiens
  misc_RNA (1)...(19): siRNA sense strand
ccuacagauuaucaaguga

SEQ ID NO: 2404713 - RNA, 19 nt, Homo sapiens
  misc_RNA (1)...(19): siRNA sense strand
caccaaacaucuuagggca

SEQ ID NO: 2404714 - RNA, 19 nt, Homo sapiens
  misc_RNA (1)...(19): siRNA sense strand
gcaaagaagaugauggaca

SEQ ID NO: 2404715 - RNA, 19 nt, Homo sapiens
  misc_RNA (1)...(19): siRNA sense strand
gcaugacccuggagcccaa

SEQ ID NO: 2404716 - RNA, 19 nt, Homo sapiens
  misc_RNA (1)...(19): siRNA sense strand
ccaaacagcuggugcacag

SEQ ID NO: 2404717 - RNA, 19 nt, Homo sapiens
  misc_RNA (1)...(19): siRNA sense strand
ggagaaagaucaaacagag

SEQ ID NO: 2404718 - RNA, 19 nt, Homo sapiens
  misc_RNA (1)...(19): siRNA sense strand
gcacugugguucugccuca

SEQ ID NO: 2404719 - RNA, 19 nt, Homo sapiens
  misc_RNA (1)...(19): siRNA sense strand
acagcugccuggugcgcaa

SEQ ID NO: 2404720 - RNA, 19 nt, Homo sapiens
  misc_RNA (1)...(19): siRNA sense strand
uggccaacgagcagggcuu

SEQ ID NO: 2404721 - RNA, 19 nt, Homo sapiens
  misc_RNA (1)...(19): siRNA sense strand
agagcugugaggaggagaa

SEQ ID NO: 2404722 - RNA, 19 nt, Homo sapiens
  misc_RNA (1)...(19): siRNA sense strand
uggacaagaaauagccuga

SEQ ID NO: 2404723 - RNA, 19 nt, Homo sapiens
  misc_RNA (1)...(19): siRNA sense strand
gggaaaaggcccacaaaga

SEQ ID NO: 2404724 - RNA, 19 nt, Homo sapiens
  misc_RNA (1)...(19): siRNA sense strand
uggcugugcuggaggacau

SEQ ID NO: 2404725 - RNA, 19 nt, Homo sapiens
  misc_RNA (1)...(19): siRNA sense strand
aguucaaggccgacaucaa

SEQ ID NO: 2404726 - RNA, 19 nt, Homo sapiens
  misc_RNA (1)...(19): siRNA sense strand
cagaggagaucaagcggga

SEQ ID NO: 2404727 - RNA, 19 nt, Homo sapiens
  misc_RNA (1)...(19): siRNA sense strand
gaaaggaacuucaagccga

SEQ ID NO: 2404728 - RNA, 19 nt, Homo sapiens
  misc_RNA (1)...(19): siRNA sense strand
uggagaggcacaaggaaca

SEQ ID NO: 2404729 - RNA, 19 nt, Homo sapiens
  misc_RNA (1)...(19): siRNA sense strand
uugccaaguaccuggacaa

SEQ ID NO: 2404730 - RNA, 19 nt, Homo sapiens
  misc_RNA (1)...(19): siRNA sense strand
aggccgacaucaaguucaa

SEQ ID NO: 2404731 - RNA, 19 nt, Homo sapiens
  misc_RNA (1)...(19): siRNA sense strand
aaaggaacuucaagccgaa

SEQ ID NO: 2404732 - RNA, 19 nt, Homo sapiens
  misc_RNA (1)...(19): siRNA sense strand
aaaccaggugagaaaggaa

SEQ ID NO: 2404733 - RNA, 19 nt, Homo sapiens
  misc_RNA (1)...(19): siRNA sense strand
aguucuacgugcugagcga

SEQ ID NO: 2404734 - RNA, 19 nt, Homo sapiens
  misc_RNA (1)...(19): siRNA sense strand
aggaggagaaguaccggaa

SEQ ID NO: 2404735 - RNA, 19 nt, Homo sapiens
  misc_RNA (1)...(19): siRNA sense strand
cggaagaucaagcugcaga

SEQ ID NO: 2404736 - RNA, 19 nt, Homo sapiens
  misc_RNA (1)...(19): siRNA sense strand
agaucuacacguucaacaa

SEQ ID NO: 2404737 - RNA, 19 nt, Homo sapiens
  misc_RNA (1)...(19): siRNA sense strand
gaaaaggcccacaaagaga

SEQ ID NO: 2404738 - RNA, 19 nt, Homo sapiens
  misc_RNA (1)...(19): siRNA sense strand
cccacaaagagaagcccaa

SEQ ID NO: 2404739 - RNA, 19 nt, Homo sapiens
  misc_RNA (1)...(19): siRNA sense strand
cgagauagucuaagggaga

SEQ ID NO: 2404740 - RNA, 19 nt, Homo sapiens
  misc_RNA (1)...(19): siRNA sense strand
ggcaauuggaugagacaaa

SEQ ID NO: 2404741 - RNA, 19 nt, Homo sapiens
  misc_RNA (1)...(19): siRNA sense strand
gaaauagaaaugagggaga

SEQ ID NO: 2404742 - RNA, 19 nt, Homo sapiens
  misc_RNA (1)...(19): siRNA sense strand
agucuaagggagaggcuaa

SEQ ID NO: 2404743 - RNA, 19 nt, Homo sapiens
  misc_RNA (1)...(19): siRNA sense strand
aaucagaggcagauaacaa

SEQ ID NO: 2404744 - RNA, 19 nt, Homo sapiens
  misc_RNA (1)...(19): siRNA sense strand
ccauaagcacuguggaaaa

SEQ ID NO: 2404745 - RNA, 19 nt, Homo sapiens
  misc_RNA (1)...(19): siRNA sense strand
gcccagaucgccagggaaa

SEQ ID NO: 2404746 - RNA, 19 nt, Homo sapiens
  misc_RNA (1)...(19): siRNA sense strand
cuuaaaugcaugcuggaaa

SEQ ID NO: 2404747 - RNA, 19 nt, Homo sapiens
  misc_RNA (1)...(19): siRNA sense strand
uguaagaguccuaaaucaa

SEQ ID NO: 2404748 - RNA, 19 nt, Homo sapiens
  misc_RNA (1)...(19): siRNA sense strand
gcuaaagcuaaacaagaaa

SEQ ID NO: 2404749 - RNA, 19 nt, Homo sapiens
  misc_RNA (1)...(19): siRNA sense strand
gaucauuagaagagaaucu

SEQ ID NO: 2404750 - RNA, 19 nt, Homo sapiens
  misc_RNA (1)...(19): siRNA sense strand
uagaaaugagggagaauga

SEQ ID NO: 2404751 - RNA, 19 nt, Homo sapiens
  misc_RNA (1)...(19): siRNA sense strand
aggcagaggguaacagauu

SEQ ID NO: 2404752 - RNA, 19 nt, Homo sapiens
  misc_RNA (1)...(19): siRNA sense strand
ccucaaugaucuggcuaaa

SEQ ID NO: 2404753 - RNA, 19 nt, Homo sapiens
  misc_RNA (1)...(19): siRNA sense strand
gcugguugcuaaagaucaa

SEQ ID NO: 2404754 - RNA, 19 nt, Homo sapiens
  misc_RNA (1)...(19): siRNA sense strand
cuuaaaucugagagagaca

SEQ ID NO: 2404755 - RNA, 19 nt, Homo sapiens
  misc_RNA (1)...(19): siRNA sense strand
acaguuugcuaaagcuaaa

SEQ ID NO: 2404756 - RNA, 19 nt, Homo sapiens
  misc_RNA (1)...(19): siRNA sense strand
cugaaaacugggaaaauaa

SEQ ID NO: 2404757 - RNA, 19 nt, Homo sapiens
  misc_RNA (1)...(19): siRNA sense strand
aagcuuugcugguggccaa

SEQ ID NO: 2404758 - RNA, 19 nt, Homo sapiens
  misc_RNA (1)...(19): siRNA sense strand
cuguaagaguccuaaauca

SEQ ID NO: 2404759 - RNA, 19 nt, Homo sapiens
  misc_RNA (1)...(19): siRNA sense strand
augacaaucuccaggaaca

SEQ ID NO: 2404760 - RNA, 19 nt, Homo sapiens
  misc_RNA (1)...(19): siRNA sense strand
caaaagacaacuaggaaca

SEQ ID NO: 2404761 - RNA, 19 nt, Homo sapiens
  misc_RNA (1)...(19): siRNA sense strand
augaacaggcacaggaaga

SEQ ID NO: 2404762 - RNA, 19 nt, Homo sapiens
  misc_RNA (1)...(19): siRNA sense strand
cgacgagaaaugaugaaaa

SEQ ID NO: 2404763 - RNA, 19 nt, Homo sapiens
  misc_RNA (1)...(19): siRNA sense strand
ccacagaacgagauagucu

SEQ ID NO: 2404764 - RNA, 19 nt, Homo sapiens
  misc_RNA (1)...(19): siRNA sense strand
gggagagggccguacaaga

SEQ ID NO: 2404765 - RNA, 19 nt, Homo sapiens
  misc_RNA (1)...(19): siRNA sense strand
uuaaaugcaugcuggaaaa

SEQ ID NO: 2404766 - RNA, 19 nt, Homo sapiens
  misc_RNA (1)...(19): siRNA sense strand
ggagacugaaagagaugua

SEQ ID NO: 2404767 - RNA, 19 nt, Homo sapiens
  misc_RNA (1)...(19): siRNA sense strand
ugaugaacguauggagcaa

SEQ ID NO: 2404768 - RNA, 19 nt, Homo sapiens
  misc_RNA (1)...(19): siRNA sense strand
aaugaaaucacuagcaaga

SEQ ID NO: 2404769 - RNA, 19 nt, Homo sapiens
  misc_RNA (1)...(19): siRNA sense strand
aagaaugaccacagaacga

SEQ ID NO: 2404770 - RNA, 19 nt, Homo sapiens
  misc_RNA (1)...(19): siRNA sense strand
gcgacaccuugcuaagaaa

SEQ ID NO: 2404771 - RNA, 19 nt, Homo sapiens
  misc_RNA (1)...(19): siRNA sense strand
ucagauggcaaaugagaga

SEQ ID NO: 2404772 - RNA, 19 nt, Homo sapiens
  misc_RNA (1)...(19): siRNA sense strand
gauaacuuuacaaggcaaa

SEQ ID NO: 2404773 - RNA, 19 nt, Homo sapiens
  misc_RNA (1)...(19): siRNA sense strand
aagaaauagaaaugaggga

SEQ ID NO: 2404774 - RNA, 19 nt, Homo sapiens
  misc_RNA (1)...(19): siRNA sense strand
ccaaucgagacaaagaaua

SEQ ID NO: 2404775 - RNA, 19 nt, Homo sapiens
  misc_RNA (1)...(19): siRNA sense strand
gugcaaacugugauguaga

SEQ ID NO: 2404776 - RNA, 19 nt, Homo sapiens
  misc_RNA (1)...(19): siRNA sense strand
cuaauuuggagguuaacaa

SEQ ID NO: 2404777 - RNA, 19 nt, Homo sapiens
  misc_RNA (1)...(19): siRNA sense strand
agguuaacaagcugaagaa

SEQ ID NO: 2404778 - RNA, 19 nt, Homo sapiens
  misc_RNA (1)...(19): siRNA sense strand
agauagcacuucaagaaaa

SEQ ID NO: 2404779 - RNA, 19 nt, Homo sapiens
  misc_RNA (1)...(19): siRNA sense strand
gggugcaaacugugaugua

SEQ ID NO: 2404780 - RNA, 19 nt, Homo sapiens
  misc_RNA (1)...(19): siRNA sense strand
ccaggaacaguuugcuaaa

SEQ ID NO: 2404781 - RNA, 19 nt, Homo sapiens
  misc_RNA (1)...(19): siRNA sense strand
acauaaaacagaagguuca

SEQ ID NO: 2404782 - RNA, 19 nt, Homo sapiens
  misc_RNA (1)...(19): siRNA sense strand
ccaaugaagaugcugaaaa

SEQ ID NO: 2404783 - RNA, 19 nt, Homo sapiens
  misc_RNA (1)...(19): siRNA sense strand
cagauagcacuucaagaaa

SEQ ID NO: 2404784 - RNA, 19 nt, Homo sapiens
  misc_RNA (1)...(19): siRNA sense strand
ucacacaauuggaagcuga

SEQ ID NO: 2404785 - RNA, 19 nt, Homo sapiens
  misc_RNA (1)...(19): siRNA sense strand
acagaagguucaagauacu

SEQ ID NO: 2404786 - RNA, 19 nt, Homo sapiens
  misc_RNA (1)...(19): siRNA sense strand
ucgaaaagccaaugaagau

SEQ ID NO: 2404787 - RNA, 19 nt, Homo sapiens
  misc_RNA (1)...(19): siRNA sense strand
aaugagggagaaugaguua

SEQ ID NO: 2404788 - RNA, 19 nt, Homo sapiens
  misc_RNA (1)...(19): siRNA sense strand
acaaagaauaucagucuca

SEQ ID NO: 2404789 - RNA, 19 nt, Homo sapiens
  misc_RNA (1)...(19): siRNA sense strand
aagagaucgugaagaacuu

SEQ ID NO: 2404790 - RNA, 19 nt, Homo sapiens
  misc_RNA (1)...(19): siRNA sense strand
ucaccuggaacaaaggaua

SEQ ID NO: 2404791 - RNA, 19 nt, Homo sapiens
  misc_RNA (1)...(19): siRNA sense strand
ggaacaaaggauagaggag

SEQ ID NO: 2404792 - RNA, 19 nt, Homo sapiens
  misc_RNA (1)...(19): siRNA sense strand
ugauaacuuuacaaggcaa

SEQ ID NO: 2404793 - RNA, 19 nt, Homo sapiens
  misc_RNA (1)...(19): siRNA sense strand
cgagauagucuaagggaga

SEQ ID NO: 2404794 - RNA, 19 nt, Homo sapiens
  misc_RNA (1)...(19): siRNA sense strand
ggcaauuggaugagacaaa

SEQ ID NO: 2404795 - RNA, 19 nt, Homo sapiens
  misc_RNA (1)...(19): siRNA sense strand
gaaauagaaaugagggaga

SEQ ID NO: 2404796 - RNA, 19 nt, Homo sapiens
  misc_RNA (1)...(19): siRNA sense strand
agucuaagggagaggcuaa

SEQ ID NO: 2404797 - RNA, 19 nt, Homo sapiens
  misc_RNA (1)...(19): siRNA sense strand
aaucagaggcagauaacaa

SEQ ID NO: 2404798 - RNA, 19 nt, Homo sapiens
  misc_RNA (1)...(19): siRNA sense strand
ccauaagcacuguggaaaa

SEQ ID NO: 2404799 - RNA, 19 nt, Homo sapiens
  misc_RNA (1)...(19): siRNA sense strand
gcccagaucgccagggaaa

SEQ ID NO: 2404800 - RNA, 19 nt, Homo sapiens
  misc_RNA (1)...(19): siRNA sense strand
cuuaaaugcaugcuggaaa

SEQ ID NO: 2404801 - RNA, 19 nt, Homo sapiens
  misc_RNA (1)...(19): siRNA sense strand
uguaagaguccuaaaucaa

SEQ ID NO: 2404802 - RNA, 19 nt, Homo sapiens
  misc_RNA (1)...(19): siRNA sense strand
gcuaaagcuaaacaagaaa

SEQ ID NO: 2404803 - RNA, 19 nt, Homo sapiens
  misc_RNA (1)...(19): siRNA sense strand
gaucauuagaagagaaucu

SEQ ID NO: 2404804 - RNA, 19 nt, Homo sapiens
  misc_RNA (1)...(19): siRNA sense strand
uagaaaugagggagaauga

SEQ ID NO: 2404805 - RNA, 19 nt, Homo sapiens
  misc_RNA (1)...(19): siRNA sense strand
aggcagaggguaacagauu

SEQ ID NO: 2404806 - RNA, 19 nt, Homo sapiens
  misc_RNA (1)...(19): siRNA sense strand
ccucaaugaucuggcuaaa

SEQ ID NO: 2404807 - RNA, 19 nt, Homo sapiens
  misc_RNA (1)...(19): siRNA sense strand
gcugguugcuaaagaucaa

SEQ ID NO: 2404808 - RNA, 19 nt, Homo sapiens
  misc_RNA (1)...(19): siRNA sense strand
cuuaaaucugagagagaca

SEQ ID NO: 2404809 - RNA, 19 nt, Homo sapiens
  misc_RNA (1)...(19): siRNA sense strand
acaguuugcuaaagcuaaa

SEQ ID NO: 2404810 - RNA, 19 nt, Homo sapiens
  misc_RNA (1)...(19): siRNA sense strand
cugaaaacugggaaaauaa

SEQ ID NO: 2404811 - RNA, 19 nt, Homo sapiens
  misc_RNA (1)...(19): siRNA sense strand
aagcuuugcugguggccaa

SEQ ID NO: 2404812 - RNA, 19 nt, Homo sapiens
  misc_RNA (1)...(19): siRNA sense strand
cuguaagaguccuaaauca

SEQ ID NO: 2404813 - RNA, 19 nt, Homo sapiens
  misc_RNA (1)...(19): siRNA sense strand
augacaaucuccaggaaca

SEQ ID NO: 2404814 - RNA, 19 nt, Homo sapiens
  misc_RNA (1)...(19): siRNA sense strand
caaaagacaacuaggaaca

SEQ ID NO: 2404815 - RNA, 19 nt, Homo sapiens
  misc_RNA (1)...(19): siRNA sense strand
augaacaggcacaggaaga

SEQ ID NO: 2404816 - RNA, 19 nt, Homo sapiens
  misc_RNA (1)...(19): siRNA sense strand
cgacgagaaaugaugaaaa

SEQ ID NO: 2404817 - RNA, 19 nt, Homo sapiens
  misc_RNA (1)...(19): siRNA sense strand
ccacagaacgagauagucu

SEQ ID NO: 2404818 - RNA, 19 nt, Homo sapiens
  misc_RNA (1)...(19): siRNA sense strand
gggagagggccguacaaga

SEQ ID NO: 2404819 - RNA, 19 nt, Homo sapiens
  misc_RNA (1)...(19): siRNA sense strand
uuaaaugcaugcuggaaaa

SEQ ID NO: 2404820 - RNA, 19 nt, Homo sapiens
  misc_RNA (1)...(19): siRNA sense strand
ggagacugaaagagaugua

SEQ ID NO: 2404821 - RNA, 19 nt, Homo sapiens
  misc_RNA (1)...(19): siRNA sense strand
ugaugaacguauggagcaa

SEQ ID NO: 2404822 - RNA, 19 nt, Homo sapiens
  misc_RNA (1)...(19): siRNA sense strand
aaugaaaucacuagcaaga

SEQ ID NO: 2404823 - RNA, 19 nt, Homo sapiens
  misc_RNA (1)...(19): siRNA sense strand
aagaaugaccacagaacga

SEQ ID NO: 2404824 - RNA, 19 nt, Homo sapiens
  misc_RNA (1)...(19): siRNA sense strand
gcgacaccuugcuaagaaa

SEQ ID NO: 2404825 - RNA, 19 nt, Homo sapiens
  misc_RNA (1)...(19): siRNA sense strand
ucagauggcaaaugagaga

SEQ ID NO: 2404826 - RNA, 19 nt, Homo sapiens
  misc_RNA (1)...(19): siRNA sense strand
gauaacuuuacaaggcaaa

SEQ ID NO: 2404827 - RNA, 19 nt, Homo sapiens
  misc_RNA (1)...(19): siRNA sense strand
aagaaauagaaaugaggga

SEQ ID NO: 2404828 - RNA, 19 nt, Homo sapiens
  misc_RNA (1)...(19): siRNA sense strand
ccaaucgagacaaagaaua

SEQ ID NO: 2404829 - RNA, 19 nt, Homo sapiens
  misc_RNA (1)...(19): siRNA sense strand
gugcaaacugugauguaga

SEQ ID NO: 2404830 - RNA, 19 nt, Homo sapiens
  misc_RNA (1)...(19): siRNA sense strand
cuaauuuggagguuaacaa

SEQ ID NO: 2404831 - RNA, 19 nt, Homo sapiens
  misc_RNA (1)...(19): siRNA sense strand
agguuaacaagcugaagaa

SEQ ID NO: 2404832 - RNA, 19 nt, Homo sapiens
  misc_RNA (1)...(19): siRNA sense strand
agauagcacuucaagaaaa

SEQ ID NO: 2404833 - RNA, 19 nt, Homo sapiens
  misc_RNA (1)...(19): siRNA sense strand
gggugcaaacugugaugua

SEQ ID NO: 2404834 - RNA, 19 nt, Homo sapiens
  misc_RNA (1)...(19): siRNA sense strand
ccaggaacaguuugcuaaa

SEQ ID NO: 2404835 - RNA, 19 nt, Homo sapiens
  misc_RNA (1)...(19): siRNA sense strand
acauaaaacagaagguuca

SEQ ID NO: 2404836 - RNA, 19 nt, Homo sapiens
  misc_RNA (1)...(19): siRNA sense strand
ccaaugaagaugcugaaaa

SEQ ID NO: 2404837 - RNA, 19 nt, Homo sapiens
  misc_RNA (1)...(19): siRNA sense strand
cagauagcacuucaagaaa

SEQ ID NO: 2404838 - RNA, 19 nt, Homo sapiens
  misc_RNA (1)...(19): siRNA sense strand
ucacacaauuggaagcuga

SEQ ID NO: 2404839 - RNA, 19 nt, Homo sapiens
  misc_RNA (1)...(19): siRNA sense strand
acagaagguucaagauacu

SEQ ID NO: 2404840 - RNA, 19 nt, Homo sapiens
  misc_RNA (1)...(19): siRNA sense strand
ucgaaaagccaaugaagau

SEQ ID NO: 2404841 - RNA, 19 nt, Homo sapiens
  misc_RNA (1)...(19): siRNA sense strand
aaugagggagaaugaguua

SEQ ID NO: 2404842 - RNA, 19 nt, Homo sapiens
  misc_RNA (1)...(19): siRNA sense strand
acaaagaauaucagucuca

SEQ ID NO: 2404843 - RNA, 19 nt, Homo sapiens
  misc_RNA (1)...(19): siRNA sense strand
aagagaucgugaagaacuu

SEQ ID NO: 2404844 - RNA, 19 nt, Homo sapiens
  misc_RNA (1)...(19): siRNA sense strand
ucaccuggaacaaaggaua

SEQ ID NO: 2404845 - RNA, 19 nt, Homo sapiens
  misc_RNA (1)...(19): siRNA sense strand
ggaacaaaggauagaggag

SEQ ID NO: 2404846 - RNA, 19 nt, Homo sapiens
  misc_RNA (1)...(19): siRNA sense strand
ugauaacuuuacaaggcaa

SEQ ID NO: 2404847 - RNA, 19 nt, Homo sapiens
  misc_RNA (1)...(19): siRNA sense strand
cgaugauggauaugaagaa

SEQ ID NO: 2404848 - RNA, 19 nt, Homo sapiens
  misc_RNA (1)...(19): siRNA sense strand
aagaaaucaaugaaggcua

SEQ ID NO: 2404849 - RNA, 19 nt, Homo sapiens
  misc_RNA (1)...(19): siRNA sense strand
cccaaugaucaaugagauu

SEQ ID NO: 2404850 - RNA, 19 nt, Homo sapiens
  misc_RNA (1)...(19): siRNA sense strand
ggauagugcuguuuggauc

SEQ ID NO: 2404851 - RNA, 19 nt, Homo sapiens
  misc_RNA (1)...(19): siRNA sense strand
caguacaacauuuggagau

SEQ ID NO: 2404852 - RNA, 19 nt, Homo sapiens
  misc_RNA (1)...(19): siRNA sense strand
uuuauuaugccuuggacaa

SEQ ID NO: 2404853 - RNA, 19 nt, Homo sapiens
  misc_RNA (1)...(19): siRNA sense strand
gaguuaucucauugcuaua

SEQ ID NO: 2404854 - RNA, 19 nt, Homo sapiens
  misc_RNA (1)...(19): siRNA sense strand
aguacaacauuuggagauu

SEQ ID NO: 2404855 - RNA, 19 nt, Homo sapiens
  misc_RNA (1)...(19): siRNA sense strand
auggagaaaccuggaguua

SEQ ID NO: 2404856 - RNA, 19 nt, Homo sapiens
  misc_RNA (1)...(19): siRNA sense strand
uguuaaaugccuggaaaga

SEQ ID NO: 2404857 - RNA, 19 nt, Homo sapiens
  misc_RNA (1)...(19): siRNA sense strand
caaugauaguauacagauc

SEQ ID NO: 2404858 - RNA, 19 nt, Homo sapiens
  misc_RNA (1)...(19): siRNA sense strand
gcacauauuuccuagcauc

SEQ ID NO: 2404859 - RNA, 19 nt, Homo sapiens
  misc_RNA (1)...(19): siRNA sense strand
gauccaucaaggagaagau

SEQ ID NO: 2404860 - RNA, 19 nt, Homo sapiens
  misc_RNA (1)...(19): siRNA sense strand
uggaagaccuggagcggaa

SEQ ID NO: 2404861 - RNA, 19 nt, Homo sapiens
  misc_RNA (1)...(19): siRNA sense strand
cggacaacaagaagaggaa

SEQ ID NO: 2404862 - RNA, 19 nt, Homo sapiens
  misc_RNA (1)...(19): siRNA sense strand
uucuaaagauucugggcaa

SEQ ID NO: 2404863 - RNA, 19 nt, Homo sapiens
  misc_RNA (1)...(19): siRNA sense strand
gggucaucuuggaguauau

SEQ ID NO: 2404864 - RNA, 19 nt, Homo sapiens
  misc_RNA (1)...(19): siRNA sense strand
agaacaaagauaagccgua

SEQ ID NO: 2404865 - RNA, 19 nt, Homo sapiens
  misc_RNA (1)...(19): siRNA sense strand
ggacaaagucacagaccug

SEQ ID NO: 2404866 - RNA, 19 nt, Homo sapiens
  misc_RNA (1)...(19): siRNA sense strand
acgaggaugacgaggccua

SEQ ID NO: 2404867 - RNA, 19 nt, Homo sapiens
  misc_RNA (1)...(19): siRNA sense strand
augacgaggccuacgggaa

SEQ ID NO: 2404868 - RNA, 19 nt, Homo sapiens
  misc_RNA (1)...(19): siRNA sense strand
gcugugagaaagugccaau

SEQ ID NO: 2404869 - RNA, 19 nt, Homo sapiens
  misc_RNA (1)...(19): siRNA sense strand
uggaagaccuggagcggaa

SEQ ID NO: 2404870 - RNA, 19 nt, Homo sapiens
  misc_RNA (1)...(19): siRNA sense strand
cggacaacaagaagaggaa

SEQ ID NO: 2404871 - RNA, 19 nt, Homo sapiens
  misc_RNA (1)...(19): siRNA sense strand
uucuaaagauucugggcaa

SEQ ID NO: 2404872 - RNA, 19 nt, Homo sapiens
  misc_RNA (1)...(19): siRNA sense strand
gggucaucuuggaguauau

SEQ ID NO: 2404873 - RNA, 19 nt, Homo sapiens
  misc_RNA (1)...(19): siRNA sense strand
agaacaaagauaagccgua

SEQ ID NO: 2404874 - RNA, 19 nt, Homo sapiens
  misc_RNA (1)...(19): siRNA sense strand
ggacaaagucacagaccug

SEQ ID NO: 2404875 - RNA, 19 nt, Homo sapiens
  misc_RNA (1)...(19): siRNA sense strand
acgaggaugacgaggccua

SEQ ID NO: 2404876 - RNA, 19 nt, Homo sapiens
  misc_RNA (1)...(19): siRNA sense strand
augacgaggccuacgggaa

SEQ ID NO: 2404877 - RNA, 19 nt, Homo sapiens
  misc_RNA (1)...(19): siRNA sense strand
gcugugagaaagugccaau

SEQ ID NO: 2404878 - RNA, 19 nt, Homo sapiens
  misc_RNA (1)...(19): siRNA sense strand
gggcaguucuggaugguga

SEQ ID NO: 2404879 - RNA, 19 nt, Homo sapiens
  misc_RNA (1)...(19): siRNA sense strand
gaagauacaucaaggguuc

SEQ ID NO: 2404880 - RNA, 19 nt, Homo sapiens
  misc_RNA (1)...(19): siRNA sense strand
gcacuuugaugcugagcga

SEQ ID NO: 2404881 - RNA, 19 nt, Homo sapiens
  misc_RNA (1)...(19): siRNA sense strand
gcaugggugaggagaucaa

SEQ ID NO: 2404882 - RNA, 19 nt, Homo sapiens
  misc_RNA (1)...(19): siRNA sense strand
ggguuggguuccagagcca

SEQ ID NO: 2404883 - RNA, 19 nt, Homo sapiens
  misc_RNA (1)...(19): siRNA sense strand
gcuucuggcaacagcuuaa

SEQ ID NO: 2404884 - RNA, 19 nt, Homo sapiens
  misc_RNA (1)...(19): siRNA sense strand
gcagcaugggugaggagau

SEQ ID NO: 2404885 - RNA, 19 nt, Homo sapiens
  misc_RNA (1)...(19): siRNA sense strand
ucaccaaagaccagcacau

SEQ ID NO: 2404886 - RNA, 19 nt, Homo sapiens
  misc_RNA (1)...(19): siRNA sense strand
ugguagaagugacaggguu

SEQ ID NO: 2404887 - RNA, 19 nt, Homo sapiens
  misc_RNA (1)...(19): siRNA sense strand
gguagaagugacaggguug

SEQ ID NO: 2404888 - RNA, 19 nt, Homo sapiens
  misc_RNA (1)...(19): siRNA sense strand
caggaggagaggugaucuu

SEQ ID NO: 2404889 - RNA, 19 nt, Homo sapiens
  misc_RNA (1)...(19): siRNA sense strand
caucaaggguucagggucg

SEQ ID NO: 2404890 - RNA, 19 nt, Homo sapiens
  misc_RNA (1)...(19): siRNA sense strand
cuugguaagauguggguuu

SEQ ID NO: 2404891 - RNA, 19 nt, Homo sapiens
  misc_RNA (1)...(19): siRNA sense strand
ucuuaauagugcuggucau

SEQ ID NO: 2404892 - RNA, 19 nt, Homo sapiens
  misc_RNA (1)...(19): siRNA sense strand
cugacgucauggugaguga

SEQ ID NO: 2404893 - RNA, 19 nt, Homo sapiens
  misc_RNA (1)...(19): siRNA sense strand
cagaugagugauuguucaa

SEQ ID NO: 2404894 - RNA, 19 nt, Homo sapiens
  misc_RNA (1)...(19): siRNA sense strand
ccgcagauguucuccgcaa

SEQ ID NO: 2404895 - RNA, 19 nt, Homo sapiens
  misc_RNA (1)...(19): siRNA sense strand
uucacaaggaacagagaaa

SEQ ID NO: 2404896 - RNA, 19 nt, Homo sapiens
  misc_RNA (1)...(19): siRNA sense strand
ccgcagacacgaugccgaa

SEQ ID NO: 2404897 - RNA, 19 nt, Homo sapiens
  misc_RNA (1)...(19): siRNA sense strand
ccagguuauggaagacaaa

SEQ ID NO: 2404898 - RNA, 19 nt, Homo sapiens
  misc_RNA (1)...(19): siRNA sense strand
ccgaaacgaaagaagcaga

SEQ ID NO: 2404899 - RNA, 19 nt, Homo sapiens
  misc_RNA (1)...(19): siRNA sense strand
agacuggagaugaggagga

SEQ ID NO: 2404900 - RNA, 19 nt, Homo sapiens
  misc_RNA (1)...(19): siRNA sense strand
uggaauggcgggagccuca

SEQ ID NO: 2404901 - RNA, 19 nt, Homo sapiens
  misc_RNA (1)...(19): siRNA sense strand
ccggaagcggaaacagaau

SEQ ID NO: 2404902 - RNA, 19 nt, Homo sapiens
  misc_RNA (1)...(19): siRNA sense strand
gcaaaagauagaagagaau

SEQ ID NO: 2404903 - RNA, 19 nt, Homo sapiens
  misc_RNA (1)...(19): siRNA sense strand
cugcacaggagguaggaaa

SEQ ID NO: 2404904 - RNA, 19 nt, Homo sapiens
  misc_RNA (1)...(19): siRNA sense strand
aagaaaagugggagaaaau

SEQ ID NO: 2404905 - RNA, 19 nt, Homo sapiens
  misc_RNA (1)...(19): siRNA sense strand
agaaauggaaagagugcuu

SEQ ID NO: 2404906 - RNA, 19 nt, Homo sapiens
  misc_RNA (1)...(19): siRNA sense strand
gcuugaauccugaagaaaa

SEQ ID NO: 2404907 - RNA, 19 nt, Homo sapiens
  misc_RNA (1)...(19): siRNA sense strand
cagauuguaaagagagcaa

SEQ ID NO: 2404908 - RNA, 19 nt, Homo sapiens
  misc_RNA (1)...(19): siRNA sense strand
ucugaaagcugcaggccuu

SEQ ID NO: 2404909 - RNA, 19 nt, Homo sapiens
  misc_RNA (1)...(19): siRNA sense strand
ggaaguugguugaaugcca

SEQ ID NO: 2404910 - RNA, 19 nt, Homo sapiens
  misc_RNA (1)...(19): siRNA sense strand
agagaaagcaauugauacu

SEQ ID NO: 2404911 - RNA, 19 nt, Homo sapiens
  misc_RNA (1)...(19): siRNA sense strand
gauuguaaagagagcaaca

SEQ ID NO: 2404912 - RNA, 19 nt, Homo sapiens
  misc_RNA (1)...(19): siRNA sense strand
ugcaaaagauagaagagaa

SEQ ID NO: 2404913 - RNA, 19 nt, Homo sapiens
  misc_RNA (1)...(19): siRNA sense strand
cuucagaaaguguugauau

SEQ ID NO: 2404914 - RNA, 19 nt, Homo sapiens
  misc_RNA (1)...(19): siRNA sense strand
caguggaacuauuggaaag

SEQ ID NO: 2404915 - RNA, 19 nt, Homo sapiens
  misc_RNA (1)...(19): siRNA sense strand
cggccacgcagguugaaua

SEQ ID NO: 2404916 - RNA, 19 nt, Homo sapiens
  misc_RNA (1)...(19): siRNA sense strand
ucuacaauagcgugggcaa

SEQ ID NO: 2404917 - RNA, 19 nt, Homo sapiens
  misc_RNA (1)...(19): siRNA sense strand
agauagaagagaauaggga

SEQ ID NO: 2404918 - RNA, 19 nt, Homo sapiens
  misc_RNA (1)...(19): siRNA sense strand
aagaagaaacucuggagca

SEQ ID NO: 2404919 - RNA, 19 nt, Homo sapiens
  misc_RNA (1)...(19): siRNA sense strand
caucaaaagcauucuacaa

SEQ ID NO: 2404920 - RNA, 19 nt, Homo sapiens
  misc_RNA (1)...(19): siRNA sense strand
gaagaauuucagaaugaca

SEQ ID NO: 2404921 - RNA, 19 nt, Homo sapiens
  misc_RNA (1)...(19): siRNA sense strand
gggacugccagcuggaaaa

SEQ ID NO: 2404922 - RNA, 19 nt, Homo sapiens
  misc_RNA (1)...(19): siRNA sense strand
ggagguaggaaaaguaauu

SEQ ID NO: 2404923 - RNA, 19 nt, Homo sapiens
  misc_RNA (1)...(19): siRNA sense strand
acaaaguuagccuuggaaa

SEQ ID NO: 2404924 - RNA, 19 nt, Homo sapiens
  misc_RNA (1)...(19): siRNA sense strand
auagaagagaauagggacu

SEQ ID NO: 2404925 - RNA, 19 nt, Homo sapiens
  misc_RNA (1)...(19): siRNA sense strand
cuacaauagcgugggcaau

SEQ ID NO: 2404926 - RNA, 19 nt, Homo sapiens
  misc_RNA (1)...(19): siRNA sense strand
aaaagaaaagugggagaaa

SEQ ID NO: 2404927 - RNA, 19 nt, Homo sapiens
  misc_RNA (1)...(19): siRNA sense strand
caagacagcuggacugcga

SEQ ID NO: 2404928 - RNA, 19 nt, Homo sapiens
  misc_RNA (1)...(19): siRNA sense strand
ucuugaacuugaugcaaaa

SEQ ID NO: 2404929 - RNA, 19 nt, Homo sapiens
  misc_RNA (1)...(19): siRNA sense strand
cuucuguaaguaaaggaaa

SEQ ID NO: 2404930 - RNA, 19 nt, Homo sapiens
  misc_RNA (1)...(19): siRNA sense strand
ggaaaagacaucaaaagca

SEQ ID NO: 2404931 - RNA, 19 nt, Homo sapiens
  misc_RNA (1)...(19): siRNA sense strand
caaaguuagccuuggaaag

SEQ ID NO: 2404932 - RNA, 19 nt, Homo sapiens
  misc_RNA (1)...(19): siRNA sense strand
acauagagaaagcaauuga

SEQ ID NO: 2404933 - RNA, 19 nt, Homo sapiens
  misc_RNA (1)...(19): siRNA sense strand
uuacuagguacuugggaca

SEQ ID NO: 2404934 - RNA, 19 nt, Homo sapiens
  misc_RNA (1)...(19): siRNA sense strand
cacuaaaagcgaaaaguuu

SEQ ID NO: 2404935 - RNA, 19 nt, Homo sapiens
  misc_RNA (1)...(19): siRNA sense strand
acacagaugaaccuggaau

SEQ ID NO: 2404936 - RNA, 19 nt, Homo sapiens
  misc_RNA (1)...(19): siRNA sense strand
aguuagccuuggaaagaca

SEQ ID NO: 2404937 - RNA, 19 nt, Homo sapiens
  misc_RNA (1)...(19): siRNA sense strand
cuauuuaagcugaagacaa

SEQ ID NO: 2404938 - RNA, 19 nt, Homo sapiens
  misc_RNA (1)...(19): siRNA sense strand
gugcugaaguggauggaga

SEQ ID NO: 2404939 - RNA, 19 nt, Homo sapiens
  misc_RNA (1)...(19): siRNA sense strand
ugagaaaauggaaggaaaa

SEQ ID NO: 2404940 - RNA, 19 nt, Homo sapiens
  misc_RNA (1)...(19): siRNA sense strand
aggcaaaggagcagggaag

SEQ ID NO: 2404941 - RNA, 19 nt, Homo sapiens
  misc_RNA (1)...(19): siRNA sense strand
ugagaaaggugguggacuc

SEQ ID NO: 2404942 - RNA, 19 nt, Homo sapiens
  misc_RNA (1)...(19): siRNA sense strand
gcaagaaugccgauggagu

SEQ ID NO: 2404943 - RNA, 19 nt, Homo sapiens
  misc_RNA (1)...(19): siRNA sense strand
agauugaguucuaugccaa

SEQ ID NO: 2404944 - RNA, 19 nt, Homo sapiens
  misc_RNA (1)...(19): siRNA sense strand
cugagguccuggaaggcaa

SEQ ID NO: 2404945 - RNA, 19 nt, Homo sapiens
  misc_RNA (1)...(19): siRNA sense strand
gagcaaucucagugaccuu

SEQ ID NO: 2404946 - RNA, 19 nt, Homo sapiens
  misc_RNA (1)...(19): siRNA sense strand
ucauguggaagcagugaaa

SEQ ID NO: 2404947 - RNA, 19 nt, Homo sapiens
  misc_RNA (1)...(19): siRNA sense strand
cggcuuaccaaggaggaua

SEQ ID NO: 2404948 - RNA, 19 nt, Homo sapiens
  misc_RNA (1)...(19): siRNA sense strand
ggacuuugauaacuggaga

SEQ ID NO: 2404949 - RNA, 19 nt, Homo sapiens
  misc_RNA (1)...(19): siRNA sense strand
uuaccaaggaggauaucaa

SEQ ID NO: 2404950 - RNA, 19 nt, Homo sapiens
  misc_RNA (1)...(19): siRNA sense strand
aagacaacaucaugggagu

SEQ ID NO: 2404951 - RNA, 19 nt, Homo sapiens
  misc_RNA (1)...(19): siRNA sense strand
agauccugcagaagaauaa

SEQ ID NO: 2404952 - RNA, 19 nt, Homo sapiens
  misc_RNA (1)...(19): siRNA sense strand
gagauuucggagugcgauu

SEQ ID NO: 2404953 - RNA, 19 nt, Homo sapiens
  misc_RNA (1)...(19): siRNA sense strand
cugaagggagcaacggcaa

SEQ ID NO: 2404954 - RNA, 19 nt, Homo sapiens
  misc_RNA (1)...(19): siRNA sense strand
caggaaggagggugauuca

SEQ ID NO: 2404955 - RNA, 19 nt, Homo sapiens
  misc_RNA (1)...(19): siRNA sense strand
ccuggaaggcaaaggagca

SEQ ID NO: 2404956 - RNA, 19 nt, Homo sapiens
  misc_RNA (1)...(19): siRNA sense strand
ugauauuucugucugggaa

SEQ ID NO: 2404957 - RNA, 19 nt, Homo sapiens
  misc_RNA (1)...(19): siRNA sense strand
gcuggaagacacagugcuu

SEQ ID NO: 2404958 - RNA, 19 nt, Homo sapiens
  misc_RNA (1)...(19): siRNA sense strand
gggaaggggaugaagagau

SEQ ID NO: 2404959 - RNA, 19 nt, Homo sapiens
  misc_RNA (1)...(19): siRNA sense strand
gagcagaggaucaugugga

SEQ ID NO: 2404960 - RNA, 19 nt, Homo sapiens
  misc_RNA (1)...(19): siRNA sense strand
aacugugggcgaugagaaa

SEQ ID NO: 2404961 - RNA, 19 nt, Homo sapiens
  misc_RNA (1)...(19): siRNA sense strand
cugcagaagaauaaccuga

SEQ ID NO: 2404962 - RNA, 19 nt, Homo sapiens
  misc_RNA (1)...(19): siRNA sense strand
aaagaagugcugagcgguu

SEQ ID NO: 2404963 - RNA, 19 nt, Homo sapiens
  misc_RNA (1)...(19): siRNA sense strand
gggagauuucggagugcga

SEQ ID NO: 2404964 - RNA, 19 nt, Homo sapiens
  misc_RNA (1)...(19): siRNA sense strand
ccuucaggucauuaagauu

SEQ ID NO: 2404965 - RNA, 19 nt, Homo sapiens
  misc_RNA (1)...(19): siRNA sense strand
gauugaguucuaugccaaa

SEQ ID NO: 2404966 - RNA, 19 nt, Homo sapiens
  misc_RNA (1)...(19): siRNA sense strand
ugucuguggacuuugauaa

SEQ ID NO: 2404967 - RNA, 19 nt, Homo sapiens
  misc_RNA (1)...(19): siRNA sense strand
gccauugagcagagcguca

SEQ ID NO: 2404968 - RNA, 19 nt, Homo sapiens
  misc_RNA (1)...(19): siRNA sense strand
uggucauauuacacaggaa

SEQ ID NO: 2404969 - RNA, 19 nt, Homo sapiens
  misc_RNA (1)...(19): siRNA sense strand
acgcagagugcuaaggagu

SEQ ID NO: 2404970 - RNA, 19 nt, Homo sapiens
  misc_RNA (1)...(19): siRNA sense strand
cguaccugguggagcagaa

SEQ ID NO: 2404971 - RNA, 19 nt, Homo sapiens
  misc_RNA (1)...(19): siRNA sense strand
cggccaucuucgucggcaa

SEQ ID NO: 2404972 - RNA, 19 nt, Homo sapiens
  misc_RNA (1)...(19): siRNA sense strand
ucuucgugcuggagaucaa

SEQ ID NO: 2404973 - RNA, 19 nt, Homo sapiens
  misc_RNA (1)...(19): siRNA sense strand
acgcguaccugguggagca

SEQ ID NO: 2404974 - RNA, 19 nt, Homo sapiens
  misc_RNA (1)...(19): siRNA sense strand
acuucaucuuccagaacua

SEQ ID NO: 2404975 - RNA, 19 nt, Homo sapiens
  misc_RNA (1)...(19): siRNA sense strand
ccgcagaagaugaugcugu

SEQ ID NO: 2404976 - RNA, 19 nt, Homo sapiens
  misc_RNA (1)...(19): siRNA sense strand
gcaagaucggcgugugcau

SEQ ID NO: 2404977 - RNA, 19 nt, Homo sapiens
  misc_RNA (1)...(19): siRNA sense strand
ucaucgugcuggugggcga

SEQ ID NO: 2404978 - RNA, 19 nt, Homo sapiens
  misc_RNA (1)...(19): siRNA sense strand
gcaugcagggcgagcacau

SEQ ID NO: 2404979 - RNA, 19 nt, Homo sapiens
  misc_RNA (1)...(19): siRNA sense strand
ccgcagagacuguuggaga

SEQ ID NO: 2404980 - RNA, 19 nt, Homo sapiens
  misc_RNA (1)...(19): siRNA sense strand
ccggaaagacgaagcccaa

SEQ ID NO: 2404981 - RNA, 19 nt, Homo sapiens
  misc_RNA (1)...(19): siRNA sense strand
caccagaagaugaagaaaa

SEQ ID NO: 2404982 - RNA, 19 nt, Homo sapiens
  misc_RNA (1)...(19): siRNA sense strand
aggcauuguauaugggaca

SEQ ID NO: 2404983 - RNA, 19 nt, Homo sapiens
  misc_RNA (1)...(19): siRNA sense strand
cuggaagauuugccgggaa

SEQ ID NO: 2404984 - RNA, 19 nt, Homo sapiens
  misc_RNA (1)...(19): siRNA sense strand
aggcuguggccgagaagau

SEQ ID NO: 2404985 - RNA, 19 nt, Homo sapiens
  misc_RNA (1)...(19): siRNA sense strand
uggugcuagucaagagaua

SEQ ID NO: 2404986 - RNA, 19 nt, Homo sapiens
  misc_RNA (1)...(19): siRNA sense strand
agucaagagauaugaggau

SEQ ID NO: 2404987 - RNA, 19 nt, Homo sapiens
  misc_RNA (1)...(19): siRNA sense strand
aggcauuguauaugggaca

SEQ ID NO: 2404988 - RNA, 19 nt, Homo sapiens
  misc_RNA (1)...(19): siRNA sense strand
cuggaagauuugccgggaa

SEQ ID NO: 2404989 - RNA, 19 nt, Homo sapiens
  misc_RNA (1)...(19): siRNA sense strand
aggcuguggccgagaagau

SEQ ID NO: 2404990 - RNA, 19 nt, Homo sapiens
  misc_RNA (1)...(19): siRNA sense strand
agugaagugggaugagaau

SEQ ID NO: 2404991 - RNA, 19 nt, Homo sapiens
  misc_RNA (1)...(19): siRNA sense strand
gcacggaacaggagggucu

SEQ ID NO: 2404992 - RNA, 19 nt, Homo sapiens
  misc_RNA (1)...(19): siRNA sense strand
acagaagggcccaggaagu

SEQ ID NO: 2404993 - RNA, 19 nt, Homo sapiens
  misc_RNA (1)...(19): siRNA sense strand
agccggaagcugagaccaa

SEQ ID NO: 2404994 - RNA, 19 nt, Homo sapiens
  misc_RNA (1)...(19): siRNA sense strand
gcagaaacccucaacagca

SEQ ID NO: 2404995 - RNA, 19 nt, Homo sapiens
  misc_RNA (1)...(19): siRNA sense strand
gaaucaaacauuuacccua

SEQ ID NO: 2404996 - RNA, 19 nt, Homo sapiens
  misc_RNA (1)...(19): siRNA sense strand
aagaggugcuacaggacau

SEQ ID NO: 2404997 - RNA, 19 nt, Homo sapiens
  misc_RNA (1)...(19): siRNA sense strand
cugccaguuucuugggaga

SEQ ID NO: 2404998 - RNA, 19 nt, Homo sapiens
  misc_RNA (1)...(19): siRNA sense strand
gggaagugguguaccugga

SEQ ID NO: 2404999 - RNA, 19 nt, Homo sapiens
  misc_RNA (1)...(19): siRNA sense strand
uggccagggaaguggugua

SEQ ID NO: 2405000 - RNA, 19 nt, Homo sapiens
  misc_RNA (1)...(19): siRNA sense strand
gcuacaggacauagguguu

SEQ ID NO: 2405001 - RNA, 19 nt, Homo sapiens
  misc_RNA (1)...(19): siRNA sense strand
gcgcagucucuugggcaaa

SEQ ID NO: 2405002 - RNA, 19 nt, Homo sapiens
  misc_RNA (1)...(19): siRNA sense strand
agauaggggacauggcuua

SEQ ID NO: 2405003 - RNA, 19 nt, Homo sapiens
  misc_RNA (1)...(19): siRNA sense strand
ggaaagggcaggaagucga

SEQ ID NO: 2405004 - RNA, 19 nt, Homo sapiens
  misc_RNA (1)...(19): siRNA sense strand
gguguagaugcaagugaaa

SEQ ID NO: 2405005 - RNA, 19 nt, Homo sapiens
  misc_RNA (1)...(19): siRNA sense strand
gcuuugaagauguaggaca

SEQ ID NO: 2405006 - RNA, 19 nt, Homo sapiens
  misc_RNA (1)...(19): siRNA sense strand
aagugaaagcuuugaagau

SEQ ID NO: 2405007 - RNA, 19 nt, Homo sapiens
  misc_RNA (1)...(19): siRNA sense strand
aggagguggcaaagcgcaa

SEQ ID NO: 2405008 - RNA, 19 nt, Homo sapiens
  misc_RNA (1)...(19): siRNA sense strand
uagcggcagcgaugggaaa

SEQ ID NO: 2405009 - RNA, 19 nt, Homo sapiens
  misc_RNA (1)...(19): siRNA sense strand
cuuugaagauguaggacac

SEQ ID NO: 2405010 - RNA, 19 nt, Homo sapiens
  misc_RNA (1)...(19): siRNA sense strand
gaacacaacuuuagcgaua

SEQ ID NO: 2405011 - RNA, 19 nt, Homo sapiens
  misc_RNA (1)...(19): siRNA sense strand
gaacagaagaauaugguua

SEQ ID NO: 2405012 - RNA, 19 nt, Homo sapiens
  misc_RNA (1)...(19): siRNA sense strand
gcaagaaagaaaugguaaa

SEQ ID NO: 2405013 - RNA, 19 nt, Homo sapiens
  misc_RNA (1)...(19): siRNA sense strand
aguugaaaguugucagaaa

SEQ ID NO: 2405014 - RNA, 19 nt, Homo sapiens
  misc_RNA (1)...(19): siRNA sense strand
ggguaauaauaaaguggaa

SEQ ID NO: 2405015 - RNA, 19 nt, Homo sapiens
  misc_RNA (1)...(19): siRNA sense strand
ggaaggagauugaagacuu

SEQ ID NO: 2405016 - RNA, 19 nt, Homo sapiens
  misc_RNA (1)...(19): siRNA sense strand
cguaugaugccaagguaaa

SEQ ID NO: 2405017 - RNA, 19 nt, Homo sapiens
  misc_RNA (1)...(19): siRNA sense strand
gaaacucccuucagaaaua

SEQ ID NO: 2405018 - RNA, 19 nt, Homo sapiens
  misc_RNA (1)...(19): siRNA sense strand
cugcauugcuugugaggau

SEQ ID NO: 2405019 - RNA, 19 nt, Homo sapiens
  misc_RNA (1)...(19): siRNA sense strand
ccgaagagcugguucccaa

SEQ ID NO: 2405020 - RNA, 19 nt, Homo sapiens
  misc_RNA (1)...(19): siRNA sense strand
ggccgaacccugagaggaa

SEQ ID NO: 2405021 - RNA, 19 nt, Homo sapiens
  misc_RNA (1)...(19): siRNA sense strand
ggggauaauuacugcuaua

SEQ ID NO: 2405022 - RNA, 19 nt, Homo sapiens
  misc_RNA (1)...(19): siRNA sense strand
cuucaaccgucgagcaaau

SEQ ID NO: 2405023 - RNA, 19 nt, Homo sapiens
  misc_RNA (1)...(19): siRNA sense strand
agacaagcaaccugaggaa

SEQ ID NO: 2405024 - RNA, 19 nt, Homo sapiens
  misc_RNA (1)...(19): siRNA sense strand
ggugaaaccagaauggaga

SEQ ID NO: 2405025 - RNA, 19 nt, Homo sapiens
  misc_RNA (1)...(19): siRNA sense strand
gaaaugaccuggacuaaca

SEQ ID NO: 2405026 - RNA, 19 nt, Homo sapiens
  misc_RNA (1)...(19): siRNA sense strand
aguagaaaugcaagaaaga

SEQ ID NO: 2405027 - RNA, 19 nt, Homo sapiens
  misc_RNA (1)...(19): siRNA sense strand
cuguacaaacaaagggaau

SEQ ID NO: 2405028 - RNA, 19 nt, Homo sapiens
  misc_RNA (1)...(19): siRNA sense strand
aagaaaugguaaacggcau

SEQ ID NO: 2405029 - RNA, 19 nt, Homo sapiens
  misc_RNA (1)...(19): siRNA sense strand
agucagcuguggagagaga

SEQ ID NO: 2405030 - RNA, 19 nt, Homo sapiens
  misc_RNA (1)...(19): siRNA sense strand
gaacaaaagcgcauugcaa

SEQ ID NO: 2405031 - RNA, 19 nt, Homo sapiens
  misc_RNA (1)...(19): siRNA sense strand
cuugaaaugaccuggacua

SEQ ID NO: 2405032 - RNA, 19 nt, Homo sapiens
  misc_RNA (1)...(19): siRNA sense strand
ggaauaacgaagaucccua

SEQ ID NO: 2405033 - RNA, 19 nt, Homo sapiens
  misc_RNA (1)...(19): siRNA sense strand
acaagcaaccugaggaaca

SEQ ID NO: 2405034 - RNA, 19 nt, Homo sapiens
  misc_RNA (1)...(19): siRNA sense strand
aggucugaaccaugagaua

SEQ ID NO: 2405035 - RNA, 19 nt, Homo sapiens
  misc_RNA (1)...(19): siRNA sense strand
cuauggagauaucugguua

SEQ ID NO: 2405036 - RNA, 19 nt, Homo sapiens
  misc_RNA (1)...(19): siRNA sense strand
acgaagaucccuauggaga

SEQ ID NO: 2405037 - RNA, 19 nt, Homo sapiens
  misc_RNA (1)...(19): siRNA sense strand
cagaauggagacugccaaa

SEQ ID NO: 2405038 - RNA, 19 nt, Homo sapiens
  misc_RNA (1)...(19): siRNA sense strand
gaagaucccuauggagaua

SEQ ID NO: 2405039 - RNA, 19 nt, Homo sapiens
  misc_RNA (1)...(19): siRNA sense strand
agauugaagacuugcagua

SEQ ID NO: 2405040 - RNA, 19 nt, Homo sapiens
  misc_RNA (1)...(19): siRNA sense strand
gaguagaaaugcaagaaag

SEQ ID NO: 2405041 - RNA, 19 nt, Homo sapiens
  misc_RNA (1)...(19): siRNA sense strand
caaauuuaagucugagcaa

SEQ ID NO: 2405042 - RNA, 19 nt, Homo sapiens
  misc_RNA (1)...(19): siRNA sense strand
gugauaggugggagaguca

SEQ ID NO: 2405043 - RNA, 19 nt, Homo sapiens
  misc_RNA (1)...(19): siRNA sense strand
gguaccuguuagaggauga

SEQ ID NO: 2405044 - RNA, 19 nt, Homo sapiens
  misc_RNA (1)...(19): siRNA sense strand
gcacaagauuuauagucca

SEQ ID NO: 2405045 - RNA, 19 nt, Homo sapiens
  misc_RNA (1)...(19): siRNA sense strand
ugaaagugccucagcauca

SEQ ID NO: 2405046 - RNA, 19 nt, Homo sapiens
  misc_RNA (1)...(19): siRNA sense strand
guuugaacacagaaaguuu

SEQ ID NO: 2405047 - RNA, 19 nt, Homo sapiens
  misc_RNA (1)...(19): siRNA sense strand
acguaugaugccaagguaa

SEQ ID NO: 2405048 - RNA, 19 nt, Homo sapiens
  misc_RNA (1)...(19): siRNA sense strand
cuauaagugaagucaggaa

SEQ ID NO: 2405049 - RNA, 19 nt, Homo sapiens
  misc_RNA (1)...(19): siRNA sense strand
auugaagacuugcaguaua

SEQ ID NO: 2405050 - RNA, 19 nt, Homo sapiens
  misc_RNA (1)...(19): siRNA sense strand
auauuuacccaauggcaua

SEQ ID NO: 2405051 - RNA, 19 nt, Homo sapiens
  misc_RNA (1)...(19): siRNA sense strand
augcuaaucugcaagggaa

SEQ ID NO: 2405052 - RNA, 19 nt, Homo sapiens
  misc_RNA (1)...(19): siRNA sense strand
caccagugccagagacauu

SEQ ID NO: 2405053 - RNA, 19 nt, Homo sapiens
  misc_RNA (1)...(19): siRNA sense strand
ugaacuggauagagugcau

SEQ ID NO: 2405054 - RNA, 19 nt, Homo sapiens
  misc_RNA (1)...(19): siRNA sense strand
ucuuaaaguuggcauucaa

SEQ ID NO: 2405055 - RNA, 19 nt, Homo sapiens
  misc_RNA (1)...(19): siRNA sense strand
uagaaacucccuucagaaa

SEQ ID NO: 2405056 - RNA, 19 nt, Homo sapiens
  misc_RNA (1)...(19): siRNA sense strand
gguuauugguggauauuac

SEQ ID NO: 2405057 - RNA, 19 nt, Homo sapiens
  misc_RNA (1)...(19): siRNA sense strand
cgaaauauguaccaccaga

SEQ ID NO: 2405058 - RNA, 19 nt, Homo sapiens
  misc_RNA (1)...(19): siRNA sense strand
cuucagaaauagagcgcac

SEQ ID NO: 2405059 - RNA, 19 nt, Homo sapiens
  misc_RNA (1)...(19): siRNA sense strand
caucagaaacacuucggaa

SEQ ID NO: 2405060 - RNA, 19 nt, Homo sapiens
  misc_RNA (1)...(19): siRNA sense strand
gcuugaacucucucguaua

SEQ ID NO: 2405061 - RNA, 19 nt, Homo sapiens
  misc_RNA (1)...(19): siRNA sense strand
agccagaaaucuuugaaaa

SEQ ID NO: 2405062 - RNA, 19 nt, Homo sapiens
  misc_RNA (1)...(19): siRNA sense strand
agaguagaaaugcaagaaa

SEQ ID NO: 2405063 - RNA, 19 nt, Homo sapiens
  misc_RNA (1)...(19): siRNA sense strand
cgaagaucccuauggagau

SEQ ID NO: 2405064 - RNA, 19 nt, Homo sapiens
  misc_RNA (1)...(19): siRNA sense strand
ugcaagaaagaaaugguaa

SEQ ID NO: 2405065 - RNA, 19 nt, Homo sapiens
  misc_RNA (1)...(19): siRNA sense strand
ggaaggguccagcggucaa

SEQ ID NO: 2405066 - RNA, 19 nt, Homo sapiens
  misc_RNA (1)...(19): siRNA sense strand
cuugacagcuauaagugaa

SEQ ID NO: 2405067 - RNA, 19 nt, Homo sapiens
  misc_RNA (1)...(19): siRNA sense strand
ccagaagauauucgaacau

SEQ ID NO: 2405068 - RNA, 19 nt, Homo sapiens
  misc_RNA (1)...(19): siRNA sense strand
ugcuaaucugcaagggaaa

SEQ ID NO: 2405069 - RNA, 19 nt, Homo sapiens
  misc_RNA (1)...(19): siRNA sense strand
auaagugauaggugggaga

SEQ ID NO: 2405070 - RNA, 19 nt, Homo sapiens
  misc_RNA (1)...(19): siRNA sense strand
ucagcuguggagagagaaa

SEQ ID NO: 2405071 - RNA, 19 nt, Homo sapiens
  misc_RNA (1)...(19): siRNA sense strand
caacuuuagcgauaccaaa

SEQ ID NO: 2405072 - RNA, 19 nt, Homo sapiens
  misc_RNA (1)...(19): siRNA sense strand
ugugaggaucuuacauaaa

SEQ ID NO: 2405073 - RNA, 19 nt, Homo sapiens
  misc_RNA (1)...(19): siRNA sense strand
aagaaaaccgugaagauuu

SEQ ID NO: 2405074 - RNA, 19 nt, Homo sapiens
  misc_RNA (1)...(19): siRNA sense strand
gccagaaaucuuugaaaau

SEQ ID NO: 2405075 - RNA, 19 nt, Homo sapiens
  misc_RNA (1)...(19): siRNA sense strand
agugaagucaggaaggaga

SEQ ID NO: 2405076 - RNA, 19 nt, Homo sapiens
  misc_RNA (1)...(19): siRNA sense strand
aggcacagugucagugauu

SEQ ID NO: 2405077 - RNA, 19 nt, Homo sapiens
  misc_RNA (1)...(19): siRNA sense strand
ggauuagaacaaagucuga

SEQ ID NO: 2405078 - RNA, 19 nt, Homo sapiens
  misc_RNA (1)...(19): siRNA sense strand
uggaagucuauuugcacaa

SEQ ID NO: 2405079 - RNA, 19 nt, Homo sapiens
  misc_RNA (1)...(19): siRNA sense strand
ggagauaucugguuaacag

SEQ ID NO: 2405080 - RNA, 19 nt, Homo sapiens
  misc_RNA (1)...(19): siRNA sense strand
ggaugauaugccagaaaau

SEQ ID NO: 2405081 - RNA, 19 nt, Homo sapiens
  misc_RNA (1)...(19): siRNA sense strand
uaugguuauugguggauau

SEQ ID NO: 2405082 - RNA, 19 nt, Homo sapiens
  misc_RNA (1)...(19): siRNA sense strand
cugccaaggaggaguacaa

SEQ ID NO: 2405083 - RNA, 19 nt, Homo sapiens
  misc_RNA (1)...(19): siRNA sense strand
ccauugaagccguggccau

SEQ ID NO: 2405084 - RNA, 19 nt, Homo sapiens
  misc_RNA (1)...(19): siRNA sense strand
ccgagcagacagcaggaaa

SEQ ID NO: 2405085 - RNA, 19 nt, Homo sapiens
  misc_RNA (1)...(19): siRNA sense strand
uggacuucuacuuggaaua

SEQ ID NO: 2405086 - RNA, 19 nt, Homo sapiens
  misc_RNA (1)...(19): siRNA sense strand
caggaaagaagaagcccuu

SEQ ID NO: 2405087 - RNA, 19 nt, Homo sapiens
  misc_RNA (1)...(19): siRNA sense strand
aggaaaacccacucaacaa

SEQ ID NO: 2405088 - RNA, 19 nt, Homo sapiens
  misc_RNA (1)...(19): siRNA sense strand
gaagauugaaccaggcguu

SEQ ID NO: 2405089 - RNA, 19 nt, Homo sapiens
  misc_RNA (1)...(19): siRNA sense strand
caggggaagcagaaguaua

SEQ ID NO: 2405090 - RNA, 19 nt, Homo sapiens
  misc_RNA (1)...(19): siRNA sense strand
agauuaaguuugaggcuaa

SEQ ID NO: 2405091 - RNA, 19 nt, Homo sapiens
  misc_RNA (1)...(19): siRNA sense strand
aaguauugcucaagggaua

SEQ ID NO: 2405092 - RNA, 19 nt, Homo sapiens
  misc_RNA (1)...(19): siRNA sense strand
cgcaauaaggauagaaaua

SEQ ID NO: 2405093 - RNA, 19 nt, Homo sapiens
  misc_RNA (1)...(19): siRNA sense strand
caucaaagucagagaagga

SEQ ID NO: 2405094 - RNA, 19 nt, Homo sapiens
  misc_RNA (1)...(19): siRNA sense strand
agauaagggcaguggaaaa

SEQ ID NO: 2405095 - RNA, 19 nt, Homo sapiens
  misc_RNA (1)...(19): siRNA sense strand
aagaagaagcagugaugaa

SEQ ID NO: 2405096 - RNA, 19 nt, Homo sapiens
  misc_RNA (1)...(19): siRNA sense strand
ggugaaugccaaucagaaa

SEQ ID NO: 2405097 - RNA, 19 nt, Homo sapiens
  misc_RNA (1)...(19): siRNA sense strand
auauaaaaccagaggacaa

SEQ ID NO: 2405098 - RNA, 19 nt, Homo sapiens
  misc_RNA (1)...(19): siRNA sense strand
gaauggaagccaagaucaa

SEQ ID NO: 2405099 - RNA, 19 nt, Homo sapiens
  misc_RNA (1)...(19): siRNA sense strand
aggaaacgcaauaaggaua

SEQ ID NO: 2405100 - RNA, 19 nt, Homo sapiens
  misc_RNA (1)...(19): siRNA sense strand
agguaagagccaagagaca

SEQ ID NO: 2405101 - RNA, 19 nt, Homo sapiens
  misc_RNA (1)...(19): siRNA sense strand
acacaaugaaggugaucaa

SEQ ID NO: 2405102 - RNA, 19 nt, Homo sapiens
  misc_RNA (1)...(19): siRNA sense strand
ccaccuaaccagugugcua

SEQ ID NO: 2405103 - RNA, 19 nt, Homo sapiens
  misc_RNA (1)...(19): siRNA sense strand
gggcacaaugcaacagaaa

SEQ ID NO: 2405104 - RNA, 19 nt, Homo sapiens
  misc_RNA (1)...(19): siRNA sense strand
aggaaaaggugaagguuga

SEQ ID NO: 2405105 - RNA, 19 nt, Homo sapiens
  misc_RNA (1)...(19): siRNA sense strand
cuucaaguguacacaauaa

SEQ ID NO: 2405106 - RNA, 19 nt, Homo sapiens
  misc_RNA (1)...(19): siRNA sense strand
ccaucagaucuguaagaaa

SEQ ID NO: 2405107 - RNA, 19 nt, Homo sapiens
  misc_RNA (1)...(19): siRNA sense strand
cuucgaagcuacugcaaau

SEQ ID NO: 2405108 - RNA, 19 nt, Homo sapiens
  misc_RNA (1)...(19): siRNA sense strand
aguaauggcuauaagcaau

SEQ ID NO: 2405109 - RNA, 19 nt, Homo sapiens
  misc_RNA (1)...(19): siRNA sense strand
cggaagaauaacucaacaa

SEQ ID NO: 2405110 - RNA, 19 nt, Homo sapiens
  misc_RNA (1)...(19): siRNA sense strand
caguaauggcuauaagcaa

SEQ ID NO: 2405111 - RNA, 19 nt, Homo sapiens
  misc_RNA (1)...(19): siRNA sense strand
ggagaauagguauggucaa

SEQ ID NO: 2405112 - RNA, 19 nt, Homo sapiens
  misc_RNA (1)...(19): siRNA sense strand
acucugaaguugacaagaa

SEQ ID NO: 2405113 - RNA, 19 nt, Homo sapiens
  misc_RNA (1)...(19): siRNA sense strand
cauccaagauugacaccaa

SEQ ID NO: 2405114 - RNA, 19 nt, Homo sapiens
  misc_RNA (1)...(19): siRNA sense strand
aggaaggaauggaagccaa

SEQ ID NO: 2405115 - RNA, 19 nt, Homo sapiens
  misc_RNA (1)...(19): siRNA sense strand
ccucugaaguaaaugaauu

SEQ ID NO: 2405116 - RNA, 19 nt, Homo sapiens
  misc_RNA (1)...(19): siRNA sense strand
ugacaagaaacgaaccaaa

SEQ ID NO: 2405117 - RNA, 19 nt, Homo sapiens
  misc_RNA (1)...(19): siRNA sense strand
ccauagaggcccugacuca

SEQ ID NO: 2405118 - RNA, 19 nt, Homo sapiens
  misc_RNA (1)...(19): siRNA sense strand
acacaauaaucaugguuca

SEQ ID NO: 2405119 - RNA, 19 nt, Homo sapiens
  misc_RNA (1)...(19): siRNA sense strand
aaugaaggccucagagcaa

SEQ ID NO: 2405120 - RNA, 19 nt, Homo sapiens
  misc_RNA (1)...(19): siRNA sense strand
ggagcaagugguagccaua

SEQ ID NO: 2405121 - RNA, 19 nt, Homo sapiens
  misc_RNA (1)...(19): siRNA sense strand
ggagaagggcacaaugcaa

SEQ ID NO: 2405122 - RNA, 19 nt, Homo sapiens
  misc_RNA (1)...(19): siRNA sense strand
cuguacaugucaaggaauu

SEQ ID NO: 2405123 - RNA, 19 nt, Homo sapiens
  misc_RNA (1)...(19): siRNA sense strand
aggaauugauccagagacu

SEQ ID NO: 2405124 - RNA, 19 nt, Homo sapiens
  misc_RNA (1)...(19): siRNA sense strand
gaucggcagaagugggaaa

SEQ ID NO: 2405125 - RNA, 19 nt, Homo sapiens
  misc_RNA (1)...(19): siRNA sense strand
ccaacaugguuuugaacua

SEQ ID NO: 2405126 - RNA, 19 nt, Homo sapiens
  misc_RNA (1)...(19): siRNA sense strand
ggcuauaagcaauguagaa

SEQ ID NO: 2405127 - RNA, 19 nt, Homo sapiens
  misc_RNA (1)...(19): siRNA sense strand
uguacaaaccguaagaaau

SEQ ID NO: 2405128 - RNA, 19 nt, Homo sapiens
  misc_RNA (1)...(19): siRNA sense strand
aagaagcagugaugaagaa

SEQ ID NO: 2405129 - RNA, 19 nt, Homo sapiens
  misc_RNA (1)...(19): siRNA sense strand
gcacauaagauaagggcag

SEQ ID NO: 2405130 - RNA, 19 nt, Homo sapiens
  misc_RNA (1)...(19): siRNA sense strand
acgcuguggugaaggacua

SEQ ID NO: 2405131 - RNA, 19 nt, Homo sapiens
  misc_RNA (1)...(19): siRNA sense strand
acccaaacuuacagggaga

SEQ ID NO: 2405132 - RNA, 19 nt, Homo sapiens
  misc_RNA (1)...(19): siRNA sense strand
cuuuaauggcuguaaguuu

SEQ ID NO: 2405133 - RNA, 19 nt, Homo sapiens
  misc_RNA (1)...(19): siRNA sense strand
ggcuaaagaagcuaagaau

SEQ ID NO: 2405134 - RNA, 19 nt, Homo sapiens
  misc_RNA (1)...(19): siRNA sense strand
ggucguagccaaauccaaa

SEQ ID NO: 2405135 - RNA, 19 nt, Homo sapiens
  misc_RNA (1)...(19): siRNA sense strand
gcuauaagcaauguagaaa

SEQ ID NO: 2405136 - RNA, 19 nt, Homo sapiens
  misc_RNA (1)...(19): siRNA sense strand
gagauuaacauuggagcaa

SEQ ID NO: 2405137 - RNA, 19 nt, Homo sapiens
  misc_RNA (1)...(19): siRNA sense strand
cuuuauaagcuuucagaca

SEQ ID NO: 2405138 - RNA, 19 nt, Homo sapiens
  misc_RNA (1)...(19): siRNA sense strand
ucaggaaggaagauguaaa

SEQ ID NO: 2405139 - RNA, 19 nt, Homo sapiens
  misc_RNA (1)...(19): siRNA sense strand
ggucagacagugagcacau

SEQ ID NO: 2405140 - RNA, 19 nt, Homo sapiens
  misc_RNA (1)...(19): siRNA sense strand
cugucuugaucgaguuaua

SEQ ID NO: 2405141 - RNA, 19 nt, Homo sapiens
  misc_RNA (1)...(19): siRNA sense strand
cccaaagaguugaggauuc

SEQ ID NO: 2405142 - RNA, 19 nt, Homo sapiens
  misc_RNA (1)...(19): siRNA sense strand
ccuccaagacccaaacuua

SEQ ID NO: 2405143 - RNA, 19 nt, Homo sapiens
  misc_RNA (1)...(19): siRNA sense strand
uaccaaaagugaagaggaa

SEQ ID NO: 2405144 - RNA, 19 nt, Homo sapiens
  misc_RNA (1)...(19): siRNA sense strand
gguaagagccaagagacaa

SEQ ID NO: 2405145 - RNA, 19 nt, Homo sapiens
  misc_RNA (1)...(19): siRNA sense strand
guuaacugaucacgugaaa

SEQ ID NO: 2405146 - RNA, 19 nt, Homo sapiens
  misc_RNA (1)...(19): siRNA sense strand
cugagaauauaccaaguaa

SEQ ID NO: 2405147 - RNA, 19 nt, Homo sapiens
  misc_RNA (1)...(19): siRNA sense strand
ggauaauuacucuugacaa

SEQ ID NO: 2405148 - RNA, 19 nt, Homo sapiens
  misc_RNA (1)...(19): siRNA sense strand
uggaagaagaugagcagca

SEQ ID NO: 2405149 - RNA, 19 nt, Homo sapiens
  misc_RNA (1)...(19): siRNA sense strand
uuguacaaaccguaagaaa

SEQ ID NO: 2405150 - RNA, 19 nt, Homo sapiens
  misc_RNA (1)...(19): siRNA sense strand
ugacagagguucuugcaca

SEQ ID NO: 2405151 - RNA, 19 nt, Homo sapiens
  misc_RNA (1)...(19): siRNA sense strand
gaggauuccaagaucaaua

SEQ ID NO: 2405152 - RNA, 19 nt, Homo sapiens
  misc_RNA (1)...(19): siRNA sense strand
cugcaaaucaacaggaagu

SEQ ID NO: 2405153 - RNA, 19 nt, Homo sapiens
  misc_RNA (1)...(19): siRNA sense strand
cuuuaaugcuccuuccaaa

SEQ ID NO: 2405154 - RNA, 19 nt, Homo sapiens
  misc_RNA (1)...(19): siRNA sense strand
gauuaacauuggagcaagu

SEQ ID NO: 2405155 - RNA, 19 nt, Homo sapiens
  misc_RNA (1)...(19): siRNA sense strand
accaaaaucagguggaaua

SEQ ID NO: 2405156 - RNA, 19 nt, Homo sapiens
  misc_RNA (1)...(19): siRNA sense strand
ccgugcaaccugaaguaaa

SEQ ID NO: 2405157 - RNA, 19 nt, Homo sapiens
  misc_RNA (1)...(19): siRNA sense strand
agagauuccuggugcuauu

SEQ ID NO: 2405158 - RNA, 19 nt, Homo sapiens
  misc_RNA (1)...(19): siRNA sense strand
cagcagaggaaaaggugaa

SEQ ID NO: 2405159 - RNA, 19 nt, Homo sapiens
  misc_RNA (1)...(19): siRNA sense strand
gaugaguauuggucagaca

SEQ ID NO: 2405160 - RNA, 19 nt, Homo sapiens
  misc_RNA (1)...(19): siRNA sense strand
gcauugaagaagauggaaa

SEQ ID NO: 2405161 - RNA, 19 nt, Homo sapiens
  misc_RNA (1)...(19): siRNA sense strand
aggcaaaaucagaagaaaa

SEQ ID NO: 2405162 - RNA, 19 nt, Homo sapiens
  misc_RNA (1)...(19): siRNA sense strand
cugaaacagagaaggcaaa

SEQ ID NO: 2405163 - RNA, 19 nt, Homo sapiens
  misc_RNA (1)...(19): siRNA sense strand
agggcugaaugguggaaua

SEQ ID NO: 2405164 - RNA, 19 nt, Homo sapiens
  misc_RNA (1)...(19): siRNA sense strand
gcuuauuaaugcaaggaca

SEQ ID NO: 2405165 - RNA, 19 nt, Homo sapiens
  misc_RNA (1)...(19): siRNA sense strand
ugacauaaugagagcugaa

SEQ ID NO: 2405166 - RNA, 19 nt, Homo sapiens
  misc_RNA (1)...(19): siRNA sense strand
ccugaaacagagaaggcaa

SEQ ID NO: 2405167 - RNA, 19 nt, Homo sapiens
  misc_RNA (1)...(19): siRNA sense strand
cauaaagcugagagcaaau

SEQ ID NO: 2405168 - RNA, 19 nt, Homo sapiens
  misc_RNA (1)...(19): siRNA sense strand
cauugaagaagauggaaaa

SEQ ID NO: 2405169 - RNA, 19 nt, Homo sapiens
  misc_RNA (1)...(19): siRNA sense strand
ggcaaaaucagaagaaaau

SEQ ID NO: 2405170 - RNA, 19 nt, Homo sapiens
  misc_RNA (1)...(19): siRNA sense strand
cagcaagaccccuuagaaa

SEQ ID NO: 2405171 - RNA, 19 nt, Homo sapiens
  misc_RNA (1)...(19): siRNA sense strand
ggggacaauucuucggaaa

SEQ ID NO: 2405172 - RNA, 19 nt, Homo sapiens
  misc_RNA (1)...(19): siRNA sense strand
aggucaggaagcuggaaua

SEQ ID NO: 2405173 - RNA, 19 nt, Homo sapiens
  misc_RNA (1)...(19): siRNA sense strand
gggacaauucuucggaaaa

SEQ ID NO: 2405174 - RNA, 19 nt, Homo sapiens
  misc_RNA (1)...(19): siRNA sense strand
gcaaugggaaggagaaaau

SEQ ID NO: 2405175 - RNA, 19 nt, Homo sapiens
  misc_RNA (1)...(19): siRNA sense strand
auaccgacccugagcuaaa

SEQ ID NO: 2405176 - RNA, 19 nt, Homo sapiens
  misc_RNA (1)...(19): siRNA sense strand
uggcaaugggaaggagaaa

SEQ ID NO: 2405177 - RNA, 19 nt, Homo sapiens
  misc_RNA (1)...(19): siRNA sense strand
uggaauacugccugaaaca

SEQ ID NO: 2405178 - RNA, 19 nt, Homo sapiens
  misc_RNA (1)...(19): siRNA sense strand
cauaaugagagcugaaaau

SEQ ID NO: 2405179 - RNA, 19 nt, Homo sapiens
  misc_RNA (1)...(19): siRNA sense strand
gaugauaauggaucggcua

SEQ ID NO: 2405180 - RNA, 19 nt, Homo sapiens
  misc_RNA (1)...(19): siRNA sense strand
gagaaaauaaggaucgaau

SEQ ID NO: 2405181 - RNA, 19 nt, Homo sapiens
  misc_RNA (1)...(19): siRNA sense strand
gugcaaagcaauacuggga

SEQ ID NO: 2405182 - RNA, 19 nt, Homo sapiens
  misc_RNA (1)...(19): siRNA sense strand
ggaaaauggcaaugggaag

SEQ ID NO: 2405183 - RNA, 19 nt, Homo sapiens
  misc_RNA (1)...(19): siRNA sense strand
cggaaaauggcaaugggaa

SEQ ID NO: 2405184 - RNA, 19 nt, Homo sapiens
  misc_RNA (1)...(19): siRNA sense strand
guuuggagugcuagugcaa

SEQ ID NO: 2405185 - RNA, 19 nt, Homo sapiens
  misc_RNA (1)...(19): siRNA sense strand
uagauaaacggguggaagu

SEQ ID NO: 2405186 - RNA, 19 nt, Homo sapiens
  misc_RNA (1)...(19): siRNA sense strand
cuuauuaaugcaaggacau

SEQ ID NO: 2405187 - RNA, 19 nt, Homo sapiens
  misc_RNA (1)...(19): siRNA sense strand
ggaugauggccguggggau

SEQ ID NO: 2405188 - RNA, 19 nt, Homo sapiens
  misc_RNA (1)...(19): siRNA sense strand
ccuuggaaucucagugaca

SEQ ID NO: 2405189 - RNA, 19 nt, Homo sapiens
  misc_RNA (1)...(19): siRNA sense strand
gcgaaggagaggucagucu

SEQ ID NO: 2405190 - RNA, 19 nt, Homo sapiens
  misc_RNA (1)...(19): siRNA sense strand
gcaaggacauaugggcgaa

SEQ ID NO: 2405191 - RNA, 19 nt, Homo sapiens
  misc_RNA (1)...(19): siRNA sense strand
gcuagguacuucaacccaa

SEQ ID NO: 2405192 - RNA, 19 nt, Homo sapiens
  misc_RNA (1)...(19): siRNA sense strand
ugaacagggcugacaacau

SEQ ID NO: 2405193 - RNA, 19 nt, Homo sapiens
  misc_RNA (1)...(19): siRNA sense strand
cuguggagcuugcgaugau

SEQ ID NO: 2405194 - RNA, 19 nt, Homo sapiens
  misc_RNA (1)...(19): siRNA sense strand
caacagaguuacauagcug

SEQ ID NO: 2405195 - RNA, 19 nt, Homo sapiens
  misc_RNA (1)...(19): siRNA sense strand
acauagaaaugcugcuuuu

SEQ ID NO: 2405196 - RNA, 19 nt, Homo sapiens
  misc_RNA (1)...(19): siRNA sense strand
aggauaagccaguccagau

SEQ ID NO: 2405197 - RNA, 19 nt, Homo sapiens
  misc_RNA (1)...(19): siRNA sense strand
gaaaauaaggaucgaaucu

SEQ ID NO: 2405198 - RNA, 19 nt, Homo sapiens
  misc_RNA (1)...(19): siRNA sense strand
guugacaggguuugauuau

SEQ ID NO: 2405199 - RNA, 19 nt, Homo sapiens
  misc_RNA (1)...(19): siRNA sense strand
ugauaauggaucggcuaua

SEQ ID NO: 2405200 - RNA, 19 nt, Homo sapiens
  misc_RNA (1)...(19): siRNA sense strand
acgaagaucugaaggccaa

SEQ ID NO: 2405201 - RNA, 19 nt, Homo sapiens
  misc_RNA (1)...(19): siRNA sense strand
gugcugaaccugugcgaga

SEQ ID NO: 2405202 - RNA, 19 nt, Homo sapiens
  misc_RNA (1)...(19): siRNA sense strand
ccaaagaagcucucgcaca

SEQ ID NO: 2405203 - RNA, 19 nt, Homo sapiens
  misc_RNA (1)...(19): siRNA sense strand
cggcaaagauggcugguuc

SEQ ID NO: 2405204 - RNA, 19 nt, Homo sapiens
  misc_RNA (1)...(19): siRNA sense strand
aggaaguggacguccgcua

SEQ ID NO: 2405205 - RNA, 19 nt, Homo sapiens
  misc_RNA (1)...(19): siRNA sense strand
gcaacgacagcgagcccaa

SEQ ID NO: 2405206 - RNA, 19 nt, Homo sapiens
  misc_RNA (1)...(19): siRNA sense strand
uggaaaucgucucgaaacu

SEQ ID NO: 2405207 - RNA, 19 nt, Homo sapiens
  misc_RNA (1)...(19): siRNA sense strand
caacuggguacauggaaaa

SEQ ID NO: 2405208 - RNA, 19 nt, Homo sapiens
  misc_RNA (1)...(19): siRNA sense strand
cagcugaaccuguggucca

SEQ ID NO: 2405209 - RNA, 19 nt, Homo sapiens
  misc_RNA (1)...(19): siRNA sense strand
ccccaagccugaaggaaau

SEQ ID NO: 2405210 - RNA, 19 nt, Homo sapiens
  misc_RNA (1)...(19): siRNA sense strand
gaauacaacaucaucgaca

SEQ ID NO: 2405211 - RNA, 19 nt, Homo sapiens
  misc_RNA (1)...(19): siRNA sense strand
gcacaugagaaguucacca

SEQ ID NO: 2405212 - RNA, 19 nt, Homo sapiens
  misc_RNA (1)...(19): siRNA sense strand
aguacgugauucagagguu

SEQ ID NO: 2405213 - RNA, 19 nt, Homo sapiens
  misc_RNA (1)...(19): siRNA sense strand
ccaauagcuaccugcgaga

SEQ ID NO: 2405214 - RNA, 19 nt, Homo sapiens
  misc_RNA (1)...(19): siRNA sense strand
uaacauggacuuugggaag

SEQ ID NO: 2405215 - RNA, 19 nt, Homo sapiens
  misc_RNA (1)...(19): siRNA sense strand
agaccaugguggagauccu

SEQ ID NO: 2405216 - RNA, 19 nt, Homo sapiens
  misc_RNA (1)...(19): siRNA sense strand
acgaagaucugaaggccaa

SEQ ID NO: 2405217 - RNA, 19 nt, Homo sapiens
  misc_RNA (1)...(19): siRNA sense strand
gugcugaaccugugcgaga

SEQ ID NO: 2405218 - RNA, 19 nt, Homo sapiens
  misc_RNA (1)...(19): siRNA sense strand
ccaaagaagcucucgcaca

SEQ ID NO: 2405219 - RNA, 19 nt, Homo sapiens
  misc_RNA (1)...(19): siRNA sense strand
cggcaaagauggcugguuc

SEQ ID NO: 2405220 - RNA, 19 nt, Homo sapiens
  misc_RNA (1)...(19): siRNA sense strand
aggaaguggacguccgcua

SEQ ID NO: 2405221 - RNA, 19 nt, Homo sapiens
  misc_RNA (1)...(19): siRNA sense strand
gcaacgacagcgagcccaa

SEQ ID NO: 2405222 - RNA, 19 nt, Homo sapiens
  misc_RNA (1)...(19): siRNA sense strand
uggaaaucgucucgaaacu

SEQ ID NO: 2405223 - RNA, 19 nt, Homo sapiens
  misc_RNA (1)...(19): siRNA sense strand
caacuggguacauggaaaa

SEQ ID NO: 2405224 - RNA, 19 nt, Homo sapiens
  misc_RNA (1)...(19): siRNA sense strand
cagcugaaccuguggucca

SEQ ID NO: 2405225 - RNA, 19 nt, Homo sapiens
  misc_RNA (1)...(19): siRNA sense strand
ccccaagccugaaggaaau

SEQ ID NO: 2405226 - RNA, 19 nt, Homo sapiens
  misc_RNA (1)...(19): siRNA sense strand
gaauacaacaucaucgaca

SEQ ID NO: 2405227 - RNA, 19 nt, Homo sapiens
  misc_RNA (1)...(19): siRNA sense strand
gcacaugagaaguucacca

SEQ ID NO: 2405228 - RNA, 19 nt, Homo sapiens
  misc_RNA (1)...(19): siRNA sense strand
aguacgugauucagagguu

SEQ ID NO: 2405229 - RNA, 19 nt, Homo sapiens
  misc_RNA (1)...(19): siRNA sense strand
ccaauagcuaccugcgaga

SEQ ID NO: 2405230 - RNA, 19 nt, Homo sapiens
  misc_RNA (1)...(19): siRNA sense strand
uaacauggacuuugggaag

SEQ ID NO: 2405231 - RNA, 19 nt, Homo sapiens
  misc_RNA (1)...(19): siRNA sense strand
agaccaugguggagauccu

SEQ ID NO: 2405232 - RNA, 19 nt, Homo sapiens
  misc_RNA (1)...(19): siRNA sense strand
ccuaugacccugugggcua

SEQ ID NO: 2405233 - RNA, 19 nt, Homo sapiens
  misc_RNA (1)...(19): siRNA sense strand
gagaagaucugcaucgaca

SEQ ID NO: 2405234 - RNA, 19 nt, Homo sapiens
  misc_RNA (1)...(19): siRNA sense strand
gagaagaggaugaugagca

SEQ ID NO: 2405235 - RNA, 19 nt, Homo sapiens
  misc_RNA (1)...(19): siRNA sense strand
cggagaaggagaagcagau

SEQ ID NO: 2405236 - RNA, 19 nt, Homo sapiens
  misc_RNA (1)...(19): siRNA sense strand
aguucauccucaaggguau

SEQ ID NO: 2405237 - RNA, 19 nt, Homo sapiens
  misc_RNA (1)...(19): siRNA sense strand
agggagaagaggaugauga

SEQ ID NO: 2405238 - RNA, 19 nt, Homo sapiens
  misc_RNA (1)...(19): siRNA sense strand
aguaccaguuugauggcaa

SEQ ID NO: 2405239 - RNA, 19 nt, Homo sapiens
  misc_RNA (1)...(19): siRNA sense strand
ggcagggagaagaggauga

SEQ ID NO: 2405240 - RNA, 19 nt, Homo sapiens
  misc_RNA (1)...(19): siRNA sense strand
guucagagccaccggagga

SEQ ID NO: 2405241 - RNA, 19 nt, Homo sapiens
  misc_RNA (1)...(19): siRNA sense strand
cgaccgacuccaagcugaa

SEQ ID NO: 2405242 - RNA, 19 nt, Homo sapiens
  misc_RNA (1)...(19): siRNA sense strand
agucugagauccugcgguu

SEQ ID NO: 2405243 - RNA, 19 nt, Homo sapiens
  misc_RNA (1)...(19): siRNA sense strand
gcgucaucuaucugaggaa

SEQ ID NO: 2405244 - RNA, 19 nt, Homo sapiens
  misc_RNA (1)...(19): siRNA sense strand
ccggaaaguggcagcacca

SEQ ID NO: 2405245 - RNA, 19 nt, Homo sapiens
  misc_RNA (1)...(19): siRNA sense strand
acucggagaaggagaagca

SEQ ID NO: 2405246 - RNA, 19 nt, Homo sapiens
  misc_RNA (1)...(19): siRNA sense strand
gauuaugagacuuggacca

SEQ ID NO: 2405247 - RNA, 19 nt, Homo sapiens
  misc_RNA (1)...(19): siRNA sense strand
cuaucaggaagaagggauu

SEQ ID NO: 2405248 - RNA, 19 nt, Homo sapiens
  misc_RNA (1)...(19): siRNA sense strand
caacaaaggauuaacugca

SEQ ID NO: 2405249 - RNA, 19 nt, Homo sapiens
  misc_RNA (1)...(19): siRNA sense strand
cgauccaaacaguuauaaa

SEQ ID NO: 2405250 - RNA, 19 nt, Homo sapiens
  misc_RNA (1)...(19): siRNA sense strand
uggauugggaucuggacua

SEQ ID NO: 2405251 - RNA, 19 nt, Homo sapiens
  misc_RNA (1)...(19): siRNA sense strand
aguaaaaguuggcuugcaa

SEQ ID NO: 2405252 - RNA, 19 nt, Homo sapiens
  misc_RNA (1)...(19): siRNA sense strand
uggacuaacagaagccauu

SEQ ID NO: 2405253 - RNA, 19 nt, Homo sapiens
  misc_RNA (1)...(19): siRNA sense strand
ggauuuuagcuuuguacaa

SEQ ID NO: 2405254 - RNA, 19 nt, Homo sapiens
  misc_RNA (1)...(19): siRNA sense strand
aguuaacccuuuugaggua

SEQ ID NO: 2405255 - RNA, 19 nt, Homo sapiens
  misc_RNA (1)...(19): siRNA sense strand
guggguuaugcaagacaaa

SEQ ID NO: 2405256 - RNA, 19 nt, Homo sapiens
  misc_RNA (1)...(19): siRNA sense strand
agaagaaagcuguggugau

SEQ ID NO: 2405257 - RNA, 19 nt, Homo sapiens
  misc_RNA (1)...(19): siRNA sense strand
aaaucaaggcugagcaaca

SEQ ID NO: 2405258 - RNA, 19 nt, Homo sapiens
  misc_RNA (1)...(19): siRNA sense strand
gguuuaugaccucaggaaa

SEQ ID NO: 2405259 - RNA, 19 nt, Homo sapiens
  misc_RNA (1)...(19): siRNA sense strand
cagaaaauggaaaggauga

SEQ ID NO: 2405260 - RNA, 19 nt, Homo sapiens
  misc_RNA (1)...(19): siRNA sense strand
aaggaaaagugaugguaga

SEQ ID NO: 2405261 - RNA, 19 nt, Homo sapiens
  misc_RNA (1)...(19): siRNA sense strand
aagugaugguagaugaaaa

SEQ ID NO: 2405262 - RNA, 19 nt, Homo sapiens
  misc_RNA (1)...(19): siRNA sense strand
ugaaaucaaggcugagcaa

SEQ ID NO: 2405263 - RNA, 19 nt, Homo sapiens
  misc_RNA (1)...(19): siRNA sense strand
uggcuauaguacagcauca

SEQ ID NO: 2405264 - RNA, 19 nt, Homo sapiens
  misc_RNA (1)...(19): siRNA sense strand
gcacaaggaauuaagcagu

SEQ ID NO: 2405265 - RNA, 19 nt, Homo sapiens
  misc_RNA (1)...(19): siRNA sense strand
gaaaauaucugcagaggcu

SEQ ID NO: 2405266 - RNA, 19 nt, Homo sapiens
  misc_RNA (1)...(19): siRNA sense strand
cugagcaacaggauguaaa

SEQ ID NO: 2405267 - RNA, 19 nt, Homo sapiens
  misc_RNA (1)...(19): siRNA sense strand
ccaauguggguuugcagaa

SEQ ID NO: 2405268 - RNA, 19 nt, Homo sapiens
  misc_RNA (1)...(19): siRNA sense strand
ucuauaagcuucuucguga

SEQ ID NO: 2405269 - RNA, 19 nt, Homo sapiens
  misc_RNA (1)...(19): siRNA sense strand
aauccaauguagagcucau

SEQ ID NO: 2405270 - RNA, 19 nt, Homo sapiens
  misc_RNA (1)...(19): siRNA sense strand
ccaucacaacaaagaaaga

SEQ ID NO: 2405271 - RNA, 19 nt, Homo sapiens
  misc_RNA (1)...(19): siRNA sense strand
gacuuaaaugcuacugaaa

SEQ ID NO: 2405272 - RNA, 19 nt, Homo sapiens
  misc_RNA (1)...(19): siRNA sense strand
uagguuugauaaagggaga

SEQ ID NO: 2405273 - RNA, 19 nt, Homo sapiens
  misc_RNA (1)...(19): siRNA sense strand
guuuauccaauguggguuu

SEQ ID NO: 2405274 - RNA, 19 nt, Homo sapiens
  misc_RNA (1)...(19): siRNA sense strand
guuuaugaccucaggaaag

SEQ ID NO: 2405275 - RNA, 19 nt, Homo sapiens
  misc_RNA (1)...(19): siRNA sense strand
uggguuugcagaauggaaa

SEQ ID NO: 2405276 - RNA, 19 nt, Homo sapiens
  misc_RNA (1)...(19): siRNA sense strand
aggcugagcaacaggaugu

SEQ ID NO: 2405277 - RNA, 19 nt, Homo sapiens
  misc_RNA (1)...(19): siRNA sense strand
acugacuucgauagagaaa

SEQ ID NO: 2405278 - RNA, 19 nt, Homo sapiens
  misc_RNA (1)...(19): siRNA sense strand
agauguuaaugaagcaguu

SEQ ID NO: 2405279 - RNA, 19 nt, Homo sapiens
  misc_RNA (1)...(19): siRNA sense strand
cugaaauaaagaugccuga

SEQ ID NO: 2405280 - RNA, 19 nt, Homo sapiens
  misc_RNA (1)...(19): siRNA sense strand
ugucacucuucuugaaaca

SEQ ID NO: 2405281 - RNA, 19 nt, Homo sapiens
  misc_RNA (1)...(19): siRNA sense strand
gagaagaguuucagcagga

SEQ ID NO: 2405282 - RNA, 19 nt, Homo sapiens
  misc_RNA (1)...(19): siRNA sense strand
uguaaugaguguuggcgaa

SEQ ID NO: 2405283 - RNA, 19 nt, Homo sapiens
  misc_RNA (1)...(19): siRNA sense strand
cugagaaugcugaggaaaa

SEQ ID NO: 2405284 - RNA, 19 nt, Homo sapiens
  misc_RNA (1)...(19): siRNA sense strand
gugugaggagugugggaaa

SEQ ID NO: 2405285 - RNA, 19 nt, Homo sapiens
  misc_RNA (1)...(19): siRNA sense strand
cuguaacgagugugggaaa

SEQ ID NO: 2405286 - RNA, 19 nt, Homo sapiens
  misc_RNA (1)...(19): siRNA sense strand
auguuaugcaggagaauua

SEQ ID NO: 2405287 - RNA, 19 nt, Homo sapiens
  misc_RNA (1)...(19): siRNA sense strand
agguaaaucccaagcaaga

SEQ ID NO: 2405288 - RNA, 19 nt, Homo sapiens
  misc_RNA (1)...(19): siRNA sense strand
ccuuaugaauguaacgaau

SEQ ID NO: 2405289 - RNA, 19 nt, Homo sapiens
  misc_RNA (1)...(19): siRNA sense strand
ccuuaugaauguaccgaau

SEQ ID NO: 2405290 - RNA, 19 nt, Homo sapiens
  misc_RNA (1)...(19): siRNA sense strand
cugaaagugaagagggcuu

SEQ ID NO: 2405291 - RNA, 19 nt, Homo sapiens
  misc_RNA (1)...(19): siRNA sense strand
gagauaggucagaaagaca

SEQ ID NO: 2405292 - RNA, 19 nt, Homo sapiens
  misc_RNA (1)...(19): siRNA sense strand
cggagauaggucagaaaga

SEQ ID NO: 2405293 - RNA, 19 nt, Homo sapiens
  misc_RNA (1)...(19): siRNA sense strand
gggaaaagcuucagccgga

SEQ ID NO: 2405294 - RNA, 19 nt, Homo sapiens
  misc_RNA (1)...(19): siRNA sense strand
gggaaaagcuucagccgga

SEQ ID NO: 2405295 - RNA, 19 nt, Homo sapiens
  misc_RNA (1)...(19): siRNA sense strand
aguucacacgggagagaaa

SEQ ID NO: 2405296 - RNA, 19 nt, Homo sapiens
  misc_RNA (1)...(19): siRNA sense strand
gauuagugaagauguacaa

SEQ ID NO: 2405297 - RNA, 19 nt, Homo sapiens
  misc_RNA (1)...(19): siRNA sense strand
cugaaagaccugcugagaa

SEQ ID NO: 2405298 - RNA, 19 nt, Homo sapiens
  misc_RNA (1)...(19): siRNA sense strand
gugaaaggucagaucuaau

SEQ ID NO: 2405299 - RNA, 19 nt, Homo sapiens
  misc_RNA (1)...(19): siRNA sense strand
gugugugcagugugggaaa

SEQ ID NO: 2405300 - RNA, 19 nt, Homo sapiens
  misc_RNA (1)...(19): siRNA sense strand
acagcagaagaguggguaa

SEQ ID NO: 2405301 - RNA, 19 nt, Homo sapiens
  misc_RNA (1)...(19): siRNA sense strand
uggugaaaggucagaucua

SEQ ID NO: 2405302 - RNA, 19 nt, Homo sapiens
  misc_RNA (1)...(19): siRNA sense strand
auguaaugaguguggaaaa

SEQ ID NO: 2405303 - RNA, 19 nt, Homo sapiens
  misc_RNA (1)...(19): siRNA sense strand
ccuuaugacuguaacgagu

SEQ ID NO: 2405304 - RNA, 19 nt, Homo sapiens
  misc_RNA (1)...(19): siRNA sense strand
agaacgagguaaaucccaa

SEQ ID NO: 2405305 - RNA, 19 nt, Homo sapiens
  misc_RNA (1)...(19): siRNA sense strand
aaauguaaugaguguggaa

SEQ ID NO: 2405306 - RNA, 19 nt, Homo sapiens
  misc_RNA (1)...(19): siRNA sense strand
agauaggucagaaagacaa

SEQ ID NO: 2405307 - RNA, 19 nt, Homo sapiens
  misc_RNA (1)...(19): siRNA sense strand
gggagauuuaacagcagaa

SEQ ID NO: 2405308 - RNA, 19 nt, Homo sapiens
  misc_RNA (1)...(19): siRNA sense strand
ucucagaccuuaaucgaca

SEQ ID NO: 2405309 - RNA, 19 nt, Homo sapiens
  misc_RNA (1)...(19): siRNA sense strand
gcugagaaugcugaggaaa

SEQ ID NO: 2405310 - RNA, 19 nt, Homo sapiens
  misc_RNA (1)...(19): siRNA sense strand
acuccgaccuugugcguca

SEQ ID NO: 2405311 - RNA, 19 nt, Homo sapiens
  misc_RNA (1)...(19): siRNA sense strand
acacgggagagaagccaua

SEQ ID NO: 2405312 - RNA, 19 nt, Homo sapiens
  misc_RNA (1)...(19): siRNA sense strand
ugcaggagaauuauggaaa

SEQ ID NO: 2405313 - RNA, 19 nt, Homo sapiens
  misc_RNA (1)...(19): siRNA sense strand
ggaaaaggcuucagucgca

SEQ ID NO: 2405314 - RNA, 19 nt, Homo sapiens
  misc_RNA (1)...(19): siRNA sense strand
gaaugugagaagaguuuca

SEQ ID NO: 2405315 - RNA, 19 nt, Homo sapiens
  misc_RNA (1)...(19): siRNA sense strand
cugugacguuugaagauau

SEQ ID NO: 2405316 - RNA, 19 nt, Homo sapiens
  misc_RNA (1)...(19): siRNA sense strand
cgggaagaauggagaccuc

SEQ ID NO: 2405317 - RNA, 19 nt, Homo sapiens
  misc_RNA (1)...(19): siRNA sense strand
aagacaauggggagauuua

SEQ ID NO: 2405318 - RNA, 19 nt, Homo sapiens
  misc_RNA (1)...(19): siRNA sense strand
cguuugaagauauggccau

SEQ ID NO: 2405319 - RNA, 19 nt, Homo sapiens
  misc_RNA (1)...(19): siRNA sense strand
agugaagagggcuuugaaa

SEQ ID NO: 2405320 - RNA, 19 nt, Homo sapiens
  misc_RNA (1)...(19): siRNA sense strand
aagcaagagauuagugaag

SEQ ID NO: 2405321 - RNA, 19 nt, Homo sapiens
  misc_RNA (1)...(19): siRNA sense strand
gagauuuaacagcagaaga

SEQ ID NO: 2405322 - RNA, 19 nt, Homo sapiens
  misc_RNA (1)...(19): siRNA sense strand
gggagagaaaccuuaugaa

SEQ ID NO: 2405323 - RNA, 19 nt, Homo sapiens
  misc_RNA (1)...(19): siRNA sense strand
ccaccaagcuggagcaggu

SEQ ID NO: 2405324 - RNA, 19 nt, Homo sapiens
  misc_RNA (1)...(19): siRNA sense strand
aggaaacccugaaaggaga

SEQ ID NO: 2405325 - RNA, 19 nt, Homo sapiens
  misc_RNA (1)...(19): siRNA sense strand
cguggaguaccgagaguau

SEQ ID NO: 2405326 - RNA, 19 nt, Homo sapiens
  misc_RNA (1)...(19): siRNA sense strand
cugaaaaggacuggagcaa

SEQ ID NO: 2405327 - RNA, 19 nt, Homo sapiens
  misc_RNA (1)...(19): siRNA sense strand
ccaacauccgcaaguggaa

SEQ ID NO: 2405328 - RNA, 19 nt, Homo sapiens
  misc_RNA (1)...(19): siRNA sense strand
ugcgagagguggugugcau

SEQ ID NO: 2405329 - RNA, 19 nt, Homo sapiens
  misc_RNA (1)...(19): siRNA sense strand
ggacugaccuucaccgcca

SEQ ID NO: 2405330 - RNA, 19 nt, Homo sapiens
  misc_RNA (1)...(19): siRNA sense strand
ggcauuggucaguggugua

SEQ ID NO: 2405331 - RNA, 19 nt, Homo sapiens
  misc_RNA (1)...(19): siRNA sense strand
ccucaaggcucgaagucuc

SEQ ID NO: 2405332 - RNA, 19 nt, Homo sapiens
  misc_RNA (1)...(19): siRNA sense strand
ccggcauggagcugagaga

SEQ ID NO: 2405333 - RNA, 19 nt, Homo sapiens
  misc_RNA (1)...(19): siRNA sense strand
caguaaaagcuuaaagaag

SEQ ID NO: 2405334 - RNA, 19 nt, Homo sapiens
  misc_RNA (1)...(19): siRNA sense strand
ccguggagaaggccaacaa

SEQ ID NO: 2405335 - RNA, 19 nt, Homo sapiens
  misc_RNA (1)...(19): siRNA sense strand
aguucugcacggagcuaaa

SEQ ID NO: 2405336 - RNA, 19 nt, Homo sapiens
  misc_RNA (1)...(19): siRNA sense strand
ugacagaacuggagcagca

SEQ ID NO: 2405337 - RNA, 19 nt, Homo sapiens
  misc_RNA (1)...(19): siRNA sense strand
aggcaggacccgaggacau

SEQ ID NO: 2405338 - RNA, 19 nt, Homo sapiens
  misc_RNA (1)...(19): siRNA sense strand
cuagaauacaggaggaguu

SEQ ID NO: 2405339 - RNA, 19 nt, Homo sapiens
  misc_RNA (1)...(19): siRNA sense strand
uggaggagcacaaggccaa

SEQ ID NO: 2405340 - RNA, 19 nt, Homo sapiens
  misc_RNA (1)...(19): siRNA sense strand
gagcacaaggccaagguga

SEQ ID NO: 2405341 - RNA, 19 nt, Homo sapiens
  misc_RNA (1)...(19): siRNA sense strand
aggccagcgaggagaucaa

SEQ ID NO: 2405342 - RNA, 19 nt, Homo sapiens
  misc_RNA (1)...(19): siRNA sense strand
aggacauggaggacggaga

SEQ ID NO: 2405343 - RNA, 19 nt, Homo sapiens
  misc_RNA (1)...(19): siRNA sense strand
agaucaaccagguggaacu

SEQ ID NO: 2405344 - RNA, 19 nt, Homo sapiens
  misc_RNA (1)...(19): siRNA sense strand
agaagagccuggaggaggu

SEQ ID NO: 2405345 - RNA, 19 nt, Homo sapiens
  misc_RNA (1)...(19): siRNA sense strand
ccccaagagaggaggaaga

SEQ ID NO: 2405346 - RNA, 19 nt, Homo sapiens
  misc_RNA (1)...(19): siRNA sense strand
ggccugaaguuguagagga

SEQ ID NO: 2405347 - RNA, 19 nt, Homo sapiens
  misc_RNA (1)...(19): siRNA sense strand
cuaaggaggcucagcagga

SEQ ID NO: 2405348 - RNA, 19 nt, Homo sapiens
  misc_RNA (1)...(19): siRNA sense strand
aggcucagcaggagacaca

SEQ ID NO: 2405349 - RNA, 19 nt, Homo sapiens
  misc_RNA (1)...(19): siRNA sense strand
aaaugguguuuguggcuga

SEQ ID NO: 2405350 - RNA, 19 nt, Homo sapiens
  misc_RNA (1)...(19): siRNA sense strand
ggguccaagcccugcagaa

SEQ ID NO: 2405351 - RNA, 19 nt, Homo sapiens
  misc_RNA (1)...(19): siRNA sense strand
aggaggaguuggagcaccu

SEQ ID NO: 2405352 - RNA, 19 nt, Homo sapiens
  misc_RNA (1)...(19): siRNA sense strand
gcaaggugaaugaggcgga

SEQ ID NO: 2405353 - RNA, 19 nt, Homo sapiens
  misc_RNA (1)...(19): siRNA sense strand
ggaaauuuauugauggaga

SEQ ID NO: 2405354 - RNA, 19 nt, Homo sapiens
  misc_RNA (1)...(19): siRNA sense strand
gagagaugauagaaggcaa

SEQ ID NO: 2405355 - RNA, 19 nt, Homo sapiens
  misc_RNA (1)...(19): siRNA sense strand
gcacguauguagacggaga

SEQ ID NO: 2405356 - RNA, 19 nt, Homo sapiens
  misc_RNA (1)...(19): siRNA sense strand
gaggaagccuuguaggaga

SEQ ID NO: 2405357 - RNA, 19 nt, Homo sapiens
  misc_RNA (1)...(19): siRNA sense strand
agagaugauagaaggcaaa

SEQ ID NO: 2405358 - RNA, 19 nt, Homo sapiens
  misc_RNA (1)...(19): siRNA sense strand
cagacagauuugaggggaa

SEQ ID NO: 2405359 - RNA, 19 nt, Homo sapiens
  misc_RNA (1)...(19): siRNA sense strand
ccuuguaggagaaguaaau

SEQ ID NO: 2405360 - RNA, 19 nt, Homo sapiens
  misc_RNA (1)...(19): siRNA sense strand
ggaccgcacuuuaugggaa

SEQ ID NO: 2405361 - RNA, 19 nt, Homo sapiens
  misc_RNA (1)...(19): siRNA sense strand
aggagaaguaaaugaagau

SEQ ID NO: 2405362 - RNA, 19 nt, Homo sapiens
  misc_RNA (1)...(19): siRNA sense strand
acgacgagaugguggagga

SEQ ID NO: 2405363 - RNA, 19 nt, Homo sapiens
  misc_RNA (1)...(19): siRNA sense strand
agguggagcugaaggccuu

SEQ ID NO: 2405364 - RNA, 19 nt, Homo sapiens
  misc_RNA (1)...(19): siRNA sense strand
auuuauugauggagagaug

SEQ ID NO: 2405365 - RNA, 19 nt, Homo sapiens
  misc_RNA (1)...(19): siRNA sense strand
aagccuuguaggagaagua

SEQ ID NO: 2405366 - RNA, 19 nt, Homo sapiens
  misc_RNA (1)...(19): siRNA sense strand
gauccuuaugaaucagaaa

SEQ ID NO: 2405367 - RNA, 19 nt, Homo sapiens
  misc_RNA (1)...(19): siRNA sense strand
uggaagggcaccuggacga

SEQ ID NO: 2405368 - RNA, 19 nt, Homo sapiens
  misc_RNA (1)...(19): siRNA sense strand
auguagacggagagcugaa

SEQ ID NO: 2405369 - RNA, 19 nt, Homo sapiens
  misc_RNA (1)...(19): siRNA sense strand
guauguagacggagagcug

SEQ ID NO: 2405370 - RNA, 19 nt, Homo sapiens
  misc_RNA (1)...(19): siRNA sense strand
ggguggugauggagggcua

SEQ ID NO: 2405371 - RNA, 19 nt, Homo sapiens
  misc_RNA (1)...(19): siRNA sense strand
ucaaagaggaugugcggaa

SEQ ID NO: 2405372 - RNA, 19 nt, Homo sapiens
  misc_RNA (1)...(19): siRNA sense strand
acgcggaggaugagggcaa

SEQ ID NO: 2405373 - RNA, 19 nt, Homo sapiens
  misc_RNA (1)...(19): siRNA sense strand
aggacaaauacguggaaaa

SEQ ID NO: 2405374 - RNA, 19 nt, Homo sapiens
  misc_RNA (1)...(19): siRNA sense strand
gugcggaaguucaaggaga

SEQ ID NO: 2405375 - RNA, 19 nt, Homo sapiens
  misc_RNA (1)...(19): siRNA sense strand
gcgugaagggcgagagugu

SEQ ID NO: 2405376 - RNA, 19 nt, Homo sapiens
  misc_RNA (1)...(19): siRNA sense strand
aggccuggaucaaggacaa

SEQ ID NO: 2405377 - RNA, 19 nt, Homo sapiens
  misc_RNA (1)...(19): siRNA sense strand
gggugcaggcagcaggaaa

SEQ ID NO: 2405378 - RNA, 19 nt, Homo sapiens
  misc_RNA (1)...(19): siRNA sense strand
gacaguugcuauagcgaga

SEQ ID NO: 2405379 - RNA, 19 nt, Homo sapiens
  misc_RNA (1)...(19): siRNA sense strand
aggaaaugcgcgaggccga

SEQ ID NO: 2405380 - RNA, 19 nt, Homo sapiens
  misc_RNA (1)...(19): siRNA sense strand
cagaagaagcucaaggaug

SEQ ID NO: 2405381 - RNA, 19 nt, Homo sapiens
  misc_RNA (1)...(19): siRNA sense strand
agaagaagcucaaggaugc

SEQ ID NO: 2405382 - RNA, 19 nt, Homo sapiens
  misc_RNA (1)...(19): siRNA sense strand
gccuacaggagguggugaa

SEQ ID NO: 2405383 - RNA, 19 nt, Homo sapiens
  misc_RNA (1)...(19): siRNA sense strand
gugcagagucggaggaguc

SEQ ID NO: 2405384 - RNA, 19 nt, Homo sapiens
  misc_RNA (1)...(19): siRNA sense strand
gcuucuuccagcagggcua

SEQ ID NO: 2405385 - RNA, 19 nt, Homo sapiens
  misc_RNA (1)...(19): siRNA sense strand
ucaauguucugcaggccaa

SEQ ID NO: 2405386 - RNA, 19 nt, Homo sapiens
  misc_RNA (1)...(19): siRNA sense strand
ccuggaucaaggacaaaua

SEQ ID NO: 2405387 - RNA, 19 nt, Homo sapiens
  misc_RNA (1)...(19): siRNA sense strand
cgcgcauggcggaggaaau

SEQ ID NO: 2405388 - RNA, 19 nt, Homo sapiens
  misc_RNA (1)...(19): siRNA sense strand
uggaaaagcgugagaugga

SEQ ID NO: 2405389 - RNA, 19 nt, Homo sapiens
  misc_RNA (1)...(19): siRNA sense strand
gugaguuccugcugcaaaa

SEQ ID NO: 2405390 - RNA, 19 nt, Homo sapiens
  misc_RNA (1)...(19): siRNA sense strand
acaaggaggccuggaucaa

SEQ ID NO: 2405391 - RNA, 19 nt, Homo sapiens
  misc_RNA (1)...(19): siRNA sense strand
cugaagagcugcagccaga

SEQ ID NO: 2405392 - RNA, 19 nt, Homo sapiens
  misc_RNA (1)...(19): siRNA sense strand
guggaugaauguaggacca

SEQ ID NO: 2405393 - RNA, 19 nt, Homo sapiens
  misc_RNA (1)...(19): siRNA sense strand
ccucagagagagucaggga

SEQ ID NO: 2405394 - RNA, 19 nt, Homo sapiens
  misc_RNA (1)...(19): siRNA sense strand
ucagagagagucagggagu

SEQ ID NO: 2405395 - RNA, 19 nt, Homo sapiens
  misc_RNA (1)...(19): siRNA sense strand
gugccaacacggaggauaa

SEQ ID NO: 2405396 - RNA, 19 nt, Homo sapiens
  misc_RNA (1)...(19): siRNA sense strand
gguuaaaugaggagaaaau

SEQ ID NO: 2405397 - RNA, 19 nt, Homo sapiens
  misc_RNA (1)...(19): siRNA sense strand
aguuaauggaugaggaaga

SEQ ID NO: 2405398 - RNA, 19 nt, Homo sapiens
  misc_RNA (1)...(19): siRNA sense strand
gaguacagacagugaggaa

SEQ ID NO: 2405399 - RNA, 19 nt, Homo sapiens
  misc_RNA (1)...(19): siRNA sense strand
gcaagaaauuauagagcag

SEQ ID NO: 2405400 - RNA, 19 nt, Homo sapiens
  misc_RNA (1)...(19): siRNA sense strand
agacaagguaacugagaca

SEQ ID NO: 2405401 - RNA, 19 nt, Homo sapiens
  misc_RNA (1)...(19): siRNA sense strand
caaaagugaggaagggaaa

SEQ ID NO: 2405402 - RNA, 19 nt, Homo sapiens
  misc_RNA (1)...(19): siRNA sense strand
cuagaagccaucagaggaa

SEQ ID NO: 2405403 - RNA, 19 nt, Homo sapiens
  misc_RNA (1)...(19): siRNA sense strand
ucuagaaagagaagaugua

SEQ ID NO: 2405404 - RNA, 19 nt, Homo sapiens
  misc_RNA (1)...(19): siRNA sense strand
ggaagauguuuuacaggaa

SEQ ID NO: 2405405 - RNA, 19 nt, Homo sapiens
  misc_RNA (1)...(19): siRNA sense strand
ugggagacguucugcacaa

SEQ ID NO: 2405406 - RNA, 19 nt, Homo sapiens
  misc_RNA (1)...(19): siRNA sense strand
ugagaaguuugcagaucaa

SEQ ID NO: 2405407 - RNA, 19 nt, Homo sapiens
  misc_RNA (1)...(19): siRNA sense strand
agaagauggagcaaagcaa

SEQ ID NO: 2405408 - RNA, 19 nt, Homo sapiens
  misc_RNA (1)...(19): siRNA sense strand
ggaagauauaugggaggaa

SEQ ID NO: 2405409 - RNA, 19 nt, Homo sapiens
  misc_RNA (1)...(19): siRNA sense strand
cuucaaguauacauggaau

SEQ ID NO: 2405410 - RNA, 19 nt, Homo sapiens
  misc_RNA (1)...(19): siRNA sense strand
ugauagacugggagaagau

SEQ ID NO: 2405411 - RNA, 19 nt, Homo sapiens
  misc_RNA (1)...(19): siRNA sense strand
cagaaaaccagaacagauu

SEQ ID NO: 2405412 - RNA, 19 nt, Homo sapiens
  misc_RNA (1)...(19): siRNA sense strand
agucagugcaauccagaua

SEQ ID NO: 2405413 - RNA, 19 nt, Homo sapiens
  misc_RNA (1)...(19): siRNA sense strand
ccaccaggcaugagccauu

SEQ ID NO: 2405414 - RNA, 19 nt, Homo sapiens
  misc_RNA (1)...(19): siRNA sense strand
gaugaaaagaucagauaca

SEQ ID NO: 2405415 - RNA, 19 nt, Homo sapiens
  misc_RNA (1)...(19): siRNA sense strand
agaaugucucgaagauuua

SEQ ID NO: 2405416 - RNA, 19 nt, Homo sapiens
  misc_RNA (1)...(19): siRNA sense strand
ccucaagacauggaugaaa

SEQ ID NO: 2405417 - RNA, 19 nt, Homo sapiens
  misc_RNA (1)...(19): siRNA sense strand
cauucagcuuguucaguaa

SEQ ID NO: 2405418 - RNA, 19 nt, Homo sapiens
  misc_RNA (1)...(19): siRNA sense strand
ccacaauuaccgaucaaga

SEQ ID NO: 2405419 - RNA, 19 nt, Homo sapiens
  misc_RNA (1)...(19): siRNA sense strand
cgcaagaagaagaucgaca

SEQ ID NO: 2405420 - RNA, 19 nt, Homo sapiens
  misc_RNA (1)...(19): siRNA sense strand
auacuugaagccugggaaa

SEQ ID NO: 2405421 - RNA, 19 nt, Homo sapiens
  misc_RNA (1)...(19): siRNA sense strand
aagauauaugggaggaaaa

SEQ ID NO: 2405422 - RNA, 19 nt, Homo sapiens
  misc_RNA (1)...(19): siRNA sense strand
aagaagaagauggagcaaa

SEQ ID NO: 2405423 - RNA, 19 nt, Homo sapiens
  misc_RNA (1)...(19): siRNA sense strand
acacacuucuagaaagaga

SEQ ID NO: 2405424 - RNA, 19 nt, Homo sapiens
  misc_RNA (1)...(19): siRNA sense strand
cucaagacauggaugaaaa

SEQ ID NO: 2405425 - RNA, 19 nt, Homo sapiens
  misc_RNA (1)...(19): siRNA sense strand
gaagaaacaggcugaggga

SEQ ID NO: 2405426 - RNA, 19 nt, Homo sapiens
  misc_RNA (1)...(19): siRNA sense strand
ggagaaacuaacaagagga

SEQ ID NO: 2405427 - RNA, 19 nt, Homo sapiens
  misc_RNA (1)...(19): siRNA sense strand
gauuaucagaugcaacaaa

SEQ ID NO: 2405428 - RNA, 19 nt, Homo sapiens
  misc_RNA (1)...(19): siRNA sense strand
aggaaagaauacaacaguu

SEQ ID NO: 2405429 - RNA, 19 nt, Homo sapiens
  misc_RNA (1)...(19): siRNA sense strand
guagaugccaagacagaga

SEQ ID NO: 2405430 - RNA, 19 nt, Homo sapiens
  misc_RNA (1)...(19): siRNA sense strand
guaaagacgcagaggagug

SEQ ID NO: 2405431 - RNA, 19 nt, Homo sapiens
  misc_RNA (1)...(19): siRNA sense strand
gcagaaaaccagaacagau

SEQ ID NO: 2405432 - RNA, 19 nt, Homo sapiens
  misc_RNA (1)...(19): siRNA sense strand
gaagaagaagauggagcaa

SEQ ID NO: 2405433 - RNA, 19 nt, Homo sapiens
  misc_RNA (1)...(19): siRNA sense strand
auguaacacugaaggaguu

SEQ ID NO: 2405434 - RNA, 19 nt, Homo sapiens
  misc_RNA (1)...(19): siRNA sense strand
cagaggaagacuuggaucu

SEQ ID NO: 2405435 - RNA, 19 nt, Homo sapiens
  misc_RNA (1)...(19): siRNA sense strand
ugaagaagaagauggagca

SEQ ID NO: 2405436 - RNA, 19 nt, Homo sapiens
  misc_RNA (1)...(19): siRNA sense strand
aagaugaauccuugcuaau

SEQ ID NO: 2405437 - RNA, 19 nt, Homo sapiens
  misc_RNA (1)...(19): siRNA sense strand
guucaguaaacaagagugu

SEQ ID NO: 2405438 - RNA, 19 nt, Homo sapiens
  misc_RNA (1)...(19): siRNA sense strand
cauuagugcagcagcuuau

SEQ ID NO: 2405439 - RNA, 19 nt, Homo sapiens
  misc_RNA (1)...(19): siRNA sense strand
augagaaguuugcagauca

SEQ ID NO: 2405440 - RNA, 19 nt, Homo sapiens
  misc_RNA (1)...(19): siRNA sense strand
aggauaaaauggaggugga

SEQ ID NO: 2405441 - RNA, 19 nt, Homo sapiens
  misc_RNA (1)...(19): siRNA sense strand
cggagaggaggaugcagaa

SEQ ID NO: 2405442 - RNA, 19 nt, Homo sapiens
  misc_RNA (1)...(19): siRNA sense strand
acagaaaaugccacaauua

SEQ ID NO: 2405443 - RNA, 19 nt, Homo sapiens
  misc_RNA (1)...(19): siRNA sense strand
cgacgaagucagggaacga

SEQ ID NO: 2405444 - RNA, 19 nt, Homo sapiens
  misc_RNA (1)...(19): siRNA sense strand
gcagaggagugucccgaga

SEQ ID NO: 2405445 - RNA, 19 nt, Homo sapiens
  misc_RNA (1)...(19): siRNA sense strand
gaugaaugauagacuggga

SEQ ID NO: 2405446 - RNA, 19 nt, Homo sapiens
  misc_RNA (1)...(19): siRNA sense strand
ggaaauuuguauugcacug

SEQ ID NO: 2405447 - RNA, 19 nt, Homo sapiens
  misc_RNA (1)...(19): siRNA sense strand
gaaaugaaugagaagaaac

SEQ ID NO: 2405448 - RNA, 19 nt, Homo sapiens
  misc_RNA (1)...(19): siRNA sense strand
caccuaacgaggauagcua

SEQ ID NO: 2405449 - RNA, 19 nt, Homo sapiens
  misc_RNA (1)...(19): siRNA sense strand
ggagaggaggaugcagaaa

SEQ ID NO: 2405450 - RNA, 19 nt, Homo sapiens
  misc_RNA (1)...(19): siRNA sense strand
gaaugauagacugggagaa

SEQ ID NO: 2405451 - RNA, 19 nt, Homo sapiens
  misc_RNA (1)...(19): siRNA sense strand
guaaagugcucaaucgcua

SEQ ID NO: 2405452 - RNA, 19 nt, Homo sapiens
  misc_RNA (1)...(19): siRNA sense strand
gcucaggauggcuggguga

SEQ ID NO: 2405453 - RNA, 19 nt, Homo sapiens
  misc_RNA (1)...(19): siRNA sense strand
ggaaauacugcaaagccuu

SEQ ID NO: 2405454 - RNA, 19 nt, Homo sapiens
  misc_RNA (1)...(19): siRNA sense strand
ccaaagcccguguggguga

SEQ ID NO: 2405455 - RNA, 19 nt, Homo sapiens
  misc_RNA (1)...(19): siRNA sense strand
aggaaauacugcaaagccu

SEQ ID NO: 2405456 - RNA, 19 nt, Homo sapiens
  misc_RNA (1)...(19): siRNA sense strand
cagcagcagcagaggagca

SEQ ID NO: 2405457 - RNA, 19 nt, Homo sapiens
  misc_RNA (1)...(19): siRNA sense strand
ggaaaauacagcagcagca

SEQ ID NO: 2405458 - RNA, 19 nt, Homo sapiens
  misc_RNA (1)...(19): siRNA sense strand
ccgugugggugauguggau

SEQ ID NO: 2405459 - RNA, 19 nt, Homo sapiens
  misc_RNA (1)...(19): siRNA sense strand
aagcagaaacccaggccaa

SEQ ID NO: 2405460 - RNA, 19 nt, Homo sapiens
  misc_RNA (1)...(19): siRNA sense strand
ggacaaggugugugggauc

SEQ ID NO: 2405461 - RNA, 19 nt, Homo sapiens
  misc_RNA (1)...(19): siRNA sense strand
aggagaaagaagagaagca

SEQ ID NO: 2405462 - RNA, 19 nt, Homo sapiens
  misc_RNA (1)...(19): siRNA sense strand
aggaaggagcgaacagcaa

SEQ ID NO: 2405463 - RNA, 19 nt, Homo sapiens
  misc_RNA (1)...(19): siRNA sense strand
gagaaagaagagaagcaga

SEQ ID NO: 2405464 - RNA, 19 nt, Homo sapiens
  misc_RNA (1)...(19): siRNA sense strand
uggaggagaaagaagagaa

SEQ ID NO: 2405465 - RNA, 19 nt, Homo sapiens
  misc_RNA (1)...(19): siRNA sense strand
ugaguuuguuccugggcaa

SEQ ID NO: 2405466 - RNA, 19 nt, Homo sapiens
  misc_RNA (1)...(19): siRNA sense strand
auagcaagccauugaaaca

SEQ ID NO: 2405467 - RNA, 19 nt, Homo sapiens
  misc_RNA (1)...(19): siRNA sense strand
gggaauucuuugaggaagg

SEQ ID NO: 2405468 - RNA, 19 nt, Homo sapiens
  misc_RNA (1)...(19): siRNA sense strand
ggauuuguaaggaaggaga

SEQ ID NO: 2405469 - RNA, 19 nt, Homo sapiens
  misc_RNA (1)...(19): siRNA sense strand
cugggaauucuuugaggaa

SEQ ID NO: 2405470 - RNA, 19 nt, Homo sapiens
  misc_RNA (1)...(19): siRNA sense strand
ccuuugacgaugaagaaga

SEQ ID NO: 2405471 - RNA, 19 nt, Homo sapiens
  misc_RNA (1)...(19): siRNA sense strand
augagaaagacauggaguu

SEQ ID NO: 2405472 - RNA, 19 nt, Homo sapiens
  misc_RNA (1)...(19): siRNA sense strand
guucagaggacugggcgaa

SEQ ID NO: 2405473 - RNA, 19 nt, Homo sapiens
  misc_RNA (1)...(19): siRNA sense strand
guguagugugcaaguauuu

SEQ ID NO: 2405474 - RNA, 19 nt, Homo sapiens
  misc_RNA (1)...(19): siRNA sense strand
agagacagcaagugggaac

SEQ ID NO: 2405475 - RNA, 19 nt, Homo sapiens
  misc_RNA (1)...(19): siRNA sense strand
agccauugaaacaggaaga

SEQ ID NO: 2405476 - RNA, 19 nt, Homo sapiens
  misc_RNA (1)...(19): siRNA sense strand
cagcaagugggaacaucaa

SEQ ID NO: 2405477 - RNA, 19 nt, Homo sapiens
  misc_RNA (1)...(19): siRNA sense strand
ccaacuaucugaagggcua

SEQ ID NO: 2405478 - RNA, 19 nt, Homo sapiens
  misc_RNA (1)...(19): siRNA sense strand
cggagaacgcggagaacau

SEQ ID NO: 2405479 - RNA, 19 nt, Homo sapiens
  misc_RNA (1)...(19): siRNA sense strand
acaacaucaucgugggcaa

SEQ ID NO: 2405480 - RNA, 19 nt, Homo sapiens
  misc_RNA (1)...(19): siRNA sense strand
aggagaggacagugaggaa

SEQ ID NO: 2405481 - RNA, 19 nt, Homo sapiens
  misc_RNA (1)...(19): siRNA sense strand
ccaaagaggcagcccggaa

SEQ ID NO: 2405482 - RNA, 19 nt, Homo sapiens
  misc_RNA (1)...(19): siRNA sense strand
gggagaagcugaagguggu

SEQ ID NO: 2405483 - RNA, 19 nt, Homo sapiens
  misc_RNA (1)...(19): siRNA sense strand
cuuggaacuagcagagaua

SEQ ID NO: 2405484 - RNA, 19 nt, Homo sapiens
  misc_RNA (1)...(19): siRNA sense strand
aggaagagaaggaggcgga

SEQ ID NO: 2405485 - RNA, 19 nt, Homo sapiens
  misc_RNA (1)...(19): siRNA sense strand
aggccaaggagaagcaaga

SEQ ID NO: 2405486 - RNA, 19 nt, Homo sapiens
  misc_RNA (1)...(19): siRNA sense strand
ugacagagcuggacggccu

SEQ ID NO: 2405487 - RNA, 19 nt, Homo sapiens
  misc_RNA (1)...(19): siRNA sense strand
ccauugagcagcuggcgaa

SEQ ID NO: 2405488 - RNA, 19 nt, Homo sapiens
  misc_RNA (1)...(19): siRNA sense strand
acaucgagauugugaacca

SEQ ID NO: 2405489 - RNA, 19 nt, Homo sapiens
  misc_RNA (1)...(19): siRNA sense strand
gcugguucgugcugggcaa

SEQ ID NO: 2405490 - RNA, 19 nt, Homo sapiens
  misc_RNA (1)...(19): siRNA sense strand
acugggaggccaaggagaa

SEQ ID NO: 2405491 - RNA, 19 nt, Homo sapiens
  misc_RNA (1)...(19): siRNA sense strand
uggaacuagcagagauaca

SEQ ID NO: 2405492 - RNA, 19 nt, Homo sapiens
  misc_RNA (1)...(19): siRNA sense strand
ccgugaucaccgaggccaa

SEQ ID NO: 2405493 - RNA, 19 nt, Homo sapiens
  misc_RNA (1)...(19): siRNA sense strand
augaagauaccgaguacuu

SEQ ID NO: 2405494 - RNA, 19 nt, Homo sapiens
  misc_RNA (1)...(19): siRNA sense strand
ggaggaaaccauugagcag

SEQ ID NO: 2405495 - RNA, 19 nt, Homo sapiens
  misc_RNA (1)...(19): siRNA sense strand
acagugaggaagaugaaga

SEQ ID NO: 2405496 - RNA, 19 nt, Homo sapiens
  misc_RNA (1)...(19): siRNA sense strand
ccgaguacuuugaugccau

SEQ ID NO: 2405497 - RNA, 19 nt, Homo sapiens
  misc_RNA (1)...(19): siRNA sense strand
gcagaaaagcugaagguag

SEQ ID NO: 2405498 - RNA, 19 nt, Homo sapiens
  misc_RNA (1)...(19): siRNA sense strand
gcugcagcucggaggaaga

SEQ ID NO: 2405499 - RNA, 19 nt, Homo sapiens
  misc_RNA (1)...(19): siRNA sense strand
aggccaauaccgagaagca

SEQ ID NO: 2405500 - RNA, 19 nt, Homo sapiens
  misc_RNA (1)...(19): siRNA sense strand
ggacaaguuccguggacug

SEQ ID NO: 2405501 - RNA, 19 nt, Homo sapiens
  misc_RNA (1)...(19): siRNA sense strand
acuacagaaaucaggguga

SEQ ID NO: 2405502 - RNA, 19 nt, Homo sapiens
  misc_RNA (1)...(19): siRNA sense strand
gggaagcagaagacagugu

SEQ ID NO: 2405503 - RNA, 19 nt, Homo sapiens
  misc_RNA (1)...(19): siRNA sense strand
acuuugaugccauggaaga

SEQ ID NO: 2405504 - RNA, 19 nt, Homo sapiens
  misc_RNA (1)...(19): siRNA sense strand
cuggaauugcaaagggaua

SEQ ID NO: 2405505 - RNA, 19 nt, Homo sapiens
  misc_RNA (1)...(19): siRNA sense strand
ggaaaagggcccagcguga

SEQ ID NO: 2405506 - RNA, 19 nt, Homo sapiens
  misc_RNA (1)...(19): siRNA sense strand
cgcagcaaauacugggaaa

SEQ ID NO: 2405507 - RNA, 19 nt, Homo sapiens
  misc_RNA (1)...(19): siRNA sense strand
gcaaauacugggaaagcca

SEQ ID NO: 2405508 - RNA, 19 nt, Homo sapiens
  misc_RNA (1)...(19): siRNA sense strand
aaacaauuauagaggagca

SEQ ID NO: 2405509 - RNA, 19 nt, Homo sapiens
  misc_RNA (1)...(19): siRNA sense strand
uggaauuccuuguggcuga

SEQ ID NO: 2405510 - RNA, 19 nt, Homo sapiens
  misc_RNA (1)...(19): siRNA sense strand
auaaacaacuaaaggcuga

SEQ ID NO: 2405511 - RNA, 19 nt, Homo sapiens
  misc_RNA (1)...(19): siRNA sense strand
guuuauuagcugcaggcaa

SEQ ID NO: 2405512 - RNA, 19 nt, Homo sapiens
  misc_RNA (1)...(19): siRNA sense strand
ggauauucugaaaggacuu

SEQ ID NO: 2405513 - RNA, 19 nt, Homo sapiens
  misc_RNA (1)...(19): siRNA sense strand
cagaggaugcagagggcca

SEQ ID NO: 2405514 - RNA, 19 nt, Homo sapiens
  misc_RNA (1)...(19): siRNA sense strand
ucucagaaguacagcccuu

SEQ ID NO: 2405515 - RNA, 19 nt, Homo sapiens
  misc_RNA (1)...(19): siRNA sense strand
cugggaaagccaaggacau

SEQ ID NO: 2405516 - RNA, 19 nt, Homo sapiens
  misc_RNA (1)...(19): siRNA sense strand
uugcagauuugaagaggca

SEQ ID NO: 2405517 - RNA, 19 nt, Homo sapiens
  misc_RNA (1)...(19): siRNA sense strand
gaagaaagauugaaagccc

SEQ ID NO: 2405518 - RNA, 19 nt, Homo sapiens
  misc_RNA (1)...(19): siRNA sense strand
aggcaaauacgaagaggcu

SEQ ID NO: 2405519 - RNA, 19 nt, Homo sapiens
  misc_RNA (1)...(19): siRNA sense strand
cagcccuuccacagagaaa

SEQ ID NO: 2405520 - RNA, 19 nt, Homo sapiens
  misc_RNA (1)...(19): siRNA sense strand
agggauagccauaugaaac

SEQ ID NO: 2405521 - RNA, 19 nt, Homo sapiens
  misc_RNA (1)...(19): siRNA sense strand
aagaaagauugaaagccca

SEQ ID NO: 2405522 - RNA, 19 nt, Homo sapiens
  misc_RNA (1)...(19): siRNA sense strand
ugaaagauuuacugccuga

SEQ ID NO: 2405523 - RNA, 19 nt, Homo sapiens
  misc_RNA (1)...(19): siRNA sense strand
ccgccuuaaccgagcaaca

SEQ ID NO: 2405524 - RNA, 19 nt, Homo sapiens
  misc_RNA (1)...(19): siRNA sense strand
uggagaaagcuguagucuu

SEQ ID NO: 2405525 - RNA, 19 nt, Homo sapiens
  misc_RNA (1)...(19): siRNA sense strand
ccaagaggaugaagcugga

SEQ ID NO: 2405526 - RNA, 19 nt, Homo sapiens
  misc_RNA (1)...(19): siRNA sense strand
auuucaaacaugcgccaaa

SEQ ID NO: 2405527 - RNA, 19 nt, Homo sapiens
  misc_RNA (1)...(19): siRNA sense strand
gcugaaagauuuacugccu

SEQ ID NO: 2405528 - RNA, 19 nt, Homo sapiens
  misc_RNA (1)...(19): siRNA sense strand
ugaaacgagacgacaccaa

SEQ ID NO: 2405529 - RNA, 19 nt, Homo sapiens
  misc_RNA (1)...(19): siRNA sense strand
cucauuugcaagagagaca

SEQ ID NO: 2405530 - RNA, 19 nt, Homo sapiens
  misc_RNA (1)...(19): siRNA sense strand
acaagagcggccuggagaa

SEQ ID NO: 2405531 - RNA, 19 nt, Homo sapiens
  misc_RNA (1)...(19): siRNA sense strand
aaagaaaagaagagaccga

SEQ ID NO: 2405532 - RNA, 19 nt, Homo sapiens
  misc_RNA (1)...(19): siRNA sense strand
aagagaaagaagauggaaa

SEQ ID NO: 2405533 - RNA, 19 nt, Homo sapiens
  misc_RNA (1)...(19): siRNA sense strand
cggaaaaggaaauggagaa

SEQ ID NO: 2405534 - RNA, 19 nt, Homo sapiens
  misc_RNA (1)...(19): siRNA sense strand
acaucaaguucaaggaaaa

SEQ ID NO: 2405535 - RNA, 19 nt, Homo sapiens
  misc_RNA (1)...(19): siRNA sense strand
aagaggaagaagacagaaa

SEQ ID NO: 2405536 - RNA, 19 nt, Homo sapiens
  misc_RNA (1)...(19): siRNA sense strand
agaaaggagaagaugcaaa

SEQ ID NO: 2405537 - RNA, 19 nt, Homo sapiens
  misc_RNA (1)...(19): siRNA sense strand
ggaaaagagaagggagaua

SEQ ID NO: 2405538 - RNA, 19 nt, Homo sapiens
  misc_RNA (1)...(19): siRNA sense strand
aagagaaugaagauggaaa

SEQ ID NO: 2405539 - RNA, 19 nt, Homo sapiens
  misc_RNA (1)...(19): siRNA sense strand
agaucaaaacgaagagaaa

SEQ ID NO: 2405540 - RNA, 19 nt, Homo sapiens
  misc_RNA (1)...(19): siRNA sense strand
agaagaugaagguggaaau

SEQ ID NO: 2405541 - RNA, 19 nt, Homo sapiens
  misc_RNA (1)...(19): siRNA sense strand
aagaggaagaugagaucaa

SEQ ID NO: 2405542 - RNA, 19 nt, Homo sapiens
  misc_RNA (1)...(19): siRNA sense strand
aagagagagaagauggaaa

SEQ ID NO: 2405543 - RNA, 19 nt, Homo sapiens
  misc_RNA (1)...(19): siRNA sense strand
agaagaugcaaaagagaaa

SEQ ID NO: 2405544 - RNA, 19 nt, Homo sapiens
  misc_RNA (1)...(19): siRNA sense strand
agaagauggaaaagagaaa

SEQ ID NO: 2405545 - RNA, 19 nt, Homo sapiens
  misc_RNA (1)...(19): siRNA sense strand
agaaacaggagauggaaaa

SEQ ID NO: 2405546 - RNA, 19 nt, Homo sapiens
  misc_RNA (1)...(19): siRNA sense strand
uggaaaugagaaaggagaa

SEQ ID NO: 2405547 - RNA, 19 nt, Homo sapiens
  misc_RNA (1)...(19): siRNA sense strand
aagaaacaggagauggaaa

SEQ ID NO: 2405548 - RNA, 19 nt, Homo sapiens
  misc_RNA (1)...(19): siRNA sense strand
agagagagaagauggaaaa

SEQ ID NO: 2405549 - RNA, 19 nt, Homo sapiens
  misc_RNA (1)...(19): siRNA sense strand
agaaaggagaagaugaaaa

SEQ ID NO: 2405550 - RNA, 19 nt, Homo sapiens
  misc_RNA (1)...(19): siRNA sense strand
agaagaugaagaagaucaa

SEQ ID NO: 2405551 - RNA, 19 nt, Homo sapiens
  misc_RNA (1)...(19): siRNA sense strand
uggaaaagagaaaggagaa

SEQ ID NO: 2405552 - RNA, 19 nt, Homo sapiens
  misc_RNA (1)...(19): siRNA sense strand
agaagaggaagaaggaaaa

SEQ ID NO: 2405553 - RNA, 19 nt, Homo sapiens
  misc_RNA (1)...(19): siRNA sense strand
agagaaugaagauggaaaa

SEQ ID NO: 2405554 - RNA, 19 nt, Homo sapiens
  misc_RNA (1)...(19): siRNA sense strand
aggcaggagccaaagagaa

SEQ ID NO: 2405555 - RNA, 19 nt, Homo sapiens
  misc_RNA (1)...(19): siRNA sense strand
augaagaagaagaucagaa

SEQ ID NO: 2405556 - RNA, 19 nt, Homo sapiens
  misc_RNA (1)...(19): siRNA sense strand
gugaagacggaaaaggaaa

SEQ ID NO: 2405557 - RNA, 19 nt, Homo sapiens
  misc_RNA (1)...(19): siRNA sense strand
cagaaaagaaacaggagau

SEQ ID NO: 2405558 - RNA, 19 nt, Homo sapiens
  misc_RNA (1)...(19): siRNA sense strand
aaagaaaggcugcagguca

SEQ ID NO: 2405559 - RNA, 19 nt, Homo sapiens
  misc_RNA (1)...(19): siRNA sense strand
auaugaggcaggagccaaa

SEQ ID NO: 2405560 - RNA, 19 nt, Homo sapiens
  misc_RNA (1)...(19): siRNA sense strand
ugaagguggaaaugaggaa

SEQ ID NO: 2405561 - RNA, 19 nt, Homo sapiens
  misc_RNA (1)...(19): siRNA sense strand
cagaaaagggaggagaaaa

SEQ ID NO: 2405562 - RNA, 19 nt, Homo sapiens
  misc_RNA (1)...(19): siRNA sense strand
aggaaauggagaagaugga

SEQ ID NO: 2405563 - RNA, 19 nt, Homo sapiens
  misc_RNA (1)...(19): siRNA sense strand
cauagauacaagugcccaa

SEQ ID NO: 2405564 - RNA, 19 nt, Homo sapiens
  misc_RNA (1)...(19): siRNA sense strand
augaggaagaagcuggaaa

SEQ ID NO: 2405565 - RNA, 19 nt, Homo sapiens
  misc_RNA (1)...(19): siRNA sense strand
aggggaagaagauggaaaa

SEQ ID NO: 2405566 - RNA, 19 nt, Homo sapiens
  misc_RNA (1)...(19): siRNA sense strand
aaauggagaagauggaaaa

SEQ ID NO: 2405567 - RNA, 19 nt, Homo sapiens
  misc_RNA (1)...(19): siRNA sense strand
aaaagagaagggagauaaa

SEQ ID NO: 2405568 - RNA, 19 nt, Homo sapiens
  misc_RNA (1)...(19): siRNA sense strand
ugaggaagaagcuggaaaa

SEQ ID NO: 2405569 - RNA, 19 nt, Homo sapiens
  misc_RNA (1)...(19): siRNA sense strand
agaaaggggaagcuggaaa

SEQ ID NO: 2405570 - RNA, 19 nt, Homo sapiens
  misc_RNA (1)...(19): siRNA sense strand
aagaagaugaagguggaaa

SEQ ID NO: 2405571 - RNA, 19 nt, Homo sapiens
  misc_RNA (1)...(19): siRNA sense strand
agugauaugauggaagaaa

SEQ ID NO: 2405572 - RNA, 19 nt, Homo sapiens
  misc_RNA (1)...(19): siRNA sense strand
agaaaagggaggagaaaag

SEQ ID NO: 2405573 - RNA, 19 nt, Homo sapiens
  misc_RNA (1)...(19): siRNA sense strand
aaaugagaaaggagaagau

SEQ ID NO: 2405574 - RNA, 19 nt, Homo sapiens
  misc_RNA (1)...(19): siRNA sense strand
agaucagaaagaagaugaa

SEQ ID NO: 2405575 - RNA, 19 nt, Homo sapiens
  misc_RNA (1)...(19): siRNA sense strand
auggaaaagagaagggaga

SEQ ID NO: 2405576 - RNA, 19 nt, Homo sapiens
  misc_RNA (1)...(19): siRNA sense strand
cuggaaaagaagacaaaga

SEQ ID NO: 2405577 - RNA, 19 nt, Homo sapiens
  misc_RNA (1)...(19): siRNA sense strand
aagauggaaaagaggauaa

SEQ ID NO: 2405578 - RNA, 19 nt, Homo sapiens
  misc_RNA (1)...(19): siRNA sense strand
aggagauggaaaagagaau

SEQ ID NO: 2405579 - RNA, 19 nt, Homo sapiens
  misc_RNA (1)...(19): siRNA sense strand
uggaaaagagaaagaagau

SEQ ID NO: 2405580 - RNA, 19 nt, Homo sapiens
  misc_RNA (1)...(19): siRNA sense strand
aagaaggaaaagaggaaga

SEQ ID NO: 2405581 - RNA, 19 nt, Homo sapiens
  misc_RNA (1)...(19): siRNA sense strand
agaugagaucaaagaagau

SEQ ID NO: 2405582 - RNA, 19 nt, Homo sapiens
  misc_RNA (1)...(19): siRNA sense strand
aaacgaagagaaaggggaa

SEQ ID NO: 2405583 - RNA, 19 nt, Homo sapiens
  misc_RNA (1)...(19): siRNA sense strand
auugaagaugccacagaaa

SEQ ID NO: 2405584 - RNA, 19 nt, Homo sapiens
  misc_RNA (1)...(19): siRNA sense strand
ccuauaacuaccugggaaa

SEQ ID NO: 2405585 - RNA, 19 nt, Homo sapiens
  misc_RNA (1)...(19): siRNA sense strand
gcacugagcuugaaggagu

SEQ ID NO: 2405586 - RNA, 19 nt, Homo sapiens
  misc_RNA (1)...(19): siRNA sense strand
ugacaaaagggaaggacaa

SEQ ID NO: 2405587 - RNA, 19 nt, Homo sapiens
  misc_RNA (1)...(19): siRNA sense strand
cugauuuaaaggauggaaa

SEQ ID NO: 2405588 - RNA, 19 nt, Homo sapiens
  misc_RNA (1)...(19): siRNA sense strand
aagccauggaccaaagaua

SEQ ID NO: 2405589 - RNA, 19 nt, Homo sapiens
  misc_RNA (1)...(19): siRNA sense strand
gugaaagaacagggaguga

SEQ ID NO: 2405590 - RNA, 19 nt, Homo sapiens
  misc_RNA (1)...(19): siRNA sense strand
aagcuaaacugaagagccu

SEQ ID NO: 2405591 - RNA, 19 nt, Homo sapiens
  misc_RNA (1)...(19): siRNA sense strand
gauaauucacguaggagca

SEQ ID NO: 2405592 - RNA, 19 nt, Homo sapiens
  misc_RNA (1)...(19): siRNA sense strand
ucucuuagacuucgggcaa

SEQ ID NO: 2405593 - RNA, 19 nt, Homo sapiens
  misc_RNA (1)...(19): siRNA sense strand
cugauagugcugaagcuaa

SEQ ID NO: 2405594 - RNA, 19 nt, Homo sapiens
  misc_RNA (1)...(19): siRNA sense strand
aaauaggagcugauggcau

SEQ ID NO: 2405595 - RNA, 19 nt, Homo sapiens
  misc_RNA (1)...(19): siRNA sense strand
cugagaauggagaaaucaa

SEQ ID NO: 2405596 - RNA, 19 nt, Homo sapiens
  misc_RNA (1)...(19): siRNA sense strand
ggagaaggccugucccuga

SEQ ID NO: 2405597 - RNA, 19 nt, Homo sapiens
  misc_RNA (1)...(19): siRNA sense strand
acguaggagcacugagcuu

SEQ ID NO: 2405598 - RNA, 19 nt, Homo sapiens
  misc_RNA (1)...(19): siRNA sense strand
ugaucagaaucgccagcaa

SEQ ID NO: 2405599 - RNA, 19 nt, Homo sapiens
  misc_RNA (1)...(19): siRNA sense strand
ucucuuuagcccugaacua

SEQ ID NO: 2405600 - RNA, 19 nt, Homo sapiens
  misc_RNA (1)...(19): siRNA sense strand
guuuacugauagugcugaa

SEQ ID NO: 2405601 - RNA, 19 nt, Homo sapiens
  misc_RNA (1)...(19): siRNA sense strand
ugaaggagucacaggaacu

SEQ ID NO: 2405602 - RNA, 19 nt, Homo sapiens
  misc_RNA (1)...(19): siRNA sense strand
ggguaaagauucgugcuga

SEQ ID NO: 2405603 - RNA, 19 nt, Homo sapiens
  misc_RNA (1)...(19): siRNA sense strand
gguaaagauucgugcugag

SEQ ID NO: 2405604 - RNA, 19 nt, Homo sapiens
  misc_RNA (1)...(19): siRNA sense strand
aggaguuguuggaugggau

SEQ ID NO: 2405605 - RNA, 19 nt, Homo sapiens
  misc_RNA (1)...(19): siRNA sense strand
accagauguuggaggcuuu

SEQ ID NO: 2405606 - RNA, 19 nt, Homo sapiens
  misc_RNA (1)...(19): siRNA sense strand
aggcagaaauggagccaga

SEQ ID NO: 2405607 - RNA, 19 nt, Homo sapiens
  misc_RNA (1)...(19): siRNA sense strand
gaacaagauuagagaggag

SEQ ID NO: 2405608 - RNA, 19 nt, Homo sapiens
  misc_RNA (1)...(19): siRNA sense strand
ggagccaaguucugggaga

SEQ ID NO: 2405609 - RNA, 19 nt, Homo sapiens
  misc_RNA (1)...(19): siRNA sense strand
agccagaagauaagggaca

SEQ ID NO: 2405610 - RNA, 19 nt, Homo sapiens
  misc_RNA (1)...(19): siRNA sense strand
uggugaggcacgagaguga

SEQ ID NO: 2405611 - RNA, 19 nt, Homo sapiens
  misc_RNA (1)...(19): siRNA sense strand
acacggugguggagcccua

SEQ ID NO: 2405612 - RNA, 19 nt, Homo sapiens
  misc_RNA (1)...(19): siRNA sense strand
augaagaggucacggagga

SEQ ID NO: 2405613 - RNA, 19 nt, Homo sapiens
  misc_RNA (1)...(19): siRNA sense strand
gaaccugggacgauggaca

SEQ ID NO: 2405614 - RNA, 19 nt, Homo sapiens
  misc_RNA (1)...(19): siRNA sense strand
cagcauucgaucuagcaaa

SEQ ID NO: 2405615 - RNA, 19 nt, Homo sapiens
  misc_RNA (1)...(19): siRNA sense strand
ccaaggaaguggaccagca

SEQ ID NO: 2405616 - RNA, 19 nt, Homo sapiens
  misc_RNA (1)...(19): siRNA sense strand
uccuagagguggugaggca

SEQ ID NO: 2405617 - RNA, 19 nt, Homo sapiens
  misc_RNA (1)...(19): siRNA sense strand
acaagauuagagaggagua

SEQ ID NO: 2405618 - RNA, 19 nt, Homo sapiens
  misc_RNA (1)...(19): siRNA sense strand
ccaccagcugauugagaau

SEQ ID NO: 2405619 - RNA, 19 nt, Homo sapiens
  misc_RNA (1)...(19): siRNA sense strand
agaugauuggugaggaaca

SEQ ID NO: 2405620 - RNA, 19 nt, Homo sapiens
  misc_RNA (1)...(19): siRNA sense strand
cggaggaggcagaaaugga

SEQ ID NO: 2405621 - RNA, 19 nt, Homo sapiens
  misc_RNA (1)...(19): siRNA sense strand
agagaaucagcguguacua

SEQ ID NO: 2405622 - RNA, 19 nt, Homo sapiens
  misc_RNA (1)...(19): siRNA sense strand
cauaaacgaauuuggggaa

SEQ ID NO: 2405623 - RNA, 19 nt, Homo sapiens
  misc_RNA (1)...(19): siRNA sense strand
uaauagggucucugagcau

SEQ ID NO: 2405624 - RNA, 19 nt, Homo sapiens
  misc_RNA (1)...(19): siRNA sense strand
aguucuagaggaagaugaa

SEQ ID NO: 2405625 - RNA, 19 nt, Homo sapiens
  misc_RNA (1)...(19): siRNA sense strand
ccaaagcaguucuagagga

SEQ ID NO: 2405626 - RNA, 19 nt, Homo sapiens
  misc_RNA (1)...(19): siRNA sense strand
gggaaugaggacagcaaaa

SEQ ID NO: 2405627 - RNA, 19 nt, Homo sapiens
  misc_RNA (1)...(19): siRNA sense strand
caucauuacaagacagaca

SEQ ID NO: 2405628 - RNA, 19 nt, Homo sapiens
  misc_RNA (1)...(19): siRNA sense strand
ggacugauccugaaggcga

SEQ ID NO: 2405629 - RNA, 19 nt, Homo sapiens
  misc_RNA (1)...(19): siRNA sense strand
uggaaacaggagucacaaa

SEQ ID NO: 2405630 - RNA, 19 nt, Homo sapiens
  misc_RNA (1)...(19): siRNA sense strand
caaaagaugugaaccgaga

SEQ ID NO: 2405631 - RNA, 19 nt, Homo sapiens
  misc_RNA (1)...(19): siRNA sense strand
cugggaaugaggacagcaa

SEQ ID NO: 2405632 - RNA, 19 nt, Homo sapiens
  misc_RNA (1)...(19): siRNA sense strand
caauuauuuaccagcacaa

SEQ ID NO: 2405633 - RNA, 19 nt, Homo sapiens
  misc_RNA (1)...(19): siRNA sense strand
ucacaaagcugcagaaggc

SEQ ID NO: 2405634 - RNA, 19 nt, Homo sapiens
  misc_RNA (1)...(19): siRNA sense strand
gggacaaguuggauggcuu

SEQ ID NO: 2405635 - RNA, 19 nt, Homo sapiens
  misc_RNA (1)...(19): siRNA sense strand
acauugagguacaaggaga

SEQ ID NO: 2405636 - RNA, 19 nt, Homo sapiens
  misc_RNA (1)...(19): siRNA sense strand
gggacaucacauugaggua

SEQ ID NO: 2405637 - RNA, 19 nt, Homo sapiens
  misc_RNA (1)...(19): siRNA sense strand
agggcaagaugaagaggau

SEQ ID NO: 2405638 - RNA, 19 nt, Homo sapiens
  misc_RNA (1)...(19): siRNA sense strand
uggccaugcgugagaucua

SEQ ID NO: 2405639 - RNA, 19 nt, Homo sapiens
  misc_RNA (1)...(19): siRNA sense strand
aaggagacccgguggcaga

SEQ ID NO: 2405640 - RNA, 19 nt, Homo sapiens
  misc_RNA (1)...(19): siRNA sense strand
ggguucgcuucgaguggaa

SEQ ID NO: 2405641 - RNA, 19 nt, Homo sapiens
  misc_RNA (1)...(19): siRNA sense strand
aguccgaggucuacgacga

SEQ ID NO: 2405642 - RNA, 19 nt, Homo sapiens
  misc_RNA (1)...(19): siRNA sense strand
aguccauugcuuagauaua

SEQ ID NO: 2405643 - RNA, 19 nt, Homo sapiens
  misc_RNA (1)...(19): siRNA sense strand
cuacuggaggauuaagaaa

SEQ ID NO: 2405644 - RNA, 19 nt, Homo sapiens
  misc_RNA (1)...(19): siRNA sense strand
aucuacuacuggaggauua

SEQ ID NO: 2405645 - RNA, 19 nt, Homo sapiens
  misc_RNA (1)...(19): siRNA sense strand
ccauauagagcuaagguuc

SEQ ID NO: 2405646 - RNA, 19 nt, Homo sapiens
  misc_RNA (1)...(19): siRNA sense strand
gcagcauuuaagagccuaa

SEQ ID NO: 2405647 - RNA, 19 nt, Homo sapiens
  misc_RNA (1)...(19): siRNA sense strand
agaggcaggauaagcuaaa

SEQ ID NO: 2405648 - RNA, 19 nt, Homo sapiens
  misc_RNA (1)...(19): siRNA sense strand
gauagaaggaguagccauc

SEQ ID NO: 2405649 - RNA, 19 nt, Homo sapiens
  misc_RNA (1)...(19): siRNA sense strand
ugauagaaggaguagccau

SEQ ID NO: 2405650 - RNA, 19 nt, Homo sapiens
  misc_RNA (1)...(19): siRNA sense strand
uuauuauaguccagaggca

SEQ ID NO: 2405651 - RNA, 19 nt, Homo sapiens
  misc_RNA (1)...(19): siRNA sense strand
ccacagaggaggaggagga

SEQ ID NO: 2405652 - RNA, 19 nt, Homo sapiens
  misc_RNA (1)...(19): siRNA sense strand
agacagaggaggaggagga

SEQ ID NO: 2405653 - RNA, 19 nt, Homo sapiens
  misc_RNA (1)...(19): siRNA sense strand
aggagaaggccguggacau

SEQ ID NO: 2405654 - RNA, 19 nt, Homo sapiens
  misc_RNA (1)...(19): siRNA sense strand
acaagauggcggagaaaca

SEQ ID NO: 2405655 - RNA, 19 nt, Homo sapiens
  misc_RNA (1)...(19): siRNA sense strand
ugaaacagcugguggagca

SEQ ID NO: 2405656 - RNA, 19 nt, Homo sapiens
  misc_RNA (1)...(19): siRNA sense strand
cagaggagguggagcagga

SEQ ID NO: 2405657 - RNA, 19 nt, Homo sapiens
  misc_RNA (1)...(19): siRNA sense strand
ccucagaguuccagccuca

SEQ ID NO: 2405658 - RNA, 19 nt, Homo sapiens
  misc_RNA (1)...(19): siRNA sense strand
cuccagacgcccagcgaaa

SEQ ID NO: 2405659 - RNA, 19 nt, Homo sapiens
  misc_RNA (1)...(19): siRNA sense strand
ggggcaagauccugggaau

SEQ ID NO: 2405660 - RNA, 19 nt, Homo sapiens
  misc_RNA (1)...(19): siRNA sense strand
aggaggaggcagaggagga

SEQ ID NO: 2405661 - RNA, 19 nt, Homo sapiens
  misc_RNA (1)...(19): siRNA sense strand
cuacaagauggcggagaaa

SEQ ID NO: 2405662 - RNA, 19 nt, Homo sapiens
  misc_RNA (1)...(19): siRNA sense strand
gcgaacaggagauggagga

SEQ ID NO: 2405663 - RNA, 19 nt, Homo sapiens
  misc_RNA (1)...(19): siRNA sense strand
aggcagaggaggaggaggu

SEQ ID NO: 2405664 - RNA, 19 nt, Homo sapiens
  misc_RNA (1)...(19): siRNA sense strand
aggaggaagagaaggcaga

SEQ ID NO: 2405665 - RNA, 19 nt, Homo sapiens
  misc_RNA (1)...(19): siRNA sense strand
cagaggaggaggaggugga

SEQ ID NO: 2405666 - RNA, 19 nt, Homo sapiens
  misc_RNA (1)...(19): siRNA sense strand
aggaggaggagguggagga

SEQ ID NO: 2405667 - RNA, 19 nt, Homo sapiens
  misc_RNA (1)...(19): siRNA sense strand
gggagacaccagugcccaa

SEQ ID NO: 2405668 - RNA, 19 nt, Homo sapiens
  misc_RNA (1)...(19): siRNA sense strand
cggaagguggcgaggucau

SEQ ID NO: 2405669 - RNA, 19 nt, Homo sapiens
  misc_RNA (1)...(19): siRNA sense strand
uggaauuccgggagggcga

SEQ ID NO: 2405670 - RNA, 19 nt, Homo sapiens
  misc_RNA (1)...(19): siRNA sense strand
ccaugaaacagcuggugga

SEQ ID NO: 2405671 - RNA, 19 nt, Homo sapiens
  misc_RNA (1)...(19): siRNA sense strand
cagaggaggaggaggaccu

SEQ ID NO: 2405672 - RNA, 19 nt, Homo sapiens
  misc_RNA (1)...(19): siRNA sense strand
gaacaagcccugggagcca

SEQ ID NO: 2405673 - RNA, 19 nt, Homo sapiens
  misc_RNA (1)...(19): siRNA sense strand
cugaaggcgaacaggagau

SEQ ID NO: 2405674 - RNA, 19 nt, Homo sapiens
  misc_RNA (1)...(19): siRNA sense strand
agaagacagaggaggagga

SEQ ID NO: 2405675 - RNA, 19 nt, Homo sapiens
  misc_RNA (1)...(19): siRNA sense strand
gcacugaaggcgaacagga

SEQ ID NO: 2405676 - RNA, 19 nt, Homo sapiens
  misc_RNA (1)...(19): siRNA sense strand
aacaggagauggaggagga

SEQ ID NO: 2405677 - RNA, 19 nt, Homo sapiens
  misc_RNA (1)...(19): siRNA sense strand
agaacaaagagauggaaca

SEQ ID NO: 2405678 - RNA, 19 nt, Homo sapiens
  misc_RNA (1)...(19): siRNA sense strand
uggaagaacgccagaggca

SEQ ID NO: 2405679 - RNA, 19 nt, Homo sapiens
  misc_RNA (1)...(19): siRNA sense strand
gagaugaagaggugcagca

SEQ ID NO: 2405680 - RNA, 19 nt, Homo sapiens
  misc_RNA (1)...(19): siRNA sense strand
agaagaacaaagagaugga

SEQ ID NO: 2405681 - RNA, 19 nt, Homo sapiens
  misc_RNA (1)...(19): siRNA sense strand
aggaaaugaaggaggcucu

SEQ ID NO: 2405682 - RNA, 19 nt, Homo sapiens
  misc_RNA (1)...(19): siRNA sense strand
aggaaauggaagaacgcca

SEQ ID NO: 2405683 - RNA, 19 nt, Homo sapiens
  misc_RNA (1)...(19): siRNA sense strand
gaagaacgccagaggcagu

SEQ ID NO: 2405684 - RNA, 19 nt, Homo sapiens
  misc_RNA (1)...(19): siRNA sense strand
gugcagcaguacagggaac

SEQ ID NO: 2405685 - RNA, 19 nt, Homo sapiens
  misc_RNA (1)...(19): siRNA sense strand
guuaagaaauggggugcaa

SEQ ID NO: 2405686 - RNA, 19 nt, Homo sapiens
  misc_RNA (1)...(19): siRNA sense strand
acaaagagauggaacagcu

SEQ ID NO: 2405687 - RNA, 19 nt, Homo sapiens
  misc_RNA (1)...(19): siRNA sense strand
ggagauaagaaaagaggaa

SEQ ID NO: 2405688 - RNA, 19 nt, Homo sapiens
  misc_RNA (1)...(19): siRNA sense strand
cuguugaauuccaguguaa

SEQ ID NO: 2405689 - RNA, 19 nt, Homo sapiens
  misc_RNA (1)...(19): siRNA sense strand
caacuuaagaggugcaaaa

SEQ ID NO: 2405690 - RNA, 19 nt, Homo sapiens
  misc_RNA (1)...(19): siRNA sense strand
acacaaugaaguaguggaa

SEQ ID NO: 2405691 - RNA, 19 nt, Homo sapiens
  misc_RNA (1)...(19): siRNA sense strand
acucaagcuaucugggaaa

SEQ ID NO: 2405692 - RNA, 19 nt, Homo sapiens
  misc_RNA (1)...(19): siRNA sense strand
guguaaauucccacauaaa

SEQ ID NO: 2405693 - RNA, 19 nt, Homo sapiens
  misc_RNA (1)...(19): siRNA sense strand
uggugaaguuaaggagaua

SEQ ID NO: 2405694 - RNA, 19 nt, Homo sapiens
  misc_RNA (1)...(19): siRNA sense strand
aggaagggaaauuugaaua

SEQ ID NO: 2405695 - RNA, 19 nt, Homo sapiens
  misc_RNA (1)...(19): siRNA sense strand
ccuucaaaacaaugagaaa

SEQ ID NO: 2405696 - RNA, 19 nt, Homo sapiens
  misc_RNA (1)...(19): siRNA sense strand
gaaaagaggaauauggaca

SEQ ID NO: 2405697 - RNA, 19 nt, Homo sapiens
  misc_RNA (1)...(19): siRNA sense strand
uggaaaacucuaugcaaaa

SEQ ID NO: 2405698 - RNA, 19 nt, Homo sapiens
  misc_RNA (1)...(19): siRNA sense strand
cguuacagauguucagaca

SEQ ID NO: 2405699 - RNA, 19 nt, Homo sapiens
  misc_RNA (1)...(19): siRNA sense strand
gcucagaauaugacaacca

SEQ ID NO: 2405700 - RNA, 19 nt, Homo sapiens
  misc_RNA (1)...(19): siRNA sense strand
cugaagaaaacaugaacaa

SEQ ID NO: 2405701 - RNA, 19 nt, Homo sapiens
  misc_RNA (1)...(19): siRNA sense strand
cuacaaaguuggagacgug

SEQ ID NO: 2405702 - RNA, 19 nt, Homo sapiens
  misc_RNA (1)...(19): siRNA sense strand
aguauauccuccaggguca

SEQ ID NO: 2405703 - RNA, 19 nt, Homo sapiens
  misc_RNA (1)...(19): siRNA sense strand
ggugaauugcagaaaugaa

SEQ ID NO: 2405704 - RNA, 19 nt, Homo sapiens
  misc_RNA (1)...(19): siRNA sense strand
uggaauauggacagagcuu

SEQ ID NO: 2405705 - RNA, 19 nt, Homo sapiens
  misc_RNA (1)...(19): siRNA sense strand
uaaagauggacgauggcaa

SEQ ID NO: 2405706 - RNA, 19 nt, Homo sapiens
  misc_RNA (1)...(19): siRNA sense strand
auggaaaacucuaugcaaa

SEQ ID NO: 2405707 - RNA, 19 nt, Homo sapiens
  misc_RNA (1)...(19): siRNA sense strand
auguagaugcucagccaaa

SEQ ID NO: 2405708 - RNA, 19 nt, Homo sapiens
  misc_RNA (1)...(19): siRNA sense strand
uaauacaucuggaagguga

SEQ ID NO: 2405709 - RNA, 19 nt, Homo sapiens
  misc_RNA (1)...(19): siRNA sense strand
augcaaaggacaaguacga

SEQ ID NO: 2405710 - RNA, 19 nt, Homo sapiens
  misc_RNA (1)...(19): siRNA sense strand
ugaauuaucaggauggaga

SEQ ID NO: 2405711 - RNA, 19 nt, Homo sapiens
  misc_RNA (1)...(19): siRNA sense strand
guugaauuccaguguaaau

SEQ ID NO: 2405712 - RNA, 19 nt, Homo sapiens
  misc_RNA (1)...(19): siRNA sense strand
augaaguaguggaauauga

SEQ ID NO: 2405713 - RNA, 19 nt, Homo sapiens
  misc_RNA (1)...(19): siRNA sense strand
guggauggagaauggacaa

SEQ ID NO: 2405714 - RNA, 19 nt, Homo sapiens
  misc_RNA (1)...(19): siRNA sense strand
cuaucaacauggaguuuca

SEQ ID NO: 2405715 - RNA, 19 nt, Homo sapiens
  misc_RNA (1)...(19): siRNA sense strand
gugcaaaauagcaggaguu

SEQ ID NO: 2405716 - RNA, 19 nt, Homo sapiens
  misc_RNA (1)...(19): siRNA sense strand
auggagaaacgauggaaaa

SEQ ID NO: 2405717 - RNA, 19 nt, Homo sapiens
  misc_RNA (1)...(19): siRNA sense strand
ccuagauccauguguggua

SEQ ID NO: 2405718 - RNA, 19 nt, Homo sapiens
  misc_RNA (1)...(19): siRNA sense strand
caaugaaguaguggaauau

SEQ ID NO: 2405719 - RNA, 19 nt, Homo sapiens
  misc_RNA (1)...(19): siRNA sense strand
aauggagaaacgauggaaa

SEQ ID NO: 2405720 - RNA, 19 nt, Homo sapiens
  misc_RNA (1)...(19): siRNA sense strand
aggaauauggacacaauga

SEQ ID NO: 2405721 - RNA, 19 nt, Homo sapiens
  misc_RNA (1)...(19): siRNA sense strand
agaaauaaacaguggucag

SEQ ID NO: 2405722 - RNA, 19 nt, Homo sapiens
  misc_RNA (1)...(19): siRNA sense strand
gaagaagauuauaacccuu

SEQ ID NO: 2405723 - RNA, 19 nt, Homo sapiens
  misc_RNA (1)...(19): siRNA sense strand
agucuguauaaacgggaaa

SEQ ID NO: 2405724 - RNA, 19 nt, Homo sapiens
  misc_RNA (1)...(19): siRNA sense strand
gaauuaucaggauggagaa

SEQ ID NO: 2405725 - RNA, 19 nt, Homo sapiens
  misc_RNA (1)...(19): siRNA sense strand
gcaaaauagcaggaguuaa

SEQ ID NO: 2405726 - RNA, 19 nt, Homo sapiens
  misc_RNA (1)...(19): siRNA sense strand
ucuauaaacuccagggcuc

SEQ ID NO: 2405727 - RNA, 19 nt, Homo sapiens
  misc_RNA (1)...(19): siRNA sense strand
caauguagaugcucagcca

SEQ ID NO: 2405728 - RNA, 19 nt, Homo sapiens
  misc_RNA (1)...(19): siRNA sense strand
ucuccaauggugaaguuaa

SEQ ID NO: 2405729 - RNA, 19 nt, Homo sapiens
  misc_RNA (1)...(19): siRNA sense strand
auggugaaguuaaggagau

SEQ ID NO: 2405730 - RNA, 19 nt, Homo sapiens
  misc_RNA (1)...(19): siRNA sense strand
ucacuaaaggagaauguca

SEQ ID NO: 2405731 - RNA, 19 nt, Homo sapiens
  misc_RNA (1)...(19): siRNA sense strand
gcaaaggacaaguacgauc

SEQ ID NO: 2405732 - RNA, 19 nt, Homo sapiens
  misc_RNA (1)...(19): siRNA sense strand
auccuaaucucauggguau

SEQ ID NO: 2405733 - RNA, 19 nt, Homo sapiens
  misc_RNA (1)...(19): siRNA sense strand
cugaacucgaguacgguua

SEQ ID NO: 2405734 - RNA, 19 nt, Homo sapiens
  misc_RNA (1)...(19): siRNA sense strand
ccuaaugcucagaauauga

SEQ ID NO: 2405735 - RNA, 19 nt, Homo sapiens
  misc_RNA (1)...(19): siRNA sense strand
aaucugucaggaagggaaa

SEQ ID NO: 2405736 - RNA, 19 nt, Homo sapiens
  misc_RNA (1)...(19): siRNA sense strand
caaucugucaggaagggaa

SEQ ID NO: 2405737 - RNA, 19 nt, Homo sapiens
  misc_RNA (1)...(19): siRNA sense strand
aggaacacuuugugauuuu

SEQ ID NO: 2405738 - RNA, 19 nt, Homo sapiens
  misc_RNA (1)...(19): siRNA sense strand
caggaagggaaauuugaau

SEQ ID NO: 2405739 - RNA, 19 nt, Homo sapiens
  misc_RNA (1)...(19): siRNA sense strand
uggucaaguuggaggucuu

SEQ ID NO: 2405740 - RNA, 19 nt, Homo sapiens
  misc_RNA (1)...(19): siRNA sense strand
guagaauuuacaugggaau

SEQ ID NO: 2405741 - RNA, 19 nt, Homo sapiens
  misc_RNA (1)...(19): siRNA sense strand
aguagaauuuacaugggaa

SEQ ID NO: 2405742 - RNA, 19 nt, Homo sapiens
  misc_RNA (1)...(19): siRNA sense strand
uggaauugcauguggaucu

SEQ ID NO: 2405743 - RNA, 19 nt, Homo sapiens
  misc_RNA (1)...(19): siRNA sense strand
agggaugguauuuguacua

SEQ ID NO: 2405744 - RNA, 19 nt, Homo sapiens
  misc_RNA (1)...(19): siRNA sense strand
gugugaugauauucgaaaa

SEQ ID NO: 2405745 - RNA, 19 nt, Homo sapiens
  misc_RNA (1)...(19): siRNA sense strand
cuugacaccuggagcacau

SEQ ID NO: 2405746 - RNA, 19 nt, Homo sapiens
  misc_RNA (1)...(19): siRNA sense strand
ggccagugcaccaaggaca

SEQ ID NO: 2405747 - RNA, 19 nt, Homo sapiens
  misc_RNA (1)...(19): siRNA sense strand
acuaggaaguggugcugga

SEQ ID NO: 2405748 - RNA, 19 nt, Homo sapiens
  misc_RNA (1)...(19): siRNA sense strand
gaugauauucgaaaagcaa

SEQ ID NO: 2405749 - RNA, 19 nt, Homo sapiens
  misc_RNA (1)...(19): siRNA sense strand
aggaggaguuuguggggaa

SEQ ID NO: 2405750 - RNA, 19 nt, Homo sapiens
  misc_RNA (1)...(19): siRNA sense strand
uccugaagcucgaugccaa

SEQ ID NO: 2405751 - RNA, 19 nt, Homo sapiens
  misc_RNA (1)...(19): siRNA sense strand
caaccaaaucagagggaaa

SEQ ID NO: 2405752 - RNA, 19 nt, Homo sapiens
  misc_RNA (1)...(19): siRNA sense strand
augaagaggaccugggaaa

SEQ ID NO: 2405753 - RNA, 19 nt, Homo sapiens
  misc_RNA (1)...(19): siRNA sense strand
acugaaaggaagacgaaua

SEQ ID NO: 2405754 - RNA, 19 nt, Homo sapiens
  misc_RNA (1)...(19): siRNA sense strand
cggaaaugggcuucaguaa

SEQ ID NO: 2405755 - RNA, 19 nt, Homo sapiens
  misc_RNA (1)...(19): siRNA sense strand
ucugagagguagaggaaaa

SEQ ID NO: 2405756 - RNA, 19 nt, Homo sapiens
  misc_RNA (1)...(19): siRNA sense strand
caucaaauacugagcaaaa

SEQ ID NO: 2405757 - RNA, 19 nt, Homo sapiens
  misc_RNA (1)...(19): siRNA sense strand
cagcaguagaauuuaguua

SEQ ID NO: 2405758 - RNA, 19 nt, Homo sapiens
  misc_RNA (1)...(19): siRNA sense strand
aggcaagcucuuauggaua

SEQ ID NO: 2405759 - RNA, 19 nt, Homo sapiens
  misc_RNA (1)...(19): siRNA sense strand
gcaaagcagaucaggaaaa

SEQ ID NO: 2405760 - RNA, 19 nt, Homo sapiens
  misc_RNA (1)...(19): siRNA sense strand
ugagcaaaauggaguaaaa

SEQ ID NO: 2405761 - RNA, 19 nt, Homo sapiens
  misc_RNA (1)...(19): siRNA sense strand
augcaaagcagaucaggaa

SEQ ID NO: 2405762 - RNA, 19 nt, Homo sapiens
  misc_RNA (1)...(19): siRNA sense strand
gggccaauuaagccagaaa

SEQ ID NO: 2405763 - RNA, 19 nt, Homo sapiens
  misc_RNA (1)...(19): siRNA sense strand
agaacuugaucgaagaaaa

SEQ ID NO: 2405764 - RNA, 19 nt, Homo sapiens
  misc_RNA (1)...(19): siRNA sense strand
aagcaauauuggaacugaa

SEQ ID NO: 2405765 - RNA, 19 nt, Homo sapiens
  misc_RNA (1)...(19): siRNA sense strand
gcagagaacuugaucgaag

SEQ ID NO: 2405766 - RNA, 19 nt, Homo sapiens
  misc_RNA (1)...(19): siRNA sense strand
cugaagcacauaacggaaa

SEQ ID NO: 2405767 - RNA, 19 nt, Homo sapiens
  misc_RNA (1)...(19): siRNA sense strand
gggaaguuuuacagaaaga

SEQ ID NO: 2405768 - RNA, 19 nt, Homo sapiens
  misc_RNA (1)...(19): siRNA sense strand
caaauggagaaguagaaau

SEQ ID NO: 2405769 - RNA, 19 nt, Homo sapiens
  misc_RNA (1)...(19): siRNA sense strand
gagaaaugggaguuacaga

SEQ ID NO: 2405770 - RNA, 19 nt, Homo sapiens
  misc_RNA (1)...(19): siRNA sense strand
gagaaagcucugaagcaca

SEQ ID NO: 2405771 - RNA, 19 nt, Homo sapiens
  misc_RNA (1)...(19): siRNA sense strand
aguggauuaccuagaaaua

SEQ ID NO: 2405772 - RNA, 19 nt, Homo sapiens
  misc_RNA (1)...(19): siRNA sense strand
aguagaaaugccacugaaa

SEQ ID NO: 2405773 - RNA, 19 nt, Homo sapiens
  misc_RNA (1)...(19): siRNA sense strand
caggcauuguugacauaaa

SEQ ID NO: 2405774 - RNA, 19 nt, Homo sapiens
  misc_RNA (1)...(19): siRNA sense strand
ggcugaagacagaaucaaa

SEQ ID NO: 2405775 - RNA, 19 nt, Homo sapiens
  misc_RNA (1)...(19): siRNA sense strand
gcaaaauggaguaaaagau

SEQ ID NO: 2405776 - RNA, 19 nt, Homo sapiens
  misc_RNA (1)...(19): siRNA sense strand
gcauagugauggugcuuuu

SEQ ID NO: 2405777 - RNA, 19 nt, Homo sapiens
  misc_RNA (1)...(19): siRNA sense strand
ccgaaauagggaaguuuua

SEQ ID NO: 2405778 - RNA, 19 nt, Homo sapiens
  misc_RNA (1)...(19): siRNA sense strand
uagggaaguuuuacagaaa

SEQ ID NO: 2405779 - RNA, 19 nt, Homo sapiens
  misc_RNA (1)...(19): siRNA sense strand
gcugaagacagaaucaaau

SEQ ID NO: 2405780 - RNA, 19 nt, Homo sapiens
  misc_RNA (1)...(19): siRNA sense strand
acagagaagcuuaucaaaa

SEQ ID NO: 2405781 - RNA, 19 nt, Homo sapiens
  misc_RNA (1)...(19): siRNA sense strand
augaaggugucuauagaga

SEQ ID NO: 2405782 - RNA, 19 nt, Homo sapiens
  misc_RNA (1)...(19): siRNA sense strand
ccuuuagguucucagcaua

SEQ ID NO: 2405783 - RNA, 19 nt, Homo sapiens
  misc_RNA (1)...(19): siRNA sense strand
caaacgaagaucugggcca

SEQ ID NO: 2405784 - RNA, 19 nt, Homo sapiens
  misc_RNA (1)...(19): siRNA sense strand
aaacgaagaucugggccaa

SEQ ID NO: 2405785 - RNA, 19 nt, Homo sapiens
  misc_RNA (1)...(19): siRNA sense strand
ggugguggugcuagaagua

SEQ ID NO: 2405786 - RNA, 19 nt, Homo sapiens
  misc_RNA (1)...(19): siRNA sense strand
gagcaaggaaaccaagaca

SEQ ID NO: 2405787 - RNA, 19 nt, Homo sapiens
  misc_RNA (1)...(19): siRNA sense strand
cuuacaagcaauaaacaga

SEQ ID NO: 2405788 - RNA, 19 nt, Homo sapiens
  misc_RNA (1)...(19): siRNA sense strand
aguuaagcucucaggcauu

SEQ ID NO: 2405789 - RNA, 19 nt, Homo sapiens
  misc_RNA (1)...(19): siRNA sense strand
auaugaaugcugcugguaa

SEQ ID NO: 2405790 - RNA, 19 nt, Homo sapiens
  misc_RNA (1)...(19): siRNA sense strand
aaguuaagcucucaggcau

SEQ ID NO: 2405791 - RNA, 19 nt, Homo sapiens
  misc_RNA (1)...(19): siRNA sense strand
ucugaaagaccaaguacuu

SEQ ID NO: 2405792 - RNA, 19 nt, Homo sapiens
  misc_RNA (1)...(19): siRNA sense strand
ccaaauggagaaguagaaa

SEQ ID NO: 2405793 - RNA, 19 nt, Homo sapiens
  misc_RNA (1)...(19): siRNA sense strand
caaagagcaaggaaaccaa

SEQ ID NO: 2405794 - RNA, 19 nt, Homo sapiens
  misc_RNA (1)...(19): siRNA sense strand
ugguggugcuagaaguaau

SEQ ID NO: 2405795 - RNA, 19 nt, Homo sapiens
  misc_RNA (1)...(19): siRNA sense strand
guaaggaagcaucgaggca

SEQ ID NO: 2405796 - RNA, 19 nt, Homo sapiens
  misc_RNA (1)...(19): siRNA sense strand
gggacaauacagaucauca

SEQ ID NO: 2405797 - RNA, 19 nt, Homo sapiens
  misc_RNA (1)...(19): siRNA sense strand
acauaacggaaaugggcuu

SEQ ID NO: 2405798 - RNA, 19 nt, Homo sapiens
  misc_RNA (1)...(19): siRNA sense strand
cugaagaugaagaggaccu

SEQ ID NO: 2405799 - RNA, 19 nt, Homo sapiens
  misc_RNA (1)...(19): siRNA sense strand
guucgaaguaauaguuuca

SEQ ID NO: 2405800 - RNA, 19 nt, Homo sapiens
  misc_RNA (1)...(19): siRNA sense strand
aguggauagcagagaacuu

SEQ ID NO: 2405801 - RNA, 19 nt, Homo sapiens
  misc_RNA (1)...(19): siRNA sense strand
uagcagagaacuugaucga

SEQ ID NO: 2405802 - RNA, 19 nt, Homo sapiens
  misc_RNA (1)...(19): siRNA sense strand
ugaauguggaagaaccuaa

SEQ ID NO: 2405803 - RNA, 19 nt, Homo sapiens
  misc_RNA (1)...(19): siRNA sense strand
uggaagaaccuaaaucaca

SEQ ID NO: 2405804 - RNA, 19 nt, Homo sapiens
  misc_RNA (1)...(19): siRNA sense strand
aggaagacgaauaggaccu

SEQ ID NO: 2405805 - RNA, 19 nt, Homo sapiens
  misc_RNA (1)...(19): siRNA sense strand
ggguaugacagcaguuguu

SEQ ID NO: 2405806 - RNA, 19 nt, Homo sapiens
  misc_RNA (1)...(19): siRNA sense strand
ucauauaaguugcacagca

SEQ ID NO: 2405807 - RNA, 19 nt, Homo sapiens
  misc_RNA (1)...(19): siRNA sense strand
guaugacagcaguuguuaa

SEQ ID NO: 2405808 - RNA, 19 nt, Homo sapiens
  misc_RNA (1)...(19): siRNA sense strand
ucuugguggugaaguggaa

SEQ ID NO: 2405809 - RNA, 19 nt, Homo sapiens
  misc_RNA (1)...(19): siRNA sense strand
gccuacagaaggagagaga

SEQ ID NO: 2405810 - RNA, 19 nt, Homo sapiens
  misc_RNA (1)...(19): siRNA sense strand
ucaauaaugagauggccaa

SEQ ID NO: 2405811 - RNA, 19 nt, Homo sapiens
  misc_RNA (1)...(19): siRNA sense strand
uuacaaaggcgcaggccca

SEQ ID NO: 2405812 - RNA, 19 nt, Homo sapiens
  misc_RNA (1)...(19): siRNA sense strand
gcugaaaacccuuagcaau

SEQ ID NO: 2405813 - RNA, 19 nt, Homo sapiens
  misc_RNA (1)...(19): siRNA sense strand
aagacauccaagaucgaua

SEQ ID NO: 2405814 - RNA, 19 nt, Homo sapiens
  misc_RNA (1)...(19): siRNA sense strand
uggcauugguagaggguca

SEQ ID NO: 2405815 - RNA, 19 nt, Homo sapiens
  misc_RNA (1)...(19): siRNA sense strand
ccgaggaauaccagcguaa

SEQ ID NO: 2405816 - RNA, 19 nt, Homo sapiens
  misc_RNA (1)...(19): siRNA sense strand
gccuaaaaguggaaggaau

SEQ ID NO: 2405817 - RNA, 19 nt, Homo sapiens
  misc_RNA (1)...(19): siRNA sense strand
uuauaauacccuacaggaa

SEQ ID NO: 2405818 - RNA, 19 nt, Homo sapiens
  misc_RNA (1)...(19): siRNA sense strand
caaagaaggugaugaggug

SEQ ID NO: 2405819 - RNA, 19 nt, Homo sapiens
  misc_RNA (1)...(19): siRNA sense strand
accuauagcacuuaacaaa

SEQ ID NO: 2405820 - RNA, 19 nt, Homo sapiens
  misc_RNA (1)...(19): siRNA sense strand
aaacaauggugaagggcag

SEQ ID NO: 2405821 - RNA, 19 nt, Homo sapiens
  misc_RNA (1)...(19): siRNA sense strand
gcuugaauuuacagcacuu

SEQ ID NO: 2405822 - RNA, 19 nt, Homo sapiens
  misc_RNA (1)...(19): siRNA sense strand
ccgcuuaugaccagaacau

SEQ ID NO: 2405823 - RNA, 19 nt, Homo sapiens
  misc_RNA (1)...(19): siRNA sense strand
aagaagaaaucaaaccuca

SEQ ID NO: 2405824 - RNA, 19 nt, Homo sapiens
  misc_RNA (1)...(19): siRNA sense strand
cugacaugcuggaaaggga

SEQ ID NO: 2405825 - RNA, 19 nt, Homo sapiens
  misc_RNA (1)...(19): siRNA sense strand
ugaacgucucauagauuua

SEQ ID NO: 2405826 - RNA, 19 nt, Homo sapiens
  misc_RNA (1)...(19): siRNA sense strand
gagcugaaccguuugcgaa

SEQ ID NO: 2405827 - RNA, 19 nt, Homo sapiens
  misc_RNA (1)...(19): siRNA sense strand
gcacuaaguaauauggaug

SEQ ID NO: 2405828 - RNA, 19 nt, Homo sapiens
  misc_RNA (1)...(19): siRNA sense strand
auggcgaggaugacaauaa

SEQ ID NO: 2405829 - RNA, 19 nt, Homo sapiens
  misc_RNA (1)...(19): siRNA sense strand
agcugaaccguuugcgaaa

SEQ ID NO: 2405830 - RNA, 19 nt, Homo sapiens
  misc_RNA (1)...(19): siRNA sense strand
aagaaaugcaaggaaacua

SEQ ID NO: 2405831 - RNA, 19 nt, Homo sapiens
  misc_RNA (1)...(19): siRNA sense strand
guagagggucacugcgaca

SEQ ID NO: 2405832 - RNA, 19 nt, Homo sapiens
  misc_RNA (1)...(19): siRNA sense strand
cugaugacaaugaagauga

SEQ ID NO: 2405833 - RNA, 19 nt, Homo sapiens
  misc_RNA (1)...(19): siRNA sense strand
cccuaaagucauuaacaca

SEQ ID NO: 2405834 - RNA, 19 nt, Homo sapiens
  misc_RNA (1)...(19): siRNA sense strand
uggaaggaaugguagcgau

SEQ ID NO: 2405835 - RNA, 19 nt, Homo sapiens
  misc_RNA (1)...(19): siRNA sense strand
ugacaugcuggaaagggaa

SEQ ID NO: 2405836 - RNA, 19 nt, Homo sapiens
  misc_RNA (1)...(19): siRNA sense strand
aagcaugaguggagggacu

SEQ ID NO: 2405837 - RNA, 19 nt, Homo sapiens
  misc_RNA (1)...(19): siRNA sense strand
cuucaaaauccauggacaa

SEQ ID NO: 2405838 - RNA, 19 nt, Homo sapiens
  misc_RNA (1)...(19): siRNA sense strand
uguggaaucugaugggcaa

SEQ ID NO: 2405839 - RNA, 19 nt, Homo sapiens
  misc_RNA (1)...(19): siRNA sense strand
ugauggauauugauggcaa

SEQ ID NO: 2405840 - RNA, 19 nt, Homo sapiens
  misc_RNA (1)...(19): siRNA sense strand
aggaaaagcuccaucgaga

SEQ ID NO: 2405841 - RNA, 19 nt, Homo sapiens
  misc_RNA (1)...(19): siRNA sense strand
acaacaaauggcaggaaca

SEQ ID NO: 2405842 - RNA, 19 nt, Homo sapiens
  misc_RNA (1)...(19): siRNA sense strand
gcacagccauuguccgcaa

SEQ ID NO: 2405843 - RNA, 19 nt, Homo sapiens
  misc_RNA (1)...(19): siRNA sense strand
uggcaggaacagagccgaa

SEQ ID NO: 2405844 - RNA, 19 nt, Homo sapiens
  misc_RNA (1)...(19): siRNA sense strand
ccaaugaggagaagcagca

SEQ ID NO: 2405845 - RNA, 19 nt, Homo sapiens
  misc_RNA (1)...(19): siRNA sense strand
ccucaguggacaauaugaa

SEQ ID NO: 2405846 - RNA, 19 nt, Homo sapiens
  misc_RNA (1)...(19): siRNA sense strand
gcuaugaucaugagcggga

SEQ ID NO: 2405847 - RNA, 19 nt, Homo sapiens
  misc_RNA (1)...(19): siRNA sense strand
uggcaaucugguacacaaa

SEQ ID NO: 2405848 - RNA, 19 nt, Homo sapiens
  misc_RNA (1)...(19): siRNA sense strand
ccauguuuccugagagacu

SEQ ID NO: 2405849 - RNA, 19 nt, Homo sapiens
  misc_RNA (1)...(19): siRNA sense strand
uugacgauaaugauggaua

SEQ ID NO: 2405850 - RNA, 19 nt, Homo sapiens
  misc_RNA (1)...(19): siRNA sense strand
aagagaaacuccaugccaa

SEQ ID NO: 2405851 - RNA, 19 nt, Homo sapiens
  misc_RNA (1)...(19): siRNA sense strand
ggaugaugugucagaugaa

SEQ ID NO: 2405852 - RNA, 19 nt, Homo sapiens
  misc_RNA (1)...(19): siRNA sense strand
gcaagaacuucgagccauc

SEQ ID NO: 2405853 - RNA, 19 nt, Homo sapiens
  misc_RNA (1)...(19): siRNA sense strand
aggaacaggaggugaacca

SEQ ID NO: 2405854 - RNA, 19 nt, Homo sapiens
  misc_RNA (1)...(19): siRNA sense strand
ggcucaaggcagaagaaga

SEQ ID NO: 2405855 - RNA, 19 nt, Homo sapiens
  misc_RNA (1)...(19): siRNA sense strand
guaaaucagagguggggaa

SEQ ID NO: 2405856 - RNA, 19 nt, Homo sapiens
  misc_RNA (1)...(19): siRNA sense strand
cccaggaacaggaggugaa

SEQ ID NO: 2405857 - RNA, 19 nt, Homo sapiens
  misc_RNA (1)...(19): siRNA sense strand
uggaaaauguggaggugga

SEQ ID NO: 2405858 - RNA, 19 nt, Homo sapiens
  misc_RNA (1)...(19): siRNA sense strand
ggauuaaaugccaggugga

SEQ ID NO: 2405859 - RNA, 19 nt, Homo sapiens
  misc_RNA (1)...(19): siRNA sense strand
cagaggaacuggagcggcu

SEQ ID NO: 2405860 - RNA, 19 nt, Homo sapiens
  misc_RNA (1)...(19): siRNA sense strand
ggaggaagaauguacgcuu

SEQ ID NO: 2405861 - RNA, 19 nt, Homo sapiens
  misc_RNA (1)...(19): siRNA sense strand
gugaagaccucccagcaga

SEQ ID NO: 2405862 - RNA, 19 nt, Homo sapiens
  misc_RNA (1)...(19): siRNA sense strand
ccaacugccucaacgguga

SEQ ID NO: 2405863 - RNA, 19 nt, Homo sapiens
  misc_RNA (1)...(19): siRNA sense strand
agaaaaugaagcugaccaa

SEQ ID NO: 2405864 - RNA, 19 nt, Homo sapiens
  misc_RNA (1)...(19): siRNA sense strand
aagcagcugcggaggaaga

SEQ ID NO: 2405865 - RNA, 19 nt, Homo sapiens
  misc_RNA (1)...(19): siRNA sense strand
ggacaguggagucggugga

SEQ ID NO: 2405866 - RNA, 19 nt, Homo sapiens
  misc_RNA (1)...(19): siRNA sense strand
gugaguuugcccaggaaca

SEQ ID NO: 2405867 - RNA, 19 nt, Homo sapiens
  misc_RNA (1)...(19): siRNA sense strand
uggagucgguggaggcuga

SEQ ID NO: 2405868 - RNA, 19 nt, Homo sapiens
  misc_RNA (1)...(19): siRNA sense strand
cugaagagaagcaagaacu

SEQ ID NO: 2405869 - RNA, 19 nt, Homo sapiens
  misc_RNA (1)...(19): siRNA sense strand
ugaagagggcugugggaug

SEQ ID NO: 2405870 - RNA, 19 nt, Homo sapiens
  misc_RNA (1)...(19): siRNA sense strand
ccaccguauugaugcugaa

SEQ ID NO: 2405871 - RNA, 19 nt, Homo sapiens
  misc_RNA (1)...(19): siRNA sense strand
gaagaagauuccagcggcu

SEQ ID NO: 2405872 - RNA, 19 nt, Homo sapiens
  misc_RNA (1)...(19): siRNA sense strand
gggagugaaaggagagccu

SEQ ID NO: 2405873 - RNA, 19 nt, Homo sapiens
  misc_RNA (1)...(19): siRNA sense strand
aagcaagaacuucgagcca

SEQ ID NO: 2405874 - RNA, 19 nt, Homo sapiens
  misc_RNA (1)...(19): siRNA sense strand
cgaaagaagaugcuggaga

SEQ ID NO: 2405875 - RNA, 19 nt, Homo sapiens
  misc_RNA (1)...(19): siRNA sense strand
gugccuuggaugagagcaa

SEQ ID NO: 2405876 - RNA, 19 nt, Homo sapiens
  misc_RNA (1)...(19): siRNA sense strand
uuuaaggaagauugcgaua

SEQ ID NO: 2405877 - RNA, 19 nt, Homo sapiens
  misc_RNA (1)...(19): siRNA sense strand
cauuuguguuggagaacca

SEQ ID NO: 2405878 - RNA, 19 nt, Homo sapiens
  misc_RNA (1)...(19): siRNA sense strand
agaagaugcuggagauccu

SEQ ID NO: 2405879 - RNA, 19 nt, Homo sapiens
  misc_RNA (1)...(19): siRNA sense strand
agaggaguauggugagcau

SEQ ID NO: 2405880 - RNA, 19 nt, Homo sapiens
  misc_RNA (1)...(19): siRNA sense strand
gugcaguaccucuggucau

SEQ ID NO: 2405881 - RNA, 19 nt, Homo sapiens
  misc_RNA (1)...(19): siRNA sense strand
aaacuuuagugucuggcua

SEQ ID NO: 2405882 - RNA, 19 nt, Homo sapiens
  misc_RNA (1)...(19): siRNA sense strand
cuaccauggcugugggaga

SEQ ID NO: 2405883 - RNA, 19 nt, Homo sapiens
  misc_RNA (1)...(19): siRNA sense strand
gagccaaauuguaggccuc

SEQ ID NO: 2405884 - RNA, 19 nt, Homo sapiens
  misc_RNA (1)...(19): siRNA sense strand
aggaggugcuggcggacaa

SEQ ID NO: 2405885 - RNA, 19 nt, Homo sapiens
  misc_RNA (1)...(19): siRNA sense strand
uuguagaaguggaggagcu

SEQ ID NO: 2405886 - RNA, 19 nt, Homo sapiens
  misc_RNA (1)...(19): siRNA sense strand
aaggcaaaccggagcugaa

SEQ ID NO: 2405887 - RNA, 19 nt, Homo sapiens
  misc_RNA (1)...(19): siRNA sense strand
acccugagacaaaggaaau

SEQ ID NO: 2405888 - RNA, 19 nt, Homo sapiens
  misc_RNA (1)...(19): siRNA sense strand
cuuaaagcucucaagguca

SEQ ID NO: 2405889 - RNA, 19 nt, Homo sapiens
  misc_RNA (1)...(19): siRNA sense strand
cacccugagacaaaggaaa

SEQ ID NO: 2405890 - RNA, 19 nt, Homo sapiens
  misc_RNA (1)...(19): siRNA sense strand
gaggaaucagagauggaaa

SEQ ID NO: 2405891 - RNA, 19 nt, Homo sapiens
  misc_RNA (1)...(19): siRNA sense strand
aaacagaagaagaggugga

SEQ ID NO: 2405892 - RNA, 19 nt, Homo sapiens
  misc_RNA (1)...(19): siRNA sense strand
gaacacuauuacaugggaa

SEQ ID NO: 2405893 - RNA, 19 nt, Homo sapiens
  misc_RNA (1)...(19): siRNA sense strand
uggugugcaaagagaguaa

SEQ ID NO: 2405894 - RNA, 19 nt, Homo sapiens
  misc_RNA (1)...(19): siRNA sense strand
ccuucaagcacuuuaacaa

SEQ ID NO: 2405895 - RNA, 19 nt, Homo sapiens
  misc_RNA (1)...(19): siRNA sense strand
agauggaaacagaagaaga

SEQ ID NO: 2405896 - RNA, 19 nt, Homo sapiens
  misc_RNA (1)...(19): siRNA sense strand
uggacuuguuauagaauca

SEQ ID NO: 2405897 - RNA, 19 nt, Homo sapiens
  misc_RNA (1)...(19): siRNA sense strand
gcagaaagauaaucacgga

SEQ ID NO: 2405898 - RNA, 19 nt, Homo sapiens
  misc_RNA (1)...(19): siRNA sense strand
aaggaaaagaagagaacau

SEQ ID NO: 2405899 - RNA, 19 nt, Homo sapiens
  misc_RNA (1)...(19): siRNA sense strand
ccucaucuggguagagaau

SEQ ID NO: 2405900 - RNA, 19 nt, Homo sapiens
  misc_RNA (1)...(19): siRNA sense strand
uauuaaaagcccugaaaga

SEQ ID NO: 2405901 - RNA, 19 nt, Homo sapiens
  misc_RNA (1)...(19): siRNA sense strand
ggaagauaaaacagaaaga

SEQ ID NO: 2405902 - RNA, 19 nt, Homo sapiens
  misc_RNA (1)...(19): siRNA sense strand
uugcugugauguuaggaaa

SEQ ID NO: 2405903 - RNA, 19 nt, Homo sapiens
  misc_RNA (1)...(19): siRNA sense strand
cgggaagauaaaacagaaa

SEQ ID NO: 2405904 - RNA, 19 nt, Homo sapiens
  misc_RNA (1)...(19): siRNA sense strand
ggaaauaaaguuacagcuc

SEQ ID NO: 2405905 - RNA, 19 nt, Homo sapiens
  misc_RNA (1)...(19): siRNA sense strand
agggaaaguguugaagaaa

SEQ ID NO: 2405906 - RNA, 19 nt, Homo sapiens
  misc_RNA (1)...(19): siRNA sense strand
cugaugacuacaaggaaga

SEQ ID NO: 2405907 - RNA, 19 nt, Homo sapiens
  misc_RNA (1)...(19): siRNA sense strand
ugaggaagcuuaagcagca

SEQ ID NO: 2405908 - RNA, 19 nt, Homo sapiens
  misc_RNA (1)...(19): siRNA sense strand
agaggauauucuucgaaau

SEQ ID NO: 2405909 - RNA, 19 nt, Homo sapiens
  misc_RNA (1)...(19): siRNA sense strand
gaguuugaguaaaggugga

SEQ ID NO: 2405910 - RNA, 19 nt, Homo sapiens
  misc_RNA (1)...(19): siRNA sense strand
cagaaagauaaucacggaa

SEQ ID NO: 2405911 - RNA, 19 nt, Homo sapiens
  misc_RNA (1)...(19): siRNA sense strand
acaauaucgggcagaaaga

SEQ ID NO: 2405912 - RNA, 19 nt, Homo sapiens
  misc_RNA (1)...(19): siRNA sense strand
caucaugaggaaucagaga

SEQ ID NO: 2405913 - RNA, 19 nt, Homo sapiens
  misc_RNA (1)...(19): siRNA sense strand
gaaauaaaguuacagcucu

SEQ ID NO: 2405914 - RNA, 19 nt, Homo sapiens
  misc_RNA (1)...(19): siRNA sense strand
ggaaacagaagaagaggug

SEQ ID NO: 2405915 - RNA, 19 nt, Homo sapiens
  misc_RNA (1)...(19): siRNA sense strand
ugcaaagagaguaagaaaa

SEQ ID NO: 2405916 - RNA, 19 nt, Homo sapiens
  misc_RNA (1)...(19): siRNA sense strand
cuacgauagccaugagcca

SEQ ID NO: 2405917 - RNA, 19 nt, Homo sapiens
  misc_RNA (1)...(19): siRNA sense strand
caauaucaggcuugacaca

SEQ ID NO: 2405918 - RNA, 19 nt, Homo sapiens
  misc_RNA (1)...(19): siRNA sense strand
cugugauguuaggaaauaa

SEQ ID NO: 2405919 - RNA, 19 nt, Homo sapiens
  misc_RNA (1)...(19): siRNA sense strand
agugauauuuacucugcaa

SEQ ID NO: 2405920 - RNA, 19 nt, Homo sapiens
  misc_RNA (1)...(19): siRNA sense strand
auggagaguuugaguaaag

SEQ ID NO: 2405921 - RNA, 19 nt, Homo sapiens
  misc_RNA (1)...(19): siRNA sense strand
agguggaaacauaauggaa

SEQ ID NO: 2405922 - RNA, 19 nt, Homo sapiens
  misc_RNA (1)...(19): siRNA sense strand
ggaccagaugcgagagauc

SEQ ID NO: 2405923 - RNA, 19 nt, Homo sapiens
  misc_RNA (1)...(19): siRNA sense strand
aggaggaggaggagagaga

SEQ ID NO: 2405924 - RNA, 19 nt, Homo sapiens
  misc_RNA (1)...(19): siRNA sense strand
gagcaugagaagaagcaga

SEQ ID NO: 2405925 - RNA, 19 nt, Homo sapiens
  misc_RNA (1)...(19): siRNA sense strand
aaaagaagaaggugggcaa

SEQ ID NO: 2405926 - RNA, 19 nt, Homo sapiens
  misc_RNA (1)...(19): siRNA sense strand
ccuacgaggacaagcagaa

SEQ ID NO: 2405927 - RNA, 19 nt, Homo sapiens
  misc_RNA (1)...(19): siRNA sense strand
agacggaagaugaccgcaa

SEQ ID NO: 2405928 - RNA, 19 nt, Homo sapiens
  misc_RNA (1)...(19): siRNA sense strand
ucgaaaugccauauaacau

SEQ ID NO: 2405929 - RNA, 19 nt, Homo sapiens
  misc_RNA (1)...(19): siRNA sense strand
gcaagaaccacaucggcau

SEQ ID NO: 2405930 - RNA, 19 nt, Homo sapiens
  misc_RNA (1)...(19): siRNA sense strand
agcagaagcuggagacgga

SEQ ID NO: 2405931 - RNA, 19 nt, Homo sapiens
  misc_RNA (1)...(19): siRNA sense strand
aggacaagcagaaacucaa

SEQ ID NO: 2405932 - RNA, 19 nt, Homo sapiens
  misc_RNA (1)...(19): siRNA sense strand
agaagaagcagaagcugga

SEQ ID NO: 2405933 - RNA, 19 nt, Homo sapiens
  misc_RNA (1)...(19): siRNA sense strand
aagaagaaggugggcaauu

SEQ ID NO: 2405934 - RNA, 19 nt, Homo sapiens
  misc_RNA (1)...(19): siRNA sense strand
aaggaggagcgcugggaca

SEQ ID NO: 2405935 - RNA, 19 nt, Homo sapiens
  misc_RNA (1)...(19): siRNA sense strand
guuacaaugcagaaaagaa

SEQ ID NO: 2405936 - RNA, 19 nt, Homo sapiens
  misc_RNA (1)...(19): siRNA sense strand
gaagggagccgucaggaca

SEQ ID NO: 2405937 - RNA, 19 nt, Homo sapiens
  misc_RNA (1)...(19): siRNA sense strand
agagaaugacacagggauu

SEQ ID NO: 2405938 - RNA, 19 nt, Homo sapiens
  misc_RNA (1)...(19): siRNA sense strand
ccuucagaggaaagcaaua

SEQ ID NO: 2405939 - RNA, 19 nt, Homo sapiens
  misc_RNA (1)...(19): siRNA sense strand
aucuacagucugaggaaua

SEQ ID NO: 2405940 - RNA, 19 nt, Homo sapiens
  misc_RNA (1)...(19): siRNA sense strand
gcuuaaugguauuguggcu

SEQ ID NO: 2405941 - RNA, 19 nt, Homo sapiens
  misc_RNA (1)...(19): siRNA sense strand
gaauaaagacauaaagagg

SEQ ID NO: 2405942 - RNA, 19 nt, Homo sapiens
  misc_RNA (1)...(19): siRNA sense strand
gcucauuaacauccagaca

SEQ ID NO: 2405943 - RNA, 19 nt, Homo sapiens
  misc_RNA (1)...(19): siRNA sense strand
ggucacugugcucgggaau

SEQ ID NO: 2405944 - RNA, 19 nt, Homo sapiens
  misc_RNA (1)...(19): siRNA sense strand
cagacacagagcagaguca

SEQ ID NO: 2405945 - RNA, 19 nt, Homo sapiens
  misc_RNA (1)...(19): siRNA sense strand
cuuccaaagaccagggcaa

SEQ ID NO: 2405946 - RNA, 19 nt, Homo sapiens
  misc_RNA (1)...(19): siRNA sense strand
agaacgaagucaaaagcaa

SEQ ID NO: 2405947 - RNA, 19 nt, Homo sapiens
  misc_RNA (1)...(19): siRNA sense strand
gugcugagaacgaagucaa

SEQ ID NO: 2405948 - RNA, 19 nt, Homo sapiens
  misc_RNA (1)...(19): siRNA sense strand
auaaagaggaauugcaagu

SEQ ID NO: 2405949 - RNA, 19 nt, Homo sapiens
  misc_RNA (1)...(19): siRNA sense strand
gaguauuaguuuggccaau

SEQ ID NO: 2405950 - RNA, 19 nt, Homo sapiens
  misc_RNA (1)...(19): siRNA sense strand
caaccagguaacagggcuu

SEQ ID NO: 2405951 - RNA, 19 nt, Homo sapiens
  misc_RNA (1)...(19): siRNA sense strand
agucaugaacccacaucua

SEQ ID NO: 2405952 - RNA, 19 nt, Homo sapiens
  misc_RNA (1)...(19): siRNA sense strand
caaaagcaagccagcgaaa

SEQ ID NO: 2405953 - RNA, 19 nt, Homo sapiens
  misc_RNA (1)...(19): siRNA sense strand
aaugaauaccuguggaucu

SEQ ID NO: 2405954 - RNA, 19 nt, Homo sapiens
  misc_RNA (1)...(19): siRNA sense strand
gcaaucaaccacugggcuu

SEQ ID NO: 2405955 - RNA, 19 nt, Homo sapiens
  misc_RNA (1)...(19): siRNA sense strand
ucagaaaguguuuaggaca

SEQ ID NO: 2405956 - RNA, 19 nt, Homo sapiens
  misc_RNA (1)...(19): siRNA sense strand
cugaugacacugacaggaa

SEQ ID NO: 2405957 - RNA, 19 nt, Homo sapiens
  misc_RNA (1)...(19): siRNA sense strand
cagaaacaagcauguaaaa

SEQ ID NO: 2405958 - RNA, 19 nt, Homo sapiens
  misc_RNA (1)...(19): siRNA sense strand
cagaaaguguugaggaaaa

SEQ ID NO: 2405959 - RNA, 19 nt, Homo sapiens
  misc_RNA (1)...(19): siRNA sense strand
ugauaguggcuuagauaaa

SEQ ID NO: 2405960 - RNA, 19 nt, Homo sapiens
  misc_RNA (1)...(19): siRNA sense strand
ucacauaaggauugagaau

SEQ ID NO: 2405961 - RNA, 19 nt, Homo sapiens
  misc_RNA (1)...(19): siRNA sense strand
acagaaacgaagugggcaa

SEQ ID NO: 2405962 - RNA, 19 nt, Homo sapiens
  misc_RNA (1)...(19): siRNA sense strand
uuggaagaauauugggaaa

SEQ ID NO: 2405963 - RNA, 19 nt, Homo sapiens
  misc_RNA (1)...(19): siRNA sense strand
cagcugaaaucaagggaga

SEQ ID NO: 2405964 - RNA, 19 nt, Homo sapiens
  misc_RNA (1)...(19): siRNA sense strand
cagaugaagaggaggaaaa

SEQ ID NO: 2405965 - RNA, 19 nt, Homo sapiens
  misc_RNA (1)...(19): siRNA sense strand
aagcauugguagugcagaa

SEQ ID NO: 2405966 - RNA, 19 nt, Homo sapiens
  misc_RNA (1)...(19): siRNA sense strand
acacaacagaagagaagaa

SEQ ID NO: 2405967 - RNA, 19 nt, Homo sapiens
  misc_RNA (1)...(19): siRNA sense strand
gcugaaaucaagggagaaa

SEQ ID NO: 2405968 - RNA, 19 nt, Homo sapiens
  misc_RNA (1)...(19): siRNA sense strand
gcaacuuuacagaaggaaa

SEQ ID NO: 2405969 - RNA, 19 nt, Homo sapiens
  misc_RNA (1)...(19): siRNA sense strand
cgacagacaaggaaacaga

SEQ ID NO: 2405970 - RNA, 19 nt, Homo sapiens
  misc_RNA (1)...(19): siRNA sense strand
uggagaacucaaagaaauu

SEQ ID NO: 2405971 - RNA, 19 nt, Homo sapiens
  misc_RNA (1)...(19): siRNA sense strand
caacuuuacagaaggaaaa

SEQ ID NO: 2405972 - RNA, 19 nt, Homo sapiens
  misc_RNA (1)...(19): siRNA sense strand
acaacagaagagaagaaua

SEQ ID NO: 2405973 - RNA, 19 nt, Homo sapiens
  misc_RNA (1)...(19): siRNA sense strand
ccaauguauuagagaugau

SEQ ID NO: 2405974 - RNA, 19 nt, Homo sapiens
  misc_RNA (1)...(19): siRNA sense strand
gugaagaagcaaaguagga

SEQ ID NO: 2405975 - RNA, 19 nt, Homo sapiens
  misc_RNA (1)...(19): siRNA sense strand
ccagaaaguguugaggaaa

SEQ ID NO: 2405976 - RNA, 19 nt, Homo sapiens
  misc_RNA (1)...(19): siRNA sense strand
gagaaugagacaaggugga

SEQ ID NO: 2405977 - RNA, 19 nt, Homo sapiens
  misc_RNA (1)...(19): siRNA sense strand
uggcaagcucagaagagaa

SEQ ID NO: 2405978 - RNA, 19 nt, Homo sapiens
  misc_RNA (1)...(19): siRNA sense strand
caguuuuggugguggaaau

SEQ ID NO: 2405979 - RNA, 19 nt, Homo sapiens
  misc_RNA (1)...(19): siRNA sense strand
acagacaaggaaacagaaa

SEQ ID NO: 2405980 - RNA, 19 nt, Homo sapiens
  misc_RNA (1)...(19): siRNA sense strand
aagcaaaguaggagugaag

SEQ ID NO: 2405981 - RNA, 19 nt, Homo sapiens
  misc_RNA (1)...(19): siRNA sense strand
cauucaaagucucgcauca

SEQ ID NO: 2405982 - RNA, 19 nt, Homo sapiens
  misc_RNA (1)...(19): siRNA sense strand
acaaggaaacagaaacgaa

SEQ ID NO: 2405983 - RNA, 19 nt, Homo sapiens
  misc_RNA (1)...(19): siRNA sense strand
aaucuauaccuuuggaaga

SEQ ID NO: 2405984 - RNA, 19 nt, Homo sapiens
  misc_RNA (1)...(19): siRNA sense strand
aguaaggacaacuuugaua

SEQ ID NO: 2405985 - RNA, 19 nt, Homo sapiens
  misc_RNA (1)...(19): siRNA sense strand
caagggagaaauggagaaa

SEQ ID NO: 2405986 - RNA, 19 nt, Homo sapiens
  misc_RNA (1)...(19): siRNA sense strand
uuagagaugaugaaggaau

SEQ ID NO: 2405987 - RNA, 19 nt, Homo sapiens
  misc_RNA (1)...(19): siRNA sense strand
aguucaaguuucacaucua

SEQ ID NO: 2405988 - RNA, 19 nt, Homo sapiens
  misc_RNA (1)...(19): siRNA sense strand
aggaaagauuugcccucaa

SEQ ID NO: 2405989 - RNA, 19 nt, Homo sapiens
  misc_RNA (1)...(19): siRNA sense strand
uggagcugcuauugaggaa

SEQ ID NO: 2405990 - RNA, 19 nt, Homo sapiens
  misc_RNA (1)...(19): siRNA sense strand
cauguuauuacguggagaa

SEQ ID NO: 2405991 - RNA, 19 nt, Homo sapiens
  misc_RNA (1)...(19): siRNA sense strand
gguuaaaagcagucuuauu

SEQ ID NO: 2405992 - RNA, 19 nt, Homo sapiens
  misc_RNA (1)...(19): siRNA sense strand
gcucagaagagaagcuuuu

SEQ ID NO: 2405993 - RNA, 19 nt, Homo sapiens
  misc_RNA (1)...(19): siRNA sense strand
gaagcgacagacaaggaaa

SEQ ID NO: 2405994 - RNA, 19 nt, Homo sapiens
  misc_RNA (1)...(19): siRNA sense strand
gagcuuuggaauagucauu

SEQ ID NO: 2405995 - RNA, 19 nt, Homo sapiens
  misc_RNA (1)...(19): siRNA sense strand
gauggagcuuugugaggau

SEQ ID NO: 2405996 - RNA, 19 nt, Homo sapiens
  misc_RNA (1)...(19): siRNA sense strand
ucaagggagaaauggagaa

SEQ ID NO: 2405997 - RNA, 19 nt, Homo sapiens
  misc_RNA (1)...(19): siRNA sense strand
uggaagaauauugggaaaa

SEQ ID NO: 2405998 - RNA, 19 nt, Homo sapiens
  misc_RNA (1)...(19): siRNA sense strand
agggagaaauggagaaaac

SEQ ID NO: 2405999 - RNA, 19 nt, Homo sapiens
  misc_RNA (1)...(19): siRNA sense strand
aaugagacaagguggauca

SEQ ID NO: 2406000 - RNA, 19 nt, Homo sapiens
  misc_RNA (1)...(19): siRNA sense strand
gagauauaaccuccaggaa

SEQ ID NO: 2406001 - RNA, 19 nt, Homo sapiens
  misc_RNA (1)...(19): siRNA sense strand
gaaaugucccugaugccaa

SEQ ID NO: 2406002 - RNA, 19 nt, Homo sapiens
  misc_RNA (1)...(19): siRNA sense strand
ggagaaaaccccugugacu

SEQ ID NO: 2406003 - RNA, 19 nt, Homo sapiens
  misc_RNA (1)...(19): siRNA sense strand
ugagaauggagcugcuauu

SEQ ID NO: 2406004 - RNA, 19 nt, Homo sapiens
  misc_RNA (1)...(19): siRNA sense strand
gcggugaagaagcaaagua

SEQ ID NO: 2406005 - RNA, 19 nt, Homo sapiens
  misc_RNA (1)...(19): siRNA sense strand
cugauaguggcuuagauaa

SEQ ID NO: 2406006 - RNA, 19 nt, Homo sapiens
  misc_RNA (1)...(19): siRNA sense strand
cugcaaccaguaaggacaa

SEQ ID NO: 2406007 - RNA, 19 nt, Homo sapiens
  misc_RNA (1)...(19): siRNA sense strand
agaugaugaaggaauggaa

SEQ ID NO: 2406008 - RNA, 19 nt, Homo sapiens
  misc_RNA (1)...(19): siRNA sense strand
augaugaaggaauggaaaa

SEQ ID NO: 2406009 - RNA, 19 nt, Homo sapiens
  misc_RNA (1)...(19): siRNA sense strand
acaucauacaucuggaaca

SEQ ID NO: 2406010 - RNA, 19 nt, Homo sapiens
  misc_RNA (1)...(19): siRNA sense strand
gcuauugaggaaaucuaua

SEQ ID NO: 2406011 - RNA, 19 nt, Homo sapiens
  misc_RNA (1)...(19): siRNA sense strand
ggugacugauuuuggcuua

SEQ ID NO: 2406012 - RNA, 19 nt, Homo sapiens
  misc_RNA (1)...(19): siRNA sense strand
aggaacuacuagauaacca

SEQ ID NO: 2406013 - RNA, 19 nt, Homo sapiens
  misc_RNA (1)...(19): siRNA sense strand
gcuuugugaggauggagaa

SEQ ID NO: 2406014 - RNA, 19 nt, Homo sapiens
  misc_RNA (1)...(19): siRNA sense strand
ggaagaguggugugggcaa

SEQ ID NO: 2406015 - RNA, 19 nt, Homo sapiens
  misc_RNA (1)...(19): siRNA sense strand
ccacauacucaauggccuu

SEQ ID NO: 2406016 - RNA, 19 nt, Homo sapiens
  misc_RNA (1)...(19): siRNA sense strand
ccaaauuugaccaguacau

SEQ ID NO: 2406017 - RNA, 19 nt, Homo sapiens
  misc_RNA (1)...(19): siRNA sense strand
gaucauaugcugcuggcuu

SEQ ID NO: 2406018 - RNA, 19 nt, Homo sapiens
  misc_RNA (1)...(19): siRNA sense strand
cccaaggagcagaagaaau

SEQ ID NO: 2406019 - RNA, 19 nt, Homo sapiens
  misc_RNA (1)...(19): siRNA sense strand
ugaagagagugcugggagu

SEQ ID NO: 2406020 - RNA, 19 nt, Homo sapiens
  misc_RNA (1)...(19): siRNA sense strand
gagccugaaaggagagaaa

SEQ ID NO: 2406021 - RNA, 19 nt, Homo sapiens
  misc_RNA (1)...(19): siRNA sense strand
agauguagauguuggaaaa

SEQ ID NO: 2406022 - RNA, 19 nt, Homo sapiens
  misc_RNA (1)...(19): siRNA sense strand
augcaaaguuagaugccaa

SEQ ID NO: 2406023 - RNA, 19 nt, Homo sapiens
  misc_RNA (1)...(19): siRNA sense strand
uuggagaaccugugugaaa

SEQ ID NO: 2406024 - RNA, 19 nt, Homo sapiens
  misc_RNA (1)...(19): siRNA sense strand
aaacaugggucaaggcuga

SEQ ID NO: 2406025 - RNA, 19 nt, Homo sapiens
  misc_RNA (1)...(19): siRNA sense strand
cauuugggcagaagggaaa

SEQ ID NO: 2406026 - RNA, 19 nt, Homo sapiens
  misc_RNA (1)...(19): siRNA sense strand
gagauguagauguuggaaa

SEQ ID NO: 2406027 - RNA, 19 nt, Homo sapiens
  misc_RNA (1)...(19): siRNA sense strand
gauaaugaagagaggacca

SEQ ID NO: 2406028 - RNA, 19 nt, Homo sapiens
  misc_RNA (1)...(19): siRNA sense strand
cuuuaaacacuucggauuu

SEQ ID NO: 2406029 - RNA, 19 nt, Homo sapiens
  misc_RNA (1)...(19): siRNA sense strand
ugaagaaaugcauaagcaa

SEQ ID NO: 2406030 - RNA, 19 nt, Homo sapiens
  misc_RNA (1)...(19): siRNA sense strand
ugacuauagguuuggagaa

SEQ ID NO: 2406031 - RNA, 19 nt, Homo sapiens
  misc_RNA (1)...(19): siRNA sense strand
agcuuauggucuugaacaa

SEQ ID NO: 2406032 - RNA, 19 nt, Homo sapiens
  misc_RNA (1)...(19): siRNA sense strand
agaagaaagaagcaugauu

SEQ ID NO: 2406033 - RNA, 19 nt, Homo sapiens
  misc_RNA (1)...(19): siRNA sense strand
cugaagaugcaaaguuaga

SEQ ID NO: 2406034 - RNA, 19 nt, Homo sapiens
  misc_RNA (1)...(19): siRNA sense strand
acuuuaaacacuucggauu

SEQ ID NO: 2406035 - RNA, 19 nt, Homo sapiens
  misc_RNA (1)...(19): siRNA sense strand
cuguucuagugaagauuua

SEQ ID NO: 2406036 - RNA, 19 nt, Homo sapiens
  misc_RNA (1)...(19): siRNA sense strand
ucauuugggcagaagggaa

SEQ ID NO: 2406037 - RNA, 19 nt, Homo sapiens
  misc_RNA (1)...(19): siRNA sense strand
aagagcagcaccaggacaa

SEQ ID NO: 2406038 - RNA, 19 nt, Homo sapiens
  misc_RNA (1)...(19): siRNA sense strand
ccuuaggagauaaugaaga

SEQ ID NO: 2406039 - RNA, 19 nt, Homo sapiens
  misc_RNA (1)...(19): siRNA sense strand
aaaguuugccacaggaaau

SEQ ID NO: 2406040 - RNA, 19 nt, Homo sapiens
  misc_RNA (1)...(19): siRNA sense strand
cuugaagguguuagcaaau

SEQ ID NO: 2406041 - RNA, 19 nt, Homo sapiens
  misc_RNA (1)...(19): siRNA sense strand
aaaugaagagggaaagcau

SEQ ID NO: 2406042 - RNA, 19 nt, Homo sapiens
  misc_RNA (1)...(19): siRNA sense strand
gagauaaugaagagaggac

SEQ ID NO: 2406043 - RNA, 19 nt, Homo sapiens
  misc_RNA (1)...(19): siRNA sense strand
aaaugagccugaaaggaga

SEQ ID NO: 2406044 - RNA, 19 nt, Homo sapiens
  misc_RNA (1)...(19): siRNA sense strand
cugacaaaagacagguaaa

SEQ ID NO: 2406045 - RNA, 19 nt, Homo sapiens
  misc_RNA (1)...(19): siRNA sense strand
gccugaaaggagagaaaau

SEQ ID NO: 2406046 - RNA, 19 nt, Homo sapiens
  misc_RNA (1)...(19): siRNA sense strand
ucuuauuaaacauggguca

SEQ ID NO: 2406047 - RNA, 19 nt, Homo sapiens
  misc_RNA (1)...(19): siRNA sense strand
augcauaagcaaauacuga

SEQ ID NO: 2406048 - RNA, 19 nt, Homo sapiens
  misc_RNA (1)...(19): siRNA sense strand
acauggaugacaagcagaa

SEQ ID NO: 2406049 - RNA, 19 nt, Homo sapiens
  misc_RNA (1)...(19): siRNA sense strand
cauacaugcggaacagaau

SEQ ID NO: 2406050 - RNA, 19 nt, Homo sapiens
  misc_RNA (1)...(19): siRNA sense strand
agaaggaagagcagcacca

SEQ ID NO: 2406051 - RNA, 19 nt, Homo sapiens
  misc_RNA (1)...(19): siRNA sense strand
gcuuauggucuugaacaaa

SEQ ID NO: 2406052 - RNA, 19 nt, Homo sapiens
  misc_RNA (1)...(19): siRNA sense strand
ggaaauucagauacaucau

SEQ ID NO: 2406053 - RNA, 19 nt, Homo sapiens
  misc_RNA (1)...(19): siRNA sense strand
acaucauacaugcggaaca

SEQ ID NO: 2406054 - RNA, 19 nt, Homo sapiens
  misc_RNA (1)...(19): siRNA sense strand
auuaagaaacaucgaguca

SEQ ID NO: 2406055 - RNA, 19 nt, Homo sapiens
  misc_RNA (1)...(19): siRNA sense strand
acugggagcuacuggguga

SEQ ID NO: 2406056 - RNA, 19 nt, Homo sapiens
  misc_RNA (1)...(19): siRNA sense strand
ugucaguggagguggaguu

SEQ ID NO: 2406057 - RNA, 19 nt, Homo sapiens
  misc_RNA (1)...(19): siRNA sense strand
aguuguucauccagggaga

SEQ ID NO: 2406058 - RNA, 19 nt, Homo sapiens
  misc_RNA (1)...(19): siRNA sense strand
cagcgugcggccaggaauu

SEQ ID NO: 2406059 - RNA, 19 nt, Homo sapiens
  misc_RNA (1)...(19): siRNA sense strand
gcucagugcuccugcgcaa

SEQ ID NO: 2406060 - RNA, 19 nt, Homo sapiens
  misc_RNA (1)...(19): siRNA sense strand
aggaggaagaucaggauga

SEQ ID NO: 2406061 - RNA, 19 nt, Homo sapiens
  misc_RNA (1)...(19): siRNA sense strand
ccugauagucucaaggaca

SEQ ID NO: 2406062 - RNA, 19 nt, Homo sapiens
  misc_RNA (1)...(19): siRNA sense strand
agcagaugacccagaaaua

SEQ ID NO: 2406063 - RNA, 19 nt, Homo sapiens
  misc_RNA (1)...(19): siRNA sense strand
acggugagggagauagaaa

SEQ ID NO: 2406064 - RNA, 19 nt, Homo sapiens
  misc_RNA (1)...(19): siRNA sense strand
agaaauaugaggaggagcu

SEQ ID NO: 2406065 - RNA, 19 nt, Homo sapiens
  misc_RNA (1)...(19): siRNA sense strand
cggaugagggcgaguacga

SEQ ID NO: 2406066 - RNA, 19 nt, Homo sapiens
  misc_RNA (1)...(19): siRNA sense strand
acgcagugcaggcggauga

SEQ ID NO: 2406067 - RNA, 19 nt, Homo sapiens
  misc_RNA (1)...(19): siRNA sense strand
ccugggacacggaggucaa

SEQ ID NO: 2406068 - RNA, 19 nt, Homo sapiens
  misc_RNA (1)...(19): siRNA sense strand
gaguacgagugccggguca

SEQ ID NO: 2406069 - RNA, 19 nt, Homo sapiens
  misc_RNA (1)...(19): siRNA sense strand
cagcacuagaagagggcca

SEQ ID NO: 2406070 - RNA, 19 nt, Homo sapiens
  misc_RNA (1)...(19): siRNA sense strand
cccagaaauaugaggagga

SEQ ID NO: 2406071 - RNA, 19 nt, Homo sapiens
  misc_RNA (1)...(19): siRNA sense strand
ggaggagaguguagggcug

SEQ ID NO: 2406072 - RNA, 19 nt, Homo sapiens
  misc_RNA (1)...(19): siRNA sense strand
cgagauagagagagagaca

SEQ ID NO: 2406073 - RNA, 19 nt, Homo sapiens
  misc_RNA (1)...(19): siRNA sense strand
agacagagacagagagcga

SEQ ID NO: 2406074 - RNA, 19 nt, Homo sapiens
  misc_RNA (1)...(19): siRNA sense strand
uggaaagcuuacugugaaa

SEQ ID NO: 2406075 - RNA, 19 nt, Homo sapiens
  misc_RNA (1)...(19): siRNA sense strand
ggacaaaagucaaaggagu

SEQ ID NO: 2406076 - RNA, 19 nt, Homo sapiens
  misc_RNA (1)...(19): siRNA sense strand
augaagaacgauacagaua

SEQ ID NO: 2406077 - RNA, 19 nt, Homo sapiens
  misc_RNA (1)...(19): siRNA sense strand
gaagauaaaccauggcgua

SEQ ID NO: 2406078 - RNA, 19 nt, Homo sapiens
  misc_RNA (1)...(19): siRNA sense strand
cuggaaacucagagaaaga

SEQ ID NO: 2406079 - RNA, 19 nt, Homo sapiens
  misc_RNA (1)...(19): siRNA sense strand
agaaagagguuaugagcgu

SEQ ID NO: 2406080 - RNA, 19 nt, Homo sapiens
  misc_RNA (1)...(19): siRNA sense strand
agauagagagagagacaga

SEQ ID NO: 2406081 - RNA, 19 nt, Homo sapiens
  misc_RNA (1)...(19): siRNA sense strand
gugaagaaggagauaguca

SEQ ID NO: 2406082 - RNA, 19 nt, Homo sapiens
  misc_RNA (1)...(19): siRNA sense strand
aaagaagcaaagaaggaaa

SEQ ID NO: 2406083 - RNA, 19 nt, Homo sapiens
  misc_RNA (1)...(19): siRNA sense strand
agaugaaacugcugaaaau

SEQ ID NO: 2406084 - RNA, 19 nt, Homo sapiens
  misc_RNA (1)...(19): siRNA sense strand
cgugaucgggacagagaaa

SEQ ID NO: 2406085 - RNA, 19 nt, Homo sapiens
  misc_RNA (1)...(19): siRNA sense strand
cgaaagugacugagaccga

SEQ ID NO: 2406086 - RNA, 19 nt, Homo sapiens
  misc_RNA (1)...(19): siRNA sense strand
aguugaaaggccagaagaa

SEQ ID NO: 2406087 - RNA, 19 nt, Homo sapiens
  misc_RNA (1)...(19): siRNA sense strand
gaagagagaaagaccgaga

SEQ ID NO: 2406088 - RNA, 19 nt, Homo sapiens
  misc_RNA (1)...(19): siRNA sense strand
agagagagagacagagaca

SEQ ID NO: 2406089 - RNA, 19 nt, Homo sapiens
  misc_RNA (1)...(19): siRNA sense strand
ccagagagagagagaggga

SEQ ID NO: 2406090 - RNA, 19 nt, Homo sapiens
  misc_RNA (1)...(19): siRNA sense strand
acacagggagaaagaggaa

SEQ ID NO: 2406091 - RNA, 19 nt, Homo sapiens
  misc_RNA (1)...(19): siRNA sense strand
gaugauagugauagugaca

SEQ ID NO: 2406092 - RNA, 19 nt, Homo sapiens
  misc_RNA (1)...(19): siRNA sense strand
uuauggaacuacagggaca

SEQ ID NO: 2406093 - RNA, 19 nt, Homo sapiens
  misc_RNA (1)...(19): siRNA sense strand
uugaaaggccagaagaaga

SEQ ID NO: 2406094 - RNA, 19 nt, Homo sapiens
  misc_RNA (1)...(19): siRNA sense strand
agagagagagggagcguga

SEQ ID NO: 2406095 - RNA, 19 nt, Homo sapiens
  misc_RNA (1)...(19): siRNA sense strand
gacaaaagucaaaggagua

SEQ ID NO: 2406096 - RNA, 19 nt, Homo sapiens
  misc_RNA (1)...(19): siRNA sense strand
cgaugaugaugaagaugau

SEQ ID NO: 2406097 - RNA, 19 nt, Homo sapiens
  misc_RNA (1)...(19): siRNA sense strand
aagcaaagaaggaaaagaa

SEQ ID NO: 2406098 - RNA, 19 nt, Homo sapiens
  misc_RNA (1)...(19): siRNA sense strand
gaaagacgacacagggaga

SEQ ID NO: 2406099 - RNA, 19 nt, Homo sapiens
  misc_RNA (1)...(19): siRNA sense strand
gugcauuuccauauggcaa

SEQ ID NO: 2406100 - RNA, 19 nt, Homo sapiens
  misc_RNA (1)...(19): siRNA sense strand
agaagaacgacauagagaa

SEQ ID NO: 2406101 - RNA, 19 nt, Homo sapiens
  misc_RNA (1)...(19): siRNA sense strand
aagaagaacgacauagaga

SEQ ID NO: 2406102 - RNA, 19 nt, Homo sapiens
  misc_RNA (1)...(19): siRNA sense strand
agaaagaggaaaccagaca

SEQ ID NO: 2406103 - RNA, 19 nt, Homo sapiens
  misc_RNA (1)...(19): siRNA sense strand
aagauaaaccauggcguaa

SEQ ID NO: 2406104 - RNA, 19 nt, Homo sapiens
  misc_RNA (1)...(19): siRNA sense strand
agaccgaagaugauaguga

SEQ ID NO: 2406105 - RNA, 19 nt, Homo sapiens
  misc_RNA (1)...(19): siRNA sense strand
gaagaaaaugccagugcua

SEQ ID NO: 2406106 - RNA, 19 nt, Homo sapiens
  misc_RNA (1)...(19): siRNA sense strand
agaaaaugccagugcuaau

SEQ ID NO: 2406107 - RNA, 19 nt, Homo sapiens
  misc_RNA (1)...(19): siRNA sense strand
aacuggaaacucagagaaa

SEQ ID NO: 2406108 - RNA, 19 nt, Homo sapiens
  misc_RNA (1)...(19): siRNA sense strand
ugaaagugaagaaggagau

SEQ ID NO: 2406109 - RNA, 19 nt, Homo sapiens
  misc_RNA (1)...(19): siRNA sense strand
agauaaaccauggcguaaa

SEQ ID NO: 2406110 - RNA, 19 nt, Homo sapiens
  misc_RNA (1)...(19): siRNA sense strand
aaacaaaagaggauacgaa

SEQ ID NO: 2406111 - RNA, 19 nt, Homo sapiens
  misc_RNA (1)...(19): siRNA sense strand
aacaauagaaaguggacau

SEQ ID NO: 2406112 - RNA, 19 nt, Homo sapiens
  misc_RNA (1)...(19): siRNA sense strand
ggagaaagaggaaaccaga

SEQ ID NO: 2406113 - RNA, 19 nt, Homo sapiens
  misc_RNA (1)...(19): siRNA sense strand
cagaagagagaaagaccga

SEQ ID NO: 2406114 - RNA, 19 nt, Homo sapiens
  misc_RNA (1)...(19): siRNA sense strand
guaugggaguuaugguaca

SEQ ID NO: 2406115 - RNA, 19 nt, Homo sapiens
  misc_RNA (1)...(19): siRNA sense strand
cugaaguagacaacaauuu

SEQ ID NO: 2406116 - RNA, 19 nt, Homo sapiens
  misc_RNA (1)...(19): siRNA sense strand
agaacgcaccagagagaga

SEQ ID NO: 2406117 - RNA, 19 nt, Homo sapiens
  misc_RNA (1)...(19): siRNA sense strand
augaaagugaagaaggaga

SEQ ID NO: 2406118 - RNA, 19 nt, Homo sapiens
  misc_RNA (1)...(19): siRNA sense strand
aaaugaaguugaaaggcca

SEQ ID NO: 2406119 - RNA, 19 nt, Homo sapiens
  misc_RNA (1)...(19): siRNA sense strand
ucacuauaggagacauuaa

SEQ ID NO: 2406120 - RNA, 19 nt, Homo sapiens
  misc_RNA (1)...(19): siRNA sense strand
acagagacagagagcgaga

SEQ ID NO: 2406121 - RNA, 19 nt, Homo sapiens
  misc_RNA (1)...(19): siRNA sense strand
ggagauagucacaggagac

SEQ ID NO: 2406122 - RNA, 19 nt, Homo sapiens
  misc_RNA (1)...(19): siRNA sense strand
uauuaugccagaagagaga

SEQ ID NO: 2406123 - RNA, 19 nt, Homo sapiens
  misc_RNA (1)...(19): siRNA sense strand
ugaucgggacagagaaaga

SEQ ID NO: 2406124 - RNA, 19 nt, Homo sapiens
  misc_RNA (1)...(19): siRNA sense strand
caguaugggaguuauggua

SEQ ID NO: 2406125 - RNA, 19 nt, Homo sapiens
  misc_RNA (1)...(19): siRNA sense strand
ggacagagaaagagaacgc

SEQ ID NO: 2406126 - RNA, 19 nt, Homo sapiens
  misc_RNA (1)...(19): siRNA sense strand
ucgccaugaaagugaagaa

SEQ ID NO: 2406127 - RNA, 19 nt, Homo sapiens
  misc_RNA (1)...(19): siRNA sense strand
guaccaaaaccgaaaguga

SEQ ID NO: 2406128 - RNA, 19 nt, Homo sapiens
  misc_RNA (1)...(19): siRNA sense strand
caauugauguuaucgguca

SEQ ID NO: 2406129 - RNA, 19 nt, Homo sapiens
  misc_RNA (1)...(19): siRNA sense strand
gaacuaagauuauugggaa

SEQ ID NO: 2406130 - RNA, 19 nt, Homo sapiens
  misc_RNA (1)...(19): siRNA sense strand
aggucaggaacuaagauua

SEQ ID NO: 2406131 - RNA, 19 nt, Homo sapiens
  misc_RNA (1)...(19): siRNA sense strand
aggaaaaguuaaugacagu

SEQ ID NO: 2406132 - RNA, 19 nt, Homo sapiens
  misc_RNA (1)...(19): siRNA sense strand
ccgaugaggugcacgccau

SEQ ID NO: 2406133 - RNA, 19 nt, Homo sapiens
  misc_RNA (1)...(19): siRNA sense strand
ggaacuaagauuauuggga

SEQ ID NO: 2406134 - RNA, 19 nt, Homo sapiens
  misc_RNA (1)...(19): siRNA sense strand
ucucucaauuucuggauau

SEQ ID NO: 2406135 - RNA, 19 nt, Homo sapiens
  misc_RNA (1)...(19): siRNA sense strand
ucacguugauugauggcau

SEQ ID NO: 2406136 - RNA, 19 nt, Homo sapiens
  misc_RNA (1)...(19): siRNA sense strand
acuuaaucuucaugggaaa

SEQ ID NO: 2406137 - RNA, 19 nt, Homo sapiens
  misc_RNA (1)...(19): siRNA sense strand
cgaaaagacgagaaagcaa

SEQ ID NO: 2406138 - RNA, 19 nt, Homo sapiens
  misc_RNA (1)...(19): siRNA sense strand
agaaagcaaugaauggcaa

SEQ ID NO: 2406139 - RNA, 19 nt, Homo sapiens
  misc_RNA (1)...(19): siRNA sense strand
cgaacaacacacuggugaa

SEQ ID NO: 2406140 - RNA, 19 nt, Homo sapiens
  misc_RNA (1)...(19): siRNA sense strand
gagccaggggcguggaaaa

SEQ ID NO: 2406141 - RNA, 19 nt, Homo sapiens
  misc_RNA (1)...(19): siRNA sense strand
ccuuuaaagacgucagcuu

SEQ ID NO: 2406142 - RNA, 19 nt, Homo sapiens
  misc_RNA (1)...(19): siRNA sense strand
gugugaagggccugggcau

SEQ ID NO: 2406143 - RNA, 19 nt, Homo sapiens
  misc_RNA (1)...(19): siRNA sense strand
cagcuuuagucuagcaagu

SEQ ID NO: 2406144 - RNA, 19 nt, Homo sapiens
  misc_RNA (1)...(19): siRNA sense strand
ccuucgacuugccaggaaa

SEQ ID NO: 2406145 - RNA, 19 nt, Homo sapiens
  misc_RNA (1)...(19): siRNA sense strand
gacuuaaucuucaugggaa

SEQ ID NO: 2406146 - RNA, 19 nt, Homo sapiens
  misc_RNA (1)...(19): siRNA sense strand
cgccauggacagacaaaca

SEQ ID NO: 2406147 - RNA, 19 nt, Homo sapiens
  misc_RNA (1)...(19): siRNA sense strand
gagcuggugagguggccaa

SEQ ID NO: 2406148 - RNA, 19 nt, Homo sapiens
  misc_RNA (1)...(19): siRNA sense strand
ucauuguggccuugauauu

SEQ ID NO: 2406149 - RNA, 19 nt, Homo sapiens
  misc_RNA (1)...(19): siRNA sense strand
ggaagaaggcauugugggu

SEQ ID NO: 2406150 - RNA, 19 nt, Homo sapiens
  misc_RNA (1)...(19): siRNA sense strand
guauaguggucaaagccau

SEQ ID NO: 2406151 - RNA, 19 nt, Homo sapiens
  misc_RNA (1)...(19): siRNA sense strand
aagaaggcauugugggugu

SEQ ID NO: 2406152 - RNA, 19 nt, Homo sapiens
  misc_RNA (1)...(19): siRNA sense strand
cucacgaagcccagaacua

SEQ ID NO: 2406153 - RNA, 19 nt, Homo sapiens
  misc_RNA (1)...(19): siRNA sense strand
caacagaagcaguggcuca

SEQ ID NO: 2406154 - RNA, 19 nt, Homo sapiens
  misc_RNA (1)...(19): siRNA sense strand
gcugauagacuuugaggga

SEQ ID NO: 2406155 - RNA, 19 nt, Homo sapiens
  misc_RNA (1)...(19): siRNA sense strand
gguacaaacgagaaagaac

SEQ ID NO: 2406156 - RNA, 19 nt, Homo sapiens
  misc_RNA (1)...(19): siRNA sense strand
gugugguacaaacgagaaa

SEQ ID NO: 2406157 - RNA, 19 nt, Homo sapiens
  misc_RNA (1)...(19): siRNA sense strand
ggaguauauuagugcucau

SEQ ID NO: 2406158 - RNA, 19 nt, Homo sapiens
  misc_RNA (1)...(19): siRNA sense strand
auaaaguguugguagcaga

SEQ ID NO: 2406159 - RNA, 19 nt, Homo sapiens
  misc_RNA (1)...(19): siRNA sense strand
ccaucaugacaaaguauau

SEQ ID NO: 2406160 - RNA, 19 nt, Homo sapiens
  misc_RNA (1)...(19): siRNA sense strand
gagaagacagauaggcacu

SEQ ID NO: 2406161 - RNA, 19 nt, Homo sapiens
  misc_RNA (1)...(19): siRNA sense strand
ucuuuaaguacguggaguu

SEQ ID NO: 2406162 - RNA, 19 nt, Homo sapiens
  misc_RNA (1)...(19): siRNA sense strand
gauuaugcugagagaaugu

SEQ ID NO: 2406163 - RNA, 19 nt, Homo sapiens
  misc_RNA (1)...(19): siRNA sense strand
gugguacaaacgagaaaga

SEQ ID NO: 2406164 - RNA, 19 nt, Homo sapiens
  misc_RNA (1)...(19): siRNA sense strand
ugauuaaacagauccgaga

SEQ ID NO: 2406165 - RNA, 19 nt, Homo sapiens
  misc_RNA (1)...(19): siRNA sense strand
cugugggcauggagcgaaa

SEQ ID NO: 2406166 - RNA, 19 nt, Homo sapiens
  misc_RNA (1)...(19): siRNA sense strand
cugaagagcaagugggaug

SEQ ID NO: 2406167 - RNA, 19 nt, Homo sapiens
  misc_RNA (1)...(19): siRNA sense strand
gagaauaucugcuugcuca

SEQ ID NO: 2406168 - RNA, 19 nt, Homo sapiens
  misc_RNA (1)...(19): siRNA sense strand
ucucagacaucgaggcagu

SEQ ID NO: 2406169 - RNA, 19 nt, Homo sapiens
  misc_RNA (1)...(19): siRNA sense strand
guggauaugaugucaggau

SEQ ID NO: 2406170 - RNA, 19 nt, Homo sapiens
  misc_RNA (1)...(19): siRNA sense strand
uuauaaagggaguuggaaa

SEQ ID NO: 2406171 - RNA, 19 nt, Homo sapiens
  misc_RNA (1)...(19): siRNA sense strand
agucaugcucuguggauua

SEQ ID NO: 2406172 - RNA, 19 nt, Homo sapiens
  misc_RNA (1)...(19): siRNA sense strand
uggauuuggcuuuggauaa

SEQ ID NO: 2406173 - RNA, 19 nt, Homo sapiens
  misc_RNA (1)...(19): siRNA sense strand
ccaagaauucugaggcgua

SEQ ID NO: 2406174 - RNA, 19 nt, Homo sapiens
  misc_RNA (1)...(19): siRNA sense strand
guauauugguugagguaac

SEQ ID NO: 2406175 - RNA, 19 nt, Homo sapiens
  misc_RNA (1)...(19): siRNA sense strand
ugcaaauauuccagagauu

SEQ ID NO: 2406176 - RNA, 19 nt, Homo sapiens
  misc_RNA (1)...(19): siRNA sense strand
uguaauaaccucagaacca

SEQ ID NO: 2406177 - RNA, 19 nt, Homo sapiens
  misc_RNA (1)...(19): siRNA sense strand
uuggaaagagagaggaaau

SEQ ID NO: 2406178 - RNA, 19 nt, Homo sapiens
  misc_RNA (1)...(19): siRNA sense strand
agauagaagcaaacgucaa

SEQ ID NO: 2406179 - RNA, 19 nt, Homo sapiens
  misc_RNA (1)...(19): siRNA sense strand
ugaugaaguuauggguaaa

SEQ ID NO: 2406180 - RNA, 19 nt, Homo sapiens
  misc_RNA (1)...(19): siRNA sense strand
caguguauucuuugugaaa

SEQ ID NO: 2406181 - RNA, 19 nt, Homo sapiens
  misc_RNA (1)...(19): siRNA sense strand
ucauugaguaucagagcaa

SEQ ID NO: 2406182 - RNA, 19 nt, Homo sapiens
  misc_RNA (1)...(19): siRNA sense strand
acaauuacagacagugaaa

SEQ ID NO: 2406183 - RNA, 19 nt, Homo sapiens
  misc_RNA (1)...(19): siRNA sense strand
uggaaagacuauaacacau

SEQ ID NO: 2406184 - RNA, 19 nt, Homo sapiens
  misc_RNA (1)...(19): siRNA sense strand
aguuggaaagagagaggaa

SEQ ID NO: 2406185 - RNA, 19 nt, Homo sapiens
  misc_RNA (1)...(19): siRNA sense strand
ugguauauugguugaggua

SEQ ID NO: 2406186 - RNA, 19 nt, Homo sapiens
  misc_RNA (1)...(19): siRNA sense strand
gagaauuuggaaagacuau

SEQ ID NO: 2406187 - RNA, 19 nt, Homo sapiens
  misc_RNA (1)...(19): siRNA sense strand
ugauauacaggauggaaca

SEQ ID NO: 2406188 - RNA, 19 nt, Homo sapiens
  misc_RNA (1)...(19): siRNA sense strand
gcucuguggauuacugaaa

SEQ ID NO: 2406189 - RNA, 19 nt, Homo sapiens
  misc_RNA (1)...(19): siRNA sense strand
gcaacaaaggcuauggagu

SEQ ID NO: 2406190 - RNA, 19 nt, Homo sapiens
  misc_RNA (1)...(19): siRNA sense strand
uuguuauaguggagauaca

SEQ ID NO: 2406191 - RNA, 19 nt, Homo sapiens
  misc_RNA (1)...(19): siRNA sense strand
gcgacgaagugcugcagga

SEQ ID NO: 2406192 - RNA, 19 nt, Homo sapiens
  misc_RNA (1)...(19): siRNA sense strand
gcuguugaaugcuggaaaa

SEQ ID NO: 2406193 - RNA, 19 nt, Homo sapiens
  misc_RNA (1)...(19): siRNA sense strand
ugacaauuacagacaguga

SEQ ID NO: 2406194 - RNA, 19 nt, Homo sapiens
  misc_RNA (1)...(19): siRNA sense strand
guugaaagacaaauggcuu

SEQ ID NO: 2406195 - RNA, 19 nt, Homo sapiens
  misc_RNA (1)...(19): siRNA sense strand
gagacugggaugaugaaga

SEQ ID NO: 2406196 - RNA, 19 nt, Homo sapiens
  misc_RNA (1)...(19): siRNA sense strand
aggcagaagaugcugauga

SEQ ID NO: 2406197 - RNA, 19 nt, Homo sapiens
  misc_RNA (1)...(19): siRNA sense strand
ggauaucagaauagucaca

SEQ ID NO: 2406198 - RNA, 19 nt, Homo sapiens
  misc_RNA (1)...(19): siRNA sense strand
aagacuaaucccaguguau

SEQ ID NO: 2406199 - RNA, 19 nt, Homo sapiens
  misc_RNA (1)...(19): siRNA sense strand
ccucagaaccaguaacagu

SEQ ID NO: 2406200 - RNA, 19 nt, Homo sapiens
  misc_RNA (1)...(19): siRNA sense strand
aaacaaacgugucgagcuc

SEQ ID NO: 2406201 - RNA, 19 nt, Homo sapiens
  misc_RNA (1)...(19): siRNA sense strand
aagagaauuuggaaagacu

SEQ ID NO: 2406202 - RNA, 19 nt, Homo sapiens
  misc_RNA (1)...(19): siRNA sense strand
cagcauggugauuuggauu

SEQ ID NO: 2406203 - RNA, 19 nt, Homo sapiens
  misc_RNA (1)...(19): siRNA sense strand
acuguauccuggaagcaua

SEQ ID NO: 2406204 - RNA, 19 nt, Homo sapiens
  misc_RNA (1)...(19): siRNA sense strand
ugccagugccugaggauga

SEQ ID NO: 2406205 - RNA, 19 nt, Homo sapiens
  misc_RNA (1)...(19): siRNA sense strand
uggaaagagagaggaaauu

SEQ ID NO: 2406206 - RNA, 19 nt, Homo sapiens
  misc_RNA (1)...(19): siRNA sense strand
gugauuuggauuuggcuuu

SEQ ID NO: 2406207 - RNA, 19 nt, Homo sapiens
  misc_RNA (1)...(19): siRNA sense strand
gcugaugaaguuaugggua

SEQ ID NO: 2406208 - RNA, 19 nt, Homo sapiens
  misc_RNA (1)...(19): siRNA sense strand
guggagauacaguaauaau

SEQ ID NO: 2406209 - RNA, 19 nt, Homo sapiens
  misc_RNA (1)...(19): siRNA sense strand
cugacaaugugaaacuaau

SEQ ID NO: 2406210 - RNA, 19 nt, Homo sapiens
  misc_RNA (1)...(19): siRNA sense strand
cccaaauugaagaugacua

SEQ ID NO: 2406211 - RNA, 19 nt, Homo sapiens
  misc_RNA (1)...(19): siRNA sense strand
ucacaugacucuagaaaac

SEQ ID NO: 2406212 - RNA, 19 nt, Homo sapiens
  misc_RNA (1)...(19): siRNA sense strand
aauucugaggcguaggaaa

SEQ ID NO: 2406213 - RNA, 19 nt, Homo sapiens
  misc_RNA (1)...(19): siRNA sense strand
ggacuguaaggcagaagau

SEQ ID NO: 2406214 - RNA, 19 nt, Homo sapiens
  misc_RNA (1)...(19): siRNA sense strand
cauuauaaagggaguugga

SEQ ID NO: 2406215 - RNA, 19 nt, Homo sapiens
  misc_RNA (1)...(19): siRNA sense strand
aggaugaagaggaggcgca

SEQ ID NO: 2406216 - RNA, 19 nt, Homo sapiens
  misc_RNA (1)...(19): siRNA sense strand
uauaaagggaguuggaaag

SEQ ID NO: 2406217 - RNA, 19 nt, Homo sapiens
  misc_RNA (1)...(19): siRNA sense strand
ugacaucauuauaaaggga

SEQ ID NO: 2406218 - RNA, 19 nt, Homo sapiens
  misc_RNA (1)...(19): siRNA sense strand
ggaguuaauaugaagguuc

SEQ ID NO: 2406219 - RNA, 19 nt, Homo sapiens
  misc_RNA (1)...(19): siRNA sense strand
cugaaaaugugggaagauu

SEQ ID NO: 2406220 - RNA, 19 nt, Homo sapiens
  misc_RNA (1)...(19): siRNA sense strand
gcuuugacaauuacagaca

SEQ ID NO: 2406221 - RNA, 19 nt, Homo sapiens
  misc_RNA (1)...(19): siRNA sense strand
agaauaucaagcugcaaau

SEQ ID NO: 2406222 - RNA, 19 nt, Homo sapiens
  misc_RNA (1)...(19): siRNA sense strand
cgggaaaauacaagaagaa

SEQ ID NO: 2406223 - RNA, 19 nt, Homo sapiens
  misc_RNA (1)...(19): siRNA sense strand
gcuuaaagaucuugcagcu

SEQ ID NO: 2406224 - RNA, 19 nt, Homo sapiens
  misc_RNA (1)...(19): siRNA sense strand
caaagaagguaaagggagc

SEQ ID NO: 2406225 - RNA, 19 nt, Homo sapiens
  misc_RNA (1)...(19): siRNA sense strand
ccaagaaagccaaggcgga

SEQ ID NO: 2406226 - RNA, 19 nt, Homo sapiens
  misc_RNA (1)...(19): siRNA sense strand
gguuccagccagagagcau

SEQ ID NO: 2406227 - RNA, 19 nt, Homo sapiens
  misc_RNA (1)...(19): siRNA sense strand
gugaagaacaccaagagga

SEQ ID NO: 2406228 - RNA, 19 nt, Homo sapiens
  misc_RNA (1)...(19): siRNA sense strand
gcacgcuaucgaagagcaa

SEQ ID NO: 2406229 - RNA, 19 nt, Homo sapiens
  misc_RNA (1)...(19): siRNA sense strand
gggaaaauacaagaagaaa

SEQ ID NO: 2406230 - RNA, 19 nt, Homo sapiens
  misc_RNA (1)...(19): siRNA sense strand
cgagagagucggagucgga

SEQ ID NO: 2406231 - RNA, 19 nt, Homo sapiens
  misc_RNA (1)...(19): siRNA sense strand
gagcagagcuacucgaggu

SEQ ID NO: 2406232 - RNA, 19 nt, Homo sapiens
  misc_RNA (1)...(19): siRNA sense strand
gggcugugagcaagaggaa

SEQ ID NO: 2406233 - RNA, 19 nt, Homo sapiens
  misc_RNA (1)...(19): siRNA sense strand
cgaaaagaaagcacagcua

SEQ ID NO: 2406234 - RNA, 19 nt, Homo sapiens
  misc_RNA (1)...(19): siRNA sense strand
auacaaagacaaaaggaga

SEQ ID NO: 2406235 - RNA, 19 nt, Homo sapiens
  misc_RNA (1)...(19): siRNA sense strand
caaagggacuuguggcugu

SEQ ID NO: 2406236 - RNA, 19 nt, Homo sapiens
  misc_RNA (1)...(19): siRNA sense strand
gacuuguggcuguggagaa

SEQ ID NO: 2406237 - RNA, 19 nt, Homo sapiens
  misc_RNA (1)...(19): siRNA sense strand
uguaaaaguugguguccga

SEQ ID NO: 2406238 - RNA, 19 nt, Homo sapiens
  misc_RNA (1)...(19): siRNA sense strand
uaggaacagaaauggacua

SEQ ID NO: 2406239 - RNA, 19 nt, Homo sapiens
  misc_RNA (1)...(19): siRNA sense strand
ugaaugagcuggaaggaga

SEQ ID NO: 2406240 - RNA, 19 nt, Homo sapiens
  misc_RNA (1)...(19): siRNA sense strand
gaauaaaagaggaagaaga

SEQ ID NO: 2406241 - RNA, 19 nt, Homo sapiens
  misc_RNA (1)...(19): siRNA sense strand
gcucuaagaaagugggcuu

SEQ ID NO: 2406242 - RNA, 19 nt, Homo sapiens
  misc_RNA (1)...(19): siRNA sense strand
ucaaagauguacagaggca

SEQ ID NO: 2406243 - RNA, 19 nt, Homo sapiens
  misc_RNA (1)...(19): siRNA sense strand
acagaagaugcuagaacaa

SEQ ID NO: 2406244 - RNA, 19 nt, Homo sapiens
  misc_RNA (1)...(19): siRNA sense strand
gaugaaagccgguugggau

SEQ ID NO: 2406245 - RNA, 19 nt, Homo sapiens
  misc_RNA (1)...(19): siRNA sense strand
ggucuaggacugaugggaa

SEQ ID NO: 2406246 - RNA, 19 nt, Homo sapiens
  misc_RNA (1)...(19): siRNA sense strand
gucuaggacugaugggaau

SEQ ID NO: 2406247 - RNA, 19 nt, Homo sapiens
  misc_RNA (1)...(19): siRNA sense strand
agcuaaucaccaagaaaua

SEQ ID NO: 2406248 - RNA, 19 nt, Homo sapiens
  misc_RNA (1)...(19): siRNA sense strand
aggaucaaguggacagaga

SEQ ID NO: 2406249 - RNA, 19 nt, Homo sapiens
  misc_RNA (1)...(19): siRNA sense strand
aauacaagcagcaggccaa

SEQ ID NO: 2406250 - RNA, 19 nt, Homo sapiens
  misc_RNA (1)...(19): siRNA sense strand
cugaagaggcuguuuaaaa

SEQ ID NO: 2406251 - RNA, 19 nt, Homo sapiens
  misc_RNA (1)...(19): siRNA sense strand
ggagagagcuaacacgcau

SEQ ID NO: 2406252 - RNA, 19 nt, Homo sapiens
  misc_RNA (1)...(19): siRNA sense strand
ggcaaggacuggaagcuga

SEQ ID NO: 2406253 - RNA, 19 nt, Homo sapiens
  misc_RNA (1)...(19): siRNA sense strand
ugaacaaagagcuggagau

SEQ ID NO: 2406254 - RNA, 19 nt, Homo sapiens
  misc_RNA (1)...(19): siRNA sense strand
caaaggaggaaaugagaac

SEQ ID NO: 2406255 - RNA, 19 nt, Homo sapiens
  misc_RNA (1)...(19): siRNA sense strand
acuaaaucuagaagcacua

SEQ ID NO: 2406256 - RNA, 19 nt, Homo sapiens
  misc_RNA (1)...(19): siRNA sense strand
aguaugcaguucugggcaa

SEQ ID NO: 2406257 - RNA, 19 nt, Homo sapiens
  misc_RNA (1)...(19): siRNA sense strand
gggcaaauccaauguucca

SEQ ID NO: 2406258 - RNA, 19 nt, Homo sapiens
  misc_RNA (1)...(19): siRNA sense strand
ggcagaagauuuaagcuca

SEQ ID NO: 2406259 - RNA, 19 nt, Homo sapiens
  misc_RNA (1)...(19): siRNA sense strand
ccaagaaauacaagcagca

SEQ ID NO: 2406260 - RNA, 19 nt, Homo sapiens
  misc_RNA (1)...(19): siRNA sense strand
cuuccaucuuccagaaauu

SEQ ID NO: 2406261 - RNA, 19 nt, Homo sapiens
  misc_RNA (1)...(19): siRNA sense strand
ccuucaaagaacagcuauu

SEQ ID NO: 2406262 - RNA, 19 nt, Homo sapiens
  misc_RNA (1)...(19): siRNA sense strand
gcuuggauucaguggguca

SEQ ID NO: 2406263 - RNA, 19 nt, Homo sapiens
  misc_RNA (1)...(19): siRNA sense strand
cugucuggagugagugaaa

SEQ ID NO: 2406264 - RNA, 19 nt, Homo sapiens
  misc_RNA (1)...(19): siRNA sense strand
gagaugaacaaaaggauga

SEQ ID NO: 2406265 - RNA, 19 nt, Homo sapiens
  misc_RNA (1)...(19): siRNA sense strand
acaaaggaggaaaugagaa

SEQ ID NO: 2406266 - RNA, 19 nt, Homo sapiens
  misc_RNA (1)...(19): siRNA sense strand
ccuuugaacaggaggccuu

SEQ ID NO: 2406267 - RNA, 19 nt, Homo sapiens
  misc_RNA (1)...(19): siRNA sense strand
cgggaaucacgaagaagau

SEQ ID NO: 2406268 - RNA, 19 nt, Homo sapiens
  misc_RNA (1)...(19): siRNA sense strand
aacaaaaggaugaggauca

SEQ ID NO: 2406269 - RNA, 19 nt, Homo sapiens
  misc_RNA (1)...(19): siRNA sense strand
aagaacagcuauugcagga

SEQ ID NO: 2406270 - RNA, 19 nt, Homo sapiens
  misc_RNA (1)...(19): siRNA sense strand
gcagggaaugagucagcua

SEQ ID NO: 2406271 - RNA, 19 nt, Homo sapiens
  misc_RNA (1)...(19): siRNA sense strand
gggaauaaaagaggaagaa

SEQ ID NO: 2406272 - RNA, 19 nt, Homo sapiens
  misc_RNA (1)...(19): siRNA sense strand
agagucagcccgaggccaa

SEQ ID NO: 2406273 - RNA, 19 nt, Homo sapiens
  misc_RNA (1)...(19): siRNA sense strand
ccacagaagaugcuagaac

SEQ ID NO: 2406274 - RNA, 19 nt, Homo sapiens
  misc_RNA (1)...(19): siRNA sense strand
ugagcaggccagaguggaa

SEQ ID NO: 2406275 - RNA, 19 nt, Homo sapiens
  misc_RNA (1)...(19): siRNA sense strand
ggaagauuggaaagcucua

SEQ ID NO: 2406276 - RNA, 19 nt, Homo sapiens
  misc_RNA (1)...(19): siRNA sense strand
agcugauguuguugggcua

SEQ ID NO: 2406277 - RNA, 19 nt, Homo sapiens
  misc_RNA (1)...(19): siRNA sense strand
gagggaagggaccgagaga

SEQ ID NO: 2406278 - RNA, 19 nt, Homo sapiens
  misc_RNA (1)...(19): siRNA sense strand
agaagaaagcgcuggccca

SEQ ID NO: 2406279 - RNA, 19 nt, Homo sapiens
  misc_RNA (1)...(19): siRNA sense strand
ccuaaacaacguagugguu

SEQ ID NO: 2406280 - RNA, 19 nt, Homo sapiens
  misc_RNA (1)...(19): siRNA sense strand
gggcagaagauuuaagcuc

SEQ ID NO: 2406281 - RNA, 19 nt, Homo sapiens
  misc_RNA (1)...(19): siRNA sense strand
guauucugguagaugguau

SEQ ID NO: 2406282 - RNA, 19 nt, Homo sapiens
  misc_RNA (1)...(19): siRNA sense strand
aggcuuaccaccugaauca

SEQ ID NO: 2406283 - RNA, 19 nt, Homo sapiens
  misc_RNA (1)...(19): siRNA sense strand
uggucaaaccugaaaacaa

SEQ ID NO: 2406284 - RNA, 19 nt, Homo sapiens
  misc_RNA (1)...(19): siRNA sense strand
agagcagggcagaagauuu

SEQ ID NO: 2406285 - RNA, 19 nt, Homo sapiens
  misc_RNA (1)...(19): siRNA sense strand
guaugaaguccuagaagcu

SEQ ID NO: 2406286 - RNA, 19 nt, Homo sapiens
  misc_RNA (1)...(19): siRNA sense strand
guuuggaugucuucgaaaa

SEQ ID NO: 2406287 - RNA, 19 nt, Homo sapiens
  misc_RNA (1)...(19): siRNA sense strand
cuagcuaaucaccaagaaa

SEQ ID NO: 2406288 - RNA, 19 nt, Homo sapiens
  misc_RNA (1)...(19): siRNA sense strand
cuauauaucugucuggagu

SEQ ID NO: 2406289 - RNA, 19 nt, Homo sapiens
  misc_RNA (1)...(19): siRNA sense strand
guaugcaguucugggcaaa

SEQ ID NO: 2406290 - RNA, 19 nt, Homo sapiens
  misc_RNA (1)...(19): siRNA sense strand
cuggaaggagauucugaaa

SEQ ID NO: 2406291 - RNA, 19 nt, Homo sapiens
  misc_RNA (1)...(19): siRNA sense strand
ucaugaugccacagaagau

SEQ ID NO: 2406292 - RNA, 19 nt, Homo sapiens
  misc_RNA (1)...(19): siRNA sense strand
ugggaauaaaagaggaaga

SEQ ID NO: 2406293 - RNA, 19 nt, Homo sapiens
  misc_RNA (1)...(19): siRNA sense strand
gcauauggauggaguggga

SEQ ID NO: 2406294 - RNA, 19 nt, Homo sapiens
  misc_RNA (1)...(19): siRNA sense strand
aauggaaagagaugggcaa

SEQ ID NO: 2406295 - RNA, 19 nt, Homo sapiens
  misc_RNA (1)...(19): siRNA sense strand
accuagaggcaaagacauu

SEQ ID NO: 2406296 - RNA, 19 nt, Homo sapiens
  misc_RNA (1)...(19): siRNA sense strand
ggauggagugggaggaccu

SEQ ID NO: 2406297 - RNA, 19 nt, Homo sapiens
  misc_RNA (1)...(19): siRNA sense strand
agauaggagaccaccagaa

SEQ ID NO: 2406298 - RNA, 19 nt, Homo sapiens
  misc_RNA (1)...(19): siRNA sense strand
guggaaauggaaagagaug

SEQ ID NO: 2406299 - RNA, 19 nt, Homo sapiens
  misc_RNA (1)...(19): siRNA sense strand
gggaaaagugacagugaaa

SEQ ID NO: 2406300 - RNA, 19 nt, Homo sapiens
  misc_RNA (1)...(19): siRNA sense strand
aagaaaugccagagguaga

SEQ ID NO: 2406301 - RNA, 19 nt, Homo sapiens
  misc_RNA (1)...(19): siRNA sense strand
aggaauggaucguggagca

SEQ ID NO: 2406302 - RNA, 19 nt, Homo sapiens
  misc_RNA (1)...(19): siRNA sense strand
aggaagaagaaaugccaga

SEQ ID NO: 2406303 - RNA, 19 nt, Homo sapiens
  misc_RNA (1)...(19): siRNA sense strand
ggcgacaccagcagggaaa

SEQ ID NO: 2406304 - RNA, 19 nt, Homo sapiens
  misc_RNA (1)...(19): siRNA sense strand
gcugcgaggaagaagaaau

SEQ ID NO: 2406305 - RNA, 19 nt, Homo sapiens
  misc_RNA (1)...(19): siRNA sense strand
agugaugaagagagagcuu

SEQ ID NO: 2406306 - RNA, 19 nt, Homo sapiens
  misc_RNA (1)...(19): siRNA sense strand
auaagaggcaugaggaaac

SEQ ID NO: 2406307 - RNA, 19 nt, Homo sapiens
  misc_RNA (1)...(19): siRNA sense strand
ugaugcagacagugaugaa

SEQ ID NO: 2406308 - RNA, 19 nt, Homo sapiens
  misc_RNA (1)...(19): siRNA sense strand
aaaucaaagaugagcaaga

SEQ ID NO: 2406309 - RNA, 19 nt, Homo sapiens
  misc_RNA (1)...(19): siRNA sense strand
gcaaaggcaccuacgggaa

SEQ ID NO: 2406310 - RNA, 19 nt, Homo sapiens
  misc_RNA (1)...(19): siRNA sense strand
agucaauccggaaggacaa

SEQ ID NO: 2406311 - RNA, 19 nt, Homo sapiens
  misc_RNA (1)...(19): siRNA sense strand
gagcaagaucugaugcaca

SEQ ID NO: 2406312 - RNA, 19 nt, Homo sapiens
  misc_RNA (1)...(19): siRNA sense strand
cgacaggcacugagggucu

SEQ ID NO: 2406313 - RNA, 19 nt, Homo sapiens
  misc_RNA (1)...(19): siRNA sense strand
ccuacgggaaggugaagaa

SEQ ID NO: 2406314 - RNA, 19 nt, Homo sapiens
  misc_RNA (1)...(19): siRNA sense strand
ccaugaaguguuugagaac

SEQ ID NO: 2406315 - RNA, 19 nt, Homo sapiens
  misc_RNA (1)...(19): siRNA sense strand
gaacagaguuguccaccga

SEQ ID NO: 2406316 - RNA, 19 nt, Homo sapiens
  misc_RNA (1)...(19): siRNA sense strand
augcacauacggagggaga

SEQ ID NO: 2406317 - RNA, 19 nt, Homo sapiens
  misc_RNA (1)...(19): siRNA sense strand
ucgugaucgucauggagua

SEQ ID NO: 2406318 - RNA, 19 nt, Homo sapiens
  misc_RNA (1)...(19): siRNA sense strand
caaaaucaaagaugagcaa

SEQ ID NO: 2406319 - RNA, 19 nt, Homo sapiens
  misc_RNA (1)...(19): siRNA sense strand
uagugaaacagaucagcaa

SEQ ID NO: 2406320 - RNA, 19 nt, Homo sapiens
  misc_RNA (1)...(19): siRNA sense strand
ccaucaagucaauccggaa

SEQ ID NO: 2406321 - RNA, 19 nt, Homo sapiens
  misc_RNA (1)...(19): siRNA sense strand
cagaagggguacaggagga

SEQ ID NO: 2406322 - RNA, 19 nt, Homo sapiens
  misc_RNA (1)...(19): siRNA sense strand
aagucaauccggaaggaca

SEQ ID NO: 2406323 - RNA, 19 nt, Homo sapiens
  misc_RNA (1)...(19): siRNA sense strand
aggacaaaaucaaagauga

SEQ ID NO: 2406324 - RNA, 19 nt, Homo sapiens
  misc_RNA (1)...(19): siRNA sense strand
uggcggaagggcugaucaa

SEQ ID NO: 2406325 - RNA, 19 nt, Homo sapiens
  misc_RNA (1)...(19): siRNA sense strand
uccucaaacucaauggcaa

SEQ ID NO: 2406326 - RNA, 19 nt, Homo sapiens
  misc_RNA (1)...(19): siRNA sense strand
aggcauuucuuccggcaga

SEQ ID NO: 2406327 - RNA, 19 nt, Homo sapiens
  misc_RNA (1)...(19): siRNA sense strand
aagaagucccgcaaggaga

SEQ ID NO: 2406328 - RNA, 19 nt, Homo sapiens
  misc_RNA (1)...(19): siRNA sense strand
uuugagaacagcagcaaga

SEQ ID NO: 2406329 - RNA, 19 nt, Homo sapiens
  misc_RNA (1)...(19): siRNA sense strand
aggcggaggcagagagaau

SEQ ID NO: 2406330 - RNA, 19 nt, Homo sapiens
  misc_RNA (1)...(19): siRNA sense strand
cguuaauugugguuguaaa

SEQ ID NO: 2406331 - RNA, 19 nt, Homo sapiens
  misc_RNA (1)...(19): siRNA sense strand
ggaaauaaucacugggucu

SEQ ID NO: 2406332 - RNA, 19 nt, Homo sapiens
  misc_RNA (1)...(19): siRNA sense strand
cguuaauggucucugggua

SEQ ID NO: 2406333 - RNA, 19 nt, Homo sapiens
  misc_RNA (1)...(19): siRNA sense strand
cauaggaaucugacaggaa

SEQ ID NO: 2406334 - RNA, 19 nt, Homo sapiens
  misc_RNA (1)...(19): siRNA sense strand
ugguuauugucaagacuua

SEQ ID NO: 2406335 - RNA, 19 nt, Homo sapiens
  misc_RNA (1)...(19): siRNA sense strand
agggagaauuccacgaaga

SEQ ID NO: 2406336 - RNA, 19 nt, Homo sapiens
  misc_RNA (1)...(19): siRNA sense strand
uaaucuuagcacugggaua

SEQ ID NO: 2406337 - RNA, 19 nt, Homo sapiens
  misc_RNA (1)...(19): siRNA sense strand
cugcagaagcuguccaaga

SEQ ID NO: 2406338 - RNA, 19 nt, Homo sapiens
  misc_RNA (1)...(19): siRNA sense strand
cuguguuaauagugguaau

SEQ ID NO: 2406339 - RNA, 19 nt, Homo sapiens
  misc_RNA (1)...(19): siRNA sense strand
ccauaaaauacaaggagga

SEQ ID NO: 2406340 - RNA, 19 nt, Homo sapiens
  misc_RNA (1)...(19): siRNA sense strand
uuggaaaggaugucagaga

SEQ ID NO: 2406341 - RNA, 19 nt, Homo sapiens
  misc_RNA (1)...(19): siRNA sense strand
cugucaggaucuuaagcaa

SEQ ID NO: 2406342 - RNA, 19 nt, Homo sapiens
  misc_RNA (1)...(19): siRNA sense strand
gcggaggcagagagaauuu

SEQ ID NO: 2406343 - RNA, 19 nt, Homo sapiens
  misc_RNA (1)...(19): siRNA sense strand
cgaaggacucgggaggaaa

SEQ ID NO: 2406344 - RNA, 19 nt, Homo sapiens
  misc_RNA (1)...(19): siRNA sense strand
acagugaacaagcggacaa

SEQ ID NO: 2406345 - RNA, 19 nt, Homo sapiens
  misc_RNA (1)...(19): siRNA sense strand
ccguagaagaugaggagag

SEQ ID NO: 2406346 - RNA, 19 nt, Homo sapiens
  misc_RNA (1)...(19): siRNA sense strand
cuucgaugggauuuggaaa

SEQ ID NO: 2406347 - RNA, 19 nt, Homo sapiens
  misc_RNA (1)...(19): siRNA sense strand
aaacuuggugccagagaau

SEQ ID NO: 2406348 - RNA, 19 nt, Homo sapiens
  misc_RNA (1)...(19): siRNA sense strand
ccuauuuauuguuggaugu

SEQ ID NO: 2406349 - RNA, 19 nt, Homo sapiens
  misc_RNA (1)...(19): siRNA sense strand
auugaaacuuggugccaga

SEQ ID NO: 2406350 - RNA, 19 nt, Homo sapiens
  misc_RNA (1)...(19): siRNA sense strand
aaaggaugucagagaccua

SEQ ID NO: 2406351 - RNA, 19 nt, Homo sapiens
  misc_RNA (1)...(19): siRNA sense strand
ggacgaaggcacuggacug

SEQ ID NO: 2406352 - RNA, 19 nt, Homo sapiens
  misc_RNA (1)...(19): siRNA sense strand
ugagugagagagugggaca

SEQ ID NO: 2406353 - RNA, 19 nt, Homo sapiens
  misc_RNA (1)...(19): siRNA sense strand
cuguggaucagauggaauu

SEQ ID NO: 2406354 - RNA, 19 nt, Homo sapiens
  misc_RNA (1)...(19): siRNA sense strand
gcaccgugagugagagagu

SEQ ID NO: 2406355 - RNA, 19 nt, Homo sapiens
  misc_RNA (1)...(19): siRNA sense strand
uggugguguucgucagcua

SEQ ID NO: 2406356 - RNA, 19 nt, Homo sapiens
  misc_RNA (1)...(19): siRNA sense strand
acucagguccguagaagau

SEQ ID NO: 2406357 - RNA, 19 nt, Homo sapiens
  misc_RNA (1)...(19): siRNA sense strand
guaccugagcagcguaauu

SEQ ID NO: 2406358 - RNA, 19 nt, Homo sapiens
  misc_RNA (1)...(19): siRNA sense strand
cugaaggagaaaucaaaca

SEQ ID NO: 2406359 - RNA, 19 nt, Homo sapiens
  misc_RNA (1)...(19): siRNA sense strand
guuaauggucucuggguac

SEQ ID NO: 2406360 - RNA, 19 nt, Homo sapiens
  misc_RNA (1)...(19): siRNA sense strand
ggguaccugagcagcguaa

SEQ ID NO: 2406361 - RNA, 19 nt, Homo sapiens
  misc_RNA (1)...(19): siRNA sense strand
aucaaacaacagugaacaa

SEQ ID NO: 2406362 - RNA, 19 nt, Homo sapiens
  misc_RNA (1)...(19): siRNA sense strand
guuggaugugaaagcauua

SEQ ID NO: 2406363 - RNA, 19 nt, Homo sapiens
  misc_RNA (1)...(19): siRNA sense strand
ugguggaccuggugggcua

SEQ ID NO: 2406364 - RNA, 19 nt, Homo sapiens
  misc_RNA (1)...(19): siRNA sense strand
ggagggaggaugagccgaa

SEQ ID NO: 2406365 - RNA, 19 nt, Homo sapiens
  misc_RNA (1)...(19): siRNA sense strand
agccgaagacugagagaca

SEQ ID NO: 2406366 - RNA, 19 nt, Homo sapiens
  misc_RNA (1)...(19): siRNA sense strand
acaauaaccugguggagcu

SEQ ID NO: 2406367 - RNA, 19 nt, Homo sapiens
  misc_RNA (1)...(19): siRNA sense strand
guucauuccuggaggcaag

SEQ ID NO: 2406368 - RNA, 19 nt, Homo sapiens
  misc_RNA (1)...(19): siRNA sense strand
cuguggauaagaagggcua

SEQ ID NO: 2406369 - RNA, 19 nt, Homo sapiens
  misc_RNA (1)...(19): siRNA sense strand
gaagaagcugcucgggaga

SEQ ID NO: 2406370 - RNA, 19 nt, Homo sapiens
  misc_RNA (1)...(19): siRNA sense strand
ggucggacuggcagcagaa

SEQ ID NO: 2406371 - RNA, 19 nt, Homo sapiens
  misc_RNA (1)...(19): siRNA sense strand
agacccaacaagaagaaaa

SEQ ID NO: 2406372 - RNA, 19 nt, Homo sapiens
  misc_RNA (1)...(19): siRNA sense strand
ccuuugaaguagagagaau

SEQ ID NO: 2406373 - RNA, 19 nt, Homo sapiens
  misc_RNA (1)...(19): siRNA sense strand
aggaagagauugaagguga

SEQ ID NO: 2406374 - RNA, 19 nt, Homo sapiens
  misc_RNA (1)...(19): siRNA sense strand
ccacggagccagaggagaa

SEQ ID NO: 2406375 - RNA, 19 nt, Homo sapiens
  misc_RNA (1)...(19): siRNA sense strand
gauugaaggugaagcaaaa

SEQ ID NO: 2406376 - RNA, 19 nt, Homo sapiens
  misc_RNA (1)...(19): siRNA sense strand
cagaaguaguagagaucuu

SEQ ID NO: 2406377 - RNA, 19 nt, Homo sapiens
  misc_RNA (1)...(19): siRNA sense strand
uggaacaguugguggaaaa

SEQ ID NO: 2406378 - RNA, 19 nt, Homo sapiens
  misc_RNA (1)...(19): siRNA sense strand
gggcaauauuagaccauca

SEQ ID NO: 2406379 - RNA, 19 nt, Homo sapiens
  misc_RNA (1)...(19): siRNA sense strand
cugaaugucuccuuggaaa

SEQ ID NO: 2406380 - RNA, 19 nt, Homo sapiens
  misc_RNA (1)...(19): siRNA sense strand
uugcaaaccucauggugaa

SEQ ID NO: 2406381 - RNA, 19 nt, Homo sapiens
  misc_RNA (1)...(19): siRNA sense strand
ggugaaaagucgcaacuaa

SEQ ID NO: 2406382 - RNA, 19 nt, Homo sapiens
  misc_RNA (1)...(19): siRNA sense strand
ggaccuggcagcugagcaa

SEQ ID NO: 2406383 - RNA, 19 nt, Homo sapiens
  misc_RNA (1)...(19): siRNA sense strand
agcaagagcuagugcaaca

SEQ ID NO: 2406384 - RNA, 19 nt, Homo sapiens
  misc_RNA (1)...(19): siRNA sense strand
cuaucagcguuuagguuua

SEQ ID NO: 2406385 - RNA, 19 nt, Homo sapiens
  misc_RNA (1)...(19): siRNA sense strand
ucuaugaggcagagaucaa

SEQ ID NO: 2406386 - RNA, 19 nt, Homo sapiens
  misc_RNA (1)...(19): siRNA sense strand
gugguuuggucgagaauga

SEQ ID NO: 2406387 - RNA, 19 nt, Homo sapiens
  misc_RNA (1)...(19): siRNA sense strand
ggguaaccguggaccuuaa

SEQ ID NO: 2406388 - RNA, 19 nt, Homo sapiens
  misc_RNA (1)...(19): siRNA sense strand
agauugaaggugaagcaaa

SEQ ID NO: 2406389 - RNA, 19 nt, Homo sapiens
  misc_RNA (1)...(19): siRNA sense strand
gauaaagcaugucagggaa

SEQ ID NO: 2406390 - RNA, 19 nt, Homo sapiens
  misc_RNA (1)...(19): siRNA sense strand
ccagaaaguuccacggcca

SEQ ID NO: 2406391 - RNA, 19 nt, Homo sapiens
  misc_RNA (1)...(19): siRNA sense strand
gaagaagaagacagggaca

SEQ ID NO: 2406392 - RNA, 19 nt, Homo sapiens
  misc_RNA (1)...(19): siRNA sense strand
cagcugugggaaaggguaa

SEQ ID NO: 2406393 - RNA, 19 nt, Homo sapiens
  misc_RNA (1)...(19): siRNA sense strand
uggaaagucuaauugcaaa

SEQ ID NO: 2406394 - RNA, 19 nt, Homo sapiens
  misc_RNA (1)...(19): siRNA sense strand
aggagaaggucuggggaaa

SEQ ID NO: 2406395 - RNA, 19 nt, Homo sapiens
  misc_RNA (1)...(19): siRNA sense strand
gagcuaugauacagagagu

SEQ ID NO: 2406396 - RNA, 19 nt, Homo sapiens
  misc_RNA (1)...(19): siRNA sense strand
caucagaaacucagaggca

SEQ ID NO: 2406397 - RNA, 19 nt, Homo sapiens
  misc_RNA (1)...(19): siRNA sense strand
ccacagcuucacaggauaa

SEQ ID NO: 2406398 - RNA, 19 nt, Homo sapiens
  misc_RNA (1)...(19): siRNA sense strand
cucuaaagcccaauguaaa

SEQ ID NO: 2406399 - RNA, 19 nt, Homo sapiens
  misc_RNA (1)...(19): siRNA sense strand
ccuaagaacaucagcgcca

SEQ ID NO: 2406400 - RNA, 19 nt, Homo sapiens
  misc_RNA (1)...(19): siRNA sense strand
ccuuagauuauuugcacaa

SEQ ID NO: 2406401 - RNA, 19 nt, Homo sapiens
  misc_RNA (1)...(19): siRNA sense strand
ugauaaagcaugucaggga

SEQ ID NO: 2406402 - RNA, 19 nt, Homo sapiens
  misc_RNA (1)...(19): siRNA sense strand
uaccaaaacagaaggaaaa

SEQ ID NO: 2406403 - RNA, 19 nt, Homo sapiens
  misc_RNA (1)...(19): siRNA sense strand
ucauauggcauuccagaaa

SEQ ID NO: 2406404 - RNA, 19 nt, Homo sapiens
  misc_RNA (1)...(19): siRNA sense strand
caguauugcaggaagugua

SEQ ID NO: 2406405 - RNA, 19 nt, Homo sapiens
  misc_RNA (1)...(19): siRNA sense strand
cggcaauauuuacugaaga

SEQ ID NO: 2406406 - RNA, 19 nt, Homo sapiens
  misc_RNA (1)...(19): siRNA sense strand
ccuuaaagaagaaccaaga

SEQ ID NO: 2406407 - RNA, 19 nt, Homo sapiens
  misc_RNA (1)...(19): siRNA sense strand
cagccaaggaagacaauca

SEQ ID NO: 2406408 - RNA, 19 nt, Homo sapiens
  misc_RNA (1)...(19): siRNA sense strand
aaacaguauugcaggaagu

SEQ ID NO: 2406409 - RNA, 19 nt, Homo sapiens
  misc_RNA (1)...(19): siRNA sense strand
agaaccagcuacagcagaa

SEQ ID NO: 2406410 - RNA, 19 nt, Homo sapiens
  misc_RNA (1)...(19): siRNA sense strand
ugauacagagaguggguuu

SEQ ID NO: 2406411 - RNA, 19 nt, Homo sapiens
  misc_RNA (1)...(19): siRNA sense strand
cugaagaagaagacaggga

SEQ ID NO: 2406412 - RNA, 19 nt, Homo sapiens
  misc_RNA (1)...(19): siRNA sense strand
ggaacaaagaaggaagaga

SEQ ID NO: 2406413 - RNA, 19 nt, Homo sapiens
  misc_RNA (1)...(19): siRNA sense strand
gagcaagucaacucagcaa

SEQ ID NO: 2406414 - RNA, 19 nt, Homo sapiens
  misc_RNA (1)...(19): siRNA sense strand
ugaaauccggcaagugaaa

SEQ ID NO: 2406415 - RNA, 19 nt, Homo sapiens
  misc_RNA (1)...(19): siRNA sense strand
ccaugaacuuuuagaugua

SEQ ID NO: 2406416 - RNA, 19 nt, Homo sapiens
  misc_RNA (1)...(19): siRNA sense strand
ucaccaaggagaagaagau

SEQ ID NO: 2406417 - RNA, 19 nt, Homo sapiens
  misc_RNA (1)...(19): siRNA sense strand
agaaauacuugcaagccuu

SEQ ID NO: 2406418 - RNA, 19 nt, Homo sapiens
  misc_RNA (1)...(19): siRNA sense strand
ggagaaggucuggggaaaa

SEQ ID NO: 2406419 - RNA, 19 nt, Homo sapiens
  misc_RNA (1)...(19): siRNA sense strand
ccguggaccuuaaagaaga

SEQ ID NO: 2406420 - RNA, 19 nt, Homo sapiens
  misc_RNA (1)...(19): siRNA sense strand
cauuacugcucaugccuaa

SEQ ID NO: 2406421 - RNA, 19 nt, Homo sapiens
  misc_RNA (1)...(19): siRNA sense strand
aaagaaauguguugugcca

SEQ ID NO: 2406422 - RNA, 19 nt, Homo sapiens
  misc_RNA (1)...(19): siRNA sense strand
aaggaaaggcagcaagaca

SEQ ID NO: 2406423 - RNA, 19 nt, Homo sapiens
  misc_RNA (1)...(19): siRNA sense strand
uaucaggagaagacagcaa

SEQ ID NO: 2406424 - RNA, 19 nt, Homo sapiens
  misc_RNA (1)...(19): siRNA sense strand
agaagaagcuacuggaggu

SEQ ID NO: 2406425 - RNA, 19 nt, Homo sapiens
  misc_RNA (1)...(19): siRNA sense strand
accaaggagaagaagauua

SEQ ID NO: 2406426 - RNA, 19 nt, Homo sapiens
  misc_RNA (1)...(19): siRNA sense strand
guccagaaguaguagagau

SEQ ID NO: 2406427 - RNA, 19 nt, Homo sapiens
  misc_RNA (1)...(19): siRNA sense strand
uuaagaaacagcugaugaa

SEQ ID NO: 2406428 - RNA, 19 nt, Homo sapiens
  misc_RNA (1)...(19): siRNA sense strand
ccugcaacuuauaagaauu

SEQ ID NO: 2406429 - RNA, 19 nt, Homo sapiens
  misc_RNA (1)...(19): siRNA sense strand
caguaauacauuuccacaa

SEQ ID NO: 2406430 - RNA, 19 nt, Homo sapiens
  misc_RNA (1)...(19): siRNA sense strand
caucugaagcaaaaggaua

SEQ ID NO: 2406431 - RNA, 19 nt, Homo sapiens
  misc_RNA (1)...(19): siRNA sense strand
ucgagaaagcagaagacuu

SEQ ID NO: 2406432 - RNA, 19 nt, Homo sapiens
  misc_RNA (1)...(19): siRNA sense strand
aagaagaagacagggacaa

SEQ ID NO: 2406433 - RNA, 19 nt, Homo sapiens
  misc_RNA (1)...(19): siRNA sense strand
guuuguuccuguugaauuu

SEQ ID NO: 2406434 - RNA, 19 nt, Homo sapiens
  misc_RNA (1)...(19): siRNA sense strand
agucagaggagcagcuuga

SEQ ID NO: 2406435 - RNA, 19 nt, Homo sapiens
  misc_RNA (1)...(19): siRNA sense strand
ccaaagcacacaagugaca

SEQ ID NO: 2406436 - RNA, 19 nt, Homo sapiens
  misc_RNA (1)...(19): siRNA sense strand
acacaagugacaaggcuuu

SEQ ID NO: 2406437 - RNA, 19 nt, Homo sapiens
  misc_RNA (1)...(19): siRNA sense strand
ccacagaaggacugggaug

SEQ ID NO: 2406438 - RNA, 19 nt, Homo sapiens
  misc_RNA (1)...(19): siRNA sense strand
cugcaaguuuccagagacu

SEQ ID NO: 2406439 - RNA, 19 nt, Homo sapiens
  misc_RNA (1)...(19): siRNA sense strand
ggaucaauguuuauggcau

SEQ ID NO: 2406440 - RNA, 19 nt, Homo sapiens
  misc_RNA (1)...(19): siRNA sense strand
gaucaauguuuauggcaug

SEQ ID NO: 2406441 - RNA, 19 nt, Homo sapiens
  misc_RNA (1)...(19): siRNA sense strand
ggaccugaugaauguacaa

SEQ ID NO: 2406442 - RNA, 19 nt, Homo sapiens
  misc_RNA (1)...(19): siRNA sense strand
caagcaggagacuggcaaa

SEQ ID NO: 2406443 - RNA, 19 nt, Homo sapiens
  misc_RNA (1)...(19): siRNA sense strand
acggcaagggccaggucua

SEQ ID NO: 2406444 - RNA, 19 nt, Homo sapiens
  misc_RNA (1)...(19): siRNA sense strand
augcaaagccagagccuga

SEQ ID NO: 2406445 - RNA, 19 nt, Homo sapiens
  misc_RNA (1)...(19): siRNA sense strand
cggaagaagcccaugcaca

SEQ ID NO: 2406446 - RNA, 19 nt, Homo sapiens
  misc_RNA (1)...(19): siRNA sense strand
cugaagaacaacaugaaaa

SEQ ID NO: 2406447 - RNA, 19 nt, Homo sapiens
  misc_RNA (1)...(19): siRNA sense strand
ucaugaagaacgaggagga

SEQ ID NO: 2406448 - RNA, 19 nt, Homo sapiens
  misc_RNA (1)...(19): siRNA sense strand
ugaaaggggagaaggguga

SEQ ID NO: 2406449 - RNA, 19 nt, Homo sapiens
  misc_RNA (1)...(19): siRNA sense strand
ggaagaagcccaugcacag

SEQ ID NO: 2406450 - RNA, 19 nt, Homo sapiens
  misc_RNA (1)...(19): siRNA sense strand
ccaaagggcagaagggcuc

SEQ ID NO: 2406451 - RNA, 19 nt, Homo sapiens
  misc_RNA (1)...(19): siRNA sense strand
acgaggaggagguggugau

SEQ ID NO: 2406452 - RNA, 19 nt, Homo sapiens
  misc_RNA (1)...(19): siRNA sense strand
ugaagaacgaggaggaggu

SEQ ID NO: 2406453 - RNA, 19 nt, Homo sapiens
  misc_RNA (1)...(19): siRNA sense strand
augcaaagccagagccuga

SEQ ID NO: 2406454 - RNA, 19 nt, Homo sapiens
  misc_RNA (1)...(19): siRNA sense strand
cggaagaagcccaugcaca

SEQ ID NO: 2406455 - RNA, 19 nt, Homo sapiens
  misc_RNA (1)...(19): siRNA sense strand
cugaagaacaacaugaaaa

SEQ ID NO: 2406456 - RNA, 19 nt, Homo sapiens
  misc_RNA (1)...(19): siRNA sense strand
ucaugaagaacgaggagga

SEQ ID NO: 2406457 - RNA, 19 nt, Homo sapiens
  misc_RNA (1)...(19): siRNA sense strand
ugaaaggggagaaggguga

SEQ ID NO: 2406458 - RNA, 19 nt, Homo sapiens
  misc_RNA (1)...(19): siRNA sense strand
ggaagaagcccaugcacag

SEQ ID NO: 2406459 - RNA, 19 nt, Homo sapiens
  misc_RNA (1)...(19): siRNA sense strand
ccaaagggcagaagggcuc

SEQ ID NO: 2406460 - RNA, 19 nt, Homo sapiens
  misc_RNA (1)...(19): siRNA sense strand
acgaggaggagguggugau

SEQ ID NO: 2406461 - RNA, 19 nt, Homo sapiens
  misc_RNA (1)...(19): siRNA sense strand
ugaagaacgaggaggaggu

SEQ ID NO: 2406462 - RNA, 19 nt, Homo sapiens
  misc_RNA (1)...(19): siRNA sense strand
augcaaagccagagccuga

SEQ ID NO: 2406463 - RNA, 19 nt, Homo sapiens
  misc_RNA (1)...(19): siRNA sense strand
cggaagaagcccaugcaca

SEQ ID NO: 2406464 - RNA, 19 nt, Homo sapiens
  misc_RNA (1)...(19): siRNA sense strand
ucaugaagaacgaggagga

SEQ ID NO: 2406465 - RNA, 19 nt, Homo sapiens
  misc_RNA (1)...(19): siRNA sense strand
ugaaaggggagaaggguga

SEQ ID NO: 2406466 - RNA, 19 nt, Homo sapiens
  misc_RNA (1)...(19): siRNA sense strand
ggaagaagcccaugcacag

SEQ ID NO: 2406467 - RNA, 19 nt, Homo sapiens
  misc_RNA (1)...(19): siRNA sense strand
ccaaagggcagaagggcuc

SEQ ID NO: 2406468 - RNA, 19 nt, Homo sapiens
  misc_RNA (1)...(19): siRNA sense strand
acgaggaggagguggugau

SEQ ID NO: 2406469 - RNA, 19 nt, Homo sapiens
  misc_RNA (1)...(19): siRNA sense strand
ugaagaacgaggaggaggu

SEQ ID NO: 2406470 - RNA, 19 nt, Homo sapiens
  misc_RNA (1)...(19): siRNA sense strand
aggucauacuggagagaaa

SEQ ID NO: 2406471 - RNA, 19 nt, Homo sapiens
  misc_RNA (1)...(19): siRNA sense strand
acuucaugguggagagaaa

SEQ ID NO: 2406472 - RNA, 19 nt, Homo sapiens
  misc_RNA (1)...(19): siRNA sense strand
acuucauacuggagagaaa

SEQ ID NO: 2406473 - RNA, 19 nt, Homo sapiens
  misc_RNA (1)...(19): siRNA sense strand
aauucauaguggagagaaa

SEQ ID NO: 2406474 - RNA, 19 nt, Homo sapiens
  misc_RNA (1)...(19): siRNA sense strand
aguucauaguggugagaaa

SEQ ID NO: 2406475 - RNA, 19 nt, Homo sapiens
  misc_RNA (1)...(19): siRNA sense strand
acuucauaguggugagaaa

SEQ ID NO: 2406476 - RNA, 19 nt, Homo sapiens
  misc_RNA (1)...(19): siRNA sense strand
guguaaugaaugugacaaa

SEQ ID NO: 2406477 - RNA, 19 nt, Homo sapiens
  misc_RNA (1)...(19): siRNA sense strand
caggaaauugagaaagaaa

SEQ ID NO: 2406478 - RNA, 19 nt, Homo sapiens
  misc_RNA (1)...(19): siRNA sense strand
aagugauguuggagaacua

SEQ ID NO: 2406479 - RNA, 19 nt, Homo sapiens
  misc_RNA (1)...(19): siRNA sense strand
uagaauugacuguggagaa

SEQ ID NO: 2406480 - RNA, 19 nt, Homo sapiens
  misc_RNA (1)...(19): siRNA sense strand
augugaagaaugugacaaa

SEQ ID NO: 2406481 - RNA, 19 nt, Homo sapiens
  misc_RNA (1)...(19): siRNA sense strand
aggugaaauugguaaucaa

SEQ ID NO: 2406482 - RNA, 19 nt, Homo sapiens
  misc_RNA (1)...(19): siRNA sense strand
aggaaguacacaugagaga

SEQ ID NO: 2406483 - RNA, 19 nt, Homo sapiens
  misc_RNA (1)...(19): siRNA sense strand
aauucacacugcagagaaa

SEQ ID NO: 2406484 - RNA, 19 nt, Homo sapiens
  misc_RNA (1)...(19): siRNA sense strand
ucucauuggcagaguggaa

SEQ ID NO: 2406485 - RNA, 19 nt, Homo sapiens
  misc_RNA (1)...(19): siRNA sense strand
gucaagaagaugaaagaga

SEQ ID NO: 2406486 - RNA, 19 nt, Homo sapiens
  misc_RNA (1)...(19): siRNA sense strand
uggcaagaucuuuggucaa

SEQ ID NO: 2406487 - RNA, 19 nt, Homo sapiens
  misc_RNA (1)...(19): siRNA sense strand
auguaauaagaguggcaaa

SEQ ID NO: 2406488 - RNA, 19 nt, Homo sapiens
  misc_RNA (1)...(19): siRNA sense strand
augucacacuguugagaaa

SEQ ID NO: 2406489 - RNA, 19 nt, Homo sapiens
  misc_RNA (1)...(19): siRNA sense strand
ccuugagacacauaagaua

SEQ ID NO: 2406490 - RNA, 19 nt, Homo sapiens
  misc_RNA (1)...(19): siRNA sense strand
guguaaugaguguggcaau

SEQ ID NO: 2406491 - RNA, 19 nt, Homo sapiens
  misc_RNA (1)...(19): siRNA sense strand
gugucaagaagaugaaaga

SEQ ID NO: 2406492 - RNA, 19 nt, Homo sapiens
  misc_RNA (1)...(19): siRNA sense strand
ggucuugucaacagggcaa

SEQ ID NO: 2406493 - RNA, 19 nt, Homo sapiens
  misc_RNA (1)...(19): siRNA sense strand
acauugaguuucaguguca

SEQ ID NO: 2406494 - RNA, 19 nt, Homo sapiens
  misc_RNA (1)...(19): siRNA sense strand
gggauguggcuauagaauu

SEQ ID NO: 2406495 - RNA, 19 nt, Homo sapiens
  misc_RNA (1)...(19): siRNA sense strand
gcaugaugaaggaggucuu

SEQ ID NO: 2406496 - RNA, 19 nt, Homo sapiens
  misc_RNA (1)...(19): siRNA sense strand
gggcaaggcaauacagaag

SEQ ID NO: 2406497 - RNA, 19 nt, Homo sapiens
  misc_RNA (1)...(19): siRNA sense strand
ccauuuaggagacaaacaa

SEQ ID NO: 2406498 - RNA, 19 nt, Homo sapiens
  misc_RNA (1)...(19): siRNA sense strand
ucaaaggugaaauugguaa

SEQ ID NO: 2406499 - RNA, 19 nt, Homo sapiens
  misc_RNA (1)...(19): siRNA sense strand
caaaggugaaauugguaau

SEQ ID NO: 2406500 - RNA, 19 nt, Homo sapiens
  misc_RNA (1)...(19): siRNA sense strand
guguaaugaaugugggaag

SEQ ID NO: 2406501 - RNA, 19 nt, Homo sapiens
  misc_RNA (1)...(19): siRNA sense strand
guguaaugaaugugggaag

SEQ ID NO: 2406502 - RNA, 19 nt, Homo sapiens
  misc_RNA (1)...(19): siRNA sense strand
cucagaagaggaaaggaaa

SEQ ID NO: 2406503 - RNA, 19 nt, Homo sapiens
  misc_RNA (1)...(19): siRNA sense strand
agauguaagguuugugaca

SEQ ID NO: 2406504 - RNA, 19 nt, Homo sapiens
  misc_RNA (1)...(19): siRNA sense strand
cuuaaggaaacaccagaua

SEQ ID NO: 2406505 - RNA, 19 nt, Homo sapiens
  misc_RNA (1)...(19): siRNA sense strand
uguaaagaguguggcaaga

SEQ ID NO: 2406506 - RNA, 19 nt, Homo sapiens
  misc_RNA (1)...(19): siRNA sense strand
agaagaauucauacugcaa

SEQ ID NO: 2406507 - RNA, 19 nt, Homo sapiens
  misc_RNA (1)...(19): siRNA sense strand
acaaggcuuucgugcguaa

SEQ ID NO: 2406508 - RNA, 19 nt, Homo sapiens
  misc_RNA (1)...(19): siRNA sense strand
uugaagcacccaugacaaa

SEQ ID NO: 2406509 - RNA, 19 nt, Homo sapiens
  misc_RNA (1)...(19): siRNA sense strand
ggcaaaacauacuagaauu

SEQ ID NO: 2406510 - RNA, 19 nt, Homo sapiens
  misc_RNA (1)...(19): siRNA sense strand
ggcaaaacauacuagaauu

SEQ ID NO: 2406511 - RNA, 19 nt, Homo sapiens
  misc_RNA (1)...(19): siRNA sense strand
ggcucgacauagaagaauu

SEQ ID NO: 2406512 - RNA, 19 nt, Homo sapiens
  misc_RNA (1)...(19): siRNA sense strand
agaugaaagagauggccuu

SEQ ID NO: 2406513 - RNA, 19 nt, Homo sapiens
  misc_RNA (1)...(19): siRNA sense strand
ucagaucaaaggugaaauu

SEQ ID NO: 2406514 - RNA, 19 nt, Homo sapiens
  misc_RNA (1)...(19): siRNA sense strand
caauguaauaagaguggca

SEQ ID NO: 2406515 - RNA, 19 nt, Homo sapiens
  misc_RNA (1)...(19): siRNA sense strand
guguaaagaguguggcaag

SEQ ID NO: 2406516 - RNA, 19 nt, Homo sapiens
  misc_RNA (1)...(19): siRNA sense strand
guggcaagaucuuugguca

SEQ ID NO: 2406517 - RNA, 19 nt, Homo sapiens
  misc_RNA (1)...(19): siRNA sense strand
ugauaaggcaauugauacu

SEQ ID NO: 2406518 - RNA, 19 nt, Homo sapiens
  misc_RNA (1)...(19): siRNA sense strand
ugcaaagacaugaaaguca

SEQ ID NO: 2406519 - RNA, 19 nt, Homo sapiens
  misc_RNA (1)...(19): siRNA sense strand
ccacacagggacauugcaa

SEQ ID NO: 2406520 - RNA, 19 nt, Homo sapiens
  misc_RNA (1)...(19): siRNA sense strand
gagaaagaaauucaugaca

SEQ ID NO: 2406521 - RNA, 19 nt, Homo sapiens
  misc_RNA (1)...(19): siRNA sense strand
aaauguaagguuugugaca

SEQ ID NO: 2406522 - RNA, 19 nt, Homo sapiens
  misc_RNA (1)...(19): siRNA sense strand
acaaaugugaugaauguga

SEQ ID NO: 2406523 - RNA, 19 nt, Homo sapiens
  misc_RNA (1)...(19): siRNA sense strand
aaauguaagguuugugaca

SEQ ID NO: 2406524 - RNA, 19 nt, Homo sapiens
  misc_RNA (1)...(19): siRNA sense strand
ugucauuccuaucuggcaa

SEQ ID NO: 2406525 - RNA, 19 nt, Homo sapiens
  misc_RNA (1)...(19): siRNA sense strand
cuuccaaaugcaugaugaa

SEQ ID NO: 2406526 - RNA, 19 nt, Homo sapiens
  misc_RNA (1)...(19): siRNA sense strand
guuucagugucaagaagau

SEQ ID NO: 2406527 - RNA, 19 nt, Homo sapiens
  misc_RNA (1)...(19): siRNA sense strand
uguaaugaguguggcaaga

SEQ ID NO: 2406528 - RNA, 19 nt, Homo sapiens
  misc_RNA (1)...(19): siRNA sense strand
gcgagaaccugaagacgga

SEQ ID NO: 2406529 - RNA, 19 nt, Homo sapiens
  misc_RNA (1)...(19): siRNA sense strand
ccuggaguggcaagagaaa

SEQ ID NO: 2406530 - RNA, 19 nt, Homo sapiens
  misc_RNA (1)...(19): siRNA sense strand
cugagaaucuugugcagca

SEQ ID NO: 2406531 - RNA, 19 nt, Homo sapiens
  misc_RNA (1)...(19): siRNA sense strand
agaagaugcgcgagcagau

SEQ ID NO: 2406532 - RNA, 19 nt, Homo sapiens
  misc_RNA (1)...(19): siRNA sense strand
ucaccuggcucgauggcau

SEQ ID NO: 2406533 - RNA, 19 nt, Homo sapiens
  misc_RNA (1)...(19): siRNA sense strand
ccaauaagcuucuggccug

SEQ ID NO: 2406534 - RNA, 19 nt, Homo sapiens
  misc_RNA (1)...(19): siRNA sense strand
cgugaaucauggcgagaac

SEQ ID NO: 2406535 - RNA, 19 nt, Homo sapiens
  misc_RNA (1)...(19): siRNA sense strand
acgugguguuugugauuga

SEQ ID NO: 2406536 - RNA, 19 nt, Homo sapiens
  misc_RNA (1)...(19): siRNA sense strand
ucaaaggccucuaccgcau

SEQ ID NO: 2406537 - RNA, 19 nt, Homo sapiens
  misc_RNA (1)...(19): siRNA sense strand
cuucaagagcagugagauu

SEQ ID NO: 2406538 - RNA, 19 nt, Homo sapiens
  misc_RNA (1)...(19): siRNA sense strand
acgaauuugacgagaacaa

SEQ ID NO: 2406539 - RNA, 19 nt, Homo sapiens
  misc_RNA (1)...(19): siRNA sense strand
ccgucaacaccaagaauca

SEQ ID NO: 2406540 - RNA, 19 nt, Homo sapiens
  misc_RNA (1)...(19): siRNA sense strand
cuuagcaguaggaggacua

SEQ ID NO: 2406541 - RNA, 19 nt, Homo sapiens
  misc_RNA (1)...(19): siRNA sense strand
ucacaaacuucaagagcag

SEQ ID NO: 2406542 - RNA, 19 nt, Homo sapiens
  misc_RNA (1)...(19): siRNA sense strand
ggccuuagcaguaggagga

SEQ ID NO: 2406543 - RNA, 19 nt, Homo sapiens
  misc_RNA (1)...(19): siRNA sense strand
agcaagaaagacuguuuaa

SEQ ID NO: 2406544 - RNA, 19 nt, Homo sapiens
  misc_RNA (1)...(19): siRNA sense strand
gguacaaucacuagugcaa

SEQ ID NO: 2406545 - RNA, 19 nt, Homo sapiens
  misc_RNA (1)...(19): siRNA sense strand
ccucaaaagcaaaagcaaa

SEQ ID NO: 2406546 - RNA, 19 nt, Homo sapiens
  misc_RNA (1)...(19): siRNA sense strand
gaacuuggagcuagggcaa

SEQ ID NO: 2406547 - RNA, 19 nt, Homo sapiens
  misc_RNA (1)...(19): siRNA sense strand
ccagauaccagguuguuaa

SEQ ID NO: 2406548 - RNA, 19 nt, Homo sapiens
  misc_RNA (1)...(19): siRNA sense strand
guaaagaacgagaagcuga

SEQ ID NO: 2406549 - RNA, 19 nt, Homo sapiens
  misc_RNA (1)...(19): siRNA sense strand
gccuuaagugugaaaguaa

SEQ ID NO: 2406550 - RNA, 19 nt, Homo sapiens
  misc_RNA (1)...(19): siRNA sense strand
acuaaagcaguuacagaaa

SEQ ID NO: 2406551 - RNA, 19 nt, Homo sapiens
  misc_RNA (1)...(19): siRNA sense strand
ccuuaagugugaaaguaau

SEQ ID NO: 2406552 - RNA, 19 nt, Homo sapiens
  misc_RNA (1)...(19): siRNA sense strand
aggcgaugcucuacgagaa

SEQ ID NO: 2406553 - RNA, 19 nt, Homo sapiens
  misc_RNA (1)...(19): siRNA sense strand
guauaaauaugcugcggga

SEQ ID NO: 2406554 - RNA, 19 nt, Homo sapiens
  misc_RNA (1)...(19): siRNA sense strand
ccaccaagcuaaagaggcu

SEQ ID NO: 2406555 - RNA, 19 nt, Homo sapiens
  misc_RNA (1)...(19): siRNA sense strand
gugugaaaguaaugaccga

SEQ ID NO: 2406556 - RNA, 19 nt, Homo sapiens
  misc_RNA (1)...(19): siRNA sense strand
agaugaagcaagauaggau

SEQ ID NO: 2406557 - RNA, 19 nt, Homo sapiens
  misc_RNA (1)...(19): siRNA sense strand
aagauaggaucaccagaua

SEQ ID NO: 2406558 - RNA, 19 nt, Homo sapiens
  misc_RNA (1)...(19): siRNA sense strand
aguaaugaccgaugaaagu

SEQ ID NO: 2406559 - RNA, 19 nt, Homo sapiens
  misc_RNA (1)...(19): siRNA sense strand
gccacaaguuacaaugcaa

SEQ ID NO: 2406560 - RNA, 19 nt, Homo sapiens
  misc_RNA (1)...(19): siRNA sense strand
auaaauaugcugcgggagu

SEQ ID NO: 2406561 - RNA, 19 nt, Homo sapiens
  misc_RNA (1)...(19): siRNA sense strand
ccaacuacgcguaugugaa

SEQ ID NO: 2406562 - RNA, 19 nt, Homo sapiens
  misc_RNA (1)...(19): siRNA sense strand
gaaaaugguuccaaggguu

SEQ ID NO: 2406563 - RNA, 19 nt, Homo sapiens
  misc_RNA (1)...(19): siRNA sense strand
uuaaggaucucuuuggcaa

SEQ ID NO: 2406564 - RNA, 19 nt, Homo sapiens
  misc_RNA (1)...(19): siRNA sense strand
gcucaauggaaaacaaauu

SEQ ID NO: 2406565 - RNA, 19 nt, Homo sapiens
  misc_RNA (1)...(19): siRNA sense strand
ugaugaugguauugaugau

SEQ ID NO: 2406566 - RNA, 19 nt, Homo sapiens
  misc_RNA (1)...(19): siRNA sense strand
aagcuguagaugagaugaa

SEQ ID NO: 2406567 - RNA, 19 nt, Homo sapiens
  misc_RNA (1)...(19): siRNA sense strand
gggcaaaagaguuccccaa

SEQ ID NO: 2406568 - RNA, 19 nt, Homo sapiens
  misc_RNA (1)...(19): siRNA sense strand
agaacgagaagcugaacuu

SEQ ID NO: 2406569 - RNA, 19 nt, Homo sapiens
  misc_RNA (1)...(19): siRNA sense strand
uuggagaagacauggauga

SEQ ID NO: 2406570 - RNA, 19 nt, Homo sapiens
  misc_RNA (1)...(19): siRNA sense strand
ugaugguauugaugaugaa

SEQ ID NO: 2406571 - RNA, 19 nt, Homo sapiens
  misc_RNA (1)...(19): siRNA sense strand
ugaauggaaaggagcucaa

SEQ ID NO: 2406572 - RNA, 19 nt, Homo sapiens
  misc_RNA (1)...(19): siRNA sense strand
cagaaaugaacgguagaau

SEQ ID NO: 2406573 - RNA, 19 nt, Homo sapiens
  misc_RNA (1)...(19): siRNA sense strand
aaagcaaauguuaggugaa

SEQ ID NO: 2406574 - RNA, 19 nt, Homo sapiens
  misc_RNA (1)...(19): siRNA sense strand
gcuaaagaggcuacccaga

SEQ ID NO: 2406575 - RNA, 19 nt, Homo sapiens
  misc_RNA (1)...(19): siRNA sense strand
cucaaaagcaaaagcaaau

SEQ ID NO: 2406576 - RNA, 19 nt, Homo sapiens
  misc_RNA (1)...(19): siRNA sense strand
cccuacucuugcugggaaa

SEQ ID NO: 2406577 - RNA, 19 nt, Homo sapiens
  misc_RNA (1)...(19): siRNA sense strand
uugauguuauaaagggcaa

SEQ ID NO: 2406578 - RNA, 19 nt, Homo sapiens
  misc_RNA (1)...(19): siRNA sense strand
caagauaggaucaccagau

SEQ ID NO: 2406579 - RNA, 19 nt, Homo sapiens
  misc_RNA (1)...(19): siRNA sense strand
ugggcaacauauucguuaa

SEQ ID NO: 2406580 - RNA, 19 nt, Homo sapiens
  misc_RNA (1)...(19): siRNA sense strand
gaccgaugaaaguggaaaa

SEQ ID NO: 2406581 - RNA, 19 nt, Homo sapiens
  misc_RNA (1)...(19): siRNA sense strand
guuacagaaaugaacggua

SEQ ID NO: 2406582 - RNA, 19 nt, Homo sapiens
  misc_RNA (1)...(19): siRNA sense strand
gaguauaugcagagaaugg

SEQ ID NO: 2406583 - RNA, 19 nt, Homo sapiens
  misc_RNA (1)...(19): siRNA sense strand
uuguacacuuugagacaca

SEQ ID NO: 2406584 - RNA, 19 nt, Homo sapiens
  misc_RNA (1)...(19): siRNA sense strand
ggaagauagugguggggca

SEQ ID NO: 2406585 - RNA, 19 nt, Homo sapiens
  misc_RNA (1)...(19): siRNA sense strand
gggauauccagguugggaa

SEQ ID NO: 2406586 - RNA, 19 nt, Homo sapiens
  misc_RNA (1)...(19): siRNA sense strand
ugguugaagucgaguggga

SEQ ID NO: 2406587 - RNA, 19 nt, Homo sapiens
  misc_RNA (1)...(19): siRNA sense strand
ugaagauacucacagggaa

SEQ ID NO: 2406588 - RNA, 19 nt, Homo sapiens
  misc_RNA (1)...(19): siRNA sense strand
cuuagaacggagaggcuuu

SEQ ID NO: 2406589 - RNA, 19 nt, Homo sapiens
  misc_RNA (1)...(19): siRNA sense strand
gaagauacucacagggaag

SEQ ID NO: 2406590 - RNA, 19 nt, Homo sapiens
  misc_RNA (1)...(19): siRNA sense strand
gagaugugcuuuaugacga

SEQ ID NO: 2406591 - RNA, 19 nt, Homo sapiens
  misc_RNA (1)...(19): siRNA sense strand
gcacauggugaaugccaca

SEQ ID NO: 2406592 - RNA, 19 nt, Homo sapiens
  misc_RNA (1)...(19): siRNA sense strand
gucaagaagcggaggcucu

SEQ ID NO: 2406593 - RNA, 19 nt, Homo sapiens
  misc_RNA (1)...(19): siRNA sense strand
cggaagcagcacaugguga

SEQ ID NO: 2406594 - RNA, 19 nt, Homo sapiens
  misc_RNA (1)...(19): siRNA sense strand
aaaaggcauuagaaggaaa

SEQ ID NO: 2406595 - RNA, 19 nt, Homo sapiens
  misc_RNA (1)...(19): siRNA sense strand
gcacaggaccaaaggggca

SEQ ID NO: 2406596 - RNA, 19 nt, Homo sapiens
  misc_RNA (1)...(19): siRNA sense strand
ggaaaugccaagcaccgaa

SEQ ID NO: 2406597 - RNA, 19 nt, Homo sapiens
  misc_RNA (1)...(19): siRNA sense strand
cagaagaagagcucccaga

SEQ ID NO: 2406598 - RNA, 19 nt, Homo sapiens
  misc_RNA (1)...(19): siRNA sense strand
ccacagaacuccacccaag

SEQ ID NO: 2406599 - RNA, 19 nt, Homo sapiens
  misc_RNA (1)...(19): siRNA sense strand
caagauugcucgaggccag

SEQ ID NO: 2406600 - RNA, 19 nt, Homo sapiens
  misc_RNA (1)...(19): siRNA sense strand
auaagcuccuggugggcaa

SEQ ID NO: 2406601 - RNA, 19 nt, Homo sapiens
  misc_RNA (1)...(19): siRNA sense strand
gagcaggcguucaugacca

SEQ ID NO: 2406602 - RNA, 19 nt, Homo sapiens
  misc_RNA (1)...(19): siRNA sense strand
cagccaaggaguuugcaga

SEQ ID NO: 2406603 - RNA, 19 nt, Homo sapiens
  misc_RNA (1)...(19): siRNA sense strand
gcauauaguggacgagaaa

SEQ ID NO: 2406604 - RNA, 19 nt, Homo sapiens
  misc_RNA (1)...(19): siRNA sense strand
auauaguggacgagaaaca

SEQ ID NO: 2406605 - RNA, 19 nt, Homo sapiens
  misc_RNA (1)...(19): siRNA sense strand
acccuaugaaugugaaaua

SEQ ID NO: 2406606 - RNA, 19 nt, Homo sapiens
  misc_RNA (1)...(19): siRNA sense strand
ugcauauaguggacgagaa

SEQ ID NO: 2406607 - RNA, 19 nt, Homo sapiens
  misc_RNA (1)...(19): siRNA sense strand
gagaaacagcauauuccaa

SEQ ID NO: 2406608 - RNA, 19 nt, Homo sapiens
  misc_RNA (1)...(19): siRNA sense strand
caucugguacaaagggcaa

SEQ ID NO: 2406609 - RNA, 19 nt, Homo sapiens
  misc_RNA (1)...(19): siRNA sense strand
uggacgagaaacagcauau

SEQ ID NO: 2406610 - RNA, 19 nt, Homo sapiens
  misc_RNA (1)...(19): siRNA sense strand
aaagcgaggugaugggacu

SEQ ID NO: 2406611 - RNA, 19 nt, Homo sapiens
  misc_RNA (1)...(19): siRNA sense strand
acaccuuacacaucauaaa

SEQ ID NO: 2406612 - RNA, 19 nt, Homo sapiens
  misc_RNA (1)...(19): siRNA sense strand
ggacccuaugaaugugaaa

SEQ ID NO: 2406613 - RNA, 19 nt, Homo sapiens
  misc_RNA (1)...(19): siRNA sense strand
ccaauuaccguucaggaga

SEQ ID NO: 2406614 - RNA, 19 nt, Homo sapiens
  misc_RNA (1)...(19): siRNA sense strand
caggaaagcuccacaucgu

SEQ ID NO: 2406615 - RNA, 19 nt, Homo sapiens
  misc_RNA (1)...(19): siRNA sense strand
gagacacaguagagggcuu

SEQ ID NO: 2406616 - RNA, 19 nt, Homo sapiens
  misc_RNA (1)...(19): siRNA sense strand
gaauagcagucaaggcuga

SEQ ID NO: 2406617 - RNA, 19 nt, Homo sapiens
  misc_RNA (1)...(19): siRNA sense strand
cuucgugggcugugaguau

SEQ ID NO: 2406618 - RNA, 19 nt, Homo sapiens
  misc_RNA (1)...(19): siRNA sense strand
cagucaaggcugagaugga

SEQ ID NO: 2406619 - RNA, 19 nt, Homo sapiens
  misc_RNA (1)...(19): siRNA sense strand
ggcagaucauggaugggaa

SEQ ID NO: 2406620 - RNA, 19 nt, Homo sapiens
  misc_RNA (1)...(19): siRNA sense strand
cuuacagaagguaggaaga

SEQ ID NO: 2406621 - RNA, 19 nt, Homo sapiens
  misc_RNA (1)...(19): siRNA sense strand
gcuggaagaugaaggcuac

SEQ ID NO: 2406622 - RNA, 19 nt, Homo sapiens
  misc_RNA (1)...(19): siRNA sense strand
cuggagaaccugaggcaug

SEQ ID NO: 2406623 - RNA, 19 nt, Homo sapiens
  misc_RNA (1)...(19): siRNA sense strand
aggacgagugcaagaagaa

SEQ ID NO: 2406624 - RNA, 19 nt, Homo sapiens
  misc_RNA (1)...(19): siRNA sense strand
gcucaaggucaacggcgaa

SEQ ID NO: 2406625 - RNA, 19 nt, Homo sapiens
  misc_RNA (1)...(19): siRNA sense strand
cguucgugcccaaggagaa

SEQ ID NO: 2406626 - RNA, 19 nt, Homo sapiens
  misc_RNA (1)...(19): siRNA sense strand
cagacaggagggugagaca

SEQ ID NO: 2406627 - RNA, 19 nt, Homo sapiens
  misc_RNA (1)...(19): siRNA sense strand
agaucauaaccuuggaaga

SEQ ID NO: 2406628 - RNA, 19 nt, Homo sapiens
  misc_RNA (1)...(19): siRNA sense strand
ugggcguggugaugggcaa

SEQ ID NO: 2406629 - RNA, 19 nt, Homo sapiens
  misc_RNA (1)...(19): siRNA sense strand
ggcucaaggucaacggcga

SEQ ID NO: 2406630 - RNA, 19 nt, Homo sapiens
  misc_RNA (1)...(19): siRNA sense strand
ggaagaagguguuugagaa

SEQ ID NO: 2406631 - RNA, 19 nt, Homo sapiens
  misc_RNA (1)...(19): siRNA sense strand
gcaccagcaucguggagaa

SEQ ID NO: 2406632 - RNA, 19 nt, Homo sapiens
  misc_RNA (1)...(19): siRNA sense strand
agaagguguuugagaagga

SEQ ID NO: 2406633 - RNA, 19 nt, Homo sapiens
  misc_RNA (1)...(19): siRNA sense strand
gggaaucacacuuggcuga

SEQ ID NO: 2406634 - RNA, 19 nt, Homo sapiens
  misc_RNA (1)...(19): siRNA sense strand
ggaaccugcaguugaggaa

SEQ ID NO: 2406635 - RNA, 19 nt, Homo sapiens
  misc_RNA (1)...(19): siRNA sense strand
aggaagaagguguuugaga

SEQ ID NO: 2406636 - RNA, 19 nt, Homo sapiens
  misc_RNA (1)...(19): siRNA sense strand
ccaccugccuugaagagau

SEQ ID NO: 2406637 - RNA, 19 nt, Homo sapiens
  misc_RNA (1)...(19): siRNA sense strand
aagagaugaccaagcgaga

SEQ ID NO: 2406638 - RNA, 19 nt, Homo sapiens
  misc_RNA (1)...(19): siRNA sense strand
gaagaagguguuugagaag

SEQ ID NO: 2406639 - RNA, 19 nt, Homo sapiens
  misc_RNA (1)...(19): siRNA sense strand
ccgaacagcuggacgcucu

SEQ ID NO: 2406640 - RNA, 19 nt, Homo sapiens
  misc_RNA (1)...(19): siRNA sense strand
gagcugauccagaaagcca

SEQ ID NO: 2406641 - RNA, 19 nt, Homo sapiens
  misc_RNA (1)...(19): siRNA sense strand
cugcguggcucuuggaugu

SEQ ID NO: 2406642 - RNA, 19 nt, Homo sapiens
  misc_RNA (1)...(19): siRNA sense strand
ccauagacccggagugcac

SEQ ID NO: 2406643 - RNA, 19 nt, Homo sapiens
  misc_RNA (1)...(19): siRNA sense strand
agaaauccgugcagaucca

SEQ ID NO: 2406644 - RNA, 19 nt, Homo sapiens
  misc_RNA (1)...(19): siRNA sense strand
caguugaggaagaaggugu

SEQ ID NO: 2406645 - RNA, 19 nt, Homo sapiens
  misc_RNA (1)...(19): siRNA sense strand
gccuugaagagaugaccaa

SEQ ID NO: 2406646 - RNA, 19 nt, Homo sapiens
  misc_RNA (1)...(19): siRNA sense strand
gagaagaauuccuuggacu

SEQ ID NO: 2406647 - RNA, 19 nt, Homo sapiens
  misc_RNA (1)...(19): siRNA sense strand
guucacacuagaaggccaa

SEQ ID NO: 2406648 - RNA, 19 nt, Homo sapiens
  misc_RNA (1)...(19): siRNA sense strand
gguucacacuagaaggcca

SEQ ID NO: 2406649 - RNA, 19 nt, Homo sapiens
  misc_RNA (1)...(19): siRNA sense strand
uggccgaggagaaggaaga

SEQ ID NO: 2406650 - RNA, 19 nt, Homo sapiens
  misc_RNA (1)...(19): siRNA sense strand
gggagaagaugcuggccuc

SEQ ID NO: 2406651 - RNA, 19 nt, Homo sapiens
  misc_RNA (1)...(19): siRNA sense strand
acuucauacuggagagaaa

SEQ ID NO: 2406652 - RNA, 19 nt, Homo sapiens
  misc_RNA (1)...(19): siRNA sense strand
cauucauacuggaaagaaa

SEQ ID NO: 2406653 - RNA, 19 nt, Homo sapiens
  misc_RNA (1)...(19): siRNA sense strand
cauucauacuggaaagaaa

SEQ ID NO: 2406654 - RNA, 19 nt, Homo sapiens
  misc_RNA (1)...(19): siRNA sense strand
ccuuaguagacaugagaua

SEQ ID NO: 2406655 - RNA, 19 nt, Homo sapiens
  misc_RNA (1)...(19): siRNA sense strand
guguaauaaauguggcaaa

SEQ ID NO: 2406656 - RNA, 19 nt, Homo sapiens
  misc_RNA (1)...(19): siRNA sense strand
augcauagaauguggcaaa

SEQ ID NO: 2406657 - RNA, 19 nt, Homo sapiens
  misc_RNA (1)...(19): siRNA sense strand
gugugaagaauguggcaaa

SEQ ID NO: 2406658 - RNA, 19 nt, Homo sapiens
  misc_RNA (1)...(19): siRNA sense strand
gugugaagaauguggcaaa

SEQ ID NO: 2406659 - RNA, 19 nt, Homo sapiens
  misc_RNA (1)...(19): siRNA sense strand
uguuagagaacuacaguaa

SEQ ID NO: 2406660 - RNA, 19 nt, Homo sapiens
  misc_RNA (1)...(19): siRNA sense strand
auguagagaauguggcaaa

SEQ ID NO: 2406661 - RNA, 19 nt, Homo sapiens
  misc_RNA (1)...(19): siRNA sense strand
aaaccauacaagugugaua

SEQ ID NO: 2406662 - RNA, 19 nt, Homo sapiens
  misc_RNA (1)...(19): siRNA sense strand
augugauguuagagaacua

SEQ ID NO: 2406663 - RNA, 19 nt, Homo sapiens
  misc_RNA (1)...(19): siRNA sense strand
gugugauaaaugugacaaa

SEQ ID NO: 2406664 - RNA, 19 nt, Homo sapiens
  misc_RNA (1)...(19): siRNA sense strand
augugaagaauguggcaaa

SEQ ID NO: 2406665 - RNA, 19 nt, Homo sapiens
  misc_RNA (1)...(19): siRNA sense strand
augugaagaauguggcaaa

SEQ ID NO: 2406666 - RNA, 19 nt, Homo sapiens
  misc_RNA (1)...(19): siRNA sense strand
augugaagaauguggcaaa

SEQ ID NO: 2406667 - RNA, 19 nt, Homo sapiens
  misc_RNA (1)...(19): siRNA sense strand
augugaagaauguggcaaa

SEQ ID NO: 2406668 - RNA, 19 nt, Homo sapiens
  misc_RNA (1)...(19): siRNA sense strand
augugaagaauguggcaaa

SEQ ID NO: 2406669 - RNA, 19 nt, Homo sapiens
  misc_RNA (1)...(19): siRNA sense strand
augugaagaauguggcaaa

SEQ ID NO: 2406670 - RNA, 19 nt, Homo sapiens
  misc_RNA (1)...(19): siRNA sense strand
gugugauaaauguggcaaa

SEQ ID NO: 2406671 - RNA, 19 nt, Homo sapiens
  misc_RNA (1)...(19): siRNA sense strand
guacaacuacccagagcaa

SEQ ID NO: 2406672 - RNA, 19 nt, Homo sapiens
  misc_RNA (1)...(19): siRNA sense strand
uugugaagaauguggcaaa

SEQ ID NO: 2406673 - RNA, 19 nt, Homo sapiens
  misc_RNA (1)...(19): siRNA sense strand
uugugaagaauguggcaaa

SEQ ID NO: 2406674 - RNA, 19 nt, Homo sapiens
  misc_RNA (1)...(19): siRNA sense strand
aaaccauacgagugugaua

SEQ ID NO: 2406675 - RNA, 19 nt, Homo sapiens
  misc_RNA (1)...(19): siRNA sense strand
cauucauaugggaaagaaa

SEQ ID NO: 2406676 - RNA, 19 nt, Homo sapiens
  misc_RNA (1)...(19): siRNA sense strand
aaaguguagaugaguguaa

SEQ ID NO: 2406677 - RNA, 19 nt, Homo sapiens
  misc_RNA (1)...(19): siRNA sense strand
aguucauucauaugggaaa

SEQ ID NO: 2406678 - RNA, 19 nt, Homo sapiens
  misc_RNA (1)...(19): siRNA sense strand
uggccagagcagaacauaa

SEQ ID NO: 2406679 - RNA, 19 nt, Homo sapiens
  misc_RNA (1)...(19): siRNA sense strand
gacaugagaugguagccaa

SEQ ID NO: 2406680 - RNA, 19 nt, Homo sapiens
  misc_RNA (1)...(19): siRNA sense strand
gauaaauaugggaaagucu

SEQ ID NO: 2406681 - RNA, 19 nt, Homo sapiens
  misc_RNA (1)...(19): siRNA sense strand
aggaaugugauguuagaga

SEQ ID NO: 2406682 - RNA, 19 nt, Homo sapiens
  misc_RNA (1)...(19): siRNA sense strand
aguucauacuggagagaag

SEQ ID NO: 2406683 - RNA, 19 nt, Homo sapiens
  misc_RNA (1)...(19): siRNA sense strand
agagagaaacccuacaaau

SEQ ID NO: 2406684 - RNA, 19 nt, Homo sapiens
  misc_RNA (1)...(19): siRNA sense strand
gcggaaucuauauaggaau

SEQ ID NO: 2406685 - RNA, 19 nt, Homo sapiens
  misc_RNA (1)...(19): siRNA sense strand
agugauacugagaagauau

SEQ ID NO: 2406686 - RNA, 19 nt, Homo sapiens
  misc_RNA (1)...(19): siRNA sense strand
ccuuucaaaugcauagaau

SEQ ID NO: 2406687 - RNA, 19 nt, Homo sapiens
  misc_RNA (1)...(19): siRNA sense strand
gaucauucauacuggaaag

SEQ ID NO: 2406688 - RNA, 19 nt, Homo sapiens
  misc_RNA (1)...(19): siRNA sense strand
ugggaaagaaacauuacaa

SEQ ID NO: 2406689 - RNA, 19 nt, Homo sapiens
  misc_RNA (1)...(19): siRNA sense strand
gaucauucauacuggaaag

SEQ ID NO: 2406690 - RNA, 19 nt, Homo sapiens
  misc_RNA (1)...(19): siRNA sense strand
gauacugagaagauaugaa

SEQ ID NO: 2406691 - RNA, 19 nt, Homo sapiens
  misc_RNA (1)...(19): siRNA sense strand
aauucauacuggagagaag

SEQ ID NO: 2406692 - RNA, 19 nt, Homo sapiens
  misc_RNA (1)...(19): siRNA sense strand
uggcaaagcuuuuaaccau

SEQ ID NO: 2406693 - RNA, 19 nt, Homo sapiens
  misc_RNA (1)...(19): siRNA sense strand
ggagagaaaccauacgagu

SEQ ID NO: 2406694 - RNA, 19 nt, Homo sapiens
  misc_RNA (1)...(19): siRNA sense strand
cggaaucuauauaggaaug

SEQ ID NO: 2406695 - RNA, 19 nt, Homo sapiens
  misc_RNA (1)...(19): siRNA sense strand
ccaucuggagcaaggaaaa

SEQ ID NO: 2406696 - RNA, 19 nt, Homo sapiens
  misc_RNA (1)...(19): siRNA sense strand
ugaaaguguagaugagugu

SEQ ID NO: 2406697 - RNA, 19 nt, Homo sapiens
  misc_RNA (1)...(19): siRNA sense strand
ggagauggcugaagggaag

SEQ ID NO: 2406698 - RNA, 19 nt, Homo sapiens
  misc_RNA (1)...(19): siRNA sense strand
ccaaugaccucguggagca

SEQ ID NO: 2406699 - RNA, 19 nt, Homo sapiens
  misc_RNA (1)...(19): siRNA sense strand
aggagauggcugaagggaa

SEQ ID NO: 2406700 - RNA, 19 nt, Homo sapiens
  misc_RNA (1)...(19): siRNA sense strand
ugagacagguaaugcgcua

SEQ ID NO: 2406701 - RNA, 19 nt, Homo sapiens
  misc_RNA (1)...(19): siRNA sense strand
ccagagaggagauggcuga

SEQ ID NO: 2406702 - RNA, 19 nt, Homo sapiens
  misc_RNA (1)...(19): siRNA sense strand
cuggagagaagguggacau

SEQ ID NO: 2406703 - RNA, 19 nt, Homo sapiens
  misc_RNA (1)...(19): siRNA sense strand
cagucgcgguggaggaaga

SEQ ID NO: 2406704 - RNA, 19 nt, Homo sapiens
  misc_RNA (1)...(19): siRNA sense strand
caggagaagcagcgagaac

SEQ ID NO: 2406705 - RNA, 19 nt, Homo sapiens
  misc_RNA (1)...(19): siRNA sense strand
agggaagcaucgagaucca

SEQ ID NO: 2406706 - RNA, 19 nt, Homo sapiens
  misc_RNA (1)...(19): siRNA sense strand
ccgcggaaacagagcgacu

SEQ ID NO: 2406707 - RNA, 19 nt, Homo sapiens
  misc_RNA (1)...(19): siRNA sense strand
agaccugugccaugagcua

SEQ ID NO: 2406708 - RNA, 19 nt, Homo sapiens
  misc_RNA (1)...(19): siRNA sense strand
gugucuauccugugaagau

SEQ ID NO: 2406709 - RNA, 19 nt, Homo sapiens
  misc_RNA (1)...(19): siRNA sense strand
uggagcagaucgagaccau

SEQ ID NO: 2406710 - RNA, 19 nt, Homo sapiens
  misc_RNA (1)...(19): siRNA sense strand
uggacgagcaucaaggaga

SEQ ID NO: 2406711 - RNA, 19 nt, Homo sapiens
  misc_RNA (1)...(19): siRNA sense strand
ugcuaaaggaugagucuga

SEQ ID NO: 2406712 - RNA, 19 nt, Homo sapiens
  misc_RNA (1)...(19): siRNA sense strand
uggaggaugaggagcccaa

SEQ ID NO: 2406713 - RNA, 19 nt, Homo sapiens
  misc_RNA (1)...(19): siRNA sense strand
aggccaucuuccugcgcaa

SEQ ID NO: 2406714 - RNA, 19 nt, Homo sapiens
  misc_RNA (1)...(19): siRNA sense strand
aagcaagaggaucgacuau

SEQ ID NO: 2406715 - RNA, 19 nt, Homo sapiens
  misc_RNA (1)...(19): siRNA sense strand
acaauaaccugcugggcaa

SEQ ID NO: 2406716 - RNA, 19 nt, Homo sapiens
  misc_RNA (1)...(19): siRNA sense strand
cggaggaguucaagcgcaa

SEQ ID NO: 2406717 - RNA, 19 nt, Homo sapiens
  misc_RNA (1)...(19): siRNA sense strand
ccaucgaagaaguggacua

SEQ ID NO: 2406718 - RNA, 19 nt, Homo sapiens
  misc_RNA (1)...(19): siRNA sense strand
gggccaugaccaaggacaa

SEQ ID NO: 2406719 - RNA, 19 nt, Homo sapiens
  misc_RNA (1)...(19): siRNA sense strand
aaaccagauggcagagaaa

SEQ ID NO: 2406720 - RNA, 19 nt, Homo sapiens
  misc_RNA (1)...(19): siRNA sense strand
aggcaagcccaaagugcaa

SEQ ID NO: 2406721 - RNA, 19 nt, Homo sapiens
  misc_RNA (1)...(19): siRNA sense strand
cgguggaagacgagaaacu

SEQ ID NO: 2406722 - RNA, 19 nt, Homo sapiens
  misc_RNA (1)...(19): siRNA sense strand
ccaagaaccagguggccau

SEQ ID NO: 2406723 - RNA, 19 nt, Homo sapiens
  misc_RNA (1)...(19): siRNA sense strand
gcgagaagaacgugcucau

SEQ ID NO: 2406724 - RNA, 19 nt, Homo sapiens
  misc_RNA (1)...(19): siRNA sense strand
ucgccaacgaccagggcaa

SEQ ID NO: 2406725 - RNA, 19 nt, Homo sapiens
  misc_RNA (1)...(19): siRNA sense strand
aagugcaaguagaguacaa

SEQ ID NO: 2406726 - RNA, 19 nt, Homo sapiens
  misc_RNA (1)...(19): siRNA sense strand
aaucggaagaugaggcgaa

SEQ ID NO: 2406727 - RNA, 19 nt, Homo sapiens
  misc_RNA (1)...(19): siRNA sense strand
aguucaagcgcaagcacaa

SEQ ID NO: 2406728 - RNA, 19 nt, Homo sapiens
  misc_RNA (1)...(19): siRNA sense strand
agauuagcgagcaggacaa

SEQ ID NO: 2406729 - RNA, 19 nt, Homo sapiens
  misc_RNA (1)...(19): siRNA sense strand
acggcaaggagcugaacaa

SEQ ID NO: 2406730 - RNA, 19 nt, Homo sapiens
  misc_RNA (1)...(19): siRNA sense strand
cggcgacaaaucagagaau

SEQ ID NO: 2406731 - RNA, 19 nt, Homo sapiens
  misc_RNA (1)...(19): siRNA sense strand
gggcaagauuagcgagcag

SEQ ID NO: 2406732 - RNA, 19 nt, Homo sapiens
  misc_RNA (1)...(19): siRNA sense strand
auggcaagguggagaucau

SEQ ID NO: 2406733 - RNA, 19 nt, Homo sapiens
  misc_RNA (1)...(19): siRNA sense strand
aagcagaaagagcucgaaa

SEQ ID NO: 2406734 - RNA, 19 nt, Homo sapiens
  misc_RNA (1)...(19): siRNA sense strand
aagaugaguaugaacacaa

SEQ ID NO: 2406735 - RNA, 19 nt, Homo sapiens
  misc_RNA (1)...(19): siRNA sense strand
cagagaaugugcaggaccu

SEQ ID NO: 2406736 - RNA, 19 nt, Homo sapiens
  misc_RNA (1)...(19): siRNA sense strand
accagauggcagagaaaga

SEQ ID NO: 2406737 - RNA, 19 nt, Homo sapiens
  misc_RNA (1)...(19): siRNA sense strand
aggauuucuucaacggcaa

SEQ ID NO: 2406738 - RNA, 19 nt, Homo sapiens
  misc_RNA (1)...(19): siRNA sense strand
aaucagagaaugugcagga

SEQ ID NO: 2406739 - RNA, 19 nt, Homo sapiens
  misc_RNA (1)...(19): siRNA sense strand
agacgguggaagacgagaa

SEQ ID NO: 2406740 - RNA, 19 nt, Homo sapiens
  misc_RNA (1)...(19): siRNA sense strand
gaguaugaacacaagcaga

SEQ ID NO: 2406741 - RNA, 19 nt, Homo sapiens
  misc_RNA (1)...(19): siRNA sense strand
ccuucgacauugacgccaa

SEQ ID NO: 2406742 - RNA, 19 nt, Homo sapiens
  misc_RNA (1)...(19): siRNA sense strand
gaugaaggagaucgcggaa

SEQ ID NO: 2406743 - RNA, 19 nt, Homo sapiens
  misc_RNA (1)...(19): siRNA sense strand
agguggagaucaucgccaa

SEQ ID NO: 2406744 - RNA, 19 nt, Homo sapiens
  misc_RNA (1)...(19): siRNA sense strand
aagagcaccgguaaggaaa

SEQ ID NO: 2406745 - RNA, 19 nt, Homo sapiens
  misc_RNA (1)...(19): siRNA sense strand
ugacaaaggucgucugagc

SEQ ID NO: 2406746 - RNA, 19 nt, Homo sapiens
  misc_RNA (1)...(19): siRNA sense strand
augaacacaagcagaaaga

SEQ ID NO: 2406747 - RNA, 19 nt, Homo sapiens
  misc_RNA (1)...(19): siRNA sense strand
gaguaaagauucaggguuc

SEQ ID NO: 2406748 - RNA, 19 nt, Homo sapiens
  misc_RNA (1)...(19): siRNA sense strand
cgagaaaagcagggagaaa

SEQ ID NO: 2406749 - RNA, 19 nt, Homo sapiens
  misc_RNA (1)...(19): siRNA sense strand
agacaauauccuugagguu

SEQ ID NO: 2406750 - RNA, 19 nt, Homo sapiens
  misc_RNA (1)...(19): siRNA sense strand
ccacagucuuccaaggaga

SEQ ID NO: 2406751 - RNA, 19 nt, Homo sapiens
  misc_RNA (1)...(19): siRNA sense strand
gggaagagcugcaaccagu

SEQ ID NO: 2406752 - RNA, 19 nt, Homo sapiens
  misc_RNA (1)...(19): siRNA sense strand
cuacagagaauucagggaa

SEQ ID NO: 2406753 - RNA, 19 nt, Homo sapiens
  misc_RNA (1)...(19): siRNA sense strand
cugcagagcauucagggaa

SEQ ID NO: 2406754 - RNA, 19 nt, Homo sapiens
  misc_RNA (1)...(19): siRNA sense strand
gcagugaaguggugagccu

SEQ ID NO: 2406755 - RNA, 19 nt, Homo sapiens
  misc_RNA (1)...(19): siRNA sense strand
gcgcagugagacagugaca

SEQ ID NO: 2406756 - RNA, 19 nt, Homo sapiens
  misc_RNA (1)...(19): siRNA sense strand
cucacugacuacagagaau

SEQ ID NO: 2406757 - RNA, 19 nt, Homo sapiens
  misc_RNA (1)...(19): siRNA sense strand
ucaucuacucugaaguuaa

SEQ ID NO: 2406758 - RNA, 19 nt, Homo sapiens
  misc_RNA (1)...(19): siRNA sense strand
agucaaaauccaaguccaa

SEQ ID NO: 2406759 - RNA, 19 nt, Homo sapiens
  misc_RNA (1)...(19): siRNA sense strand
ugugaagcccagagagguu

SEQ ID NO: 2406760 - RNA, 19 nt, Homo sapiens
  misc_RNA (1)...(19): siRNA sense strand
ccaucgguaccucgggaaa

SEQ ID NO: 2406761 - RNA, 19 nt, Homo sapiens
  misc_RNA (1)...(19): siRNA sense strand
cagagaauucagggaacua

SEQ ID NO: 2406762 - RNA, 19 nt, Homo sapiens
  misc_RNA (1)...(19): siRNA sense strand
ugugaaguccagagagguu

SEQ ID NO: 2406763 - RNA, 19 nt, Homo sapiens
  misc_RNA (1)...(19): siRNA sense strand
gggaauuacuacugcacag

SEQ ID NO: 2406764 - RNA, 19 nt, Homo sapiens
  misc_RNA (1)...(19): siRNA sense strand
aauccaaguccaagagcca

SEQ ID NO: 2406765 - RNA, 19 nt, Homo sapiens
  misc_RNA (1)...(19): siRNA sense strand
aagagaaaccccagacaau

SEQ ID NO: 2406766 - RNA, 19 nt, Homo sapiens
  misc_RNA (1)...(19): siRNA sense strand
cguccagugcugagagcca

SEQ ID NO: 2406767 - RNA, 19 nt, Homo sapiens
  misc_RNA (1)...(19): siRNA sense strand
agaaauacuaagagaaacc

SEQ ID NO: 2406768 - RNA, 19 nt, Homo sapiens
  misc_RNA (1)...(19): siRNA sense strand
ggaguaaagauucaggguu

SEQ ID NO: 2406769 - RNA, 19 nt, Homo sapiens
  misc_RNA (1)...(19): siRNA sense strand
acugugaaacccaggaaga

SEQ ID NO: 2406770 - RNA, 19 nt, Homo sapiens
  misc_RNA (1)...(19): siRNA sense strand
cgggcaaaggcggaaguaa

SEQ ID NO: 2406771 - RNA, 19 nt, Homo sapiens
  misc_RNA (1)...(19): siRNA sense strand
ggagagagagugacccuca

SEQ ID NO: 2406772 - RNA, 19 nt, Homo sapiens
  misc_RNA (1)...(19): siRNA sense strand
aggaugucacccuaggaaa

SEQ ID NO: 2406773 - RNA, 19 nt, Homo sapiens
  misc_RNA (1)...(19): siRNA sense strand
cgguaccucgggaaagaaa

SEQ ID NO: 2406774 - RNA, 19 nt, Homo sapiens
  misc_RNA (1)...(19): siRNA sense strand
ccacauucuucaaaggaga

SEQ ID NO: 2406775 - RNA, 19 nt, Homo sapiens
  misc_RNA (1)...(19): siRNA sense strand
guucaaauaacaauggcaa

SEQ ID NO: 2406776 - RNA, 19 nt, Homo sapiens
  misc_RNA (1)...(19): siRNA sense strand
gcuaauaccuccaggacac

SEQ ID NO: 2406777 - RNA, 19 nt, Homo sapiens
  misc_RNA (1)...(19): siRNA sense strand
cagauaacucagcuggaaa

SEQ ID NO: 2406778 - RNA, 19 nt, Homo sapiens
  misc_RNA (1)...(19): siRNA sense strand
cugagaugccacagaagaa

SEQ ID NO: 2406779 - RNA, 19 nt, Homo sapiens
  misc_RNA (1)...(19): siRNA sense strand
ggagaaaaguugacccuga

SEQ ID NO: 2406780 - RNA, 19 nt, Homo sapiens
  misc_RNA (1)...(19): siRNA sense strand
gcugaaacagugaggggua

SEQ ID NO: 2406781 - RNA, 19 nt, Homo sapiens
  misc_RNA (1)...(19): siRNA sense strand
gaaguaacccugugcgcuu

SEQ ID NO: 2406782 - RNA, 19 nt, Homo sapiens
  misc_RNA (1)...(19): siRNA sense strand
aaaccugagcugugaaaca

SEQ ID NO: 2406783 - RNA, 19 nt, Homo sapiens
  misc_RNA (1)...(19): siRNA sense strand
gaguugguuucuugggaga

SEQ ID NO: 2406784 - RNA, 19 nt, Homo sapiens
  misc_RNA (1)...(19): siRNA sense strand
cggcacuacuggggagaaa

SEQ ID NO: 2406785 - RNA, 19 nt, Homo sapiens
  misc_RNA (1)...(19): siRNA sense strand
gugaaauauacuuggaaug

SEQ ID NO: 2406786 - RNA, 19 nt, Homo sapiens
  misc_RNA (1)...(19): siRNA sense strand
ugguauacucugagaucca

SEQ ID NO: 2406787 - RNA, 19 nt, Homo sapiens
  misc_RNA (1)...(19): siRNA sense strand
cgagaggacaugcaggaga

SEQ ID NO: 2406788 - RNA, 19 nt, Homo sapiens
  misc_RNA (1)...(19): siRNA sense strand
gcuacagacucucagccua

SEQ ID NO: 2406789 - RNA, 19 nt, Homo sapiens
  misc_RNA (1)...(19): siRNA sense strand
agagaaaacaacaugguau

SEQ ID NO: 2406790 - RNA, 19 nt, Homo sapiens
  misc_RNA (1)...(19): siRNA sense strand
gguaaagacacaacaccca

SEQ ID NO: 2406791 - RNA, 19 nt, Homo sapiens
  misc_RNA (1)...(19): siRNA sense strand
aggacaugcaggagagucu

SEQ ID NO: 2406792 - RNA, 19 nt, Homo sapiens
  misc_RNA (1)...(19): siRNA sense strand
ucuucaaaggagagagagu

SEQ ID NO: 2406793 - RNA, 19 nt, Homo sapiens
  misc_RNA (1)...(19): siRNA sense strand
augccacagaagaaggaaa

SEQ ID NO: 2406794 - RNA, 19 nt, Homo sapiens
  misc_RNA (1)...(19): siRNA sense strand
acagaagaaggaaagagaa

SEQ ID NO: 2406795 - RNA, 19 nt, Homo sapiens
  misc_RNA (1)...(19): siRNA sense strand
cucuaaggaugaagaaagu

SEQ ID NO: 2406796 - RNA, 19 nt, Homo sapiens
  misc_RNA (1)...(19): siRNA sense strand
ccuccagagcggucagaca

SEQ ID NO: 2406797 - RNA, 19 nt, Homo sapiens
  misc_RNA (1)...(19): siRNA sense strand
aggaaacacccucgagguu

SEQ ID NO: 2406798 - RNA, 19 nt, Homo sapiens
  misc_RNA (1)...(19): siRNA sense strand
acuucaacuucuucagaga

SEQ ID NO: 2406799 - RNA, 19 nt, Homo sapiens
  misc_RNA (1)...(19): siRNA sense strand
ggaaagagaaauugacugc

SEQ ID NO: 2406800 - RNA, 19 nt, Homo sapiens
  misc_RNA (1)...(19): siRNA sense strand
agaagaaggaaagagaaau

SEQ ID NO: 2406801 - RNA, 19 nt, Homo sapiens
  misc_RNA (1)...(19): siRNA sense strand
cuucagagauggcgagguc

SEQ ID NO: 2406802 - RNA, 19 nt, Homo sapiens
  misc_RNA (1)...(19): siRNA sense strand
cugaaacagugagggguaa

SEQ ID NO: 2406803 - RNA, 19 nt, Homo sapiens
  misc_RNA (1)...(19): siRNA sense strand
gguaacauccacaagcaca

SEQ ID NO: 2406804 - RNA, 19 nt, Homo sapiens
  misc_RNA (1)...(19): siRNA sense strand
gggcgaacgacgagcugau

SEQ ID NO: 2406805 - RNA, 19 nt, Homo sapiens
  misc_RNA (1)...(19): siRNA sense strand
augaaggagaugagggcca

SEQ ID NO: 2406806 - RNA, 19 nt, Homo sapiens
  misc_RNA (1)...(19): siRNA sense strand
ucaacgagucggagaacca

SEQ ID NO: 2406807 - RNA, 19 nt, Homo sapiens
  misc_RNA (1)...(19): siRNA sense strand
ucggagaaccagagcagca

SEQ ID NO: 2406808 - RNA, 19 nt, Homo sapiens
  misc_RNA (1)...(19): siRNA sense strand
uggucaacgagucggagaa

SEQ ID NO: 2406809 - RNA, 19 nt, Homo sapiens
  misc_RNA (1)...(19): siRNA sense strand
cuuggaagaaaguggcaca

SEQ ID NO: 2406810 - RNA, 19 nt, Homo sapiens
  misc_RNA (1)...(19): siRNA sense strand
cagcaaaagccuagugcau

SEQ ID NO: 2406811 - RNA, 19 nt, Homo sapiens
  misc_RNA (1)...(19): siRNA sense strand
ggguggguggguugguuua

SEQ ID NO: 2406812 - RNA, 19 nt, Homo sapiens
  misc_RNA (1)...(19): siRNA sense strand
ucguggaggcuguggaaca

SEQ ID NO: 2406813 - RNA, 19 nt, Homo sapiens
  misc_RNA (1)...(19): siRNA sense strand
aauaccagcuaguggacau

SEQ ID NO: 2406814 - RNA, 19 nt, Homo sapiens
  misc_RNA (1)...(19): siRNA sense strand
uggacaucucccaggacaa

SEQ ID NO: 2406815 - RNA, 19 nt, Homo sapiens
  misc_RNA (1)...(19): siRNA sense strand
gaaugagagcaaagcgcga

SEQ ID NO: 2406816 - RNA, 19 nt, Homo sapiens
  misc_RNA (1)...(19): siRNA sense strand
gcggagaaugagagcaaag

SEQ ID NO: 2406817 - RNA, 19 nt, Homo sapiens
  misc_RNA (1)...(19): siRNA sense strand
aggaggaagaggaggaaca

SEQ ID NO: 2406818 - RNA, 19 nt, Homo sapiens
  misc_RNA (1)...(19): siRNA sense strand
uguggauaaugaagaggaa

SEQ ID NO: 2406819 - RNA, 19 nt, Homo sapiens
  misc_RNA (1)...(19): siRNA sense strand
cugccaagccucagcucaa

SEQ ID NO: 2406820 - RNA, 19 nt, Homo sapiens
  misc_RNA (1)...(19): siRNA sense strand
ggcuggaugaagacaguaa

SEQ ID NO: 2406821 - RNA, 19 nt, Homo sapiens
  misc_RNA (1)...(19): siRNA sense strand
gcuuacugcucgacagcga

SEQ ID NO: 2406822 - RNA, 19 nt, Homo sapiens
  misc_RNA (1)...(19): siRNA sense strand
accucaagaaggagaucaa

SEQ ID NO: 2406823 - RNA, 19 nt, Homo sapiens
  misc_RNA (1)...(19): siRNA sense strand
aagcacaagaagaaacaca

SEQ ID NO: 2406824 - RNA, 19 nt, Homo sapiens
  misc_RNA (1)...(19): siRNA sense strand
guacaauacaacugggaga

SEQ ID NO: 2406825 - RNA, 19 nt, Homo sapiens
  misc_RNA (1)...(19): siRNA sense strand
aggaggugguacaauacaa

SEQ ID NO: 2406826 - RNA, 19 nt, Homo sapiens
  misc_RNA (1)...(19): siRNA sense strand
ggaaacuguggaagaacca

SEQ ID NO: 2406827 - RNA, 19 nt, Homo sapiens
  misc_RNA (1)...(19): siRNA sense strand
ugcuggaguucaagugcaa

SEQ ID NO: 2406828 - RNA, 19 nt, Homo sapiens
  misc_RNA (1)...(19): siRNA sense strand
guacaauacaacugggaga

SEQ ID NO: 2406829 - RNA, 19 nt, Homo sapiens
  misc_RNA (1)...(19): siRNA sense strand
gaaagaagcaguuagguca

SEQ ID NO: 2406830 - RNA, 19 nt, Homo sapiens
  misc_RNA (1)...(19): siRNA sense strand
uaguaagagcuucaaggaa

SEQ ID NO: 2406831 - RNA, 19 nt, Homo sapiens
  misc_RNA (1)...(19): siRNA sense strand
aggaggugguacaauacaa

SEQ ID NO: 2406832 - RNA, 19 nt, Homo sapiens
  misc_RNA (1)...(19): siRNA sense strand
ggaaacuguggaagaacca

SEQ ID NO: 2406833 - RNA, 19 nt, Homo sapiens
  misc_RNA (1)...(19): siRNA sense strand
ugcuggaguucaagugcaa

SEQ ID NO: 2406834 - RNA, 19 nt, Homo sapiens
  misc_RNA (1)...(19): siRNA sense strand
ggacaaugccuuaugggaa

SEQ ID NO: 2406835 - RNA, 19 nt, Homo sapiens
  misc_RNA (1)...(19): siRNA sense strand
ggagagaccuuucugggaa

SEQ ID NO: 2406836 - RNA, 19 nt, Homo sapiens
  misc_RNA (1)...(19): siRNA sense strand
ggaaagaggacaaugccuu

SEQ ID NO: 2406837 - RNA, 19 nt, Homo sapiens
  misc_RNA (1)...(19): siRNA sense strand
cuuucuggaaggaggauaa

SEQ ID NO: 2406838 - RNA, 19 nt, Homo sapiens
  misc_RNA (1)...(19): siRNA sense strand
gagaaagcccugugggaag

SEQ ID NO: 2406839 - RNA, 19 nt, Homo sapiens
  misc_RNA (1)...(19): siRNA sense strand
ggagaaagcccugugggaa

SEQ ID NO: 2406840 - RNA, 19 nt, Homo sapiens
  misc_RNA (1)...(19): siRNA sense strand
ccuucuggaaagaggacaa

SEQ ID NO: 2406841 - RNA, 19 nt, Homo sapiens
  misc_RNA (1)...(19): siRNA sense strand
gggagaaagcccuguggga

SEQ ID NO: 2406842 - RNA, 19 nt, Homo sapiens
  misc_RNA (1)...(19): siRNA sense strand
agggaagagauguggacuu

SEQ ID NO: 2406843 - RNA, 19 nt, Homo sapiens
  misc_RNA (1)...(19): siRNA sense strand
cagaagaaacuaaugcaca

SEQ ID NO: 2406844 - RNA, 19 nt, Homo sapiens
  misc_RNA (1)...(19): siRNA sense strand
ccuucuggaaagaggaaaa

SEQ ID NO: 2406845 - RNA, 19 nt, Homo sapiens
  misc_RNA (1)...(19): siRNA sense strand
aaauagaggacuucaggga

SEQ ID NO: 2406846 - RNA, 19 nt, Homo sapiens
  misc_RNA (1)...(19): siRNA sense strand
cuuucagggaggaagagaa

SEQ ID NO: 2406847 - RNA, 19 nt, Homo sapiens
  misc_RNA (1)...(19): siRNA sense strand
acaagcugcaggaggaaaa

SEQ ID NO: 2406848 - RNA, 19 nt, Homo sapiens
  misc_RNA (1)...(19): siRNA sense strand
caguauucgccagaagaaa

SEQ ID NO: 2406849 - RNA, 19 nt, Homo sapiens
  misc_RNA (1)...(19): siRNA sense strand
gggaagaggagaaaaccuu

SEQ ID NO: 2406850 - RNA, 19 nt, Homo sapiens
  misc_RNA (1)...(19): siRNA sense strand
ccuucugggaaauggaaaa

SEQ ID NO: 2406851 - RNA, 19 nt, Homo sapiens
  misc_RNA (1)...(19): siRNA sense strand
ggauggagaacaauggcca

SEQ ID NO: 2406852 - RNA, 19 nt, Homo sapiens
  misc_RNA (1)...(19): siRNA sense strand
guuuauuaccaaagccaaa

SEQ ID NO: 2406853 - RNA, 19 nt, Homo sapiens
  misc_RNA (1)...(19): siRNA sense strand
uggcaaauguuauucggua

SEQ ID NO: 2406854 - RNA, 19 nt, Homo sapiens
  misc_RNA (1)...(19): siRNA sense strand
uagcaaaaucagauggaau

SEQ ID NO: 2406855 - RNA, 19 nt, Homo sapiens
  misc_RNA (1)...(19): siRNA sense strand
uggugaggcuaaacggcaa

SEQ ID NO: 2406856 - RNA, 19 nt, Homo sapiens
  misc_RNA (1)...(19): siRNA sense strand
gggugaagcugcugcugca

SEQ ID NO: 2406857 - RNA, 19 nt, Homo sapiens
  misc_RNA (1)...(19): siRNA sense strand
gcaucgugagccugcgaaa

SEQ ID NO: 2406858 - RNA, 19 nt, Homo sapiens
  misc_RNA (1)...(19): siRNA sense strand
augacacaguuaaggguuu

SEQ ID NO: 2406859 - RNA, 19 nt, Homo sapiens
  misc_RNA (1)...(19): siRNA sense strand
uuaccaaagccaaagaaaa

SEQ ID NO: 2406860 - RNA, 19 nt, Homo sapiens
  misc_RNA (1)...(19): siRNA sense strand
gguacaaaggcauggugga

SEQ ID NO: 2406861 - RNA, 19 nt, Homo sapiens
  misc_RNA (1)...(19): siRNA sense strand
agcgacaauucaaggguuu

SEQ ID NO: 2406862 - RNA, 19 nt, Homo sapiens
  misc_RNA (1)...(19): siRNA sense strand
guguuucaguacagggcau

SEQ ID NO: 2406863 - RNA, 19 nt, Homo sapiens
  misc_RNA (1)...(19): siRNA sense strand
aguuaaggguuuauuacca

SEQ ID NO: 2406864 - RNA, 19 nt, Homo sapiens
  misc_RNA (1)...(19): siRNA sense strand
aggugucgauauuggaaaa

SEQ ID NO: 2406865 - RNA, 19 nt, Homo sapiens
  misc_RNA (1)...(19): siRNA sense strand
aggcagaaucguugacaaa

SEQ ID NO: 2406866 - RNA, 19 nt, Homo sapiens
  misc_RNA (1)...(19): siRNA sense strand
ccuuuaaaccugauacaaa

SEQ ID NO: 2406867 - RNA, 19 nt, Homo sapiens
  misc_RNA (1)...(19): siRNA sense strand
cugaaugccaagaaggaaa

SEQ ID NO: 2406868 - RNA, 19 nt, Homo sapiens
  misc_RNA (1)...(19): siRNA sense strand
caagaguagugcaggguga

SEQ ID NO: 2406869 - RNA, 19 nt, Homo sapiens
  misc_RNA (1)...(19): siRNA sense strand
auucaaagugcgugagaga

SEQ ID NO: 2406870 - RNA, 19 nt, Homo sapiens
  misc_RNA (1)...(19): siRNA sense strand
ccuuagaagauggaagaaa

SEQ ID NO: 2406871 - RNA, 19 nt, Homo sapiens
  misc_RNA (1)...(19): siRNA sense strand
ccaagaaggaaaaguuaua

SEQ ID NO: 2406872 - RNA, 19 nt, Homo sapiens
  misc_RNA (1)...(19): siRNA sense strand
ccguuugucugaaggaaau

SEQ ID NO: 2406873 - RNA, 19 nt, Homo sapiens
  misc_RNA (1)...(19): siRNA sense strand
ugaaaugaugaaagccaua

SEQ ID NO: 2406874 - RNA, 19 nt, Homo sapiens
  misc_RNA (1)...(19): siRNA sense strand
acauugaugacgagaauuu

SEQ ID NO: 2406875 - RNA, 19 nt, Homo sapiens
  misc_RNA (1)...(19): siRNA sense strand
ugaaauacaacuugagcca

SEQ ID NO: 2406876 - RNA, 19 nt, Homo sapiens
  misc_RNA (1)...(19): siRNA sense strand
guaagagagaaguggcuuu

SEQ ID NO: 2406877 - RNA, 19 nt, Homo sapiens
  misc_RNA (1)...(19): siRNA sense strand
ucugcaaaccugagggaga

SEQ ID NO: 2406878 - RNA, 19 nt, Homo sapiens
  misc_RNA (1)...(19): siRNA sense strand
cuugaaaccuauggagcaa

SEQ ID NO: 2406879 - RNA, 19 nt, Homo sapiens
  misc_RNA (1)...(19): siRNA sense strand
caccagaagacuuggauga

SEQ ID NO: 2406880 - RNA, 19 nt, Homo sapiens
  misc_RNA (1)...(19): siRNA sense strand
cagaaaaggaagauacuau

SEQ ID NO: 2406881 - RNA, 19 nt, Homo sapiens
  misc_RNA (1)...(19): siRNA sense strand
aaacagagcuaauuggacu

SEQ ID NO: 2406882 - RNA, 19 nt, Homo sapiens
  misc_RNA (1)...(19): siRNA sense strand
aaccugagggagagaauua

SEQ ID NO: 2406883 - RNA, 19 nt, Homo sapiens
  misc_RNA (1)...(19): siRNA sense strand
agaagauggaagaaaccaa

SEQ ID NO: 2406884 - RNA, 19 nt, Homo sapiens
  misc_RNA (1)...(19): siRNA sense strand
agagaauuauggaagcaau

SEQ ID NO: 2406885 - RNA, 19 nt, Homo sapiens
  misc_RNA (1)...(19): siRNA sense strand
cuuagaagauggaagaaac

SEQ ID NO: 2406886 - RNA, 19 nt, Homo sapiens
  misc_RNA (1)...(19): siRNA sense strand
uggaaauguuugaagcgau

SEQ ID NO: 2406887 - RNA, 19 nt, Homo sapiens
  misc_RNA (1)...(19): siRNA sense strand
cuuaaagacaagaaagcca

SEQ ID NO: 2406888 - RNA, 19 nt, Homo sapiens
  misc_RNA (1)...(19): siRNA sense strand
acaaaguagggcaguggua

SEQ ID NO: 2406889 - RNA, 19 nt, Homo sapiens
  misc_RNA (1)...(19): siRNA sense strand
gaaaggaaaaccuggaaau

SEQ ID NO: 2406890 - RNA, 19 nt, Homo sapiens
  misc_RNA (1)...(19): siRNA sense strand
acuauggaccacagagauu

SEQ ID NO: 2406891 - RNA, 19 nt, Homo sapiens
  misc_RNA (1)...(19): siRNA sense strand
ugaaauugaugaacaggga

SEQ ID NO: 2406892 - RNA, 19 nt, Homo sapiens
  misc_RNA (1)...(19): siRNA sense strand
augcaggccuuaaagacaa

SEQ ID NO: 2406893 - RNA, 19 nt, Homo sapiens
  misc_RNA (1)...(19): siRNA sense strand
gauccuguaaauagagcaa

SEQ ID NO: 2406894 - RNA, 19 nt, Homo sapiens
  misc_RNA (1)...(19): siRNA sense strand
uuggaaaccuuguggaaac

SEQ ID NO: 2406895 - RNA, 19 nt, Homo sapiens
  misc_RNA (1)...(19): siRNA sense strand
gaaaguucacacagaccaa

SEQ ID NO: 2406896 - RNA, 19 nt, Homo sapiens
  misc_RNA (1)...(19): siRNA sense strand
cuguuuggaugaagacauu

SEQ ID NO: 2406897 - RNA, 19 nt, Homo sapiens
  misc_RNA (1)...(19): siRNA sense strand
cagagauggacuacagaca

SEQ ID NO: 2406898 - RNA, 19 nt, Homo sapiens
  misc_RNA (1)...(19): siRNA sense strand
aggaaaaccuggaaauguu

SEQ ID NO: 2406899 - RNA, 19 nt, Homo sapiens
  misc_RNA (1)...(19): siRNA sense strand
augaagacauugaugacga

SEQ ID NO: 2406900 - RNA, 19 nt, Homo sapiens
  misc_RNA (1)...(19): siRNA sense strand
gggcagugguaccaugaca

SEQ ID NO: 2406901 - RNA, 19 nt, Homo sapiens
  misc_RNA (1)...(19): siRNA sense strand
ccaacuaauggaagaucau

SEQ ID NO: 2406902 - RNA, 19 nt, Homo sapiens
  misc_RNA (1)...(19): siRNA sense strand
gcacacaaacgugggaaaa

SEQ ID NO: 2406903 - RNA, 19 nt, Homo sapiens
  misc_RNA (1)...(19): siRNA sense strand
cugaagaaugaaaugauga

SEQ ID NO: 2406904 - RNA, 19 nt, Homo sapiens
  misc_RNA (1)...(19): siRNA sense strand
uaacugaagaggagggauc

SEQ ID NO: 2406905 - RNA, 19 nt, Homo sapiens
  misc_RNA (1)...(19): siRNA sense strand
uuggaugcaaagaaagaaa

SEQ ID NO: 2406906 - RNA, 19 nt, Homo sapiens
  misc_RNA (1)...(19): siRNA sense strand
ugaggaugcuaaaggcaca

SEQ ID NO: 2406907 - RNA, 19 nt, Homo sapiens
  misc_RNA (1)...(19): siRNA sense strand
auucaguacccgaagaaca

SEQ ID NO: 2406908 - RNA, 19 nt, Homo sapiens
  misc_RNA (1)...(19): siRNA sense strand
aaauugaugaacagggaca

SEQ ID NO: 2406909 - RNA, 19 nt, Homo sapiens
  misc_RNA (1)...(19): siRNA sense strand
cugaauucaaagugcguga

SEQ ID NO: 2406910 - RNA, 19 nt, Homo sapiens
  misc_RNA (1)...(19): siRNA sense strand
agcaaugguuguuagaaaa

SEQ ID NO: 2406911 - RNA, 19 nt, Homo sapiens
  misc_RNA (1)...(19): siRNA sense strand
uuggucagcucaaaggaaa

SEQ ID NO: 2406912 - RNA, 19 nt, Homo sapiens
  misc_RNA (1)...(19): siRNA sense strand
caaaccugagggagagaau

SEQ ID NO: 2406913 - RNA, 19 nt, Homo sapiens
  misc_RNA (1)...(19): siRNA sense strand
gggaaggaaaguucacaca

SEQ ID NO: 2406914 - RNA, 19 nt, Homo sapiens
  misc_RNA (1)...(19): siRNA sense strand
cgaagaacaaaguagggca

SEQ ID NO: 2406915 - RNA, 19 nt, Homo sapiens
  misc_RNA (1)...(19): siRNA sense strand
cuguaaauagagcaaagaa

SEQ ID NO: 2406916 - RNA, 19 nt, Homo sapiens
  misc_RNA (1)...(19): siRNA sense strand
agcacacaaacgugggaaa

SEQ ID NO: 2406917 - RNA, 19 nt, Homo sapiens
  misc_RNA (1)...(19): siRNA sense strand
augaaaugaugaaagccau

SEQ ID NO: 2406918 - RNA, 19 nt, Homo sapiens
  misc_RNA (1)...(19): siRNA sense strand
ccacaaagcuucuggagga

SEQ ID NO: 2406919 - RNA, 19 nt, Homo sapiens
  misc_RNA (1)...(19): siRNA sense strand
ccaaggaggcggagugcaa

SEQ ID NO: 2406920 - RNA, 19 nt, Homo sapiens
  misc_RNA (1)...(19): siRNA sense strand
ugucggaacagaagagaaa

SEQ ID NO: 2406921 - RNA, 19 nt, Homo sapiens
  misc_RNA (1)...(19): siRNA sense strand
gaagaagagcaaagagcau

SEQ ID NO: 2406922 - RNA, 19 nt, Homo sapiens
  misc_RNA (1)...(19): siRNA sense strand
ugaaagaagaugaggugau

SEQ ID NO: 2406923 - RNA, 19 nt, Homo sapiens
  misc_RNA (1)...(19): siRNA sense strand
aggagauagaagagaagaa

SEQ ID NO: 2406924 - RNA, 19 nt, Homo sapiens
  misc_RNA (1)...(19): siRNA sense strand
agauagaagagaagaagau

SEQ ID NO: 2406925 - RNA, 19 nt, Homo sapiens
  misc_RNA (1)...(19): siRNA sense strand
augaggaggaaaugggaaa

SEQ ID NO: 2406926 - RNA, 19 nt, Homo sapiens
  misc_RNA (1)...(19): siRNA sense strand
gcuuaaaccucuacaggga

SEQ ID NO: 2406927 - RNA, 19 nt, Homo sapiens
  misc_RNA (1)...(19): siRNA sense strand
aggagaaggagcuggagaa

SEQ ID NO: 2406928 - RNA, 19 nt, Homo sapiens
  misc_RNA (1)...(19): siRNA sense strand
auucaaagguacggauaua

SEQ ID NO: 2406929 - RNA, 19 nt, Homo sapiens
  misc_RNA (1)...(19): siRNA sense strand
acauugagaggaaggauaa

SEQ ID NO: 2406930 - RNA, 19 nt, Homo sapiens
  misc_RNA (1)...(19): siRNA sense strand
aggaagaccuugcaggaca

SEQ ID NO: 2406931 - RNA, 19 nt, Homo sapiens
  misc_RNA (1)...(19): siRNA sense strand
ugcaagagacagaggaaga

SEQ ID NO: 2406932 - RNA, 19 nt, Homo sapiens
  misc_RNA (1)...(19): siRNA sense strand
aagacaagacguugaaaga

SEQ ID NO: 2406933 - RNA, 19 nt, Homo sapiens
  misc_RNA (1)...(19): siRNA sense strand
gcuuaugaggaaaggauga

SEQ ID NO: 2406934 - RNA, 19 nt, Homo sapiens
  misc_RNA (1)...(19): siRNA sense strand
ggaacuacagagagaacuu

SEQ ID NO: 2406935 - RNA, 19 nt, Homo sapiens
  misc_RNA (1)...(19): siRNA sense strand
gaaaguuggaggaagaaaa

SEQ ID NO: 2406936 - RNA, 19 nt, Homo sapiens
  misc_RNA (1)...(19): siRNA sense strand
cagaagagugugaagacau

SEQ ID NO: 2406937 - RNA, 19 nt, Homo sapiens
  misc_RNA (1)...(19): siRNA sense strand
gugcauggccacagaacuu

SEQ ID NO: 2406938 - RNA, 19 nt, Homo sapiens
  misc_RNA (1)...(19): siRNA sense strand
gaauaaagagauagcccuu

SEQ ID NO: 2406939 - RNA, 19 nt, Homo sapiens
  misc_RNA (1)...(19): siRNA sense strand
agaagcugauggagggaga

SEQ ID NO: 2406940 - RNA, 19 nt, Homo sapiens
  misc_RNA (1)...(19): siRNA sense strand
uugcaugauucaagagcau

SEQ ID NO: 2406941 - RNA, 19 nt, Homo sapiens
  misc_RNA (1)...(19): siRNA sense strand
cgggagcaguugaagaaga

SEQ ID NO: 2406942 - RNA, 19 nt, Homo sapiens
  misc_RNA (1)...(19): siRNA sense strand
gagaggaaggauaaggaca

SEQ ID NO: 2406943 - RNA, 19 nt, Homo sapiens
  misc_RNA (1)...(19): siRNA sense strand
agaggaaggauaaggacau

SEQ ID NO: 2406944 - RNA, 19 nt, Homo sapiens
  misc_RNA (1)...(19): siRNA sense strand
guccagaagcugaagaaca

SEQ ID NO: 2406945 - RNA, 19 nt, Homo sapiens
  misc_RNA (1)...(19): siRNA sense strand
ccacacagagggagaaagu

SEQ ID NO: 2406946 - RNA, 19 nt, Homo sapiens
  misc_RNA (1)...(19): siRNA sense strand
gggugaucauucaaaggua

SEQ ID NO: 2406947 - RNA, 19 nt, Homo sapiens
  misc_RNA (1)...(19): siRNA sense strand
ggaggaagaaaaugagaau

SEQ ID NO: 2406948 - RNA, 19 nt, Homo sapiens
  misc_RNA (1)...(19): siRNA sense strand
uggacaaagcucugcagaa

SEQ ID NO: 2406949 - RNA, 19 nt, Homo sapiens
  misc_RNA (1)...(19): siRNA sense strand
agaaacaucaugaaggaca

SEQ ID NO: 2406950 - RNA, 19 nt, Homo sapiens
  misc_RNA (1)...(19): siRNA sense strand
ucucugaagcccugaggaa

SEQ ID NO: 2406951 - RNA, 19 nt, Homo sapiens
  misc_RNA (1)...(19): siRNA sense strand
cacauugagaggaaggaua

SEQ ID NO: 2406952 - RNA, 19 nt, Homo sapiens
  misc_RNA (1)...(19): siRNA sense strand
uggacaagcagaaggcaga

SEQ ID NO: 2406953 - RNA, 19 nt, Homo sapiens
  misc_RNA (1)...(19): siRNA sense strand
cugcaaacugaaagaagau

SEQ ID NO: 2406954 - RNA, 19 nt, Homo sapiens
  misc_RNA (1)...(19): siRNA sense strand
gcaaacugaaagaagauga

SEQ ID NO: 2406955 - RNA, 19 nt, Homo sapiens
  misc_RNA (1)...(19): siRNA sense strand
cugcccacauugagaggaa

SEQ ID NO: 2406956 - RNA, 19 nt, Homo sapiens
  misc_RNA (1)...(19): siRNA sense strand
aaugcaaguuagaagaaga

SEQ ID NO: 2406957 - RNA, 19 nt, Homo sapiens
  misc_RNA (1)...(19): siRNA sense strand
gcugauggagggagaacuu

SEQ ID NO: 2406958 - RNA, 19 nt, Homo sapiens
  misc_RNA (1)...(19): siRNA sense strand
uggaggacacccagaggaa

SEQ ID NO: 2406959 - RNA, 19 nt, Homo sapiens
  misc_RNA (1)...(19): siRNA sense strand
ccucgauggcugagaagga

SEQ ID NO: 2406960 - RNA, 19 nt, Homo sapiens
  misc_RNA (1)...(19): siRNA sense strand
agacaguggcugagcagga

SEQ ID NO: 2406961 - RNA, 19 nt, Homo sapiens
  misc_RNA (1)...(19): siRNA sense strand
gggaguuccaggaggagau

SEQ ID NO: 2406962 - RNA, 19 nt, Homo sapiens
  misc_RNA (1)...(19): siRNA sense strand
gagauagaagagaagaaga

SEQ ID NO: 2406963 - RNA, 19 nt, Homo sapiens
  misc_RNA (1)...(19): siRNA sense strand
gcaucaggagacucagaaa

SEQ ID NO: 2406964 - RNA, 19 nt, Homo sapiens
  misc_RNA (1)...(19): siRNA sense strand
acugcaaacugaaagaaga

SEQ ID NO: 2406965 - RNA, 19 nt, Homo sapiens
  misc_RNA (1)...(19): siRNA sense strand
uccaggaacuacagagaga

SEQ ID NO: 2406966 - RNA, 19 nt, Homo sapiens
  misc_RNA (1)...(19): siRNA sense strand
ggaaacugcagaagggucu

SEQ ID NO: 2406967 - RNA, 19 nt, Homo sapiens
  misc_RNA (1)...(19): siRNA sense strand
gaaaauucagacaaggaaa

SEQ ID NO: 2406968 - RNA, 19 nt, Homo sapiens
  misc_RNA (1)...(19): siRNA sense strand
ccucagagacaaagagccu

SEQ ID NO: 2406969 - RNA, 19 nt, Homo sapiens
  misc_RNA (1)...(19): siRNA sense strand
agagugagcuggaggugca

SEQ ID NO: 2406970 - RNA, 19 nt, Homo sapiens
  misc_RNA (1)...(19): siRNA sense strand
aagaaagacaagacguuga

SEQ ID NO: 2406971 - RNA, 19 nt, Homo sapiens
  misc_RNA (1)...(19): siRNA sense strand
agaagcaacaccagaauga

SEQ ID NO: 2406972 - RNA, 19 nt, Homo sapiens
  misc_RNA (1)...(19): siRNA sense strand
gagggaaugaucagauuau

SEQ ID NO: 2406973 - RNA, 19 nt, Homo sapiens
  misc_RNA (1)...(19): siRNA sense strand
agaagaagaugaaagccga

SEQ ID NO: 2406974 - RNA, 19 nt, Homo sapiens
  misc_RNA (1)...(19): siRNA sense strand
agaugaaagccgagaacac

SEQ ID NO: 2406975 - RNA, 19 nt, Homo sapiens
  misc_RNA (1)...(19): siRNA sense strand
aggaaaugggaaaucacaa

SEQ ID NO: 2406976 - RNA, 19 nt, Homo sapiens
  misc_RNA (1)...(19): siRNA sense strand
cauucaagaacuucgaaau

SEQ ID NO: 2406977 - RNA, 19 nt, Homo sapiens
  misc_RNA (1)...(19): siRNA sense strand
acggauucuuguuggaaau

SEQ ID NO: 2406978 - RNA, 19 nt, Homo sapiens
  misc_RNA (1)...(19): siRNA sense strand
cucauaagcuuaagagcca

SEQ ID NO: 2406979 - RNA, 19 nt, Homo sapiens
  misc_RNA (1)...(19): siRNA sense strand
gauaugaccaacauggcua

SEQ ID NO: 2406980 - RNA, 19 nt, Homo sapiens
  misc_RNA (1)...(19): siRNA sense strand
gaauuauccugaagccuga

SEQ ID NO: 2406981 - RNA, 19 nt, Homo sapiens
  misc_RNA (1)...(19): siRNA sense strand
agauaaucgugaucggcga

SEQ ID NO: 2406982 - RNA, 19 nt, Homo sapiens
  misc_RNA (1)...(19): siRNA sense strand
caaugauauaccacggauu

SEQ ID NO: 2406983 - RNA, 19 nt, Homo sapiens
  misc_RNA (1)...(19): siRNA sense strand
gcgacuccaaugugggcaa

SEQ ID NO: 2406984 - RNA, 19 nt, Homo sapiens
  misc_RNA (1)...(19): siRNA sense strand
ugaccauguggaagcuaua

SEQ ID NO: 2406985 - RNA, 19 nt, Homo sapiens
  misc_RNA (1)...(19): siRNA sense strand
guguaugauaugaccaaca

SEQ ID NO: 2406986 - RNA, 19 nt, Homo sapiens
  misc_RNA (1)...(19): siRNA sense strand
cagaaauguacaugcuguu

SEQ ID NO: 2406987 - RNA, 19 nt, Homo sapiens
  misc_RNA (1)...(19): siRNA sense strand
gcgggaaggagguggaaca

SEQ ID NO: 2406988 - RNA, 19 nt, Homo sapiens
  misc_RNA (1)...(19): siRNA sense strand
ggacguuccucuacggcau

SEQ ID NO: 2406989 - RNA, 19 nt, Homo sapiens
  misc_RNA (1)...(19): siRNA sense strand
aagaggagcuggaggugga

SEQ ID NO: 2406990 - RNA, 19 nt, Homo sapiens
  misc_RNA (1)...(19): siRNA sense strand
gcagcaagcagcagagccu

SEQ ID NO: 2406991 - RNA, 19 nt, Homo sapiens
  misc_RNA (1)...(19): siRNA sense strand
agauggaccaacacagaaa

SEQ ID NO: 2406992 - RNA, 19 nt, Homo sapiens
  misc_RNA (1)...(19): siRNA sense strand
uggaaucaugaguggagua

SEQ ID NO: 2406993 - RNA, 19 nt, Homo sapiens
  misc_RNA (1)...(19): siRNA sense strand
cuuguuugguucauggcaa

SEQ ID NO: 2406994 - RNA, 19 nt, Homo sapiens
  misc_RNA (1)...(19): siRNA sense strand
cggaaguucuggagauccu

SEQ ID NO: 2406995 - RNA, 19 nt, Homo sapiens
  misc_RNA (1)...(19): siRNA sense strand
gcgagguggcucuggacau

SEQ ID NO: 2406996 - RNA, 19 nt, Homo sapiens
  misc_RNA (1)...(19): siRNA sense strand
ugacggagcaggaggugga

SEQ ID NO: 2406997 - RNA, 19 nt, Homo sapiens
  misc_RNA (1)...(19): siRNA sense strand
ugguggacgugcugcaaga

SEQ ID NO: 2406998 - RNA, 19 nt, Homo sapiens
  misc_RNA (1)...(19): siRNA sense strand
ccauguucgcccugcgcaa

SEQ ID NO: 2406999 - RNA, 19 nt, Homo sapiens
  misc_RNA (1)...(19): siRNA sense strand
augcagaacuacaaagcaa

SEQ ID NO: 2407000 - RNA, 19 nt, Homo sapiens
  misc_RNA (1)...(19): siRNA sense strand
aggagaaccgagagaggaa

SEQ ID NO: 2407001 - RNA, 19 nt, Homo sapiens
  misc_RNA (1)...(19): siRNA sense strand
aggcagugcuccugggaca

SEQ ID NO: 2407002 - RNA, 19 nt, Homo sapiens
  misc_RNA (1)...(19): siRNA sense strand
cgaaaugccgagcgagcaa

SEQ ID NO: 2407003 - RNA, 19 nt, Homo sapiens
  misc_RNA (1)...(19): siRNA sense strand
gugagacauuugugggcaa

SEQ ID NO: 2407004 - RNA, 19 nt, Homo sapiens
  misc_RNA (1)...(19): siRNA sense strand
guguuaaggaauuagcaaa

SEQ ID NO: 2407005 - RNA, 19 nt, Homo sapiens
  misc_RNA (1)...(19): siRNA sense strand
agaguuugccagugguaaa

SEQ ID NO: 2407006 - RNA, 19 nt, Homo sapiens
  misc_RNA (1)...(19): siRNA sense strand
agaaagaacaagcuggaga

SEQ ID NO: 2407007 - RNA, 19 nt, Homo sapiens
  misc_RNA (1)...(19): siRNA sense strand
caaacagaagauagaguau

SEQ ID NO: 2407008 - RNA, 19 nt, Homo sapiens
  misc_RNA (1)...(19): siRNA sense strand
ccgagaacuuccagaacca

SEQ ID NO: 2407009 - RNA, 19 nt, Homo sapiens
  misc_RNA (1)...(19): siRNA sense strand
cccaagauggagugagcaa

SEQ ID NO: 2407010 - RNA, 19 nt, Homo sapiens
  misc_RNA (1)...(19): siRNA sense strand
ugaaacaggaaaugaccaa

SEQ ID NO: 2407011 - RNA, 19 nt, Homo sapiens
  misc_RNA (1)...(19): siRNA sense strand
ccaaagaugcagaacuaca

SEQ ID NO: 2407012 - RNA, 19 nt, Homo sapiens
  misc_RNA (1)...(19): siRNA sense strand
cgaaacuugacuuuggaaa

SEQ ID NO: 2407013 - RNA, 19 nt, Homo sapiens
  misc_RNA (1)...(19): siRNA sense strand
augacaugcuacagaaaga

SEQ ID NO: 2407014 - RNA, 19 nt, Homo sapiens
  misc_RNA (1)...(19): siRNA sense strand
aggaaaugaccaaacagaa

SEQ ID NO: 2407015 - RNA, 19 nt, Homo sapiens
  misc_RNA (1)...(19): siRNA sense strand
aaacagaaaugaugagccu

SEQ ID NO: 2407016 - RNA, 19 nt, Homo sapiens
  misc_RNA (1)...(19): siRNA sense strand
caguaaugcagaaggucuu

SEQ ID NO: 2407017 - RNA, 19 nt, Homo sapiens
  misc_RNA (1)...(19): siRNA sense strand
gugacaacagugagacauu

SEQ ID NO: 2407018 - RNA, 19 nt, Homo sapiens
  misc_RNA (1)...(19): siRNA sense strand
aggaaacacaauauggauu

SEQ ID NO: 2407019 - RNA, 19 nt, Homo sapiens
  misc_RNA (1)...(19): siRNA sense strand
gcucagcaaggaagaggaa

SEQ ID NO: 2407020 - RNA, 19 nt, Homo sapiens
  misc_RNA (1)...(19): siRNA sense strand
gauaacaagcagaaagaac

SEQ ID NO: 2407021 - RNA, 19 nt, Homo sapiens
  misc_RNA (1)...(19): siRNA sense strand
gcagaaagaacaagcugga

SEQ ID NO: 2407022 - RNA, 19 nt, Homo sapiens
  misc_RNA (1)...(19): siRNA sense strand
aguccaggauaaagagcuu

SEQ ID NO: 2407023 - RNA, 19 nt, Homo sapiens
  misc_RNA (1)...(19): siRNA sense strand
gagaguuaggccagcacaa

SEQ ID NO: 2407024 - RNA, 19 nt, Homo sapiens
  misc_RNA (1)...(19): siRNA sense strand
agagcuuagaacagcgaaa

SEQ ID NO: 2407025 - RNA, 19 nt, Homo sapiens
  misc_RNA (1)...(19): siRNA sense strand
augcgaaguaugaagauuu

SEQ ID NO: 2407026 - RNA, 19 nt, Homo sapiens
  misc_RNA (1)...(19): siRNA sense strand
agagaagcagcaugaacaa

SEQ ID NO: 2407027 - RNA, 19 nt, Homo sapiens
  misc_RNA (1)...(19): siRNA sense strand
ccagggacuaugaaagcaa

SEQ ID NO: 2407028 - RNA, 19 nt, Homo sapiens
  misc_RNA (1)...(19): siRNA sense strand
auaacaagcagaaagaaca

SEQ ID NO: 2407029 - RNA, 19 nt, Homo sapiens
  misc_RNA (1)...(19): siRNA sense strand
ggcugaaagaagagggucu

SEQ ID NO: 2407030 - RNA, 19 nt, Homo sapiens
  misc_RNA (1)...(19): siRNA sense strand
guggaagauccuuugacua

SEQ ID NO: 2407031 - RNA, 19 nt, Homo sapiens
  misc_RNA (1)...(19): siRNA sense strand
cagaagaaucaaacggugu

SEQ ID NO: 2407032 - RNA, 19 nt, Homo sapiens
  misc_RNA (1)...(19): siRNA sense strand
caaaagaagaugccgagaa

SEQ ID NO: 2407033 - RNA, 19 nt, Homo sapiens
  misc_RNA (1)...(19): siRNA sense strand
cguuaugagaagagauaug

SEQ ID NO: 2407034 - RNA, 19 nt, Homo sapiens
  misc_RNA (1)...(19): siRNA sense strand
gguguuaaggaauuagcaa

SEQ ID NO: 2407035 - RNA, 19 nt, Homo sapiens
  misc_RNA (1)...(19): siRNA sense strand
aaggguagugggauaguua

SEQ ID NO: 2407036 - RNA, 19 nt, Homo sapiens
  misc_RNA (1)...(19): siRNA sense strand
ccaccugcccagagcaaga

SEQ ID NO: 2407037 - RNA, 19 nt, Homo sapiens
  misc_RNA (1)...(19): siRNA sense strand
uacagaacaaggagaacaa

SEQ ID NO: 2407038 - RNA, 19 nt, Homo sapiens
  misc_RNA (1)...(19): siRNA sense strand
aacaauaacaccaaggaca

SEQ ID NO: 2407039 - RNA, 19 nt, Homo sapiens
  misc_RNA (1)...(19): siRNA sense strand
caggaaaugaccaaacaga

SEQ ID NO: 2407040 - RNA, 19 nt, Homo sapiens
  misc_RNA (1)...(19): siRNA sense strand
acuacauacagaagaauca

SEQ ID NO: 2407041 - RNA, 19 nt, Homo sapiens
  misc_RNA (1)...(19): siRNA sense strand
ccucaaguauauuugcaga

SEQ ID NO: 2407042 - RNA, 19 nt, Homo sapiens
  misc_RNA (1)...(19): siRNA sense strand
cagcaguaaugcagaaggu

SEQ ID NO: 2407043 - RNA, 19 nt, Homo sapiens
  misc_RNA (1)...(19): siRNA sense strand
agccaucauuugacagcaa

SEQ ID NO: 2407044 - RNA, 19 nt, Homo sapiens
  misc_RNA (1)...(19): siRNA sense strand
acaaaaugagugugcagaa

SEQ ID NO: 2407045 - RNA, 19 nt, Homo sapiens
  misc_RNA (1)...(19): siRNA sense strand
cagugacaacagugagaca

SEQ ID NO: 2407046 - RNA, 19 nt, Homo sapiens
  misc_RNA (1)...(19): siRNA sense strand
aguaugaguccaggauaaa

SEQ ID NO: 2407047 - RNA, 19 nt, Homo sapiens
  misc_RNA (1)...(19): siRNA sense strand
aggaagaggaagcaggugu

SEQ ID NO: 2407048 - RNA, 19 nt, Homo sapiens
  misc_RNA (1)...(19): siRNA sense strand
augagaagagauaugggaa

SEQ ID NO: 2407049 - RNA, 19 nt, Homo sapiens
  misc_RNA (1)...(19): siRNA sense strand
gaagcagguguuaaggaau

SEQ ID NO: 2407050 - RNA, 19 nt, Homo sapiens
  misc_RNA (1)...(19): siRNA sense strand
gcaguaaugcagaaggucu

SEQ ID NO: 2407051 - RNA, 19 nt, Homo sapiens
  misc_RNA (1)...(19): siRNA sense strand
cagaaggucuugagaaaac

SEQ ID NO: 2407052 - RNA, 19 nt, Homo sapiens
  misc_RNA (1)...(19): siRNA sense strand
gaacggugcgcaugggcau

SEQ ID NO: 2407053 - RNA, 19 nt, Homo sapiens
  misc_RNA (1)...(19): siRNA sense strand
aaagaaaugacaugcuaca

SEQ ID NO: 2407054 - RNA, 19 nt, Homo sapiens
  misc_RNA (1)...(19): siRNA sense strand
ggacaaaagcagagauguu

SEQ ID NO: 2407055 - RNA, 19 nt, Homo sapiens
  misc_RNA (1)...(19): siRNA sense strand
gagaauuaucacuggagaa

SEQ ID NO: 2407056 - RNA, 19 nt, Homo sapiens
  misc_RNA (1)...(19): siRNA sense strand
ccauucagauagagagaca

SEQ ID NO: 2407057 - RNA, 19 nt, Homo sapiens
  misc_RNA (1)...(19): siRNA sense strand
uggcaaagcacaaugggaa

SEQ ID NO: 2407058 - RNA, 19 nt, Homo sapiens
  misc_RNA (1)...(19): siRNA sense strand
agggauuacuugaaggaga

SEQ ID NO: 2407059 - RNA, 19 nt, Homo sapiens
  misc_RNA (1)...(19): siRNA sense strand
ucagaaugaccuugggcua

SEQ ID NO: 2407060 - RNA, 19 nt, Homo sapiens
  misc_RNA (1)...(19): siRNA sense strand
agauagagagacaagcuaa

SEQ ID NO: 2407061 - RNA, 19 nt, Homo sapiens
  misc_RNA (1)...(19): siRNA sense strand
ugcuaaugaugauggcaaa

SEQ ID NO: 2407062 - RNA, 19 nt, Homo sapiens
  misc_RNA (1)...(19): siRNA sense strand
aggaaaaggaagagaaauc

SEQ ID NO: 2407063 - RNA, 19 nt, Homo sapiens
  misc_RNA (1)...(19): siRNA sense strand
ucgcaaauagaaaggaaaa

SEQ ID NO: 2407064 - RNA, 19 nt, Homo sapiens
  misc_RNA (1)...(19): siRNA sense strand
gcaaaaguuguguggcuaa

SEQ ID NO: 2407065 - RNA, 19 nt, Homo sapiens
  misc_RNA (1)...(19): siRNA sense strand
ugauaagacagaugaagau

SEQ ID NO: 2407066 - RNA, 19 nt, Homo sapiens
  misc_RNA (1)...(19): siRNA sense strand
cggagaagucgcaaauaga

SEQ ID NO: 2407067 - RNA, 19 nt, Homo sapiens
  misc_RNA (1)...(19): siRNA sense strand
cacaaugggaagaagacaa

SEQ ID NO: 2407068 - RNA, 19 nt, Homo sapiens
  misc_RNA (1)...(19): siRNA sense strand
gagcagggugcgaaggaca

SEQ ID NO: 2407069 - RNA, 19 nt, Homo sapiens
  misc_RNA (1)...(19): siRNA sense strand
agucgcaaauagaaaggaa

SEQ ID NO: 2407070 - RNA, 19 nt, Homo sapiens
  misc_RNA (1)...(19): siRNA sense strand
cuacagaagcagccacaau

SEQ ID NO: 2407071 - RNA, 19 nt, Homo sapiens
  misc_RNA (1)...(19): siRNA sense strand
uguguaguuuggaguguaa

SEQ ID NO: 2407072 - RNA, 19 nt, Homo sapiens
  misc_RNA (1)...(19): siRNA sense strand
aauuuuaguucaagggcaa

SEQ ID NO: 2407073 - RNA, 19 nt, Homo sapiens
  misc_RNA (1)...(19): siRNA sense strand
acucugugguguaaagauu

SEQ ID NO: 2407074 - RNA, 19 nt, Homo sapiens
  misc_RNA (1)...(19): siRNA sense strand
ugcauaauccugugagaau

SEQ ID NO: 2407075 - RNA, 19 nt, Homo sapiens
  misc_RNA (1)...(19): siRNA sense strand
gcugaaaagcauaucuaua

SEQ ID NO: 2407076 - RNA, 19 nt, Homo sapiens
  misc_RNA (1)...(19): siRNA sense strand
uguagaacucuguggugua

SEQ ID NO: 2407077 - RNA, 19 nt, Homo sapiens
  misc_RNA (1)...(19): siRNA sense strand
agucuugggacgaggccua

SEQ ID NO: 2407078 - RNA, 19 nt, Homo sapiens
  misc_RNA (1)...(19): siRNA sense strand
agauacuggcucaggaaaa

SEQ ID NO: 2407079 - RNA, 19 nt, Homo sapiens
  misc_RNA (1)...(19): siRNA sense strand
agauugugguaguagauga

SEQ ID NO: 2407080 - RNA, 19 nt, Homo sapiens
  misc_RNA (1)...(19): siRNA sense strand
gauugugguaguagaugaa

SEQ ID NO: 2407081 - RNA, 19 nt, Homo sapiens
  misc_RNA (1)...(19): siRNA sense strand
cuauguuggcaaagcacaa

SEQ ID NO: 2407082 - RNA, 19 nt, Homo sapiens
  misc_RNA (1)...(19): siRNA sense strand
aggaagaccagauugaaaa

SEQ ID NO: 2407083 - RNA, 19 nt, Homo sapiens
  misc_RNA (1)...(19): siRNA sense strand
gcagaugauuccuguggga

SEQ ID NO: 2407084 - RNA, 19 nt, Homo sapiens
  misc_RNA (1)...(19): siRNA sense strand
gugucaggcugguugucaa

SEQ ID NO: 2407085 - RNA, 19 nt, Homo sapiens
  misc_RNA (1)...(19): siRNA sense strand
augcuaaugaugauggcaa

SEQ ID NO: 2407086 - RNA, 19 nt, Homo sapiens
  misc_RNA (1)...(19): siRNA sense strand
uaaggaaaaggaagagaaa

SEQ ID NO: 2407087 - RNA, 19 nt, Homo sapiens
  misc_RNA (1)...(19): siRNA sense strand
gcacaggagucuugggacg

SEQ ID NO: 2407088 - RNA, 19 nt, Homo sapiens
  misc_RNA (1)...(19): siRNA sense strand
uaguauuuguggacugcaa

SEQ ID NO: 2407089 - RNA, 19 nt, Homo sapiens
  misc_RNA (1)...(19): siRNA sense strand
uggucguuauggagaguau

SEQ ID NO: 2407090 - RNA, 19 nt, Homo sapiens
  misc_RNA (1)...(19): siRNA sense strand
guguaaagcgaaacaucuu

SEQ ID NO: 2407091 - RNA, 19 nt, Homo sapiens
  misc_RNA (1)...(19): siRNA sense strand
gauaauuaaaccagaccca

SEQ ID NO: 2407092 - RNA, 19 nt, Homo sapiens
  misc_RNA (1)...(19): siRNA sense strand
uacaccaaccagagaguua

SEQ ID NO: 2407093 - RNA, 19 nt, Homo sapiens
  misc_RNA (1)...(19): siRNA sense strand
cuaaagaauugaugagugg

SEQ ID NO: 2407094 - RNA, 19 nt, Homo sapiens
  misc_RNA (1)...(19): siRNA sense strand
gggauuacuugaaggagac

SEQ ID NO: 2407095 - RNA, 19 nt, Homo sapiens
  misc_RNA (1)...(19): siRNA sense strand
gcuaaagaauugaugagug

SEQ ID NO: 2407096 - RNA, 19 nt, Homo sapiens
  misc_RNA (1)...(19): siRNA sense strand
uuuggaguguaaagcgaaa

SEQ ID NO: 2407097 - RNA, 19 nt, Homo sapiens
  misc_RNA (1)...(19): siRNA sense strand
gaaaaggaagagaaaucaa

SEQ ID NO: 2407098 - RNA, 19 nt, Homo sapiens
  misc_RNA (1)...(19): siRNA sense strand
cuugaagaaaucaggcuau

SEQ ID NO: 2407099 - RNA, 19 nt, Homo sapiens
  misc_RNA (1)...(19): siRNA sense strand
aaucaagaggaaugcuaau

SEQ ID NO: 2407100 - RNA, 19 nt, Homo sapiens
  misc_RNA (1)...(19): siRNA sense strand
aaguuaaggaaaaggaaga

SEQ ID NO: 2407101 - RNA, 19 nt, Homo sapiens
  misc_RNA (1)...(19): siRNA sense strand
cagauagagagacaagcua

SEQ ID NO: 2407102 - RNA, 19 nt, Homo sapiens
  misc_RNA (1)...(19): siRNA sense strand
guuaagguuaucauagcaa

SEQ ID NO: 2407103 - RNA, 19 nt, Homo sapiens
  misc_RNA (1)...(19): siRNA sense strand
aaaucaagaggaaugcuaa

SEQ ID NO: 2407104 - RNA, 19 nt, Homo sapiens
  misc_RNA (1)...(19): siRNA sense strand
gucgcaaauagaaaggaaa

SEQ ID NO: 2407105 - RNA, 19 nt, Homo sapiens
  misc_RNA (1)...(19): siRNA sense strand
cuucuacaaguuaaggaaa

SEQ ID NO: 2407106 - RNA, 19 nt, Homo sapiens
  misc_RNA (1)...(19): siRNA sense strand
gcuuuauucgagagcaaaa

SEQ ID NO: 2407107 - RNA, 19 nt, Homo sapiens
  misc_RNA (1)...(19): siRNA sense strand
ccuaaugauugucagacca

SEQ ID NO: 2407108 - RNA, 19 nt, Homo sapiens
  misc_RNA (1)...(19): siRNA sense strand
aagcacaaugggaagaaga

SEQ ID NO: 2407109 - RNA, 19 nt, Homo sapiens
  misc_RNA (1)...(19): siRNA sense strand
uguuaucaugcgagcuuua

SEQ ID NO: 2407110 - RNA, 19 nt, Homo sapiens
  misc_RNA (1)...(19): siRNA sense strand
cagaaugaccuugggcuau

SEQ ID NO: 2407111 - RNA, 19 nt, Homo sapiens
  misc_RNA (1)...(19): siRNA sense strand
uggagauagccaaggagaa

SEQ ID NO: 2407112 - RNA, 19 nt, Homo sapiens
  misc_RNA (1)...(19): siRNA sense strand
uggaagagaagaagaggga

SEQ ID NO: 2407113 - RNA, 19 nt, Homo sapiens
  misc_RNA (1)...(19): siRNA sense strand
acgaacaaucagagguaca

SEQ ID NO: 2407114 - RNA, 19 nt, Homo sapiens
  misc_RNA (1)...(19): siRNA sense strand
gcugaaugcucccggcaga

SEQ ID NO: 2407115 - RNA, 19 nt, Homo sapiens
  misc_RNA (1)...(19): siRNA sense strand
uggccaaggagcuggaaga

SEQ ID NO: 2407116 - RNA, 19 nt, Homo sapiens
  misc_RNA (1)...(19): siRNA sense strand
ggaagauccuggaguccca

SEQ ID NO: 2407117 - RNA, 19 nt, Homo sapiens
  misc_RNA (1)...(19): siRNA sense strand
ucuucauggucuauggcaa

SEQ ID NO: 2407118 - RNA, 19 nt, Homo sapiens
  misc_RNA (1)...(19): siRNA sense strand
gaagagaagaagagggagg

SEQ ID NO: 2407119 - RNA, 19 nt, Homo sapiens
  misc_RNA (1)...(19): siRNA sense strand
cugccaucaucuugaguga

SEQ ID NO: 2407120 - RNA, 19 nt, Homo sapiens
  misc_RNA (1)...(19): siRNA sense strand
ugcacuaaggauaaggaaa

SEQ ID NO: 2407121 - RNA, 19 nt, Homo sapiens
  misc_RNA (1)...(19): siRNA sense strand
agaagaagagggaggcgga

SEQ ID NO: 2407122 - RNA, 19 nt, Homo sapiens
  misc_RNA (1)...(19): siRNA sense strand
gcggaaggaacgagacaac

SEQ ID NO: 2407123 - RNA, 19 nt, Homo sapiens
  misc_RNA (1)...(19): siRNA sense strand
aggagcuggaagagaagaa

SEQ ID NO: 2407124 - RNA, 19 nt, Homo sapiens
  misc_RNA (1)...(19): siRNA sense strand
aggcgaaacagaaggugga

SEQ ID NO: 2407125 - RNA, 19 nt, Homo sapiens
  misc_RNA (1)...(19): siRNA sense strand
agguggagaaggaggcuca

SEQ ID NO: 2407126 - RNA, 19 nt, Homo sapiens
  misc_RNA (1)...(19): siRNA sense strand
agaaggcggugcugcggaa

SEQ ID NO: 2407127 - RNA, 19 nt, Homo sapiens
  misc_RNA (1)...(19): siRNA sense strand
ugaagacgcuggaggugga

SEQ ID NO: 2407128 - RNA, 19 nt, Homo sapiens
  misc_RNA (1)...(19): siRNA sense strand
accauuugcacuaaggaua

SEQ ID NO: 2407129 - RNA, 19 nt, Homo sapiens
  misc_RNA (1)...(19): siRNA sense strand
agucaggaggcgaaacaga

SEQ ID NO: 2407130 - RNA, 19 nt, Homo sapiens
  misc_RNA (1)...(19): siRNA sense strand
ugaacaaacgcguggcgga

SEQ ID NO: 2407131 - RNA, 19 nt, Homo sapiens
  misc_RNA (1)...(19): siRNA sense strand
aggacaaucaugaggaaga

SEQ ID NO: 2407132 - RNA, 19 nt, Homo sapiens
  misc_RNA (1)...(19): siRNA sense strand
gccaacuguaugaggacaa

SEQ ID NO: 2407133 - RNA, 19 nt, Homo sapiens
  misc_RNA (1)...(19): siRNA sense strand
ccuuauucuucuuugucaa

SEQ ID NO: 2407134 - RNA, 19 nt, Homo sapiens
  misc_RNA (1)...(19): siRNA sense strand
agaaaagauccggaagaaa

SEQ ID NO: 2407135 - RNA, 19 nt, Homo sapiens
  misc_RNA (1)...(19): siRNA sense strand
agaaauauccggacagggu

SEQ ID NO: 2407136 - RNA, 19 nt, Homo sapiens
  misc_RNA (1)...(19): siRNA sense strand
augagagugucuaugggaa

SEQ ID NO: 2407137 - RNA, 19 nt, Homo sapiens
  misc_RNA (1)...(19): siRNA sense strand
aguaggaagaauagaggaa

SEQ ID NO: 2407138 - RNA, 19 nt, Homo sapiens
  misc_RNA (1)...(19): siRNA sense strand
ggucaaagagauuggagca

SEQ ID NO: 2407139 - RNA, 19 nt, Homo sapiens
  misc_RNA (1)...(19): siRNA sense strand
uuacgaaagaagaaggauu

SEQ ID NO: 2407140 - RNA, 19 nt, Homo sapiens
  misc_RNA (1)...(19): siRNA sense strand
aaauaaagacacuggcuca

SEQ ID NO: 2407141 - RNA, 19 nt, Homo sapiens
  misc_RNA (1)...(19): siRNA sense strand
aguuaaaaccagagcuauu

SEQ ID NO: 2407142 - RNA, 19 nt, Homo sapiens
  misc_RNA (1)...(19): siRNA sense strand
ccucccaguaggaagaaua

SEQ ID NO: 2407143 - RNA, 19 nt, Homo sapiens
  misc_RNA (1)...(19): siRNA sense strand
gucucagagugaagaagaa

SEQ ID NO: 2407144 - RNA, 19 nt, Homo sapiens
  misc_RNA (1)...(19): siRNA sense strand
ggaaacuguuggauccaga

SEQ ID NO: 2407145 - RNA, 19 nt, Homo sapiens
  misc_RNA (1)...(19): siRNA sense strand
ucucagaugaugaugaaca

SEQ ID NO: 2407146 - RNA, 19 nt, Homo sapiens
  misc_RNA (1)...(19): siRNA sense strand
guuggaacgcauuagcaaa

SEQ ID NO: 2407147 - RNA, 19 nt, Homo sapiens
  misc_RNA (1)...(19): siRNA sense strand
acauuaugauccagaagca

SEQ ID NO: 2407148 - RNA, 19 nt, Homo sapiens
  misc_RNA (1)...(19): siRNA sense strand
ggccaugcucagagacaga

SEQ ID NO: 2407149 - RNA, 19 nt, Homo sapiens
  misc_RNA (1)...(19): siRNA sense strand
cugaugaacaugcuggaau

SEQ ID NO: 2407150 - RNA, 19 nt, Homo sapiens
  misc_RNA (1)...(19): siRNA sense strand
uuaggauggagcuggauaa

SEQ ID NO: 2407151 - RNA, 19 nt, Homo sapiens
  misc_RNA (1)...(19): siRNA sense strand
uaaagaaacuucaacagga

SEQ ID NO: 2407152 - RNA, 19 nt, Homo sapiens
  misc_RNA (1)...(19): siRNA sense strand
guuccauggagaagaggau

SEQ ID NO: 2407153 - RNA, 19 nt, Homo sapiens
  misc_RNA (1)...(19): siRNA sense strand
cugaaggagugccggagga

SEQ ID NO: 2407154 - RNA, 19 nt, Homo sapiens
  misc_RNA (1)...(19): siRNA sense strand
cuucagaaaggcaugguga

SEQ ID NO: 2407155 - RNA, 19 nt, Homo sapiens
  misc_RNA (1)...(19): siRNA sense strand
gugccauccuaaagaaacu

SEQ ID NO: 2407156 - RNA, 19 nt, Homo sapiens
  misc_RNA (1)...(19): siRNA sense strand
gguauagaagugagugugu

SEQ ID NO: 2407157 - RNA, 19 nt, Homo sapiens
  misc_RNA (1)...(19): siRNA sense strand
gaagaauagaggaacccuu

SEQ ID NO: 2407158 - RNA, 19 nt, Homo sapiens
  misc_RNA (1)...(19): siRNA sense strand
gucaaagagauuggagcaa

SEQ ID NO: 2407159 - RNA, 19 nt, Homo sapiens
  misc_RNA (1)...(19): siRNA sense strand
uauagaagugaguguguca

SEQ ID NO: 2407160 - RNA, 19 nt, Homo sapiens
  misc_RNA (1)...(19): siRNA sense strand
gaugaugaacagagaaccu

SEQ ID NO: 2407161 - RNA, 19 nt, Homo sapiens
  misc_RNA (1)...(19): siRNA sense strand
acuaaugacgcaagagaca

SEQ ID NO: 2407162 - RNA, 19 nt, Homo sapiens
  misc_RNA (1)...(19): siRNA sense strand
caacagaagccaaagccau

SEQ ID NO: 2407163 - RNA, 19 nt, Homo sapiens
  misc_RNA (1)...(19): siRNA sense strand
cagcaaaguaggagcagcu

SEQ ID NO: 2407164 - RNA, 19 nt, Homo sapiens
  misc_RNA (1)...(19): siRNA sense strand
ugcaacaacaagaaacaaa

SEQ ID NO: 2407165 - RNA, 19 nt, Homo sapiens
  misc_RNA (1)...(19): siRNA sense strand
gcugcuaccucuagggaug

SEQ ID NO: 2407166 - RNA, 19 nt, Homo sapiens
  misc_RNA (1)...(19): siRNA sense strand
caugcaacaacaagaaaca

SEQ ID NO: 2407167 - RNA, 19 nt, Homo sapiens
  misc_RNA (1)...(19): siRNA sense strand
agagacaauucuaaggacu

SEQ ID NO: 2407168 - RNA, 19 nt, Homo sapiens
  misc_RNA (1)...(19): siRNA sense strand
agggaugagggaugcaauu

SEQ ID NO: 2407169 - RNA, 19 nt, Homo sapiens
  misc_RNA (1)...(19): siRNA sense strand
gggaagaagaggaggaaac

SEQ ID NO: 2407170 - RNA, 19 nt, Homo sapiens
  misc_RNA (1)...(19): siRNA sense strand
guucgauaauggagggaca

SEQ ID NO: 2407171 - RNA, 19 nt, Homo sapiens
  misc_RNA (1)...(19): siRNA sense strand
gaacagaaucagaguggga

SEQ ID NO: 2407172 - RNA, 19 nt, Homo sapiens
  misc_RNA (1)...(19): siRNA sense strand
ccgaauacgacgagagaag

SEQ ID NO: 2407173 - RNA, 19 nt, Homo sapiens
  misc_RNA (1)...(19): siRNA sense strand
uggaaaaggagaaggagua

SEQ ID NO: 2407174 - RNA, 19 nt, Homo sapiens
  misc_RNA (1)...(19): siRNA sense strand
acagaaucagagugggaaa

SEQ ID NO: 2407175 - RNA, 19 nt, Homo sapiens
  misc_RNA (1)...(19): siRNA sense strand
aauauaagcaagagugaga

SEQ ID NO: 2407176 - RNA, 19 nt, Homo sapiens
  misc_RNA (1)...(19): siRNA sense strand
aguuugaagccaaguauua

SEQ ID NO: 2407177 - RNA, 19 nt, Homo sapiens
  misc_RNA (1)...(19): siRNA sense strand
gugacauauuuguucgaua

SEQ ID NO: 2407178 - RNA, 19 nt, Homo sapiens
  misc_RNA (1)...(19): siRNA sense strand
gaaaauugcuugaagggau

SEQ ID NO: 2407179 - RNA, 19 nt, Homo sapiens
  misc_RNA (1)...(19): siRNA sense strand
gguaugaauauaagcaaga

SEQ ID NO: 2407180 - RNA, 19 nt, Homo sapiens
  misc_RNA (1)...(19): siRNA sense strand
aaguuaauacugaggagaa

SEQ ID NO: 2407181 - RNA, 19 nt, Homo sapiens
  misc_RNA (1)...(19): siRNA sense strand
gcuugauguuggagaagga

SEQ ID NO: 2407182 - RNA, 19 nt, Homo sapiens
  misc_RNA (1)...(19): siRNA sense strand
caagaaauuuguaaagcca

SEQ ID NO: 2407183 - RNA, 19 nt, Homo sapiens
  misc_RNA (1)...(19): siRNA sense strand
ugacauagguaucuggcuu

SEQ ID NO: 2407184 - RNA, 19 nt, Homo sapiens
  misc_RNA (1)...(19): siRNA sense strand
aguuaauacugaggagaau

SEQ ID NO: 2407185 - RNA, 19 nt, Homo sapiens
  misc_RNA (1)...(19): siRNA sense strand
auggaugaguacuuagaaa

SEQ ID NO: 2407186 - RNA, 19 nt, Homo sapiens
  misc_RNA (1)...(19): siRNA sense strand
ucucgaaggaaucgguaua

SEQ ID NO: 2407187 - RNA, 19 nt, Homo sapiens
  misc_RNA (1)...(19): siRNA sense strand
uauaagcaagagugagaua

SEQ ID NO: 2407188 - RNA, 19 nt, Homo sapiens
  misc_RNA (1)...(19): siRNA sense strand
cauguagaaccaagugaaa

SEQ ID NO: 2407189 - RNA, 19 nt, Homo sapiens
  misc_RNA (1)...(19): siRNA sense strand
cauaaaaucaagcggggaa

SEQ ID NO: 2407190 - RNA, 19 nt, Homo sapiens
  misc_RNA (1)...(19): siRNA sense strand
acucaauggcggaggccuu

SEQ ID NO: 2407191 - RNA, 19 nt, Homo sapiens
  misc_RNA (1)...(19): siRNA sense strand
cagucaaccgagagugaau

SEQ ID NO: 2407192 - RNA, 19 nt, Homo sapiens
  misc_RNA (1)...(19): siRNA sense strand
cccauggaccucagaauaa

SEQ ID NO: 2407193 - RNA, 19 nt, Homo sapiens
  misc_RNA (1)...(19): siRNA sense strand
aaaauugcuugaagggaua

SEQ ID NO: 2407194 - RNA, 19 nt, Homo sapiens
  misc_RNA (1)...(19): siRNA sense strand
ccacagucuuccuggaguu

SEQ ID NO: 2407195 - RNA, 19 nt, Homo sapiens
  misc_RNA (1)...(19): siRNA sense strand
cugacaaagcagagcaagu

SEQ ID NO: 2407196 - RNA, 19 nt, Homo sapiens
  misc_RNA (1)...(19): siRNA sense strand
augcagagaggcugaauau

SEQ ID NO: 2407197 - RNA, 19 nt, Homo sapiens
  misc_RNA (1)...(19): siRNA sense strand
aaguauuacaagauggaga

SEQ ID NO: 2407198 - RNA, 19 nt, Homo sapiens
  misc_RNA (1)...(19): siRNA sense strand
gggaaaaccugaaccacau

SEQ ID NO: 2407199 - RNA, 19 nt, Homo sapiens
  misc_RNA (1)...(19): siRNA sense strand
gcaaguaugcagagaggcu

SEQ ID NO: 2407200 - RNA, 19 nt, Homo sapiens
  misc_RNA (1)...(19): siRNA sense strand
ugaauauaagcaagaguga

SEQ ID NO: 2407201 - RNA, 19 nt, Homo sapiens
  misc_RNA (1)...(19): siRNA sense strand
caggaugcccuucaggaaa

SEQ ID NO: 2407202 - RNA, 19 nt, Homo sapiens
  misc_RNA (1)...(19): siRNA sense strand
acuuauaaacaauggcuca

SEQ ID NO: 2407203 - RNA, 19 nt, Homo sapiens
  misc_RNA (1)...(19): siRNA sense strand
ggaccuuaucgaaugggaa

SEQ ID NO: 2407204 - RNA, 19 nt, Homo sapiens
  misc_RNA (1)...(19): siRNA sense strand
uguuuggaguuguggugua

SEQ ID NO: 2407205 - RNA, 19 nt, Homo sapiens
  misc_RNA (1)...(19): siRNA sense strand
aagcaaauauggaacaacu

SEQ ID NO: 2407206 - RNA, 19 nt, Homo sapiens
  misc_RNA (1)...(19): siRNA sense strand
cugcagagacucaacgaca

SEQ ID NO: 2407207 - RNA, 19 nt, Homo sapiens
  misc_RNA (1)...(19): siRNA sense strand
gagagaaguacuuaguuca

SEQ ID NO: 2407208 - RNA, 19 nt, Homo sapiens
  misc_RNA (1)...(19): siRNA sense strand
agaaguacuuaguucaaga

SEQ ID NO: 2407209 - RNA, 19 nt, Homo sapiens
  misc_RNA (1)...(19): siRNA sense strand
acaaagcagagcaaguuaa

SEQ ID NO: 2407210 - RNA, 19 nt, Homo sapiens
  misc_RNA (1)...(19): siRNA sense strand
guuaauacugaggagaaua

SEQ ID NO: 2407211 - RNA, 19 nt, Homo sapiens
  misc_RNA (1)...(19): siRNA sense strand
ucaaugggcaggaugcaaa

SEQ ID NO: 2407212 - RNA, 19 nt, Homo sapiens
  misc_RNA (1)...(19): siRNA sense strand
agcaagagugagauaacaa

SEQ ID NO: 2407213 - RNA, 19 nt, Homo sapiens
  misc_RNA (1)...(19): siRNA sense strand
uggaugaguacuuagaaau

SEQ ID NO: 2407214 - RNA, 19 nt, Homo sapiens
  misc_RNA (1)...(19): siRNA sense strand
cuuaaucuccacugacaaa

SEQ ID NO: 2407215 - RNA, 19 nt, Homo sapiens
  misc_RNA (1)...(19): siRNA sense strand
agucaaguaagccaagaaa

SEQ ID NO: 2407216 - RNA, 19 nt, Homo sapiens
  misc_RNA (1)...(19): siRNA sense strand
gcuuggaauucucgaagga

SEQ ID NO: 2407217 - RNA, 19 nt, Homo sapiens
  misc_RNA (1)...(19): siRNA sense strand
gaauaucaaaaguggguau

SEQ ID NO: 2407218 - RNA, 19 nt, Homo sapiens
  misc_RNA (1)...(19): siRNA sense strand
ucagaauaacagacaucua

SEQ ID NO: 2407219 - RNA, 19 nt, Homo sapiens
  misc_RNA (1)...(19): siRNA sense strand
uguagaaccaagugaaaau

SEQ ID NO: 2407220 - RNA, 19 nt, Homo sapiens
  misc_RNA (1)...(19): siRNA sense strand
acccaaugguucuugacaa

SEQ ID NO: 2407221 - RNA, 19 nt, Homo sapiens
  misc_RNA (1)...(19): siRNA sense strand
aggagaaggaguauacuga

SEQ ID NO: 2407222 - RNA, 19 nt, Homo sapiens
  misc_RNA (1)...(19): siRNA sense strand
gcucauacauagcagcguu

SEQ ID NO: 2407223 - RNA, 19 nt, Homo sapiens
  misc_RNA (1)...(19): siRNA sense strand
aagaagaggaggaaacacu

SEQ ID NO: 2407224 - RNA, 19 nt, Homo sapiens
  misc_RNA (1)...(19): siRNA sense strand
acuuuacaauacuggcaua

SEQ ID NO: 2407225 - RNA, 19 nt, Homo sapiens
  misc_RNA (1)...(19): siRNA sense strand
agagaaguacuuaguucaa

SEQ ID NO: 2407226 - RNA, 19 nt, Homo sapiens
  misc_RNA (1)...(19): siRNA sense strand
ggugagaagauuggacuau

SEQ ID NO: 2407227 - RNA, 19 nt, Homo sapiens
  misc_RNA (1)...(19): siRNA sense strand
gaauauccucgaacagaau

SEQ ID NO: 2407228 - RNA, 19 nt, Homo sapiens
  misc_RNA (1)...(19): siRNA sense strand
gggaaugugguauaagcau

SEQ ID NO: 2407229 - RNA, 19 nt, Homo sapiens
  misc_RNA (1)...(19): siRNA sense strand
gguauaagcaucagccucu

SEQ ID NO: 2407230 - RNA, 19 nt, Homo sapiens
  misc_RNA (1)...(19): siRNA sense strand
uugcaucauucaaguggaa

SEQ ID NO: 2407231 - RNA, 19 nt, Homo sapiens
  misc_RNA (1)...(19): siRNA sense strand
acuucauggaacuaggaua

SEQ ID NO: 2407232 - RNA, 19 nt, Homo sapiens
  misc_RNA (1)...(19): siRNA sense strand
guuccaaacccuaugaguu

SEQ ID NO: 2407233 - RNA, 19 nt, Homo sapiens
  misc_RNA (1)...(19): siRNA sense strand
aaggcuugauguuggagaa

SEQ ID NO: 2407234 - RNA, 19 nt, Homo sapiens
  misc_RNA (1)...(19): siRNA sense strand
ccucagaauaacagacauc

SEQ ID NO: 2407235 - RNA, 19 nt, Homo sapiens
  misc_RNA (1)...(19): siRNA sense strand
gagcaacugacauagguau

SEQ ID NO: 2407236 - RNA, 19 nt, Homo sapiens
  misc_RNA (1)...(19): siRNA sense strand
ccauagugaggaugagaaa

SEQ ID NO: 2407237 - RNA, 19 nt, Homo sapiens
  misc_RNA (1)...(19): siRNA sense strand
gagaaauaggagaaacgaa

SEQ ID NO: 2407238 - RNA, 19 nt, Homo sapiens
  misc_RNA (1)...(19): siRNA sense strand
uggagaucgccaaggaaua

SEQ ID NO: 2407239 - RNA, 19 nt, Homo sapiens
  misc_RNA (1)...(19): siRNA sense strand
cagaguuggcauucagaaa

SEQ ID NO: 2407240 - RNA, 19 nt, Homo sapiens
  misc_RNA (1)...(19): siRNA sense strand
agggagagcccaaguggaa

SEQ ID NO: 2407241 - RNA, 19 nt, Homo sapiens
  misc_RNA (1)...(19): siRNA sense strand
aggcacaagaucaggagaa

SEQ ID NO: 2407242 - RNA, 19 nt, Homo sapiens
  misc_RNA (1)...(19): siRNA sense strand
ccaccaagggagagcccaa

SEQ ID NO: 2407243 - RNA, 19 nt, Homo sapiens
  misc_RNA (1)...(19): siRNA sense strand
uggaauggaacaaggaaga

SEQ ID NO: 2407244 - RNA, 19 nt, Homo sapiens
  misc_RNA (1)...(19): siRNA sense strand
caggaaaugagauggaaaa

SEQ ID NO: 2407245 - RNA, 19 nt, Homo sapiens
  misc_RNA (1)...(19): siRNA sense strand
cgaugaggcuuuuggggaa

SEQ ID NO: 2407246 - RNA, 19 nt, Homo sapiens
  misc_RNA (1)...(19): siRNA sense strand
acaggaaaugagauggaaa

SEQ ID NO: 2407247 - RNA, 19 nt, Homo sapiens
  misc_RNA (1)...(19): siRNA sense strand
uaacaagagagaaggacau

SEQ ID NO: 2407248 - RNA, 19 nt, Homo sapiens
  misc_RNA (1)...(19): siRNA sense strand
acagaaaggaccuggagau

SEQ ID NO: 2407249 - RNA, 19 nt, Homo sapiens
  misc_RNA (1)...(19): siRNA sense strand
cggaaagcagaguguggaa

SEQ ID NO: 2407250 - RNA, 19 nt, Homo sapiens
  misc_RNA (1)...(19): siRNA sense strand
cgggagaauuagagcaaag

SEQ ID NO: 2407251 - RNA, 19 nt, Homo sapiens
  misc_RNA (1)...(19): siRNA sense strand
uggcagugcugaagggagu

SEQ ID NO: 2407252 - RNA, 19 nt, Homo sapiens
  misc_RNA (1)...(19): siRNA sense strand
ggaaaagccagaagcgauu

SEQ ID NO: 2407253 - RNA, 19 nt, Homo sapiens
  misc_RNA (1)...(19): siRNA sense strand
accagaagaacuaaagaaa

SEQ ID NO: 2407254 - RNA, 19 nt, Homo sapiens
  misc_RNA (1)...(19): siRNA sense strand
aaaccaacuacguggagaa

SEQ ID NO: 2407255 - RNA, 19 nt, Homo sapiens
  misc_RNA (1)...(19): siRNA sense strand
aggaugagaaagagacaga

SEQ ID NO: 2407256 - RNA, 19 nt, Homo sapiens
  misc_RNA (1)...(19): siRNA sense strand
agaaagagacagaugagga

SEQ ID NO: 2407257 - RNA, 19 nt, Homo sapiens
  misc_RNA (1)...(19): siRNA sense strand
cagacaggaaccagaagaa

SEQ ID NO: 2407258 - RNA, 19 nt, Homo sapiens
  misc_RNA (1)...(19): siRNA sense strand
caagugaagcugagagacu

SEQ ID NO: 2407259 - RNA, 19 nt, Homo sapiens
  misc_RNA (1)...(19): siRNA sense strand
guauagcugcauagggaau

SEQ ID NO: 2407260 - RNA, 19 nt, Homo sapiens
  misc_RNA (1)...(19): siRNA sense strand
cuacguggacaaagaguau

SEQ ID NO: 2407261 - RNA, 19 nt, Homo sapiens
  misc_RNA (1)...(19): siRNA sense strand
auagugaggaugagaaaga

SEQ ID NO: 2407262 - RNA, 19 nt, Homo sapiens
  misc_RNA (1)...(19): siRNA sense strand
aagagagucaagagaaauu

SEQ ID NO: 2407263 - RNA, 19 nt, Homo sapiens
  misc_RNA (1)...(19): siRNA sense strand
uggaugaagaccugaucaa

SEQ ID NO: 2407264 - RNA, 19 nt, Homo sapiens
  misc_RNA (1)...(19): siRNA sense strand
auauaaaagcccagcagaa

SEQ ID NO: 2407265 - RNA, 19 nt, Homo sapiens
  misc_RNA (1)...(19): siRNA sense strand
ugggagacuuggagagauc

SEQ ID NO: 2407266 - RNA, 19 nt, Homo sapiens
  misc_RNA (1)...(19): siRNA sense strand
gaaauuuauaggaggccuu

SEQ ID NO: 2407267 - RNA, 19 nt, Homo sapiens
  misc_RNA (1)...(19): siRNA sense strand
gagaauuagagcaaagacu

SEQ ID NO: 2407268 - RNA, 19 nt, Homo sapiens
  misc_RNA (1)...(19): siRNA sense strand
ccacaaacgccgucccuca

SEQ ID NO: 2407269 - RNA, 19 nt, Homo sapiens
  misc_RNA (1)...(19): siRNA sense strand
gcuacuagaagcuggcaga

SEQ ID NO: 2407270 - RNA, 19 nt, Homo sapiens
  misc_RNA (1)...(19): siRNA sense strand
aagcaagcaggcugagaau

SEQ ID NO: 2407271 - RNA, 19 nt, Homo sapiens
  misc_RNA (1)...(19): siRNA sense strand
acaugaggagagugagaga

SEQ ID NO: 2407272 - RNA, 19 nt, Homo sapiens
  misc_RNA (1)...(19): siRNA sense strand
gaguguggaagcaggaaaa

SEQ ID NO: 2407273 - RNA, 19 nt, Homo sapiens
  misc_RNA (1)...(19): siRNA sense strand
gcugaggccugaucgggaa

SEQ ID NO: 2407274 - RNA, 19 nt, Homo sapiens
  misc_RNA (1)...(19): siRNA sense strand
auaacaagagagaaggaca

SEQ ID NO: 2407275 - RNA, 19 nt, Homo sapiens
  misc_RNA (1)...(19): siRNA sense strand
cugaagaagguacuggaau

SEQ ID NO: 2407276 - RNA, 19 nt, Homo sapiens
  misc_RNA (1)...(19): siRNA sense strand
gcgcagagcuucagcaacg

SEQ ID NO: 2407277 - RNA, 19 nt, Homo sapiens
  misc_RNA (1)...(19): siRNA sense strand
uuguauagcugcauaggga

SEQ ID NO: 2407278 - RNA, 19 nt, Homo sapiens
  misc_RNA (1)...(19): siRNA sense strand
ucgagucagccgugaacaa

SEQ ID NO: 2407279 - RNA, 19 nt, Homo sapiens
  misc_RNA (1)...(19): siRNA sense strand
agaauucagcagacaggaa

SEQ ID NO: 2407280 - RNA, 19 nt, Homo sapiens
  misc_RNA (1)...(19): siRNA sense strand
ggaacaaggaagagguacc

SEQ ID NO: 2407281 - RNA, 19 nt, Homo sapiens
  misc_RNA (1)...(19): siRNA sense strand
agaaacaggcaggaagcua

SEQ ID NO: 2407282 - RNA, 19 nt, Homo sapiens
  misc_RNA (1)...(19): siRNA sense strand
augagauggaaaaggaaua

SEQ ID NO: 2407283 - RNA, 19 nt, Homo sapiens
  misc_RNA (1)...(19): siRNA sense strand
gaaaagaucccucuggcaa

SEQ ID NO: 2407284 - RNA, 19 nt, Homo sapiens
  misc_RNA (1)...(19): siRNA sense strand
gagaaggacaugaggagag

SEQ ID NO: 2407285 - RNA, 19 nt, Homo sapiens
  misc_RNA (1)...(19): siRNA sense strand
aaacaggaaaugagaugga

SEQ ID NO: 2407286 - RNA, 19 nt, Homo sapiens
  misc_RNA (1)...(19): siRNA sense strand
aggaaaagccagaagcgau

SEQ ID NO: 2407287 - RNA, 19 nt, Homo sapiens
  misc_RNA (1)...(19): siRNA sense strand
ggaugaacugguuggaaac

SEQ ID NO: 2407288 - RNA, 19 nt, Homo sapiens
  misc_RNA (1)...(19): siRNA sense strand
aaggacaugaggagaguga

SEQ ID NO: 2407289 - RNA, 19 nt, Homo sapiens
  misc_RNA (1)...(19): siRNA sense strand
gggaauucagaguuggcau

SEQ ID NO: 2407290 - RNA, 19 nt, Homo sapiens
  misc_RNA (1)...(19): siRNA sense strand
agaacaacauacagggaga

SEQ ID NO: 2407291 - RNA, 19 nt, Homo sapiens
  misc_RNA (1)...(19): siRNA sense strand
ugacuagaacugagagaca

SEQ ID NO: 2407292 - RNA, 19 nt, Homo sapiens
  misc_RNA (1)...(19): siRNA sense strand
guaucagccuuuagggaca

SEQ ID NO: 2407293 - RNA, 19 nt, Homo sapiens
  misc_RNA (1)...(19): siRNA sense strand
accaaaugccugugaagaa

SEQ ID NO: 2407294 - RNA, 19 nt, Homo sapiens
  misc_RNA (1)...(19): siRNA sense strand
agucuggauugaagaacaa

SEQ ID NO: 2407295 - RNA, 19 nt, Homo sapiens
  misc_RNA (1)...(19): siRNA sense strand
agucaaguucaaagaguuu

SEQ ID NO: 2407296 - RNA, 19 nt, Homo sapiens
  misc_RNA (1)...(19): siRNA sense strand
acgggaagcauuugaagaa

SEQ ID NO: 2407297 - RNA, 19 nt, Homo sapiens
  misc_RNA (1)...(19): siRNA sense strand
cauuugaagaagcuagaua

SEQ ID NO: 2407298 - RNA, 19 nt, Homo sapiens
  misc_RNA (1)...(19): siRNA sense strand
cuaugauuuuguagggaaa

SEQ ID NO: 2407299 - RNA, 19 nt, Homo sapiens
  misc_RNA (1)...(19): siRNA sense strand
auacagggagaguggagaa

SEQ ID NO: 2407300 - RNA, 19 nt, Homo sapiens
  misc_RNA (1)...(19): siRNA sense strand
guggagaagagaagagaac

SEQ ID NO: 2407301 - RNA, 19 nt, Homo sapiens
  misc_RNA (1)...(19): siRNA sense strand
gggagaguggagaagagaa

SEQ ID NO: 2407302 - RNA, 19 nt, Homo sapiens
  misc_RNA (1)...(19): siRNA sense strand
ccugaggauguacgagaaa

SEQ ID NO: 2407303 - RNA, 19 nt, Homo sapiens
  misc_RNA (1)...(19): siRNA sense strand
ggagaguggagaagagaag

SEQ ID NO: 2407304 - RNA, 19 nt, Homo sapiens
  misc_RNA (1)...(19): siRNA sense strand
uuuaacaaguucagcaaca

SEQ ID NO: 2407305 - RNA, 19 nt, Homo sapiens
  misc_RNA (1)...(19): siRNA sense strand
guucgugaucccauggaaa

SEQ ID NO: 2407306 - RNA, 19 nt, Homo sapiens
  misc_RNA (1)...(19): siRNA sense strand
gaacauaucaccaaccaga

SEQ ID NO: 2407307 - RNA, 19 nt, Homo sapiens
  misc_RNA (1)...(19): siRNA sense strand
aauuugagacuuuggaaga

SEQ ID NO: 2407308 - RNA, 19 nt, Homo sapiens
  misc_RNA (1)...(19): siRNA sense strand
acuagaacugagagacaau

SEQ ID NO: 2407309 - RNA, 19 nt, Homo sapiens
  misc_RNA (1)...(19): siRNA sense strand
aaguaaguccacaggguca

SEQ ID NO: 2407310 - RNA, 19 nt, Homo sapiens
  misc_RNA (1)...(19): siRNA sense strand
gggauauauacccgcuuaa

SEQ ID NO: 2407311 - RNA, 19 nt, Homo sapiens
  misc_RNA (1)...(19): siRNA sense strand
cugaggagacccaagagaa

SEQ ID NO: 2407312 - RNA, 19 nt, Homo sapiens
  misc_RNA (1)...(19): siRNA sense strand
ucggaaaggcaauuaucaa

SEQ ID NO: 2407313 - RNA, 19 nt, Homo sapiens
  misc_RNA (1)...(19): siRNA sense strand
uggauuggccaguggacau

SEQ ID NO: 2407314 - RNA, 19 nt, Homo sapiens
  misc_RNA (1)...(19): siRNA sense strand
ugaugguacuaaauggauu

SEQ ID NO: 2407315 - RNA, 19 nt, Homo sapiens
  misc_RNA (1)...(19): siRNA sense strand
caguauucggaaaggcaau

SEQ ID NO: 2407316 - RNA, 19 nt, Homo sapiens
  misc_RNA (1)...(19): siRNA sense strand
agacaguauuuaaaggauc

SEQ ID NO: 2407317 - RNA, 19 nt, Homo sapiens
  misc_RNA (1)...(19): siRNA sense strand
aucaagaaauaucgaccaa

SEQ ID NO: 2407318 - RNA, 19 nt, Homo sapiens
  misc_RNA (1)...(19): siRNA sense strand
cugaaauuucccaacuuua

SEQ ID NO: 2407319 - RNA, 19 nt, Homo sapiens
  misc_RNA (1)...(19): siRNA sense strand
aagucuggauugaagaaca

SEQ ID NO: 2407320 - RNA, 19 nt, Homo sapiens
  misc_RNA (1)...(19): siRNA sense strand
ucuacuaggcucuuaacaa

SEQ ID NO: 2407321 - RNA, 19 nt, Homo sapiens
  misc_RNA (1)...(19): siRNA sense strand
cuucaggaguuuugcaaga

SEQ ID NO: 2407322 - RNA, 19 nt, Homo sapiens
  misc_RNA (1)...(19): siRNA sense strand
aggaaaaucuucuacucaa

SEQ ID NO: 2407323 - RNA, 19 nt, Homo sapiens
  misc_RNA (1)...(19): siRNA sense strand
auggacauucacugggaaa

SEQ ID NO: 2407324 - RNA, 19 nt, Homo sapiens
  misc_RNA (1)...(19): siRNA sense strand
ccaagagaaacgaaggucu

SEQ ID NO: 2407325 - RNA, 19 nt, Homo sapiens
  misc_RNA (1)...(19): siRNA sense strand
ggucaccaacagagaaguu

SEQ ID NO: 2407326 - RNA, 19 nt, Homo sapiens
  misc_RNA (1)...(19): siRNA sense strand
ggaagaaaacugaggagac

SEQ ID NO: 2407327 - RNA, 19 nt, Homo sapiens
  misc_RNA (1)...(19): siRNA sense strand
aguuauuaccauccaguau

SEQ ID NO: 2407328 - RNA, 19 nt, Homo sapiens
  misc_RNA (1)...(19): siRNA sense strand
uuaaagaggaugauggaga

SEQ ID NO: 2407329 - RNA, 19 nt, Homo sapiens
  misc_RNA (1)...(19): siRNA sense strand
aaagagaaguacauggagu

SEQ ID NO: 2407330 - RNA, 19 nt, Homo sapiens
  misc_RNA (1)...(19): siRNA sense strand
ggaggcuggccgagaucaa

SEQ ID NO: 2407331 - RNA, 19 nt, Homo sapiens
  misc_RNA (1)...(19): siRNA sense strand
cuggagaugaagaagauga

SEQ ID NO: 2407332 - RNA, 19 nt, Homo sapiens
  misc_RNA (1)...(19): siRNA sense strand
gaacaugaugcuggggaaa

SEQ ID NO: 2407333 - RNA, 19 nt, Homo sapiens
  misc_RNA (1)...(19): siRNA sense strand
gagggaaggcguucggcuu

SEQ ID NO: 2407334 - RNA, 19 nt, Homo sapiens
  misc_RNA (1)...(19): siRNA sense strand
ugaacaugaugcuggggaa

SEQ ID NO: 2407335 - RNA, 19 nt, Homo sapiens
  misc_RNA (1)...(19): siRNA sense strand
aguacagugaugaagagaa

SEQ ID NO: 2407336 - RNA, 19 nt, Homo sapiens
  misc_RNA (1)...(19): siRNA sense strand
cuuuaaagaggaugaugga

SEQ ID NO: 2407337 - RNA, 19 nt, Homo sapiens
  misc_RNA (1)...(19): siRNA sense strand
caaccaagagagugcccaa

SEQ ID NO: 2407338 - RNA, 19 nt, Homo sapiens
  misc_RNA (1)...(19): siRNA sense strand
aauuaaaggggaugaggaa

SEQ ID NO: 2407339 - RNA, 19 nt, Homo sapiens
  misc_RNA (1)...(19): siRNA sense strand
auugagaaguugaaaggga

SEQ ID NO: 2407340 - RNA, 19 nt, Homo sapiens
  misc_RNA (1)...(19): siRNA sense strand
cauuagaagaacuguggau

SEQ ID NO: 2407341 - RNA, 19 nt, Homo sapiens
  misc_RNA (1)...(19): siRNA sense strand
augaggaagaagacaacua

SEQ ID NO: 2407342 - RNA, 19 nt, Homo sapiens
  misc_RNA (1)...(19): siRNA sense strand
cuacaaacugcauugaaaa

SEQ ID NO: 2407343 - RNA, 19 nt, Homo sapiens
  misc_RNA (1)...(19): siRNA sense strand
uugagaaguugaaagggau

SEQ ID NO: 2407344 - RNA, 19 nt, Homo sapiens
  misc_RNA (1)...(19): siRNA sense strand
uuaaaggggaugaggaaga

SEQ ID NO: 2407345 - RNA, 19 nt, Homo sapiens
  misc_RNA (1)...(19): siRNA sense strand
gggacacauuagaagaacu

SEQ ID NO: 2407346 - RNA, 19 nt, Homo sapiens
  misc_RNA (1)...(19): siRNA sense strand
ccaacugcgaagaugauau

SEQ ID NO: 2407347 - RNA, 19 nt, Homo sapiens
  misc_RNA (1)...(19): siRNA sense strand
cccuagaaacgcagcugaa

SEQ ID NO: 2407348 - RNA, 19 nt, Homo sapiens
  misc_RNA (1)...(19): siRNA sense strand
ggaagaagaucaaggccaa

SEQ ID NO: 2407349 - RNA, 19 nt, Homo sapiens
  misc_RNA (1)...(19): siRNA sense strand
ggaaugaacucaaagccaa

SEQ ID NO: 2407350 - RNA, 19 nt, Homo sapiens
  misc_RNA (1)...(19): siRNA sense strand
cggaagaagaucaaggcca

SEQ ID NO: 2407351 - RNA, 19 nt, Homo sapiens
  misc_RNA (1)...(19): siRNA sense strand
ggccaagauguuagggaca

SEQ ID NO: 2407352 - RNA, 19 nt, Homo sapiens
  misc_RNA (1)...(19): siRNA sense strand
aguccaaaauacagaguuu

SEQ ID NO: 2407353 - RNA, 19 nt, Homo sapiens
  misc_RNA (1)...(19): siRNA sense strand
ggguaaagcugaauccucu

SEQ ID NO: 2407354 - RNA, 19 nt, Homo sapiens
  misc_RNA (1)...(19): siRNA sense strand
agaucaaggccaagauguu

SEQ ID NO: 2407355 - RNA, 19 nt, Homo sapiens
  misc_RNA (1)...(19): siRNA sense strand
cggaaugaacucaaagcca

SEQ ID NO: 2407356 - RNA, 19 nt, Homo sapiens
  misc_RNA (1)...(19): siRNA sense strand
ucaaggaggaacuggccua

SEQ ID NO: 2407357 - RNA, 19 nt, Homo sapiens
  misc_RNA (1)...(19): siRNA sense strand
cagaggaagcagagagcag

SEQ ID NO: 2407358 - RNA, 19 nt, Homo sapiens
  misc_RNA (1)...(19): siRNA sense strand
cggcagagcagaaggccaa

SEQ ID NO: 2407359 - RNA, 19 nt, Homo sapiens
  misc_RNA (1)...(19): siRNA sense strand
agaacaucguggagggcaa

SEQ ID NO: 2407360 - RNA, 19 nt, Homo sapiens
  misc_RNA (1)...(19): siRNA sense strand
gauaaugauuugaugcaca

SEQ ID NO: 2407361 - RNA, 19 nt, Homo sapiens
  misc_RNA (1)...(19): siRNA sense strand
cgacaaagaaguaugccga

SEQ ID NO: 2407362 - RNA, 19 nt, Homo sapiens
  misc_RNA (1)...(19): siRNA sense strand
ucauggaguugcugggaca

SEQ ID NO: 2407363 - RNA, 19 nt, Homo sapiens
  misc_RNA (1)...(19): siRNA sense strand
uggaacagcggcagcggaa

SEQ ID NO: 2407364 - RNA, 19 nt, Homo sapiens
  misc_RNA (1)...(19): siRNA sense strand
cgaccgugugugagaagau

SEQ ID NO: 2407365 - RNA, 19 nt, Homo sapiens
  misc_RNA (1)...(19): siRNA sense strand
cggacacagcauagaacua

SEQ ID NO: 2407366 - RNA, 19 nt, Homo sapiens
  misc_RNA (1)...(19): siRNA sense strand
gugcaguggaugugugaca

SEQ ID NO: 2407367 - RNA, 19 nt, Homo sapiens
  misc_RNA (1)...(19): siRNA sense strand
aggcaacagaaucgagcaa

SEQ ID NO: 2407368 - RNA, 19 nt, Homo sapiens
  misc_RNA (1)...(19): siRNA sense strand
aggcucaggacgagugcaa

SEQ ID NO: 2407369 - RNA, 19 nt, Homo sapiens
  misc_RNA (1)...(19): siRNA sense strand
ggucugagcuacaacacca

SEQ ID NO: 2407370 - RNA, 19 nt, Homo sapiens
  misc_RNA (1)...(19): siRNA sense strand
ccuaaagggcagcaggagu

SEQ ID NO: 2407371 - RNA, 19 nt, Homo sapiens
  misc_RNA (1)...(19): siRNA sense strand
gggcagguucuguggagca

SEQ ID NO: 2407372 - RNA, 19 nt, Homo sapiens
  misc_RNA (1)...(19): siRNA sense strand
ccuucaaugccacggagaa

SEQ ID NO: 2407373 - RNA, 19 nt, Homo sapiens
  misc_RNA (1)...(19): siRNA sense strand
gcucaggacgagugcaagu

SEQ ID NO: 2407374 - RNA, 19 nt, Homo sapiens
  misc_RNA (1)...(19): siRNA sense strand
ugugacauguggagagacu

SEQ ID NO: 2407375 - RNA, 19 nt, Homo sapiens
  misc_RNA (1)...(19): siRNA sense strand
cccaggaggaggugguaga

SEQ ID NO: 2407376 - RNA, 19 nt, Homo sapiens
  misc_RNA (1)...(19): siRNA sense strand
gguuacaagagccugacaa

SEQ ID NO: 2407377 - RNA, 19 nt, Homo sapiens
  misc_RNA (1)...(19): siRNA sense strand
acucagugugugaugguuu

SEQ ID NO: 2407378 - RNA, 19 nt, Homo sapiens
  misc_RNA (1)...(19): siRNA sense strand
caaaaggaacgcagagcaa

SEQ ID NO: 2407379 - RNA, 19 nt, Homo sapiens
  misc_RNA (1)...(19): siRNA sense strand
cgaagauggaucaaagcca

SEQ ID NO: 2407380 - RNA, 19 nt, Homo sapiens
  misc_RNA (1)...(19): siRNA sense strand
ggaucauuaaacuggaaaa

SEQ ID NO: 2407381 - RNA, 19 nt, Homo sapiens
  misc_RNA (1)...(19): siRNA sense strand
gaaagagucucaaggccuu

SEQ ID NO: 2407382 - RNA, 19 nt, Homo sapiens
  misc_RNA (1)...(19): siRNA sense strand
cuguaagacgggaggaucu

SEQ ID NO: 2407383 - RNA, 19 nt, Homo sapiens
  misc_RNA (1)...(19): siRNA sense strand
ccaaccagauugagugcca

SEQ ID NO: 2407384 - RNA, 19 nt, Homo sapiens
  misc_RNA (1)...(19): siRNA sense strand
aggcagugaaagaggccau

SEQ ID NO: 2407385 - RNA, 19 nt, Homo sapiens
  misc_RNA (1)...(19): siRNA sense strand
augaacagcuugagaggcu

SEQ ID NO: 2407386 - RNA, 19 nt, Homo sapiens
  misc_RNA (1)...(19): siRNA sense strand
cagaauggaucaugagcug

SEQ ID NO: 2407387 - RNA, 19 nt, Homo sapiens
  misc_RNA (1)...(19): siRNA sense strand
ccauggaggaccuggugau

SEQ ID NO: 2407388 - RNA, 19 nt, Homo sapiens
  misc_RNA (1)...(19): siRNA sense strand
aggccuugaagcugaacua

SEQ ID NO: 2407389 - RNA, 19 nt, Homo sapiens
  misc_RNA (1)...(19): siRNA sense strand
gguggaaacagcaugcaga

SEQ ID NO: 2407390 - RNA, 19 nt, Homo sapiens
  misc_RNA (1)...(19): siRNA sense strand
agaaagagucucaaggccu

SEQ ID NO: 2407391 - RNA, 19 nt, Homo sapiens
  misc_RNA (1)...(19): siRNA sense strand
gugaucaagaggauugcaa

SEQ ID NO: 2407392 - RNA, 19 nt, Homo sapiens
  misc_RNA (1)...(19): siRNA sense strand
ggauacacaaggacggaca

SEQ ID NO: 2407393 - RNA, 19 nt, Homo sapiens
  misc_RNA (1)...(19): siRNA sense strand
ccaucaagcagcugcacau

SEQ ID NO: 2407394 - RNA, 19 nt, Homo sapiens
  misc_RNA (1)...(19): siRNA sense strand
ucuguaaaccuguggagga

SEQ ID NO: 2407395 - RNA, 19 nt, Homo sapiens
  misc_RNA (1)...(19): siRNA sense strand
ggauacacaaggacggaca

SEQ ID NO: 2407396 - RNA, 19 nt, Homo sapiens
  misc_RNA (1)...(19): siRNA sense strand
ccaucaagcagcugcacau

SEQ ID NO: 2407397 - RNA, 19 nt, Homo sapiens
  misc_RNA (1)...(19): siRNA sense strand
ucuguaaaccuguggagga

SEQ ID NO: 2407398 - RNA, 19 nt, Homo sapiens
  misc_RNA (1)...(19): siRNA sense strand
ggauacacaaggacggaca

SEQ ID NO: 2407399 - RNA, 19 nt, Homo sapiens
  misc_RNA (1)...(19): siRNA sense strand
ccaucaagcagcugcacau

SEQ ID NO: 2407400 - RNA, 19 nt, Homo sapiens
  misc_RNA (1)...(19): siRNA sense strand
ucuguaaaccuguggagga

SEQ ID NO: 2407401 - RNA, 19 nt, Homo sapiens
  misc_RNA (1)...(19): siRNA sense strand
ggauacacaaggacggaca

SEQ ID NO: 2407402 - RNA, 19 nt, Homo sapiens
  misc_RNA (1)...(19): siRNA sense strand
ccaucaagcagcugcacau

SEQ ID NO: 2407403 - RNA, 19 nt, Homo sapiens
  misc_RNA (1)...(19): siRNA sense strand
ucuguaaaccuguggagga

SEQ ID NO: 2407404 - RNA, 19 nt, Homo sapiens
  misc_RNA (1)...(19): siRNA sense strand
aguuaaugcgggaggugaa

SEQ ID NO: 2407405 - RNA, 19 nt, Homo sapiens
  misc_RNA (1)...(19): siRNA sense strand
aggcaugucugcagggcuu

SEQ ID NO: 2407406 - RNA, 19 nt, Homo sapiens
  misc_RNA (1)...(19): siRNA sense strand
cagaaguguggaagcaaau

SEQ ID NO: 2407407 - RNA, 19 nt, Homo sapiens
  misc_RNA (1)...(19): siRNA sense strand
agguggaggagguaguuaa

SEQ ID NO: 2407408 - RNA, 19 nt, Homo sapiens
  misc_RNA (1)...(19): siRNA sense strand
agcaaauguuucaggaguu

SEQ ID NO: 2407409 - RNA, 19 nt, Homo sapiens
  misc_RNA (1)...(19): siRNA sense strand
gaagaaaugcuauagagga

SEQ ID NO: 2407410 - RNA, 19 nt, Homo sapiens
  misc_RNA (1)...(19): siRNA sense strand
aagcaaauguuucaggagu

SEQ ID NO: 2407411 - RNA, 19 nt, Homo sapiens
  misc_RNA (1)...(19): siRNA sense strand
caggugaagaugagggugu

SEQ ID NO: 2407412 - RNA, 19 nt, Homo sapiens
  misc_RNA (1)...(19): siRNA sense strand
ccucaggagagaaugucua

SEQ ID NO: 2407413 - RNA, 19 nt, Homo sapiens
  misc_RNA (1)...(19): siRNA sense strand
ccauuuacaagguggagga

SEQ ID NO: 2407414 - RNA, 19 nt, Homo sapiens
  misc_RNA (1)...(19): siRNA sense strand
gaggugaagccauggcaca

SEQ ID NO: 2407415 - RNA, 19 nt, Homo sapiens
  misc_RNA (1)...(19): siRNA sense strand
uuuacaagguggaggaggu

SEQ ID NO: 2407416 - RNA, 19 nt, Homo sapiens
  misc_RNA (1)...(19): siRNA sense strand
ucguggugauuguuguaaa

SEQ ID NO: 2407417 - RNA, 19 nt, Homo sapiens
  misc_RNA (1)...(19): siRNA sense strand
gggccacacaauagugaca

SEQ ID NO: 2407418 - RNA, 19 nt, Homo sapiens
  misc_RNA (1)...(19): siRNA sense strand
cguggugauuguuguaaaa

SEQ ID NO: 2407419 - RNA, 19 nt, Homo sapiens
  misc_RNA (1)...(19): siRNA sense strand
augcuauagaggaagauuu

SEQ ID NO: 2407420 - RNA, 19 nt, Homo sapiens
  misc_RNA (1)...(19): siRNA sense strand
cuguaggaacuuaagcauu

SEQ ID NO: 2407421 - RNA, 19 nt, Homo sapiens
  misc_RNA (1)...(19): siRNA sense strand
auauugagaaggagguaaa

SEQ ID NO: 2407422 - RNA, 19 nt, Homo sapiens
  misc_RNA (1)...(19): siRNA sense strand
cagacagacugcugagcga

SEQ ID NO: 2407423 - RNA, 19 nt, Homo sapiens
  misc_RNA (1)...(19): siRNA sense strand
ugaaaagaguagagauaag

SEQ ID NO: 2407424 - RNA, 19 nt, Homo sapiens
  misc_RNA (1)...(19): siRNA sense strand
agaacuuccuggagaccau

SEQ ID NO: 2407425 - RNA, 19 nt, Homo sapiens
  misc_RNA (1)...(19): siRNA sense strand
aggagggcaagaagggcaa

SEQ ID NO: 2407426 - RNA, 19 nt, Homo sapiens
  misc_RNA (1)...(19): siRNA sense strand
gaguauuccuaaaagguga

SEQ ID NO: 2407427 - RNA, 19 nt, Homo sapiens
  misc_RNA (1)...(19): siRNA sense strand
ggagggacggggaggauau

SEQ ID NO: 2407428 - RNA, 19 nt, Homo sapiens
  misc_RNA (1)...(19): siRNA sense strand
agcaagaccaucagugaga

SEQ ID NO: 2407429 - RNA, 19 nt, Homo sapiens
  misc_RNA (1)...(19): siRNA sense strand
cugcaggacuacaugcuga

SEQ ID NO: 2407430 - RNA, 19 nt, Homo sapiens
  misc_RNA (1)...(19): siRNA sense strand
ggagaaugugucagacuua

SEQ ID NO: 2407431 - RNA, 19 nt, Homo sapiens
  misc_RNA (1)...(19): siRNA sense strand
cgaucaaacucaccaggua

SEQ ID NO: 2407432 - RNA, 19 nt, Homo sapiens
  misc_RNA (1)...(19): siRNA sense strand
ggucaagaagcccaaauua

SEQ ID NO: 2407433 - RNA, 19 nt, Homo sapiens
  misc_RNA (1)...(19): siRNA sense strand
gaagugagaaggugacaau

SEQ ID NO: 2407434 - RNA, 19 nt, Homo sapiens
  misc_RNA (1)...(19): siRNA sense strand
gggagaaugugucagacuu

SEQ ID NO: 2407435 - RNA, 19 nt, Homo sapiens
  misc_RNA (1)...(19): siRNA sense strand
cagcaguggacgggagaau

SEQ ID NO: 2407436 - RNA, 19 nt, Homo sapiens
  misc_RNA (1)...(19): siRNA sense strand
gcuccaauuaccagugaau

SEQ ID NO: 2407437 - RNA, 19 nt, Homo sapiens
  misc_RNA (1)...(19): siRNA sense strand
caaauuaucuggaagugga

SEQ ID NO: 2407438 - RNA, 19 nt, Homo sapiens
  misc_RNA (1)...(19): siRNA sense strand
acgcacagccacauauuua

SEQ ID NO: 2407439 - RNA, 19 nt, Homo sapiens
  misc_RNA (1)...(19): siRNA sense strand
ugucaaacgcacagccaca

SEQ ID NO: 2407440 - RNA, 19 nt, Homo sapiens
  misc_RNA (1)...(19): siRNA sense strand
agaaggugacaaucaguua

SEQ ID NO: 2407441 - RNA, 19 nt, Homo sapiens
  misc_RNA (1)...(19): siRNA sense strand
gucaagaagcccaaauuau

SEQ ID NO: 2407442 - RNA, 19 nt, Homo sapiens
  misc_RNA (1)...(19): siRNA sense strand
agugagaaggugacaauca

SEQ ID NO: 2407443 - RNA, 19 nt, Homo sapiens
  misc_RNA (1)...(19): siRNA sense strand
aaucaguuacgcagaguau

SEQ ID NO: 2407444 - RNA, 19 nt, Homo sapiens
  misc_RNA (1)...(19): siRNA sense strand
ucaguuacgcagaguauau

SEQ ID NO: 2407445 - RNA, 19 nt, Homo sapiens
  misc_RNA (1)...(19): siRNA sense strand
gaacaagacugggaucaga

SEQ ID NO: 2407446 - RNA, 19 nt, Homo sapiens
  misc_RNA (1)...(19): siRNA sense strand
gggucaagaagcccaaauu

SEQ ID NO: 2407447 - RNA, 19 nt, Homo sapiens
  misc_RNA (1)...(19): siRNA sense strand
gguccaugggauucgaauu

SEQ ID NO: 2407448 - RNA, 19 nt, Homo sapiens
  misc_RNA (1)...(19): siRNA sense strand
ccaugggauucgaauugaa

SEQ ID NO: 2407449 - RNA, 19 nt, Homo sapiens
  misc_RNA (1)...(19): siRNA sense strand
gguggugacugcagagaug

SEQ ID NO: 2407450 - RNA, 19 nt, Homo sapiens
  misc_RNA (1)...(19): siRNA sense strand
cccgagaggagcugccuaa

SEQ ID NO: 2407451 - RNA, 19 nt, Homo sapiens
  misc_RNA (1)...(19): siRNA sense strand
gcacuuaaggacagccgau

SEQ ID NO: 2407452 - RNA, 19 nt, Homo sapiens
  misc_RNA (1)...(19): siRNA sense strand
gugauuaccuggacuggga

SEQ ID NO: 2407453 - RNA, 19 nt, Homo sapiens
  misc_RNA (1)...(19): siRNA sense strand
uugcagaaggugauggaaa

SEQ ID NO: 2407454 - RNA, 19 nt, Homo sapiens
  misc_RNA (1)...(19): siRNA sense strand
uugugaaggugaaaggcaa

SEQ ID NO: 2407455 - RNA, 19 nt, Homo sapiens
  misc_RNA (1)...(19): siRNA sense strand
guaauaaagcagaaggaag

SEQ ID NO: 2407456 - RNA, 19 nt, Homo sapiens
  misc_RNA (1)...(19): siRNA sense strand
ugcagaaggugauggaaaa

SEQ ID NO: 2407457 - RNA, 19 nt, Homo sapiens
  misc_RNA (1)...(19): siRNA sense strand
acucauuaggccucagaaa

SEQ ID NO: 2407458 - RNA, 19 nt, Homo sapiens
  misc_RNA (1)...(19): siRNA sense strand
ccagaauugcagaagguga

SEQ ID NO: 2407459 - RNA, 19 nt, Homo sapiens
  misc_RNA (1)...(19): siRNA sense strand
ccgaguuugugaaggugaa

SEQ ID NO: 2407460 - RNA, 19 nt, Homo sapiens
  misc_RNA (1)...(19): siRNA sense strand
aggaagaagaauuucgaga

SEQ ID NO: 2407461 - RNA, 19 nt, Homo sapiens
  misc_RNA (1)...(19): siRNA sense strand
cagaauugcagaaggugau

SEQ ID NO: 2407462 - RNA, 19 nt, Homo sapiens
  misc_RNA (1)...(19): siRNA sense strand
aggaagaagaagcacagaa

SEQ ID NO: 2407463 - RNA, 19 nt, Homo sapiens
  misc_RNA (1)...(19): siRNA sense strand
cgcccaaggaagaagaauu

SEQ ID NO: 2407464 - RNA, 19 nt, Homo sapiens
  misc_RNA (1)...(19): siRNA sense strand
cuaaaugccucgagcugga

SEQ ID NO: 2407465 - RNA, 19 nt, Homo sapiens
  misc_RNA (1)...(19): siRNA sense strand
agaaauugcaagaagagca

SEQ ID NO: 2407466 - RNA, 19 nt, Homo sapiens
  misc_RNA (1)...(19): siRNA sense strand
agaaggaagaagaagcaca

SEQ ID NO: 2407467 - RNA, 19 nt, Homo sapiens
  misc_RNA (1)...(19): siRNA sense strand
aagaaaucugacuuggaaa

SEQ ID NO: 2407468 - RNA, 19 nt, Homo sapiens
  misc_RNA (1)...(19): siRNA sense strand
accaaguaauaaagcagaa

SEQ ID NO: 2407469 - RNA, 19 nt, Homo sapiens
  misc_RNA (1)...(19): siRNA sense strand
acuacauagaagaugacaa

SEQ ID NO: 2407470 - RNA, 19 nt, Homo sapiens
  misc_RNA (1)...(19): siRNA sense strand
gugugcagccuguggccaa

SEQ ID NO: 2407471 - RNA, 19 nt, Homo sapiens
  misc_RNA (1)...(19): siRNA sense strand
gagagaaauggcagugcga

SEQ ID NO: 2407472 - RNA, 19 nt, Homo sapiens
  misc_RNA (1)...(19): siRNA sense strand
aaguaauaaagcagaagga

SEQ ID NO: 2407473 - RNA, 19 nt, Homo sapiens
  misc_RNA (1)...(19): siRNA sense strand
ugcaagaagagcaagaaaa

SEQ ID NO: 2407474 - RNA, 19 nt, Homo sapiens
  misc_RNA (1)...(19): siRNA sense strand
cagaaaaugacaucagaca

SEQ ID NO: 2407475 - RNA, 19 nt, Homo sapiens
  misc_RNA (1)...(19): siRNA sense strand
caagaagcaucauggccga

SEQ ID NO: 2407476 - RNA, 19 nt, Homo sapiens
  misc_RNA (1)...(19): siRNA sense strand
gagaagaaccuaaaugccu

SEQ ID NO: 2407477 - RNA, 19 nt, Homo sapiens
  misc_RNA (1)...(19): siRNA sense strand
cugacuggcuacaggcgua

SEQ ID NO: 2407478 - RNA, 19 nt, Homo sapiens
  misc_RNA (1)...(19): siRNA sense strand
gcagcagaacugugcguga

SEQ ID NO: 2407479 - RNA, 19 nt, Homo sapiens
  misc_RNA (1)...(19): siRNA sense strand
ucgcaagguccuacgguca

SEQ ID NO: 2407480 - RNA, 19 nt, Homo sapiens
  misc_RNA (1)...(19): siRNA sense strand
ccacugggcugacuggcua

SEQ ID NO: 2407481 - RNA, 19 nt, Homo sapiens
  misc_RNA (1)...(19): siRNA sense strand
ccgaggaguuugacgccga

SEQ ID NO: 2407482 - RNA, 19 nt, Homo sapiens
  misc_RNA (1)...(19): siRNA sense strand
cggucaagcauccgggagu

SEQ ID NO: 2407483 - RNA, 19 nt, Homo sapiens
  misc_RNA (1)...(19): siRNA sense strand
cuuaaaggguggagaccaa

SEQ ID NO: 2407484 - RNA, 19 nt, Homo sapiens
  misc_RNA (1)...(19): siRNA sense strand
aggagaaagaggaggaaaa

SEQ ID NO: 2407485 - RNA, 19 nt, Homo sapiens
  misc_RNA (1)...(19): siRNA sense strand
caguagaacagaagaugaa

SEQ ID NO: 2407486 - RNA, 19 nt, Homo sapiens
  misc_RNA (1)...(19): siRNA sense strand
cugaagacguuuagacaca

SEQ ID NO: 2407487 - RNA, 19 nt, Homo sapiens
  misc_RNA (1)...(19): siRNA sense strand
cauacaagugaaagcgaua

SEQ ID NO: 2407488 - RNA, 19 nt, Homo sapiens
  misc_RNA (1)...(19): siRNA sense strand
agaagaauaaggagaaaga

SEQ ID NO: 2407489 - RNA, 19 nt, Homo sapiens
  misc_RNA (1)...(19): siRNA sense strand
uggucaacacagagagcaa

SEQ ID NO: 2407490 - RNA, 19 nt, Homo sapiens
  misc_RNA (1)...(19): siRNA sense strand
ccgugaaggaggagaagga

SEQ ID NO: 2407491 - RNA, 19 nt, Homo sapiens
  misc_RNA (1)...(19): siRNA sense strand
cugcaggaucaaugacaua

SEQ ID NO: 2407492 - RNA, 19 nt, Homo sapiens
  misc_RNA (1)...(19): siRNA sense strand
caaaagaagaauaaggaga

SEQ ID NO: 2407493 - RNA, 19 nt, Homo sapiens
  misc_RNA (1)...(19): siRNA sense strand
guccaaagccccagaaaau

SEQ ID NO: 2407494 - RNA, 19 nt, Homo sapiens
  misc_RNA (1)...(19): siRNA sense strand
gaucaaccucagcaagaaa

SEQ ID NO: 2407495 - RNA, 19 nt, Homo sapiens
  misc_RNA (1)...(19): siRNA sense strand
ggauguagacacagggaag

SEQ ID NO: 2407496 - RNA, 19 nt, Homo sapiens
  misc_RNA (1)...(19): siRNA sense strand
ccaugagggagccgugaaa

SEQ ID NO: 2407497 - RNA, 19 nt, Homo sapiens
  misc_RNA (1)...(19): siRNA sense strand
cugagagaggagaacaaua

SEQ ID NO: 2407498 - RNA, 19 nt, Homo sapiens
  misc_RNA (1)...(19): siRNA sense strand
guucacagcccaagagagu

SEQ ID NO: 2407499 - RNA, 19 nt, Homo sapiens
  misc_RNA (1)...(19): siRNA sense strand
auuggaaacuccuggaaaa

SEQ ID NO: 2407500 - RNA, 19 nt, Homo sapiens
  misc_RNA (1)...(19): siRNA sense strand
aaacaguagaacagaagau

SEQ ID NO: 2407501 - RNA, 19 nt, Homo sapiens
  misc_RNA (1)...(19): siRNA sense strand
guaaacaaacugugaucca

SEQ ID NO: 2407502 - RNA, 19 nt, Homo sapiens
  misc_RNA (1)...(19): siRNA sense strand
ccuucuuuauucagggcaa

SEQ ID NO: 2407503 - RNA, 19 nt, Homo sapiens
  misc_RNA (1)...(19): siRNA sense strand
gagaaagaccacagcucca

SEQ ID NO: 2407504 - RNA, 19 nt, Homo sapiens
  misc_RNA (1)...(19): siRNA sense strand
caguugaucgguugagauu

SEQ ID NO: 2407505 - RNA, 19 nt, Homo sapiens
  misc_RNA (1)...(19): siRNA sense strand
ugaccgugaaggaggagaa

SEQ ID NO: 2407506 - RNA, 19 nt, Homo sapiens
  misc_RNA (1)...(19): siRNA sense strand
ggauaaaacaguagaacag

SEQ ID NO: 2407507 - RNA, 19 nt, Homo sapiens
  misc_RNA (1)...(19): siRNA sense strand
aguaugggauguagacaca

SEQ ID NO: 2407508 - RNA, 19 nt, Homo sapiens
  misc_RNA (1)...(19): siRNA sense strand
agaauaaggagaaagagga

SEQ ID NO: 2407509 - RNA, 19 nt, Homo sapiens
  misc_RNA (1)...(19): siRNA sense strand
gcccagucacccaaagaaa

SEQ ID NO: 2407510 - RNA, 19 nt, Homo sapiens
  misc_RNA (1)...(19): siRNA sense strand
cggaucaaccucagcaaga

SEQ ID NO: 2407511 - RNA, 19 nt, Homo sapiens
  misc_RNA (1)...(19): siRNA sense strand
gaacaauaucucagggcuc

SEQ ID NO: 2407512 - RNA, 19 nt, Homo sapiens
  misc_RNA (1)...(19): siRNA sense strand
gguaaaaguaugggaugua

SEQ ID NO: 2407513 - RNA, 19 nt, Homo sapiens
  misc_RNA (1)...(19): siRNA sense strand
gggaagugccugaagacgu

SEQ ID NO: 2407514 - RNA, 19 nt, Homo sapiens
  misc_RNA (1)...(19): siRNA sense strand
cguugaauuccgaggccau

SEQ ID NO: 2407515 - RNA, 19 nt, Homo sapiens
  misc_RNA (1)...(19): siRNA sense strand
gaagccaagaugaaggaau

SEQ ID NO: 2407516 - RNA, 19 nt, Homo sapiens
  misc_RNA (1)...(19): siRNA sense strand
gcugcauggaucaggaaga

SEQ ID NO: 2407517 - RNA, 19 nt, Homo sapiens
  misc_RNA (1)...(19): siRNA sense strand
gagugguucugcaggauca

SEQ ID NO: 2407518 - RNA, 19 nt, Homo sapiens
  misc_RNA (1)...(19): siRNA sense strand
ugaaggaggagaaggagca

SEQ ID NO: 2407519 - RNA, 19 nt, Homo sapiens
  misc_RNA (1)...(19): siRNA sense strand
gcagauggcaagauccgaa

SEQ ID NO: 2407520 - RNA, 19 nt, Homo sapiens
  misc_RNA (1)...(19): siRNA sense strand
uguaagaacaggcucguau

SEQ ID NO: 2407521 - RNA, 19 nt, Homo sapiens
  misc_RNA (1)...(19): siRNA sense strand
gcgccugugcagauggcaa

SEQ ID NO: 2407522 - RNA, 19 nt, Homo sapiens
  misc_RNA (1)...(19): siRNA sense strand
auaaggagaaagaggagga

SEQ ID NO: 2407523 - RNA, 19 nt, Homo sapiens
  misc_RNA (1)...(19): siRNA sense strand
agugguugauccaggaaaa

SEQ ID NO: 2407524 - RNA, 19 nt, Homo sapiens
  misc_RNA (1)...(19): siRNA sense strand
gaauaucaggccagggagu

SEQ ID NO: 2407525 - RNA, 19 nt, Homo sapiens
  misc_RNA (1)...(19): siRNA sense strand
ucuucuggguucagcaaau

SEQ ID NO: 2407526 - RNA, 19 nt, Homo sapiens
  misc_RNA (1)...(19): siRNA sense strand
ggagcuaugaccuaaguau

SEQ ID NO: 2407527 - RNA, 19 nt, Homo sapiens
  misc_RNA (1)...(19): siRNA sense strand
cuugcauggacuuguguaa

SEQ ID NO: 2407528 - RNA, 19 nt, Homo sapiens
  misc_RNA (1)...(19): siRNA sense strand
agaaaauagucucauggaa

SEQ ID NO: 2407529 - RNA, 19 nt, Homo sapiens
  misc_RNA (1)...(19): siRNA sense strand
uccagaaacugcagcccaa

SEQ ID NO: 2407530 - RNA, 19 nt, Homo sapiens
  misc_RNA (1)...(19): siRNA sense strand
aagcgauacccguugaauu

SEQ ID NO: 2407531 - RNA, 19 nt, Homo sapiens
  misc_RNA (1)...(19): siRNA sense strand
ccaagaugaaggaauauca

SEQ ID NO: 2407532 - RNA, 19 nt, Homo sapiens
  misc_RNA (1)...(19): siRNA sense strand
cugaggaaccauggaggaa

SEQ ID NO: 2407533 - RNA, 19 nt, Homo sapiens
  misc_RNA (1)...(19): siRNA sense strand
agagcaugcgugugaaaca

SEQ ID NO: 2407534 - RNA, 19 nt, Homo sapiens
  misc_RNA (1)...(19): siRNA sense strand
cagcaagaaagaggggaaa

SEQ ID NO: 2407535 - RNA, 19 nt, Homo sapiens
  misc_RNA (1)...(19): siRNA sense strand
ugguugaccuggaugacau

SEQ ID NO: 2407536 - RNA, 19 nt, Homo sapiens
  misc_RNA (1)...(19): siRNA sense strand
aguguaauauucagguuca

SEQ ID NO: 2407537 - RNA, 19 nt, Homo sapiens
  misc_RNA (1)...(19): siRNA sense strand
aggaggagaaggagcacca

SEQ ID NO: 2407538 - RNA, 19 nt, Homo sapiens
  misc_RNA (1)...(19): siRNA sense strand
cuucagaccacacagggaa

SEQ ID NO: 2407539 - RNA, 19 nt, Homo sapiens
  misc_RNA (1)...(19): siRNA sense strand
ucagcaagaaagaggggaa

SEQ ID NO: 2407540 - RNA, 19 nt, Homo sapiens
  misc_RNA (1)...(19): siRNA sense strand
augcaauggucgugaacaa

SEQ ID NO: 2407541 - RNA, 19 nt, Homo sapiens
  misc_RNA (1)...(19): siRNA sense strand
augaaggaguguuuggaaa

SEQ ID NO: 2407542 - RNA, 19 nt, Homo sapiens
  misc_RNA (1)...(19): siRNA sense strand
ggaggaaauggcaaggaaa

SEQ ID NO: 2407543 - RNA, 19 nt, Homo sapiens
  misc_RNA (1)...(19): siRNA sense strand
cauuaagacaguagcaauu

SEQ ID NO: 2407544 - RNA, 19 nt, Homo sapiens
  misc_RNA (1)...(19): siRNA sense strand
ccucaguauuuguggacau

SEQ ID NO: 2407545 - RNA, 19 nt, Homo sapiens
  misc_RNA (1)...(19): siRNA sense strand
ggagaaaggaacaugacau

SEQ ID NO: 2407546 - RNA, 19 nt, Homo sapiens
  misc_RNA (1)...(19): siRNA sense strand
gaggaaauggcaaggaaaa

SEQ ID NO: 2407547 - RNA, 19 nt, Homo sapiens
  misc_RNA (1)...(19): siRNA sense strand
cagagaaggccaagaaaau

SEQ ID NO: 2407548 - RNA, 19 nt, Homo sapiens
  misc_RNA (1)...(19): siRNA sense strand
agacuauuguagagacuau

SEQ ID NO: 2407549 - RNA, 19 nt, Homo sapiens
  misc_RNA (1)...(19): siRNA sense strand
cgguggauggaaugggaua

SEQ ID NO: 2407550 - RNA, 19 nt, Homo sapiens
  misc_RNA (1)...(19): siRNA sense strand
cagauaugguaaaguguca

SEQ ID NO: 2407551 - RNA, 19 nt, Homo sapiens
  misc_RNA (1)...(19): siRNA sense strand
caguuggaccuguggcaaa

SEQ ID NO: 2407552 - RNA, 19 nt, Homo sapiens
  misc_RNA (1)...(19): siRNA sense strand
gguuaugaacauugaagau

SEQ ID NO: 2407553 - RNA, 19 nt, Homo sapiens
  misc_RNA (1)...(19): siRNA sense strand
agaagaaaaugauggaaga

SEQ ID NO: 2407554 - RNA, 19 nt, Homo sapiens
  misc_RNA (1)...(19): siRNA sense strand
aggaauauguacagucaca

SEQ ID NO: 2407555 - RNA, 19 nt, Homo sapiens
  misc_RNA (1)...(19): siRNA sense strand
gggacuggaaacauggaaa

SEQ ID NO: 2407556 - RNA, 19 nt, Homo sapiens
  misc_RNA (1)...(19): siRNA sense strand
gcagagaaggccaagaaaa

SEQ ID NO: 2407557 - RNA, 19 nt, Homo sapiens
  misc_RNA (1)...(19): siRNA sense strand
cagaauucauccuagggaa

SEQ ID NO: 2407558 - RNA, 19 nt, Homo sapiens
  misc_RNA (1)...(19): siRNA sense strand
acugaguccuggagcuaua

SEQ ID NO: 2407559 - RNA, 19 nt, Homo sapiens
  misc_RNA (1)...(19): siRNA sense strand
caggaaggcaacagcaaau

SEQ ID NO: 2407560 - RNA, 19 nt, Homo sapiens
  misc_RNA (1)...(19): siRNA sense strand
agagaggagaaaagagaaa

SEQ ID NO: 2407561 - RNA, 19 nt, Homo sapiens
  misc_RNA (1)...(19): siRNA sense strand
cugcagagggccauuguaa

SEQ ID NO: 2407562 - RNA, 19 nt, Homo sapiens
  misc_RNA (1)...(19): siRNA sense strand
gauucaacguggaagagau

SEQ ID NO: 2407563 - RNA, 19 nt, Homo sapiens
  misc_RNA (1)...(19): siRNA sense strand
cccaggaaggacagaguua

SEQ ID NO: 2407564 - RNA, 19 nt, Homo sapiens
  misc_RNA (1)...(19): siRNA sense strand
aggaggaaauggcaaggaa

SEQ ID NO: 2407565 - RNA, 19 nt, Homo sapiens
  misc_RNA (1)...(19): siRNA sense strand
gggccucgguggauggaau

SEQ ID NO: 2407566 - RNA, 19 nt, Homo sapiens
  misc_RNA (1)...(19): siRNA sense strand
ggaagagugagcugggaca

SEQ ID NO: 2407567 - RNA, 19 nt, Homo sapiens
  misc_RNA (1)...(19): siRNA sense strand
accacaucauugagaauaa

SEQ ID NO: 2407568 - RNA, 19 nt, Homo sapiens
  misc_RNA (1)...(19): siRNA sense strand
cuguaaacccacaugauau

SEQ ID NO: 2407569 - RNA, 19 nt, Homo sapiens
  misc_RNA (1)...(19): siRNA sense strand
gaaaagagaaaaugggcuu

SEQ ID NO: 2407570 - RNA, 19 nt, Homo sapiens
  misc_RNA (1)...(19): siRNA sense strand
aaauccaagaagagagcaa

SEQ ID NO: 2407571 - RNA, 19 nt, Homo sapiens
  misc_RNA (1)...(19): siRNA sense strand
augcaaugaaggaguguuu

SEQ ID NO: 2407572 - RNA, 19 nt, Homo sapiens
  misc_RNA (1)...(19): siRNA sense strand
ggaaagcugcagagggcca

SEQ ID NO: 2407573 - RNA, 19 nt, Homo sapiens
  misc_RNA (1)...(19): siRNA sense strand
guacaggaggaaauggcaa

SEQ ID NO: 2407574 - RNA, 19 nt, Homo sapiens
  misc_RNA (1)...(19): siRNA sense strand
ggauggaaugggauaaaca

SEQ ID NO: 2407575 - RNA, 19 nt, Homo sapiens
  misc_RNA (1)...(19): siRNA sense strand
ggguuaguuugcaagggaa

SEQ ID NO: 2407576 - RNA, 19 nt, Homo sapiens
  misc_RNA (1)...(19): siRNA sense strand
ccuaaaccucagauauuaa

SEQ ID NO: 2407577 - RNA, 19 nt, Homo sapiens
  misc_RNA (1)...(19): siRNA sense strand
acauggaaauaaagaagga

SEQ ID NO: 2407578 - RNA, 19 nt, Homo sapiens
  misc_RNA (1)...(19): siRNA sense strand
ugaaggaguguuuggaaaa

SEQ ID NO: 2407579 - RNA, 19 nt, Homo sapiens
  misc_RNA (1)...(19): siRNA sense strand
gcaaagagguccaagaugc

SEQ ID NO: 2407580 - RNA, 19 nt, Homo sapiens
  misc_RNA (1)...(19): siRNA sense strand
cccaagacgaaaugaaaga

SEQ ID NO: 2407581 - RNA, 19 nt, Homo sapiens
  misc_RNA (1)...(19): siRNA sense strand
acauuaagacaguagcaau

SEQ ID NO: 2407582 - RNA, 19 nt, Homo sapiens
  misc_RNA (1)...(19): siRNA sense strand
aagccaaugaugaguaauu

SEQ ID NO: 2407583 - RNA, 19 nt, Homo sapiens
  misc_RNA (1)...(19): siRNA sense strand
ccaccacaucauugagaau

SEQ ID NO: 2407584 - RNA, 19 nt, Homo sapiens
  misc_RNA (1)...(19): siRNA sense strand
caggaaggacagaguuaga

SEQ ID NO: 2407585 - RNA, 19 nt, Homo sapiens
  misc_RNA (1)...(19): siRNA sense strand
agcaggaguugaaaugaaa

SEQ ID NO: 2407586 - RNA, 19 nt, Homo sapiens
  misc_RNA (1)...(19): siRNA sense strand
guugaaaugaaaucggaau

SEQ ID NO: 2407587 - RNA, 19 nt, Homo sapiens
  misc_RNA (1)...(19): siRNA sense strand
aguugguacuggucacaaa

SEQ ID NO: 2407588 - RNA, 19 nt, Homo sapiens
  misc_RNA (1)...(19): siRNA sense strand
ucguuaggacaguggacua

SEQ ID NO: 2407589 - RNA, 19 nt, Homo sapiens
  misc_RNA (1)...(19): siRNA sense strand
cuacaagugcucagagacu

SEQ ID NO: 2407590 - RNA, 19 nt, Homo sapiens
  misc_RNA (1)...(19): siRNA sense strand
ccaaagaccauguaaaaca

SEQ ID NO: 2407591 - RNA, 19 nt, Homo sapiens
  misc_RNA (1)...(19): siRNA sense strand
ccacugaguccuggagcua

SEQ ID NO: 2407592 - RNA, 19 nt, Homo sapiens
  misc_RNA (1)...(19): siRNA sense strand
ggaaugggauaaacaggga

SEQ ID NO: 2407593 - RNA, 19 nt, Homo sapiens
  misc_RNA (1)...(19): siRNA sense strand
ggauaaacagggauguacu

SEQ ID NO: 2407594 - RNA, 19 nt, Homo sapiens
  misc_RNA (1)...(19): siRNA sense strand
uggaaauaaagaaggaaac

SEQ ID NO: 2407595 - RNA, 19 nt, Homo sapiens
  misc_RNA (1)...(19): siRNA sense strand
agucaaccagagaggagaa

SEQ ID NO: 2407596 - RNA, 19 nt, Homo sapiens
  misc_RNA (1)...(19): siRNA sense strand
aaggacagaguuagagauu

SEQ ID NO: 2407597 - RNA, 19 nt, Homo sapiens
  misc_RNA (1)...(19): siRNA sense strand
ugacagugugguugacaau

SEQ ID NO: 2407598 - RNA, 19 nt, Homo sapiens
  misc_RNA (1)...(19): siRNA sense strand
ccagagaggagaaaagaga

SEQ ID NO: 2407599 - RNA, 19 nt, Homo sapiens
  misc_RNA (1)...(19): siRNA sense strand
auguacagucacaagauua

SEQ ID NO: 2407600 - RNA, 19 nt, Homo sapiens
  misc_RNA (1)...(19): siRNA sense strand
gugugaaguccuccagaau

SEQ ID NO: 2407601 - RNA, 19 nt, Homo sapiens
  misc_RNA (1)...(19): siRNA sense strand
cuguugaugcuguggugaa

SEQ ID NO: 2407602 - RNA, 19 nt, Homo sapiens
  misc_RNA (1)...(19): siRNA sense strand
guggauggaaugggauaaa

SEQ ID NO: 2407603 - RNA, 19 nt, Homo sapiens
  misc_RNA (1)...(19): siRNA sense strand
agaugauggccgcaggaaa

SEQ ID NO: 2407604 - RNA, 19 nt, Homo sapiens
  misc_RNA (1)...(19): siRNA sense strand
agaugauggccgcaggaaa

SEQ ID NO: 2407605 - RNA, 19 nt, Homo sapiens
  misc_RNA (1)...(19): siRNA sense strand
uggaggaugcagugaaaga

SEQ ID NO: 2407606 - RNA, 19 nt, Homo sapiens
  misc_RNA (1)...(19): siRNA sense strand
accaauugcuggaggagga

SEQ ID NO: 2407607 - RNA, 19 nt, Homo sapiens
  misc_RNA (1)...(19): siRNA sense strand
cugacaaggguaaagguga

SEQ ID NO: 2407608 - RNA, 19 nt, Homo sapiens
  misc_RNA (1)...(19): siRNA sense strand
gaaaccaauugcuggagga

SEQ ID NO: 2407609 - RNA, 19 nt, Homo sapiens
  misc_RNA (1)...(19): siRNA sense strand
cagacuacgugaagggaga

SEQ ID NO: 2407610 - RNA, 19 nt, Homo sapiens
  misc_RNA (1)...(19): siRNA sense strand
agaugauggccgcaggaaa

SEQ ID NO: 2407611 - RNA, 19 nt, Homo sapiens
  misc_RNA (1)...(19): siRNA sense strand
uggaggaugcagugaaaga

SEQ ID NO: 2407612 - RNA, 19 nt, Homo sapiens
  misc_RNA (1)...(19): siRNA sense strand
accaauugcuggaggagga

SEQ ID NO: 2407613 - RNA, 19 nt, Homo sapiens
  misc_RNA (1)...(19): siRNA sense strand
cugacaaggguaaagguga

SEQ ID NO: 2407614 - RNA, 19 nt, Homo sapiens
  misc_RNA (1)...(19): siRNA sense strand
gaaaccaauugcuggagga

SEQ ID NO: 2407615 - RNA, 19 nt, Homo sapiens
  misc_RNA (1)...(19): siRNA sense strand
ugaggaaccccaagugaaa

SEQ ID NO: 2407616 - RNA, 19 nt, Homo sapiens
  misc_RNA (1)...(19): siRNA sense strand
gagagaaccuggaagccgu

SEQ ID NO: 2407617 - RNA, 19 nt, Homo sapiens
  misc_RNA (1)...(19): siRNA sense strand
cagacuacgugaagggaga

SEQ ID NO: 2407618 - RNA, 19 nt, Homo sapiens
  misc_RNA (1)...(19): siRNA sense strand
agaugauggccgcaggaaa

SEQ ID NO: 2407619 - RNA, 19 nt, Homo sapiens
  misc_RNA (1)...(19): siRNA sense strand
uggaggaugcagugaaaga

SEQ ID NO: 2407620 - RNA, 19 nt, Homo sapiens
  misc_RNA (1)...(19): siRNA sense strand
accaauugcuggaggagga

SEQ ID NO: 2407621 - RNA, 19 nt, Homo sapiens
  misc_RNA (1)...(19): siRNA sense strand
cugacaaggguaaagguga

SEQ ID NO: 2407622 - RNA, 19 nt, Homo sapiens
  misc_RNA (1)...(19): siRNA sense strand
gaaaccaauugcuggagga

SEQ ID NO: 2407623 - RNA, 19 nt, Homo sapiens
  misc_RNA (1)...(19): siRNA sense strand
ugaggaaccccaagugaaa

SEQ ID NO: 2407624 - RNA, 19 nt, Homo sapiens
  misc_RNA (1)...(19): siRNA sense strand
gagagaaccuggaagccgu

SEQ ID NO: 2407625 - RNA, 19 nt, Homo sapiens
  misc_RNA (1)...(19): siRNA sense strand
aggagaggaugaaggcuca

SEQ ID NO: 2407626 - RNA, 19 nt, Homo sapiens
  misc_RNA (1)...(19): siRNA sense strand
agagggaggcugaagguga

SEQ ID NO: 2407627 - RNA, 19 nt, Homo sapiens
  misc_RNA (1)...(19): siRNA sense strand
acguguaccuggagcagau

SEQ ID NO: 2407628 - RNA, 19 nt, Homo sapiens
  misc_RNA (1)...(19): siRNA sense strand
augaacugcugacgggaau

SEQ ID NO: 2407629 - RNA, 19 nt, Homo sapiens
  misc_RNA (1)...(19): siRNA sense strand
ucagguacuuugugagcga

SEQ ID NO: 2407630 - RNA, 19 nt, Homo sapiens
  misc_RNA (1)...(19): siRNA sense strand
gcgcgauguuagugaggac

SEQ ID NO: 2407631 - RNA, 19 nt, Homo sapiens
  misc_RNA (1)...(19): siRNA sense strand
cgugcugcuccguggcaua

SEQ ID NO: 2407632 - RNA, 19 nt, Homo sapiens
  misc_RNA (1)...(19): siRNA sense strand
gggagaagguggugucagc

SEQ ID NO: 2407633 - RNA, 19 nt, Homo sapiens
  misc_RNA (1)...(19): siRNA sense strand
cggcagagaugcugguagc

SEQ ID NO: 2407634 - RNA, 19 nt, Homo sapiens
  misc_RNA (1)...(19): siRNA sense strand
ggaaccugcuccuggacca

SEQ ID NO: 2407635 - RNA, 19 nt, Homo sapiens
  misc_RNA (1)...(19): siRNA sense strand
cuucaggaauccaggccca

SEQ ID NO: 2407636 - RNA, 19 nt, Homo sapiens
  misc_RNA (1)...(19): siRNA sense strand
gggcaugggagaagguggu

SEQ ID NO: 2407637 - RNA, 19 nt, Homo sapiens
  misc_RNA (1)...(19): siRNA sense strand
aagccaauuccuugugaaa

SEQ ID NO: 2407638 - RNA, 19 nt, Homo sapiens
  misc_RNA (1)...(19): siRNA sense strand
cccaagaucagaaggaaaa

SEQ ID NO: 2407639 - RNA, 19 nt, Homo sapiens
  misc_RNA (1)...(19): siRNA sense strand
ccccaagaucagaaggaaa

SEQ ID NO: 2407640 - RNA, 19 nt, Homo sapiens
  misc_RNA (1)...(19): siRNA sense strand
ccgaggacaaguauggaau

SEQ ID NO: 2407641 - RNA, 19 nt, Homo sapiens
  misc_RNA (1)...(19): siRNA sense strand
guucagagacauuggggau

SEQ ID NO: 2407642 - RNA, 19 nt, Homo sapiens
  misc_RNA (1)...(19): siRNA sense strand
cgagagugccccagugaau

SEQ ID NO: 2407643 - RNA, 19 nt, Homo sapiens
  misc_RNA (1)...(19): siRNA sense strand
aggacaaguauggaauaaa

SEQ ID NO: 2407644 - RNA, 19 nt, Homo sapiens
  misc_RNA (1)...(19): siRNA sense strand
gaagcugagcagaagccaa

SEQ ID NO: 2407645 - RNA, 19 nt, Homo sapiens
  misc_RNA (1)...(19): siRNA sense strand
acaucuaacuuuugagagu

SEQ ID NO: 2407646 - RNA, 19 nt, Homo sapiens
  misc_RNA (1)...(19): siRNA sense strand
ccucagacacagagagcaa

SEQ ID NO: 2407647 - RNA, 19 nt, Homo sapiens
  misc_RNA (1)...(19): siRNA sense strand
ggguacuguuugaggagaa

SEQ ID NO: 2407648 - RNA, 19 nt, Homo sapiens
  misc_RNA (1)...(19): siRNA sense strand
ucucaauggauaaggacaa

SEQ ID NO: 2407649 - RNA, 19 nt, Homo sapiens
  misc_RNA (1)...(19): siRNA sense strand
uggauaaggacaaggccaa

SEQ ID NO: 2407650 - RNA, 19 nt, Homo sapiens
  misc_RNA (1)...(19): siRNA sense strand
ucuacgaugcugugggcaa

SEQ ID NO: 2407651 - RNA, 19 nt, Homo sapiens
  misc_RNA (1)...(19): siRNA sense strand
uggaagugacagugaagau

SEQ ID NO: 2407652 - RNA, 19 nt, Homo sapiens
  misc_RNA (1)...(19): siRNA sense strand
acacagagagcaaggaacu

SEQ ID NO: 2407653 - RNA, 19 nt, Homo sapiens
  misc_RNA (1)...(19): siRNA sense strand
uggaugagcugaugccaga

SEQ ID NO: 2407654 - RNA, 19 nt, Homo sapiens
  misc_RNA (1)...(19): siRNA sense strand
uggaauacagacugcagaa

SEQ ID NO: 2407655 - RNA, 19 nt, Homo sapiens
  misc_RNA (1)...(19): siRNA sense strand
cagcaaaacaccagccaga

SEQ ID NO: 2407656 - RNA, 19 nt, Homo sapiens
  misc_RNA (1)...(19): siRNA sense strand
ccagaggaggagagaagca

SEQ ID NO: 2407657 - RNA, 19 nt, Homo sapiens
  misc_RNA (1)...(19): siRNA sense strand
gagacaggcagguggguac

SEQ ID NO: 2407658 - RNA, 19 nt, Homo sapiens
  misc_RNA (1)...(19): siRNA sense strand
gcuggaguggagagagaca

SEQ ID NO: 2407659 - RNA, 19 nt, Homo sapiens
  misc_RNA (1)...(19): siRNA sense strand
agacacagagagcaaggaa

SEQ ID NO: 2407660 - RNA, 19 nt, Homo sapiens
  misc_RNA (1)...(19): siRNA sense strand
ugccagaggaggagagaag

SEQ ID NO: 2407661 - RNA, 19 nt, Homo sapiens
  misc_RNA (1)...(19): siRNA sense strand
agagcaaggaacugggagu

SEQ ID NO: 2407662 - RNA, 19 nt, Homo sapiens
  misc_RNA (1)...(19): siRNA sense strand
cgcaaagggcucagcgacu

SEQ ID NO: 2407663 - RNA, 19 nt, Homo sapiens
  misc_RNA (1)...(19): siRNA sense strand
acuaauagggugaagcugu

SEQ ID NO: 2407664 - RNA, 19 nt, Homo sapiens
  misc_RNA (1)...(19): siRNA sense strand
cuggaagaguugaagcaca

SEQ ID NO: 2407665 - RNA, 19 nt, Homo sapiens
  misc_RNA (1)...(19): siRNA sense strand
ggaauuaccucaaccgauc

SEQ ID NO: 2407666 - RNA, 19 nt, Homo sapiens
  misc_RNA (1)...(19): siRNA sense strand
gugcauucccagaagcaga

SEQ ID NO: 2407667 - RNA, 19 nt, Homo sapiens
  misc_RNA (1)...(19): siRNA sense strand
cagaagcagaacagacaga

SEQ ID NO: 2407668 - RNA, 19 nt, Homo sapiens
  misc_RNA (1)...(19): siRNA sense strand
ccaagcaggagcugggcau

SEQ ID NO: 2407669 - RNA, 19 nt, Homo sapiens
  misc_RNA (1)...(19): siRNA sense strand
ucaaugaggaagagagccu

SEQ ID NO: 2407670 - RNA, 19 nt, Homo sapiens
  misc_RNA (1)...(19): siRNA sense strand
cccagaagcagaacagaca

SEQ ID NO: 2407671 - RNA, 19 nt, Homo sapiens
  misc_RNA (1)...(19): siRNA sense strand
gggaauuaccucaaccgau

SEQ ID NO: 2407672 - RNA, 19 nt, Homo sapiens
  misc_RNA (1)...(19): siRNA sense strand
caccuaacgaugaaggaca

SEQ ID NO: 2407673 - RNA, 19 nt, Homo sapiens
  misc_RNA (1)...(19): siRNA sense strand
agauagaguuugaggaggu

SEQ ID NO: 2407674 - RNA, 19 nt, Homo sapiens
  misc_RNA (1)...(19): siRNA sense strand
cgauaaagaagaagcagca

SEQ ID NO: 2407675 - RNA, 19 nt, Homo sapiens
  misc_RNA (1)...(19): siRNA sense strand
aguuugaggagguggauau

SEQ ID NO: 2407676 - RNA, 19 nt, Homo sapiens
  misc_RNA (1)...(19): siRNA sense strand
ucacaaugucagaagaaca

SEQ ID NO: 2407677 - RNA, 19 nt, Homo sapiens
  misc_RNA (1)...(19): siRNA sense strand
ucagaagaacagaggcaau

SEQ ID NO: 2407678 - RNA, 19 nt, Homo sapiens
  misc_RNA (1)...(19): siRNA sense strand
ugucagaagaacagaggca

SEQ ID NO: 2407679 - RNA, 19 nt, Homo sapiens
  misc_RNA (1)...(19): siRNA sense strand
cgggcuucguggcgauaaa

SEQ ID NO: 2407680 - RNA, 19 nt, Homo sapiens
  misc_RNA (1)...(19): siRNA sense strand
aggcaauggauguacaaaa

SEQ ID NO: 2407681 - RNA, 19 nt, Homo sapiens
  misc_RNA (1)...(19): siRNA sense strand
uuagauuucuggaagccaa

SEQ ID NO: 2407682 - RNA, 19 nt, Homo sapiens
  misc_RNA (1)...(19): siRNA sense strand
ggcuggugaugaagagaca

SEQ ID NO: 2407683 - RNA, 19 nt, Homo sapiens
  misc_RNA (1)...(19): siRNA sense strand
agagaaaggaggaggaucc

SEQ ID NO: 2407684 - RNA, 19 nt, Homo sapiens
  misc_RNA (1)...(19): siRNA sense strand
cugaagaugugcagcgcgu

SEQ ID NO: 2407685 - RNA, 19 nt, Homo sapiens
  misc_RNA (1)...(19): siRNA sense strand
ccaauaggaagcagcgguu

SEQ ID NO: 2407686 - RNA, 19 nt, Homo sapiens
  misc_RNA (1)...(19): siRNA sense strand
gaugcuaguccaugguaca

SEQ ID NO: 2407687 - RNA, 19 nt, Homo sapiens
  misc_RNA (1)...(19): siRNA sense strand
ugaugaagagacagagugu

SEQ ID NO: 2407688 - RNA, 19 nt, Homo sapiens
  misc_RNA (1)...(19): siRNA sense strand
gugcaauggaagaagaaaa

SEQ ID NO: 2407689 - RNA, 19 nt, Homo sapiens
  misc_RNA (1)...(19): siRNA sense strand
aguacaaaccuucaggaaa

SEQ ID NO: 2407690 - RNA, 19 nt, Homo sapiens
  misc_RNA (1)...(19): siRNA sense strand
ugaagaggcuagaggagga

SEQ ID NO: 2407691 - RNA, 19 nt, Homo sapiens
  misc_RNA (1)...(19): siRNA sense strand
cauuaagagaguugaacau

SEQ ID NO: 2407692 - RNA, 19 nt, Homo sapiens
  misc_RNA (1)...(19): siRNA sense strand
agaaaggauaucagugcaa

SEQ ID NO: 2407693 - RNA, 19 nt, Homo sapiens
  misc_RNA (1)...(19): siRNA sense strand
gcuuaaaauagcaaggcaa

SEQ ID NO: 2407694 - RNA, 19 nt, Homo sapiens
  misc_RNA (1)...(19): siRNA sense strand
gcucauuaagagaguugaa

SEQ ID NO: 2407695 - RNA, 19 nt, Homo sapiens
  misc_RNA (1)...(19): siRNA sense strand
aagccaaagcugaggaacu

SEQ ID NO: 2407696 - RNA, 19 nt, Homo sapiens
  misc_RNA (1)...(19): siRNA sense strand
ugagauugacccaaagcaa

SEQ ID NO: 2407697 - RNA, 19 nt, Homo sapiens
  misc_RNA (1)...(19): siRNA sense strand
aggaugaaacuguggcuga

SEQ ID NO: 2407698 - RNA, 19 nt, Homo sapiens
  misc_RNA (1)...(19): siRNA sense strand
uggaagaagaaaaggauca

SEQ ID NO: 2407699 - RNA, 19 nt, Homo sapiens
  misc_RNA (1)...(19): siRNA sense strand
gaacugaagaaaagagcau

SEQ ID NO: 2407700 - RNA, 19 nt, Homo sapiens
  misc_RNA (1)...(19): siRNA sense strand
ccaguugauugaaaagaaa

SEQ ID NO: 2407701 - RNA, 19 nt, Homo sapiens
  misc_RNA (1)...(19): siRNA sense strand
cagcagaugcaaagccuga

SEQ ID NO: 2407702 - RNA, 19 nt, Homo sapiens
  misc_RNA (1)...(19): siRNA sense strand
aggcaaacucucacuguau

SEQ ID NO: 2407703 - RNA, 19 nt, Homo sapiens
  misc_RNA (1)...(19): siRNA sense strand
ccuagagagagaagcauca

SEQ ID NO: 2407704 - RNA, 19 nt, Homo sapiens
  misc_RNA (1)...(19): siRNA sense strand
uggaaguaaaccuguaauu

SEQ ID NO: 2407705 - RNA, 19 nt, Homo sapiens
  misc_RNA (1)...(19): siRNA sense strand
auaucuugcacaacagaaa

SEQ ID NO: 2407706 - RNA, 19 nt, Homo sapiens
  misc_RNA (1)...(19): siRNA sense strand
aggaaaugccacagauaug

SEQ ID NO: 2407707 - RNA, 19 nt, Homo sapiens
  misc_RNA (1)...(19): siRNA sense strand
cccuuuaggaagaacuaua

SEQ ID NO: 2407708 - RNA, 19 nt, Homo sapiens
  misc_RNA (1)...(19): siRNA sense strand
cagccuagagagagaagca

SEQ ID NO: 2407709 - RNA, 19 nt, Homo sapiens
  misc_RNA (1)...(19): siRNA sense strand
ggaucagcucauuaagaga

SEQ ID NO: 2407710 - RNA, 19 nt, Homo sapiens
  misc_RNA (1)...(19): siRNA sense strand
ggaacaaaagaaucagcua

SEQ ID NO: 2407711 - RNA, 19 nt, Homo sapiens
  misc_RNA (1)...(19): siRNA sense strand
aaaaguaguuucagagcca

SEQ ID NO: 2407712 - RNA, 19 nt, Homo sapiens
  misc_RNA (1)...(19): siRNA sense strand
aggaacuucaggaggccaa

SEQ ID NO: 2407713 - RNA, 19 nt, Homo sapiens
  misc_RNA (1)...(19): siRNA sense strand
cugaaguuuuaaagggaga

SEQ ID NO: 2407714 - RNA, 19 nt, Homo sapiens
  misc_RNA (1)...(19): siRNA sense strand
ccaaacgaauguugagccu

SEQ ID NO: 2407715 - RNA, 19 nt, Homo sapiens
  misc_RNA (1)...(19): siRNA sense strand
aaguacaaaccuucaggaa

SEQ ID NO: 2407716 - RNA, 19 nt, Homo sapiens
  misc_RNA (1)...(19): siRNA sense strand
cacaacagaaacaggaaca

SEQ ID NO: 2407717 - RNA, 19 nt, Homo sapiens
  misc_RNA (1)...(19): siRNA sense strand
agaaaucagacccgugaau

SEQ ID NO: 2407718 - RNA, 19 nt, Homo sapiens
  misc_RNA (1)...(19): siRNA sense strand
ucagagaggagaugccaga

SEQ ID NO: 2407719 - RNA, 19 nt, Homo sapiens
  misc_RNA (1)...(19): siRNA sense strand
agaaacaggaacaaaagaa

SEQ ID NO: 2407720 - RNA, 19 nt, Homo sapiens
  misc_RNA (1)...(19): siRNA sense strand
gaaacaggaacaaaagaau

SEQ ID NO: 2407721 - RNA, 19 nt, Homo sapiens
  misc_RNA (1)...(19): siRNA sense strand
cuucaggaggccaaggaga

SEQ ID NO: 2407722 - RNA, 19 nt, Homo sapiens
  misc_RNA (1)...(19): siRNA sense strand
gugcaauggaagaagaaaa

SEQ ID NO: 2407723 - RNA, 19 nt, Homo sapiens
  misc_RNA (1)...(19): siRNA sense strand
aguacaaaccuucaggaaa

SEQ ID NO: 2407724 - RNA, 19 nt, Homo sapiens
  misc_RNA (1)...(19): siRNA sense strand
ugaagaggcuagaggagga

SEQ ID NO: 2407725 - RNA, 19 nt, Homo sapiens
  misc_RNA (1)...(19): siRNA sense strand
cauuaagagaguugaacau

SEQ ID NO: 2407726 - RNA, 19 nt, Homo sapiens
  misc_RNA (1)...(19): siRNA sense strand
agaaaggauaucagugcaa

SEQ ID NO: 2407727 - RNA, 19 nt, Homo sapiens
  misc_RNA (1)...(19): siRNA sense strand
gcuuaaaauagcaaggcaa

SEQ ID NO: 2407728 - RNA, 19 nt, Homo sapiens
  misc_RNA (1)...(19): siRNA sense strand
gcucauuaagagaguugaa

SEQ ID NO: 2407729 - RNA, 19 nt, Homo sapiens
  misc_RNA (1)...(19): siRNA sense strand
aagccaaagcugaggaacu

SEQ ID NO: 2407730 - RNA, 19 nt, Homo sapiens
  misc_RNA (1)...(19): siRNA sense strand
ugagauugacccaaagcaa

SEQ ID NO: 2407731 - RNA, 19 nt, Homo sapiens
  misc_RNA (1)...(19): siRNA sense strand
aggaugaaacuguggcuga

SEQ ID NO: 2407732 - RNA, 19 nt, Homo sapiens
  misc_RNA (1)...(19): siRNA sense strand
uggaagaagaaaaggauca

SEQ ID NO: 2407733 - RNA, 19 nt, Homo sapiens
  misc_RNA (1)...(19): siRNA sense strand
gaacugaagaaaagagcau

SEQ ID NO: 2407734 - RNA, 19 nt, Homo sapiens
  misc_RNA (1)...(19): siRNA sense strand
ccaguugauugaaaagaaa

SEQ ID NO: 2407735 - RNA, 19 nt, Homo sapiens
  misc_RNA (1)...(19): siRNA sense strand
cagcagaugcaaagccuga

SEQ ID NO: 2407736 - RNA, 19 nt, Homo sapiens
  misc_RNA (1)...(19): siRNA sense strand
aggcaaacucucacuguau

SEQ ID NO: 2407737 - RNA, 19 nt, Homo sapiens
  misc_RNA (1)...(19): siRNA sense strand
ccuagagagagaagcauca

SEQ ID NO: 2407738 - RNA, 19 nt, Homo sapiens
  misc_RNA (1)...(19): siRNA sense strand
uggaaguaaaccuguaauu

SEQ ID NO: 2407739 - RNA, 19 nt, Homo sapiens
  misc_RNA (1)...(19): siRNA sense strand
auaucuugcacaacagaaa

SEQ ID NO: 2407740 - RNA, 19 nt, Homo sapiens
  misc_RNA (1)...(19): siRNA sense strand
aggaaaugccacagauaug

SEQ ID NO: 2407741 - RNA, 19 nt, Homo sapiens
  misc_RNA (1)...(19): siRNA sense strand
cccuuuaggaagaacuaua

SEQ ID NO: 2407742 - RNA, 19 nt, Homo sapiens
  misc_RNA (1)...(19): siRNA sense strand
cagccuagagagagaagca

SEQ ID NO: 2407743 - RNA, 19 nt, Homo sapiens
  misc_RNA (1)...(19): siRNA sense strand
ggaucagcucauuaagaga

SEQ ID NO: 2407744 - RNA, 19 nt, Homo sapiens
  misc_RNA (1)...(19): siRNA sense strand
ggaacaaaagaaucagcua

SEQ ID NO: 2407745 - RNA, 19 nt, Homo sapiens
  misc_RNA (1)...(19): siRNA sense strand
aaaaguaguuucagagcca

SEQ ID NO: 2407746 - RNA, 19 nt, Homo sapiens
  misc_RNA (1)...(19): siRNA sense strand
aggaacuucaggaggccaa

SEQ ID NO: 2407747 - RNA, 19 nt, Homo sapiens
  misc_RNA (1)...(19): siRNA sense strand
cugaaguuuuaaagggaga

SEQ ID NO: 2407748 - RNA, 19 nt, Homo sapiens
  misc_RNA (1)...(19): siRNA sense strand
ccaaacgaauguugagccu

SEQ ID NO: 2407749 - RNA, 19 nt, Homo sapiens
  misc_RNA (1)...(19): siRNA sense strand
aaguacaaaccuucaggaa

SEQ ID NO: 2407750 - RNA, 19 nt, Homo sapiens
  misc_RNA (1)...(19): siRNA sense strand
cacaacagaaacaggaaca

SEQ ID NO: 2407751 - RNA, 19 nt, Homo sapiens
  misc_RNA (1)...(19): siRNA sense strand
agaaaucagacccgugaau

SEQ ID NO: 2407752 - RNA, 19 nt, Homo sapiens
  misc_RNA (1)...(19): siRNA sense strand
ucagagaggagaugccaga

SEQ ID NO: 2407753 - RNA, 19 nt, Homo sapiens
  misc_RNA (1)...(19): siRNA sense strand
agaaacaggaacaaaagaa

SEQ ID NO: 2407754 - RNA, 19 nt, Homo sapiens
  misc_RNA (1)...(19): siRNA sense strand
gaaacaggaacaaaagaau

SEQ ID NO: 2407755 - RNA, 19 nt, Homo sapiens
  misc_RNA (1)...(19): siRNA sense strand
cuucaggaggccaaggaga

SEQ ID NO: 2407756 - RNA, 19 nt, Homo sapiens
  misc_RNA (1)...(19): siRNA sense strand
ccaggagagaugagggaga

SEQ ID NO: 2407757 - RNA, 19 nt, Homo sapiens
  misc_RNA (1)...(19): siRNA sense strand
aggaagaagcagagaggac

SEQ ID NO: 2407758 - RNA, 19 nt, Homo sapiens
  misc_RNA (1)...(19): siRNA sense strand
gaggaagaccagcaggaca

SEQ ID NO: 2407759 - RNA, 19 nt, Homo sapiens
  misc_RNA (1)...(19): siRNA sense strand
ccgccugggguuagagaaa

SEQ ID NO: 2407760 - RNA, 19 nt, Homo sapiens
  misc_RNA (1)...(19): siRNA sense strand
gacgccugguggagggaaa

SEQ ID NO: 2407761 - RNA, 19 nt, Homo sapiens
  misc_RNA (1)...(19): siRNA sense strand
uggagcaguuggagcuaca

SEQ ID NO: 2407762 - RNA, 19 nt, Homo sapiens
  misc_RNA (1)...(19): siRNA sense strand
ggaaagaggaggagcgaca

SEQ ID NO: 2407763 - RNA, 19 nt, Homo sapiens
  misc_RNA (1)...(19): siRNA sense strand
ggaaggaggaggaggagga

SEQ ID NO: 2407764 - RNA, 19 nt, Homo sapiens
  misc_RNA (1)...(19): siRNA sense strand
auacagagcuacauggaca

SEQ ID NO: 2407765 - RNA, 19 nt, Homo sapiens
  misc_RNA (1)...(19): siRNA sense strand
agacaauucuggugccaca

SEQ ID NO: 2407766 - RNA, 19 nt, Homo sapiens
  misc_RNA (1)...(19): siRNA sense strand
ugggcuacgaugagagcaa

SEQ ID NO: 2407767 - RNA, 19 nt, Homo sapiens
  misc_RNA (1)...(19): siRNA sense strand
gagcuagagugcugccaga

SEQ ID NO: 2407768 - RNA, 19 nt, Homo sapiens
  misc_RNA (1)...(19): siRNA sense strand
ccacaguguucucaggcau

SEQ ID NO: 2407769 - RNA, 19 nt, Homo sapiens
  misc_RNA (1)...(19): siRNA sense strand
ugaagaugcaggaggagga

SEQ ID NO: 2407770 - RNA, 19 nt, Homo sapiens
  misc_RNA (1)...(19): siRNA sense strand
agagggagcagaagcggaa

SEQ ID NO: 2407771 - RNA, 19 nt, Homo sapiens
  misc_RNA (1)...(19): siRNA sense strand
acaugcagaccaagaacaa

SEQ ID NO: 2407772 - RNA, 19 nt, Homo sapiens
  misc_RNA (1)...(19): siRNA sense strand
gccaggugauggugcgcaa

SEQ ID NO: 2407773 - RNA, 19 nt, Homo sapiens
  misc_RNA (1)...(19): siRNA sense strand
acucggagcuacuggcuga

SEQ ID NO: 2407774 - RNA, 19 nt, Homo sapiens
  misc_RNA (1)...(19): siRNA sense strand
ggcaagagccugaagccga

SEQ ID NO: 2407775 - RNA, 19 nt, Homo sapiens
  misc_RNA (1)...(19): siRNA sense strand
gagugcaggacaaagacaa

SEQ ID NO: 2407776 - RNA, 19 nt, Homo sapiens
  misc_RNA (1)...(19): siRNA sense strand
agcuacuggcugagauuaa

SEQ ID NO: 2407777 - RNA, 19 nt, Homo sapiens
  misc_RNA (1)...(19): siRNA sense strand
gagcagaagcggaaagagg

SEQ ID NO: 2407778 - RNA, 19 nt, Homo sapiens
  misc_RNA (1)...(19): siRNA sense strand
acgugaugcccguggauaa

SEQ ID NO: 2407779 - RNA, 19 nt, Homo sapiens
  misc_RNA (1)...(19): siRNA sense strand
cugaaacggacgagaugaa

SEQ ID NO: 2407780 - RNA, 19 nt, Homo sapiens
  misc_RNA (1)...(19): siRNA sense strand
gggaggacaaggaggagau

SEQ ID NO: 2407781 - RNA, 19 nt, Homo sapiens
  misc_RNA (1)...(19): siRNA sense strand
gaaccaacaucuaugcaga

SEQ ID NO: 2407782 - RNA, 19 nt, Homo sapiens
  misc_RNA (1)...(19): siRNA sense strand
ggggagaaguuugggagaa

SEQ ID NO: 2407783 - RNA, 19 nt, Homo sapiens
  misc_RNA (1)...(19): siRNA sense strand
ccugguaugacgaggugaa

SEQ ID NO: 2407784 - RNA, 19 nt, Homo sapiens
  misc_RNA (1)...(19): siRNA sense strand
cggucuacuuugucugcaa

SEQ ID NO: 2407785 - RNA, 19 nt, Homo sapiens
  misc_RNA (1)...(19): siRNA sense strand
ucagcaaauaccagcacaa

SEQ ID NO: 2407786 - RNA, 19 nt, Homo sapiens
  misc_RNA (1)...(19): siRNA sense strand
gagaugaaugagguggaaa

SEQ ID NO: 2407787 - RNA, 19 nt, Homo sapiens
  misc_RNA (1)...(19): siRNA sense strand
ccagggaggacaaggagga

SEQ ID NO: 2407788 - RNA, 19 nt, Homo sapiens
  misc_RNA (1)...(19): siRNA sense strand
agaugaaugagguggaaac

SEQ ID NO: 2407789 - RNA, 19 nt, Homo sapiens
  misc_RNA (1)...(19): siRNA sense strand
acgcgggagucaucagcaa

SEQ ID NO: 2407790 - RNA, 19 nt, Homo sapiens
  misc_RNA (1)...(19): siRNA sense strand
acacagauaguuugggcca

SEQ ID NO: 2407791 - RNA, 19 nt, Homo sapiens
  misc_RNA (1)...(19): siRNA sense strand
cgugaugcccguggauaaa

SEQ ID NO: 2407792 - RNA, 19 nt, Homo sapiens
  misc_RNA (1)...(19): siRNA sense strand
acaccaagaugaaggacag

SEQ ID NO: 2407793 - RNA, 19 nt, Homo sapiens
  misc_RNA (1)...(19): siRNA sense strand
ggacauguacagugggauc

SEQ ID NO: 2407794 - RNA, 19 nt, Homo sapiens
  misc_RNA (1)...(19): siRNA sense strand
aagaugggaugcagcggaa

SEQ ID NO: 2407795 - RNA, 19 nt, Homo sapiens
  misc_RNA (1)...(19): siRNA sense strand
ggucuauuuuauugggauu

SEQ ID NO: 2407796 - RNA, 19 nt, Homo sapiens
  misc_RNA (1)...(19): siRNA sense strand
caucaauggagguguagca

SEQ ID NO: 2407797 - RNA, 19 nt, Homo sapiens
  misc_RNA (1)...(19): siRNA sense strand
ucaagaaaggccugggcga

SEQ ID NO: 2407798 - RNA, 19 nt, Homo sapiens
  misc_RNA (1)...(19): siRNA sense strand
gcucauggaagaugggaug

SEQ ID NO: 2407799 - RNA, 19 nt, Homo sapiens
  misc_RNA (1)...(19): siRNA sense strand
agaagaacauggaggacua

SEQ ID NO: 2407800 - RNA, 19 nt, Homo sapiens
  misc_RNA (1)...(19): siRNA sense strand
gaguggaguuugaggagga

SEQ ID NO: 2407801 - RNA, 19 nt, Homo sapiens
  misc_RNA (1)...(19): siRNA sense strand
agaucgaacaccagggcaa

SEQ ID NO: 2407802 - RNA, 19 nt, Homo sapiens
  misc_RNA (1)...(19): siRNA sense strand
gacacuggcuggagggaga

SEQ ID NO: 2407803 - RNA, 19 nt, Homo sapiens
  misc_RNA (1)...(19): siRNA sense strand
ggaacugacugcaagggau

SEQ ID NO: 2407804 - RNA, 19 nt, Homo sapiens
  misc_RNA (1)...(19): siRNA sense strand
cggacaaggagaucgaaca

SEQ ID NO: 2407805 - RNA, 19 nt, Homo sapiens
  misc_RNA (1)...(19): siRNA sense strand
acaaggagaucgaacacca

SEQ ID NO: 2407806 - RNA, 19 nt, Homo sapiens
  misc_RNA (1)...(19): siRNA sense strand
gcuuugucucgcagaagaa

SEQ ID NO: 2407807 - RNA, 19 nt, Homo sapiens
  misc_RNA (1)...(19): siRNA sense strand
acacagaguuucaaggcaa

SEQ ID NO: 2407808 - RNA, 19 nt, Homo sapiens
  misc_RNA (1)...(19): siRNA sense strand
ccacaguuggagagggcua

SEQ ID NO: 2407809 - RNA, 19 nt, Homo sapiens
  misc_RNA (1)...(19): siRNA sense strand
cugcuaucggugugggaaa

SEQ ID NO: 2407810 - RNA, 19 nt, Homo sapiens
  misc_RNA (1)...(19): siRNA sense strand
ucgacuacuauaagcgaua

SEQ ID NO: 2407811 - RNA, 19 nt, Homo sapiens
  misc_RNA (1)...(19): siRNA sense strand
gagcaaagcuucaaccaag

SEQ ID NO: 2407812 - RNA, 19 nt, Homo sapiens
  misc_RNA (1)...(19): siRNA sense strand
gggcuacgguuaugggcca

SEQ ID NO: 2407813 - RNA, 19 nt, Homo sapiens
  misc_RNA (1)...(19): siRNA sense strand
cggaauucucuguaugaca

SEQ ID NO: 2407814 - RNA, 19 nt, Homo sapiens
  misc_RNA (1)...(19): siRNA sense strand
gggcagaggaugcagugga

SEQ ID NO: 2407815 - RNA, 19 nt, Homo sapiens
  misc_RNA (1)...(19): siRNA sense strand
cgugaaagauuaugccuuc

SEQ ID NO: 2407816 - RNA, 19 nt, Homo sapiens
  misc_RNA (1)...(19): siRNA sense strand
cgguuaugggccagagagu

SEQ ID NO: 2407817 - RNA, 19 nt, Homo sapiens
  misc_RNA (1)...(19): siRNA sense strand
ucauuaagaauuacggcuu

SEQ ID NO: 2407818 - RNA, 19 nt, Homo sapiens
  misc_RNA (1)...(19): siRNA sense strand
ccuugacaacacagaguuu

SEQ ID NO: 2407819 - RNA, 19 nt, Homo sapiens
  misc_RNA (1)...(19): siRNA sense strand
caacgaugcauauggagca

SEQ ID NO: 2407820 - RNA, 19 nt, Homo sapiens
  misc_RNA (1)...(19): siRNA sense strand
caccuuacaccaugggcua

SEQ ID NO: 2407821 - RNA, 19 nt, Homo sapiens
  misc_RNA (1)...(19): siRNA sense strand
acacuagaaaagagagaaa

SEQ ID NO: 2407822 - RNA, 19 nt, Homo sapiens
  misc_RNA (1)...(19): siRNA sense strand
ugaagaaaacucagcuaaa

SEQ ID NO: 2407823 - RNA, 19 nt, Homo sapiens
  misc_RNA (1)...(19): siRNA sense strand
aaacuggggaugaagaaaa

SEQ ID NO: 2407824 - RNA, 19 nt, Homo sapiens
  misc_RNA (1)...(19): siRNA sense strand
acacuagaaaagagagaaa

SEQ ID NO: 2407825 - RNA, 19 nt, Homo sapiens
  misc_RNA (1)...(19): siRNA sense strand
ugaagaaaacucagcuaaa

SEQ ID NO: 2407826 - RNA, 19 nt, Homo sapiens
  misc_RNA (1)...(19): siRNA sense strand
aaacuggggaugaagaaaa

SEQ ID NO: 2407827 - RNA, 19 nt, Homo sapiens
  misc_RNA (1)...(19): siRNA sense strand
cuguauacccugaggaaau

SEQ ID NO: 2407828 - RNA, 19 nt, Homo sapiens
  misc_RNA (1)...(19): siRNA sense strand
ggacaaacccaaagccaga

SEQ ID NO: 2407829 - RNA, 19 nt, Homo sapiens
  misc_RNA (1)...(19): siRNA sense strand
gcacuaugaaggugaacaa

SEQ ID NO: 2407830 - RNA, 19 nt, Homo sapiens
  misc_RNA (1)...(19): siRNA sense strand
gaguauaaauguagaccca

SEQ ID NO: 2407831 - RNA, 19 nt, Homo sapiens
  misc_RNA (1)...(19): siRNA sense strand
auacaugggaugagagaga

SEQ ID NO: 2407832 - RNA, 19 nt, Homo sapiens
  misc_RNA (1)...(19): siRNA sense strand
ggaccaauguacaggacca

SEQ ID NO: 2407833 - RNA, 19 nt, Homo sapiens
  misc_RNA (1)...(19): siRNA sense strand
ccaaauuagcaaagcauca

SEQ ID NO: 2407834 - RNA, 19 nt, Homo sapiens
  misc_RNA (1)...(19): siRNA sense strand
caauauggcaugaagguga

SEQ ID NO: 2407835 - RNA, 19 nt, Homo sapiens
  misc_RNA (1)...(19): siRNA sense strand
cauccaaagucaaguccaa

SEQ ID NO: 2407836 - RNA, 19 nt, Homo sapiens
  misc_RNA (1)...(19): siRNA sense strand
ccagcaaaucucagaagaa

SEQ ID NO: 2407837 - RNA, 19 nt, Homo sapiens
  misc_RNA (1)...(19): siRNA sense strand
gugaggagaugaugcggua

SEQ ID NO: 2407838 - RNA, 19 nt, Homo sapiens
  misc_RNA (1)...(19): siRNA sense strand
cccaaauucugauggacaa

SEQ ID NO: 2407839 - RNA, 19 nt, Homo sapiens
  misc_RNA (1)...(19): siRNA sense strand
cagccaaauauucgugaaa

SEQ ID NO: 2407840 - RNA, 19 nt, Homo sapiens
  misc_RNA (1)...(19): siRNA sense strand
gccaaauauucgugaaaau

SEQ ID NO: 2407841 - RNA, 19 nt, Homo sapiens
  misc_RNA (1)...(19): siRNA sense strand
agaccaagucagccaaaua

SEQ ID NO: 2407842 - RNA, 19 nt, Homo sapiens
  misc_RNA (1)...(19): siRNA sense strand
ccaccagaccagaaaggua

SEQ ID NO: 2407843 - RNA, 19 nt, Homo sapiens
  misc_RNA (1)...(19): siRNA sense strand
augcaaauaacuaggauga

SEQ ID NO: 2407844 - RNA, 19 nt, Homo sapiens
  misc_RNA (1)...(19): siRNA sense strand
ggacuaaacacugggaaca

SEQ ID NO: 2407845 - RNA, 19 nt, Homo sapiens
  misc_RNA (1)...(19): siRNA sense strand
ucccaugguucuagaggaa

SEQ ID NO: 2407846 - RNA, 19 nt, Homo sapiens
  misc_RNA (1)...(19): siRNA sense strand
acuaugaaggugaacaaua

SEQ ID NO: 2407847 - RNA, 19 nt, Homo sapiens
  misc_RNA (1)...(19): siRNA sense strand
gcuuacuacuucaggccua

SEQ ID NO: 2407848 - RNA, 19 nt, Homo sapiens
  misc_RNA (1)...(19): siRNA sense strand
agcucagagaagagggaaa

SEQ ID NO: 2407849 - RNA, 19 nt, Homo sapiens
  misc_RNA (1)...(19): siRNA sense strand
gaauuaaagcacagcucau

SEQ ID NO: 2407850 - RNA, 19 nt, Homo sapiens
  misc_RNA (1)...(19): siRNA sense strand
agucauaccaagcagacaa

SEQ ID NO: 2407851 - RNA, 19 nt, Homo sapiens
  misc_RNA (1)...(19): siRNA sense strand
cuaccaggccaaagaaaca

SEQ ID NO: 2407852 - RNA, 19 nt, Homo sapiens
  misc_RNA (1)...(19): siRNA sense strand
ccacaggauacaagcccaa

SEQ ID NO: 2407853 - RNA, 19 nt, Homo sapiens
  misc_RNA (1)...(19): siRNA sense strand
ucaggaagacagugguauu

SEQ ID NO: 2407854 - RNA, 19 nt, Homo sapiens
  misc_RNA (1)...(19): siRNA sense strand
cagaaaucaacaaguucaa

SEQ ID NO: 2407855 - RNA, 19 nt, Homo sapiens
  misc_RNA (1)...(19): siRNA sense strand
ucaaaucagccaaaggaau

SEQ ID NO: 2407856 - RNA, 19 nt, Homo sapiens
  misc_RNA (1)...(19): siRNA sense strand
gcuccaauccagaaggcau

SEQ ID NO: 2407857 - RNA, 19 nt, Homo sapiens
  misc_RNA (1)...(19): siRNA sense strand
agcagaaaguccaggcaca

SEQ ID NO: 2407858 - RNA, 19 nt, Homo sapiens
  misc_RNA (1)...(19): siRNA sense strand
accaagcagacaagagaua

SEQ ID NO: 2407859 - RNA, 19 nt, Homo sapiens
  misc_RNA (1)...(19): siRNA sense strand
caagaaaaugagagugaga

SEQ ID NO: 2407860 - RNA, 19 nt, Homo sapiens
  misc_RNA (1)...(19): siRNA sense strand
gguucuagaggaaguguuu

SEQ ID NO: 2407861 - RNA, 19 nt, Homo sapiens
  misc_RNA (1)...(19): siRNA sense strand
acaccauguucuauaaaga

SEQ ID NO: 2407862 - RNA, 19 nt, Homo sapiens
  misc_RNA (1)...(19): siRNA sense strand
caaccaaauccuaaaggga

SEQ ID NO: 2407863 - RNA, 19 nt, Homo sapiens
  misc_RNA (1)...(19): siRNA sense strand
cgucauaacaagacugauc

SEQ ID NO: 2407864 - RNA, 19 nt, Homo sapiens
  misc_RNA (1)...(19): siRNA sense strand
caauacaugggaugagaga

SEQ ID NO: 2407865 - RNA, 19 nt, Homo sapiens
  misc_RNA (1)...(19): siRNA sense strand
aaacaguaccccaggacua

SEQ ID NO: 2407866 - RNA, 19 nt, Homo sapiens
  misc_RNA (1)...(19): siRNA sense strand
guuauaugccagucccaaa

SEQ ID NO: 2407867 - RNA, 19 nt, Homo sapiens
  misc_RNA (1)...(19): siRNA sense strand
ccaugguucuagaggaagu

SEQ ID NO: 2407868 - RNA, 19 nt, Homo sapiens
  misc_RNA (1)...(19): siRNA sense strand
gaacauucaucuuucccua

SEQ ID NO: 2407869 - RNA, 19 nt, Homo sapiens
  misc_RNA (1)...(19): siRNA sense strand
guauaaauguagacccacu

SEQ ID NO: 2407870 - RNA, 19 nt, Homo sapiens
  misc_RNA (1)...(19): siRNA sense strand
ggcaaauuccacagagguu

SEQ ID NO: 2407871 - RNA, 19 nt, Homo sapiens
  misc_RNA (1)...(19): siRNA sense strand
ccaagggcagagagaaaga

SEQ ID NO: 2407872 - RNA, 19 nt, Homo sapiens
  misc_RNA (1)...(19): siRNA sense strand
agagaaagaaggccguauu

SEQ ID NO: 2407873 - RNA, 19 nt, Homo sapiens
  misc_RNA (1)...(19): siRNA sense strand
ccaaaaggcaaaaugaaga

SEQ ID NO: 2407874 - RNA, 19 nt, Homo sapiens
  misc_RNA (1)...(19): siRNA sense strand
aaggugagaauuugaacua

SEQ ID NO: 2407875 - RNA, 19 nt, Homo sapiens
  misc_RNA (1)...(19): siRNA sense strand
cagagaagagggaaagcca

SEQ ID NO: 2407876 - RNA, 19 nt, Homo sapiens
  misc_RNA (1)...(19): siRNA sense strand
gcagcuuguuauugguaca

SEQ ID NO: 2407877 - RNA, 19 nt, Homo sapiens
  misc_RNA (1)...(19): siRNA sense strand
agugagaggcaacagcaaa

SEQ ID NO: 2407878 - RNA, 19 nt, Homo sapiens
  misc_RNA (1)...(19): siRNA sense strand
caagaaacccagaaaccca

SEQ ID NO: 2407879 - RNA, 19 nt, Homo sapiens
  misc_RNA (1)...(19): siRNA sense strand
ucaacaaccaccauggcaa

SEQ ID NO: 2407880 - RNA, 19 nt, Homo sapiens
  misc_RNA (1)...(19): siRNA sense strand
ucccaauuaugcaggaaau

SEQ ID NO: 2407881 - RNA, 19 nt, Homo sapiens
  misc_RNA (1)...(19): siRNA sense strand
gagugagaggcaacagcaa

SEQ ID NO: 2407882 - RNA, 19 nt, Homo sapiens
  misc_RNA (1)...(19): siRNA sense strand
gacuaaacacugggaacaa

SEQ ID NO: 2407883 - RNA, 19 nt, Homo sapiens
  misc_RNA (1)...(19): siRNA sense strand
cuucaaaggaggcccaaca

SEQ ID NO: 2407884 - RNA, 19 nt, Homo sapiens
  misc_RNA (1)...(19): siRNA sense strand
caacugggccaaaaggaaa

SEQ ID NO: 2407885 - RNA, 19 nt, Homo sapiens
  misc_RNA (1)...(19): siRNA sense strand
uaauaaugccgcuggacca

SEQ ID NO: 2407886 - RNA, 19 nt, Homo sapiens
  misc_RNA (1)...(19): siRNA sense strand
gggccaucuucuucgccaa

SEQ ID NO: 2407887 - RNA, 19 nt, Homo sapiens
  misc_RNA (1)...(19): siRNA sense strand
aagucaaguuuaagggaaa

SEQ ID NO: 2407888 - RNA, 19 nt, Homo sapiens
  misc_RNA (1)...(19): siRNA sense strand
ccaagaaaguuaagggagu

SEQ ID NO: 2407889 - RNA, 19 nt, Homo sapiens
  misc_RNA (1)...(19): siRNA sense strand
aagaaagaccagagagaga

SEQ ID NO: 2407890 - RNA, 19 nt, Homo sapiens
  misc_RNA (1)...(19): siRNA sense strand
ucauagaggugguaggaga

SEQ ID NO: 2407891 - RNA, 19 nt, Homo sapiens
  misc_RNA (1)...(19): siRNA sense strand
ccgaagaggauaaggagga

SEQ ID NO: 2407892 - RNA, 19 nt, Homo sapiens
  misc_RNA (1)...(19): siRNA sense strand
ccaugaaggaccagcagaa

SEQ ID NO: 2407893 - RNA, 19 nt, Homo sapiens
  misc_RNA (1)...(19): siRNA sense strand
agcagaaacgagagauuaa

SEQ ID NO: 2407894 - RNA, 19 nt, Homo sapiens
  misc_RNA (1)...(19): siRNA sense strand
uggaagugaacgacauaaa

SEQ ID NO: 2407895 - RNA, 19 nt, Homo sapiens
  misc_RNA (1)...(19): siRNA sense strand
gaggaaggauggugggaag

SEQ ID NO: 2407896 - RNA, 19 nt, Homo sapiens
  misc_RNA (1)...(19): siRNA sense strand
ggucaauugaaguagaaaa

SEQ ID NO: 2407897 - RNA, 19 nt, Homo sapiens
  misc_RNA (1)...(19): siRNA sense strand
ccagcagaaacgagagauu

SEQ ID NO: 2407898 - RNA, 19 nt, Homo sapiens
  misc_RNA (1)...(19): siRNA sense strand
aggacaaagagcaaggauu

SEQ ID NO: 2407899 - RNA, 19 nt, Homo sapiens
  misc_RNA (1)...(19): siRNA sense strand
caauaagagaggcgagcga

SEQ ID NO: 2407900 - RNA, 19 nt, Homo sapiens
  misc_RNA (1)...(19): siRNA sense strand
agugaacgacauaaagaaa

SEQ ID NO: 2407901 - RNA, 19 nt, Homo sapiens
  misc_RNA (1)...(19): siRNA sense strand
acauugacuuagaagguuu

SEQ ID NO: 2407902 - RNA, 19 nt, Homo sapiens
  misc_RNA (1)...(19): siRNA sense strand
aguuggaugaagagaagaa

SEQ ID NO: 2407903 - RNA, 19 nt, Homo sapiens
  misc_RNA (1)...(19): siRNA sense strand
ugacaaucaaagaaggaga

SEQ ID NO: 2407904 - RNA, 19 nt, Homo sapiens
  misc_RNA (1)...(19): siRNA sense strand
caaacagaacagaagaaaa

SEQ ID NO: 2407905 - RNA, 19 nt, Homo sapiens
  misc_RNA (1)...(19): siRNA sense strand
caagucaaguuuaagggaa

SEQ ID NO: 2407906 - RNA, 19 nt, Homo sapiens
  misc_RNA (1)...(19): siRNA sense strand
aaaagaaagaccagagaga

SEQ ID NO: 2407907 - RNA, 19 nt, Homo sapiens
  misc_RNA (1)...(19): siRNA sense strand
ggugggagggacagaucaa

SEQ ID NO: 2407908 - RNA, 19 nt, Homo sapiens
  misc_RNA (1)...(19): siRNA sense strand
agaggugguaggagaggua

SEQ ID NO: 2407909 - RNA, 19 nt, Homo sapiens
  misc_RNA (1)...(19): siRNA sense strand
agaaauggacagcaggaca

SEQ ID NO: 2407910 - RNA, 19 nt, Homo sapiens
  misc_RNA (1)...(19): siRNA sense strand
gaggaguggacgcgucaaa

SEQ ID NO: 2407911 - RNA, 19 nt, Homo sapiens
  misc_RNA (1)...(19): siRNA sense strand
aaguuaagggagugggcuu

SEQ ID NO: 2407912 - RNA, 19 nt, Homo sapiens
  misc_RNA (1)...(19): siRNA sense strand
agaaaagacuauugggaag

SEQ ID NO: 2407913 - RNA, 19 nt, Homo sapiens
  misc_RNA (1)...(19): siRNA sense strand
aggauaaggaggaacacau

SEQ ID NO: 2407914 - RNA, 19 nt, Homo sapiens
  misc_RNA (1)...(19): siRNA sense strand
agauggaagugaacgacau

SEQ ID NO: 2407915 - RNA, 19 nt, Homo sapiens
  misc_RNA (1)...(19): siRNA sense strand
ccaacaaagcuccagaaaa

SEQ ID NO: 2407916 - RNA, 19 nt, Homo sapiens
  misc_RNA (1)...(19): siRNA sense strand
caggcaccacugagagaaa

SEQ ID NO: 2407917 - RNA, 19 nt, Homo sapiens
  misc_RNA (1)...(19): siRNA sense strand
aggccauaguggaguuuga

SEQ ID NO: 2407918 - RNA, 19 nt, Homo sapiens
  misc_RNA (1)...(19): siRNA sense strand
cugaguuggaugaagagaa

SEQ ID NO: 2407919 - RNA, 19 nt, Homo sapiens
  misc_RNA (1)...(19): siRNA sense strand
acagcaggacaaagagcaa

SEQ ID NO: 2407920 - RNA, 19 nt, Homo sapiens
  misc_RNA (1)...(19): siRNA sense strand
aagaggauaaggaggaaca

SEQ ID NO: 2407921 - RNA, 19 nt, Homo sapiens
  misc_RNA (1)...(19): siRNA sense strand
ggagcaucaucgagaccau

SEQ ID NO: 2407922 - RNA, 19 nt, Homo sapiens
  misc_RNA (1)...(19): siRNA sense strand
ggugggaaggagagcugaa

SEQ ID NO: 2407923 - RNA, 19 nt, Homo sapiens
  misc_RNA (1)...(19): siRNA sense strand
uggaugaagagaagaaaau

SEQ ID NO: 2407924 - RNA, 19 nt, Homo sapiens
  misc_RNA (1)...(19): siRNA sense strand
cagaaaagccccugcacga

SEQ ID NO: 2407925 - RNA, 19 nt, Homo sapiens
  misc_RNA (1)...(19): siRNA sense strand
aaacagaaauggacagcag

SEQ ID NO: 2407926 - RNA, 19 nt, Homo sapiens
  misc_RNA (1)...(19): siRNA sense strand
aggcacagaaugaugauga

SEQ ID NO: 2407927 - RNA, 19 nt, Homo sapiens
  misc_RNA (1)...(19): siRNA sense strand
cgacguaggcuggugggaa

SEQ ID NO: 2407928 - RNA, 19 nt, Homo sapiens
  misc_RNA (1)...(19): siRNA sense strand
agagcaaggauuacugcaa

SEQ ID NO: 2407929 - RNA, 19 nt, Homo sapiens
  misc_RNA (1)...(19): siRNA sense strand
aagaaagagaugaagaaag

SEQ ID NO: 2407930 - RNA, 19 nt, Homo sapiens
  misc_RNA (1)...(19): siRNA sense strand
uagaaaagacuauugggaa

SEQ ID NO: 2407931 - RNA, 19 nt, Homo sapiens
  misc_RNA (1)...(19): siRNA sense strand
cgaagugcccaguggaaac

SEQ ID NO: 2407932 - RNA, 19 nt, Homo sapiens
  misc_RNA (1)...(19): siRNA sense strand
ucaaagaaggagauauagu

SEQ ID NO: 2407933 - RNA, 19 nt, Homo sapiens
  misc_RNA (1)...(19): siRNA sense strand
gggaauagacccaagaagc

SEQ ID NO: 2407934 - RNA, 19 nt, Homo sapiens
  misc_RNA (1)...(19): siRNA sense strand
ggacaaagaucucucggac

SEQ ID NO: 2407935 - RNA, 19 nt, Homo sapiens
  misc_RNA (1)...(19): siRNA sense strand
cugcagcaauccagcccaa

SEQ ID NO: 2407936 - RNA, 19 nt, Homo sapiens
  misc_RNA (1)...(19): siRNA sense strand
ugacauugacuuagaaggu

SEQ ID NO: 2407937 - RNA, 19 nt, Homo sapiens
  misc_RNA (1)...(19): siRNA sense strand
aagugaacgacauaaagaa

SEQ ID NO: 2407938 - RNA, 19 nt, Homo sapiens
  misc_RNA (1)...(19): siRNA sense strand
augcagagccagagcguga

SEQ ID NO: 2407939 - RNA, 19 nt, Homo sapiens
  misc_RNA (1)...(19): siRNA sense strand
cacaagagccugucgguga

SEQ ID NO: 2407940 - RNA, 19 nt, Homo sapiens
  misc_RNA (1)...(19): siRNA sense strand
cggagauggcggugaccuu

SEQ ID NO: 2407941 - RNA, 19 nt, Homo sapiens
  misc_RNA (1)...(19): siRNA sense strand
ucgguuaagcugaugaaga

SEQ ID NO: 2407942 - RNA, 19 nt, Homo sapiens
  misc_RNA (1)...(19): siRNA sense strand
gagagagaaugaugggaga

SEQ ID NO: 2407943 - RNA, 19 nt, Homo sapiens
  misc_RNA (1)...(19): siRNA sense strand
agaagauggcacagaagua

SEQ ID NO: 2407944 - RNA, 19 nt, Homo sapiens
  misc_RNA (1)...(19): siRNA sense strand
ugggaggagaugaaggaaa

SEQ ID NO: 2407945 - RNA, 19 nt, Homo sapiens
  misc_RNA (1)...(19): siRNA sense strand
gugacgaggaggugaucaa

SEQ ID NO: 2407946 - RNA, 19 nt, Homo sapiens
  misc_RNA (1)...(19): siRNA sense strand
agaugaagaacaagacaau

SEQ ID NO: 2407947 - RNA, 19 nt, Homo sapiens
  misc_RNA (1)...(19): siRNA sense strand
cggaagaugacccgagaga

SEQ ID NO: 2407948 - RNA, 19 nt, Homo sapiens
  misc_RNA (1)...(19): siRNA sense strand
augaagaacaagacaauga

SEQ ID NO: 2407949 - RNA, 19 nt, Homo sapiens
  misc_RNA (1)...(19): siRNA sense strand
gggaaaugaaagugacucu

SEQ ID NO: 2407950 - RNA, 19 nt, Homo sapiens
  misc_RNA (1)...(19): siRNA sense strand
gcaguggagaggaggaaca

SEQ ID NO: 2407951 - RNA, 19 nt, Homo sapiens
  misc_RNA (1)...(19): siRNA sense strand
ggcgauuaucuguggaaau

SEQ ID NO: 2407952 - RNA, 19 nt, Homo sapiens
  misc_RNA (1)...(19): siRNA sense strand
acuaugaagcguaaagaga

SEQ ID NO: 2407953 - RNA, 19 nt, Homo sapiens
  misc_RNA (1)...(19): siRNA sense strand
guggagaggaggaacaaga

SEQ ID NO: 2407954 - RNA, 19 nt, Homo sapiens
  misc_RNA (1)...(19): siRNA sense strand
agaucaggacuuagauaau

SEQ ID NO: 2407955 - RNA, 19 nt, Homo sapiens
  misc_RNA (1)...(19): siRNA sense strand
ggagucaagaggaugcaaa

SEQ ID NO: 2407956 - RNA, 19 nt, Homo sapiens
  misc_RNA (1)...(19): siRNA sense strand
cucaaaguguggugaccua

SEQ ID NO: 2407957 - RNA, 19 nt, Homo sapiens
  misc_RNA (1)...(19): siRNA sense strand
cucuaaauugagugacaaa

SEQ ID NO: 2407958 - RNA, 19 nt, Homo sapiens
  misc_RNA (1)...(19): siRNA sense strand
gagucaagaggaugcaaau

SEQ ID NO: 2407959 - RNA, 19 nt, Homo sapiens
  misc_RNA (1)...(19): siRNA sense strand
aagaugaagaacaagacaa

SEQ ID NO: 2407960 - RNA, 19 nt, Homo sapiens
  misc_RNA (1)...(19): siRNA sense strand
ugauuggagucaagaggau

SEQ ID NO: 2407961 - RNA, 19 nt, Homo sapiens
  misc_RNA (1)...(19): siRNA sense strand
gaaugaugggagagaaacu

SEQ ID NO: 2407962 - RNA, 19 nt, Homo sapiens
  misc_RNA (1)...(19): siRNA sense strand
gcccaaaauucaagcccaa

SEQ ID NO: 2407963 - RNA, 19 nt, Homo sapiens
  misc_RNA (1)...(19): siRNA sense strand
cagugaugaccgcaaguua

SEQ ID NO: 2407964 - RNA, 19 nt, Homo sapiens
  misc_RNA (1)...(19): siRNA sense strand
gugacaaacuagaucagga

SEQ ID NO: 2407965 - RNA, 19 nt, Homo sapiens
  misc_RNA (1)...(19): siRNA sense strand
ugaaagaggggaugccaaa

SEQ ID NO: 2407966 - RNA, 19 nt, Homo sapiens
  misc_RNA (1)...(19): siRNA sense strand
gagagaaugaugggagaga

SEQ ID NO: 2407967 - RNA, 19 nt, Homo sapiens
  misc_RNA (1)...(19): siRNA sense strand
gguaagaaacacaggggca

SEQ ID NO: 2407968 - RNA, 19 nt, Homo sapiens
  misc_RNA (1)...(19): siRNA sense strand
gguuaacauaagcaaacaa

SEQ ID NO: 2407969 - RNA, 19 nt, Homo sapiens
  misc_RNA (1)...(19): siRNA sense strand
gaacagcaguggagaggag

SEQ ID NO: 2407970 - RNA, 19 nt, Homo sapiens
  misc_RNA (1)...(19): siRNA sense strand
ccucaauucugugggucaa

SEQ ID NO: 2407971 - RNA, 19 nt, Homo sapiens
  misc_RNA (1)...(19): siRNA sense strand
acuuugaagaugaagaaca

SEQ ID NO: 2407972 - RNA, 19 nt, Homo sapiens
  misc_RNA (1)...(19): siRNA sense strand
ccaagaaguaauauaagca

SEQ ID NO: 2407973 - RNA, 19 nt, Homo sapiens
  misc_RNA (1)...(19): siRNA sense strand
uauaagcaguggagggucu

SEQ ID NO: 2407974 - RNA, 19 nt, Homo sapiens
  misc_RNA (1)...(19): siRNA sense strand
ggacgaacauacagagagg

SEQ ID NO: 2407975 - RNA, 19 nt, Homo sapiens
  misc_RNA (1)...(19): siRNA sense strand
gcugguuaacauaagcaaa

SEQ ID NO: 2407976 - RNA, 19 nt, Homo sapiens
  misc_RNA (1)...(19): siRNA sense strand
aggagaugaaggaaaccaa

SEQ ID NO: 2407977 - RNA, 19 nt, Homo sapiens
  misc_RNA (1)...(19): siRNA sense strand
agagaaugaugggagagaa

SEQ ID NO: 2407978 - RNA, 19 nt, Homo sapiens
  misc_RNA (1)...(19): siRNA sense strand
gggcgauuaucuguggaaa

SEQ ID NO: 2407979 - RNA, 19 nt, Homo sapiens
  misc_RNA (1)...(19): siRNA sense strand
agaugacccgagagagaau

SEQ ID NO: 2407980 - RNA, 19 nt, Homo sapiens
  misc_RNA (1)...(19): siRNA sense strand
gggccagugaugaccgcaa

SEQ ID NO: 2407981 - RNA, 19 nt, Homo sapiens
  misc_RNA (1)...(19): siRNA sense strand
cagcaguggagaggaggaa

SEQ ID NO: 2407982 - RNA, 19 nt, Homo sapiens
  misc_RNA (1)...(19): siRNA sense strand
acaaacuagaucaggacuu

SEQ ID NO: 2407983 - RNA, 19 nt, Homo sapiens
  misc_RNA (1)...(19): siRNA sense strand
uugaagaugaagaacaaga

SEQ ID NO: 2407984 - RNA, 19 nt, Homo sapiens
  misc_RNA (1)...(19): siRNA sense strand
aggaagagcaucaccuuga

SEQ ID NO: 2407985 - RNA, 19 nt, Homo sapiens
  misc_RNA (1)...(19): siRNA sense strand
aggaggugaucaaacaauu

SEQ ID NO: 2407986 - RNA, 19 nt, Homo sapiens
  misc_RNA (1)...(19): siRNA sense strand
gcgaagauuuggauggagc

SEQ ID NO: 2407987 - RNA, 19 nt, Homo sapiens
  misc_RNA (1)...(19): siRNA sense strand
caccugauacauauggaaa

SEQ ID NO: 2407988 - RNA, 19 nt, Homo sapiens
  misc_RNA (1)...(19): siRNA sense strand
guaaagagaugauuggcug

SEQ ID NO: 2407989 - RNA, 19 nt, Homo sapiens
  misc_RNA (1)...(19): siRNA sense strand
cuaugaagcguaaagagau

SEQ ID NO: 2407990 - RNA, 19 nt, Homo sapiens
  misc_RNA (1)...(19): siRNA sense strand
uggcacacuuugcuggaau

SEQ ID NO: 2407991 - RNA, 19 nt, Homo sapiens
  misc_RNA (1)...(19): siRNA sense strand
cggaauuacccaaagcaaa

SEQ ID NO: 2407992 - RNA, 19 nt, Homo sapiens
  misc_RNA (1)...(19): siRNA sense strand
ugacauugacagagggaca

SEQ ID NO: 2407993 - RNA, 19 nt, Homo sapiens
  misc_RNA (1)...(19): siRNA sense strand
aaucauaguuguugcccaa

SEQ ID NO: 2407994 - RNA, 19 nt, Homo sapiens
  misc_RNA (1)...(19): siRNA sense strand
agcuagaagaugauggaaa

SEQ ID NO: 2407995 - RNA, 19 nt, Homo sapiens
  misc_RNA (1)...(19): siRNA sense strand
auaaaagacuacagagaca

SEQ ID NO: 2407996 - RNA, 19 nt, Homo sapiens
  misc_RNA (1)...(19): siRNA sense strand
acucagaaggaacaggaaa

SEQ ID NO: 2407997 - RNA, 19 nt, Homo sapiens
  misc_RNA (1)...(19): siRNA sense strand
cugcauagacauaacaaaa

SEQ ID NO: 2407998 - RNA, 19 nt, Homo sapiens
  misc_RNA (1)...(19): siRNA sense strand
uaacaugggauuauggcua

SEQ ID NO: 2407999 - RNA, 19 nt, Homo sapiens
  misc_RNA (1)...(19): siRNA sense strand
gaaagaagugaaugcccaa

SEQ ID NO: 2408000 - RNA, 19 nt, Homo sapiens
  misc_RNA (1)...(19): siRNA sense strand
agaaagaagugaaugccca

SEQ ID NO: 2408001 - RNA, 19 nt, Homo sapiens
  misc_RNA (1)...(19): siRNA sense strand
ccacauuggauaaucagaa

SEQ ID NO: 2408002 - RNA, 19 nt, Homo sapiens
  misc_RNA (1)...(19): siRNA sense strand
cauuaggauuggaaacaca

SEQ ID NO: 2408003 - RNA, 19 nt, Homo sapiens
  misc_RNA (1)...(19): siRNA sense strand
aagcaaugauucuagugaa

SEQ ID NO: 2408004 - RNA, 19 nt, Homo sapiens
  misc_RNA (1)...(19): siRNA sense strand
gucaaagacagcagguauu

SEQ ID NO: 2408005 - RNA, 19 nt, Homo sapiens
  misc_RNA (1)...(19): siRNA sense strand
cacugaacuugaagggaga

SEQ ID NO: 2408006 - RNA, 19 nt, Homo sapiens
  misc_RNA (1)...(19): siRNA sense strand
gaacagagcuaacauggga

SEQ ID NO: 2408007 - RNA, 19 nt, Homo sapiens
  misc_RNA (1)...(19): siRNA sense strand
agaaggaacaggaaaacaa

SEQ ID NO: 2408008 - RNA, 19 nt, Homo sapiens
  misc_RNA (1)...(19): siRNA sense strand
uugcauuuauucaggaaga

SEQ ID NO: 2408009 - RNA, 19 nt, Homo sapiens
  misc_RNA (1)...(19): siRNA sense strand
aaacgggagagaugagaau

SEQ ID NO: 2408010 - RNA, 19 nt, Homo sapiens
  misc_RNA (1)...(19): siRNA sense strand
uauuagcaauggaguggaa

SEQ ID NO: 2408011 - RNA, 19 nt, Homo sapiens
  misc_RNA (1)...(19): siRNA sense strand
gcauauaaucuaaccaacu

SEQ ID NO: 2408012 - RNA, 19 nt, Homo sapiens
  misc_RNA (1)...(19): siRNA sense strand
gggagagaugagaauacua

SEQ ID NO: 2408013 - RNA, 19 nt, Homo sapiens
  misc_RNA (1)...(19): siRNA sense strand
ugcuugagacagaguguaa

SEQ ID NO: 2408014 - RNA, 19 nt, Homo sapiens
  misc_RNA (1)...(19): siRNA sense strand
acagauuccuacuggcauu

SEQ ID NO: 2408015 - RNA, 19 nt, Homo sapiens
  misc_RNA (1)...(19): siRNA sense strand
ccaauaaagaauacaucca

SEQ ID NO: 2408016 - RNA, 19 nt, Homo sapiens
  misc_RNA (1)...(19): siRNA sense strand
cucagaaggaacaggaaaa

SEQ ID NO: 2408017 - RNA, 19 nt, Homo sapiens
  misc_RNA (1)...(19): siRNA sense strand
aguuguagacuuuagagaa

SEQ ID NO: 2408018 - RNA, 19 nt, Homo sapiens
  misc_RNA (1)...(19): siRNA sense strand
gcuaagugaaaccaagaau

SEQ ID NO: 2408019 - RNA, 19 nt, Homo sapiens
  misc_RNA (1)...(19): siRNA sense strand
guggaaggagucuacgaaa

SEQ ID NO: 2408020 - RNA, 19 nt, Homo sapiens
  misc_RNA (1)...(19): siRNA sense strand
ccaaagacgacaugcaaag

SEQ ID NO: 2408021 - RNA, 19 nt, Homo sapiens
  misc_RNA (1)...(19): siRNA sense strand
uauaaaaccccuuguggaa

SEQ ID NO: 2408022 - RNA, 19 nt, Homo sapiens
  misc_RNA (1)...(19): siRNA sense strand
uacgaaacguggaggaagu

SEQ ID NO: 2408023 - RNA, 19 nt, Homo sapiens
  misc_RNA (1)...(19): siRNA sense strand
cgaucuacagcaugucaaa

SEQ ID NO: 2408024 - RNA, 19 nt, Homo sapiens
  misc_RNA (1)...(19): siRNA sense strand
gcagguauuuugugaugaa

SEQ ID NO: 2408025 - RNA, 19 nt, Homo sapiens
  misc_RNA (1)...(19): siRNA sense strand
aggaagauuacuaagcaga

SEQ ID NO: 2408026 - RNA, 19 nt, Homo sapiens
  misc_RNA (1)...(19): siRNA sense strand
uggaaggagucuacgaaac

SEQ ID NO: 2408027 - RNA, 19 nt, Homo sapiens
  misc_RNA (1)...(19): siRNA sense strand
aggcgaccacauuggauaa

SEQ ID NO: 2408028 - RNA, 19 nt, Homo sapiens
  misc_RNA (1)...(19): siRNA sense strand
uagaaacacacaacaggaa

SEQ ID NO: 2408029 - RNA, 19 nt, Homo sapiens
  misc_RNA (1)...(19): siRNA sense strand
ccacugaacuugaagggag

SEQ ID NO: 2408030 - RNA, 19 nt, Homo sapiens
  misc_RNA (1)...(19): siRNA sense strand
guuaccugcuugagacaga

SEQ ID NO: 2408031 - RNA, 19 nt, Homo sapiens
  misc_RNA (1)...(19): siRNA sense strand
caccaacagguaugugaaa

SEQ ID NO: 2408032 - RNA, 19 nt, Homo sapiens
  misc_RNA (1)...(19): siRNA sense strand
ugaaaaugccacugaacuu

SEQ ID NO: 2408033 - RNA, 19 nt, Homo sapiens
  misc_RNA (1)...(19): siRNA sense strand
gaugaaaacgggagagaug

SEQ ID NO: 2408034 - RNA, 19 nt, Homo sapiens
  misc_RNA (1)...(19): siRNA sense strand
agugaaugaagcaacuaua

SEQ ID NO: 2408035 - RNA, 19 nt, Homo sapiens
  misc_RNA (1)...(19): siRNA sense strand
caauaaagggagcaucaca

SEQ ID NO: 2408036 - RNA, 19 nt, Homo sapiens
  misc_RNA (1)...(19): siRNA sense strand
gacgacaugcaaagacaaa

SEQ ID NO: 2408037 - RNA, 19 nt, Homo sapiens
  misc_RNA (1)...(19): siRNA sense strand
cgacaugcaaagacaaacu

SEQ ID NO: 2408038 - RNA, 19 nt, Homo sapiens
  misc_RNA (1)...(19): siRNA sense strand
gcugcauagacauaacaaa

SEQ ID NO: 2408039 - RNA, 19 nt, Homo sapiens
  misc_RNA (1)...(19): siRNA sense strand
acaaaauaaccacuggaua

SEQ ID NO: 2408040 - RNA, 19 nt, Homo sapiens
  misc_RNA (1)...(19): siRNA sense strand
aagacgacaugcaaagaca

SEQ ID NO: 2408041 - RNA, 19 nt, Homo sapiens
  misc_RNA (1)...(19): siRNA sense strand
ccacaguuuaaguacagaa

SEQ ID NO: 2408042 - RNA, 19 nt, Homo sapiens
  misc_RNA (1)...(19): siRNA sense strand
gcuuacuauggaaacgaaa

SEQ ID NO: 2408043 - RNA, 19 nt, Homo sapiens
  misc_RNA (1)...(19): siRNA sense strand
aaagaauacauccaagcaa

SEQ ID NO: 2408044 - RNA, 19 nt, Homo sapiens
  misc_RNA (1)...(19): siRNA sense strand
caaaguucaauaaagggaa

SEQ ID NO: 2408045 - RNA, 19 nt, Homo sapiens
  misc_RNA (1)...(19): siRNA sense strand
uagaaagcucccacaguuu

SEQ ID NO: 2408046 - RNA, 19 nt, Homo sapiens
  misc_RNA (1)...(19): siRNA sense strand
ucaacugacagcaaggaau

SEQ ID NO: 2408047 - RNA, 19 nt, Homo sapiens
  misc_RNA (1)...(19): siRNA sense strand
auuuaugaaugcagccuuu

SEQ ID NO: 2408048 - RNA, 19 nt, Homo sapiens
  misc_RNA (1)...(19): siRNA sense strand
gcagugaccaccuggccaa

SEQ ID NO: 2408049 - RNA, 19 nt, Homo sapiens
  misc_RNA (1)...(19): siRNA sense strand
ccguggcgugcguggauua

SEQ ID NO: 2408050 - RNA, 19 nt, Homo sapiens
  misc_RNA (1)...(19): siRNA sense strand
ccgacgugcucauggccau

SEQ ID NO: 2408051 - RNA, 19 nt, Homo sapiens
  misc_RNA (1)...(19): siRNA sense strand
acuaaaaggaguucaggaa

SEQ ID NO: 2408052 - RNA, 19 nt, Homo sapiens
  misc_RNA (1)...(19): siRNA sense strand
ggaugaaguaaaagaaagu

SEQ ID NO: 2408053 - RNA, 19 nt, Homo sapiens
  misc_RNA (1)...(19): siRNA sense strand
cuaaaaggaguucaggaaa

SEQ ID NO: 2408054 - RNA, 19 nt, Homo sapiens
  misc_RNA (1)...(19): siRNA sense strand
caggaaaauucguccaaca

SEQ ID NO: 2408055 - RNA, 19 nt, Homo sapiens
  misc_RNA (1)...(19): siRNA sense strand
ccuggagaacucugaagaa

SEQ ID NO: 2408056 - RNA, 19 nt, Homo sapiens
  misc_RNA (1)...(19): siRNA sense strand
auauaaaggaaccugaaga

SEQ ID NO: 2408057 - RNA, 19 nt, Homo sapiens
  misc_RNA (1)...(19): siRNA sense strand
agauauaaaggaaccugaa

SEQ ID NO: 2408058 - RNA, 19 nt, Homo sapiens
  misc_RNA (1)...(19): siRNA sense strand
agaauuugcaacaagguca

SEQ ID NO: 2408059 - RNA, 19 nt, Homo sapiens
  misc_RNA (1)...(19): siRNA sense strand
gggaaagauaagaaagcua

SEQ ID NO: 2408060 - RNA, 19 nt, Homo sapiens
  misc_RNA (1)...(19): siRNA sense strand
cauugaaauucguaggcaa

SEQ ID NO: 2408061 - RNA, 19 nt, Homo sapiens
  misc_RNA (1)...(19): siRNA sense strand
ggaucagccaggugaggua

SEQ ID NO: 2408062 - RNA, 19 nt, Homo sapiens
  misc_RNA (1)...(19): siRNA sense strand
augaugaagccgagaaaca

SEQ ID NO: 2408063 - RNA, 19 nt, Homo sapiens
  misc_RNA (1)...(19): siRNA sense strand
caucaaauguaaacgacga

SEQ ID NO: 2408064 - RNA, 19 nt, Homo sapiens
  misc_RNA (1)...(19): siRNA sense strand
ggaaaauaacagaugaaca

SEQ ID NO: 2408065 - RNA, 19 nt, Homo sapiens
  misc_RNA (1)...(19): siRNA sense strand
agaugaugaagccgagaaa

SEQ ID NO: 2408066 - RNA, 19 nt, Homo sapiens
  misc_RNA (1)...(19): siRNA sense strand
gagcaaaggcacaacacca

SEQ ID NO: 2408067 - RNA, 19 nt, Homo sapiens
  misc_RNA (1)...(19): siRNA sense strand
cguaauaaggaaaccaaca

SEQ ID NO: 2408068 - RNA, 19 nt, Homo sapiens
  misc_RNA (1)...(19): siRNA sense strand
gugcauugacacuggauga

SEQ ID NO: 2408069 - RNA, 19 nt, Homo sapiens
  misc_RNA (1)...(19): siRNA sense strand
aagauaaauucaucgguga

SEQ ID NO: 2408070 - RNA, 19 nt, Homo sapiens
  misc_RNA (1)...(19): siRNA sense strand
agaugaacaaagacaguau

SEQ ID NO: 2408071 - RNA, 19 nt, Homo sapiens
  misc_RNA (1)...(19): siRNA sense strand
cugaaagcuuaaugcccaa

SEQ ID NO: 2408072 - RNA, 19 nt, Homo sapiens
  misc_RNA (1)...(19): siRNA sense strand
uaagaaagcuauucaggca

SEQ ID NO: 2408073 - RNA, 19 nt, Homo sapiens
  misc_RNA (1)...(19): siRNA sense strand
aaauguaaacgacgaacaa

SEQ ID NO: 2408074 - RNA, 19 nt, Homo sapiens
  misc_RNA (1)...(19): siRNA sense strand
gccaaaacagauaguaaaa

SEQ ID NO: 2408075 - RNA, 19 nt, Homo sapiens
  misc_RNA (1)...(19): siRNA sense strand
acucucagacuuugauaaa

SEQ ID NO: 2408076 - RNA, 19 nt, Homo sapiens
  misc_RNA (1)...(19): siRNA sense strand
cggauuuauuccaggaucu

SEQ ID NO: 2408077 - RNA, 19 nt, Homo sapiens
  misc_RNA (1)...(19): siRNA sense strand
ccugaaagcuuaaugccca

SEQ ID NO: 2408078 - RNA, 19 nt, Homo sapiens
  misc_RNA (1)...(19): siRNA sense strand
cguaugacuccaagcaaaa

SEQ ID NO: 2408079 - RNA, 19 nt, Homo sapiens
  misc_RNA (1)...(19): siRNA sense strand
gagcaauguaacucgucaa

SEQ ID NO: 2408080 - RNA, 19 nt, Homo sapiens
  misc_RNA (1)...(19): siRNA sense strand
auguaaacgacgaacaaga

SEQ ID NO: 2408081 - RNA, 19 nt, Homo sapiens
  misc_RNA (1)...(19): siRNA sense strand
gcuacaacugccauugaaa

SEQ ID NO: 2408082 - RNA, 19 nt, Homo sapiens
  misc_RNA (1)...(19): siRNA sense strand
ucacaaacucugacccaau

SEQ ID NO: 2408083 - RNA, 19 nt, Homo sapiens
  misc_RNA (1)...(19): siRNA sense strand
gggaauagugagaggccuc

SEQ ID NO: 2408084 - RNA, 19 nt, Homo sapiens
  misc_RNA (1)...(19): siRNA sense strand
ggagcuuuguggugcaaca

SEQ ID NO: 2408085 - RNA, 19 nt, Homo sapiens
  misc_RNA (1)...(19): siRNA sense strand
caaagaaugaacaggaauc

SEQ ID NO: 2408086 - RNA, 19 nt, Homo sapiens
  misc_RNA (1)...(19): siRNA sense strand
ucaaagaaugaacaggaau

SEQ ID NO: 2408087 - RNA, 19 nt, Homo sapiens
  misc_RNA (1)...(19): siRNA sense strand
accuaaaccuguucgaaga

SEQ ID NO: 2408088 - RNA, 19 nt, Homo sapiens
  misc_RNA (1)...(19): siRNA sense strand
aggaagaauggcuaugauu

SEQ ID NO: 2408089 - RNA, 19 nt, Homo sapiens
  misc_RNA (1)...(19): siRNA sense strand
caaauguaaacgacgaaca

SEQ ID NO: 2408090 - RNA, 19 nt, Homo sapiens
  misc_RNA (1)...(19): siRNA sense strand
ugguaauacuguagauggu

SEQ ID NO: 2408091 - RNA, 19 nt, Homo sapiens
  misc_RNA (1)...(19): siRNA sense strand
uggcuaugauuuaccagaa

SEQ ID NO: 2408092 - RNA, 19 nt, Homo sapiens
  misc_RNA (1)...(19): siRNA sense strand
acgacgaacaagaugauga

SEQ ID NO: 2408093 - RNA, 19 nt, Homo sapiens
  misc_RNA (1)...(19): siRNA sense strand
ggaccagacaacaguacga

SEQ ID NO: 2408094 - RNA, 19 nt, Homo sapiens
  misc_RNA (1)...(19): siRNA sense strand
aaauccacaugcaggaaau

SEQ ID NO: 2408095 - RNA, 19 nt, Homo sapiens
  misc_RNA (1)...(19): siRNA sense strand
gggucguauucugguguaa

SEQ ID NO: 2408096 - RNA, 19 nt, Homo sapiens
  misc_RNA (1)...(19): siRNA sense strand
cuggaaaauaacagaugaa

SEQ ID NO: 2408097 - RNA, 19 nt, Homo sapiens
  misc_RNA (1)...(19): siRNA sense strand
gugagcagugggagacauu

SEQ ID NO: 2408098 - RNA, 19 nt, Homo sapiens
  misc_RNA (1)...(19): siRNA sense strand
ucagcagauaccagagcaa

SEQ ID NO: 2408099 - RNA, 19 nt, Homo sapiens
  misc_RNA (1)...(19): siRNA sense strand
cagaaguccugccggcuga

SEQ ID NO: 2408100 - RNA, 19 nt, Homo sapiens
  misc_RNA (1)...(19): siRNA sense strand
ccacacacauggaggaagc

SEQ ID NO: 2408101 - RNA, 19 nt, Homo sapiens
  misc_RNA (1)...(19): siRNA sense strand
uuaugaugaucccuggaaa

SEQ ID NO: 2408102 - RNA, 19 nt, Homo sapiens
  misc_RNA (1)...(19): siRNA sense strand
ccgcacaggagcuggagaa

SEQ ID NO: 2408103 - RNA, 19 nt, Homo sapiens
  misc_RNA (1)...(19): siRNA sense strand
cugcucaacuccaggguga

SEQ ID NO: 2408104 - RNA, 19 nt, Homo sapiens
  misc_RNA (1)...(19): siRNA sense strand
aggacgaguaugagaaguu

SEQ ID NO: 2408105 - RNA, 19 nt, Homo sapiens
  misc_RNA (1)...(19): siRNA sense strand
gggaggaucuacagcagga

SEQ ID NO: 2408106 - RNA, 19 nt, Homo sapiens
  misc_RNA (1)...(19): siRNA sense strand
ucuuugacauggaggccua

SEQ ID NO: 2408107 - RNA, 19 nt, Homo sapiens
  misc_RNA (1)...(19): siRNA sense strand
cuucagaacaauugcacca

SEQ ID NO: 2408108 - RNA, 19 nt, Homo sapiens
  misc_RNA (1)...(19): siRNA sense strand
aucaaaggcuggugggugu

SEQ ID NO: 2408109 - RNA, 19 nt, Homo sapiens
  misc_RNA (1)...(19): siRNA sense strand
aagaauggauuguaccuga

SEQ ID NO: 2408110 - RNA, 19 nt, Homo sapiens
  misc_RNA (1)...(19): siRNA sense strand
acgaguaugagaaguucaa

SEQ ID NO: 2408111 - RNA, 19 nt, Homo sapiens
  misc_RNA (1)...(19): siRNA sense strand
aggaguggcaggugcuuau

SEQ ID NO: 2408112 - RNA, 19 nt, Homo sapiens
  misc_RNA (1)...(19): siRNA sense strand
ccuacguggcuuaguggua

SEQ ID NO: 2408113 - RNA, 19 nt, Homo sapiens
  misc_RNA (1)...(19): siRNA sense strand
gcgagaaacuggaggcgau

SEQ ID NO: 2408114 - RNA, 19 nt, Homo sapiens
  misc_RNA (1)...(19): siRNA sense strand
aggugaaguuacagcagaa

SEQ ID NO: 2408115 - RNA, 19 nt, Homo sapiens
  misc_RNA (1)...(19): siRNA sense strand
ggucugacucggaggccaa

SEQ ID NO: 2408116 - RNA, 19 nt, Homo sapiens
  misc_RNA (1)...(19): siRNA sense strand
gcuccaaagccaagcccaa

SEQ ID NO: 2408117 - RNA, 19 nt, Homo sapiens
  misc_RNA (1)...(19): siRNA sense strand
ggggaaagccugucgggaa

SEQ ID NO: 2408118 - RNA, 19 nt, Homo sapiens
  misc_RNA (1)...(19): siRNA sense strand
gggaaagccugucgggaac

SEQ ID NO: 2408119 - RNA, 19 nt, Homo sapiens
  misc_RNA (1)...(19): siRNA sense strand
gggacaaauggauggccaa

SEQ ID NO: 2408120 - RNA, 19 nt, Homo sapiens
  misc_RNA (1)...(19): siRNA sense strand
gugcugaggcagagggagu

SEQ ID NO: 2408121 - RNA, 19 nt, Homo sapiens
  misc_RNA (1)...(19): siRNA sense strand
cggcuacuacagcgagaaa

SEQ ID NO: 2408122 - RNA, 19 nt, Homo sapiens
  misc_RNA (1)...(19): siRNA sense strand
cccagaaggagcagcggaa

SEQ ID NO: 2408123 - RNA, 19 nt, Homo sapiens
  misc_RNA (1)...(19): siRNA sense strand
uggacgugauugagcguga

SEQ ID NO: 2408124 - RNA, 19 nt, Homo sapiens
  misc_RNA (1)...(19): siRNA sense strand
ugucaggaggcaaggugaa

SEQ ID NO: 2408125 - RNA, 19 nt, Homo sapiens
  misc_RNA (1)...(19): siRNA sense strand
gugaaggggucaagaucau

SEQ ID NO: 2408126 - RNA, 19 nt, Homo sapiens
  misc_RNA (1)...(19): siRNA sense strand
cugcauggugccaaggcua

SEQ ID NO: 2408127 - RNA, 19 nt, Homo sapiens
  misc_RNA (1)...(19): siRNA sense strand
gcuacuacagcgagaaacu

SEQ ID NO: 2408128 - RNA, 19 nt, Homo sapiens
  misc_RNA (1)...(19): siRNA sense strand
uggaguugcccgugacaga

SEQ ID NO: 2408129 - RNA, 19 nt, Homo sapiens
  misc_RNA (1)...(19): siRNA sense strand
cagaaggagcagcggaaac

SEQ ID NO: 2408130 - RNA, 19 nt, Homo sapiens
  misc_RNA (1)...(19): siRNA sense strand
cugucuugcucaugcauau

SEQ ID NO: 2408131 - RNA, 19 nt, Homo sapiens
  misc_RNA (1)...(19): siRNA sense strand
cuggaaaguuugacgagcu

SEQ ID NO: 2408132 - RNA, 19 nt, Homo sapiens
  misc_RNA (1)...(19): siRNA sense strand
guacgagaccaucgagcga

SEQ ID NO: 2408133 - RNA, 19 nt, Homo sapiens
  misc_RNA (1)...(19): siRNA sense strand
agaucaugcaggaggccuu

SEQ ID NO: 2408134 - RNA, 19 nt, Homo sapiens
  misc_RNA (1)...(19): siRNA sense strand
ucgaauuggaccugggaaa

SEQ ID NO: 2408135 - RNA, 19 nt, Homo sapiens
  misc_RNA (1)...(19): siRNA sense strand
ggaaauucgaguuugggaa

SEQ ID NO: 2408136 - RNA, 19 nt, Homo sapiens
  misc_RNA (1)...(19): siRNA sense strand
ccauaauucagcagccaaa

SEQ ID NO: 2408137 - RNA, 19 nt, Homo sapiens
  misc_RNA (1)...(19): siRNA sense strand
ucaaaagguacaugggaaa

SEQ ID NO: 2408138 - RNA, 19 nt, Homo sapiens
  misc_RNA (1)...(19): siRNA sense strand
aagaugaaccuguggaaaa

SEQ ID NO: 2408139 - RNA, 19 nt, Homo sapiens
  misc_RNA (1)...(19): siRNA sense strand
cugucaagauaauggaaga

SEQ ID NO: 2408140 - RNA, 19 nt, Homo sapiens
  misc_RNA (1)...(19): siRNA sense strand
ggcaaagggcacagugaca

SEQ ID NO: 2408141 - RNA, 19 nt, Homo sapiens
  misc_RNA (1)...(19): siRNA sense strand
agaaaaggaaggaggcauu

SEQ ID NO: 2408142 - RNA, 19 nt, Homo sapiens
  misc_RNA (1)...(19): siRNA sense strand
ccaaccagaaugaaagcaa

SEQ ID NO: 2408143 - RNA, 19 nt, Homo sapiens
  misc_RNA (1)...(19): siRNA sense strand
ugaagaagauggugggguu

SEQ ID NO: 2408144 - RNA, 19 nt, Homo sapiens
  misc_RNA (1)...(19): siRNA sense strand
aagguagauuggagcaaau

SEQ ID NO: 2408145 - RNA, 19 nt, Homo sapiens
  misc_RNA (1)...(19): siRNA sense strand
gggagauacuacagcaaac

SEQ ID NO: 2408146 - RNA, 19 nt, Homo sapiens
  misc_RNA (1)...(19): siRNA sense strand
agauaauggaagaacccua

SEQ ID NO: 2408147 - RNA, 19 nt, Homo sapiens
  misc_RNA (1)...(19): siRNA sense strand
ugaucgauucaguggcaaa

SEQ ID NO: 2408148 - RNA, 19 nt, Homo sapiens
  misc_RNA (1)...(19): siRNA sense strand
acauugaaacucuggaaaa

SEQ ID NO: 2408149 - RNA, 19 nt, Homo sapiens
  misc_RNA (1)...(19): siRNA sense strand
cugaagguuuggagagaag

SEQ ID NO: 2408150 - RNA, 19 nt, Homo sapiens
  misc_RNA (1)...(19): siRNA sense strand
gcagaugccuuauggguuc

SEQ ID NO: 2408151 - RNA, 19 nt, Homo sapiens
  misc_RNA (1)...(19): siRNA sense strand
ugguaaagcugcagccaug

SEQ ID NO: 2408152 - RNA, 19 nt, Homo sapiens
  misc_RNA (1)...(19): siRNA sense strand
caucaggaggaccuagaaa

SEQ ID NO: 2408153 - RNA, 19 nt, Homo sapiens
  misc_RNA (1)...(19): siRNA sense strand
agugauacauauaaggcca

SEQ ID NO: 2408154 - RNA, 19 nt, Homo sapiens
  misc_RNA (1)...(19): siRNA sense strand
cgaauuggaccugggaaau

SEQ ID NO: 2408155 - RNA, 19 nt, Homo sapiens
  misc_RNA (1)...(19): siRNA sense strand
ucgaguuugggaaggauaa

SEQ ID NO: 2408156 - RNA, 19 nt, Homo sapiens
  misc_RNA (1)...(19): siRNA sense strand
cuucuaaaauucggggaaa

SEQ ID NO: 2408157 - RNA, 19 nt, Homo sapiens
  misc_RNA (1)...(19): siRNA sense strand
gggaagggcuugaucaggu

SEQ ID NO: 2408158 - RNA, 19 nt, Homo sapiens
  misc_RNA (1)...(19): siRNA sense strand
acucccaaccagaaugaaa

SEQ ID NO: 2408159 - RNA, 19 nt, Homo sapiens
  misc_RNA (1)...(19): siRNA sense strand
ccaagaacuuugaagagcu

SEQ ID NO: 2408160 - RNA, 19 nt, Homo sapiens
  misc_RNA (1)...(19): siRNA sense strand
uugaauuuccucagaucua

SEQ ID NO: 2408161 - RNA, 19 nt, Homo sapiens
  misc_RNA (1)...(19): siRNA sense strand
ugaaacaggcugauggaac

SEQ ID NO: 2408162 - RNA, 19 nt, Homo sapiens
  misc_RNA (1)...(19): siRNA sense strand
aggaaggaggcauugaauu

SEQ ID NO: 2408163 - RNA, 19 nt, Homo sapiens
  misc_RNA (1)...(19): siRNA sense strand
cgaauugugaucucagaau

SEQ ID NO: 2408164 - RNA, 19 nt, Homo sapiens
  misc_RNA (1)...(19): siRNA sense strand
accaggaaccaaugaagaa

SEQ ID NO: 2408165 - RNA, 19 nt, Homo sapiens
  misc_RNA (1)...(19): siRNA sense strand
gcacugagaccaacuuuau

SEQ ID NO: 2408166 - RNA, 19 nt, Homo sapiens
  misc_RNA (1)...(19): siRNA sense strand
uugggaaggauaaguacaa

SEQ ID NO: 2408167 - RNA, 19 nt, Homo sapiens
  misc_RNA (1)...(19): siRNA sense strand
gugacauacaggagcaagu

SEQ ID NO: 2408168 - RNA, 19 nt, Homo sapiens
  misc_RNA (1)...(19): siRNA sense strand
uauaaggccaacagugcua

SEQ ID NO: 2408169 - RNA, 19 nt, Homo sapiens
  misc_RNA (1)...(19): siRNA sense strand
cacugaagguuuggagaga

SEQ ID NO: 2408170 - RNA, 19 nt, Homo sapiens
  misc_RNA (1)...(19): siRNA sense strand
cugcaaaggugucagcuga

SEQ ID NO: 2408171 - RNA, 19 nt, Homo sapiens
  misc_RNA (1)...(19): siRNA sense strand
caacaagggugcugcccga

SEQ ID NO: 2408172 - RNA, 19 nt, Homo sapiens
  misc_RNA (1)...(19): siRNA sense strand
gguuaaccaaguaccgaaa

SEQ ID NO: 2408173 - RNA, 19 nt, Homo sapiens
  misc_RNA (1)...(19): siRNA sense strand
auacaaugagucagaugaa

SEQ ID NO: 2408174 - RNA, 19 nt, Homo sapiens
  misc_RNA (1)...(19): siRNA sense strand
uggaauuugcuaagaacau

SEQ ID NO: 2408175 - RNA, 19 nt, Homo sapiens
  misc_RNA (1)...(19): siRNA sense strand
augaagugguuguugacau

SEQ ID NO: 2408176 - RNA, 19 nt, Homo sapiens
  misc_RNA (1)...(19): siRNA sense strand
cgaaaauaguucccgauga

SEQ ID NO: 2408177 - RNA, 19 nt, Homo sapiens
  misc_RNA (1)...(19): siRNA sense strand
caaucaggaaggugggcca

SEQ ID NO: 2408178 - RNA, 19 nt, Homo sapiens
  misc_RNA (1)...(19): siRNA sense strand
agucagaugaagugguugu

SEQ ID NO: 2408179 - RNA, 19 nt, Homo sapiens
  misc_RNA (1)...(19): siRNA sense strand
agaagaauccauaaggcaa

SEQ ID NO: 2408180 - RNA, 19 nt, Homo sapiens
  misc_RNA (1)...(19): siRNA sense strand
ccuccaaaucaguggccaa

SEQ ID NO: 2408181 - RNA, 19 nt, Homo sapiens
  misc_RNA (1)...(19): siRNA sense strand
cugaagaagguaaagaaca

SEQ ID NO: 2408182 - RNA, 19 nt, Homo sapiens
  misc_RNA (1)...(19): siRNA sense strand
augcagacuuuuagagcua

SEQ ID NO: 2408183 - RNA, 19 nt, Homo sapiens
  misc_RNA (1)...(19): siRNA sense strand
cuauauaacauucagguca

SEQ ID NO: 2408184 - RNA, 19 nt, Homo sapiens
  misc_RNA (1)...(19): siRNA sense strand
aggugaaaucaaagcaaaa

SEQ ID NO: 2408185 - RNA, 19 nt, Homo sapiens
  misc_RNA (1)...(19): siRNA sense strand
guguuaaugcugugcugaa

SEQ ID NO: 2408186 - RNA, 19 nt, Homo sapiens
  misc_RNA (1)...(19): siRNA sense strand
auaacauucaggucagaaa

SEQ ID NO: 2408187 - RNA, 19 nt, Homo sapiens
  misc_RNA (1)...(19): siRNA sense strand
cuggaagaaucgaggggau

SEQ ID NO: 2408188 - RNA, 19 nt, Homo sapiens
  misc_RNA (1)...(19): siRNA sense strand
aacagagaggagagugaaa

SEQ ID NO: 2408189 - RNA, 19 nt, Homo sapiens
  misc_RNA (1)...(19): siRNA sense strand
ccauaaggcaaaacagaga

SEQ ID NO: 2408190 - RNA, 19 nt, Homo sapiens
  misc_RNA (1)...(19): siRNA sense strand
ggacauaucuggucgucug

SEQ ID NO: 2408191 - RNA, 19 nt, Homo sapiens
  misc_RNA (1)...(19): siRNA sense strand
guuaaugcgccgaggcaac

SEQ ID NO: 2408192 - RNA, 19 nt, Homo sapiens
  misc_RNA (1)...(19): siRNA sense strand
aaaacagagaggagaguga

SEQ ID NO: 2408193 - RNA, 19 nt, Homo sapiens
  misc_RNA (1)...(19): siRNA sense strand
aagaagaauccauaaggca

SEQ ID NO: 2408194 - RNA, 19 nt, Homo sapiens
  misc_RNA (1)...(19): siRNA sense strand
cagagaggagagugaaaau

SEQ ID NO: 2408195 - RNA, 19 nt, Homo sapiens
  misc_RNA (1)...(19): siRNA sense strand
gcgagaacuaaaugagaaa

SEQ ID NO: 2408196 - RNA, 19 nt, Homo sapiens
  misc_RNA (1)...(19): siRNA sense strand
agaagagaauggugagcaa

SEQ ID NO: 2408197 - RNA, 19 nt, Homo sapiens
  misc_RNA (1)...(19): siRNA sense strand
aaucagaagcaaagagcaa

SEQ ID NO: 2408198 - RNA, 19 nt, Homo sapiens
  misc_RNA (1)...(19): siRNA sense strand
acggauugguggugugaaa

SEQ ID NO: 2408199 - RNA, 19 nt, Homo sapiens
  misc_RNA (1)...(19): siRNA sense strand
agaugaggcuggugaggaa

SEQ ID NO: 2408200 - RNA, 19 nt, Homo sapiens
  misc_RNA (1)...(19): siRNA sense strand
guaucaaauuguaguggaa

SEQ ID NO: 2408201 - RNA, 19 nt, Homo sapiens
  misc_RNA (1)...(19): siRNA sense strand
ggaaagacgccuuggcuga

SEQ ID NO: 2408202 - RNA, 19 nt, Homo sapiens
  misc_RNA (1)...(19): siRNA sense strand
cugaagaggcacaaaggua

SEQ ID NO: 2408203 - RNA, 19 nt, Homo sapiens
  misc_RNA (1)...(19): siRNA sense strand
gugaggaagccguggauga

SEQ ID NO: 2408204 - RNA, 19 nt, Homo sapiens
  misc_RNA (1)...(19): siRNA sense strand
uuuaaaugggugagaagaa

SEQ ID NO: 2408205 - RNA, 19 nt, Homo sapiens
  misc_RNA (1)...(19): siRNA sense strand
aggcacaaagguaaagaaa

SEQ ID NO: 2408206 - RNA, 19 nt, Homo sapiens
  misc_RNA (1)...(19): siRNA sense strand
uggaagaaccaucaacaaa

SEQ ID NO: 2408207 - RNA, 19 nt, Homo sapiens
  misc_RNA (1)...(19): siRNA sense strand
gagcaaagucaggaaacaa

SEQ ID NO: 2408208 - RNA, 19 nt, Homo sapiens
  misc_RNA (1)...(19): siRNA sense strand
uggcaaagaagcaguguga

SEQ ID NO: 2408209 - RNA, 19 nt, Homo sapiens
  misc_RNA (1)...(19): siRNA sense strand
gagccuuguuggacagcaa

SEQ ID NO: 2408210 - RNA, 19 nt, Homo sapiens
  misc_RNA (1)...(19): siRNA sense strand
ugguuaaaguugucugcaa

SEQ ID NO: 2408211 - RNA, 19 nt, Homo sapiens
  misc_RNA (1)...(19): siRNA sense strand
uuggaagacuuuugggaaa

SEQ ID NO: 2408212 - RNA, 19 nt, Homo sapiens
  misc_RNA (1)...(19): siRNA sense strand
uguggagagcaaagaaaua

SEQ ID NO: 2408213 - RNA, 19 nt, Homo sapiens
  misc_RNA (1)...(19): siRNA sense strand
gcagugucuuguaggaaau

SEQ ID NO: 2408214 - RNA, 19 nt, Homo sapiens
  misc_RNA (1)...(19): siRNA sense strand
gcacagaccuucagcugca

SEQ ID NO: 2408215 - RNA, 19 nt, Homo sapiens
  misc_RNA (1)...(19): siRNA sense strand
ccagauuacauuaaccaaa

SEQ ID NO: 2408216 - RNA, 19 nt, Homo sapiens
  misc_RNA (1)...(19): siRNA sense strand
gcacauggcaagaacggau

SEQ ID NO: 2408217 - RNA, 19 nt, Homo sapiens
  misc_RNA (1)...(19): siRNA sense strand
uggaaaagucgaagaauca

SEQ ID NO: 2408218 - RNA, 19 nt, Homo sapiens
  misc_RNA (1)...(19): siRNA sense strand
acguauaaugcuugcagaa

SEQ ID NO: 2408219 - RNA, 19 nt, Homo sapiens
  misc_RNA (1)...(19): siRNA sense strand
caaucagaucaaugaacaa

SEQ ID NO: 2408220 - RNA, 19 nt, Homo sapiens
  misc_RNA (1)...(19): siRNA sense strand
ggacaaaagagcucugauu

SEQ ID NO: 2408221 - RNA, 19 nt, Homo sapiens
  misc_RNA (1)...(19): siRNA sense strand
uuuccaaguugaaggauga

SEQ ID NO: 2408222 - RNA, 19 nt, Homo sapiens
  misc_RNA (1)...(19): siRNA sense strand
ccaaguugaaggaugaaau

SEQ ID NO: 2408223 - RNA, 19 nt, Homo sapiens
  misc_RNA (1)...(19): siRNA sense strand
gcaagaaacaagagccaac

SEQ ID NO: 2408224 - RNA, 19 nt, Homo sapiens
  misc_RNA (1)...(19): siRNA sense strand
cagaugaugaaguaagauu

SEQ ID NO: 2408225 - RNA, 19 nt, Homo sapiens
  misc_RNA (1)...(19): siRNA sense strand
gggaagggccucaaagcca

SEQ ID NO: 2408226 - RNA, 19 nt, Homo sapiens
  misc_RNA (1)...(19): siRNA sense strand
aagagaauggugagcaauu

SEQ ID NO: 2408227 - RNA, 19 nt, Homo sapiens
  misc_RNA (1)...(19): siRNA sense strand
ugauggaacugcugcuaau

SEQ ID NO: 2408228 - RNA, 19 nt, Homo sapiens
  misc_RNA (1)...(19): siRNA sense strand
gcaaugauguugugaggac

SEQ ID NO: 2408229 - RNA, 19 nt, Homo sapiens
  misc_RNA (1)...(19): siRNA sense strand
cuguaaacaaacugcgaga

SEQ ID NO: 2408230 - RNA, 19 nt, Homo sapiens
  misc_RNA (1)...(19): siRNA sense strand
agagguuacagaagagaau

SEQ ID NO: 2408231 - RNA, 19 nt, Homo sapiens
  misc_RNA (1)...(19): siRNA sense strand
cagaaggcucagcgaguuu

SEQ ID NO: 2408232 - RNA, 19 nt, Homo sapiens
  misc_RNA (1)...(19): siRNA sense strand
gaccacaaucagaagcaaa

SEQ ID NO: 2408233 - RNA, 19 nt, Homo sapiens
  misc_RNA (1)...(19): siRNA sense strand
cugcaagaaacaagagcca

SEQ ID NO: 2408234 - RNA, 19 nt, Homo sapiens
  misc_RNA (1)...(19): siRNA sense strand
aggaggagacagaggagga

SEQ ID NO: 2408235 - RNA, 19 nt, Homo sapiens
  misc_RNA (1)...(19): siRNA sense strand
cguauaaugcuugcagaaa

SEQ ID NO: 2408236 - RNA, 19 nt, Homo sapiens
  misc_RNA (1)...(19): siRNA sense strand
aggaacaugaagagguaca

SEQ ID NO: 2408237 - RNA, 19 nt, Homo sapiens
  misc_RNA (1)...(19): siRNA sense strand
gcaaagaaauaucugugga

SEQ ID NO: 2408238 - RNA, 19 nt, Homo sapiens
  misc_RNA (1)...(19): siRNA sense strand
auuucuuuguggagagcaa

SEQ ID NO: 2408239 - RNA, 19 nt, Homo sapiens
  misc_RNA (1)...(19): siRNA sense strand
caugguaagccuacaagaa

SEQ ID NO: 2408240 - RNA, 19 nt, Homo sapiens
  misc_RNA (1)...(19): siRNA sense strand
agaaguuggaggaguugaa

SEQ ID NO: 2408241 - RNA, 19 nt, Homo sapiens
  misc_RNA (1)...(19): siRNA sense strand
acauggaaaggauggacaa

SEQ ID NO: 2408242 - RNA, 19 nt, Homo sapiens
  misc_RNA (1)...(19): siRNA sense strand
uuacagaagagaaugguga

SEQ ID NO: 2408243 - RNA, 19 nt, Homo sapiens
  misc_RNA (1)...(19): siRNA sense strand
ccuacaagaaguuggagga

SEQ ID NO: 2408244 - RNA, 19 nt, Homo sapiens
  misc_RNA (1)...(19): siRNA sense strand
agcaaagucaggaaacaaa

SEQ ID NO: 2408245 - RNA, 19 nt, Homo sapiens
  misc_RNA (1)...(19): siRNA sense strand
gugucuuguaggaaauaaa

SEQ ID NO: 2408246 - RNA, 19 nt, Homo sapiens
  misc_RNA (1)...(19): siRNA sense strand
uuuggaauguacauggaaa

SEQ ID NO: 2408247 - RNA, 19 nt, Homo sapiens
  misc_RNA (1)...(19): siRNA sense strand
agcagugucuuguaggaaa

SEQ ID NO: 2408248 - RNA, 19 nt, Homo sapiens
  misc_RNA (1)...(19): siRNA sense strand
gagaacuaaaugagaaacu

SEQ ID NO: 2408249 - RNA, 19 nt, Homo sapiens
  misc_RNA (1)...(19): siRNA sense strand
caccaaaaccugacaagaa

SEQ ID NO: 2408250 - RNA, 19 nt, Homo sapiens
  misc_RNA (1)...(19): siRNA sense strand
caucaccaguggagagguu

SEQ ID NO: 2408251 - RNA, 19 nt, Homo sapiens
  misc_RNA (1)...(19): siRNA sense strand
ucuacaaaauccaggaaga

SEQ ID NO: 2408252 - RNA, 19 nt, Homo sapiens
  misc_RNA (1)...(19): siRNA sense strand
cuucauuuauugucaguga

SEQ ID NO: 2408253 - RNA, 19 nt, Homo sapiens
  misc_RNA (1)...(19): siRNA sense strand
cagauaugcuucagagccu

SEQ ID NO: 2408254 - RNA, 19 nt, Homo sapiens
  misc_RNA (1)...(19): siRNA sense strand
gguaaagaaacugcggcaa

SEQ ID NO: 2408255 - RNA, 19 nt, Homo sapiens
  misc_RNA (1)...(19): siRNA sense strand
ggaaauugccagacagcug

SEQ ID NO: 2408256 - RNA, 19 nt, Homo sapiens
  misc_RNA (1)...(19): siRNA sense strand
guaaacaaacugcgagaac

SEQ ID NO: 2408257 - RNA, 19 nt, Homo sapiens
  misc_RNA (1)...(19): siRNA sense strand
ccucaaaggaugugcaguc

SEQ ID NO: 2408258 - RNA, 19 nt, Homo sapiens
  misc_RNA (1)...(19): siRNA sense strand
cuagaaagaaacaggcaaa

SEQ ID NO: 2408259 - RNA, 19 nt, Homo sapiens
  misc_RNA (1)...(19): siRNA sense strand
cgauauucacagagcauaa

SEQ ID NO: 2408260 - RNA, 19 nt, Homo sapiens
  misc_RNA (1)...(19): siRNA sense strand
gagaacugcucgaaggcaa

SEQ ID NO: 2408261 - RNA, 19 nt, Homo sapiens
  misc_RNA (1)...(19): siRNA sense strand
gaggaagggaagagagcau

SEQ ID NO: 2408262 - RNA, 19 nt, Homo sapiens
  misc_RNA (1)...(19): siRNA sense strand
gagaagauacagugaggca

SEQ ID NO: 2408263 - RNA, 19 nt, Homo sapiens
  misc_RNA (1)...(19): siRNA sense strand
uggaaaugaaguuggucua

SEQ ID NO: 2408264 - RNA, 19 nt, Homo sapiens
  misc_RNA (1)...(19): siRNA sense strand
acuucaaacuguucagcaa

SEQ ID NO: 2408265 - RNA, 19 nt, Homo sapiens
  misc_RNA (1)...(19): siRNA sense strand
aagauaaacacaagcaaga

SEQ ID NO: 2408266 - RNA, 19 nt, Homo sapiens
  misc_RNA (1)...(19): siRNA sense strand
caguaggaguuuggagaau

SEQ ID NO: 2408267 - RNA, 19 nt, Homo sapiens
  misc_RNA (1)...(19): siRNA sense strand
agauauagcaaguguggca

SEQ ID NO: 2408268 - RNA, 19 nt, Homo sapiens
  misc_RNA (1)...(19): siRNA sense strand
cugaaauaguagacccuuu

SEQ ID NO: 2408269 - RNA, 19 nt, Homo sapiens
  misc_RNA (1)...(19): siRNA sense strand
aagaaacaggcaaagauaa

SEQ ID NO: 2408270 - RNA, 19 nt, Homo sapiens
  misc_RNA (1)...(19): siRNA sense strand
ugaaggaagaagaaacaau

SEQ ID NO: 2408271 - RNA, 19 nt, Homo sapiens
  misc_RNA (1)...(19): siRNA sense strand
ggcaaagauaacagaacuu

SEQ ID NO: 2408272 - RNA, 19 nt, Homo sapiens
  misc_RNA (1)...(19): siRNA sense strand
aaugaacguguguggaaua

SEQ ID NO: 2408273 - RNA, 19 nt, Homo sapiens
  misc_RNA (1)...(19): siRNA sense strand
acggaaggcagaaggugaa

SEQ ID NO: 2408274 - RNA, 19 nt, Homo sapiens
  misc_RNA (1)...(19): siRNA sense strand
gaguaaaggagcaguccca

SEQ ID NO: 2408275 - RNA, 19 nt, Homo sapiens
  misc_RNA (1)...(19): siRNA sense strand
cuugaaggaagaagaaaca

SEQ ID NO: 2408276 - RNA, 19 nt, Homo sapiens
  misc_RNA (1)...(19): siRNA sense strand
guuccaaagauaaacacaa

SEQ ID NO: 2408277 - RNA, 19 nt, Homo sapiens
  misc_RNA (1)...(19): siRNA sense strand
ggguguucgcuaugaguuu

SEQ ID NO: 2408278 - RNA, 19 nt, Homo sapiens
  misc_RNA (1)...(19): siRNA sense strand
agcucuugcuauagacaaa

SEQ ID NO: 2408279 - RNA, 19 nt, Homo sapiens
  misc_RNA (1)...(19): siRNA sense strand
auaaugaacguguguggaa

SEQ ID NO: 2408280 - RNA, 19 nt, Homo sapiens
  misc_RNA (1)...(19): siRNA sense strand
agaacugcucgaaggcaaa

SEQ ID NO: 2408281 - RNA, 19 nt, Homo sapiens
  misc_RNA (1)...(19): siRNA sense strand
gucacaagagauuaagaaa

SEQ ID NO: 2408282 - RNA, 19 nt, Homo sapiens
  misc_RNA (1)...(19): siRNA sense strand
aggcaaagauaacagaacu

SEQ ID NO: 2408283 - RNA, 19 nt, Homo sapiens
  misc_RNA (1)...(19): siRNA sense strand
gcuugguggaggaagggaa

SEQ ID NO: 2408284 - RNA, 19 nt, Homo sapiens
  misc_RNA (1)...(19): siRNA sense strand
guacacaccauuugcgaca

SEQ ID NO: 2408285 - RNA, 19 nt, Homo sapiens
  misc_RNA (1)...(19): siRNA sense strand
gggagaaccauuugaugca

SEQ ID NO: 2408286 - RNA, 19 nt, Homo sapiens
  misc_RNA (1)...(19): siRNA sense strand
agacaauggggaagcgaau

SEQ ID NO: 2408287 - RNA, 19 nt, Homo sapiens
  misc_RNA (1)...(19): siRNA sense strand
agccagcugcagagaguaa

SEQ ID NO: 2408288 - RNA, 19 nt, Homo sapiens
  misc_RNA (1)...(19): siRNA sense strand
agguaaacagguagaaauc

SEQ ID NO: 2408289 - RNA, 19 nt, Homo sapiens
  misc_RNA (1)...(19): siRNA sense strand
gguagaaaucacacuugaa

SEQ ID NO: 2408290 - RNA, 19 nt, Homo sapiens
  misc_RNA (1)...(19): siRNA sense strand
guguuuagaugucuggaga

SEQ ID NO: 2408291 - RNA, 19 nt, Homo sapiens
  misc_RNA (1)...(19): siRNA sense strand
acuagaaagaaacaggcaa

SEQ ID NO: 2408292 - RNA, 19 nt, Homo sapiens
  misc_RNA (1)...(19): siRNA sense strand
agaaacaggcaaagauaac

SEQ ID NO: 2408293 - RNA, 19 nt, Homo sapiens
  misc_RNA (1)...(19): siRNA sense strand
ccggaaucaucuucgucaa

SEQ ID NO: 2408294 - RNA, 19 nt, Homo sapiens
  misc_RNA (1)...(19): siRNA sense strand
cuucaaacuguucagcaaa

SEQ ID NO: 2408295 - RNA, 19 nt, Homo sapiens
  misc_RNA (1)...(19): siRNA sense strand
agaaagaaacaggcaaaga

SEQ ID NO: 2408296 - RNA, 19 nt, Homo sapiens
  misc_RNA (1)...(19): siRNA sense strand
cuucaugucuacugggagu

SEQ ID NO: 2408297 - RNA, 19 nt, Homo sapiens
  misc_RNA (1)...(19): siRNA sense strand
gcauaagcaagcucaucaa

SEQ ID NO: 2408298 - RNA, 19 nt, Homo sapiens
  misc_RNA (1)...(19): siRNA sense strand
cagcuuguuccaaagauaa

SEQ ID NO: 2408299 - RNA, 19 nt, Homo sapiens
  misc_RNA (1)...(19): siRNA sense strand
ggcaaguuucauugagaca

SEQ ID NO: 2408300 - RNA, 19 nt, Homo sapiens
  misc_RNA (1)...(19): siRNA sense strand
caaagauaaacacaagcaa

SEQ ID NO: 2408301 - RNA, 19 nt, Homo sapiens
  misc_RNA (1)...(19): siRNA sense strand
agauaacagaacuugacaa

SEQ ID NO: 2408302 - RNA, 19 nt, Homo sapiens
  misc_RNA (1)...(19): siRNA sense strand
aaggagcaguucugggaga

SEQ ID NO: 2408303 - RNA, 19 nt, Homo sapiens
  misc_RNA (1)...(19): siRNA sense strand
gguuggacaaauugaagau

SEQ ID NO: 2408304 - RNA, 19 nt, Homo sapiens
  misc_RNA (1)...(19): siRNA sense strand
uggaaaugucacaagagau

SEQ ID NO: 2408305 - RNA, 19 nt, Homo sapiens
  misc_RNA (1)...(19): siRNA sense strand
uaguagacccuuugagugu

SEQ ID NO: 2408306 - RNA, 19 nt, Homo sapiens
  misc_RNA (1)...(19): siRNA sense strand
ccuuaaagaacauaaugga

SEQ ID NO: 2408307 - RNA, 19 nt, Homo sapiens
  misc_RNA (1)...(19): siRNA sense strand
agaaagaagccgaggcaca

SEQ ID NO: 2408308 - RNA, 19 nt, Homo sapiens
  misc_RNA (1)...(19): siRNA sense strand
ucugaagacaaguggguaa

SEQ ID NO: 2408309 - RNA, 19 nt, Homo sapiens
  misc_RNA (1)...(19): siRNA sense strand
cugaggacgcugagaggaa

SEQ ID NO: 2408310 - RNA, 19 nt, Homo sapiens
  misc_RNA (1)...(19): siRNA sense strand
acugaagaguuuagaggau

SEQ ID NO: 2408311 - RNA, 19 nt, Homo sapiens
  misc_RNA (1)...(19): siRNA sense strand
uggaaggagagcagaggua

SEQ ID NO: 2408312 - RNA, 19 nt, Homo sapiens
  misc_RNA (1)...(19): siRNA sense strand
acuuagcugcugaggaaua

SEQ ID NO: 2408313 - RNA, 19 nt, Homo sapiens
  misc_RNA (1)...(19): siRNA sense strand
cuagauuuggugagagcaa

SEQ ID NO: 2408314 - RNA, 19 nt, Homo sapiens
  misc_RNA (1)...(19): siRNA sense strand
ccuucgaagauguauauaa

SEQ ID NO: 2408315 - RNA, 19 nt, Homo sapiens
  misc_RNA (1)...(19): siRNA sense strand
gagagaugacagaagcaau

SEQ ID NO: 2408316 - RNA, 19 nt, Homo sapiens
  misc_RNA (1)...(19): siRNA sense strand
gcuuacagccuuagccaga

SEQ ID NO: 2408317 - RNA, 19 nt, Homo sapiens
  misc_RNA (1)...(19): siRNA sense strand
gaagaaagaagccgaggca

SEQ ID NO: 2408318 - RNA, 19 nt, Homo sapiens
  misc_RNA (1)...(19): siRNA sense strand
aagacaaguggguaaggaa

SEQ ID NO: 2408319 - RNA, 19 nt, Homo sapiens
  misc_RNA (1)...(19): siRNA sense strand
cugcagagccaaggagaga

SEQ ID NO: 2408320 - RNA, 19 nt, Homo sapiens
  misc_RNA (1)...(19): siRNA sense strand
gugaaaauugcaagaaaca

SEQ ID NO: 2408321 - RNA, 19 nt, Homo sapiens
  misc_RNA (1)...(19): siRNA sense strand
cucugauggaugagacaaa

SEQ ID NO: 2408322 - RNA, 19 nt, Homo sapiens
  misc_RNA (1)...(19): siRNA sense strand
ccaagguccugcagagcca

SEQ ID NO: 2408323 - RNA, 19 nt, Homo sapiens
  misc_RNA (1)...(19): siRNA sense strand
ggguaaggaaccacuucua

SEQ ID NO: 2408324 - RNA, 19 nt, Homo sapiens
  misc_RNA (1)...(19): siRNA sense strand
acuccuacaagaagaauau

SEQ ID NO: 2408325 - RNA, 19 nt, Homo sapiens
  misc_RNA (1)...(19): siRNA sense strand
guguggacaugcugcgaga

SEQ ID NO: 2408326 - RNA, 19 nt, Homo sapiens
  misc_RNA (1)...(19): siRNA sense strand
aagaauacaaacaggccau

SEQ ID NO: 2408327 - RNA, 19 nt, Homo sapiens
  misc_RNA (1)...(19): siRNA sense strand
ccucuuacuacuugggcuu

SEQ ID NO: 2408328 - RNA, 19 nt, Homo sapiens
  misc_RNA (1)...(19): siRNA sense strand
cuauauagagucugcagau

SEQ ID NO: 2408329 - RNA, 19 nt, Homo sapiens
  misc_RNA (1)...(19): siRNA sense strand
gggcggauauggaaggaug

SEQ ID NO: 2408330 - RNA, 19 nt, Homo sapiens
  misc_RNA (1)...(19): siRNA sense strand
ggaagaacucaguagguag

SEQ ID NO: 2408331 - RNA, 19 nt, Homo sapiens
  misc_RNA (1)...(19): siRNA sense strand
gccaaagaaggaagugaca

SEQ ID NO: 2408332 - RNA, 19 nt, Homo sapiens
  misc_RNA (1)...(19): siRNA sense strand
ccaaagaaggaagugacaa

SEQ ID NO: 2408333 - RNA, 19 nt, Homo sapiens
  misc_RNA (1)...(19): siRNA sense strand
aggauuaucaaaagaggaa

SEQ ID NO: 2408334 - RNA, 19 nt, Homo sapiens
  misc_RNA (1)...(19): siRNA sense strand
guacaaugcuuggggacau

SEQ ID NO: 2408335 - RNA, 19 nt, Homo sapiens
  misc_RNA (1)...(19): siRNA sense strand
gccaaggagagaugacaga

SEQ ID NO: 2408336 - RNA, 19 nt, Homo sapiens
  misc_RNA (1)...(19): siRNA sense strand
ggauacuacaacaaagcuu

SEQ ID NO: 2408337 - RNA, 19 nt, Homo sapiens
  misc_RNA (1)...(19): siRNA sense strand
cugcugucauggaaggaga

SEQ ID NO: 2408338 - RNA, 19 nt, Homo sapiens
  misc_RNA (1)...(19): siRNA sense strand
gaaggagagcagagguaac

SEQ ID NO: 2408339 - RNA, 19 nt, Homo sapiens
  misc_RNA (1)...(19): siRNA sense strand
gggaagaauaugagagagu

SEQ ID NO: 2408340 - RNA, 19 nt, Homo sapiens
  misc_RNA (1)...(19): siRNA sense strand
agggauugacuuagagcaa

SEQ ID NO: 2408341 - RNA, 19 nt, Homo sapiens
  misc_RNA (1)...(19): siRNA sense strand
ugaaaagguuuauggggaa

SEQ ID NO: 2408342 - RNA, 19 nt, Homo sapiens
  misc_RNA (1)...(19): siRNA sense strand
caucaggaggcaacggaaa

SEQ ID NO: 2408343 - RNA, 19 nt, Homo sapiens
  misc_RNA (1)...(19): siRNA sense strand
cuggagagaacuagaucaa

SEQ ID NO: 2408344 - RNA, 19 nt, Homo sapiens
  misc_RNA (1)...(19): siRNA sense strand
ucagaaaaccuuugaggaa

SEQ ID NO: 2408345 - RNA, 19 nt, Homo sapiens
  misc_RNA (1)...(19): siRNA sense strand
agaaaaccuuugaggaaau

SEQ ID NO: 2408346 - RNA, 19 nt, Homo sapiens
  misc_RNA (1)...(19): siRNA sense strand
gggaaauggaccagagggu

SEQ ID NO: 2408347 - RNA, 19 nt, Homo sapiens
  misc_RNA (1)...(19): siRNA sense strand
gaacagaacaaguggugcu

SEQ ID NO: 2408348 - RNA, 19 nt, Homo sapiens
  misc_RNA (1)...(19): siRNA sense strand
cugaaaagguuuaugggga

SEQ ID NO: 2408349 - RNA, 19 nt, Homo sapiens
  misc_RNA (1)...(19): siRNA sense strand
uuacauuaccugacagaca

SEQ ID NO: 2408350 - RNA, 19 nt, Homo sapiens
  misc_RNA (1)...(19): siRNA sense strand
ggaggaagcgacaggagga

SEQ ID NO: 2408351 - RNA, 19 nt, Homo sapiens
  misc_RNA (1)...(19): siRNA sense strand
cgggcagaugggaagaaua

SEQ ID NO: 2408352 - RNA, 19 nt, Homo sapiens
  misc_RNA (1)...(19): siRNA sense strand
caggaguuccacaggacaa

SEQ ID NO: 2408353 - RNA, 19 nt, Homo sapiens
  misc_RNA (1)...(19): siRNA sense strand
auuugaguuuggagggauu

SEQ ID NO: 2408354 - RNA, 19 nt, Homo sapiens
  misc_RNA (1)...(19): siRNA sense strand
cuuugagcaccgagacuua

SEQ ID NO: 2408355 - RNA, 19 nt, Homo sapiens
  misc_RNA (1)...(19): siRNA sense strand
ggaacagacaggcuggaga

SEQ ID NO: 2408356 - RNA, 19 nt, Homo sapiens
  misc_RNA (1)...(19): siRNA sense strand
gagcaaacaucaggaggca

SEQ ID NO: 2408357 - RNA, 19 nt, Homo sapiens
  misc_RNA (1)...(19): siRNA sense strand
agaucaagccggaagagca

SEQ ID NO: 2408358 - RNA, 19 nt, Homo sapiens
  misc_RNA (1)...(19): siRNA sense strand
gcaaacaucaggaggcaac

SEQ ID NO: 2408359 - RNA, 19 nt, Homo sapiens
  misc_RNA (1)...(19): siRNA sense strand
augaagaaggagaauaaca

SEQ ID NO: 2408360 - RNA, 19 nt, Homo sapiens
  misc_RNA (1)...(19): siRNA sense strand
agagaguccugcuguaaaa

SEQ ID NO: 2408361 - RNA, 19 nt, Homo sapiens
  misc_RNA (1)...(19): siRNA sense strand
agaacuagaucaagccgga

SEQ ID NO: 2408362 - RNA, 19 nt, Homo sapiens
  misc_RNA (1)...(19): siRNA sense strand
augggaagaauaugagaga

SEQ ID NO: 2408363 - RNA, 19 nt, Homo sapiens
  misc_RNA (1)...(19): siRNA sense strand
aggaccagauuuagucaau

SEQ ID NO: 2408364 - RNA, 19 nt, Homo sapiens
  misc_RNA (1)...(19): siRNA sense strand
gcucaugaagaaggagaau

SEQ ID NO: 2408365 - RNA, 19 nt, Homo sapiens
  misc_RNA (1)...(19): siRNA sense strand
ggagagaacuagaucaagc

SEQ ID NO: 2408366 - RNA, 19 nt, Homo sapiens
  misc_RNA (1)...(19): siRNA sense strand
gggaagggguguuuggcga

SEQ ID NO: 2408367 - RNA, 19 nt, Homo sapiens
  misc_RNA (1)...(19): siRNA sense strand
gggccaaaagcugggaaaa

SEQ ID NO: 2408368 - RNA, 19 nt, Homo sapiens
  misc_RNA (1)...(19): siRNA sense strand
ggcucaugaagaaggagaa

SEQ ID NO: 2408369 - RNA, 19 nt, Homo sapiens
  misc_RNA (1)...(19): siRNA sense strand
ccugacuccuuuacagaau

SEQ ID NO: 2408370 - RNA, 19 nt, Homo sapiens
  misc_RNA (1)...(19): siRNA sense strand
gcuuggaacgggaugggau

SEQ ID NO: 2408371 - RNA, 19 nt, Homo sapiens
  misc_RNA (1)...(19): siRNA sense strand
ccauaaaauucuaggagau

SEQ ID NO: 2408372 - RNA, 19 nt, Homo sapiens
  misc_RNA (1)...(19): siRNA sense strand
ggacguuggugguuggcua

SEQ ID NO: 2408373 - RNA, 19 nt, Homo sapiens
  misc_RNA (1)...(19): siRNA sense strand
uuggagaagauguuagaua

SEQ ID NO: 2408374 - RNA, 19 nt, Homo sapiens
  misc_RNA (1)...(19): siRNA sense strand
guacuagaacuuugggaca

SEQ ID NO: 2408375 - RNA, 19 nt, Homo sapiens
  misc_RNA (1)...(19): siRNA sense strand
acuuuggaguuguggauuu

SEQ ID NO: 2408376 - RNA, 19 nt, Homo sapiens
  misc_RNA (1)...(19): siRNA sense strand
guggcugacacaaggguua

SEQ ID NO: 2408377 - RNA, 19 nt, Homo sapiens
  misc_RNA (1)...(19): siRNA sense strand
uaggagauaaggugaacaa

SEQ ID NO: 2408378 - RNA, 19 nt, Homo sapiens
  misc_RNA (1)...(19): siRNA sense strand
uggcuaaauaagaagauga

SEQ ID NO: 2408379 - RNA, 19 nt, Homo sapiens
  misc_RNA (1)...(19): siRNA sense strand
gauugaagucacaaguaau

SEQ ID NO: 2408380 - RNA, 19 nt, Homo sapiens
  misc_RNA (1)...(19): siRNA sense strand
cggcuaacaacguguauca

SEQ ID NO: 2408381 - RNA, 19 nt, Homo sapiens
  misc_RNA (1)...(19): siRNA sense strand
gggcagaguuaccagggca

SEQ ID NO: 2408382 - RNA, 19 nt, Homo sapiens
  misc_RNA (1)...(19): siRNA sense strand
ucacgagaacauugagaca

SEQ ID NO: 2408383 - RNA, 19 nt, Homo sapiens
  misc_RNA (1)...(19): siRNA sense strand
cuggcuggcucauggagaa

SEQ ID NO: 2408384 - RNA, 19 nt, Homo sapiens
  misc_RNA (1)...(19): siRNA sense strand
cuggaaggcacaaaggaca

SEQ ID NO: 2408385 - RNA, 19 nt, Homo sapiens
  misc_RNA (1)...(19): siRNA sense strand
ggguuaggaugcaaggcca

SEQ ID NO: 2408386 - RNA, 19 nt, Homo sapiens
  misc_RNA (1)...(19): siRNA sense strand
aagaagaaaacuagugaca

SEQ ID NO: 2408387 - RNA, 19 nt, Homo sapiens
  misc_RNA (1)...(19): siRNA sense strand
ggcuaaauaagaagaugau

SEQ ID NO: 2408388 - RNA, 19 nt, Homo sapiens
  misc_RNA (1)...(19): siRNA sense strand
guuccagugaugaguacua

SEQ ID NO: 2408389 - RNA, 19 nt, Homo sapiens
  misc_RNA (1)...(19): siRNA sense strand
ggcacaaaggacagaaguu

SEQ ID NO: 2408390 - RNA, 19 nt, Homo sapiens
  misc_RNA (1)...(19): siRNA sense strand
guucuugaccuguggcuga

SEQ ID NO: 2408391 - RNA, 19 nt, Homo sapiens
  misc_RNA (1)...(19): siRNA sense strand
augcaagcacugaacgcua

SEQ ID NO: 2408392 - RNA, 19 nt, Homo sapiens
  misc_RNA (1)...(19): siRNA sense strand
gguuaggaugcaaggccau

SEQ ID NO: 2408393 - RNA, 19 nt, Homo sapiens
  misc_RNA (1)...(19): siRNA sense strand
gguuggagaagauguuaga

SEQ ID NO: 2408394 - RNA, 19 nt, Homo sapiens
  misc_RNA (1)...(19): siRNA sense strand
agguacaucaagagagugu

SEQ ID NO: 2408395 - RNA, 19 nt, Homo sapiens
  misc_RNA (1)...(19): siRNA sense strand
cagaauagcuggcugggag

SEQ ID NO: 2408396 - RNA, 19 nt, Homo sapiens
  misc_RNA (1)...(19): siRNA sense strand
gagaagaggcucagcgaga

SEQ ID NO: 2408397 - RNA, 19 nt, Homo sapiens
  misc_RNA (1)...(19): siRNA sense strand
aggaagagcggcagggcaa

SEQ ID NO: 2408398 - RNA, 19 nt, Homo sapiens
  misc_RNA (1)...(19): siRNA sense strand
ggaagcaucuggugagcga

SEQ ID NO: 2408399 - RNA, 19 nt, Homo sapiens
  misc_RNA (1)...(19): siRNA sense strand
agacagaggagcuggggaa

SEQ ID NO: 2408400 - RNA, 19 nt, Homo sapiens
  misc_RNA (1)...(19): siRNA sense strand
ggcucuaggaagugggauu

SEQ ID NO: 2408401 - RNA, 19 nt, Homo sapiens
  misc_RNA (1)...(19): siRNA sense strand
cugaaggaccagagaggga

SEQ ID NO: 2408402 - RNA, 19 nt, Homo sapiens
  misc_RNA (1)...(19): siRNA sense strand
ccaaaugagcaaugcggau

SEQ ID NO: 2408403 - RNA, 19 nt, Homo sapiens
  misc_RNA (1)...(19): siRNA sense strand
gugaaaucguugaggacac

SEQ ID NO: 2408404 - RNA, 19 nt, Homo sapiens
  misc_RNA (1)...(19): siRNA sense strand
gaggaaagauggcacggau

SEQ ID NO: 2408405 - RNA, 19 nt, Homo sapiens
  misc_RNA (1)...(19): siRNA sense strand
ggaccaaggcauagagagc

SEQ ID NO: 2408406 - RNA, 19 nt, Homo sapiens
  misc_RNA (1)...(19): siRNA sense strand
aggcauagagagccaggaa

SEQ ID NO: 2408407 - RNA, 19 nt, Homo sapiens
  misc_RNA (1)...(19): siRNA sense strand
aggcgaaggugacggagga

SEQ ID NO: 2408408 - RNA, 19 nt, Homo sapiens
  misc_RNA (1)...(19): siRNA sense strand
aggcucagcgagagggaga

SEQ ID NO: 2408409 - RNA, 19 nt, Homo sapiens
  misc_RNA (1)...(19): siRNA sense strand
cgcaggagcucuuccgcaa

SEQ ID NO: 2408410 - RNA, 19 nt, Homo sapiens
  misc_RNA (1)...(19): siRNA sense strand
uugaugaccaaaugagcaa

SEQ ID NO: 2408411 - RNA, 19 nt, Homo sapiens
  misc_RNA (1)...(19): siRNA sense strand
acuacgucaucaaggagaa

SEQ ID NO: 2408412 - RNA, 19 nt, Homo sapiens
  misc_RNA (1)...(19): siRNA sense strand
agaagaugaagaagcgcau

SEQ ID NO: 2408413 - RNA, 19 nt, Homo sapiens
  misc_RNA (1)...(19): siRNA sense strand
gaaauaaugcaaagagagc

SEQ ID NO: 2408414 - RNA, 19 nt, Homo sapiens
  misc_RNA (1)...(19): siRNA sense strand
ggaugguuaagaagaugaa

SEQ ID NO: 2408415 - RNA, 19 nt, Homo sapiens
  misc_RNA (1)...(19): siRNA sense strand
ggaaauaaugcaaagagag

SEQ ID NO: 2408416 - RNA, 19 nt, Homo sapiens
  misc_RNA (1)...(19): siRNA sense strand
gagaagagcuccauccaug

SEQ ID NO: 2408417 - RNA, 19 nt, Homo sapiens
  misc_RNA (1)...(19): siRNA sense strand
gggccaaggcucuaggaag

SEQ ID NO: 2408418 - RNA, 19 nt, Homo sapiens
  misc_RNA (1)...(19): siRNA sense strand
gggaccugcugaaggacca

SEQ ID NO: 2408419 - RNA, 19 nt, Homo sapiens
  misc_RNA (1)...(19): siRNA sense strand
cugcaugacaauagacaaa

SEQ ID NO: 2408420 - RNA, 19 nt, Homo sapiens
  misc_RNA (1)...(19): siRNA sense strand
gcuaaaagucaauggagaa

SEQ ID NO: 2408421 - RNA, 19 nt, Homo sapiens
  misc_RNA (1)...(19): siRNA sense strand
gguauuggcaaaaggaaaa

SEQ ID NO: 2408422 - RNA, 19 nt, Homo sapiens
  misc_RNA (1)...(19): siRNA sense strand
gaucaauacuggaacagca

SEQ ID NO: 2408423 - RNA, 19 nt, Homo sapiens
  misc_RNA (1)...(19): siRNA sense strand
gggcaacagaggugaaacu

SEQ ID NO: 2408424 - RNA, 19 nt, Homo sapiens
  misc_RNA (1)...(19): siRNA sense strand
aggugaaacuacugggcca

SEQ ID NO: 2408425 - RNA, 19 nt, Homo sapiens
  misc_RNA (1)...(19): siRNA sense strand
agucaauggagaagcuauu

SEQ ID NO: 2408426 - RNA, 19 nt, Homo sapiens
  misc_RNA (1)...(19): siRNA sense strand
acauccaagccuaaagaaa

SEQ ID NO: 2408427 - RNA, 19 nt, Homo sapiens
  misc_RNA (1)...(19): siRNA sense strand
ucagaauauucguggaacu

SEQ ID NO: 2408428 - RNA, 19 nt, Homo sapiens
  misc_RNA (1)...(19): siRNA sense strand
ggcuaaaagucaauggaga

SEQ ID NO: 2408429 - RNA, 19 nt, Homo sapiens
  misc_RNA (1)...(19): siRNA sense strand
aagaauuggugaagcaacu

SEQ ID NO: 2408430 - RNA, 19 nt, Homo sapiens
  misc_RNA (1)...(19): siRNA sense strand
ugggaaaacugcaugacaa

SEQ ID NO: 2408431 - RNA, 19 nt, Homo sapiens
  misc_RNA (1)...(19): siRNA sense strand
gggaaaacugcaugacaau

SEQ ID NO: 2408432 - RNA, 19 nt, Homo sapiens
  misc_RNA (1)...(19): siRNA sense strand
ccaaacaucaugaaggcuu

SEQ ID NO: 2408433 - RNA, 19 nt, Homo sapiens
  misc_RNA (1)...(19): siRNA sense strand
ugguauuggcaaaaggaaa

SEQ ID NO: 2408434 - RNA, 19 nt, Homo sapiens
  misc_RNA (1)...(19): siRNA sense strand
ccggaucaauacuggaaca

SEQ ID NO: 2408435 - RNA, 19 nt, Homo sapiens
  misc_RNA (1)...(19): siRNA sense strand
ggauggugacggaggagca

SEQ ID NO: 2408436 - RNA, 19 nt, Homo sapiens
  misc_RNA (1)...(19): siRNA sense strand
gguacacauccaagccuaa

SEQ ID NO: 2408437 - RNA, 19 nt, Homo sapiens
  misc_RNA (1)...(19): siRNA sense strand
uaccgaaguauguggaauu

SEQ ID NO: 2408438 - RNA, 19 nt, Homo sapiens
  misc_RNA (1)...(19): siRNA sense strand
gaauauucguggaacugga

SEQ ID NO: 2408439 - RNA, 19 nt, Homo sapiens
  misc_RNA (1)...(19): siRNA sense strand
uggaaaaggaugaggaaga

SEQ ID NO: 2408440 - RNA, 19 nt, Homo sapiens
  misc_RNA (1)...(19): siRNA sense strand
aggaacucaucuuggacaa

SEQ ID NO: 2408441 - RNA, 19 nt, Homo sapiens
  misc_RNA (1)...(19): siRNA sense strand
aggaugaggaagacuacaa

SEQ ID NO: 2408442 - RNA, 19 nt, Homo sapiens
  misc_RNA (1)...(19): siRNA sense strand
ugaagguggugaagcccaa

SEQ ID NO: 2408443 - RNA, 19 nt, Homo sapiens
  misc_RNA (1)...(19): siRNA sense strand
gcaacagguuuauccgaga

SEQ ID NO: 2408444 - RNA, 19 nt, Homo sapiens
  misc_RNA (1)...(19): siRNA sense strand
cuggaaggacugagcgcau

SEQ ID NO: 2408445 - RNA, 19 nt, Homo sapiens
  misc_RNA (1)...(19): siRNA sense strand
ccuuguguugccaggguua

SEQ ID NO: 2408446 - RNA, 19 nt, Homo sapiens
  misc_RNA (1)...(19): siRNA sense strand
cgagaggaggcguugguca

SEQ ID NO: 2408447 - RNA, 19 nt, Homo sapiens
  misc_RNA (1)...(19): siRNA sense strand
cugcauaccuuaacccuca

SEQ ID NO: 2408448 - RNA, 19 nt, Homo sapiens
  misc_RNA (1)...(19): siRNA sense strand
cagacaagaacgagaggag

SEQ ID NO: 2408449 - RNA, 19 nt, Homo sapiens
  misc_RNA (1)...(19): siRNA sense strand
cgaacaacugaaagaacaa

SEQ ID NO: 2408450 - RNA, 19 nt, Homo sapiens
  misc_RNA (1)...(19): siRNA sense strand
acugaaagcaaucgaacaa

SEQ ID NO: 2408451 - RNA, 19 nt, Homo sapiens
  misc_RNA (1)...(19): siRNA sense strand
ccuaaagaagaaacugaaa

SEQ ID NO: 2408452 - RNA, 19 nt, Homo sapiens
  misc_RNA (1)...(19): siRNA sense strand
ccaaauugcaugaagagga

SEQ ID NO: 2408453 - RNA, 19 nt, Homo sapiens
  misc_RNA (1)...(19): siRNA sense strand
caaucgaacaacugaaaga

SEQ ID NO: 2408454 - RNA, 19 nt, Homo sapiens
  misc_RNA (1)...(19): siRNA sense strand
uggagaaaauucagaaaga

SEQ ID NO: 2408455 - RNA, 19 nt, Homo sapiens
  misc_RNA (1)...(19): siRNA sense strand
gggacauguuugaaaucuu

SEQ ID NO: 2408456 - RNA, 19 nt, Homo sapiens
  misc_RNA (1)...(19): siRNA sense strand
ggucagaagaugaaacucu

SEQ ID NO: 2408457 - RNA, 19 nt, Homo sapiens
  misc_RNA (1)...(19): siRNA sense strand
caggaaacgauaagccauu

SEQ ID NO: 2408458 - RNA, 19 nt, Homo sapiens
  misc_RNA (1)...(19): siRNA sense strand
ccgcaauguuaacaaugaa

SEQ ID NO: 2408459 - RNA, 19 nt, Homo sapiens
  misc_RNA (1)...(19): siRNA sense strand
cuggaaaacagcuagaaaa

SEQ ID NO: 2408460 - RNA, 19 nt, Homo sapiens
  misc_RNA (1)...(19): siRNA sense strand
gaucagaaggacuguacau

SEQ ID NO: 2408461 - RNA, 19 nt, Homo sapiens
  misc_RNA (1)...(19): siRNA sense strand
aagauuuggaauuggguau

SEQ ID NO: 2408462 - RNA, 19 nt, Homo sapiens
  misc_RNA (1)...(19): siRNA sense strand
ggacccugagauagacaaa

SEQ ID NO: 2408463 - RNA, 19 nt, Homo sapiens
  misc_RNA (1)...(19): siRNA sense strand
cuugacaguccgaggauca

SEQ ID NO: 2408464 - RNA, 19 nt, Homo sapiens
  misc_RNA (1)...(19): siRNA sense strand
agauggcacagcugggaua

SEQ ID NO: 2408465 - RNA, 19 nt, Homo sapiens
  misc_RNA (1)...(19): siRNA sense strand
agaaauaaaccaaucacca

SEQ ID NO: 2408466 - RNA, 19 nt, Homo sapiens
  misc_RNA (1)...(19): siRNA sense strand
ccaccacauuuuacagaaa

SEQ ID NO: 2408467 - RNA, 19 nt, Homo sapiens
  misc_RNA (1)...(19): siRNA sense strand
ugcaacaaauggagaaagu

SEQ ID NO: 2408468 - RNA, 19 nt, Homo sapiens
  misc_RNA (1)...(19): siRNA sense strand
gcuucugauucuacauauu

SEQ ID NO: 2408469 - RNA, 19 nt, Homo sapiens
  misc_RNA (1)...(19): siRNA sense strand
aggcagauaaaguuacaau

SEQ ID NO: 2408470 - RNA, 19 nt, Homo sapiens
  misc_RNA (1)...(19): siRNA sense strand
cuguagugcaauuaccaaa

SEQ ID NO: 2408471 - RNA, 19 nt, Homo sapiens
  misc_RNA (1)...(19): siRNA sense strand
auuccaaauugcaugaaga

SEQ ID NO: 2408472 - RNA, 19 nt, Homo sapiens
  misc_RNA (1)...(19): siRNA sense strand
gcacaguguuuccaaggga

SEQ ID NO: 2408473 - RNA, 19 nt, Homo sapiens
  misc_RNA (1)...(19): siRNA sense strand
acaagcagcaacuggaaaa

SEQ ID NO: 2408474 - RNA, 19 nt, Homo sapiens
  misc_RNA (1)...(19): siRNA sense strand
gcuacugcuguguugguaa

SEQ ID NO: 2408475 - RNA, 19 nt, Homo sapiens
  misc_RNA (1)...(19): siRNA sense strand
aaauggagaaagugcugua

SEQ ID NO: 2408476 - RNA, 19 nt, Homo sapiens
  misc_RNA (1)...(19): siRNA sense strand
cuauagcccucauggacau

SEQ ID NO: 2408477 - RNA, 19 nt, Homo sapiens
  misc_RNA (1)...(19): siRNA sense strand
gacaaauggaaguguggga

SEQ ID NO: 2408478 - RNA, 19 nt, Homo sapiens
  misc_RNA (1)...(19): siRNA sense strand
aggaaccaccucagaauau

SEQ ID NO: 2408479 - RNA, 19 nt, Homo sapiens
  misc_RNA (1)...(19): siRNA sense strand
cagaauaugaaaccacaau

SEQ ID NO: 2408480 - RNA, 19 nt, Homo sapiens
  misc_RNA (1)...(19): siRNA sense strand
aucaagaaccuaaagaaga

SEQ ID NO: 2408481 - RNA, 19 nt, Homo sapiens
  misc_RNA (1)...(19): siRNA sense strand
agcuggaagauuuggaauu

SEQ ID NO: 2408482 - RNA, 19 nt, Homo sapiens
  misc_RNA (1)...(19): siRNA sense strand
cuaagaaagcugcaaagca

SEQ ID NO: 2408483 - RNA, 19 nt, Homo sapiens
  misc_RNA (1)...(19): siRNA sense strand
caggaagcaagaagugaca

SEQ ID NO: 2408484 - RNA, 19 nt, Homo sapiens
  misc_RNA (1)...(19): siRNA sense strand
acuuaaaggaguugcuaaa

SEQ ID NO: 2408485 - RNA, 19 nt, Homo sapiens
  misc_RNA (1)...(19): siRNA sense strand
aagucaauuccuagugaaa

SEQ ID NO: 2408486 - RNA, 19 nt, Homo sapiens
  misc_RNA (1)...(19): siRNA sense strand
uaugauuacagguggaaau

SEQ ID NO: 2408487 - RNA, 19 nt, Homo sapiens
  misc_RNA (1)...(19): siRNA sense strand
guuugaacugucagaacaa

SEQ ID NO: 2408488 - RNA, 19 nt, Homo sapiens
  misc_RNA (1)...(19): siRNA sense strand
aguuguggcaauaggagaa

SEQ ID NO: 2408489 - RNA, 19 nt, Homo sapiens
  misc_RNA (1)...(19): siRNA sense strand
acugaaaacugaagcuaau

SEQ ID NO: 2408490 - RNA, 19 nt, Homo sapiens
  misc_RNA (1)...(19): siRNA sense strand
guuuaugauuacaggugga

SEQ ID NO: 2408491 - RNA, 19 nt, Homo sapiens
  misc_RNA (1)...(19): siRNA sense strand
cccuauguucagaggaauu

SEQ ID NO: 2408492 - RNA, 19 nt, Homo sapiens
  misc_RNA (1)...(19): siRNA sense strand
caguacaguuggaugucau

SEQ ID NO: 2408493 - RNA, 19 nt, Homo sapiens
  misc_RNA (1)...(19): siRNA sense strand
acaggauguaauagggaga

SEQ ID NO: 2408494 - RNA, 19 nt, Homo sapiens
  misc_RNA (1)...(19): siRNA sense strand
cugaaaacaauaaagggaa

SEQ ID NO: 2408495 - RNA, 19 nt, Homo sapiens
  misc_RNA (1)...(19): siRNA sense strand
uggcacaaacaaaugguau

SEQ ID NO: 2408496 - RNA, 19 nt, Homo sapiens
  misc_RNA (1)...(19): siRNA sense strand
gcugaaaacaauaaaggga

SEQ ID NO: 2408497 - RNA, 19 nt, Homo sapiens
  misc_RNA (1)...(19): siRNA sense strand
agcaaggacaggagggaga

SEQ ID NO: 2408498 - RNA, 19 nt, Homo sapiens
  misc_RNA (1)...(19): siRNA sense strand
ccuaggaaccauugggcca

SEQ ID NO: 2408499 - RNA, 19 nt, Homo sapiens
  misc_RNA (1)...(19): siRNA sense strand
cuggagaacaagugccuuu

SEQ ID NO: 2408500 - RNA, 19 nt, Homo sapiens
  misc_RNA (1)...(19): siRNA sense strand
agaaacaacuccagcugca

SEQ ID NO: 2408501 - RNA, 19 nt, Homo sapiens
  misc_RNA (1)...(19): siRNA sense strand
aggagggagaugacaacua

SEQ ID NO: 2408502 - RNA, 19 nt, Homo sapiens
  misc_RNA (1)...(19): siRNA sense strand
ggaccuagaugcugccacu

SEQ ID NO: 2408503 - RNA, 19 nt, Homo sapiens
  misc_RNA (1)...(19): siRNA sense strand
ccaccuucaaagagcagaa

SEQ ID NO: 2408504 - RNA, 19 nt, Homo sapiens
  misc_RNA (1)...(19): siRNA sense strand
ccuuaauucagaugacaca

SEQ ID NO: 2408505 - RNA, 19 nt, Homo sapiens
  misc_RNA (1)...(19): siRNA sense strand
gcuagagccagcaaggaca

SEQ ID NO: 2408506 - RNA, 19 nt, Homo sapiens
  misc_RNA (1)...(19): siRNA sense strand
gcugauaggccaagggagg

SEQ ID NO: 2408507 - RNA, 19 nt, Homo sapiens
  misc_RNA (1)...(19): siRNA sense strand
gcauguggaccuugggaac

SEQ ID NO: 2408508 - RNA, 19 nt, Homo sapiens
  misc_RNA (1)...(19): siRNA sense strand
caagcaacacugagccaga

SEQ ID NO: 2408509 - RNA, 19 nt, Homo sapiens
  misc_RNA (1)...(19): siRNA sense strand
gcagauguguggaucacca

SEQ ID NO: 2408510 - RNA, 19 nt, Homo sapiens
  misc_RNA (1)...(19): siRNA sense strand
uguugauacugguuguaaa

SEQ ID NO: 2408511 - RNA, 19 nt, Homo sapiens
  misc_RNA (1)...(19): siRNA sense strand
gcauugggcucauggggaa

SEQ ID NO: 2408512 - RNA, 19 nt, Homo sapiens
  misc_RNA (1)...(19): siRNA sense strand
ugucauuccaagugggcau

SEQ ID NO: 2408513 - RNA, 19 nt, Homo sapiens
  misc_RNA (1)...(19): siRNA sense strand
auguaugagaacagccuaa

SEQ ID NO: 2408514 - RNA, 19 nt, Homo sapiens
  misc_RNA (1)...(19): siRNA sense strand
cuaaucaauauguggguca

SEQ ID NO: 2408515 - RNA, 19 nt, Homo sapiens
  misc_RNA (1)...(19): siRNA sense strand
augucauccuucagacuua

SEQ ID NO: 2408516 - RNA, 19 nt, Homo sapiens
  misc_RNA (1)...(19): siRNA sense strand
gugacacaacacugggaau

SEQ ID NO: 2408517 - RNA, 19 nt, Homo sapiens
  misc_RNA (1)...(19): siRNA sense strand
uuccuaaacaacaggcuaa

SEQ ID NO: 2408518 - RNA, 19 nt, Homo sapiens
  misc_RNA (1)...(19): siRNA sense strand
gugaagacgaagaggucga

SEQ ID NO: 2408519 - RNA, 19 nt, Homo sapiens
  misc_RNA (1)...(19): siRNA sense strand
agcugaaauugaugaagaa

SEQ ID NO: 2408520 - RNA, 19 nt, Homo sapiens
  misc_RNA (1)...(19): siRNA sense strand
aauucaaaguucaagguga

SEQ ID NO: 2408521 - RNA, 19 nt, Homo sapiens
  misc_RNA (1)...(19): siRNA sense strand
ggucgaugaaacaggugua

SEQ ID NO: 2408522 - RNA, 19 nt, Homo sapiens
  misc_RNA (1)...(19): siRNA sense strand
aagaaggcacggaaggcua

SEQ ID NO: 2408523 - RNA, 19 nt, Homo sapiens
  misc_RNA (1)...(19): siRNA sense strand
agucaguaccagagcuuga

SEQ ID NO: 2408524 - RNA, 19 nt, Homo sapiens
  misc_RNA (1)...(19): siRNA sense strand
gucucaaacauucaagaaa

SEQ ID NO: 2408525 - RNA, 19 nt, Homo sapiens
  misc_RNA (1)...(19): siRNA sense strand
gugaaaagaaggcacggaa

SEQ ID NO: 2408526 - RNA, 19 nt, Homo sapiens
  misc_RNA (1)...(19): siRNA sense strand
augaaacagguguagaaau

SEQ ID NO: 2408527 - RNA, 19 nt, Homo sapiens
  misc_RNA (1)...(19): siRNA sense strand
aagcggaagcagagagaaa

SEQ ID NO: 2408528 - RNA, 19 nt, Homo sapiens
  misc_RNA (1)...(19): siRNA sense strand
gcagauaaaauuugggaaa

SEQ ID NO: 2408529 - RNA, 19 nt, Homo sapiens
  misc_RNA (1)...(19): siRNA sense strand
ucucaauaguggagcagaa

SEQ ID NO: 2408530 - RNA, 19 nt, Homo sapiens
  misc_RNA (1)...(19): siRNA sense strand
caauaguggagcagaagaa

SEQ ID NO: 2408531 - RNA, 19 nt, Homo sapiens
  misc_RNA (1)...(19): siRNA sense strand
ugucaagauuggagaggga

SEQ ID NO: 2408532 - RNA, 19 nt, Homo sapiens
  misc_RNA (1)...(19): siRNA sense strand
ccacagaguaacagaggga

SEQ ID NO: 2408533 - RNA, 19 nt, Homo sapiens
  misc_RNA (1)...(19): siRNA sense strand
ggugaaggacuuugaggau

SEQ ID NO: 2408534 - RNA, 19 nt, Homo sapiens
  misc_RNA (1)...(19): siRNA sense strand
ugauaaaagcagagacuga

SEQ ID NO: 2408535 - RNA, 19 nt, Homo sapiens
  misc_RNA (1)...(19): siRNA sense strand
cagaaaucacagaugaaga

SEQ ID NO: 2408536 - RNA, 19 nt, Homo sapiens
  misc_RNA (1)...(19): siRNA sense strand
ccacaguagaccaggggaa

SEQ ID NO: 2408537 - RNA, 19 nt, Homo sapiens
  misc_RNA (1)...(19): siRNA sense strand
ccaagaacugagacagaca

SEQ ID NO: 2408538 - RNA, 19 nt, Homo sapiens
  misc_RNA (1)...(19): siRNA sense strand
ucaagauuggagagggaau

SEQ ID NO: 2408539 - RNA, 19 nt, Homo sapiens
  misc_RNA (1)...(19): siRNA sense strand
gcugaggcuaacugcgaaa

SEQ ID NO: 2408540 - RNA, 19 nt, Homo sapiens
  misc_RNA (1)...(19): siRNA sense strand
aagcagagacugagcgaag

SEQ ID NO: 2408541 - RNA, 19 nt, Homo sapiens
  misc_RNA (1)...(19): siRNA sense strand
gacggagagcugaggcuaa

SEQ ID NO: 2408542 - RNA, 19 nt, Homo sapiens
  misc_RNA (1)...(19): siRNA sense strand
agccaagaacugagacaga

SEQ ID NO: 2408543 - RNA, 19 nt, Homo sapiens
  misc_RNA (1)...(19): siRNA sense strand
ccauguggaaagcagauaa

SEQ ID NO: 2408544 - RNA, 19 nt, Homo sapiens
  misc_RNA (1)...(19): siRNA sense strand
cuuuauggaagcagcagaa

SEQ ID NO: 2408545 - RNA, 19 nt, Homo sapiens
  misc_RNA (1)...(19): siRNA sense strand
agaugaagacaacagcaua

SEQ ID NO: 2408546 - RNA, 19 nt, Homo sapiens
  misc_RNA (1)...(19): siRNA sense strand
ucucaaggaaggaaacgaa

SEQ ID NO: 2408547 - RNA, 19 nt, Homo sapiens
  misc_RNA (1)...(19): siRNA sense strand
caauuuauccaguugguga

SEQ ID NO: 2408548 - RNA, 19 nt, Homo sapiens
  misc_RNA (1)...(19): siRNA sense strand
cagaugaagacaacagcau

SEQ ID NO: 2408549 - RNA, 19 nt, Homo sapiens
  misc_RNA (1)...(19): siRNA sense strand
cagcaaaguggaugauauc

SEQ ID NO: 2408550 - RNA, 19 nt, Homo sapiens
  misc_RNA (1)...(19): siRNA sense strand
cauguggaaagcagauaaa

SEQ ID NO: 2408551 - RNA, 19 nt, Homo sapiens
  misc_RNA (1)...(19): siRNA sense strand
cauccaacggagacggaga

SEQ ID NO: 2408552 - RNA, 19 nt, Homo sapiens
  misc_RNA (1)...(19): siRNA sense strand
agcagaaaucacagaugaa

SEQ ID NO: 2408553 - RNA, 19 nt, Homo sapiens
  misc_RNA (1)...(19): siRNA sense strand
ggagccaagaacugagaca

SEQ ID NO: 2408554 - RNA, 19 nt, Homo sapiens
  misc_RNA (1)...(19): siRNA sense strand
ugggcacgccacagaguaa

SEQ ID NO: 2408555 - RNA, 19 nt, Homo sapiens
  misc_RNA (1)...(19): siRNA sense strand
agauucagcugauuggaga

SEQ ID NO: 2408556 - RNA, 19 nt, Homo sapiens
  misc_RNA (1)...(19): siRNA sense strand
gagauguuccugugugaca

SEQ ID NO: 2408557 - RNA, 19 nt, Homo sapiens
  misc_RNA (1)...(19): siRNA sense strand
aagagaaauuccucagagu

SEQ ID NO: 2408558 - RNA, 19 nt, Homo sapiens
  misc_RNA (1)...(19): siRNA sense strand
agucuuuggcucuacaaua

SEQ ID NO: 2408559 - RNA, 19 nt, Homo sapiens
  misc_RNA (1)...(19): siRNA sense strand
uaguggagcagaagaacau

SEQ ID NO: 2408560 - RNA, 19 nt, Homo sapiens
  misc_RNA (1)...(19): siRNA sense strand
augaauccauaguugcaaa

SEQ ID NO: 2408561 - RNA, 19 nt, Homo sapiens
  misc_RNA (1)...(19): siRNA sense strand
accaggagccaaaggaaaa

SEQ ID NO: 2408562 - RNA, 19 nt, Homo sapiens
  misc_RNA (1)...(19): siRNA sense strand
caacggagacggagagcug

SEQ ID NO: 2408563 - RNA, 19 nt, Homo sapiens
  misc_RNA (1)...(19): siRNA sense strand
agacagacaaugugggcac

SEQ ID NO: 2408564 - RNA, 19 nt, Homo sapiens
  misc_RNA (1)...(19): siRNA sense strand
agggaaugcuggccgacuu

SEQ ID NO: 2408565 - RNA, 19 nt, Homo sapiens
  misc_RNA (1)...(19): siRNA sense strand
uguugugcauuguguaaau

SEQ ID NO: 2408566 - RNA, 19 nt, Homo sapiens
  misc_RNA (1)...(19): siRNA sense strand
augaggaggccaagggcaa

SEQ ID NO: 2408567 - RNA, 19 nt, Homo sapiens
  misc_RNA (1)...(19): siRNA sense strand
gugaagacgaagagcacca

SEQ ID NO: 2408568 - RNA, 19 nt, Homo sapiens
  misc_RNA (1)...(19): siRNA sense strand
ccuauguggaggacggcaa

SEQ ID NO: 2408569 - RNA, 19 nt, Homo sapiens
  misc_RNA (1)...(19): siRNA sense strand
gggucacaccugucaacaa

SEQ ID NO: 2408570 - RNA, 19 nt, Homo sapiens
  misc_RNA (1)...(19): siRNA sense strand
gagugaagacgaagagcac

SEQ ID NO: 2408571 - RNA, 19 nt, Homo sapiens
  misc_RNA (1)...(19): siRNA sense strand
cgagugaagacgaagagca

SEQ ID NO: 2408572 - RNA, 19 nt, Homo sapiens
  misc_RNA (1)...(19): siRNA sense strand
ccaucagccuggaaggugu

SEQ ID NO: 2408573 - RNA, 19 nt, Homo sapiens
  misc_RNA (1)...(19): siRNA sense strand
cugaggaggaggagcccau

SEQ ID NO: 2408574 - RNA, 19 nt, Homo sapiens
  misc_RNA (1)...(19): siRNA sense strand
gggaaaucgagaugagcaa

SEQ ID NO: 2408575 - RNA, 19 nt, Homo sapiens
  misc_RNA (1)...(19): siRNA sense strand
aaaacaaggcugugggcaa

SEQ ID NO: 2408576 - RNA, 19 nt, Homo sapiens
  misc_RNA (1)...(19): siRNA sense strand
ugauggcauuauugggaaa

SEQ ID NO: 2408577 - RNA, 19 nt, Homo sapiens
  misc_RNA (1)...(19): siRNA sense strand
gggccaucgacgugcagaa

SEQ ID NO: 2408578 - RNA, 19 nt, Homo sapiens
  misc_RNA (1)...(19): siRNA sense strand
cacaggagguccagggcuu

SEQ ID NO: 2408579 - RNA, 19 nt, Homo sapiens
  misc_RNA (1)...(19): siRNA sense strand
cgucaagggcacgguuaaa

SEQ ID NO: 2408580 - RNA, 19 nt, Homo sapiens
  misc_RNA (1)...(19): siRNA sense strand
cggagaacaggcuggugaa

SEQ ID NO: 2408581 - RNA, 19 nt, Homo sapiens
  misc_RNA (1)...(19): siRNA sense strand
cugacaacaaugagcccaa

SEQ ID NO: 2408582 - RNA, 19 nt, Homo sapiens
  misc_RNA (1)...(19): siRNA sense strand
gugaaggagacgcggcuga

SEQ ID NO: 2408583 - RNA, 19 nt, Homo sapiens
  misc_RNA (1)...(19): siRNA sense strand
ccuuggugcaucagagaca

SEQ ID NO: 2408584 - RNA, 19 nt, Homo sapiens
  misc_RNA (1)...(19): siRNA sense strand
ggucgacggaggagaucau

SEQ ID NO: 2408585 - RNA, 19 nt, Homo sapiens
  misc_RNA (1)...(19): siRNA sense strand
ccuuaguggaggagcgugu

SEQ ID NO: 2408586 - RNA, 19 nt, Homo sapiens
  misc_RNA (1)...(19): siRNA sense strand
ccggagaacaggcugguga

SEQ ID NO: 2408587 - RNA, 19 nt, Homo sapiens
  misc_RNA (1)...(19): siRNA sense strand
auggauacuucgaggauuc

SEQ ID NO: 2408588 - RNA, 19 nt, Homo sapiens
  misc_RNA (1)...(19): siRNA sense strand
cggccaccucccuggauaa

SEQ ID NO: 2408589 - RNA, 19 nt, Homo sapiens
  misc_RNA (1)...(19): siRNA sense strand
cgguuaaaaucuucuggaa

SEQ ID NO: 2408590 - RNA, 19 nt, Homo sapiens
  misc_RNA (1)...(19): siRNA sense strand
cgauugugaacgugaagga

SEQ ID NO: 2408591 - RNA, 19 nt, Homo sapiens
  misc_RNA (1)...(19): siRNA sense strand
gggaaagagaagcgguugu

SEQ ID NO: 2408592 - RNA, 19 nt, Homo sapiens
  misc_RNA (1)...(19): siRNA sense strand
cuaaagaagaugaggcaag

SEQ ID NO: 2408593 - RNA, 19 nt, Homo sapiens
  misc_RNA (1)...(19): siRNA sense strand
ggcuaaagaagaugaggca

SEQ ID NO: 2408594 - RNA, 19 nt, Homo sapiens
  misc_RNA (1)...(19): siRNA sense strand
cacucaagucagagaaaca

SEQ ID NO: 2408595 - RNA, 19 nt, Homo sapiens
  misc_RNA (1)...(19): siRNA sense strand
agaugaggcaagagaaaau

SEQ ID NO: 2408596 - RNA, 19 nt, Homo sapiens
  misc_RNA (1)...(19): siRNA sense strand
ccauagcagccaagaugau

SEQ ID NO: 2408597 - RNA, 19 nt, Homo sapiens
  misc_RNA (1)...(19): siRNA sense strand
agaagaugaggcaagagaa

SEQ ID NO: 2408598 - RNA, 19 nt, Homo sapiens
  misc_RNA (1)...(19): siRNA sense strand
gcuaaagaagaugaggcaa

SEQ ID NO: 2408599 - RNA, 19 nt, Homo sapiens
  misc_RNA (1)...(19): siRNA sense strand
gagacaaacuucugagcga

SEQ ID NO: 2408600 - RNA, 19 nt, Homo sapiens
  misc_RNA (1)...(19): siRNA sense strand
uccaagaaguacaagggua

SEQ ID NO: 2408601 - RNA, 19 nt, Homo sapiens
  misc_RNA (1)...(19): siRNA sense strand
cgaggugugcaacgggaaa

SEQ ID NO: 2408602 - RNA, 19 nt, Homo sapiens
  misc_RNA (1)...(19): siRNA sense strand
gggaaacuguacaucguga

SEQ ID NO: 2408603 - RNA, 19 nt, Homo sapiens
  misc_RNA (1)...(19): siRNA sense strand
agacaaacuucugagcgaa

SEQ ID NO: 2408604 - RNA, 19 nt, Homo sapiens
  misc_RNA (1)...(19): siRNA sense strand
gcacaauuggagagggcag

SEQ ID NO: 2408605 - RNA, 19 nt, Homo sapiens
  misc_RNA (1)...(19): siRNA sense strand
aaagaaaaucgcaggaaaa

SEQ ID NO: 2408606 - RNA, 19 nt, Homo sapiens
  misc_RNA (1)...(19): siRNA sense strand
gccaagaggcagugaggca

SEQ ID NO: 2408607 - RNA, 19 nt, Homo sapiens
  misc_RNA (1)...(19): siRNA sense strand
aaaugaggauaacgugaaa

SEQ ID NO: 2408608 - RNA, 19 nt, Homo sapiens
  misc_RNA (1)...(19): siRNA sense strand
ggagagaccuguggcccaa

SEQ ID NO: 2408609 - RNA, 19 nt, Homo sapiens
  misc_RNA (1)...(19): siRNA sense strand
uggcuguggaugauauaaa

SEQ ID NO: 2408610 - RNA, 19 nt, Homo sapiens
  misc_RNA (1)...(19): siRNA sense strand
acaaggacuuagaggccga

SEQ ID NO: 2408611 - RNA, 19 nt, Homo sapiens
  misc_RNA (1)...(19): siRNA sense strand
gggaaugcguccauccuga

SEQ ID NO: 2408612 - RNA, 19 nt, Homo sapiens
  misc_RNA (1)...(19): siRNA sense strand
gguaccagagugaggcgua

SEQ ID NO: 2408613 - RNA, 19 nt, Homo sapiens
  misc_RNA (1)...(19): siRNA sense strand
acuuagaggccgaaaucca

SEQ ID NO: 2408614 - RNA, 19 nt, Homo sapiens
  misc_RNA (1)...(19): siRNA sense strand
cgcaggaaaaucugggaaa

SEQ ID NO: 2408615 - RNA, 19 nt, Homo sapiens
  misc_RNA (1)...(19): siRNA sense strand
cgaauguggaggauagacu

SEQ ID NO: 2408616 - RNA, 19 nt, Homo sapiens
  misc_RNA (1)...(19): siRNA sense strand
gggcagacaucgaggcuga

SEQ ID NO: 2408617 - RNA, 19 nt, Homo sapiens
  misc_RNA (1)...(19): siRNA sense strand
gcagauaaccagagggaag

SEQ ID NO: 2408618 - RNA, 19 nt, Homo sapiens
  misc_RNA (1)...(19): siRNA sense strand
gcagauaaucagagggaag

SEQ ID NO: 2408619 - RNA, 19 nt, Homo sapiens
  misc_RNA (1)...(19): siRNA sense strand
gcacauaaucagagggcag

SEQ ID NO: 2408620 - RNA, 19 nt, Homo sapiens
  misc_RNA (1)...(19): siRNA sense strand
aagcugaagcggaggguga

SEQ ID NO: 2408621 - RNA, 19 nt, Homo sapiens
  misc_RNA (1)...(19): siRNA sense strand
gggaagaggccauagcuga

SEQ ID NO: 2408622 - RNA, 19 nt, Homo sapiens
  misc_RNA (1)...(19): siRNA sense strand
gggucagagguuacagaua

SEQ ID NO: 2408623 - RNA, 19 nt, Homo sapiens
  misc_RNA (1)...(19): siRNA sense strand
gcagauagucaaagggaag

SEQ ID NO: 2408624 - RNA, 19 nt, Homo sapiens
  misc_RNA (1)...(19): siRNA sense strand
gcagauaaucagagggcac

SEQ ID NO: 2408625 - RNA, 19 nt, Homo sapiens
  misc_RNA (1)...(19): siRNA sense strand
gcagauaaucagagggcag

SEQ ID NO: 2408626 - RNA, 19 nt, Homo sapiens
  misc_RNA (1)...(19): siRNA sense strand
gcagauaaucagagggcag

SEQ ID NO: 2408627 - RNA, 19 nt, Homo sapiens
  misc_RNA (1)...(19): siRNA sense strand
aggucaagacagugagguu

SEQ ID NO: 2408628 - RNA, 19 nt, Homo sapiens
  misc_RNA (1)...(19): siRNA sense strand
aggaacuggucgaggccuu

SEQ ID NO: 2408629 - RNA, 19 nt, Homo sapiens
  misc_RNA (1)...(19): siRNA sense strand
acagauaaccacagggaag

SEQ ID NO: 2408630 - RNA, 19 nt, Homo sapiens
  misc_RNA (1)...(19): siRNA sense strand
ugcccauguuugaggacaa

SEQ ID NO: 2408631 - RNA, 19 nt, Homo sapiens
  misc_RNA (1)...(19): siRNA sense strand
ggcaagaaggugcgcaaaa

SEQ ID NO: 2408632 - RNA, 19 nt, Homo sapiens
  misc_RNA (1)...(19): siRNA sense strand
cggagagccuucuggcaca

SEQ ID NO: 2408633 - RNA, 19 nt, Homo sapiens
  misc_RNA (1)...(19): siRNA sense strand
acagauaaucaaagggaag

SEQ ID NO: 2408634 - RNA, 19 nt, Homo sapiens
  misc_RNA (1)...(19): siRNA sense strand
gugaggaugaugaggaacu

SEQ ID NO: 2408635 - RNA, 19 nt, Homo sapiens
  misc_RNA (1)...(19): siRNA sense strand
gucaaagggaagaggccau

SEQ ID NO: 2408636 - RNA, 19 nt, Homo sapiens
  misc_RNA (1)...(19): siRNA sense strand
agggagagcaagaagacca

SEQ ID NO: 2408637 - RNA, 19 nt, Homo sapiens
  misc_RNA (1)...(19): siRNA sense strand
gcacagauaaccacaggga

SEQ ID NO: 2408638 - RNA, 19 nt, Homo sapiens
  misc_RNA (1)...(19): siRNA sense strand
cagaagcugagcagggaga

SEQ ID NO: 2408639 - RNA, 19 nt, Homo sapiens
  misc_RNA (1)...(19): siRNA sense strand
ggggcaagaaggugcgcaa

SEQ ID NO: 2408640 - RNA, 19 nt, Homo sapiens
  misc_RNA (1)...(19): siRNA sense strand
cugcagauaaucagaggga

SEQ ID NO: 2408641 - RNA, 19 nt, Homo sapiens
  misc_RNA (1)...(19): siRNA sense strand
cugcagauaaccagaggga

SEQ ID NO: 2408642 - RNA, 19 nt, Homo sapiens
  misc_RNA (1)...(19): siRNA sense strand
cgaccuggagagugaggau

SEQ ID NO: 2408643 - RNA, 19 nt, Homo sapiens
  misc_RNA (1)...(19): siRNA sense strand
ugcagauagucaaagggaa

SEQ ID NO: 2408644 - RNA, 19 nt, Homo sapiens
  misc_RNA (1)...(19): siRNA sense strand
gcuugggaaacgcgggaga

SEQ ID NO: 2408645 - RNA, 19 nt, Homo sapiens
  misc_RNA (1)...(19): siRNA sense strand
ggaaauggcuauaucagca

SEQ ID NO: 2408646 - RNA, 19 nt, Homo sapiens
  misc_RNA (1)...(19): siRNA sense strand
acaccaauagagacggaaa

SEQ ID NO: 2408647 - RNA, 19 nt, Homo sapiens
  misc_RNA (1)...(19): siRNA sense strand
ugcaaauggagaugggaca

SEQ ID NO: 2408648 - RNA, 19 nt, Homo sapiens
  misc_RNA (1)...(19): siRNA sense strand
aggaaugguauaaaggcuu

SEQ ID NO: 2408649 - RNA, 19 nt, Homo sapiens
  misc_RNA (1)...(19): siRNA sense strand
cggaggucaugcaggacuu

SEQ ID NO: 2408650 - RNA, 19 nt, Homo sapiens
  misc_RNA (1)...(19): siRNA sense strand
gcacagacuuuacagagca

SEQ ID NO: 2408651 - RNA, 19 nt, Homo sapiens
  misc_RNA (1)...(19): siRNA sense strand
ggacaccaauagagacgga

SEQ ID NO: 2408652 - RNA, 19 nt, Homo sapiens
  misc_RNA (1)...(19): siRNA sense strand
uuccaaauuugcagagcau

SEQ ID NO: 2408653 - RNA, 19 nt, Homo sapiens
  misc_RNA (1)...(19): siRNA sense strand
agaugggacaauagacuuu

SEQ ID NO: 2408654 - RNA, 19 nt, Homo sapiens
  misc_RNA (1)...(19): siRNA sense strand
cagaaaagaucuuccgcca

SEQ ID NO: 2408655 - RNA, 19 nt, Homo sapiens
  misc_RNA (1)...(19): siRNA sense strand
uagugaucgugcaggcaau

SEQ ID NO: 2408656 - RNA, 19 nt, Homo sapiens
  misc_RNA (1)...(19): siRNA sense strand
ugagucaaccccagagaaa

SEQ ID NO: 2408657 - RNA, 19 nt, Homo sapiens
  misc_RNA (1)...(19): siRNA sense strand
ggacagaccuuuagccuca

SEQ ID NO: 2408658 - RNA, 19 nt, Homo sapiens
  misc_RNA (1)...(19): siRNA sense strand
gguacaaggagcagaggga

SEQ ID NO: 2408659 - RNA, 19 nt, Homo sapiens
  misc_RNA (1)...(19): siRNA sense strand
acagcaagauggagagcga

SEQ ID NO: 2408660 - RNA, 19 nt, Homo sapiens
  misc_RNA (1)...(19): siRNA sense strand
uacaaggagcagagggaga

SEQ ID NO: 2408661 - RNA, 19 nt, Homo sapiens
  misc_RNA (1)...(19): siRNA sense strand
ggcuguggccagagaaaca

SEQ ID NO: 2408662 - RNA, 19 nt, Homo sapiens
  misc_RNA (1)...(19): siRNA sense strand
uggcaagaccagggagaca

SEQ ID NO: 2408663 - RNA, 19 nt, Homo sapiens
  misc_RNA (1)...(19): siRNA sense strand
cgagagugcucaccggaca

SEQ ID NO: 2408664 - RNA, 19 nt, Homo sapiens
  misc_RNA (1)...(19): siRNA sense strand
gcaauuacaccgaugagga

SEQ ID NO: 2408665 - RNA, 19 nt, Homo sapiens
  misc_RNA (1)...(19): siRNA sense strand
agaucaucaucaacagcaa

SEQ ID NO: 2408666 - RNA, 19 nt, Homo sapiens
  misc_RNA (1)...(19): siRNA sense strand
ucggauagcaaguggccuu

SEQ ID NO: 2408667 - RNA, 19 nt, Homo sapiens
  misc_RNA (1)...(19): siRNA sense strand
ggaucagguacaaggagca

SEQ ID NO: 2408668 - RNA, 19 nt, Homo sapiens
  misc_RNA (1)...(19): siRNA sense strand
caggcuguggccagagaaa

SEQ ID NO: 2408669 - RNA, 19 nt, Homo sapiens
  misc_RNA (1)...(19): siRNA sense strand
uggagagcgaggugcgauu

SEQ ID NO: 2408670 - RNA, 19 nt, Homo sapiens
  misc_RNA (1)...(19): siRNA sense strand
cuggagggcuggaaggugu

SEQ ID NO: 2408671 - RNA, 19 nt, Homo sapiens
  misc_RNA (1)...(19): siRNA sense strand
acaccgaugaggaggacga

SEQ ID NO: 2408672 - RNA, 19 nt, Homo sapiens
  misc_RNA (1)...(19): siRNA sense strand
ccuuauaguuccagagcca

SEQ ID NO: 2408673 - RNA, 19 nt, Homo sapiens
  misc_RNA (1)...(19): siRNA sense strand
agauaugucacuagguaua

SEQ ID NO: 2408674 - RNA, 19 nt, Homo sapiens
  misc_RNA (1)...(19): siRNA sense strand
aggaaacaagccugagaaa

SEQ ID NO: 2408675 - RNA, 19 nt, Homo sapiens
  misc_RNA (1)...(19): siRNA sense strand
gggucaugauggaauuaaa

SEQ ID NO: 2408676 - RNA, 19 nt, Homo sapiens
  misc_RNA (1)...(19): siRNA sense strand
gggaaagccucaugggaug

SEQ ID NO: 2408677 - RNA, 19 nt, Homo sapiens
  misc_RNA (1)...(19): siRNA sense strand
auggaaaagugaagggcua

SEQ ID NO: 2408678 - RNA, 19 nt, Homo sapiens
  misc_RNA (1)...(19): siRNA sense strand
cugaauuggcugaagucaa

SEQ ID NO: 2408679 - RNA, 19 nt, Homo sapiens
  misc_RNA (1)...(19): siRNA sense strand
agaagaacgcugaagaaca

SEQ ID NO: 2408680 - RNA, 19 nt, Homo sapiens
  misc_RNA (1)...(19): siRNA sense strand
ugcugaacauccagggaaa

SEQ ID NO: 2408681 - RNA, 19 nt, Homo sapiens
  misc_RNA (1)...(19): siRNA sense strand
ccucaggaacuucaggaaa

SEQ ID NO: 2408682 - RNA, 19 nt, Homo sapiens
  misc_RNA (1)...(19): siRNA sense strand
ggaugaugccaguagaaca

SEQ ID NO: 2408683 - RNA, 19 nt, Homo sapiens
  misc_RNA (1)...(19): siRNA sense strand
uugaagaaagccacagaua

SEQ ID NO: 2408684 - RNA, 19 nt, Homo sapiens
  misc_RNA (1)...(19): siRNA sense strand
uggagggcauggacagaaa

SEQ ID NO: 2408685 - RNA, 19 nt, Homo sapiens
  misc_RNA (1)...(19): siRNA sense strand
ucaaugugacggagaagaa

SEQ ID NO: 2408686 - RNA, 19 nt, Homo sapiens
  misc_RNA (1)...(19): siRNA sense strand
agacauuggaccagaaaau

SEQ ID NO: 2408687 - RNA, 19 nt, Homo sapiens
  misc_RNA (1)...(19): siRNA sense strand
ggaaugaacucgaugcaag

SEQ ID NO: 2408688 - RNA, 19 nt, Homo sapiens
  misc_RNA (1)...(19): siRNA sense strand
ucgaaauagcuugaagaaa

SEQ ID NO: 2408689 - RNA, 19 nt, Homo sapiens
  misc_RNA (1)...(19): siRNA sense strand
caaaaggaaaugagcaauu

SEQ ID NO: 2408690 - RNA, 19 nt, Homo sapiens
  misc_RNA (1)...(19): siRNA sense strand
cacuaaggugggugagcaa

SEQ ID NO: 2408691 - RNA, 19 nt, Homo sapiens
  misc_RNA (1)...(19): siRNA sense strand
cucaggaacuucaggaaaa

SEQ ID NO: 2408692 - RNA, 19 nt, Homo sapiens
  misc_RNA (1)...(19): siRNA sense strand
gaaucuggcaugaaggaca

SEQ ID NO: 2408693 - RNA, 19 nt, Homo sapiens
  misc_RNA (1)...(19): siRNA sense strand
cggagaagaacgcugaaga

SEQ ID NO: 2408694 - RNA, 19 nt, Homo sapiens
  misc_RNA (1)...(19): siRNA sense strand
aaauacagucucuggaaga

SEQ ID NO: 2408695 - RNA, 19 nt, Homo sapiens
  misc_RNA (1)...(19): siRNA sense strand
cuggaugcuuguaaggaau

SEQ ID NO: 2408696 - RNA, 19 nt, Homo sapiens
  misc_RNA (1)...(19): siRNA sense strand
ggacucuaucucaggaaau

SEQ ID NO: 2408697 - RNA, 19 nt, Homo sapiens
  misc_RNA (1)...(19): siRNA sense strand
gagcaauuguagagcaggu

SEQ ID NO: 2408698 - RNA, 19 nt, Homo sapiens
  misc_RNA (1)...(19): siRNA sense strand
ggaagagcuggauggaaaa

SEQ ID NO: 2408699 - RNA, 19 nt, Homo sapiens
  misc_RNA (1)...(19): siRNA sense strand
ccuacaucgugaacaagaa

SEQ ID NO: 2408700 - RNA, 19 nt, Homo sapiens
  misc_RNA (1)...(19): siRNA sense strand
agggaaagccucaugggau

SEQ ID NO: 2408701 - RNA, 19 nt, Homo sapiens
  misc_RNA (1)...(19): siRNA sense strand
cagaaaaugaugugacuca

SEQ ID NO: 2408702 - RNA, 19 nt, Homo sapiens
  misc_RNA (1)...(19): siRNA sense strand
agaagauacaggugcuaga

SEQ ID NO: 2408703 - RNA, 19 nt, Homo sapiens
  misc_RNA (1)...(19): siRNA sense strand
agaucaagacauuggacca

SEQ ID NO: 2408704 - RNA, 19 nt, Homo sapiens
  misc_RNA (1)...(19): siRNA sense strand
cagaaugcugaauggaaga

SEQ ID NO: 2408705 - RNA, 19 nt, Homo sapiens
  misc_RNA (1)...(19): siRNA sense strand
guuaguggagacacagaaa

SEQ ID NO: 2408706 - RNA, 19 nt, Homo sapiens
  misc_RNA (1)...(19): siRNA sense strand
agaucgacgcccugagaga

SEQ ID NO: 2408707 - RNA, 19 nt, Homo sapiens
  misc_RNA (1)...(19): siRNA sense strand
gagaaggaaacaagccuga

SEQ ID NO: 2408708 - RNA, 19 nt, Homo sapiens
  misc_RNA (1)...(19): siRNA sense strand
ggucaacagaucaagacau

SEQ ID NO: 2408709 - RNA, 19 nt, Homo sapiens
  misc_RNA (1)...(19): siRNA sense strand
ccagaaugcugaauggaag

SEQ ID NO: 2408710 - RNA, 19 nt, Homo sapiens
  misc_RNA (1)...(19): siRNA sense strand
uacaggugcuagaggagaa

SEQ ID NO: 2408711 - RNA, 19 nt, Homo sapiens
  misc_RNA (1)...(19): siRNA sense strand
ggaaacaagccugagaaaa

SEQ ID NO: 2408712 - RNA, 19 nt, Homo sapiens
  misc_RNA (1)...(19): siRNA sense strand
aauuaaaccaccugaagga

SEQ ID NO: 2408713 - RNA, 19 nt, Homo sapiens
  misc_RNA (1)...(19): siRNA sense strand
caauuguagagcaggugaa

SEQ ID NO: 2408714 - RNA, 19 nt, Homo sapiens
  misc_RNA (1)...(19): siRNA sense strand
uggagggaagugagaguuu

SEQ ID NO: 2408715 - RNA, 19 nt, Homo sapiens
  misc_RNA (1)...(19): siRNA sense strand
cccaacugguacagcacaa

SEQ ID NO: 2408716 - RNA, 19 nt, Homo sapiens
  misc_RNA (1)...(19): siRNA sense strand
cuaaggugggugagcaaga

SEQ ID NO: 2408717 - RNA, 19 nt, Homo sapiens
  misc_RNA (1)...(19): siRNA sense strand
ggcagagguugcagagcca

SEQ ID NO: 2408718 - RNA, 19 nt, Homo sapiens
  misc_RNA (1)...(19): siRNA sense strand
ccucgaaauagcuugaaga

SEQ ID NO: 2408719 - RNA, 19 nt, Homo sapiens
  misc_RNA (1)...(19): siRNA sense strand
agaaacuucaacaggauuu

SEQ ID NO: 2408720 - RNA, 19 nt, Homo sapiens
  misc_RNA (1)...(19): siRNA sense strand
gcuggagggaagugagagu

SEQ ID NO: 2408721 - RNA, 19 nt, Homo sapiens
  misc_RNA (1)...(19): siRNA sense strand
cagcuaccugggagugaua

SEQ ID NO: 2408722 - RNA, 19 nt, Homo sapiens
  misc_RNA (1)...(19): siRNA sense strand
agauacaggugcuagagga

SEQ ID NO: 2408723 - RNA, 19 nt, Homo sapiens
  misc_RNA (1)...(19): siRNA sense strand
uuaauggagagguggguga

SEQ ID NO: 2408724 - RNA, 19 nt, Homo sapiens
  misc_RNA (1)...(19): siRNA sense strand
aagacuggacaaugaguuu

SEQ ID NO: 2408725 - RNA, 19 nt, Homo sapiens
  misc_RNA (1)...(19): siRNA sense strand
ccgaacaaaccauccagaa

SEQ ID NO: 2408726 - RNA, 19 nt, Homo sapiens
  misc_RNA (1)...(19): siRNA sense strand
cuggaggagagguggcaga

SEQ ID NO: 2408727 - RNA, 19 nt, Homo sapiens
  misc_RNA (1)...(19): siRNA sense strand
cuugcuggagugagugaaa

SEQ ID NO: 2408728 - RNA, 19 nt, Homo sapiens
  misc_RNA (1)...(19): siRNA sense strand
caggaugaugccaguagaa

SEQ ID NO: 2408729 - RNA, 19 nt, Homo sapiens
  misc_RNA (1)...(19): siRNA sense strand
aagccugagaaaagaaaua

SEQ ID NO: 2408730 - RNA, 19 nt, Homo sapiens
  misc_RNA (1)...(19): siRNA sense strand
ugaauggaagacuggacaa

SEQ ID NO: 2408731 - RNA, 19 nt, Homo sapiens
  misc_RNA (1)...(19): siRNA sense strand
gaauggaagacuggacaau

SEQ ID NO: 2408732 - RNA, 19 nt, Homo sapiens
  misc_RNA (1)...(19): siRNA sense strand
ugggagugauagagcucau

SEQ ID NO: 2408733 - RNA, 19 nt, Homo sapiens
  misc_RNA (1)...(19): siRNA sense strand
acauuugccugcugaacau

SEQ ID NO: 2408734 - RNA, 19 nt, Homo sapiens
  misc_RNA (1)...(19): siRNA sense strand
ccgagaagauugagggcua

SEQ ID NO: 2408735 - RNA, 19 nt, Homo sapiens
  misc_RNA (1)...(19): siRNA sense strand
cuauagagcaagagggaga

SEQ ID NO: 2408736 - RNA, 19 nt, Homo sapiens
  misc_RNA (1)...(19): siRNA sense strand
ggaaagaaauggcaggagu

SEQ ID NO: 2408737 - RNA, 19 nt, Homo sapiens
  misc_RNA (1)...(19): siRNA sense strand
uaucaaaggcaaauggcaa

SEQ ID NO: 2408738 - RNA, 19 nt, Homo sapiens
  misc_RNA (1)...(19): siRNA sense strand
cagcagauucagagacauu

SEQ ID NO: 2408739 - RNA, 19 nt, Homo sapiens
  misc_RNA (1)...(19): siRNA sense strand
gcuuaaguccagaagaaau

SEQ ID NO: 2408740 - RNA, 19 nt, Homo sapiens
  misc_RNA (1)...(19): siRNA sense strand
ccuauaucaaagagugaaa

SEQ ID NO: 2408741 - RNA, 19 nt, Homo sapiens
  misc_RNA (1)...(19): siRNA sense strand
uugcgaagaagguuagaaa

SEQ ID NO: 2408742 - RNA, 19 nt, Homo sapiens
  misc_RNA (1)...(19): siRNA sense strand
agaagaaauccgugcacuu

SEQ ID NO: 2408743 - RNA, 19 nt, Homo sapiens
  misc_RNA (1)...(19): siRNA sense strand
ggauggaguuggaggagcu

SEQ ID NO: 2408744 - RNA, 19 nt, Homo sapiens
  misc_RNA (1)...(19): siRNA sense strand
agacauugccagucaguca

SEQ ID NO: 2408745 - RNA, 19 nt, Homo sapiens
  misc_RNA (1)...(19): siRNA sense strand
ggcugagauuugugauaau

SEQ ID NO: 2408746 - RNA, 19 nt, Homo sapiens
  misc_RNA (1)...(19): siRNA sense strand
aagauauagccgagaagau

SEQ ID NO: 2408747 - RNA, 19 nt, Homo sapiens
  misc_RNA (1)...(19): siRNA sense strand
gaggcaagucgcaggguca

SEQ ID NO: 2408748 - RNA, 19 nt, Homo sapiens
  misc_RNA (1)...(19): siRNA sense strand
uggaguuggaggagcuuua

SEQ ID NO: 2408749 - RNA, 19 nt, Homo sapiens
  misc_RNA (1)...(19): siRNA sense strand
ggagagaugacaagggaag

SEQ ID NO: 2408750 - RNA, 19 nt, Homo sapiens
  misc_RNA (1)...(19): siRNA sense strand
ggacaaggacuauagagca

SEQ ID NO: 2408751 - RNA, 19 nt, Homo sapiens
  misc_RNA (1)...(19): siRNA sense strand
gaugacaagggaaggaaga

SEQ ID NO: 2408752 - RNA, 19 nt, Homo sapiens
  misc_RNA (1)...(19): siRNA sense strand
cuaagaaguugcuaaggga

SEQ ID NO: 2408753 - RNA, 19 nt, Homo sapiens
  misc_RNA (1)...(19): siRNA sense strand
gggugaugcagcagauuca

SEQ ID NO: 2408754 - RNA, 19 nt, Homo sapiens
  misc_RNA (1)...(19): siRNA sense strand
gggagagaugacaagggaa

SEQ ID NO: 2408755 - RNA, 19 nt, Homo sapiens
  misc_RNA (1)...(19): siRNA sense strand
gguaaaacuaugcuagcua

SEQ ID NO: 2408756 - RNA, 19 nt, Homo sapiens
  misc_RNA (1)...(19): siRNA sense strand
gaggaauaugaacaaguua

SEQ ID NO: 2408757 - RNA, 19 nt, Homo sapiens
  misc_RNA (1)...(19): siRNA sense strand
caagagggagagaugacaa

SEQ ID NO: 2408758 - RNA, 19 nt, Homo sapiens
  misc_RNA (1)...(19): siRNA sense strand
gggaaggaagaauaugcaa

SEQ ID NO: 2408759 - RNA, 19 nt, Homo sapiens
  misc_RNA (1)...(19): siRNA sense strand
ggcaggaauuauuggagga

SEQ ID NO: 2408760 - RNA, 19 nt, Homo sapiens
  misc_RNA (1)...(19): siRNA sense strand
caaagggauuagaaggcca

SEQ ID NO: 2408761 - RNA, 19 nt, Homo sapiens
  misc_RNA (1)...(19): siRNA sense strand
aagaugaaccauuuagaga

SEQ ID NO: 2408762 - RNA, 19 nt, Homo sapiens
  misc_RNA (1)...(19): siRNA sense strand
ugacaagggaaggaagaau

SEQ ID NO: 2408763 - RNA, 19 nt, Homo sapiens
  misc_RNA (1)...(19): siRNA sense strand
ugcaaagaaaggaagagaa

SEQ ID NO: 2408764 - RNA, 19 nt, Homo sapiens
  misc_RNA (1)...(19): siRNA sense strand
ugguauuggcugcuacuaa

SEQ ID NO: 2408765 - RNA, 19 nt, Homo sapiens
  misc_RNA (1)...(19): siRNA sense strand
caacagguucggcaggaau

SEQ ID NO: 2408766 - RNA, 19 nt, Homo sapiens
  misc_RNA (1)...(19): siRNA sense strand
gacuauagagcaagaggga

SEQ ID NO: 2408767 - RNA, 19 nt, Homo sapiens
  misc_RNA (1)...(19): siRNA sense strand
agacauuguauccaggaau

SEQ ID NO: 2408768 - RNA, 19 nt, Homo sapiens
  misc_RNA (1)...(19): siRNA sense strand
cgagaagauugagggcuau

SEQ ID NO: 2408769 - RNA, 19 nt, Homo sapiens
  misc_RNA (1)...(19): siRNA sense strand
uugaauuggcccuaaagaa

SEQ ID NO: 2408770 - RNA, 19 nt, Homo sapiens
  misc_RNA (1)...(19): siRNA sense strand
acaagggaaggaagaauau

SEQ ID NO: 2408771 - RNA, 19 nt, Homo sapiens
  misc_RNA (1)...(19): siRNA sense strand
aggcaaauggcaacagguu

SEQ ID NO: 2408772 - RNA, 19 nt, Homo sapiens
  misc_RNA (1)...(19): siRNA sense strand
gagacauuguauccaggaa

SEQ ID NO: 2408773 - RNA, 19 nt, Homo sapiens
  misc_RNA (1)...(19): siRNA sense strand
aucuaaauacagaggugaa

SEQ ID NO: 2408774 - RNA, 19 nt, Homo sapiens
  misc_RNA (1)...(19): siRNA sense strand
aggaagagaauaugcccuu

SEQ ID NO: 2408775 - RNA, 19 nt, Homo sapiens
  misc_RNA (1)...(19): siRNA sense strand
uggugcaagugauggugaa

SEQ ID NO: 2408776 - RNA, 19 nt, Homo sapiens
  misc_RNA (1)...(19): siRNA sense strand
acauagcagaucuggaaga

SEQ ID NO: 2408777 - RNA, 19 nt, Homo sapiens
  misc_RNA (1)...(19): siRNA sense strand
gcgucccaaucgagaagua

SEQ ID NO: 2408778 - RNA, 19 nt, Homo sapiens
  misc_RNA (1)...(19): siRNA sense strand
gggacauugaugaagcuuu

SEQ ID NO: 2408779 - RNA, 19 nt, Homo sapiens
  misc_RNA (1)...(19): siRNA sense strand
gagauuugugauaaugcaa

SEQ ID NO: 2408780 - RNA, 19 nt, Homo sapiens
  misc_RNA (1)...(19): siRNA sense strand
auuugauggugcugguuau

SEQ ID NO: 2408781 - RNA, 19 nt, Homo sapiens
  misc_RNA (1)...(19): siRNA sense strand
guuggaggagcuuuagaaa

SEQ ID NO: 2408782 - RNA, 19 nt, Homo sapiens
  misc_RNA (1)...(19): siRNA sense strand
cuaaagaggaacuucagau

SEQ ID NO: 2408783 - RNA, 19 nt, Homo sapiens
  misc_RNA (1)...(19): siRNA sense strand
acuuugaauuggcccuaaa

SEQ ID NO: 2408784 - RNA, 19 nt, Homo sapiens
  misc_RNA (1)...(19): siRNA sense strand
gggaacagcuaaaggcaga

SEQ ID NO: 2408785 - RNA, 19 nt, Homo sapiens
  misc_RNA (1)...(19): siRNA sense strand
acagaaaagcauugagaaa

SEQ ID NO: 2408786 - RNA, 19 nt, Homo sapiens
  misc_RNA (1)...(19): siRNA sense strand
gcaauaaaaucuugggcca

SEQ ID NO: 2408787 - RNA, 19 nt, Homo sapiens
  misc_RNA (1)...(19): siRNA sense strand
aagcauugagaaagcuaaa

SEQ ID NO: 2408788 - RNA, 19 nt, Homo sapiens
  misc_RNA (1)...(19): siRNA sense strand
agcaaauaaaguagccaaa

SEQ ID NO: 2408789 - RNA, 19 nt, Homo sapiens
  misc_RNA (1)...(19): siRNA sense strand
accaaagggaacagcuaaa

SEQ ID NO: 2408790 - RNA, 19 nt, Homo sapiens
  misc_RNA (1)...(19): siRNA sense strand
agcuaaaggcagaaguaga

SEQ ID NO: 2408791 - RNA, 19 nt, Homo sapiens
  misc_RNA (1)...(19): siRNA sense strand
gcuuaguugaugaugguau

SEQ ID NO: 2408792 - RNA, 19 nt, Homo sapiens
  misc_RNA (1)...(19): siRNA sense strand
aagcaaauaaaguagccaa

SEQ ID NO: 2408793 - RNA, 19 nt, Homo sapiens
  misc_RNA (1)...(19): siRNA sense strand
gugaaacggaagagcgaac

SEQ ID NO: 2408794 - RNA, 19 nt, Homo sapiens
  misc_RNA (1)...(19): siRNA sense strand
acugauaacauauucgcaa

SEQ ID NO: 2408795 - RNA, 19 nt, Homo sapiens
  misc_RNA (1)...(19): siRNA sense strand
aguuggagguucuggaauc

SEQ ID NO: 2408796 - RNA, 19 nt, Homo sapiens
  misc_RNA (1)...(19): siRNA sense strand
ggaagagcgaaccaggcua

SEQ ID NO: 2408797 - RNA, 19 nt, Homo sapiens
  misc_RNA (1)...(19): siRNA sense strand
ccgcaaguuguggaagaaa

SEQ ID NO: 2408798 - RNA, 19 nt, Homo sapiens
  misc_RNA (1)...(19): siRNA sense strand
gugcagaagaaaagagaac

SEQ ID NO: 2408799 - RNA, 19 nt, Homo sapiens
  misc_RNA (1)...(19): siRNA sense strand
gagaauuggagcagggaua

SEQ ID NO: 2408800 - RNA, 19 nt, Homo sapiens
  misc_RNA (1)...(19): siRNA sense strand
gguagaaacuauugcgcaa

SEQ ID NO: 2408801 - RNA, 19 nt, Homo sapiens
  misc_RNA (1)...(19): siRNA sense strand
agaaauaauggcugggaaa

SEQ ID NO: 2408802 - RNA, 19 nt, Homo sapiens
  misc_RNA (1)...(19): siRNA sense strand
ugaaaggccucaugggaaa

SEQ ID NO: 2408803 - RNA, 19 nt, Homo sapiens
  misc_RNA (1)...(19): siRNA sense strand
ggucaaagauggugccaca

SEQ ID NO: 2408804 - RNA, 19 nt, Homo sapiens
  misc_RNA (1)...(19): siRNA sense strand
cagaagaggcagaagcuua

SEQ ID NO: 2408805 - RNA, 19 nt, Homo sapiens
  misc_RNA (1)...(19): siRNA sense strand
agaucaaccuccugaaaua

SEQ ID NO: 2408806 - RNA, 19 nt, Homo sapiens
  misc_RNA (1)...(19): siRNA sense strand
uggaagaaauggagcaaga

SEQ ID NO: 2408807 - RNA, 19 nt, Homo sapiens
  misc_RNA (1)...(19): siRNA sense strand
gacacaaguuugaaggaaa

SEQ ID NO: 2408808 - RNA, 19 nt, Homo sapiens
  misc_RNA (1)...(19): siRNA sense strand
cgaguagagccaagagaua

SEQ ID NO: 2408809 - RNA, 19 nt, Homo sapiens
  misc_RNA (1)...(19): siRNA sense strand
gggcaggaguucuaugaaa

SEQ ID NO: 2408810 - RNA, 19 nt, Homo sapiens
  misc_RNA (1)...(19): siRNA sense strand
ggacaaaugcugcagaaau

SEQ ID NO: 2408811 - RNA, 19 nt, Homo sapiens
  misc_RNA (1)...(19): siRNA sense strand
ggaaauagaacaacugcaa

SEQ ID NO: 2408812 - RNA, 19 nt, Homo sapiens
  misc_RNA (1)...(19): siRNA sense strand
uggaaauagcugagauaau

SEQ ID NO: 2408813 - RNA, 19 nt, Homo sapiens
  misc_RNA (1)...(19): siRNA sense strand
uggauaugcuccuggguua

SEQ ID NO: 2408814 - RNA, 19 nt, Homo sapiens
  misc_RNA (1)...(19): siRNA sense strand
agaagaagacuuugaagaa

SEQ ID NO: 2408815 - RNA, 19 nt, Homo sapiens
  misc_RNA (1)...(19): siRNA sense strand
gcaaagugauugaggaaac

SEQ ID NO: 2408816 - RNA, 19 nt, Homo sapiens
  misc_RNA (1)...(19): siRNA sense strand
ccauagaugagaaggcuaa

SEQ ID NO: 2408817 - RNA, 19 nt, Homo sapiens
  misc_RNA (1)...(19): siRNA sense strand
ggguaaaccugauggagga

SEQ ID NO: 2408818 - RNA, 19 nt, Homo sapiens
  misc_RNA (1)...(19): siRNA sense strand
ggagaaagggagauaguga

SEQ ID NO: 2408819 - RNA, 19 nt, Homo sapiens
  misc_RNA (1)...(19): siRNA sense strand
uggaagaaggaaagacuaa

SEQ ID NO: 2408820 - RNA, 19 nt, Homo sapiens
  misc_RNA (1)...(19): siRNA sense strand
cuggaaaguucucaaguaa

SEQ ID NO: 2408821 - RNA, 19 nt, Homo sapiens
  misc_RNA (1)...(19): siRNA sense strand
caaaggaggagcagagauu

SEQ ID NO: 2408822 - RNA, 19 nt, Homo sapiens
  misc_RNA (1)...(19): siRNA sense strand
acagaaaccuucagcaaau

SEQ ID NO: 2408823 - RNA, 19 nt, Homo sapiens
  misc_RNA (1)...(19): siRNA sense strand
ugacaaugcauuuggaauu

SEQ ID NO: 2408824 - RNA, 19 nt, Homo sapiens
  misc_RNA (1)...(19): siRNA sense strand
gggcaaagugacacaacaa

SEQ ID NO: 2408825 - RNA, 19 nt, Homo sapiens
  misc_RNA (1)...(19): siRNA sense strand
cuggaaauucggagcguaa

SEQ ID NO: 2408826 - RNA, 19 nt, Homo sapiens
  misc_RNA (1)...(19): siRNA sense strand
agaaagagaacguaaagua

SEQ ID NO: 2408827 - RNA, 19 nt, Homo sapiens
  misc_RNA (1)...(19): siRNA sense strand
aggaaagacuaaugcauuu

SEQ ID NO: 2408828 - RNA, 19 nt, Homo sapiens
  misc_RNA (1)...(19): siRNA sense strand
gauugaaacugauggcauu

SEQ ID NO: 2408829 - RNA, 19 nt, Homo sapiens
  misc_RNA (1)...(19): siRNA sense strand
uaaucaagcuacugagaau

SEQ ID NO: 2408830 - RNA, 19 nt, Homo sapiens
  misc_RNA (1)...(19): siRNA sense strand
cgggaaagcaaguugggaa

SEQ ID NO: 2408831 - RNA, 19 nt, Homo sapiens
  misc_RNA (1)...(19): siRNA sense strand
aagcaguggaagaaggaaa

SEQ ID NO: 2408832 - RNA, 19 nt, Homo sapiens
  misc_RNA (1)...(19): siRNA sense strand
gauggaaguauuagugaua

SEQ ID NO: 2408833 - RNA, 19 nt, Homo sapiens
  misc_RNA (1)...(19): siRNA sense strand
uggagguacuauuggguua

SEQ ID NO: 2408834 - RNA, 19 nt, Homo sapiens
  misc_RNA (1)...(19): siRNA sense strand
aaauuagacuccagagcua

SEQ ID NO: 2408835 - RNA, 19 nt, Homo sapiens
  misc_RNA (1)...(19): siRNA sense strand
cagagauggaugagaguuu

SEQ ID NO: 2408836 - RNA, 19 nt, Homo sapiens
  misc_RNA (1)...(19): siRNA sense strand
ggagaaagaaguauaccaa

SEQ ID NO: 2408837 - RNA, 19 nt, Homo sapiens
  misc_RNA (1)...(19): siRNA sense strand
ugugaaaggagaagcuaaa

SEQ ID NO: 2408838 - RNA, 19 nt, Homo sapiens
  misc_RNA (1)...(19): siRNA sense strand
uguccaggaugcagaaaua

SEQ ID NO: 2408839 - RNA, 19 nt, Homo sapiens
  misc_RNA (1)...(19): siRNA sense strand
gagcagggauaaauggcaa

SEQ ID NO: 2408840 - RNA, 19 nt, Homo sapiens
  misc_RNA (1)...(19): siRNA sense strand
agcaauagcuggugaagau

SEQ ID NO: 2408841 - RNA, 19 nt, Homo sapiens
  misc_RNA (1)...(19): siRNA sense strand
ccauaaugcaggaagguga

SEQ ID NO: 2408842 - RNA, 19 nt, Homo sapiens
  misc_RNA (1)...(19): siRNA sense strand
aguagaagccagugaugaa

SEQ ID NO: 2408843 - RNA, 19 nt, Homo sapiens
  misc_RNA (1)...(19): siRNA sense strand
ucagaagcacagaggguua

SEQ ID NO: 2408844 - RNA, 19 nt, Homo sapiens
  misc_RNA (1)...(19): siRNA sense strand
cugaagugacugagaauuu

SEQ ID NO: 2408845 - RNA, 19 nt, Homo sapiens
  misc_RNA (1)...(19): siRNA sense strand
gaauuuaaaccuggagaaa

SEQ ID NO: 2408846 - RNA, 19 nt, Homo sapiens
  misc_RNA (1)...(19): siRNA sense strand
ggaaggaggaguagcugaa

SEQ ID NO: 2408847 - RNA, 19 nt, Homo sapiens
  misc_RNA (1)...(19): siRNA sense strand
ggaugauguaccagagcua

SEQ ID NO: 2408848 - RNA, 19 nt, Homo sapiens
  misc_RNA (1)...(19): siRNA sense strand
cuacugagaaugaagauua

SEQ ID NO: 2408849 - RNA, 19 nt, Homo sapiens
  misc_RNA (1)...(19): siRNA sense strand
gauaacuacugaaggaaaa

SEQ ID NO: 2408850 - RNA, 19 nt, Homo sapiens
  misc_RNA (1)...(19): siRNA sense strand
cagcuuagguacacagauu

SEQ ID NO: 2408851 - RNA, 19 nt, Homo sapiens
  misc_RNA (1)...(19): siRNA sense strand
uagcgaaggaugacgguaa

SEQ ID NO: 2408852 - RNA, 19 nt, Homo sapiens
  misc_RNA (1)...(19): siRNA sense strand
aggagaaggaggagugaga

SEQ ID NO: 2408853 - RNA, 19 nt, Homo sapiens
  misc_RNA (1)...(19): siRNA sense strand
gauaaauggcaaugacaga

SEQ ID NO: 2408854 - RNA, 19 nt, Homo sapiens
  misc_RNA (1)...(19): siRNA sense strand
aauugaaguugaagagaca

SEQ ID NO: 2408855 - RNA, 19 nt, Homo sapiens
  misc_RNA (1)...(19): siRNA sense strand
gcgccaagccacuggaaga

SEQ ID NO: 2408856 - RNA, 19 nt, Homo sapiens
  misc_RNA (1)...(19): siRNA sense strand
guacaaugggucaaacaaa

SEQ ID NO: 2408857 - RNA, 19 nt, Homo sapiens
  misc_RNA (1)...(19): siRNA sense strand
gguacgugcuggugaugaa

SEQ ID NO: 2408858 - RNA, 19 nt, Homo sapiens
  misc_RNA (1)...(19): siRNA sense strand
gaaaggacaacaauggaaa

SEQ ID NO: 2408859 - RNA, 19 nt, Homo sapiens
  misc_RNA (1)...(19): siRNA sense strand
agaugagauuccagaagaa

SEQ ID NO: 2408860 - RNA, 19 nt, Homo sapiens
  misc_RNA (1)...(19): siRNA sense strand
agacaaagcaguggaagaa

SEQ ID NO: 2408861 - RNA, 19 nt, Homo sapiens
  misc_RNA (1)...(19): siRNA sense strand
caacaucacauuugagauu

SEQ ID NO: 2408862 - RNA, 19 nt, Homo sapiens
  misc_RNA (1)...(19): siRNA sense strand
auucaaggcccuacaaaua

SEQ ID NO: 2408863 - RNA, 19 nt, Homo sapiens
  misc_RNA (1)...(19): siRNA sense strand
aguaaaagguagugcauca

SEQ ID NO: 2408864 - RNA, 19 nt, Homo sapiens
  misc_RNA (1)...(19): siRNA sense strand
ucauaauagcuaagaguga

SEQ ID NO: 2408865 - RNA, 19 nt, Homo sapiens
  misc_RNA (1)...(19): siRNA sense strand
aagaagacuuugaagaaca

SEQ ID NO: 2408866 - RNA, 19 nt, Homo sapiens
  misc_RNA (1)...(19): siRNA sense strand
gguuauuauuacagggagu

SEQ ID NO: 2408867 - RNA, 19 nt, Homo sapiens
  misc_RNA (1)...(19): siRNA sense strand
uggaaaggauuuugugaua

SEQ ID NO: 2408868 - RNA, 19 nt, Homo sapiens
  misc_RNA (1)...(19): siRNA sense strand
agaaggaggagcugagauu

SEQ ID NO: 2408869 - RNA, 19 nt, Homo sapiens
  misc_RNA (1)...(19): siRNA sense strand
gcgcaaaagaagaagagaa

SEQ ID NO: 2408870 - RNA, 19 nt, Homo sapiens
  misc_RNA (1)...(19): siRNA sense strand
ggccaaauaucgagaggga

SEQ ID NO: 2408871 - RNA, 19 nt, Homo sapiens
  misc_RNA (1)...(19): siRNA sense strand
agauuuaugccuaggacaa

SEQ ID NO: 2408872 - RNA, 19 nt, Homo sapiens
  misc_RNA (1)...(19): siRNA sense strand
caaaagaagaagagaagau

SEQ ID NO: 2408873 - RNA, 19 nt, Homo sapiens
  misc_RNA (1)...(19): siRNA sense strand
cuuacaaagugcaaggaca

SEQ ID NO: 2408874 - RNA, 19 nt, Homo sapiens
  misc_RNA (1)...(19): siRNA sense strand
cugugaagguauauacaau

SEQ ID NO: 2408875 - RNA, 19 nt, Homo sapiens
  misc_RNA (1)...(19): siRNA sense strand
aagaagaagagaagaugau

SEQ ID NO: 2408876 - RNA, 19 nt, Homo sapiens
  misc_RNA (1)...(19): siRNA sense strand
gugcaauugaacaguacaa

SEQ ID NO: 2408877 - RNA, 19 nt, Homo sapiens
  misc_RNA (1)...(19): siRNA sense strand
cccaacugguaaugagauu

SEQ ID NO: 2408878 - RNA, 19 nt, Homo sapiens
  misc_RNA (1)...(19): siRNA sense strand
agaugaauacccagcagaa

SEQ ID NO: 2408879 - RNA, 19 nt, Homo sapiens
  misc_RNA (1)...(19): siRNA sense strand
guuacagagcauaaagaca

SEQ ID NO: 2408880 - RNA, 19 nt, Homo sapiens
  misc_RNA (1)...(19): siRNA sense strand
acaaugacucuuugcggaa

SEQ ID NO: 2408881 - RNA, 19 nt, Homo sapiens
  misc_RNA (1)...(19): siRNA sense strand
aggacaagccagaagaugu

SEQ ID NO: 2408882 - RNA, 19 nt, Homo sapiens
  misc_RNA (1)...(19): siRNA sense strand
aauaaagaccauuacguga

SEQ ID NO: 2408883 - RNA, 19 nt, Homo sapiens
  misc_RNA (1)...(19): siRNA sense strand
augaauacccagcagaaga

SEQ ID NO: 2408884 - RNA, 19 nt, Homo sapiens
  misc_RNA (1)...(19): siRNA sense strand
gaaggaauuaguugagcga

SEQ ID NO: 2408885 - RNA, 19 nt, Homo sapiens
  misc_RNA (1)...(19): siRNA sense strand
gaacacuucugcagggaac

SEQ ID NO: 2408886 - RNA, 19 nt, Homo sapiens
  misc_RNA (1)...(19): siRNA sense strand
ggacaacacaacugcagga

SEQ ID NO: 2408887 - RNA, 19 nt, Homo sapiens
  misc_RNA (1)...(19): siRNA sense strand
guugacagauuuaugccua

SEQ ID NO: 2408888 - RNA, 19 nt, Homo sapiens
  misc_RNA (1)...(19): siRNA sense strand
guauuucaucugugccaaa

SEQ ID NO: 2408889 - RNA, 19 nt, Homo sapiens
  misc_RNA (1)...(19): siRNA sense strand
agaaauugguuacagagca

SEQ ID NO: 2408890 - RNA, 19 nt, Homo sapiens
  misc_RNA (1)...(19): siRNA sense strand
ccaaauaucgagagggacg

SEQ ID NO: 2408891 - RNA, 19 nt, Homo sapiens
  misc_RNA (1)...(19): siRNA sense strand
cuaaaguggauaugcacga

SEQ ID NO: 2408892 - RNA, 19 nt, Homo sapiens
  misc_RNA (1)...(19): siRNA sense strand
acacagaggauuuuagaca

SEQ ID NO: 2408893 - RNA, 19 nt, Homo sapiens
  misc_RNA (1)...(19): siRNA sense strand
cacaacugcaggagcgcaa

SEQ ID NO: 2408894 - RNA, 19 nt, Homo sapiens
  misc_RNA (1)...(19): siRNA sense strand
cggaaaacacagauaaacu

SEQ ID NO: 2408895 - RNA, 19 nt, Homo sapiens
  misc_RNA (1)...(19): siRNA sense strand
acaacauggccuuuggaaa

SEQ ID NO: 2408896 - RNA, 19 nt, Homo sapiens
  misc_RNA (1)...(19): siRNA sense strand
cggccgagacggacaugaa

SEQ ID NO: 2408897 - RNA, 19 nt, Homo sapiens
  misc_RNA (1)...(19): siRNA sense strand
cccugaaucugaugcgcua

SEQ ID NO: 2408898 - RNA, 19 nt, Homo sapiens
  misc_RNA (1)...(19): siRNA sense strand
ccacaggagucauucggga

SEQ ID NO: 2408899 - RNA, 19 nt, Homo sapiens
  misc_RNA (1)...(19): siRNA sense strand
uggcauuggcccugaaucu

SEQ ID NO: 2408900 - RNA, 19 nt, Homo sapiens
  misc_RNA (1)...(19): siRNA sense strand
agaaaauggaggagauaaa

SEQ ID NO: 2408901 - RNA, 19 nt, Homo sapiens
  misc_RNA (1)...(19): siRNA sense strand
uuacaaagguggagaggag

SEQ ID NO: 2408902 - RNA, 19 nt, Homo sapiens
  misc_RNA (1)...(19): siRNA sense strand
aggagaaaauggaggagau

SEQ ID NO: 2408903 - RNA, 19 nt, Homo sapiens
  misc_RNA (1)...(19): siRNA sense strand
agagaagagcucaaggaga

SEQ ID NO: 2408904 - RNA, 19 nt, Homo sapiens
  misc_RNA (1)...(19): siRNA sense strand
aagauauggaugagaagau

SEQ ID NO: 2408905 - RNA, 19 nt, Homo sapiens
  misc_RNA (1)...(19): siRNA sense strand
gcaagaacuacaaggcagu

SEQ ID NO: 2408906 - RNA, 19 nt, Homo sapiens
  misc_RNA (1)...(19): siRNA sense strand
ccaaagcaggagugacaca

SEQ ID NO: 2408907 - RNA, 19 nt, Homo sapiens
  misc_RNA (1)...(19): siRNA sense strand
uuaugaaggaaaugcagaa

SEQ ID NO: 2408908 - RNA, 19 nt, Homo sapiens
  misc_RNA (1)...(19): siRNA sense strand
agggcagaauugaagaaaa

SEQ ID NO: 2408909 - RNA, 19 nt, Homo sapiens
  misc_RNA (1)...(19): siRNA sense strand
gcucuaaagaacaacuaca

SEQ ID NO: 2408910 - RNA, 19 nt, Homo sapiens
  misc_RNA (1)...(19): siRNA sense strand
uggacaaggauuuugauaa

SEQ ID NO: 2408911 - RNA, 19 nt, Homo sapiens
  misc_RNA (1)...(19): siRNA sense strand
uggaugagaagauggacau

SEQ ID NO: 2408912 - RNA, 19 nt, Homo sapiens
  misc_RNA (1)...(19): siRNA sense strand
agaagagcucaaggagaaa

SEQ ID NO: 2408913 - RNA, 19 nt, Homo sapiens
  misc_RNA (1)...(19): siRNA sense strand
caccaaaggagcagcagga

SEQ ID NO: 2408914 - RNA, 19 nt, Homo sapiens
  misc_RNA (1)...(19): siRNA sense strand
aagaaugaacucagggaag

SEQ ID NO: 2408915 - RNA, 19 nt, Homo sapiens
  misc_RNA (1)...(19): siRNA sense strand
gagaaaauggaggagauaa

SEQ ID NO: 2408916 - RNA, 19 nt, Homo sapiens
  misc_RNA (1)...(19): siRNA sense strand
ggaggagauaaaacagaua

SEQ ID NO: 2408917 - RNA, 19 nt, Homo sapiens
  misc_RNA (1)...(19): siRNA sense strand
auaaaggaucuaauggaca

SEQ ID NO: 2408918 - RNA, 19 nt, Homo sapiens
  misc_RNA (1)...(19): siRNA sense strand
ugcagaaagauauggauga

SEQ ID NO: 2408919 - RNA, 19 nt, Homo sapiens
  misc_RNA (1)...(19): siRNA sense strand
aucuaauggacaaggauuu

SEQ ID NO: 2408920 - RNA, 19 nt, Homo sapiens
  misc_RNA (1)...(19): siRNA sense strand
gggaacugcuagagggcau

SEQ ID NO: 2408921 - RNA, 19 nt, Homo sapiens
  misc_RNA (1)...(19): siRNA sense strand
gugaagagccggaggccau

SEQ ID NO: 2408922 - RNA, 19 nt, Homo sapiens
  misc_RNA (1)...(19): siRNA sense strand
uggcaggacuagagggcuu

SEQ ID NO: 2408923 - RNA, 19 nt, Homo sapiens
  misc_RNA (1)...(19): siRNA sense strand
gggaaggggaggaggaaga

SEQ ID NO: 2408924 - RNA, 19 nt, Homo sapiens
  misc_RNA (1)...(19): siRNA sense strand
uagcagagagacagggaga

SEQ ID NO: 2408925 - RNA, 19 nt, Homo sapiens
  misc_RNA (1)...(19): siRNA sense strand
uugaagugcuagugagcga

SEQ ID NO: 2408926 - RNA, 19 nt, Homo sapiens
  misc_RNA (1)...(19): siRNA sense strand
gggaagacuggcugggagu

SEQ ID NO: 2408927 - RNA, 19 nt, Homo sapiens
  misc_RNA (1)...(19): siRNA sense strand
uagagguggcauugagcaa

SEQ ID NO: 2408928 - RNA, 19 nt, Homo sapiens
  misc_RNA (1)...(19): siRNA sense strand
uugaggaggaggaggccua

SEQ ID NO: 2408929 - RNA, 19 nt, Homo sapiens
  misc_RNA (1)...(19): siRNA sense strand
ggaccuauauggacgagca

SEQ ID NO: 2408930 - RNA, 19 nt, Homo sapiens
  misc_RNA (1)...(19): siRNA sense strand
cugugaagaauaagauuga

SEQ ID NO: 2408931 - RNA, 19 nt, Homo sapiens
  misc_RNA (1)...(19): siRNA sense strand
cggagcaggacuuggccua

SEQ ID NO: 2408932 - RNA, 19 nt, Homo sapiens
  misc_RNA (1)...(19): siRNA sense strand
caguaauucagguggcuca

SEQ ID NO: 2408933 - RNA, 19 nt, Homo sapiens
  misc_RNA (1)...(19): siRNA sense strand
cggcaugcacacaguccaa

SEQ ID NO: 2408934 - RNA, 19 nt, Homo sapiens
  misc_RNA (1)...(19): siRNA sense strand
gagaggaugaauuggcuga

SEQ ID NO: 2408935 - RNA, 19 nt, Homo sapiens
  misc_RNA (1)...(19): siRNA sense strand
aagacaauuaccuggagua

SEQ ID NO: 2408936 - RNA, 19 nt, Homo sapiens
  misc_RNA (1)...(19): siRNA sense strand
gugcagaagcaguugguug

SEQ ID NO: 2408937 - RNA, 19 nt, Homo sapiens
  misc_RNA (1)...(19): siRNA sense strand
agacaauuaccuggaguau

SEQ ID NO: 2408938 - RNA, 19 nt, Homo sapiens
  misc_RNA (1)...(19): siRNA sense strand
gggagcuagagguggcauu

SEQ ID NO: 2408939 - RNA, 19 nt, Homo sapiens
  misc_RNA (1)...(19): siRNA sense strand
gcgagacggagcaggacuu

SEQ ID NO: 2408940 - RNA, 19 nt, Homo sapiens
  misc_RNA (1)...(19): siRNA sense strand
cugcagaggagccuggaga

SEQ ID NO: 2408941 - RNA, 19 nt, Homo sapiens
  misc_RNA (1)...(19): siRNA sense strand
agaaauaacuguauccuac

SEQ ID NO: 2408942 - RNA, 19 nt, Homo sapiens
  misc_RNA (1)...(19): siRNA sense strand
cuggagagaaugaggaaag

SEQ ID NO: 2408943 - RNA, 19 nt, Homo sapiens
  misc_RNA (1)...(19): siRNA sense strand
auucuuuaacaguggacua

SEQ ID NO: 2408944 - RNA, 19 nt, Homo sapiens
  misc_RNA (1)...(19): siRNA sense strand
gagcuaaacuggagccguc

SEQ ID NO: 2408945 - RNA, 19 nt, Homo sapiens
  misc_RNA (1)...(19): siRNA sense strand
ggacagaccagcugggacu

SEQ ID NO: 2408946 - RNA, 19 nt, Homo sapiens
  misc_RNA (1)...(19): siRNA sense strand
cugugaggaaccugggaaa

SEQ ID NO: 2408947 - RNA, 19 nt, Homo sapiens
  misc_RNA (1)...(19): siRNA sense strand
gcgccagcuacgaggacua

SEQ ID NO: 2408948 - RNA, 19 nt, Homo sapiens
  misc_RNA (1)...(19): siRNA sense strand
gguuaugggcaguggccga

SEQ ID NO: 2408949 - RNA, 19 nt, Homo sapiens
  misc_RNA (1)...(19): siRNA sense strand
gaggagaaggagaagcaga

SEQ ID NO: 2408950 - RNA, 19 nt, Homo sapiens
  misc_RNA (1)...(19): siRNA sense strand
aggagaaggagaagcagau

SEQ ID NO: 2408951 - RNA, 19 nt, Homo sapiens
  misc_RNA (1)...(19): siRNA sense strand
gcuacgaggacuacgguca

SEQ ID NO: 2408952 - RNA, 19 nt, Homo sapiens
  misc_RNA (1)...(19): siRNA sense strand
gggucaagcugcagcaccu

SEQ ID NO: 2408953 - RNA, 19 nt, Homo sapiens
  misc_RNA (1)...(19): siRNA sense strand
uggaggagaaggagaagca

SEQ ID NO: 2408954 - RNA, 19 nt, Homo sapiens
  misc_RNA (1)...(19): siRNA sense strand
ggcuuuaccaccuggagaa

SEQ ID NO: 2408955 - RNA, 19 nt, Homo sapiens
  misc_RNA (1)...(19): siRNA sense strand
gggaaagaccgguggcaga

SEQ ID NO: 2408956 - RNA, 19 nt, Homo sapiens
  misc_RNA (1)...(19): siRNA sense strand
agagagauccaaagggcaa

SEQ ID NO: 2408957 - RNA, 19 nt, Homo sapiens
  misc_RNA (1)...(19): siRNA sense strand
cgaugaaggaggagcaguu

SEQ ID NO: 2408958 - RNA, 19 nt, Homo sapiens
  misc_RNA (1)...(19): siRNA sense strand
acauggaggcccagaggaa

SEQ ID NO: 2408959 - RNA, 19 nt, Homo sapiens
  misc_RNA (1)...(19): siRNA sense strand
cugcaguaccugugccaua

SEQ ID NO: 2408960 - RNA, 19 nt, Homo sapiens
  misc_RNA (1)...(19): siRNA sense strand
cugggaaagcagagaccua

SEQ ID NO: 2408961 - RNA, 19 nt, Homo sapiens
  misc_RNA (1)...(19): siRNA sense strand
cauugaaggacaaaagaaa

SEQ ID NO: 2408962 - RNA, 19 nt, Homo sapiens
  misc_RNA (1)...(19): siRNA sense strand
augcuaugaugaaggagaa

SEQ ID NO: 2408963 - RNA, 19 nt, Homo sapiens
  misc_RNA (1)...(19): siRNA sense strand
agaaggggcuggaggagaa

SEQ ID NO: 2408964 - RNA, 19 nt, Homo sapiens
  misc_RNA (1)...(19): siRNA sense strand
caaaagaggcaucgaguca

SEQ ID NO: 2408965 - RNA, 19 nt, Homo sapiens
  misc_RNA (1)...(19): siRNA sense strand
aggcagaagaccuggcuga

SEQ ID NO: 2408966 - RNA, 19 nt, Homo sapiens
  misc_RNA (1)...(19): siRNA sense strand
ggaagcagauggaggcugu

SEQ ID NO: 2408967 - RNA, 19 nt, Homo sapiens
  misc_RNA (1)...(19): siRNA sense strand
gauggagggacuuggagaa

SEQ ID NO: 2408968 - RNA, 19 nt, Homo sapiens
  misc_RNA (1)...(19): siRNA sense strand
cgaucaaccauguacaaau

SEQ ID NO: 2408969 - RNA, 19 nt, Homo sapiens
  misc_RNA (1)...(19): siRNA sense strand
ucgccaaagccaaagaaau

SEQ ID NO: 2408970 - RNA, 19 nt, Homo sapiens
  misc_RNA (1)...(19): siRNA sense strand
ucucagacauuuuggacaa

SEQ ID NO: 2408971 - RNA, 19 nt, Homo sapiens
  misc_RNA (1)...(19): siRNA sense strand
gauugaagugacggagaaa

SEQ ID NO: 2408972 - RNA, 19 nt, Homo sapiens
  misc_RNA (1)...(19): siRNA sense strand
gcagaaagcuuaggccaca

SEQ ID NO: 2408973 - RNA, 19 nt, Homo sapiens
  misc_RNA (1)...(19): siRNA sense strand
gcuuaggccacaaagacaa

SEQ ID NO: 2408974 - RNA, 19 nt, Homo sapiens
  misc_RNA (1)...(19): siRNA sense strand
ggagagagccagagcagcu

SEQ ID NO: 2408975 - RNA, 19 nt, Homo sapiens
  misc_RNA (1)...(19): siRNA sense strand
ugaaagaaacggaggcuuc

SEQ ID NO: 2408976 - RNA, 19 nt, Homo sapiens
  misc_RNA (1)...(19): siRNA sense strand
gggacuuggagaaggcaga

SEQ ID NO: 2408977 - RNA, 19 nt, Homo sapiens
  misc_RNA (1)...(19): siRNA sense strand
aagaaacagucauggagga

SEQ ID NO: 2408978 - RNA, 19 nt, Homo sapiens
  misc_RNA (1)...(19): siRNA sense strand
gggaggauguggagaggag

SEQ ID NO: 2408979 - RNA, 19 nt, Homo sapiens
  misc_RNA (1)...(19): siRNA sense strand
gagcaggagcaucaggaga

SEQ ID NO: 2408980 - RNA, 19 nt, Homo sapiens
  misc_RNA (1)...(19): siRNA sense strand
cagcauaccaugaacacga

SEQ ID NO: 2408981 - RNA, 19 nt, Homo sapiens
  misc_RNA (1)...(19): siRNA sense strand
cuugagagcaggagggaug

SEQ ID NO: 2408982 - RNA, 19 nt, Homo sapiens
  misc_RNA (1)...(19): siRNA sense strand
ccacaaagacaaagaccag

SEQ ID NO: 2408983 - RNA, 19 nt, Homo sapiens
  misc_RNA (1)...(19): siRNA sense strand
cgagagugccugagcagca

SEQ ID NO: 2408984 - RNA, 19 nt, Homo sapiens
  misc_RNA (1)...(19): siRNA sense strand
cccacaaagcccaagaaau

SEQ ID NO: 2408985 - RNA, 19 nt, Homo sapiens
  misc_RNA (1)...(19): siRNA sense strand
gaggagaagcaccgagagu

SEQ ID NO: 2408986 - RNA, 19 nt, Homo sapiens
  misc_RNA (1)...(19): siRNA sense strand
gauucaucuugcuggaaaa

SEQ ID NO: 2408987 - RNA, 19 nt, Homo sapiens
  misc_RNA (1)...(19): siRNA sense strand
agaaacagucauggaggaa

SEQ ID NO: 2408988 - RNA, 19 nt, Homo sapiens
  misc_RNA (1)...(19): siRNA sense strand
gcaaggacacugagagccu

SEQ ID NO: 2408989 - RNA, 19 nt, Homo sapiens
  misc_RNA (1)...(19): siRNA sense strand
ggcuggaggaggaggagau

SEQ ID NO: 2408990 - RNA, 19 nt, Homo sapiens
  misc_RNA (1)...(19): siRNA sense strand
aagacaaagaccaggagga

SEQ ID NO: 2408991 - RNA, 19 nt, Homo sapiens
  misc_RNA (1)...(19): siRNA sense strand
ccacaucagugaaagccau

SEQ ID NO: 2408992 - RNA, 19 nt, Homo sapiens
  misc_RNA (1)...(19): siRNA sense strand
agcaggagcaucaggagaa

SEQ ID NO: 2408993 - RNA, 19 nt, Homo sapiens
  misc_RNA (1)...(19): siRNA sense strand
agauggaggcugucuggaa

SEQ ID NO: 2408994 - RNA, 19 nt, Homo sapiens
  misc_RNA (1)...(19): siRNA sense strand
ccaaagagcucagcagcca

SEQ ID NO: 2408995 - RNA, 19 nt, Homo sapiens
  misc_RNA (1)...(19): siRNA sense strand
acgggacaguggugcuaua

SEQ ID NO: 2408996 - RNA, 19 nt, Homo sapiens
  misc_RNA (1)...(19): siRNA sense strand
ccugcaaauauuaagaaga

SEQ ID NO: 2408997 - RNA, 19 nt, Homo sapiens
  misc_RNA (1)...(19): siRNA sense strand
ggaagaaccugcagcuccu

SEQ ID NO: 2408998 - RNA, 19 nt, Homo sapiens
  misc_RNA (1)...(19): siRNA sense strand
uugaagugacggagaaagu

SEQ ID NO: 2408999 - RNA, 19 nt, Homo sapiens
  misc_RNA (1)...(19): siRNA sense strand
gaugcuaugaugaaggaga

SEQ ID NO: 2409000 - RNA, 19 nt, Homo sapiens
  misc_RNA (1)...(19): siRNA sense strand
ccaaggaaagaaacaguca

SEQ ID NO: 2409001 - RNA, 19 nt, Homo sapiens
  misc_RNA (1)...(19): siRNA sense strand
ccuacaaggcccagaaccu

SEQ ID NO: 2409002 - RNA, 19 nt, Homo sapiens
  misc_RNA (1)...(19): siRNA sense strand
uccaggaagaauuaggaua

SEQ ID NO: 2409003 - RNA, 19 nt, Homo sapiens
  misc_RNA (1)...(19): siRNA sense strand
ggacaaaagaaaaggucac

SEQ ID NO: 2409004 - RNA, 19 nt, Homo sapiens
  misc_RNA (1)...(19): siRNA sense strand
ccuugauccuccaacacaa

SEQ ID NO: 2409005 - RNA, 19 nt, Homo sapiens
  misc_RNA (1)...(19): siRNA sense strand
cgauggagggacuuggaga

SEQ ID NO: 2409006 - RNA, 19 nt, Homo sapiens
  misc_RNA (1)...(19): siRNA sense strand
auggaggcccagaggaaga

SEQ ID NO: 2409007 - RNA, 19 nt, Homo sapiens
  misc_RNA (1)...(19): siRNA sense strand
cuaugaugaaggagaagca

SEQ ID NO: 2409008 - RNA, 19 nt, Homo sapiens
  misc_RNA (1)...(19): siRNA sense strand
ccagcuaacucgggcucaa

SEQ ID NO: 2409009 - RNA, 19 nt, Homo sapiens
  misc_RNA (1)...(19): siRNA sense strand
guucaguggaguuuaccua

SEQ ID NO: 2409010 - RNA, 19 nt, Homo sapiens
  misc_RNA (1)...(19): siRNA sense strand
aagaaggcucagaaugcua

SEQ ID NO: 2409011 - RNA, 19 nt, Homo sapiens
  misc_RNA (1)...(19): siRNA sense strand
gaggaaagccaacaggaac

SEQ ID NO: 2409012 - RNA, 19 nt, Homo sapiens
  misc_RNA (1)...(19): siRNA sense strand
uggagaaggcagagcuauc

SEQ ID NO: 2409013 - RNA, 19 nt, Homo sapiens
  misc_RNA (1)...(19): siRNA sense strand
ggcaagaagcgaucaacca

SEQ ID NO: 2409014 - RNA, 19 nt, Homo sapiens
  misc_RNA (1)...(19): siRNA sense strand
cguaaagacgcuagccaaa

SEQ ID NO: 2409015 - RNA, 19 nt, Homo sapiens
  misc_RNA (1)...(19): siRNA sense strand
aggccaagcuccagagaca

SEQ ID NO: 2409016 - RNA, 19 nt, Homo sapiens
  misc_RNA (1)...(19): siRNA sense strand
cggcagaaacagaaggaca

SEQ ID NO: 2409017 - RNA, 19 nt, Homo sapiens
  misc_RNA (1)...(19): siRNA sense strand
cgucacaggaguagagaga

SEQ ID NO: 2409018 - RNA, 19 nt, Homo sapiens
  misc_RNA (1)...(19): siRNA sense strand
ggaugaucauugagagcau

SEQ ID NO: 2409019 - RNA, 19 nt, Homo sapiens
  misc_RNA (1)...(19): siRNA sense strand
auucaaagaucgggagcaa

SEQ ID NO: 2409020 - RNA, 19 nt, Homo sapiens
  misc_RNA (1)...(19): siRNA sense strand
ggagaaagcaaaaguggaa

SEQ ID NO: 2409021 - RNA, 19 nt, Homo sapiens
  misc_RNA (1)...(19): siRNA sense strand
ugguauagaucgaaggagu

SEQ ID NO: 2409022 - RNA, 19 nt, Homo sapiens
  misc_RNA (1)...(19): siRNA sense strand
ugaaauggaugaucgggaa

SEQ ID NO: 2409023 - RNA, 19 nt, Homo sapiens
  misc_RNA (1)...(19): siRNA sense strand
gcuacaaacgggugacaga

SEQ ID NO: 2409024 - RNA, 19 nt, Homo sapiens
  misc_RNA (1)...(19): siRNA sense strand
ucacaggaguagagagaag

SEQ ID NO: 2409025 - RNA, 19 nt, Homo sapiens
  misc_RNA (1)...(19): siRNA sense strand
ccguaaagacgcuagccaa

SEQ ID NO: 2409026 - RNA, 19 nt, Homo sapiens
  misc_RNA (1)...(19): siRNA sense strand
acuccaagaugcugaugaa

SEQ ID NO: 2409027 - RNA, 19 nt, Homo sapiens
  misc_RNA (1)...(19): siRNA sense strand
ggcagaaacagaaggacau

SEQ ID NO: 2409028 - RNA, 19 nt, Homo sapiens
  misc_RNA (1)...(19): siRNA sense strand
ucgaaaaggaaaaggccaa

SEQ ID NO: 2409029 - RNA, 19 nt, Homo sapiens
  misc_RNA (1)...(19): siRNA sense strand
uggcaacaccucagaaaga

SEQ ID NO: 2409030 - RNA, 19 nt, Homo sapiens
  misc_RNA (1)...(19): siRNA sense strand
aggaguagagagaagcuua

SEQ ID NO: 2409031 - RNA, 19 nt, Homo sapiens
  misc_RNA (1)...(19): siRNA sense strand
caguaugguuugagacaac

SEQ ID NO: 2409032 - RNA, 19 nt, Homo sapiens
  misc_RNA (1)...(19): siRNA sense strand
gguauagaucgaaggaguu

SEQ ID NO: 2409033 - RNA, 19 nt, Homo sapiens
  misc_RNA (1)...(19): siRNA sense strand
cuggaggaucgguggaaau

SEQ ID NO: 2409034 - RNA, 19 nt, Homo sapiens
  misc_RNA (1)...(19): siRNA sense strand
gauggagaucgaugugaaa

SEQ ID NO: 2409035 - RNA, 19 nt, Homo sapiens
  misc_RNA (1)...(19): siRNA sense strand
gcagagaacaauacggcca

SEQ ID NO: 2409036 - RNA, 19 nt, Homo sapiens
  misc_RNA (1)...(19): siRNA sense strand
ucacaagcgggcucagaaa

SEQ ID NO: 2409037 - RNA, 19 nt, Homo sapiens
  misc_RNA (1)...(19): siRNA sense strand
cuugauagcaccaggcaca

SEQ ID NO: 2409038 - RNA, 19 nt, Homo sapiens
  misc_RNA (1)...(19): siRNA sense strand
gguuccuggugcagaagaa

SEQ ID NO: 2409039 - RNA, 19 nt, Homo sapiens
  misc_RNA (1)...(19): siRNA sense strand
ggaaucaagaagcagggaa

SEQ ID NO: 2409040 - RNA, 19 nt, Homo sapiens
  misc_RNA (1)...(19): siRNA sense strand
ccaagaaggccaagcucca

SEQ ID NO: 2409041 - RNA, 19 nt, Homo sapiens
  misc_RNA (1)...(19): siRNA sense strand
ugcaggagcugguggccaa

SEQ ID NO: 2409042 - RNA, 19 nt, Homo sapiens
  misc_RNA (1)...(19): siRNA sense strand
cuucaacauuccaggcaga

SEQ ID NO: 2409043 - RNA, 19 nt, Homo sapiens
  misc_RNA (1)...(19): siRNA sense strand
accagaaacuuaucagcaa

SEQ ID NO: 2409044 - RNA, 19 nt, Homo sapiens
  misc_RNA (1)...(19): siRNA sense strand
gugcaggucagcuggguau

SEQ ID NO: 2409045 - RNA, 19 nt, Homo sapiens
  misc_RNA (1)...(19): siRNA sense strand
ccaguagggaacaaagcaa

SEQ ID NO: 2409046 - RNA, 19 nt, Homo sapiens
  misc_RNA (1)...(19): siRNA sense strand
gaaucaagaagcagggaag

SEQ ID NO: 2409047 - RNA, 19 nt, Homo sapiens
  misc_RNA (1)...(19): siRNA sense strand
gacacaaccaagaagaaau

SEQ ID NO: 2409048 - RNA, 19 nt, Homo sapiens
  misc_RNA (1)...(19): siRNA sense strand
cgaccgagucuuaucagaa

SEQ ID NO: 2409049 - RNA, 19 nt, Homo sapiens
  misc_RNA (1)...(19): siRNA sense strand
gugagcaugaccagguaua

SEQ ID NO: 2409050 - RNA, 19 nt, Homo sapiens
  misc_RNA (1)...(19): siRNA sense strand
ccacggagcagcugaacca

SEQ ID NO: 2409051 - RNA, 19 nt, Homo sapiens
  misc_RNA (1)...(19): siRNA sense strand
uggcagaagaugcuggaca

SEQ ID NO: 2409052 - RNA, 19 nt, Homo sapiens
  misc_RNA (1)...(19): siRNA sense strand
gugcagaagaagucaccau

SEQ ID NO: 2409053 - RNA, 19 nt, Homo sapiens
  misc_RNA (1)...(19): siRNA sense strand
gaaauggaugaucgggaau

SEQ ID NO: 2409054 - RNA, 19 nt, Homo sapiens
  misc_RNA (1)...(19): siRNA sense strand
gguuucagucagugcauau

SEQ ID NO: 2409055 - RNA, 19 nt, Homo sapiens
  misc_RNA (1)...(19): siRNA sense strand
agaccaacgcaguauggaa

SEQ ID NO: 2409056 - RNA, 19 nt, Homo sapiens
  misc_RNA (1)...(19): siRNA sense strand
ccaaauagaacacgagccu

SEQ ID NO: 2409057 - RNA, 19 nt, Homo sapiens
  misc_RNA (1)...(19): siRNA sense strand
cugcaggaccaguuggaca

SEQ ID NO: 2409058 - RNA, 19 nt, Homo sapiens
  misc_RNA (1)...(19): siRNA sense strand
ggaugaucgggaauugaua

SEQ ID NO: 2409059 - RNA, 19 nt, Homo sapiens
  misc_RNA (1)...(19): siRNA sense strand
gagcagcugaagaccguaa

SEQ ID NO: 2409060 - RNA, 19 nt, Homo sapiens
  misc_RNA (1)...(19): siRNA sense strand
cagcauagccgcaaccuca

SEQ ID NO: 2409061 - RNA, 19 nt, Homo sapiens
  misc_RNA (1)...(19): siRNA sense strand
uugagaaggugcagaucca

SEQ ID NO: 2409062 - RNA, 19 nt, Homo sapiens
  misc_RNA (1)...(19): siRNA sense strand
ugaugaacauugagaaggu

SEQ ID NO: 2409063 - RNA, 19 nt, Homo sapiens
  misc_RNA (1)...(19): siRNA sense strand
ccucaaagcgcaaguccca

SEQ ID NO: 2409064 - RNA, 19 nt, Homo sapiens
  misc_RNA (1)...(19): siRNA sense strand
ggcccaaccuggugcagau

SEQ ID NO: 2409065 - RNA, 19 nt, Homo sapiens
  misc_RNA (1)...(19): siRNA sense strand
ggucuggagaagcucgaaa

SEQ ID NO: 2409066 - RNA, 19 nt, Homo sapiens
  misc_RNA (1)...(19): siRNA sense strand
ggaaagacuucaagggaga

SEQ ID NO: 2409067 - RNA, 19 nt, Homo sapiens
  misc_RNA (1)...(19): siRNA sense strand
cgagaaugcgagagaaaga

SEQ ID NO: 2409068 - RNA, 19 nt, Homo sapiens
  misc_RNA (1)...(19): siRNA sense strand
cugcgaugacugugagaaa

SEQ ID NO: 2409069 - RNA, 19 nt, Homo sapiens
  misc_RNA (1)...(19): siRNA sense strand
ccauugaagaugugagaga

SEQ ID NO: 2409070 - RNA, 19 nt, Homo sapiens
  misc_RNA (1)...(19): siRNA sense strand
auucaagggaacaggauua

SEQ ID NO: 2409071 - RNA, 19 nt, Homo sapiens
  misc_RNA (1)...(19): siRNA sense strand
cggaagugcaggacaacaa

SEQ ID NO: 2409072 - RNA, 19 nt, Homo sapiens
  misc_RNA (1)...(19): siRNA sense strand
gauuauggcaagagauaga

SEQ ID NO: 2409073 - RNA, 19 nt, Homo sapiens
  misc_RNA (1)...(19): siRNA sense strand
cuacaaggccagcgcggaa

SEQ ID NO: 2409074 - RNA, 19 nt, Homo sapiens
  misc_RNA (1)...(19): siRNA sense strand
cagaacagacugaaggaga

SEQ ID NO: 2409075 - RNA, 19 nt, Homo sapiens
  misc_RNA (1)...(19): siRNA sense strand
aucuagaaauggugcguua

SEQ ID NO: 2409076 - RNA, 19 nt, Homo sapiens
  misc_RNA (1)...(19): siRNA sense strand
cuggucaguuuaagggaaa

SEQ ID NO: 2409077 - RNA, 19 nt, Homo sapiens
  misc_RNA (1)...(19): siRNA sense strand
cuucuaacaauaagggcaa

SEQ ID NO: 2409078 - RNA, 19 nt, Homo sapiens
  misc_RNA (1)...(19): siRNA sense strand
uccgagaaugcgagagaaa

SEQ ID NO: 2409079 - RNA, 19 nt, Homo sapiens
  misc_RNA (1)...(19): siRNA sense strand
gugaagugucuguuagauu

SEQ ID NO: 2409080 - RNA, 19 nt, Homo sapiens
  misc_RNA (1)...(19): siRNA sense strand
ccagaaagaaguggagaga

SEQ ID NO: 2409081 - RNA, 19 nt, Homo sapiens
  misc_RNA (1)...(19): siRNA sense strand
gagaaaggcaacagcgacu

SEQ ID NO: 2409082 - RNA, 19 nt, Homo sapiens
  misc_RNA (1)...(19): siRNA sense strand
aagaaggaccucaguggaa

SEQ ID NO: 2409083 - RNA, 19 nt, Homo sapiens
  misc_RNA (1)...(19): siRNA sense strand
gugagagaguucuugggaa

SEQ ID NO: 2409084 - RNA, 19 nt, Homo sapiens
  misc_RNA (1)...(19): siRNA sense strand
ugagagaguucuugggaag

SEQ ID NO: 2409085 - RNA, 19 nt, Homo sapiens
  misc_RNA (1)...(19): siRNA sense strand
uggaauggacagaggagga

SEQ ID NO: 2409086 - RNA, 19 nt, Homo sapiens
  misc_RNA (1)...(19): siRNA sense strand
cauuagaugauguggcuga

SEQ ID NO: 2409087 - RNA, 19 nt, Homo sapiens
  misc_RNA (1)...(19): siRNA sense strand
gguaaaugccacagacuac

SEQ ID NO: 2409088 - RNA, 19 nt, Homo sapiens
  misc_RNA (1)...(19): siRNA sense strand
gggaagacacuccgagcga

SEQ ID NO: 2409089 - RNA, 19 nt, Homo sapiens
  misc_RNA (1)...(19): siRNA sense strand
gguuuagcagcuuggcaaa

SEQ ID NO: 2409090 - RNA, 19 nt, Homo sapiens
  misc_RNA (1)...(19): siRNA sense strand
gcacauugcaucagguaac

SEQ ID NO: 2409091 - RNA, 19 nt, Homo sapiens
  misc_RNA (1)...(19): siRNA sense strand
ggacagaggaggaccugga

SEQ ID NO: 2409092 - RNA, 19 nt, Homo sapiens
  misc_RNA (1)...(19): siRNA sense strand
cuguuagauucgaaugcaa

SEQ ID NO: 2409093 - RNA, 19 nt, Homo sapiens
  misc_RNA (1)...(19): siRNA sense strand
agauagaagugucccuaau

SEQ ID NO: 2409094 - RNA, 19 nt, Homo sapiens
  misc_RNA (1)...(19): siRNA sense strand
cgaagcugccauugaauau

SEQ ID NO: 2409095 - RNA, 19 nt, Homo sapiens
  misc_RNA (1)...(19): siRNA sense strand
gcucaaggcaggaggagac

SEQ ID NO: 2409096 - RNA, 19 nt, Homo sapiens
  misc_RNA (1)...(19): siRNA sense strand
ucacacugagacagaauaa

SEQ ID NO: 2409097 - RNA, 19 nt, Homo sapiens
  misc_RNA (1)...(19): siRNA sense strand
gcagaaagauauuggugug

SEQ ID NO: 2409098 - RNA, 19 nt, Homo sapiens
  misc_RNA (1)...(19): siRNA sense strand
gggaaagacuucaagggag

SEQ ID NO: 2409099 - RNA, 19 nt, Homo sapiens
  misc_RNA (1)...(19): siRNA sense strand
caucagguaaccagaaaga

SEQ ID NO: 2409100 - RNA, 19 nt, Homo sapiens
  misc_RNA (1)...(19): siRNA sense strand
ccugaaaaccauugaagau

SEQ ID NO: 2409101 - RNA, 19 nt, Homo sapiens
  misc_RNA (1)...(19): siRNA sense strand
agcaggcaguggagauaua

SEQ ID NO: 2409102 - RNA, 19 nt, Homo sapiens
  misc_RNA (1)...(19): siRNA sense strand
gcagcuuggcaaaggauga

SEQ ID NO: 2409103 - RNA, 19 nt, Homo sapiens
  misc_RNA (1)...(19): siRNA sense strand
ccauuaacgcuucuaacaa

SEQ ID NO: 2409104 - RNA, 19 nt, Homo sapiens
  misc_RNA (1)...(19): siRNA sense strand
uggagagacuucugagcca

SEQ ID NO: 2409105 - RNA, 19 nt, Homo sapiens
  misc_RNA (1)...(19): siRNA sense strand
ggaccauggaggcaaguga

SEQ ID NO: 2409106 - RNA, 19 nt, Homo sapiens
  misc_RNA (1)...(19): siRNA sense strand
ugguaaaugccacagacua

SEQ ID NO: 2409107 - RNA, 19 nt, Homo sapiens
  misc_RNA (1)...(19): siRNA sense strand
caaggcaggaggagaccaa

SEQ ID NO: 2409108 - RNA, 19 nt, Homo sapiens
  misc_RNA (1)...(19): siRNA sense strand
gcugauggagaucuagaaa

SEQ ID NO: 2409109 - RNA, 19 nt, Homo sapiens
  misc_RNA (1)...(19): siRNA sense strand
gugcguuaccuguuggaau

SEQ ID NO: 2409110 - RNA, 19 nt, Homo sapiens
  misc_RNA (1)...(19): siRNA sense strand
gcucagaagaggcuggcga

SEQ ID NO: 2409111 - RNA, 19 nt, Homo sapiens
  misc_RNA (1)...(19): siRNA sense strand
uguuagauucgaaugcaaa

SEQ ID NO: 2409112 - RNA, 19 nt, Homo sapiens
  misc_RNA (1)...(19): siRNA sense strand
acuguuaagaucaggaaaa

SEQ ID NO: 2409113 - RNA, 19 nt, Homo sapiens
  misc_RNA (1)...(19): siRNA sense strand
caggacaacaaugggaaua

SEQ ID NO: 2409114 - RNA, 19 nt, Homo sapiens
  misc_RNA (1)...(19): siRNA sense strand
ccaaggcgucauagagaca

SEQ ID NO: 2409115 - RNA, 19 nt, Homo sapiens
  misc_RNA (1)...(19): siRNA sense strand
ccagggaggcaaaguguca

SEQ ID NO: 2409116 - RNA, 19 nt, Homo sapiens
  misc_RNA (1)...(19): siRNA sense strand
agguuuagcagcuuggcaa

SEQ ID NO: 2409117 - RNA, 19 nt, Homo sapiens
  misc_RNA (1)...(19): siRNA sense strand
gcgaugacugugagaaacu

SEQ ID NO: 2409118 - RNA, 19 nt, Homo sapiens
  misc_RNA (1)...(19): siRNA sense strand
gcaaaguggcccaaaucca

SEQ ID NO: 2409119 - RNA, 19 nt, Homo sapiens
  misc_RNA (1)...(19): siRNA sense strand
aggaggagaccaagaagga

SEQ ID NO: 2409120 - RNA, 19 nt, Homo sapiens
  misc_RNA (1)...(19): siRNA sense strand
gaaaaguggugcagcucau

SEQ ID NO: 2409121 - RNA, 19 nt, Homo sapiens
  misc_RNA (1)...(19): siRNA sense strand
gcaggacaacaaugggaau

SEQ ID NO: 2409122 - RNA, 19 nt, Homo sapiens
  misc_RNA (1)...(19): siRNA sense strand
gaggagaccaagaaggacu

SEQ ID NO: 2409123 - RNA, 19 nt, Homo sapiens
  misc_RNA (1)...(19): siRNA sense strand
augcaaaacccaauaagaa

SEQ ID NO: 2409124 - RNA, 19 nt, Homo sapiens
  misc_RNA (1)...(19): siRNA sense strand
uggcugaaacugaccgcaa

SEQ ID NO: 2409125 - RNA, 19 nt, Homo sapiens
  misc_RNA (1)...(19): siRNA sense strand
ccgagcgauuugacaggaa

SEQ ID NO: 2409126 - RNA, 19 nt, Homo sapiens
  misc_RNA (1)...(19): siRNA sense strand
ggcccaaauccauggcauu

SEQ ID NO: 2409127 - RNA, 19 nt, Homo sapiens
  misc_RNA (1)...(19): siRNA sense strand
agggaacaggauuaaauua

SEQ ID NO: 2409128 - RNA, 19 nt, Homo sapiens
  misc_RNA (1)...(19): siRNA sense strand
uguuauacuugcuugugaa

SEQ ID NO: 2409129 - RNA, 19 nt, Homo sapiens
  misc_RNA (1)...(19): siRNA sense strand
gugcugagcuggaccggaa

SEQ ID NO: 2409130 - RNA, 19 nt, Homo sapiens
  misc_RNA (1)...(19): siRNA sense strand
ggaaggacccuaaggacca

SEQ ID NO: 2409131 - RNA, 19 nt, Homo sapiens
  misc_RNA (1)...(19): siRNA sense strand
gcagaagggccaugugcca

SEQ ID NO: 2409132 - RNA, 19 nt, Homo sapiens
  misc_RNA (1)...(19): siRNA sense strand
agguagaggaggccaucaa

SEQ ID NO: 2409133 - RNA, 19 nt, Homo sapiens
  misc_RNA (1)...(19): siRNA sense strand
aaggagaaccugaggcgga

SEQ ID NO: 2409134 - RNA, 19 nt, Homo sapiens
  misc_RNA (1)...(19): siRNA sense strand
ccaaguacgacaaggugga

SEQ ID NO: 2409135 - RNA, 19 nt, Homo sapiens
  misc_RNA (1)...(19): siRNA sense strand
gggagauucagaagcgcuu

SEQ ID NO: 2409136 - RNA, 19 nt, Homo sapiens
  misc_RNA (1)...(19): siRNA sense strand
ggguaaagaacaagagaga

SEQ ID NO: 2409137 - RNA, 19 nt, Homo sapiens
  misc_RNA (1)...(19): siRNA sense strand
cgugauuaccggaaagaaa

SEQ ID NO: 2409138 - RNA, 19 nt, Homo sapiens
  misc_RNA (1)...(19): siRNA sense strand
gcgagggaccaaagagaaa

SEQ ID NO: 2409139 - RNA, 19 nt, Homo sapiens
  misc_RNA (1)...(19): siRNA sense strand
aagcaaaggaagagcauau

SEQ ID NO: 2409140 - RNA, 19 nt, Homo sapiens
  misc_RNA (1)...(19): siRNA sense strand
aaguaaggaaggaaagaua

SEQ ID NO: 2409141 - RNA, 19 nt, Homo sapiens
  misc_RNA (1)...(19): siRNA sense strand
gaaacauggcaaaggacaa

SEQ ID NO: 2409142 - RNA, 19 nt, Homo sapiens
  misc_RNA (1)...(19): siRNA sense strand
cugaagaagaagaaagaga

SEQ ID NO: 2409143 - RNA, 19 nt, Homo sapiens
  misc_RNA (1)...(19): siRNA sense strand
augugaaaguagaggaaaa

SEQ ID NO: 2409144 - RNA, 19 nt, Homo sapiens
  misc_RNA (1)...(19): siRNA sense strand
uggaaaagggagaaagaua

SEQ ID NO: 2409145 - RNA, 19 nt, Homo sapiens
  misc_RNA (1)...(19): siRNA sense strand
gugaacugcagaagggaaa

SEQ ID NO: 2409146 - RNA, 19 nt, Homo sapiens
  misc_RNA (1)...(19): siRNA sense strand
aaucaagacagaaaggaaa

SEQ ID NO: 2409147 - RNA, 19 nt, Homo sapiens
  misc_RNA (1)...(19): siRNA sense strand
ggaugaugaaauagaagaa

SEQ ID NO: 2409148 - RNA, 19 nt, Homo sapiens
  misc_RNA (1)...(19): siRNA sense strand
gaagauaaaccaagggcga

SEQ ID NO: 2409149 - RNA, 19 nt, Homo sapiens
  misc_RNA (1)...(19): siRNA sense strand
agaaaggagagaaggaaga

SEQ ID NO: 2409150 - RNA, 19 nt, Homo sapiens
  misc_RNA (1)...(19): siRNA sense strand
agaagaaacuagagugaac

SEQ ID NO: 2409151 - RNA, 19 nt, Homo sapiens
  misc_RNA (1)...(19): siRNA sense strand
agaacaagaaagagauaga

SEQ ID NO: 2409152 - RNA, 19 nt, Homo sapiens
  misc_RNA (1)...(19): siRNA sense strand
acacagacucacagaggaa

SEQ ID NO: 2409153 - RNA, 19 nt, Homo sapiens
  misc_RNA (1)...(19): siRNA sense strand
gugaagaggaaguaccuaa

SEQ ID NO: 2409154 - RNA, 19 nt, Homo sapiens
  misc_RNA (1)...(19): siRNA sense strand
aggagagaaggaagagaaa

SEQ ID NO: 2409155 - RNA, 19 nt, Homo sapiens
  misc_RNA (1)...(19): siRNA sense strand
auacagagagaacgagaaa

SEQ ID NO: 2409156 - RNA, 19 nt, Homo sapiens
  misc_RNA (1)...(19): siRNA sense strand
gucgagaggacaugagaaa

SEQ ID NO: 2409157 - RNA, 19 nt, Homo sapiens
  misc_RNA (1)...(19): siRNA sense strand
ggcaaaggacaaagaaaga

SEQ ID NO: 2409158 - RNA, 19 nt, Homo sapiens
  misc_RNA (1)...(19): siRNA sense strand
ggguuaaugcaaagaccua

SEQ ID NO: 2409159 - RNA, 19 nt, Homo sapiens
  misc_RNA (1)...(19): siRNA sense strand
augaaaguaaggaaggaaa

SEQ ID NO: 2409160 - RNA, 19 nt, Homo sapiens
  misc_RNA (1)...(19): siRNA sense strand
ggaaagacagaaagcccaa

SEQ ID NO: 2409161 - RNA, 19 nt, Homo sapiens
  misc_RNA (1)...(19): siRNA sense strand
agagaacaagaaagagaua

SEQ ID NO: 2409162 - RNA, 19 nt, Homo sapiens
  misc_RNA (1)...(19): siRNA sense strand
acaagaaagagauagacaa

SEQ ID NO: 2409163 - RNA, 19 nt, Homo sapiens
  misc_RNA (1)...(19): siRNA sense strand
aggaagagcauaugaaagu

SEQ ID NO: 2409164 - RNA, 19 nt, Homo sapiens
  misc_RNA (1)...(19): siRNA sense strand
aaaucaagacagaaaggaa

SEQ ID NO: 2409165 - RNA, 19 nt, Homo sapiens
  misc_RNA (1)...(19): siRNA sense strand
auucuagggcaaaggauaa

SEQ ID NO: 2409166 - RNA, 19 nt, Homo sapiens
  misc_RNA (1)...(19): siRNA sense strand
aagagaaagaagugacaga

SEQ ID NO: 2409167 - RNA, 19 nt, Homo sapiens
  misc_RNA (1)...(19): siRNA sense strand
agggagaaagauagggaga

SEQ ID NO: 2409168 - RNA, 19 nt, Homo sapiens
  misc_RNA (1)...(19): siRNA sense strand
gugagaaaggagagaagga

SEQ ID NO: 2409169 - RNA, 19 nt, Homo sapiens
  misc_RNA (1)...(19): siRNA sense strand
ccagagaccaagagaacca

SEQ ID NO: 2409170 - RNA, 19 nt, Homo sapiens
  misc_RNA (1)...(19): siRNA sense strand
caccugaggcagugagcaa

SEQ ID NO: 2409171 - RNA, 19 nt, Homo sapiens
  misc_RNA (1)...(19): siRNA sense strand
gggagaaagauagggagaa

SEQ ID NO: 2409172 - RNA, 19 nt, Homo sapiens
  misc_RNA (1)...(19): siRNA sense strand
ggaaaagaaaauacagaga

SEQ ID NO: 2409173 - RNA, 19 nt, Homo sapiens
  misc_RNA (1)...(19): siRNA sense strand
aaagcaaagcaaaggaaga

SEQ ID NO: 2409174 - RNA, 19 nt, Homo sapiens
  misc_RNA (1)...(19): siRNA sense strand
gcuaaaagcaguugagauc

SEQ ID NO: 2409175 - RNA, 19 nt, Homo sapiens
  misc_RNA (1)...(19): siRNA sense strand
ggauguaaccaagcagaaa

SEQ ID NO: 2409176 - RNA, 19 nt, Homo sapiens
  misc_RNA (1)...(19): siRNA sense strand
aaaucaagcaguuggugaa

SEQ ID NO: 2409177 - RNA, 19 nt, Homo sapiens
  misc_RNA (1)...(19): siRNA sense strand
ggaaggaaagauaugaaaa

SEQ ID NO: 2409178 - RNA, 19 nt, Homo sapiens
  misc_RNA (1)...(19): siRNA sense strand
guaaagaacaagagagacc

SEQ ID NO: 2409179 - RNA, 19 nt, Homo sapiens
  misc_RNA (1)...(19): siRNA sense strand
ggaccaaagagaaagaagu

SEQ ID NO: 2409180 - RNA, 19 nt, Homo sapiens
  misc_RNA (1)...(19): siRNA sense strand
aaggagagaaggaagagaa

SEQ ID NO: 2409181 - RNA, 19 nt, Homo sapiens
  misc_RNA (1)...(19): siRNA sense strand
gggcgagggaccaaagaga

SEQ ID NO: 2409182 - RNA, 19 nt, Homo sapiens
  misc_RNA (1)...(19): siRNA sense strand
gauccaacaaaaugagaaa

SEQ ID NO: 2409183 - RNA, 19 nt, Homo sapiens
  misc_RNA (1)...(19): siRNA sense strand
aagaaagaaaccaagagaa

SEQ ID NO: 2409184 - RNA, 19 nt, Homo sapiens
  misc_RNA (1)...(19): siRNA sense strand
auagaagaaacuagaguga

SEQ ID NO: 2409185 - RNA, 19 nt, Homo sapiens
  misc_RNA (1)...(19): siRNA sense strand
aggaaggaaagauaugaaa

SEQ ID NO: 2409186 - RNA, 19 nt, Homo sapiens
  misc_RNA (1)...(19): siRNA sense strand
cagaaagaucucaguggau

SEQ ID NO: 2409187 - RNA, 19 nt, Homo sapiens
  misc_RNA (1)...(19): siRNA sense strand
gagaacgagaaauggaaaa

SEQ ID NO: 2409188 - RNA, 19 nt, Homo sapiens
  misc_RNA (1)...(19): siRNA sense strand
acagaauaccacaagagaa

SEQ ID NO: 2409189 - RNA, 19 nt, Homo sapiens
  misc_RNA (1)...(19): siRNA sense strand
ugaugugaaaguagaggaa

SEQ ID NO: 2409190 - RNA, 19 nt, Homo sapiens
  misc_RNA (1)...(19): siRNA sense strand
ccuaaaagucagaggaaga

SEQ ID NO: 2409191 - RNA, 19 nt, Homo sapiens
  misc_RNA (1)...(19): siRNA sense strand
caaagaagauguugccgua

SEQ ID NO: 2409192 - RNA, 19 nt, Homo sapiens
  misc_RNA (1)...(19): siRNA sense strand
caggaaaaguggacagcua

SEQ ID NO: 2409193 - RNA, 19 nt, Homo sapiens
  misc_RNA (1)...(19): siRNA sense strand
gauaagaaacccaggggaa

SEQ ID NO: 2409194 - RNA, 19 nt, Homo sapiens
  misc_RNA (1)...(19): siRNA sense strand
ggaagagaucacaaagcaa

SEQ ID NO: 2409195 - RNA, 19 nt, Homo sapiens
  misc_RNA (1)...(19): siRNA sense strand
caauggacaaagugaagaa

SEQ ID NO: 2409196 - RNA, 19 nt, Homo sapiens
  misc_RNA (1)...(19): siRNA sense strand
aggcagugcuguuaugcaa

SEQ ID NO: 2409197 - RNA, 19 nt, Homo sapiens
  misc_RNA (1)...(19): siRNA sense strand
ccucaauggacaaagugaa

SEQ ID NO: 2409198 - RNA, 19 nt, Homo sapiens
  misc_RNA (1)...(19): siRNA sense strand
cuguggauaaugaaggaaa

SEQ ID NO: 2409199 - RNA, 19 nt, Homo sapiens
  misc_RNA (1)...(19): siRNA sense strand
cagccagaacaguggaaga

SEQ ID NO: 2409200 - RNA, 19 nt, Homo sapiens
  misc_RNA (1)...(19): siRNA sense strand
caaaggauaaucaggaaaa

SEQ ID NO: 2409201 - RNA, 19 nt, Homo sapiens
  misc_RNA (1)...(19): siRNA sense strand
gcaacaaaccaaacaaaau

SEQ ID NO: 2409202 - RNA, 19 nt, Homo sapiens
  misc_RNA (1)...(19): siRNA sense strand
ggacaguguucccuggaca

SEQ ID NO: 2409203 - RNA, 19 nt, Homo sapiens
  misc_RNA (1)...(19): siRNA sense strand
caugaaucacacaagguaa

SEQ ID NO: 2409204 - RNA, 19 nt, Homo sapiens
  misc_RNA (1)...(19): siRNA sense strand
uguggauaaugaaggaaau

SEQ ID NO: 2409205 - RNA, 19 nt, Homo sapiens
  misc_RNA (1)...(19): siRNA sense strand
auuugcaagcuguggauaa

SEQ ID NO: 2409206 - RNA, 19 nt, Homo sapiens
  misc_RNA (1)...(19): siRNA sense strand
guggaagaguucagacacu

SEQ ID NO: 2409207 - RNA, 19 nt, Homo sapiens
  misc_RNA (1)...(19): siRNA sense strand
agcaaaggauaaucaggaa

SEQ ID NO: 2409208 - RNA, 19 nt, Homo sapiens
  misc_RNA (1)...(19): siRNA sense strand
ugagaaagaagacggacuu

SEQ ID NO: 2409209 - RNA, 19 nt, Homo sapiens
  misc_RNA (1)...(19): siRNA sense strand
cuaacugccaugaagcaaa

SEQ ID NO: 2409210 - RNA, 19 nt, Homo sapiens
  misc_RNA (1)...(19): siRNA sense strand
gauacauaaccaaagaaga

SEQ ID NO: 2409211 - RNA, 19 nt, Homo sapiens
  misc_RNA (1)...(19): siRNA sense strand
ugaaagugauguugaaccu

SEQ ID NO: 2409212 - RNA, 19 nt, Homo sapiens
  misc_RNA (1)...(19): siRNA sense strand
aagcaagcauguaaagcga

SEQ ID NO: 2409213 - RNA, 19 nt, Homo sapiens
  misc_RNA (1)...(19): siRNA sense strand
aggaugaagcagccacuua

SEQ ID NO: 2409214 - RNA, 19 nt, Homo sapiens
  misc_RNA (1)...(19): siRNA sense strand
cagaaagacaccuccaaaa

SEQ ID NO: 2409215 - RNA, 19 nt, Homo sapiens
  misc_RNA (1)...(19): siRNA sense strand
aagcaacaaaccaaacaaa

SEQ ID NO: 2409216 - RNA, 19 nt, Homo sapiens
  misc_RNA (1)...(19): siRNA sense strand
cgauuaugaaagugauguu

SEQ ID NO: 2409217 - RNA, 19 nt, Homo sapiens
  misc_RNA (1)...(19): siRNA sense strand
guucugugcaaguaggaau

SEQ ID NO: 2409218 - RNA, 19 nt, Homo sapiens
  misc_RNA (1)...(19): siRNA sense strand
cauacacaguccaggcaga

SEQ ID NO: 2409219 - RNA, 19 nt, Homo sapiens
  misc_RNA (1)...(19): siRNA sense strand
ccaugaagcaaaggauaau

SEQ ID NO: 2409220 - RNA, 19 nt, Homo sapiens
  misc_RNA (1)...(19): siRNA sense strand
gaaauuggcugccucggaa

SEQ ID NO: 2409221 - RNA, 19 nt, Homo sapiens
  misc_RNA (1)...(19): siRNA sense strand
caguggaagaguucagaca

SEQ ID NO: 2409222 - RNA, 19 nt, Homo sapiens
  misc_RNA (1)...(19): siRNA sense strand
ugggaagauuuaccagcaa

SEQ ID NO: 2409223 - RNA, 19 nt, Homo sapiens
  misc_RNA (1)...(19): siRNA sense strand
agaccuuugggaagauuua

SEQ ID NO: 2409224 - RNA, 19 nt, Homo sapiens
  misc_RNA (1)...(19): siRNA sense strand
ccagacaagcuaaggaaag

SEQ ID NO: 2409225 - RNA, 19 nt, Homo sapiens
  misc_RNA (1)...(19): siRNA sense strand
ugccaugaagcaaaggaua

SEQ ID NO: 2409226 - RNA, 19 nt, Homo sapiens
  misc_RNA (1)...(19): siRNA sense strand
gugcaaauccucagccacu

SEQ ID NO: 2409227 - RNA, 19 nt, Homo sapiens
  misc_RNA (1)...(19): siRNA sense strand
gcgcaggugucaaaggaug

SEQ ID NO: 2409228 - RNA, 19 nt, Homo sapiens
  misc_RNA (1)...(19): siRNA sense strand
aaaguguacaggaggccaa

SEQ ID NO: 2409229 - RNA, 19 nt, Homo sapiens
  misc_RNA (1)...(19): siRNA sense strand
ugacagcaaggaagaaaca

SEQ ID NO: 2409230 - RNA, 19 nt, Homo sapiens
  misc_RNA (1)...(19): siRNA sense strand
aagcaaaggauaaucagga

SEQ ID NO: 2409231 - RNA, 19 nt, Homo sapiens
  misc_RNA (1)...(19): siRNA sense strand
ggaaaaguggacagcuauu

SEQ ID NO: 2409232 - RNA, 19 nt, Homo sapiens
  misc_RNA (1)...(19): siRNA sense strand
ccguagccucaauggacaa

SEQ ID NO: 2409233 - RNA, 19 nt, Homo sapiens
  misc_RNA (1)...(19): siRNA sense strand
caaagagagaacugccaga

SEQ ID NO: 2409234 - RNA, 19 nt, Homo sapiens
  misc_RNA (1)...(19): siRNA sense strand
gggagagaggaaagccaaa

SEQ ID NO: 2409235 - RNA, 19 nt, Homo sapiens
  misc_RNA (1)...(19): siRNA sense strand
cagaacagaaagaggaagu

SEQ ID NO: 2409236 - RNA, 19 nt, Homo sapiens
  misc_RNA (1)...(19): siRNA sense strand
uugaggagggagagaggaa

SEQ ID NO: 2409237 - RNA, 19 nt, Homo sapiens
  misc_RNA (1)...(19): siRNA sense strand
aggaaauagaacagaucuu

SEQ ID NO: 2409238 - RNA, 19 nt, Homo sapiens
  misc_RNA (1)...(19): siRNA sense strand
ugucaguugaggagggaga

SEQ ID NO: 2409239 - RNA, 19 nt, Homo sapiens
  misc_RNA (1)...(19): siRNA sense strand
ccucaggagcaaacaguca

SEQ ID NO: 2409240 - RNA, 19 nt, Homo sapiens
  misc_RNA (1)...(19): siRNA sense strand
uggaaaagccucaggagca

SEQ ID NO: 2409241 - RNA, 19 nt, Homo sapiens
  misc_RNA (1)...(19): siRNA sense strand
uuuauugaaacuagggcaa

SEQ ID NO: 2409242 - RNA, 19 nt, Homo sapiens
  misc_RNA (1)...(19): siRNA sense strand
gugacauaaaacuggaaaa

SEQ ID NO: 2409243 - RNA, 19 nt, Homo sapiens
  misc_RNA (1)...(19): siRNA sense strand
caucacgcuaguaggaaau

SEQ ID NO: 2409244 - RNA, 19 nt, Homo sapiens
  misc_RNA (1)...(19): siRNA sense strand
gagcaaacagucagcgaag

SEQ ID NO: 2409245 - RNA, 19 nt, Homo sapiens
  misc_RNA (1)...(19): siRNA sense strand
ugucagaacagaaagagga

SEQ ID NO: 2409246 - RNA, 19 nt, Homo sapiens
  misc_RNA (1)...(19): siRNA sense strand
gacaacaccuaucaggcaa

SEQ ID NO: 2409247 - RNA, 19 nt, Homo sapiens
  misc_RNA (1)...(19): siRNA sense strand
gucagaacagaaagaggaa

SEQ ID NO: 2409248 - RNA, 19 nt, Homo sapiens
  misc_RNA (1)...(19): siRNA sense strand
ggagcaaacagucagcgaa

SEQ ID NO: 2409249 - RNA, 19 nt, Homo sapiens
  misc_RNA (1)...(19): siRNA sense strand
ugaugaugucagaacagaa

SEQ ID NO: 2409250 - RNA, 19 nt, Homo sapiens
  misc_RNA (1)...(19): siRNA sense strand
gauugagaaauuugggaaa

SEQ ID NO: 2409251 - RNA, 19 nt, Homo sapiens
  misc_RNA (1)...(19): siRNA sense strand
guaucaaguuaaagcagaa

SEQ ID NO: 2409252 - RNA, 19 nt, Homo sapiens
  misc_RNA (1)...(19): siRNA sense strand
guguaacaggauugagaaa

SEQ ID NO: 2409253 - RNA, 19 nt, Homo sapiens
  misc_RNA (1)...(19): siRNA sense strand
acuaagugguggagcauca

SEQ ID NO: 2409254 - RNA, 19 nt, Homo sapiens
  misc_RNA (1)...(19): siRNA sense strand
ucuuaaacauggagcccua

SEQ ID NO: 2409255 - RNA, 19 nt, Homo sapiens
  misc_RNA (1)...(19): siRNA sense strand
augaaugaaugucaggaaa

SEQ ID NO: 2409256 - RNA, 19 nt, Homo sapiens
  misc_RNA (1)...(19): siRNA sense strand
cugaagcuuuagaaggaaa

SEQ ID NO: 2409257 - RNA, 19 nt, Homo sapiens
  misc_RNA (1)...(19): siRNA sense strand
guaucaaugcaguggaaaa

SEQ ID NO: 2409258 - RNA, 19 nt, Homo sapiens
  misc_RNA (1)...(19): siRNA sense strand
ccauguugccuguggaaga

SEQ ID NO: 2409259 - RNA, 19 nt, Homo sapiens
  misc_RNA (1)...(19): siRNA sense strand
gcucuuuggcacaggagaa

SEQ ID NO: 2409260 - RNA, 19 nt, Homo sapiens
  misc_RNA (1)...(19): siRNA sense strand
cugaaauguuggccaaauu

SEQ ID NO: 2409261 - RNA, 19 nt, Homo sapiens
  misc_RNA (1)...(19): siRNA sense strand
ggacguaauaaccgagaga

SEQ ID NO: 2409262 - RNA, 19 nt, Homo sapiens
  misc_RNA (1)...(19): siRNA sense strand
aggacuaagugguggagca

SEQ ID NO: 2409263 - RNA, 19 nt, Homo sapiens
  misc_RNA (1)...(19): siRNA sense strand
gaagauauauugaagagca

SEQ ID NO: 2409264 - RNA, 19 nt, Homo sapiens
  misc_RNA (1)...(19): siRNA sense strand
ggccaaauuuacagaaacu

SEQ ID NO: 2409265 - RNA, 19 nt, Homo sapiens
  misc_RNA (1)...(19): siRNA sense strand
gcaccaugggaaaggauuu

SEQ ID NO: 2409266 - RNA, 19 nt, Homo sapiens
  misc_RNA (1)...(19): siRNA sense strand
augcaaggcucaagcuuau

SEQ ID NO: 2409267 - RNA, 19 nt, Homo sapiens
  misc_RNA (1)...(19): siRNA sense strand
aguuaaagcagaauuggaa

SEQ ID NO: 2409268 - RNA, 19 nt, Homo sapiens
  misc_RNA (1)...(19): siRNA sense strand
ggauugagaaauuugggaa

SEQ ID NO: 2409269 - RNA, 19 nt, Homo sapiens
  misc_RNA (1)...(19): siRNA sense strand
caguguaacucaaagcgua

SEQ ID NO: 2409270 - RNA, 19 nt, Homo sapiens
  misc_RNA (1)...(19): siRNA sense strand
gugaaugagauguacguuu

SEQ ID NO: 2409271 - RNA, 19 nt, Homo sapiens
  misc_RNA (1)...(19): siRNA sense strand
guuaaagcagaauuggaaa

SEQ ID NO: 2409272 - RNA, 19 nt, Homo sapiens
  misc_RNA (1)...(19): siRNA sense strand
uuacugaaauguuggccaa

SEQ ID NO: 2409273 - RNA, 19 nt, Homo sapiens
  misc_RNA (1)...(19): siRNA sense strand
agaaaagacggcaggaauu

SEQ ID NO: 2409274 - RNA, 19 nt, Homo sapiens
  misc_RNA (1)...(19): siRNA sense strand
acguaugugaccaguguaa

SEQ ID NO: 2409275 - RNA, 19 nt, Homo sapiens
  misc_RNA (1)...(19): siRNA sense strand
cagucgaccauaauagaaa

SEQ ID NO: 2409276 - RNA, 19 nt, Homo sapiens
  misc_RNA (1)...(19): siRNA sense strand
cucaaagcguagaagguuu

SEQ ID NO: 2409277 - RNA, 19 nt, Homo sapiens
  misc_RNA (1)...(19): siRNA sense strand
ugggaaaggauuuggcuca

SEQ ID NO: 2409278 - RNA, 19 nt, Homo sapiens
  misc_RNA (1)...(19): siRNA sense strand
ggguacaggugaugauucu

SEQ ID NO: 2409279 - RNA, 19 nt, Homo sapiens
  misc_RNA (1)...(19): siRNA sense strand
cgacguacauuaagugcca

SEQ ID NO: 2409280 - RNA, 19 nt, Homo sapiens
  misc_RNA (1)...(19): siRNA sense strand
ggguaaaaucuuucgaaca

SEQ ID NO: 2409281 - RNA, 19 nt, Homo sapiens
  misc_RNA (1)...(19): siRNA sense strand
ugaaugaaugucaggaaaa

SEQ ID NO: 2409282 - RNA, 19 nt, Homo sapiens
  misc_RNA (1)...(19): siRNA sense strand
caucaaacaaguucugaau

SEQ ID NO: 2409283 - RNA, 19 nt, Homo sapiens
  misc_RNA (1)...(19): siRNA sense strand
agguaucaaugcaguggaa

SEQ ID NO: 2409284 - RNA, 19 nt, Homo sapiens
  misc_RNA (1)...(19): siRNA sense strand
ucauguuggcuuugaggaa

SEQ ID NO: 2409285 - RNA, 19 nt, Homo sapiens
  misc_RNA (1)...(19): siRNA sense strand
gugcaaacauguugggcag

SEQ ID NO: 2409286 - RNA, 19 nt, Homo sapiens
  misc_RNA (1)...(19): siRNA sense strand
aacaagacgcucaggaauu

SEQ ID NO: 2409287 - RNA, 19 nt, Homo sapiens
  misc_RNA (1)...(19): siRNA sense strand
acguaauaaccgagagaag

SEQ ID NO: 2409288 - RNA, 19 nt, Homo sapiens
  misc_RNA (1)...(19): siRNA sense strand
gcaucaaaagguagaaaga

SEQ ID NO: 2409289 - RNA, 19 nt, Homo sapiens
  misc_RNA (1)...(19): siRNA sense strand
agagaagauugguguucau

SEQ ID NO: 2409290 - RNA, 19 nt, Homo sapiens
  misc_RNA (1)...(19): siRNA sense strand
cguaauaaccgagagaaga

SEQ ID NO: 2409291 - RNA, 19 nt, Homo sapiens
  misc_RNA (1)...(19): siRNA sense strand
ccaaauuuacagaaacuga

SEQ ID NO: 2409292 - RNA, 19 nt, Homo sapiens
  misc_RNA (1)...(19): siRNA sense strand
aagaaaagacggcaggaau

SEQ ID NO: 2409293 - RNA, 19 nt, Homo sapiens
  misc_RNA (1)...(19): siRNA sense strand
ucgaacaugguuugaacaa

SEQ ID NO: 2409294 - RNA, 19 nt, Homo sapiens
  misc_RNA (1)...(19): siRNA sense strand
cgaccauaauagaaauagu

SEQ ID NO: 2409295 - RNA, 19 nt, Homo sapiens
  misc_RNA (1)...(19): siRNA sense strand
acaacgugaauuagagaca

SEQ ID NO: 2409296 - RNA, 19 nt, Homo sapiens
  misc_RNA (1)...(19): siRNA sense strand
gguucuggguacacugcaa

SEQ ID NO: 2409297 - RNA, 19 nt, Homo sapiens
  misc_RNA (1)...(19): siRNA sense strand
caaaauuaucacugcacaa

SEQ ID NO: 2409298 - RNA, 19 nt, Homo sapiens
  misc_RNA (1)...(19): siRNA sense strand
ucaguuaaacgaaggccaa

SEQ ID NO: 2409299 - RNA, 19 nt, Homo sapiens
  misc_RNA (1)...(19): siRNA sense strand
ggaaagugggcguuggucu

SEQ ID NO: 2409300 - RNA, 19 nt, Homo sapiens
  misc_RNA (1)...(19): siRNA sense strand
gcaugugacaacaaaucaa

SEQ ID NO: 2409301 - RNA, 19 nt, Homo sapiens
  misc_RNA (1)...(19): siRNA sense strand
auguuggcuuugaggaaau

SEQ ID NO: 2409302 - RNA, 19 nt, Homo sapiens
  misc_RNA (1)...(19): siRNA sense strand
gcuuugaggaaaucuuaaa

SEQ ID NO: 2409303 - RNA, 19 nt, Homo sapiens
  misc_RNA (1)...(19): siRNA sense strand
uagcaauggauacgugcaa

SEQ ID NO: 2409304 - RNA, 19 nt, Homo sapiens
  misc_RNA (1)...(19): siRNA sense strand
guguugagucauuuacuua

SEQ ID NO: 2409305 - RNA, 19 nt, Homo sapiens
  misc_RNA (1)...(19): siRNA sense strand
gggacuugucauuggaguu

SEQ ID NO: 2409306 - RNA, 19 nt, Homo sapiens
  misc_RNA (1)...(19): siRNA sense strand
ggacuaagugguggagcau

SEQ ID NO: 2409307 - RNA, 19 nt, Homo sapiens
  misc_RNA (1)...(19): siRNA sense strand
aacugaagcuuuagaagga

SEQ ID NO: 2409308 - RNA, 19 nt, Homo sapiens
  misc_RNA (1)...(19): siRNA sense strand
aagaaccauuucaggagaa

SEQ ID NO: 2409309 - RNA, 19 nt, Homo sapiens
  misc_RNA (1)...(19): siRNA sense strand
aaugaaugaaugucaggaa

SEQ ID NO: 2409310 - RNA, 19 nt, Homo sapiens
  misc_RNA (1)...(19): siRNA sense strand
uggaacuuauucagccaaa

SEQ ID NO: 2409311 - RNA, 19 nt, Homo sapiens
  misc_RNA (1)...(19): siRNA sense strand
gaaggaggguucuggguac

SEQ ID NO: 2409312 - RNA, 19 nt, Homo sapiens
  misc_RNA (1)...(19): siRNA sense strand
aguaacuccugguguaaca

SEQ ID NO: 2409313 - RNA, 19 nt, Homo sapiens
  misc_RNA (1)...(19): siRNA sense strand
aggaagaaauuaaggccaa

SEQ ID NO: 2409314 - RNA, 19 nt, Homo sapiens
  misc_RNA (1)...(19): siRNA sense strand
ugagaaugcauuuggaaca

SEQ ID NO: 2409315 - RNA, 19 nt, Homo sapiens
  misc_RNA (1)...(19): siRNA sense strand
aagaaugaugugaaagcaa

SEQ ID NO: 2409316 - RNA, 19 nt, Homo sapiens
  misc_RNA (1)...(19): siRNA sense strand
ggagaguggaucagcaaaa

SEQ ID NO: 2409317 - RNA, 19 nt, Homo sapiens
  misc_RNA (1)...(19): siRNA sense strand
agugagaaucccuuaguaa

SEQ ID NO: 2409318 - RNA, 19 nt, Homo sapiens
  misc_RNA (1)...(19): siRNA sense strand
aagucaaggaucugaagaa

SEQ ID NO: 2409319 - RNA, 19 nt, Homo sapiens
  misc_RNA (1)...(19): siRNA sense strand
agcaaggaguauacaagaa

SEQ ID NO: 2409320 - RNA, 19 nt, Homo sapiens
  misc_RNA (1)...(19): siRNA sense strand
cugugaaugaugaugagaa

SEQ ID NO: 2409321 - RNA, 19 nt, Homo sapiens
  misc_RNA (1)...(19): siRNA sense strand
acucaucacagaagaaaca

SEQ ID NO: 2409322 - RNA, 19 nt, Homo sapiens
  misc_RNA (1)...(19): siRNA sense strand
cucuucagaucgagggcaa

SEQ ID NO: 2409323 - RNA, 19 nt, Homo sapiens
  misc_RNA (1)...(19): siRNA sense strand
caugcaacuucaaaagaaa

SEQ ID NO: 2409324 - RNA, 19 nt, Homo sapiens
  misc_RNA (1)...(19): siRNA sense strand
caggagaguggaucagcaa

SEQ ID NO: 2409325 - RNA, 19 nt, Homo sapiens
  misc_RNA (1)...(19): siRNA sense strand
ccuccaaaggcaugcucua

SEQ ID NO: 2409326 - RNA, 19 nt, Homo sapiens
  misc_RNA (1)...(19): siRNA sense strand
aaacaaggaaguaccaaaa

SEQ ID NO: 2409327 - RNA, 19 nt, Homo sapiens
  misc_RNA (1)...(19): siRNA sense strand
cugagcuugccgagauaaa

SEQ ID NO: 2409328 - RNA, 19 nt, Homo sapiens
  misc_RNA (1)...(19): siRNA sense strand
caaaacuuccagugagaau

SEQ ID NO: 2409329 - RNA, 19 nt, Homo sapiens
  misc_RNA (1)...(19): siRNA sense strand
caaacuaucuggaucagga

SEQ ID NO: 2409330 - RNA, 19 nt, Homo sapiens
  misc_RNA (1)...(19): siRNA sense strand
gucaaggaucugaagaaaa

SEQ ID NO: 2409331 - RNA, 19 nt, Homo sapiens
  misc_RNA (1)...(19): siRNA sense strand
agaaacaccucaauggaac

SEQ ID NO: 2409332 - RNA, 19 nt, Homo sapiens
  misc_RNA (1)...(19): siRNA sense strand
acuuagagaagaacaggau

SEQ ID NO: 2409333 - RNA, 19 nt, Homo sapiens
  misc_RNA (1)...(19): siRNA sense strand
ggcaaagcucuguagcauu

SEQ ID NO: 2409334 - RNA, 19 nt, Homo sapiens
  misc_RNA (1)...(19): siRNA sense strand
cggaauuaagugagagaga

SEQ ID NO: 2409335 - RNA, 19 nt, Homo sapiens
  misc_RNA (1)...(19): siRNA sense strand
uggccaaguuuauugaaaa

SEQ ID NO: 2409336 - RNA, 19 nt, Homo sapiens
  misc_RNA (1)...(19): siRNA sense strand
ugauugcagaggagaggaa

SEQ ID NO: 2409337 - RNA, 19 nt, Homo sapiens
  misc_RNA (1)...(19): siRNA sense strand
ccagauaacucucaccuca

SEQ ID NO: 2409338 - RNA, 19 nt, Homo sapiens
  misc_RNA (1)...(19): siRNA sense strand
cccuacaagcagagaagau

SEQ ID NO: 2409339 - RNA, 19 nt, Homo sapiens
  misc_RNA (1)...(19): siRNA sense strand
ccugaaaaguggagagcau

SEQ ID NO: 2409340 - RNA, 19 nt, Homo sapiens
  misc_RNA (1)...(19): siRNA sense strand
ccagaaagagacaacgaaa

SEQ ID NO: 2409341 - RNA, 19 nt, Homo sapiens
  misc_RNA (1)...(19): siRNA sense strand
cggaagagcagaagaagca

SEQ ID NO: 2409342 - RNA, 19 nt, Homo sapiens
  misc_RNA (1)...(19): siRNA sense strand
gaaaagaguuuaagggagu

SEQ ID NO: 2409343 - RNA, 19 nt, Homo sapiens
  misc_RNA (1)...(19): siRNA sense strand
gagcagaagaagcaggaga

SEQ ID NO: 2409344 - RNA, 19 nt, Homo sapiens
  misc_RNA (1)...(19): siRNA sense strand
acuccaaaauccugggaaa

SEQ ID NO: 2409345 - RNA, 19 nt, Homo sapiens
  misc_RNA (1)...(19): siRNA sense strand
auucagaggaggaaagaga

SEQ ID NO: 2409346 - RNA, 19 nt, Homo sapiens
  misc_RNA (1)...(19): siRNA sense strand
ccaguauugaggaaagaaa

SEQ ID NO: 2409347 - RNA, 19 nt, Homo sapiens
  misc_RNA (1)...(19): siRNA sense strand
aggaagaaaugcuaauaca

SEQ ID NO: 2409348 - RNA, 19 nt, Homo sapiens
  misc_RNA (1)...(19): siRNA sense strand
uggaugugccagugacaaa

SEQ ID NO: 2409349 - RNA, 19 nt, Homo sapiens
  misc_RNA (1)...(19): siRNA sense strand
aggguauguucaagaggaa

SEQ ID NO: 2409350 - RNA, 19 nt, Homo sapiens
  misc_RNA (1)...(19): siRNA sense strand
ccaaagaagcaaacuccaa

SEQ ID NO: 2409351 - RNA, 19 nt, Homo sapiens
  misc_RNA (1)...(19): siRNA sense strand
ggauaugcuuacugaacca

SEQ ID NO: 2409352 - RNA, 19 nt, Homo sapiens
  misc_RNA (1)...(19): siRNA sense strand
gggaauaugaagucagcca

SEQ ID NO: 2409353 - RNA, 19 nt, Homo sapiens
  misc_RNA (1)...(19): siRNA sense strand
aguuuaagggaguggucua

SEQ ID NO: 2409354 - RNA, 19 nt, Homo sapiens
  misc_RNA (1)...(19): siRNA sense strand
uuauggaaguagcuggaaa

SEQ ID NO: 2409355 - RNA, 19 nt, Homo sapiens
  misc_RNA (1)...(19): siRNA sense strand
uuauaagcgaggagggaca

SEQ ID NO: 2409356 - RNA, 19 nt, Homo sapiens
  misc_RNA (1)...(19): siRNA sense strand
ccaguuacuuguagcucaa

SEQ ID NO: 2409357 - RNA, 19 nt, Homo sapiens
  misc_RNA (1)...(19): siRNA sense strand
cccuggaacuuuagaccaa

SEQ ID NO: 2409358 - RNA, 19 nt, Homo sapiens
  misc_RNA (1)...(19): siRNA sense strand
gcuaaagcuggcagugaau

SEQ ID NO: 2409359 - RNA, 19 nt, Homo sapiens
  misc_RNA (1)...(19): siRNA sense strand
augucaaccucaugaagaa

SEQ ID NO: 2409360 - RNA, 19 nt, Homo sapiens
  misc_RNA (1)...(19): siRNA sense strand
cagauggucaagagaagaa

SEQ ID NO: 2409361 - RNA, 19 nt, Homo sapiens
  misc_RNA (1)...(19): siRNA sense strand
cuguagagaaauaugaaga

SEQ ID NO: 2409362 - RNA, 19 nt, Homo sapiens
  misc_RNA (1)...(19): siRNA sense strand
gaacaaaagaaacaggaga

SEQ ID NO: 2409363 - RNA, 19 nt, Homo sapiens
  misc_RNA (1)...(19): siRNA sense strand
ggugagcagcccagaaaga

SEQ ID NO: 2409364 - RNA, 19 nt, Homo sapiens
  misc_RNA (1)...(19): siRNA sense strand
aguuggaagcuguagagaa

SEQ ID NO: 2409365 - RNA, 19 nt, Homo sapiens
  misc_RNA (1)...(19): siRNA sense strand
agacugaaucugucaaaga

SEQ ID NO: 2409366 - RNA, 19 nt, Homo sapiens
  misc_RNA (1)...(19): siRNA sense strand
ugucaaagagucagagucu

SEQ ID NO: 2409367 - RNA, 19 nt, Homo sapiens
  misc_RNA (1)...(19): siRNA sense strand
gcuauaugacagaaguaga

SEQ ID NO: 2409368 - RNA, 19 nt, Homo sapiens
  misc_RNA (1)...(19): siRNA sense strand
guuuaugaccucagagacu

SEQ ID NO: 2409369 - RNA, 19 nt, Homo sapiens
  misc_RNA (1)...(19): siRNA sense strand
ugacaaaccuucaagugca

SEQ ID NO: 2409370 - RNA, 19 nt, Homo sapiens
  misc_RNA (1)...(19): siRNA sense strand
gggagcaauuuauggaagu

SEQ ID NO: 2409371 - RNA, 19 nt, Homo sapiens
  misc_RNA (1)...(19): siRNA sense strand
acucguggugggagauuaa

SEQ ID NO: 2409372 - RNA, 19 nt, Homo sapiens
  misc_RNA (1)...(19): siRNA sense strand
aacuugaggcugagaagaa

SEQ ID NO: 2409373 - RNA, 19 nt, Homo sapiens
  misc_RNA (1)...(19): siRNA sense strand
gaggaaagagaggggaaua

SEQ ID NO: 2409374 - RNA, 19 nt, Homo sapiens
  misc_RNA (1)...(19): siRNA sense strand
aaguaccacuggaggaaga

SEQ ID NO: 2409375 - RNA, 19 nt, Homo sapiens
  misc_RNA (1)...(19): siRNA sense strand
ugcuaaagcuggcagugaa

SEQ ID NO: 2409376 - RNA, 19 nt, Homo sapiens
  misc_RNA (1)...(19): siRNA sense strand
aggagaaacuuuugaucuu

SEQ ID NO: 2409377 - RNA, 19 nt, Homo sapiens
  misc_RNA (1)...(19): siRNA sense strand
ugcuaaaacuugaggcuga

SEQ ID NO: 2409378 - RNA, 19 nt, Homo sapiens
  misc_RNA (1)...(19): siRNA sense strand
aguauguauugcagaacuu

SEQ ID NO: 2409379 - RNA, 19 nt, Homo sapiens
  misc_RNA (1)...(19): siRNA sense strand
cugaaagaaaugaaagucu

SEQ ID NO: 2409380 - RNA, 19 nt, Homo sapiens
  misc_RNA (1)...(19): siRNA sense strand
ccuuagaacagaggaaaca

SEQ ID NO: 2409381 - RNA, 19 nt, Homo sapiens
  misc_RNA (1)...(19): siRNA sense strand
ccugaaaaguggagagcau

SEQ ID NO: 2409382 - RNA, 19 nt, Homo sapiens
  misc_RNA (1)...(19): siRNA sense strand
gaaaagaguuuaagggagu

SEQ ID NO: 2409383 - RNA, 19 nt, Homo sapiens
  misc_RNA (1)...(19): siRNA sense strand
auucagaggaggaaagaga

SEQ ID NO: 2409384 - RNA, 19 nt, Homo sapiens
  misc_RNA (1)...(19): siRNA sense strand
gggaauaugaagucagcca

SEQ ID NO: 2409385 - RNA, 19 nt, Homo sapiens
  misc_RNA (1)...(19): siRNA sense strand
aguuuaagggaguggucua

SEQ ID NO: 2409386 - RNA, 19 nt, Homo sapiens
  misc_RNA (1)...(19): siRNA sense strand
cuguagagaaauaugaaga

SEQ ID NO: 2409387 - RNA, 19 nt, Homo sapiens
  misc_RNA (1)...(19): siRNA sense strand
aguuggaagcuguagagaa

SEQ ID NO: 2409388 - RNA, 19 nt, Homo sapiens
  misc_RNA (1)...(19): siRNA sense strand
aacuugaggcugagaagaa

SEQ ID NO: 2409389 - RNA, 19 nt, Homo sapiens
  misc_RNA (1)...(19): siRNA sense strand
gaggaaagagaggggaaua

SEQ ID NO: 2409390 - RNA, 19 nt, Homo sapiens
  misc_RNA (1)...(19): siRNA sense strand
ugcuaaaacuugaggcuga

SEQ ID NO: 2409391 - RNA, 19 nt, Homo sapiens
  misc_RNA (1)...(19): siRNA sense strand
aguauguauugcagaacuu

SEQ ID NO: 2409392 - RNA, 19 nt, Homo sapiens
  misc_RNA (1)...(19): siRNA sense strand
cugaaagaaaugaaagucu

SEQ ID NO: 2409393 - RNA, 19 nt, Homo sapiens
  misc_RNA (1)...(19): siRNA sense strand
aggaggaaagagaggggaa

SEQ ID NO: 2409394 - RNA, 19 nt, Homo sapiens
  misc_RNA (1)...(19): siRNA sense strand
ggaauaugaagucagccaa

SEQ ID NO: 2409395 - RNA, 19 nt, Homo sapiens
  misc_RNA (1)...(19): siRNA sense strand
gauuauaaggaucgccuga

SEQ ID NO: 2409396 - RNA, 19 nt, Homo sapiens
  misc_RNA (1)...(19): siRNA sense strand
aauaugaagaagugcuaca

SEQ ID NO: 2409397 - RNA, 19 nt, Homo sapiens
  misc_RNA (1)...(19): siRNA sense strand
ggaaaagaguuuaagggag

SEQ ID NO: 2409398 - RNA, 19 nt, Homo sapiens
  misc_RNA (1)...(19): siRNA sense strand
uggguugagccuagaucua

SEQ ID NO: 2409399 - RNA, 19 nt, Homo sapiens
  misc_RNA (1)...(19): siRNA sense strand
ggacagaggcugagggaag

SEQ ID NO: 2409400 - RNA, 19 nt, Homo sapiens
  misc_RNA (1)...(19): siRNA sense strand
ggacaaggacagaggcuga

SEQ ID NO: 2409401 - RNA, 19 nt, Homo sapiens
  misc_RNA (1)...(19): siRNA sense strand
agagggagguaaaggcaaa

SEQ ID NO: 2409402 - RNA, 19 nt, Homo sapiens
  misc_RNA (1)...(19): siRNA sense strand
agauaaucaucgaagacaa

SEQ ID NO: 2409403 - RNA, 19 nt, Homo sapiens
  misc_RNA (1)...(19): siRNA sense strand
uaaaauagagggagguaaa

SEQ ID NO: 2409404 - RNA, 19 nt, Homo sapiens
  misc_RNA (1)...(19): siRNA sense strand
aguaugaaccauugaggaa

SEQ ID NO: 2409405 - RNA, 19 nt, Homo sapiens
  misc_RNA (1)...(19): siRNA sense strand
uaguaaagccuguaagaca

SEQ ID NO: 2409406 - RNA, 19 nt, Homo sapiens
  misc_RNA (1)...(19): siRNA sense strand
ggguuauuacugaggaaau

SEQ ID NO: 2409407 - RNA, 19 nt, Homo sapiens
  misc_RNA (1)...(19): siRNA sense strand
ggugacuggaguagauaaa

SEQ ID NO: 2409408 - RNA, 19 nt, Homo sapiens
  misc_RNA (1)...(19): siRNA sense strand
gaagaauguaccagagcau

SEQ ID NO: 2409409 - RNA, 19 nt, Homo sapiens
  misc_RNA (1)...(19): siRNA sense strand
cagcagcagccuugagaau

SEQ ID NO: 2409410 - RNA, 19 nt, Homo sapiens
  misc_RNA (1)...(19): siRNA sense strand
uggaauauauggacaggau

SEQ ID NO: 2409411 - RNA, 19 nt, Homo sapiens
  misc_RNA (1)...(19): siRNA sense strand
gggaaggucaacugggaga

SEQ ID NO: 2409412 - RNA, 19 nt, Homo sapiens
  misc_RNA (1)...(19): siRNA sense strand
ggagagagucuuugccaga

SEQ ID NO: 2409413 - RNA, 19 nt, Homo sapiens
  misc_RNA (1)...(19): siRNA sense strand
gggaaauaucaccaacuaa

SEQ ID NO: 2409414 - RNA, 19 nt, Homo sapiens
  misc_RNA (1)...(19): siRNA sense strand
aaagaauggagcuggaaau

SEQ ID NO: 2409415 - RNA, 19 nt, Homo sapiens
  misc_RNA (1)...(19): siRNA sense strand
cccucaagccaguguaaua

SEQ ID NO: 2409416 - RNA, 19 nt, Homo sapiens
  misc_RNA (1)...(19): siRNA sense strand
aguaaagccuguaagacau

SEQ ID NO: 2409417 - RNA, 19 nt, Homo sapiens
  misc_RNA (1)...(19): siRNA sense strand
uugcaaugaauaaggacaa

SEQ ID NO: 2409418 - RNA, 19 nt, Homo sapiens
  misc_RNA (1)...(19): siRNA sense strand
gcugaauauauuagggcuu

SEQ ID NO: 2409419 - RNA, 19 nt, Homo sapiens
  misc_RNA (1)...(19): siRNA sense strand
aaccaaaagcugaagaaaa

SEQ ID NO: 2409420 - RNA, 19 nt, Homo sapiens
  misc_RNA (1)...(19): siRNA sense strand
uugaggaaucugugagcaa

SEQ ID NO: 2409421 - RNA, 19 nt, Homo sapiens
  misc_RNA (1)...(19): siRNA sense strand
gcugccaaguggaaugaaa

SEQ ID NO: 2409422 - RNA, 19 nt, Homo sapiens
  misc_RNA (1)...(19): siRNA sense strand
uaccauaaccugaagacaa

SEQ ID NO: 2409423 - RNA, 19 nt, Homo sapiens
  misc_RNA (1)...(19): siRNA sense strand
guuugaagauauugugcau

SEQ ID NO: 2409424 - RNA, 19 nt, Homo sapiens
  misc_RNA (1)...(19): siRNA sense strand
gaaccauugaggaaagaau

SEQ ID NO: 2409425 - RNA, 19 nt, Homo sapiens
  misc_RNA (1)...(19): siRNA sense strand
cauuguacauaguaagaga

SEQ ID NO: 2409426 - RNA, 19 nt, Homo sapiens
  misc_RNA (1)...(19): siRNA sense strand
gugcaagauuucagaccca

SEQ ID NO: 2409427 - RNA, 19 nt, Homo sapiens
  misc_RNA (1)...(19): siRNA sense strand
cguuaauguuuacaggaca

SEQ ID NO: 2409428 - RNA, 19 nt, Homo sapiens
  misc_RNA (1)...(19): siRNA sense strand
acacagaaagugcaagauu

SEQ ID NO: 2409429 - RNA, 19 nt, Homo sapiens
  misc_RNA (1)...(19): siRNA sense strand
ggguauagcagauuccaau

SEQ ID NO: 2409430 - RNA, 19 nt, Homo sapiens
  misc_RNA (1)...(19): siRNA sense strand
cuuaaagaauggagcugga

SEQ ID NO: 2409431 - RNA, 19 nt, Homo sapiens
  misc_RNA (1)...(19): siRNA sense strand
auugauggguggagaaguu

SEQ ID NO: 2409432 - RNA, 19 nt, Homo sapiens
  misc_RNA (1)...(19): siRNA sense strand
uguaauaagcccugggaag

SEQ ID NO: 2409433 - RNA, 19 nt, Homo sapiens
  misc_RNA (1)...(19): siRNA sense strand
gguaaaggcaaauguaacu

SEQ ID NO: 2409434 - RNA, 19 nt, Homo sapiens
  misc_RNA (1)...(19): siRNA sense strand
agagaaugcaccaggagau

SEQ ID NO: 2409435 - RNA, 19 nt, Homo sapiens
  misc_RNA (1)...(19): siRNA sense strand
uccaaagaacuguggguau

SEQ ID NO: 2409436 - RNA, 19 nt, Homo sapiens
  misc_RNA (1)...(19): siRNA sense strand
ggaaauaaucacugccucu

SEQ ID NO: 2409437 - RNA, 19 nt, Homo sapiens
  misc_RNA (1)...(19): siRNA sense strand
gauucaauuaucugggauu

SEQ ID NO: 2409438 - RNA, 19 nt, Homo sapiens
  misc_RNA (1)...(19): siRNA sense strand
guacaauaguaaaccaagu

SEQ ID NO: 2409439 - RNA, 19 nt, Homo sapiens
  misc_RNA (1)...(19): siRNA sense strand
aaacacagaaagugcaaga

SEQ ID NO: 2409440 - RNA, 19 nt, Homo sapiens
  misc_RNA (1)...(19): siRNA sense strand
uguuaugcccagaagacaa

SEQ ID NO: 2409441 - RNA, 19 nt, Homo sapiens
  misc_RNA (1)...(19): siRNA sense strand
uggacaggaugguuggcua

SEQ ID NO: 2409442 - RNA, 19 nt, Homo sapiens
  misc_RNA (1)...(19): siRNA sense strand
aagacuggcuaguagagaa

SEQ ID NO: 2409443 - RNA, 19 nt, Homo sapiens
  misc_RNA (1)...(19): siRNA sense strand
ccagaacaaagaagucaaa

SEQ ID NO: 2409444 - RNA, 19 nt, Homo sapiens
  misc_RNA (1)...(19): siRNA sense strand
gaggaaucugugagcaauu

SEQ ID NO: 2409445 - RNA, 19 nt, Homo sapiens
  misc_RNA (1)...(19): siRNA sense strand
uggaugaagguguggccua

SEQ ID NO: 2409446 - RNA, 19 nt, Homo sapiens
  misc_RNA (1)...(19): siRNA sense strand
ugauuaugguacugcaaaa

SEQ ID NO: 2409447 - RNA, 19 nt, Homo sapiens
  misc_RNA (1)...(19): siRNA sense strand
guacauaguaagagacccu

SEQ ID NO: 2409448 - RNA, 19 nt, Homo sapiens
  misc_RNA (1)...(19): siRNA sense strand
guaccagagcauuuagcaa

SEQ ID NO: 2409449 - RNA, 19 nt, Homo sapiens
  misc_RNA (1)...(19): siRNA sense strand
ccugcuaguuuaaaccaaa

SEQ ID NO: 2409450 - RNA, 19 nt, Homo sapiens
  misc_RNA (1)...(19): siRNA sense strand
uagaaagcaccgaccuaaa

SEQ ID NO: 2409451 - RNA, 19 nt, Homo sapiens
  misc_RNA (1)...(19): siRNA sense strand
cugcagauuuauugauagu

SEQ ID NO: 2409452 - RNA, 19 nt, Homo sapiens
  misc_RNA (1)...(19): siRNA sense strand
cuguaagacaugauaggau

SEQ ID NO: 2409453 - RNA, 19 nt, Homo sapiens
  misc_RNA (1)...(19): siRNA sense strand
gugaauggaaggugucaga

SEQ ID NO: 2409454 - RNA, 19 nt, Homo sapiens
  misc_RNA (1)...(19): siRNA sense strand
gauggaucgccuaggauau

SEQ ID NO: 2409455 - RNA, 19 nt, Homo sapiens
  misc_RNA (1)...(19): siRNA sense strand
agacuggcuaguagagaau

SEQ ID NO: 2409456 - RNA, 19 nt, Homo sapiens
  misc_RNA (1)...(19): siRNA sense strand
uaaagaauggagcuggaaa

SEQ ID NO: 2409457 - RNA, 19 nt, Homo sapiens
  misc_RNA (1)...(19): siRNA sense strand
guaagagacccucgggcau

SEQ ID NO: 2409458 - RNA, 19 nt, Homo sapiens
  misc_RNA (1)...(19): siRNA sense strand
gggagagcucagaggacaa

SEQ ID NO: 2409459 - RNA, 19 nt, Homo sapiens
  misc_RNA (1)...(19): siRNA sense strand
cagcauggcuugaagagga

SEQ ID NO: 2409460 - RNA, 19 nt, Homo sapiens
  misc_RNA (1)...(19): siRNA sense strand
augaagauguggaugaaaa

SEQ ID NO: 2409461 - RNA, 19 nt, Homo sapiens
  misc_RNA (1)...(19): siRNA sense strand
cggaagaagaagaagaaag

SEQ ID NO: 2409462 - RNA, 19 nt, Homo sapiens
  misc_RNA (1)...(19): siRNA sense strand
cauuugaugaugaggaaga

SEQ ID NO: 2409463 - RNA, 19 nt, Homo sapiens
  misc_RNA (1)...(19): siRNA sense strand
augaggaagaugagcagaa

SEQ ID NO: 2409464 - RNA, 19 nt, Homo sapiens
  misc_RNA (1)...(19): siRNA sense strand
augaugaagauguggauga

SEQ ID NO: 2409465 - RNA, 19 nt, Homo sapiens
  misc_RNA (1)...(19): siRNA sense strand
gguacuacgugaaggaggu

SEQ ID NO: 2409466 - RNA, 19 nt, Homo sapiens
  misc_RNA (1)...(19): siRNA sense strand
gagucaacgcagaacguga

SEQ ID NO: 2409467 - RNA, 19 nt, Homo sapiens
  misc_RNA (1)...(19): siRNA sense strand
gcagugaaacagugccaga

SEQ ID NO: 2409468 - RNA, 19 nt, Homo sapiens
  misc_RNA (1)...(19): siRNA sense strand
auuuggacgggcagaguaa

SEQ ID NO: 2409469 - RNA, 19 nt, Homo sapiens
  misc_RNA (1)...(19): siRNA sense strand
uugaagaggagucgaggau

SEQ ID NO: 2409470 - RNA, 19 nt, Homo sapiens
  misc_RNA (1)...(19): siRNA sense strand
gauccgcuuuggagggaga

SEQ ID NO: 2409471 - RNA, 19 nt, Homo sapiens
  misc_RNA (1)...(19): siRNA sense strand
cuccauacucuuugcgauu

SEQ ID NO: 2409472 - RNA, 19 nt, Homo sapiens
  misc_RNA (1)...(19): siRNA sense strand
acaucgacaacaaggauuu

SEQ ID NO: 2409473 - RNA, 19 nt, Homo sapiens
  misc_RNA (1)...(19): siRNA sense strand
ugugaaaggcaucgaugau

SEQ ID NO: 2409474 - RNA, 19 nt, Homo sapiens
  misc_RNA (1)...(19): siRNA sense strand
gcugaugccaaaugcaaaa

SEQ ID NO: 2409475 - RNA, 19 nt, Homo sapiens
  misc_RNA (1)...(19): siRNA sense strand
gcggaagaagaagaagaaa

SEQ ID NO: 2409476 - RNA, 19 nt, Homo sapiens
  misc_RNA (1)...(19): siRNA sense strand
acuaagagugcuaaggaaa

SEQ ID NO: 2409477 - RNA, 19 nt, Homo sapiens
  misc_RNA (1)...(19): siRNA sense strand
augcaacagagaagaauaa

SEQ ID NO: 2409478 - RNA, 19 nt, Homo sapiens
  misc_RNA (1)...(19): siRNA sense strand
agaaauaagaagcaugcua

SEQ ID NO: 2409479 - RNA, 19 nt, Homo sapiens
  misc_RNA (1)...(19): siRNA sense strand
auuuaaaccuagugagcca

SEQ ID NO: 2409480 - RNA, 19 nt, Homo sapiens
  misc_RNA (1)...(19): siRNA sense strand
acgaaacuuuagagaauga

SEQ ID NO: 2409481 - RNA, 19 nt, Homo sapiens
  misc_RNA (1)...(19): siRNA sense strand
gauuauggucugauccaaa

SEQ ID NO: 2409482 - RNA, 19 nt, Homo sapiens
  misc_RNA (1)...(19): siRNA sense strand
gaagcuuaccaguggcuaa

SEQ ID NO: 2409483 - RNA, 19 nt, Homo sapiens
  misc_RNA (1)...(19): siRNA sense strand
gggacuauauagauggcau

SEQ ID NO: 2409484 - RNA, 19 nt, Homo sapiens
  misc_RNA (1)...(19): siRNA sense strand
cgcaguaauucaaggccua

SEQ ID NO: 2409485 - RNA, 19 nt, Homo sapiens
  misc_RNA (1)...(19): siRNA sense strand
cuaagagugcuaaggaaau

SEQ ID NO: 2409486 - RNA, 19 nt, Homo sapiens
  misc_RNA (1)...(19): siRNA sense strand
gccaggaaguagaagccaa

SEQ ID NO: 2409487 - RNA, 19 nt, Homo sapiens
  misc_RNA (1)...(19): siRNA sense strand
auguagauauggaagaaga

SEQ ID NO: 2409488 - RNA, 19 nt, Homo sapiens
  misc_RNA (1)...(19): siRNA sense strand
acaauuaaacugugggacu

SEQ ID NO: 2409489 - RNA, 19 nt, Homo sapiens
  misc_RNA (1)...(19): siRNA sense strand
gcgaugcaacagagaagaa

SEQ ID NO: 2409490 - RNA, 19 nt, Homo sapiens
  misc_RNA (1)...(19): siRNA sense strand
aaagagacuaagagugcua

SEQ ID NO: 2409491 - RNA, 19 nt, Homo sapiens
  misc_RNA (1)...(19): siRNA sense strand
agguuuaggagaagacauu

SEQ ID NO: 2409492 - RNA, 19 nt, Homo sapiens
  misc_RNA (1)...(19): siRNA sense strand
gaugcaacagagaagaaua

SEQ ID NO: 2409493 - RNA, 19 nt, Homo sapiens
  misc_RNA (1)...(19): siRNA sense strand
uugccaacgagcugggaaa

SEQ ID NO: 2409494 - RNA, 19 nt, Homo sapiens
  misc_RNA (1)...(19): siRNA sense strand
guggaacagcggcaagaaa

SEQ ID NO: 2409495 - RNA, 19 nt, Homo sapiens
  misc_RNA (1)...(19): siRNA sense strand
agauguagauauggaagaa

SEQ ID NO: 2409496 - RNA, 19 nt, Homo sapiens
  misc_RNA (1)...(19): siRNA sense strand
cugcagauucuaaguauau

SEQ ID NO: 2409497 - RNA, 19 nt, Homo sapiens
  misc_RNA (1)...(19): siRNA sense strand
ccucuuuacucuugcccaa

SEQ ID NO: 2409498 - RNA, 19 nt, Homo sapiens
  misc_RNA (1)...(19): siRNA sense strand
caucaagaaauaagaagca

SEQ ID NO: 2409499 - RNA, 19 nt, Homo sapiens
  misc_RNA (1)...(19): siRNA sense strand
cagcuagcaaagaugguua

SEQ ID NO: 2409500 - RNA, 19 nt, Homo sapiens
  misc_RNA (1)...(19): siRNA sense strand
aguauauguugcugcagua

SEQ ID NO: 2409501 - RNA, 19 nt, Homo sapiens
  misc_RNA (1)...(19): siRNA sense strand
gcaccuuugcuuugggaga

SEQ ID NO: 2409502 - RNA, 19 nt, Homo sapiens
  misc_RNA (1)...(19): siRNA sense strand
gcuaaauagaucccaguuu

SEQ ID NO: 2409503 - RNA, 19 nt, Homo sapiens
  misc_RNA (1)...(19): siRNA sense strand
gugcauugccuuuggaaac

SEQ ID NO: 2409504 - RNA, 19 nt, Homo sapiens
  misc_RNA (1)...(19): siRNA sense strand
gcuugaauugcaaaugaaa

SEQ ID NO: 2409505 - RNA, 19 nt, Homo sapiens
  misc_RNA (1)...(19): siRNA sense strand
uaucacaaguaucaagcaa

SEQ ID NO: 2409506 - RNA, 19 nt, Homo sapiens
  misc_RNA (1)...(19): siRNA sense strand
caugauaugguuauggauu

SEQ ID NO: 2409507 - RNA, 19 nt, Homo sapiens
  misc_RNA (1)...(19): siRNA sense strand
cuagugaaagauaggagua

SEQ ID NO: 2409508 - RNA, 19 nt, Homo sapiens
  misc_RNA (1)...(19): siRNA sense strand
ggguuuauucuuaacacua

SEQ ID NO: 2409509 - RNA, 19 nt, Homo sapiens
  misc_RNA (1)...(19): siRNA sense strand
ggcaacagcaggaugaaaa

SEQ ID NO: 2409510 - RNA, 19 nt, Homo sapiens
  misc_RNA (1)...(19): siRNA sense strand
cugaagauguagauaugga

SEQ ID NO: 2409511 - RNA, 19 nt, Homo sapiens
  misc_RNA (1)...(19): siRNA sense strand
augauugauccaagaacua

SEQ ID NO: 2409512 - RNA, 19 nt, Homo sapiens
  misc_RNA (1)...(19): siRNA sense strand
caguuaguuuugaggaaau

SEQ ID NO: 2409513 - RNA, 19 nt, Homo sapiens
  misc_RNA (1)...(19): siRNA sense strand
uggaaacgagggaguauau

SEQ ID NO: 2409514 - RNA, 19 nt, Homo sapiens
  misc_RNA (1)...(19): siRNA sense strand
gauugauccaagaacuaaa

SEQ ID NO: 2409515 - RNA, 19 nt, Homo sapiens
  misc_RNA (1)...(19): siRNA sense strand
guuuaggagaagacauuau

SEQ ID NO: 2409516 - RNA, 19 nt, Homo sapiens
  misc_RNA (1)...(19): siRNA sense strand
acagagaagaauaaggagu

SEQ ID NO: 2409517 - RNA, 19 nt, Homo sapiens
  misc_RNA (1)...(19): siRNA sense strand
uguagauauggaagaagaa

SEQ ID NO: 2409518 - RNA, 19 nt, Homo sapiens
  misc_RNA (1)...(19): siRNA sense strand
ccuugaagcauccgcagua

SEQ ID NO: 2409519 - RNA, 19 nt, Homo sapiens
  misc_RNA (1)...(19): siRNA sense strand
acaauaugggauucuguaa

SEQ ID NO: 2409520 - RNA, 19 nt, Homo sapiens
  misc_RNA (1)...(19): siRNA sense strand
agccaaggccauuguauau

SEQ ID NO: 2409521 - RNA, 19 nt, Homo sapiens
  misc_RNA (1)...(19): siRNA sense strand
ccuugauggcacaauuaaa

SEQ ID NO: 2409522 - RNA, 19 nt, Homo sapiens
  misc_RNA (1)...(19): siRNA sense strand
ggauucugucuuuguuaua

SEQ ID NO: 2409523 - RNA, 19 nt, Homo sapiens
  misc_RNA (1)...(19): siRNA sense strand
agaacuaaagcuuugguuu

SEQ ID NO: 2409524 - RNA, 19 nt, Homo sapiens
  misc_RNA (1)...(19): siRNA sense strand
caacaguggaacagcggca

SEQ ID NO: 2409525 - RNA, 19 nt, Homo sapiens
  misc_RNA (1)...(19): siRNA sense strand
ucugcagauucuaaguaua

SEQ ID NO: 2409526 - RNA, 19 nt, Homo sapiens
  misc_RNA (1)...(19): siRNA sense strand
ugaaacuguggauguauaa

SEQ ID NO: 2409527 - RNA, 19 nt, Homo sapiens
  misc_RNA (1)...(19): siRNA sense strand
gauacaaguaacacagguu

SEQ ID NO: 2409528 - RNA, 19 nt, Homo sapiens
  misc_RNA (1)...(19): siRNA sense strand
gcgcgaugcaacagagaag

SEQ ID NO: 2409529 - RNA, 19 nt, Homo sapiens
  misc_RNA (1)...(19): siRNA sense strand
gcugugcauuggaguggaa

SEQ ID NO: 2409530 - RNA, 19 nt, Homo sapiens
  misc_RNA (1)...(19): siRNA sense strand
cuaaagagacuaagagugc

SEQ ID NO: 2409531 - RNA, 19 nt, Homo sapiens
  misc_RNA (1)...(19): siRNA sense strand
gggaguauauguugcugca

SEQ ID NO: 2409532 - RNA, 19 nt, Homo sapiens
  misc_RNA (1)...(19): siRNA sense strand
agaaaaggaaacugagcuu

SEQ ID NO: 2409533 - RNA, 19 nt, Homo sapiens
  misc_RNA (1)...(19): siRNA sense strand
uggaauacugaguguuaaa

SEQ ID NO: 2409534 - RNA, 19 nt, Homo sapiens
  misc_RNA (1)...(19): siRNA sense strand
ccaucauaaaggaguuaaa

SEQ ID NO: 2409535 - RNA, 19 nt, Homo sapiens
  misc_RNA (1)...(19): siRNA sense strand
ggucgggaugagaaggaaa

SEQ ID NO: 2409536 - RNA, 19 nt, Homo sapiens
  misc_RNA (1)...(19): siRNA sense strand
cacaugaagaugagacaau

SEQ ID NO: 2409537 - RNA, 19 nt, Homo sapiens
  misc_RNA (1)...(19): siRNA sense strand
uaggaaugaccaauggaau

SEQ ID NO: 2409538 - RNA, 19 nt, Homo sapiens
  misc_RNA (1)...(19): siRNA sense strand
aaucugaagcaaagaagga

SEQ ID NO: 2409539 - RNA, 19 nt, Homo sapiens
  misc_RNA (1)...(19): siRNA sense strand
ggugaaaguauacagcaca

SEQ ID NO: 2409540 - RNA, 19 nt, Homo sapiens
  misc_RNA (1)...(19): siRNA sense strand
cgggaugacauuuugauua

SEQ ID NO: 2409541 - RNA, 19 nt, Homo sapiens
  misc_RNA (1)...(19): siRNA sense strand
uggauaggaaggugaaagu

SEQ ID NO: 2409542 - RNA, 19 nt, Homo sapiens
  misc_RNA (1)...(19): siRNA sense strand
ucugaagcaaagaaggaau

SEQ ID NO: 2409543 - RNA, 19 nt, Homo sapiens
  misc_RNA (1)...(19): siRNA sense strand
gagguuacuuucuggcuca

SEQ ID NO: 2409544 - RNA, 19 nt, Homo sapiens
  misc_RNA (1)...(19): siRNA sense strand
auauaugcaugguggcaaa

SEQ ID NO: 2409545 - RNA, 19 nt, Homo sapiens
  misc_RNA (1)...(19): siRNA sense strand
gcugcuaggaagaggagaa

SEQ ID NO: 2409546 - RNA, 19 nt, Homo sapiens
  misc_RNA (1)...(19): siRNA sense strand
aggaacaaauuaaggacau

SEQ ID NO: 2409547 - RNA, 19 nt, Homo sapiens
  misc_RNA (1)...(19): siRNA sense strand
ccgcugaaguugaacaaaa

SEQ ID NO: 2409548 - RNA, 19 nt, Homo sapiens
  misc_RNA (1)...(19): siRNA sense strand
guuacaggaaccaaagaaa

SEQ ID NO: 2409549 - RNA, 19 nt, Homo sapiens
  misc_RNA (1)...(19): siRNA sense strand
agagaaaguggcugaugaa

SEQ ID NO: 2409550 - RNA, 19 nt, Homo sapiens
  misc_RNA (1)...(19): siRNA sense strand
uggccagagcagucagaaa

SEQ ID NO: 2409551 - RNA, 19 nt, Homo sapiens
  misc_RNA (1)...(19): siRNA sense strand
gggaucaaaggaagaggaa

SEQ ID NO: 2409552 - RNA, 19 nt, Homo sapiens
  misc_RNA (1)...(19): siRNA sense strand
cuggaggaaagaagauuaa

SEQ ID NO: 2409553 - RNA, 19 nt, Homo sapiens
  misc_RNA (1)...(19): siRNA sense strand
aaugaaugguagucgaaga

SEQ ID NO: 2409554 - RNA, 19 nt, Homo sapiens
  misc_RNA (1)...(19): siRNA sense strand
ggaagaggaaaaugggcaa

SEQ ID NO: 2409555 - RNA, 19 nt, Homo sapiens
  misc_RNA (1)...(19): siRNA sense strand
aaggaaacgaccugucaaa

SEQ ID NO: 2409556 - RNA, 19 nt, Homo sapiens
  misc_RNA (1)...(19): siRNA sense strand
ggaucaaaggaagaggaaa

SEQ ID NO: 2409557 - RNA, 19 nt, Homo sapiens
  misc_RNA (1)...(19): siRNA sense strand
ggaaaaugggcaaggucau

SEQ ID NO: 2409558 - RNA, 19 nt, Homo sapiens
  misc_RNA (1)...(19): siRNA sense strand
acaggaaggacaugcagaa

SEQ ID NO: 2409559 - RNA, 19 nt, Homo sapiens
  misc_RNA (1)...(19): siRNA sense strand
agaccagaaaugaacuaua

SEQ ID NO: 2409560 - RNA, 19 nt, Homo sapiens
  misc_RNA (1)...(19): siRNA sense strand
gaaaugaacuauaaagguc

SEQ ID NO: 2409561 - RNA, 19 nt, Homo sapiens
  misc_RNA (1)...(19): siRNA sense strand
augaaugguagucgaagaa

SEQ ID NO: 2409562 - RNA, 19 nt, Homo sapiens
  misc_RNA (1)...(19): siRNA sense strand
gcuaggaagaggagaacac

SEQ ID NO: 2409563 - RNA, 19 nt, Homo sapiens
  misc_RNA (1)...(19): siRNA sense strand
ggaaggaaucucaagagca

SEQ ID NO: 2409564 - RNA, 19 nt, Homo sapiens
  misc_RNA (1)...(19): siRNA sense strand
ucaaagacaggcuagggaa

SEQ ID NO: 2409565 - RNA, 19 nt, Homo sapiens
  misc_RNA (1)...(19): siRNA sense strand
aagaaacuuaggaaggaau

SEQ ID NO: 2409566 - RNA, 19 nt, Homo sapiens
  misc_RNA (1)...(19): siRNA sense strand
cuauaaaggucgauacgag

SEQ ID NO: 2409567 - RNA, 19 nt, Homo sapiens
  misc_RNA (1)...(19): siRNA sense strand
gaggaacaaauuaaggaca

SEQ ID NO: 2409568 - RNA, 19 nt, Homo sapiens
  misc_RNA (1)...(19): siRNA sense strand
gggcaaggucaucucaaaa

SEQ ID NO: 2409569 - RNA, 19 nt, Homo sapiens
  misc_RNA (1)...(19): siRNA sense strand
cucaagagaaaguggcuga

SEQ ID NO: 2409570 - RNA, 19 nt, Homo sapiens
  misc_RNA (1)...(19): siRNA sense strand
gcgauauggaagaugggca

SEQ ID NO: 2409571 - RNA, 19 nt, Homo sapiens
  misc_RNA (1)...(19): siRNA sense strand
gaacuugguaucuugggaa

SEQ ID NO: 2409572 - RNA, 19 nt, Homo sapiens
  misc_RNA (1)...(19): siRNA sense strand
aggcagaggaagccauuga

SEQ ID NO: 2409573 - RNA, 19 nt, Homo sapiens
  misc_RNA (1)...(19): siRNA sense strand
cguuggaggucggcgauau

SEQ ID NO: 2409574 - RNA, 19 nt, Homo sapiens
  misc_RNA (1)...(19): siRNA sense strand
aaaugggaucaaaggaaga

SEQ ID NO: 2409575 - RNA, 19 nt, Homo sapiens
  misc_RNA (1)...(19): siRNA sense strand
acaauuauuugcuugccaa

SEQ ID NO: 2409576 - RNA, 19 nt, Homo sapiens
  misc_RNA (1)...(19): siRNA sense strand
gcuagggaacagaccagaa

SEQ ID NO: 2409577 - RNA, 19 nt, Homo sapiens
  misc_RNA (1)...(19): siRNA sense strand
auacgagaucacagcggaa

SEQ ID NO: 2409578 - RNA, 19 nt, Homo sapiens
  misc_RNA (1)...(19): siRNA sense strand
cauugaaaaccaaaaggaa

SEQ ID NO: 2409579 - RNA, 19 nt, Homo sapiens
  misc_RNA (1)...(19): siRNA sense strand
ggaaagaggcagcagcaga

SEQ ID NO: 2409580 - RNA, 19 nt, Homo sapiens
  misc_RNA (1)...(19): siRNA sense strand
ugacgagaacagugagaau

SEQ ID NO: 2409581 - RNA, 19 nt, Homo sapiens
  misc_RNA (1)...(19): siRNA sense strand
acgaugaagaugacgagaa

SEQ ID NO: 2409582 - RNA, 19 nt, Homo sapiens
  misc_RNA (1)...(19): siRNA sense strand
aagaaugggagcuggugaa

SEQ ID NO: 2409583 - RNA, 19 nt, Homo sapiens
  misc_RNA (1)...(19): siRNA sense strand
aucaagaaccagaggacau

SEQ ID NO: 2409584 - RNA, 19 nt, Homo sapiens
  misc_RNA (1)...(19): siRNA sense strand
gagucaggcgccaggaaga

SEQ ID NO: 2409585 - RNA, 19 nt, Homo sapiens
  misc_RNA (1)...(19): siRNA sense strand
cuguagaguugauccguga

SEQ ID NO: 2409586 - RNA, 19 nt, Homo sapiens
  misc_RNA (1)...(19): siRNA sense strand
acauuuacgacgaugaaga

SEQ ID NO: 2409587 - RNA, 19 nt, Homo sapiens
  misc_RNA (1)...(19): siRNA sense strand
gaggaaagaggcagcagca

SEQ ID NO: 2409588 - RNA, 19 nt, Homo sapiens
  misc_RNA (1)...(19): siRNA sense strand
cagugauggagaugaggau

SEQ ID NO: 2409589 - RNA, 19 nt, Homo sapiens
  misc_RNA (1)...(19): siRNA sense strand
cagaggacauuuacgacga

SEQ ID NO: 2409590 - RNA, 19 nt, Homo sapiens
  misc_RNA (1)...(19): siRNA sense strand
cggaggauuuggagagagc

SEQ ID NO: 2409591 - RNA, 19 nt, Homo sapiens
  misc_RNA (1)...(19): siRNA sense strand
augaguacccagaggagga

SEQ ID NO: 2409592 - RNA, 19 nt, Homo sapiens
  misc_RNA (1)...(19): siRNA sense strand
agagagagcagcagcgaca

SEQ ID NO: 2409593 - RNA, 19 nt, Homo sapiens
  misc_RNA (1)...(19): siRNA sense strand
gcaacauccuagcggccua

SEQ ID NO: 2409594 - RNA, 19 nt, Homo sapiens
  misc_RNA (1)...(19): siRNA sense strand
gagcgcaucaucagggaga

SEQ ID NO: 2409595 - RNA, 19 nt, Homo sapiens
  misc_RNA (1)...(19): siRNA sense strand
ggaugaauggccagccuga

SEQ ID NO: 2409596 - RNA, 19 nt, Homo sapiens
  misc_RNA (1)...(19): siRNA sense strand
ggaaagagaucuaccgcaa

SEQ ID NO: 2409597 - RNA, 19 nt, Homo sapiens
  misc_RNA (1)...(19): siRNA sense strand
aggugaaguauguggacaa

SEQ ID NO: 2409598 - RNA, 19 nt, Homo sapiens
  misc_RNA (1)...(19): siRNA sense strand
cagagcagccugagcgcaa

SEQ ID NO: 2409599 - RNA, 19 nt, Homo sapiens
  misc_RNA (1)...(19): siRNA sense strand
agaucuaccgcaagagcaa

SEQ ID NO: 2409600 - RNA, 19 nt, Homo sapiens
  misc_RNA (1)...(19): siRNA sense strand
agaucaaccaugugcagaa

SEQ ID NO: 2409601 - RNA, 19 nt, Homo sapiens
  misc_RNA (1)...(19): siRNA sense strand
agaaggagcaugaggcgau

SEQ ID NO: 2409602 - RNA, 19 nt, Homo sapiens
  misc_RNA (1)...(19): siRNA sense strand
cagagaaguaccugagcga

SEQ ID NO: 2409603 - RNA, 19 nt, Homo sapiens
  misc_RNA (1)...(19): siRNA sense strand
cggaagucacgguggagau

SEQ ID NO: 2409604 - RNA, 19 nt, Homo sapiens
  misc_RNA (1)...(19): siRNA sense strand
ugcacgaaguugauggcaa

SEQ ID NO: 2409605 - RNA, 19 nt, Homo sapiens
  misc_RNA (1)...(19): siRNA sense strand
ccccgaagacuaugggaaa

SEQ ID NO: 2409606 - RNA, 19 nt, Homo sapiens
  misc_RNA (1)...(19): siRNA sense strand
ccgaagacuaugggaaaca

SEQ ID NO: 2409607 - RNA, 19 nt, Homo sapiens
  misc_RNA (1)...(19): siRNA sense strand
gggcccacauuguuggcua

SEQ ID NO: 2409608 - RNA, 19 nt, Homo sapiens
  misc_RNA (1)...(19): siRNA sense strand
ccaagcugguggaggagca

SEQ ID NO: 2409609 - RNA, 19 nt, Homo sapiens
  misc_RNA (1)...(19): siRNA sense strand
aggagggccgagaggaauu

SEQ ID NO: 2409610 - RNA, 19 nt, Homo sapiens
  misc_RNA (1)...(19): siRNA sense strand
cuggagaaccugcgggacu

SEQ ID NO: 2409611 - RNA, 19 nt, Homo sapiens
  misc_RNA (1)...(19): siRNA sense strand
aggaauucuauguacacua

SEQ ID NO: 2409612 - RNA, 19 nt, Homo sapiens
  misc_RNA (1)...(19): siRNA sense strand
uggacgaguggguagacaa

SEQ ID NO: 2409613 - RNA, 19 nt, Homo sapiens
  misc_RNA (1)...(19): siRNA sense strand
ugacugagguggaccggca

SEQ ID NO: 2409614 - RNA, 19 nt, Homo sapiens
  misc_RNA (1)...(19): siRNA sense strand
acagaagaacucagagaag

SEQ ID NO: 2409615 - RNA, 19 nt, Homo sapiens
  misc_RNA (1)...(19): siRNA sense strand
uggugacagaagagaagaa

SEQ ID NO: 2409616 - RNA, 19 nt, Homo sapiens
  misc_RNA (1)...(19): siRNA sense strand
acagaagagaagaaggugu

SEQ ID NO: 2409617 - RNA, 19 nt, Homo sapiens
  misc_RNA (1)...(19): siRNA sense strand
ugauggugacagaagagaa

SEQ ID NO: 2409618 - RNA, 19 nt, Homo sapiens
  misc_RNA (1)...(19): siRNA sense strand
gcacagaacgcgaagguca

SEQ ID NO: 2409619 - RNA, 19 nt, Homo sapiens
  misc_RNA (1)...(19): siRNA sense strand
ccaaacucuagaugagaaa

SEQ ID NO: 2409620 - RNA, 19 nt, Homo sapiens
  misc_RNA (1)...(19): siRNA sense strand
cggaagcugcagaggaauu

SEQ ID NO: 2409621 - RNA, 19 nt, Homo sapiens
  misc_RNA (1)...(19): siRNA sense strand
acgaagaagaaaugaaagu

SEQ ID NO: 2409622 - RNA, 19 nt, Homo sapiens
  misc_RNA (1)...(19): siRNA sense strand
ccgauuuggaacaggaaga

SEQ ID NO: 2409623 - RNA, 19 nt, Homo sapiens
  misc_RNA (1)...(19): siRNA sense strand
cgaggaagaagaaagaaaa

SEQ ID NO: 2409624 - RNA, 19 nt, Homo sapiens
  misc_RNA (1)...(19): siRNA sense strand
gugacgaagaagaaaugaa

SEQ ID NO: 2409625 - RNA, 19 nt, Homo sapiens
  misc_RNA (1)...(19): siRNA sense strand
cgggaaggagugaggcuga

SEQ ID NO: 2409626 - RNA, 19 nt, Homo sapiens
  misc_RNA (1)...(19): siRNA sense strand
cccuggaggaggugaacaa

SEQ ID NO: 2409627 - RNA, 19 nt, Homo sapiens
  misc_RNA (1)...(19): siRNA sense strand
cuaggaagcuugauggacu

SEQ ID NO: 2409628 - RNA, 19 nt, Homo sapiens
  misc_RNA (1)...(19): siRNA sense strand
caaaauagcaccuggucau

SEQ ID NO: 2409629 - RNA, 19 nt, Homo sapiens
  misc_RNA (1)...(19): siRNA sense strand
aggcugagacuguggacga

SEQ ID NO: 2409630 - RNA, 19 nt, Homo sapiens
  misc_RNA (1)...(19): siRNA sense strand
uggaacaggaagaggaaag

SEQ ID NO: 2409631 - RNA, 19 nt, Homo sapiens
  misc_RNA (1)...(19): siRNA sense strand
aucggaagcugcagaggaa

SEQ ID NO: 2409632 - RNA, 19 nt, Homo sapiens
  misc_RNA (1)...(19): siRNA sense strand
gcugggcaucacagggaaa

SEQ ID NO: 2409633 - RNA, 19 nt, Homo sapiens
  misc_RNA (1)...(19): siRNA sense strand
gcugggaaagagaggacuu

SEQ ID NO: 2409634 - RNA, 19 nt, Homo sapiens
  misc_RNA (1)...(19): siRNA sense strand
gauucaacaauggaagaaa

SEQ ID NO: 2409635 - RNA, 19 nt, Homo sapiens
  misc_RNA (1)...(19): siRNA sense strand
acagugacgaagaagaaau

SEQ ID NO: 2409636 - RNA, 19 nt, Homo sapiens
  misc_RNA (1)...(19): siRNA sense strand
cagacagugacgaagaaga

SEQ ID NO: 2409637 - RNA, 19 nt, Homo sapiens
  misc_RNA (1)...(19): siRNA sense strand
cgaaaauaaugcacagaac

SEQ ID NO: 2409638 - RNA, 19 nt, Homo sapiens
  misc_RNA (1)...(19): siRNA sense strand
gcaccuggucauagcagau

SEQ ID NO: 2409639 - RNA, 19 nt, Homo sapiens
  misc_RNA (1)...(19): siRNA sense strand
cuuccagaucaguagaaau

SEQ ID NO: 2409640 - RNA, 19 nt, Homo sapiens
  misc_RNA (1)...(19): siRNA sense strand
aaacucuagaugagaaaca

SEQ ID NO: 2409641 - RNA, 19 nt, Homo sapiens
  misc_RNA (1)...(19): siRNA sense strand
gucccagaacacagacaaa

SEQ ID NO: 2409642 - RNA, 19 nt, Homo sapiens
  misc_RNA (1)...(19): siRNA sense strand
uuucaaacucagugucuuu

SEQ ID NO: 2409643 - RNA, 19 nt, Homo sapiens
  misc_RNA (1)...(19): siRNA sense strand
ucuccaagucugacagcau

SEQ ID NO: 2409644 - RNA, 19 nt, Homo sapiens
  misc_RNA (1)...(19): siRNA sense strand
gggaauacuuggaaccuug

SEQ ID NO: 2409645 - RNA, 19 nt, Homo sapiens
  misc_RNA (1)...(19): siRNA sense strand
guaaaugcacggaagccuu

SEQ ID NO: 2409646 - RNA, 19 nt, Homo sapiens
  misc_RNA (1)...(19): siRNA sense strand
uguuagaguucaagcacaa

SEQ ID NO: 2409647 - RNA, 19 nt, Homo sapiens
  misc_RNA (1)...(19): siRNA sense strand
aggaagagcaugaagaaaa

SEQ ID NO: 2409648 - RNA, 19 nt, Homo sapiens
  misc_RNA (1)...(19): siRNA sense strand
aagaauagaaacugggaga

SEQ ID NO: 2409649 - RNA, 19 nt, Homo sapiens
  misc_RNA (1)...(19): siRNA sense strand
cuauagaagcauacgaaga

SEQ ID NO: 2409650 - RNA, 19 nt, Homo sapiens
  misc_RNA (1)...(19): siRNA sense strand
acaaagacauugaggccca

SEQ ID NO: 2409651 - RNA, 19 nt, Homo sapiens
  misc_RNA (1)...(19): siRNA sense strand
ccaaauucauuaugcccaa

SEQ ID NO: 2409652 - RNA, 19 nt, Homo sapiens
  misc_RNA (1)...(19): siRNA sense strand
gugaaguagaugauaaaga

SEQ ID NO: 2409653 - RNA, 19 nt, Homo sapiens
  misc_RNA (1)...(19): siRNA sense strand
gaagauggacccagcggua

SEQ ID NO: 2409654 - RNA, 19 nt, Homo sapiens
  misc_RNA (1)...(19): siRNA sense strand
ggauaaacagugugaccga

SEQ ID NO: 2409655 - RNA, 19 nt, Homo sapiens
  misc_RNA (1)...(19): siRNA sense strand
gugaagaggaagagagcac

SEQ ID NO: 2409656 - RNA, 19 nt, Homo sapiens
  misc_RNA (1)...(19): siRNA sense strand
gggccgugccucauggaaa

SEQ ID NO: 2409657 - RNA, 19 nt, Homo sapiens
  misc_RNA (1)...(19): siRNA sense strand
agaaaagaacucugggaau

SEQ ID NO: 2409658 - RNA, 19 nt, Homo sapiens
  misc_RNA (1)...(19): siRNA sense strand
guugauaagaaaugcaaga

SEQ ID NO: 2409659 - RNA, 19 nt, Homo sapiens
  misc_RNA (1)...(19): siRNA sense strand
cugaaggagaagaugguau

SEQ ID NO: 2409660 - RNA, 19 nt, Homo sapiens
  misc_RNA (1)...(19): siRNA sense strand
gggaggaagagcaugaaga

SEQ ID NO: 2409661 - RNA, 19 nt, Homo sapiens
  misc_RNA (1)...(19): siRNA sense strand
auaagaaaugcaagaguga

SEQ ID NO: 2409662 - RNA, 19 nt, Homo sapiens
  misc_RNA (1)...(19): siRNA sense strand
ggucaugauuauagagguc

SEQ ID NO: 2409663 - RNA, 19 nt, Homo sapiens
  misc_RNA (1)...(19): siRNA sense strand
gagagagaaaagagacuaa

SEQ ID NO: 2409664 - RNA, 19 nt, Homo sapiens
  misc_RNA (1)...(19): siRNA sense strand
gaggaagagcaugaagaaa

SEQ ID NO: 2409665 - RNA, 19 nt, Homo sapiens
  misc_RNA (1)...(19): siRNA sense strand
acgaauguccagaaagaga

SEQ ID NO: 2409666 - RNA, 19 nt, Homo sapiens
  misc_RNA (1)...(19): siRNA sense strand
gcugggaagaugaugacaa

SEQ ID NO: 2409667 - RNA, 19 nt, Homo sapiens
  misc_RNA (1)...(19): siRNA sense strand
acaggaaggcugacagaca

SEQ ID NO: 2409668 - RNA, 19 nt, Homo sapiens
  misc_RNA (1)...(19): siRNA sense strand
ccagauagcuaauaaccga

SEQ ID NO: 2409669 - RNA, 19 nt, Homo sapiens
  misc_RNA (1)...(19): siRNA sense strand
ucggaaucuucgaguagua

SEQ ID NO: 2409670 - RNA, 19 nt, Homo sapiens
  misc_RNA (1)...(19): siRNA sense strand
ugaagagagaucaggugua

SEQ ID NO: 2409671 - RNA, 19 nt, Homo sapiens
  misc_RNA (1)...(19): siRNA sense strand
gagagaaaagagacuaaaa

SEQ ID NO: 2409672 - RNA, 19 nt, Homo sapiens
  misc_RNA (1)...(19): siRNA sense strand
caucagggaggaagagcau

SEQ ID NO: 2409673 - RNA, 19 nt, Homo sapiens
  misc_RNA (1)...(19): siRNA sense strand
guggaaagcuggaugcuac

SEQ ID NO: 2409674 - RNA, 19 nt, Homo sapiens
  misc_RNA (1)...(19): siRNA sense strand
aaggagaggugcugggaag

SEQ ID NO: 2409675 - RNA, 19 nt, Homo sapiens
  misc_RNA (1)...(19): siRNA sense strand
aguucaagcacaagaaaau

SEQ ID NO: 2409676 - RNA, 19 nt, Homo sapiens
  misc_RNA (1)...(19): siRNA sense strand
gugauauugagaagccuaa

SEQ ID NO: 2409677 - RNA, 19 nt, Homo sapiens
  misc_RNA (1)...(19): siRNA sense strand
gagaaaagagacuaaaaca

SEQ ID NO: 2409678 - RNA, 19 nt, Homo sapiens
  misc_RNA (1)...(19): siRNA sense strand
guguaauccgagaggucau

SEQ ID NO: 2409679 - RNA, 19 nt, Homo sapiens
  misc_RNA (1)...(19): siRNA sense strand
ucacauuaccacacgucaa

SEQ ID NO: 2409680 - RNA, 19 nt, Homo sapiens
  misc_RNA (1)...(19): siRNA sense strand
cgaauguccagaaagagaa

SEQ ID NO: 2409681 - RNA, 19 nt, Homo sapiens
  misc_RNA (1)...(19): siRNA sense strand
gggaugugaaguagaugau

SEQ ID NO: 2409682 - RNA, 19 nt, Homo sapiens
  misc_RNA (1)...(19): siRNA sense strand
gguacuauucagccaacaa

SEQ ID NO: 2409683 - RNA, 19 nt, Homo sapiens
  misc_RNA (1)...(19): siRNA sense strand
gaucagguguaauccgaga

SEQ ID NO: 2409684 - RNA, 19 nt, Homo sapiens
  misc_RNA (1)...(19): siRNA sense strand
gauaagaaaugcaagagug

SEQ ID NO: 2409685 - RNA, 19 nt, Homo sapiens
  misc_RNA (1)...(19): siRNA sense strand
cauuucagaaggugauaau

SEQ ID NO: 2409686 - RNA, 19 nt, Homo sapiens
  misc_RNA (1)...(19): siRNA sense strand
ucagggaggaagagcauga

SEQ ID NO: 2409687 - RNA, 19 nt, Homo sapiens
  misc_RNA (1)...(19): siRNA sense strand
aaggaaagaauguuagagu

SEQ ID NO: 2409688 - RNA, 19 nt, Homo sapiens
  misc_RNA (1)...(19): siRNA sense strand
cucuguuacugaaggagaa

SEQ ID NO: 2409689 - RNA, 19 nt, Homo sapiens
  misc_RNA (1)...(19): siRNA sense strand
ggccgugccucauggaaaa

SEQ ID NO: 2409690 - RNA, 19 nt, Homo sapiens
  misc_RNA (1)...(19): siRNA sense strand
cagacaucgugaaguggau

SEQ ID NO: 2409691 - RNA, 19 nt, Homo sapiens
  misc_RNA (1)...(19): siRNA sense strand
ccaccaugauauaaggaag

SEQ ID NO: 2409692 - RNA, 19 nt, Homo sapiens
  misc_RNA (1)...(19): siRNA sense strand
gcaagaggggcaagcagaa

SEQ ID NO: 2409693 - RNA, 19 nt, Homo sapiens
  misc_RNA (1)...(19): siRNA sense strand
ggagaagaugguauaaacu

SEQ ID NO: 2409694 - RNA, 19 nt, Homo sapiens
  misc_RNA (1)...(19): siRNA sense strand
cagacauuccugggauaaa

SEQ ID NO: 2409695 - RNA, 19 nt, Homo sapiens
  misc_RNA (1)...(19): siRNA sense strand
auagaaacugggagaagca

SEQ ID NO: 2409696 - RNA, 19 nt, Homo sapiens
  misc_RNA (1)...(19): siRNA sense strand
cggcacauccugaggcaga

SEQ ID NO: 2409697 - RNA, 19 nt, Homo sapiens
  misc_RNA (1)...(19): siRNA sense strand
uguaaauaucugcuggauu

SEQ ID NO: 2409698 - RNA, 19 nt, Homo sapiens
  misc_RNA (1)...(19): siRNA sense strand
agacgaaggaggacgguag

SEQ ID NO: 2409699 - RNA, 19 nt, Homo sapiens
  misc_RNA (1)...(19): siRNA sense strand
cagaauacuaugaaggcaa

SEQ ID NO: 2409700 - RNA, 19 nt, Homo sapiens
  misc_RNA (1)...(19): siRNA sense strand
aggaauucuucgaacaaua

SEQ ID NO: 2409701 - RNA, 19 nt, Homo sapiens
  misc_RNA (1)...(19): siRNA sense strand
cuuuauugcggcagggaaa

SEQ ID NO: 2409702 - RNA, 19 nt, Homo sapiens
  misc_RNA (1)...(19): siRNA sense strand
ggaugauggccuaguaaau

SEQ ID NO: 2409703 - RNA, 19 nt, Homo sapiens
  misc_RNA (1)...(19): siRNA sense strand
ggaacuaagaaguacguau

SEQ ID NO: 2409704 - RNA, 19 nt, Homo sapiens
  misc_RNA (1)...(19): siRNA sense strand
gguuuggaauacugagaau

SEQ ID NO: 2409705 - RNA, 19 nt, Homo sapiens
  misc_RNA (1)...(19): siRNA sense strand
acaacaagaaggagcaaaa

SEQ ID NO: 2409706 - RNA, 19 nt, Homo sapiens
  misc_RNA (1)...(19): siRNA sense strand
aacuaaacccugaagauaa

SEQ ID NO: 2409707 - RNA, 19 nt, Homo sapiens
  misc_RNA (1)...(19): siRNA sense strand
ucucagugaagaagauaaa

SEQ ID NO: 2409708 - RNA, 19 nt, Homo sapiens
  misc_RNA (1)...(19): siRNA sense strand
caacaugagucuugcggca

SEQ ID NO: 2409709 - RNA, 19 nt, Homo sapiens
  misc_RNA (1)...(19): siRNA sense strand
cacaagagcgaguggaaga

SEQ ID NO: 2409710 - RNA, 19 nt, Homo sapiens
  misc_RNA (1)...(19): siRNA sense strand
ugacagauugagagaugaa

SEQ ID NO: 2409711 - RNA, 19 nt, Homo sapiens
  misc_RNA (1)...(19): siRNA sense strand
ucgcaagcauauugaugaa

SEQ ID NO: 2409712 - RNA, 19 nt, Homo sapiens
  misc_RNA (1)...(19): siRNA sense strand
cuguagauguaguugucaa

SEQ ID NO: 2409713 - RNA, 19 nt, Homo sapiens
  misc_RNA (1)...(19): siRNA sense strand
cauccagcacuaugagaua

SEQ ID NO: 2409714 - RNA, 19 nt, Homo sapiens
  misc_RNA (1)...(19): siRNA sense strand
guggauggaugauggccua

SEQ ID NO: 2409715 - RNA, 19 nt, Homo sapiens
  misc_RNA (1)...(19): siRNA sense strand
aagauaaagaggugaucau

SEQ ID NO: 2409716 - RNA, 19 nt, Homo sapiens
  misc_RNA (1)...(19): siRNA sense strand
acacaaaagcauuggcaga

SEQ ID NO: 2409717 - RNA, 19 nt, Homo sapiens
  misc_RNA (1)...(19): siRNA sense strand
gcuuauucuccuugcacaa

SEQ ID NO: 2409718 - RNA, 19 nt, Homo sapiens
  misc_RNA (1)...(19): siRNA sense strand
cccaagaagcugauugauu

SEQ ID NO: 2409719 - RNA, 19 nt, Homo sapiens
  misc_RNA (1)...(19): siRNA sense strand
gagaacuacugcuugggaa

SEQ ID NO: 2409720 - RNA, 19 nt, Homo sapiens
  misc_RNA (1)...(19): siRNA sense strand
cggaguuaauagaccaaga

SEQ ID NO: 2409721 - RNA, 19 nt, Homo sapiens
  misc_RNA (1)...(19): siRNA sense strand
gcuugggaacuaagaagua

SEQ ID NO: 2409722 - RNA, 19 nt, Homo sapiens
  misc_RNA (1)...(19): siRNA sense strand
gcaagaucacaaauggcaa

SEQ ID NO: 2409723 - RNA, 19 nt, Homo sapiens
  misc_RNA (1)...(19): siRNA sense strand
cuuuagaguggauggauga

SEQ ID NO: 2409724 - RNA, 19 nt, Homo sapiens
  misc_RNA (1)...(19): siRNA sense strand
ggcagaauauauagagaac

SEQ ID NO: 2409725 - RNA, 19 nt, Homo sapiens
  misc_RNA (1)...(19): siRNA sense strand
gcaagaaauaucugguacu

SEQ ID NO: 2409726 - RNA, 19 nt, Homo sapiens
  misc_RNA (1)...(19): siRNA sense strand
guaaaugauaucacgccaa

SEQ ID NO: 2409727 - RNA, 19 nt, Homo sapiens
  misc_RNA (1)...(19): siRNA sense strand
aagaagauaaagaggugau

SEQ ID NO: 2409728 - RNA, 19 nt, Homo sapiens
  misc_RNA (1)...(19): siRNA sense strand
caguuaaaugugauugcaa

SEQ ID NO: 2409729 - RNA, 19 nt, Homo sapiens
  misc_RNA (1)...(19): siRNA sense strand
uugcacaacaaaugaagaa

SEQ ID NO: 2409730 - RNA, 19 nt, Homo sapiens
  misc_RNA (1)...(19): siRNA sense strand
ccaagaaacaucauggugu

SEQ ID NO: 2409731 - RNA, 19 nt, Homo sapiens
  misc_RNA (1)...(19): siRNA sense strand
ccucaggaugacuggaaga

SEQ ID NO: 2409732 - RNA, 19 nt, Homo sapiens
  misc_RNA (1)...(19): siRNA sense strand
cgccaaaauugauaggaga

SEQ ID NO: 2409733 - RNA, 19 nt, Homo sapiens
  misc_RNA (1)...(19): siRNA sense strand
uguuggugccaguuggaaa

SEQ ID NO: 2409734 - RNA, 19 nt, Homo sapiens
  misc_RNA (1)...(19): siRNA sense strand
gaguuaauagaccaagaaa

SEQ ID NO: 2409735 - RNA, 19 nt, Homo sapiens
  misc_RNA (1)...(19): siRNA sense strand
ugaagaagauaaagaggug

SEQ ID NO: 2409736 - RNA, 19 nt, Homo sapiens
  misc_RNA (1)...(19): siRNA sense strand
cuaagaaguacguauugaa

SEQ ID NO: 2409737 - RNA, 19 nt, Homo sapiens
  misc_RNA (1)...(19): siRNA sense strand
ccuaaggugaauucaguau

SEQ ID NO: 2409738 - RNA, 19 nt, Homo sapiens
  misc_RNA (1)...(19): siRNA sense strand
uggcagaauauguuguaca

SEQ ID NO: 2409739 - RNA, 19 nt, Homo sapiens
  misc_RNA (1)...(19): siRNA sense strand
acaagaaggagcaaaacua

SEQ ID NO: 2409740 - RNA, 19 nt, Homo sapiens
  misc_RNA (1)...(19): siRNA sense strand
ccaaggaugaugaaaacaa

SEQ ID NO: 2409741 - RNA, 19 nt, Homo sapiens
  misc_RNA (1)...(19): siRNA sense strand
ggaaaggaauucuucgaac

SEQ ID NO: 2409742 - RNA, 19 nt, Homo sapiens
  misc_RNA (1)...(19): siRNA sense strand
ucaacuaaacccugaagau

SEQ ID NO: 2409743 - RNA, 19 nt, Homo sapiens
  misc_RNA (1)...(19): siRNA sense strand
gaagaaguccuuaguggca

SEQ ID NO: 2409744 - RNA, 19 nt, Homo sapiens
  misc_RNA (1)...(19): siRNA sense strand
uggaagaagcccaaggaug

SEQ ID NO: 2409745 - RNA, 19 nt, Homo sapiens
  misc_RNA (1)...(19): siRNA sense strand
aaaugaagaaucuggaagu

SEQ ID NO: 2409746 - RNA, 19 nt, Homo sapiens
  misc_RNA (1)...(19): siRNA sense strand
ccagcauuccuguaugaua

SEQ ID NO: 2409747 - RNA, 19 nt, Homo sapiens
  misc_RNA (1)...(19): siRNA sense strand
aauaacucgucuucacaaa

SEQ ID NO: 2409748 - RNA, 19 nt, Homo sapiens
  misc_RNA (1)...(19): siRNA sense strand
ucagugaagaagauaaaga

SEQ ID NO: 2409749 - RNA, 19 nt, Homo sapiens
  misc_RNA (1)...(19): siRNA sense strand
aaaggaauucuucgaacaa

SEQ ID NO: 2409750 - RNA, 19 nt, Homo sapiens
  misc_RNA (1)...(19): siRNA sense strand
gaaaaguugcugaggucuu

SEQ ID NO: 2409751 - RNA, 19 nt, Homo sapiens
  misc_RNA (1)...(19): siRNA sense strand
ggaagguauuaguggaaca

SEQ ID NO: 2409752 - RNA, 19 nt, Homo sapiens
  misc_RNA (1)...(19): siRNA sense strand
agaagagaggaaugagaaa

SEQ ID NO: 2409753 - RNA, 19 nt, Homo sapiens
  misc_RNA (1)...(19): siRNA sense strand
aagaggaagaagagaggaa

SEQ ID NO: 2409754 - RNA, 19 nt, Homo sapiens
  misc_RNA (1)...(19): siRNA sense strand
ccgcaggagaagauacaaa

SEQ ID NO: 2409755 - RNA, 19 nt, Homo sapiens
  misc_RNA (1)...(19): siRNA sense strand
agaaggaagugaugcaaaa

SEQ ID NO: 2409756 - RNA, 19 nt, Homo sapiens
  misc_RNA (1)...(19): siRNA sense strand
acagaauaccuaaggaaaa

SEQ ID NO: 2409757 - RNA, 19 nt, Homo sapiens
  misc_RNA (1)...(19): siRNA sense strand
uuucugugcugcagggaua

SEQ ID NO: 2409758 - RNA, 19 nt, Homo sapiens
  misc_RNA (1)...(19): siRNA sense strand
gugacuuauugcaguuaaa

SEQ ID NO: 2409759 - RNA, 19 nt, Homo sapiens
  misc_RNA (1)...(19): siRNA sense strand
agcccuaaauagugaaauu

SEQ ID NO: 2409760 - RNA, 19 nt, Homo sapiens
  misc_RNA (1)...(19): siRNA sense strand
aagagaggaaugagaaaga

SEQ ID NO: 2409761 - RNA, 19 nt, Homo sapiens
  misc_RNA (1)...(19): siRNA sense strand
agaaagggaacuucagcaa

SEQ ID NO: 2409762 - RNA, 19 nt, Homo sapiens
  misc_RNA (1)...(19): siRNA sense strand
uauuaguggaacagacaaa

SEQ ID NO: 2409763 - RNA, 19 nt, Homo sapiens
  misc_RNA (1)...(19): siRNA sense strand
ucacagaauaccuaaggaa

SEQ ID NO: 2409764 - RNA, 19 nt, Homo sapiens
  misc_RNA (1)...(19): siRNA sense strand
ucuagaucuucguggaaau

SEQ ID NO: 2409765 - RNA, 19 nt, Homo sapiens
  misc_RNA (1)...(19): siRNA sense strand
guaugaagaacaugaggau

SEQ ID NO: 2409766 - RNA, 19 nt, Homo sapiens
  misc_RNA (1)...(19): siRNA sense strand
caaauuaaguaaaggcaug

SEQ ID NO: 2409767 - RNA, 19 nt, Homo sapiens
  misc_RNA (1)...(19): siRNA sense strand
gggucaaauaugaaauaca

SEQ ID NO: 2409768 - RNA, 19 nt, Homo sapiens
  misc_RNA (1)...(19): siRNA sense strand
agaaacaaguagaugagca

SEQ ID NO: 2409769 - RNA, 19 nt, Homo sapiens
  misc_RNA (1)...(19): siRNA sense strand
cacagaauaccuaaggaaa

SEQ ID NO: 2409770 - RNA, 19 nt, Homo sapiens
  misc_RNA (1)...(19): siRNA sense strand
ccagauugaccuugaggau

SEQ ID NO: 2409771 - RNA, 19 nt, Homo sapiens
  misc_RNA (1)...(19): siRNA sense strand
uagaugagcaaaugagaga

SEQ ID NO: 2409772 - RNA, 19 nt, Homo sapiens
  misc_RNA (1)...(19): siRNA sense strand
gucuauaauuggugauguu

SEQ ID NO: 2409773 - RNA, 19 nt, Homo sapiens
  misc_RNA (1)...(19): siRNA sense strand
ccuuuaauccaaugccuaa

SEQ ID NO: 2409774 - RNA, 19 nt, Homo sapiens
  misc_RNA (1)...(19): siRNA sense strand
ggaaugagaaagaaggaag

SEQ ID NO: 2409775 - RNA, 19 nt, Homo sapiens
  misc_RNA (1)...(19): siRNA sense strand
gguauuaguggaacagaca

SEQ ID NO: 2409776 - RNA, 19 nt, Homo sapiens
  misc_RNA (1)...(19): siRNA sense strand
aagaagagaggaaugagaa

SEQ ID NO: 2409777 - RNA, 19 nt, Homo sapiens
  misc_RNA (1)...(19): siRNA sense strand
aagcaagaacacagugaca

SEQ ID NO: 2409778 - RNA, 19 nt, Homo sapiens
  misc_RNA (1)...(19): siRNA sense strand
aagaaggaagugaugcaaa

SEQ ID NO: 2409779 - RNA, 19 nt, Homo sapiens
  misc_RNA (1)...(19): siRNA sense strand
cacgaagagcugaaguuaa

SEQ ID NO: 2409780 - RNA, 19 nt, Homo sapiens
  misc_RNA (1)...(19): siRNA sense strand
cguggaaaucaauuacaaa

SEQ ID NO: 2409781 - RNA, 19 nt, Homo sapiens
  misc_RNA (1)...(19): siRNA sense strand
ccaaauuaaguaaaggcau

SEQ ID NO: 2409782 - RNA, 19 nt, Homo sapiens
  misc_RNA (1)...(19): siRNA sense strand
gaugagcaaaugagagaca

SEQ ID NO: 2409783 - RNA, 19 nt, Homo sapiens
  misc_RNA (1)...(19): siRNA sense strand
ccagcucauuguacagaaa

SEQ ID NO: 2409784 - RNA, 19 nt, Homo sapiens
  misc_RNA (1)...(19): siRNA sense strand
auuuagaaguccuggagca

SEQ ID NO: 2409785 - RNA, 19 nt, Homo sapiens
  misc_RNA (1)...(19): siRNA sense strand
aaggaagguauuaguggaa

SEQ ID NO: 2409786 - RNA, 19 nt, Homo sapiens
  misc_RNA (1)...(19): siRNA sense strand
ccaccaaagcaccagguuu

SEQ ID NO: 2409787 - RNA, 19 nt, Homo sapiens
  misc_RNA (1)...(19): siRNA sense strand
ugagaaagaaggaagugau

SEQ ID NO: 2409788 - RNA, 19 nt, Homo sapiens
  misc_RNA (1)...(19): siRNA sense strand
cagcaacaucuucaauaaa

SEQ ID NO: 2409789 - RNA, 19 nt, Homo sapiens
  misc_RNA (1)...(19): siRNA sense strand
ccugcaacaacaacaaaua

SEQ ID NO: 2409790 - RNA, 19 nt, Homo sapiens
  misc_RNA (1)...(19): siRNA sense strand
ggauacaaaaguuaagcaa

SEQ ID NO: 2409791 - RNA, 19 nt, Homo sapiens
  misc_RNA (1)...(19): siRNA sense strand
aggaagaagagaggaauga

SEQ ID NO: 2409792 - RNA, 19 nt, Homo sapiens
  misc_RNA (1)...(19): siRNA sense strand
gauugaaccaagugccuuu

SEQ ID NO: 2409793 - RNA, 19 nt, Homo sapiens
  misc_RNA (1)...(19): siRNA sense strand
agaucuucguggaaaucaa

SEQ ID NO: 2409794 - RNA, 19 nt, Homo sapiens
  misc_RNA (1)...(19): siRNA sense strand
guuuaugaaccuaacgaga

SEQ ID NO: 2409795 - RNA, 19 nt, Homo sapiens
  misc_RNA (1)...(19): siRNA sense strand
aacaaguagaugagcaaau

SEQ ID NO: 2409796 - RNA, 19 nt, Homo sapiens
  misc_RNA (1)...(19): siRNA sense strand
acucaucacacuacugaaa

SEQ ID NO: 2409797 - RNA, 19 nt, Homo sapiens
  misc_RNA (1)...(19): siRNA sense strand
gaaugagaaagaaggaagu

SEQ ID NO: 2409798 - RNA, 19 nt, Homo sapiens
  misc_RNA (1)...(19): siRNA sense strand
cauucuagcgggaaauauu

SEQ ID NO: 2409799 - RNA, 19 nt, Homo sapiens
  misc_RNA (1)...(19): siRNA sense strand
gcaauggauacaaaaguua

SEQ ID NO: 2409800 - RNA, 19 nt, Homo sapiens
  misc_RNA (1)...(19): siRNA sense strand
acacagugacagaugacau

SEQ ID NO: 2409801 - RNA, 19 nt, Homo sapiens
  misc_RNA (1)...(19): siRNA sense strand
agcucauucuagcgggaaa

SEQ ID NO: 2409802 - RNA, 19 nt, Homo sapiens
  misc_RNA (1)...(19): siRNA sense strand
cugcagggauagugguucu

SEQ ID NO: 2409803 - RNA, 19 nt, Homo sapiens
  misc_RNA (1)...(19): siRNA sense strand
gaggaaugagaaagaagga

SEQ ID NO: 2409804 - RNA, 19 nt, Homo sapiens
  misc_RNA (1)...(19): siRNA sense strand
cuccaaacaucuuccgauu

SEQ ID NO: 2409805 - RNA, 19 nt, Homo sapiens
  misc_RNA (1)...(19): siRNA sense strand
aggaauugaaagcccuaaa

SEQ ID NO: 2409806 - RNA, 19 nt, Homo sapiens
  misc_RNA (1)...(19): siRNA sense strand
gaggaagaagagaggaaug

SEQ ID NO: 2409807 - RNA, 19 nt, Homo sapiens
  misc_RNA (1)...(19): siRNA sense strand
ugaaagacccucugccuca

SEQ ID NO: 2409808 - RNA, 19 nt, Homo sapiens
  misc_RNA (1)...(19): siRNA sense strand
caaggaagguauuagugga

SEQ ID NO: 2409809 - RNA, 19 nt, Homo sapiens
  misc_RNA (1)...(19): siRNA sense strand
cugauauggaggcacauua

SEQ ID NO: 2409810 - RNA, 19 nt, Homo sapiens
  misc_RNA (1)...(19): siRNA sense strand
uagaaguccuggagcagca

SEQ ID NO: 2409811 - RNA, 19 nt, Homo sapiens
  misc_RNA (1)...(19): siRNA sense strand
ggcuuugguuugagagcaa

SEQ ID NO: 2409812 - RNA, 19 nt, Homo sapiens
  misc_RNA (1)...(19): siRNA sense strand
caagagauaucaaggcaga

SEQ ID NO: 2409813 - RNA, 19 nt, Homo sapiens
  misc_RNA (1)...(19): siRNA sense strand
ccaaauucccacagaggau

SEQ ID NO: 2409814 - RNA, 19 nt, Homo sapiens
  misc_RNA (1)...(19): siRNA sense strand
ggguaagaagagucgagua

SEQ ID NO: 2409815 - RNA, 19 nt, Homo sapiens
  misc_RNA (1)...(19): siRNA sense strand
auaucaaggcagaagaauu

SEQ ID NO: 2409816 - RNA, 19 nt, Homo sapiens
  misc_RNA (1)...(19): siRNA sense strand
ucuguuaugacgaggcaaa

SEQ ID NO: 2409817 - RNA, 19 nt, Homo sapiens
  misc_RNA (1)...(19): siRNA sense strand
uugagagcaacaagagaua

SEQ ID NO: 2409818 - RNA, 19 nt, Homo sapiens
  misc_RNA (1)...(19): siRNA sense strand
agauaucaaggcagaagaa

SEQ ID NO: 2409819 - RNA, 19 nt, Homo sapiens
  misc_RNA (1)...(19): siRNA sense strand
guugagaaaauacggaaaa

SEQ ID NO: 2409820 - RNA, 19 nt, Homo sapiens
  misc_RNA (1)...(19): siRNA sense strand
gagcaacaagagauaucaa

SEQ ID NO: 2409821 - RNA, 19 nt, Homo sapiens
  misc_RNA (1)...(19): siRNA sense strand
aaggaaaucuugaaccuga

SEQ ID NO: 2409822 - RNA, 19 nt, Homo sapiens
  misc_RNA (1)...(19): siRNA sense strand
gguugagaaaauacggaaa

SEQ ID NO: 2409823 - RNA, 19 nt, Homo sapiens
  misc_RNA (1)...(19): siRNA sense strand
augaaaugggccucugaaa

SEQ ID NO: 2409824 - RNA, 19 nt, Homo sapiens
  misc_RNA (1)...(19): siRNA sense strand
cuacuuugaagaagaugaa

SEQ ID NO: 2409825 - RNA, 19 nt, Homo sapiens
  misc_RNA (1)...(19): siRNA sense strand
aagaagaugaaguucggua

SEQ ID NO: 2409826 - RNA, 19 nt, Homo sapiens
  misc_RNA (1)...(19): siRNA sense strand
gaggaugguucccgcguga

SEQ ID NO: 2409827 - RNA, 19 nt, Homo sapiens
  misc_RNA (1)...(19): siRNA sense strand
ugaaaugggccucugaaaa

SEQ ID NO: 2409828 - RNA, 19 nt, Homo sapiens
  misc_RNA (1)...(19): siRNA sense strand
agaagaugaaguucgguau

SEQ ID NO: 2409829 - RNA, 19 nt, Homo sapiens
  misc_RNA (1)...(19): siRNA sense strand
ccggacucugguugagaaa

SEQ ID NO: 2409830 - RNA, 19 nt, Homo sapiens
  misc_RNA (1)...(19): siRNA sense strand
cuuugaagaagaugaaguu

SEQ ID NO: 2409831 - RNA, 19 nt, Homo sapiens
  misc_RNA (1)...(19): siRNA sense strand
ggcuuugguuugagagcaa

SEQ ID NO: 2409832 - RNA, 19 nt, Homo sapiens
  misc_RNA (1)...(19): siRNA sense strand
caagagauaucaaggcaga

SEQ ID NO: 2409833 - RNA, 19 nt, Homo sapiens
  misc_RNA (1)...(19): siRNA sense strand
ccaaauucccacagaggau

SEQ ID NO: 2409834 - RNA, 19 nt, Homo sapiens
  misc_RNA (1)...(19): siRNA sense strand
ggguaagaagagucgagua

SEQ ID NO: 2409835 - RNA, 19 nt, Homo sapiens
  misc_RNA (1)...(19): siRNA sense strand
auaucaaggcagaagaauu

SEQ ID NO: 2409836 - RNA, 19 nt, Homo sapiens
  misc_RNA (1)...(19): siRNA sense strand
ucuguuaugacgaggcaaa

SEQ ID NO: 2409837 - RNA, 19 nt, Homo sapiens
  misc_RNA (1)...(19): siRNA sense strand
uugagagcaacaagagaua

SEQ ID NO: 2409838 - RNA, 19 nt, Homo sapiens
  misc_RNA (1)...(19): siRNA sense strand
agauaucaaggcagaagaa

SEQ ID NO: 2409839 - RNA, 19 nt, Homo sapiens
  misc_RNA (1)...(19): siRNA sense strand
guugagaaaauacggaaaa

SEQ ID NO: 2409840 - RNA, 19 nt, Homo sapiens
  misc_RNA (1)...(19): siRNA sense strand
gagcaacaagagauaucaa

SEQ ID NO: 2409841 - RNA, 19 nt, Homo sapiens
  misc_RNA (1)...(19): siRNA sense strand
aaggaaaucuugaaccuga

SEQ ID NO: 2409842 - RNA, 19 nt, Homo sapiens
  misc_RNA (1)...(19): siRNA sense strand
gguugagaaaauacggaaa

SEQ ID NO: 2409843 - RNA, 19 nt, Homo sapiens
  misc_RNA (1)...(19): siRNA sense strand
augaaaugggccucugaaa

SEQ ID NO: 2409844 - RNA, 19 nt, Homo sapiens
  misc_RNA (1)...(19): siRNA sense strand
cuacuuugaagaagaugaa

SEQ ID NO: 2409845 - RNA, 19 nt, Homo sapiens
  misc_RNA (1)...(19): siRNA sense strand
aagaagaugaaguucggua

SEQ ID NO: 2409846 - RNA, 19 nt, Homo sapiens
  misc_RNA (1)...(19): siRNA sense strand
gaggaugguucccgcguga

SEQ ID NO: 2409847 - RNA, 19 nt, Homo sapiens
  misc_RNA (1)...(19): siRNA sense strand
ugaaaugggccucugaaaa

SEQ ID NO: 2409848 - RNA, 19 nt, Homo sapiens
  misc_RNA (1)...(19): siRNA sense strand
agaagaugaaguucgguau

SEQ ID NO: 2409849 - RNA, 19 nt, Homo sapiens
  misc_RNA (1)...(19): siRNA sense strand
ccggacucugguugagaaa

SEQ ID NO: 2409850 - RNA, 19 nt, Homo sapiens
  misc_RNA (1)...(19): siRNA sense strand
cuuugaagaagaugaaguu

SEQ ID NO: 2409851 - RNA, 19 nt, Homo sapiens
  misc_RNA (1)...(19): siRNA sense strand
aagggaacuugaugggaaa

SEQ ID NO: 2409852 - RNA, 19 nt, Homo sapiens
  misc_RNA (1)...(19): siRNA sense strand
ggauuguggugcaaggcaa

SEQ ID NO: 2409853 - RNA, 19 nt, Homo sapiens
  misc_RNA (1)...(19): siRNA sense strand
gugcaaggcaagagaaacu

SEQ ID NO: 2409854 - RNA, 19 nt, Homo sapiens
  misc_RNA (1)...(19): siRNA sense strand
agaauauugggcagaguaa

SEQ ID NO: 2409855 - RNA, 19 nt, Homo sapiens
  misc_RNA (1)...(19): siRNA sense strand
caucaaaccaguaagccua

SEQ ID NO: 2409856 - RNA, 19 nt, Homo sapiens
  misc_RNA (1)...(19): siRNA sense strand
aguagugaccagagagaga

SEQ ID NO: 2409857 - RNA, 19 nt, Homo sapiens
  misc_RNA (1)...(19): siRNA sense strand
aaagggaacuugaugggaa

SEQ ID NO: 2409858 - RNA, 19 nt, Homo sapiens
  misc_RNA (1)...(19): siRNA sense strand
ggcaagagaaacuggcauu

SEQ ID NO: 2409859 - RNA, 19 nt, Homo sapiens
  misc_RNA (1)...(19): siRNA sense strand
uggugcaaggcaagagaaa

SEQ ID NO: 2409860 - RNA, 19 nt, Homo sapiens
  misc_RNA (1)...(19): siRNA sense strand
gcuuucaaguccagcaaaa

SEQ ID NO: 2409861 - RNA, 19 nt, Homo sapiens
  misc_RNA (1)...(19): siRNA sense strand
aguccaaagaaaugcaauu

SEQ ID NO: 2409862 - RNA, 19 nt, Homo sapiens
  misc_RNA (1)...(19): siRNA sense strand
accaguaagccuagagaga

SEQ ID NO: 2409863 - RNA, 19 nt, Homo sapiens
  misc_RNA (1)...(19): siRNA sense strand
aauauugggcagaguaaau

SEQ ID NO: 2409864 - RNA, 19 nt, Homo sapiens
  misc_RNA (1)...(19): siRNA sense strand
gggaaagaaacgaauggca

SEQ ID NO: 2409865 - RNA, 19 nt, Homo sapiens
  misc_RNA (1)...(19): siRNA sense strand
aguuacacaucacaggaaa

SEQ ID NO: 2409866 - RNA, 19 nt, Homo sapiens
  misc_RNA (1)...(19): siRNA sense strand
aaggaaaggagcaggaugu

SEQ ID NO: 2409867 - RNA, 19 nt, Homo sapiens
  misc_RNA (1)...(19): siRNA sense strand
uugugguaguccaaagaaa

SEQ ID NO: 2409868 - RNA, 19 nt, Homo sapiens
  misc_RNA (1)...(19): siRNA sense strand
gcguucaaucucaggauau

SEQ ID NO: 2409869 - RNA, 19 nt, Homo sapiens
  misc_RNA (1)...(19): siRNA sense strand
agguaaaccacaaccaaaa

SEQ ID NO: 2409870 - RNA, 19 nt, Homo sapiens
  misc_RNA (1)...(19): siRNA sense strand
uugcagaucaugaaccaaa

SEQ ID NO: 2409871 - RNA, 19 nt, Homo sapiens
  misc_RNA (1)...(19): siRNA sense strand
auuagaggguagagcagau

SEQ ID NO: 2409872 - RNA, 19 nt, Homo sapiens
  misc_RNA (1)...(19): siRNA sense strand
aaaauguaucccaggaaaa

SEQ ID NO: 2409873 - RNA, 19 nt, Homo sapiens
  misc_RNA (1)...(19): siRNA sense strand
ccaaaacagaccagaugaa

SEQ ID NO: 2409874 - RNA, 19 nt, Homo sapiens
  misc_RNA (1)...(19): siRNA sense strand
caggacacucuguggaaaa

SEQ ID NO: 2409875 - RNA, 19 nt, Homo sapiens
  misc_RNA (1)...(19): siRNA sense strand
ggaaagaaacgaauggcag

SEQ ID NO: 2409876 - RNA, 19 nt, Homo sapiens
  misc_RNA (1)...(19): siRNA sense strand
cgaucagaaggcagaugaa

SEQ ID NO: 2409877 - RNA, 19 nt, Homo sapiens
  misc_RNA (1)...(19): siRNA sense strand
uaguaauaagcuugcagaa

SEQ ID NO: 2409878 - RNA, 19 nt, Homo sapiens
  misc_RNA (1)...(19): siRNA sense strand
gaggaagggcuggaaggaa

SEQ ID NO: 2409879 - RNA, 19 nt, Homo sapiens
  misc_RNA (1)...(19): siRNA sense strand
ggucagucagccaaggaga

SEQ ID NO: 2409880 - RNA, 19 nt, Homo sapiens
  misc_RNA (1)...(19): siRNA sense strand
gaauauugggcagaguaaa

SEQ ID NO: 2409881 - RNA, 19 nt, Homo sapiens
  misc_RNA (1)...(19): siRNA sense strand
acaaaaugguagcaggcuu

SEQ ID NO: 2409882 - RNA, 19 nt, Homo sapiens
  misc_RNA (1)...(19): siRNA sense strand
ccuuaaacaucaaaccagu

SEQ ID NO: 2409883 - RNA, 19 nt, Homo sapiens
  misc_RNA (1)...(19): siRNA sense strand
cugucaucguguaagaaaa

SEQ ID NO: 2409884 - RNA, 19 nt, Homo sapiens
  misc_RNA (1)...(19): siRNA sense strand
uggaaggaaaggagcagga

SEQ ID NO: 2409885 - RNA, 19 nt, Homo sapiens
  misc_RNA (1)...(19): siRNA sense strand
agaacuggaugcugcacau

SEQ ID NO: 2409886 - RNA, 19 nt, Homo sapiens
  misc_RNA (1)...(19): siRNA sense strand
gcugaagcguguuggggaa

SEQ ID NO: 2409887 - RNA, 19 nt, Homo sapiens
  misc_RNA (1)...(19): siRNA sense strand
ugagaacagaagugagaca

SEQ ID NO: 2409888 - RNA, 19 nt, Homo sapiens
  misc_RNA (1)...(19): siRNA sense strand
cugaguggaaggagcacaa

SEQ ID NO: 2409889 - RNA, 19 nt, Homo sapiens
  misc_RNA (1)...(19): siRNA sense strand
aggacguucuggagaccua

SEQ ID NO: 2409890 - RNA, 19 nt, Homo sapiens
  misc_RNA (1)...(19): siRNA sense strand
aggauaggacagaugaaaa

SEQ ID NO: 2409891 - RNA, 19 nt, Homo sapiens
  misc_RNA (1)...(19): siRNA sense strand
agccagacucccucagaaa

SEQ ID NO: 2409892 - RNA, 19 nt, Homo sapiens
  misc_RNA (1)...(19): siRNA sense strand
cagaagugagacagcugaa

SEQ ID NO: 2409893 - RNA, 19 nt, Homo sapiens
  misc_RNA (1)...(19): siRNA sense strand
caaaugacuuggacgccuu

SEQ ID NO: 2409894 - RNA, 19 nt, Homo sapiens
  misc_RNA (1)...(19): siRNA sense strand
cucuagguuccuugaguaa

SEQ ID NO: 2409895 - RNA, 19 nt, Homo sapiens
  misc_RNA (1)...(19): siRNA sense strand
gaguaaccuggaagaaaca

SEQ ID NO: 2409896 - RNA, 19 nt, Homo sapiens
  misc_RNA (1)...(19): siRNA sense strand
ugagacagcugaagcgugu

SEQ ID NO: 2409897 - RNA, 19 nt, Homo sapiens
  misc_RNA (1)...(19): siRNA sense strand
uggagaugaaagaugauuu

SEQ ID NO: 2409898 - RNA, 19 nt, Homo sapiens
  misc_RNA (1)...(19): siRNA sense strand
gccaugaugucucaggcaa

SEQ ID NO: 2409899 - RNA, 19 nt, Homo sapiens
  misc_RNA (1)...(19): siRNA sense strand
auggagaggacgugccuuu

SEQ ID NO: 2409900 - RNA, 19 nt, Homo sapiens
  misc_RNA (1)...(19): siRNA sense strand
ccaagaagcugaaggaaga

SEQ ID NO: 2409901 - RNA, 19 nt, Homo sapiens
  misc_RNA (1)...(19): siRNA sense strand
acaaagaaagauugggaaa

SEQ ID NO: 2409902 - RNA, 19 nt, Homo sapiens
  misc_RNA (1)...(19): siRNA sense strand
cagaauagucaauggacaa

SEQ ID NO: 2409903 - RNA, 19 nt, Homo sapiens
  misc_RNA (1)...(19): siRNA sense strand
guaagaagcuaaugaauga

SEQ ID NO: 2409904 - RNA, 19 nt, Homo sapiens
  misc_RNA (1)...(19): siRNA sense strand
ggaaaugauaacagaaaca

SEQ ID NO: 2409905 - RNA, 19 nt, Homo sapiens
  misc_RNA (1)...(19): siRNA sense strand
agucaauggacaaggagaa

SEQ ID NO: 2409906 - RNA, 19 nt, Homo sapiens
  misc_RNA (1)...(19): siRNA sense strand
aggcaugaaagaagugaaa

SEQ ID NO: 2409907 - RNA, 19 nt, Homo sapiens
  misc_RNA (1)...(19): siRNA sense strand
aggaaaugaaagagaugua

SEQ ID NO: 2409908 - RNA, 19 nt, Homo sapiens
  misc_RNA (1)...(19): siRNA sense strand
gagaaaaguaagaagcuaa

SEQ ID NO: 2409909 - RNA, 19 nt, Homo sapiens
  misc_RNA (1)...(19): siRNA sense strand
agaggaucauaaagagaua

SEQ ID NO: 2409910 - RNA, 19 nt, Homo sapiens
  misc_RNA (1)...(19): siRNA sense strand
uagaaaggaaagagaaaca

SEQ ID NO: 2409911 - RNA, 19 nt, Homo sapiens
  misc_RNA (1)...(19): siRNA sense strand
agagaaaacaggaggagua

SEQ ID NO: 2409912 - RNA, 19 nt, Homo sapiens
  misc_RNA (1)...(19): siRNA sense strand
gguaucaacaagagcuuaa

SEQ ID NO: 2409913 - RNA, 19 nt, Homo sapiens
  misc_RNA (1)...(19): siRNA sense strand
aaguaaaagcugagaauga

SEQ ID NO: 2409914 - RNA, 19 nt, Homo sapiens
  misc_RNA (1)...(19): siRNA sense strand
caggaggaguaguaaguau

SEQ ID NO: 2409915 - RNA, 19 nt, Homo sapiens
  misc_RNA (1)...(19): siRNA sense strand
ugugaaaggagcaguacaa

SEQ ID NO: 2409916 - RNA, 19 nt, Homo sapiens
  misc_RNA (1)...(19): siRNA sense strand
aagagaaaaugguggaauu

SEQ ID NO: 2409917 - RNA, 19 nt, Homo sapiens
  misc_RNA (1)...(19): siRNA sense strand
caugauagaugcaccuuaa

SEQ ID NO: 2409918 - RNA, 19 nt, Homo sapiens
  misc_RNA (1)...(19): siRNA sense strand
ccgaacuguugaaggaaaa

SEQ ID NO: 2409919 - RNA, 19 nt, Homo sapiens
  misc_RNA (1)...(19): siRNA sense strand
gugugaaaacagaaagaaa

SEQ ID NO: 2409920 - RNA, 19 nt, Homo sapiens
  misc_RNA (1)...(19): siRNA sense strand
ucaguaugagagagagaaa

SEQ ID NO: 2409921 - RNA, 19 nt, Homo sapiens
  misc_RNA (1)...(19): siRNA sense strand
gauuaacccaacaaagaaa

SEQ ID NO: 2409922 - RNA, 19 nt, Homo sapiens
  misc_RNA (1)...(19): siRNA sense strand
ggaagaggcuugugccguu

SEQ ID NO: 2409923 - RNA, 19 nt, Homo sapiens
  misc_RNA (1)...(19): siRNA sense strand
ccucgugcuagaagagaaa

SEQ ID NO: 2409924 - RNA, 19 nt, Homo sapiens
  misc_RNA (1)...(19): siRNA sense strand
aguaguaaguaucaaggaa

SEQ ID NO: 2409925 - RNA, 19 nt, Homo sapiens
  misc_RNA (1)...(19): siRNA sense strand
acagaauagucaauggaca

SEQ ID NO: 2409926 - RNA, 19 nt, Homo sapiens
  misc_RNA (1)...(19): siRNA sense strand
guacagacauugagagcag

SEQ ID NO: 2409927 - RNA, 19 nt, Homo sapiens
  misc_RNA (1)...(19): siRNA sense strand
uaguaaguaucaaggaaga

SEQ ID NO: 2409928 - RNA, 19 nt, Homo sapiens
  misc_RNA (1)...(19): siRNA sense strand
aagcaaacacagugaaagu

SEQ ID NO: 2409929 - RNA, 19 nt, Homo sapiens
  misc_RNA (1)...(19): siRNA sense strand
acacaggaaaugaaagaga

SEQ ID NO: 2409930 - RNA, 19 nt, Homo sapiens
  misc_RNA (1)...(19): siRNA sense strand
gaaaacaggaggaguagua

SEQ ID NO: 2409931 - RNA, 19 nt, Homo sapiens
  misc_RNA (1)...(19): siRNA sense strand
aaggagcaguacaaagaaa

SEQ ID NO: 2409932 - RNA, 19 nt, Homo sapiens
  misc_RNA (1)...(19): siRNA sense strand
caacaaagaaagauuggga

SEQ ID NO: 2409933 - RNA, 19 nt, Homo sapiens
  misc_RNA (1)...(19): siRNA sense strand
uguuggaaguucugaugaa

SEQ ID NO: 2409934 - RNA, 19 nt, Homo sapiens
  misc_RNA (1)...(19): siRNA sense strand
agacaggaaauauguacaa

SEQ ID NO: 2409935 - RNA, 19 nt, Homo sapiens
  misc_RNA (1)...(19): siRNA sense strand
ucaaaaugcagaagcuaaa

SEQ ID NO: 2409936 - RNA, 19 nt, Homo sapiens
  misc_RNA (1)...(19): siRNA sense strand
auauugaagcacuggacaa

SEQ ID NO: 2409937 - RNA, 19 nt, Homo sapiens
  misc_RNA (1)...(19): siRNA sense strand
agacauguguggacgagau

SEQ ID NO: 2409938 - RNA, 19 nt, Homo sapiens
  misc_RNA (1)...(19): siRNA sense strand
caaagaaagauugggaaaa

SEQ ID NO: 2409939 - RNA, 19 nt, Homo sapiens
  misc_RNA (1)...(19): siRNA sense strand
uggacgagaugcagaagau

SEQ ID NO: 2409940 - RNA, 19 nt, Homo sapiens
  misc_RNA (1)...(19): siRNA sense strand
agaaaagacuggaagcuga

SEQ ID NO: 2409941 - RNA, 19 nt, Homo sapiens
  misc_RNA (1)...(19): siRNA sense strand
caaaguaaaagcugagaau

SEQ ID NO: 2409942 - RNA, 19 nt, Homo sapiens
  misc_RNA (1)...(19): siRNA sense strand
acuccgaacugcagaagau

SEQ ID NO: 2409943 - RNA, 19 nt, Homo sapiens
  misc_RNA (1)...(19): siRNA sense strand
acgagauguuucuguacaa

SEQ ID NO: 2409944 - RNA, 19 nt, Homo sapiens
  misc_RNA (1)...(19): siRNA sense strand
cuguaagacaagagauagu

SEQ ID NO: 2409945 - RNA, 19 nt, Homo sapiens
  misc_RNA (1)...(19): siRNA sense strand
ggcuuuauugagagugaaa

SEQ ID NO: 2409946 - RNA, 19 nt, Homo sapiens
  misc_RNA (1)...(19): siRNA sense strand
agauaaguucuguaagaca

SEQ ID NO: 2409947 - RNA, 19 nt, Homo sapiens
  misc_RNA (1)...(19): siRNA sense strand
augcagaagcuaaagugaa

SEQ ID NO: 2409948 - RNA, 19 nt, Homo sapiens
  misc_RNA (1)...(19): siRNA sense strand
gcuaaugaaugaaugugau

SEQ ID NO: 2409949 - RNA, 19 nt, Homo sapiens
  misc_RNA (1)...(19): siRNA sense strand
ccguuauucugcuggaaca

SEQ ID NO: 2409950 - RNA, 19 nt, Homo sapiens
  misc_RNA (1)...(19): siRNA sense strand
agaagcaaccacaggucaa

SEQ ID NO: 2409951 - RNA, 19 nt, Homo sapiens
  misc_RNA (1)...(19): siRNA sense strand
gaaggaagagcaugauaga

SEQ ID NO: 2409952 - RNA, 19 nt, Homo sapiens
  misc_RNA (1)...(19): siRNA sense strand
aggaagagcaugauagaug

SEQ ID NO: 2409953 - RNA, 19 nt, Homo sapiens
  misc_RNA (1)...(19): siRNA sense strand
aaaacuugcuuuagagaga

SEQ ID NO: 2409954 - RNA, 19 nt, Homo sapiens
  misc_RNA (1)...(19): siRNA sense strand
aagcacuggacaaggacaa

SEQ ID NO: 2409955 - RNA, 19 nt, Homo sapiens
  misc_RNA (1)...(19): siRNA sense strand
aucaaagacugcaagaaau

SEQ ID NO: 2409956 - RNA, 19 nt, Homo sapiens
  misc_RNA (1)...(19): siRNA sense strand
auaagcaaacacagugaaa

SEQ ID NO: 2409957 - RNA, 19 nt, Homo sapiens
  misc_RNA (1)...(19): siRNA sense strand
uucuguaagacaagagaua

SEQ ID NO: 2409958 - RNA, 19 nt, Homo sapiens
  misc_RNA (1)...(19): siRNA sense strand
acgagaugcagaagauuau

SEQ ID NO: 2409959 - RNA, 19 nt, Homo sapiens
  misc_RNA (1)...(19): siRNA sense strand
cgagaaagugucagagccu

SEQ ID NO: 2409960 - RNA, 19 nt, Homo sapiens
  misc_RNA (1)...(19): siRNA sense strand
aggaaacagaauagucaau

SEQ ID NO: 2409961 - RNA, 19 nt, Homo sapiens
  misc_RNA (1)...(19): siRNA sense strand
gacauugagagcagaacaa

SEQ ID NO: 2409962 - RNA, 19 nt, Homo sapiens
  misc_RNA (1)...(19): siRNA sense strand
ucacuagagaugaaaucaa

SEQ ID NO: 2409963 - RNA, 19 nt, Homo sapiens
  misc_RNA (1)...(19): siRNA sense strand
uuaaggauaucuacggcaa

SEQ ID NO: 2409964 - RNA, 19 nt, Homo sapiens
  misc_RNA (1)...(19): siRNA sense strand
accaguggcuucagaggaa

SEQ ID NO: 2409965 - RNA, 19 nt, Homo sapiens
  misc_RNA (1)...(19): siRNA sense strand
augaagaaaugaaaggucu

SEQ ID NO: 2409966 - RNA, 19 nt, Homo sapiens
  misc_RNA (1)...(19): siRNA sense strand
agauauugcuauacucaga

SEQ ID NO: 2409967 - RNA, 19 nt, Homo sapiens
  misc_RNA (1)...(19): siRNA sense strand
ucaaacuucuagaaagaca

SEQ ID NO: 2409968 - RNA, 19 nt, Homo sapiens
  misc_RNA (1)...(19): siRNA sense strand
uggaaaggacagaggaaaa

SEQ ID NO: 2409969 - RNA, 19 nt, Homo sapiens
  misc_RNA (1)...(19): siRNA sense strand
cggugaaggaagagaaugu

SEQ ID NO: 2409970 - RNA, 19 nt, Homo sapiens
  misc_RNA (1)...(19): siRNA sense strand
ccuuggaccuggaggacau

SEQ ID NO: 2409971 - RNA, 19 nt, Homo sapiens
  misc_RNA (1)...(19): siRNA sense strand
agacaaagacgguagcuca

SEQ ID NO: 2409972 - RNA, 19 nt, Homo sapiens
  misc_RNA (1)...(19): siRNA sense strand
ccaugggacaagagaaaga

SEQ ID NO: 2409973 - RNA, 19 nt, Homo sapiens
  misc_RNA (1)...(19): siRNA sense strand
gugcagagagccagggcau

SEQ ID NO: 2409974 - RNA, 19 nt, Homo sapiens
  misc_RNA (1)...(19): siRNA sense strand
ccuauagagaagaggcuuu

SEQ ID NO: 2409975 - RNA, 19 nt, Homo sapiens
  misc_RNA (1)...(19): siRNA sense strand
gcuaccggcucuugggcaa

SEQ ID NO: 2409976 - RNA, 19 nt, Homo sapiens
  misc_RNA (1)...(19): siRNA sense strand
agagcagccagcagagaaa

SEQ ID NO: 2409977 - RNA, 19 nt, Homo sapiens
  misc_RNA (1)...(19): siRNA sense strand
ccaugcagagagugugaaa

SEQ ID NO: 2409978 - RNA, 19 nt, Homo sapiens
  misc_RNA (1)...(19): siRNA sense strand
aguggaaaggacagaggaa

SEQ ID NO: 2409979 - RNA, 19 nt, Homo sapiens
  misc_RNA (1)...(19): siRNA sense strand
ggaggaaguggaaaggaca

SEQ ID NO: 2409980 - RNA, 19 nt, Homo sapiens
  misc_RNA (1)...(19): siRNA sense strand
ccagaaggggacaggcaua

SEQ ID NO: 2409981 - RNA, 19 nt, Homo sapiens
  misc_RNA (1)...(19): siRNA sense strand
gagcgagacagcaaggaga

SEQ ID NO: 2409982 - RNA, 19 nt, Homo sapiens
  misc_RNA (1)...(19): siRNA sense strand
cucccaaguuaaagaccaa

SEQ ID NO: 2409983 - RNA, 19 nt, Homo sapiens
  misc_RNA (1)...(19): siRNA sense strand
gggcuagaaaagaggguca

SEQ ID NO: 2409984 - RNA, 19 nt, Homo sapiens
  misc_RNA (1)...(19): siRNA sense strand
cggaggaaguggaaaggac

SEQ ID NO: 2409985 - RNA, 19 nt, Homo sapiens
  misc_RNA (1)...(19): siRNA sense strand
ggacacaccugcucgcuga

SEQ ID NO: 2409986 - RNA, 19 nt, Homo sapiens
  misc_RNA (1)...(19): siRNA sense strand
ugcacgaggcucagggcaa

SEQ ID NO: 2409987 - RNA, 19 nt, Homo sapiens
  misc_RNA (1)...(19): siRNA sense strand
guggcaugcuccagcguga

SEQ ID NO: 2409988 - RNA, 19 nt, Homo sapiens
  misc_RNA (1)...(19): siRNA sense strand
cggaaagagaaggcgaaga

SEQ ID NO: 2409989 - RNA, 19 nt, Homo sapiens
  misc_RNA (1)...(19): siRNA sense strand
ugggaagugcagagagcca

SEQ ID NO: 2409990 - RNA, 19 nt, Homo sapiens
  misc_RNA (1)...(19): siRNA sense strand
cuggaaaccccgaggcaga

SEQ ID NO: 2409991 - RNA, 19 nt, Homo sapiens
  misc_RNA (1)...(19): siRNA sense strand
agagaauguggcaggcaga

SEQ ID NO: 2409992 - RNA, 19 nt, Homo sapiens
  misc_RNA (1)...(19): siRNA sense strand
ggaccuuggaccuggagga

SEQ ID NO: 2409993 - RNA, 19 nt, Homo sapiens
  misc_RNA (1)...(19): siRNA sense strand
ucaccaagucccagcggau

SEQ ID NO: 2409994 - RNA, 19 nt, Homo sapiens
  misc_RNA (1)...(19): siRNA sense strand
ugugaaaggguguuugaca

SEQ ID NO: 2409995 - RNA, 19 nt, Homo sapiens
  misc_RNA (1)...(19): siRNA sense strand
auaugaugcuucaggacaa

SEQ ID NO: 2409996 - RNA, 19 nt, Homo sapiens
  misc_RNA (1)...(19): siRNA sense strand
aggacuaauagcuggcaaa

SEQ ID NO: 2409997 - RNA, 19 nt, Homo sapiens
  misc_RNA (1)...(19): siRNA sense strand
agugaaagacucagaaagu

SEQ ID NO: 2409998 - RNA, 19 nt, Homo sapiens
  misc_RNA (1)...(19): siRNA sense strand
aaaucuucaaggaggaaua

SEQ ID NO: 2409999 - RNA, 19 nt, Homo sapiens
  misc_RNA (1)...(19): siRNA sense strand
gaaaggaaauguuaggauc

SEQ ID NO: 2410000 - RNA, 19 nt, Homo sapiens
  misc_RNA (1)...(19): siRNA sense strand
cgaaucuacuagugcaaca

SEQ ID NO: 2410001 - RNA, 19 nt, Homo sapiens
  misc_RNA (1)...(19): siRNA sense strand
gggaaucacucgagaaaac

SEQ ID NO: 2410002 - RNA, 19 nt, Homo sapiens
  misc_RNA (1)...(19): siRNA sense strand
auagcaaagacaugggaau

SEQ ID NO: 2410003 - RNA, 19 nt, Homo sapiens
  misc_RNA (1)...(19): siRNA sense strand
auaacaggcaaaugguuua

SEQ ID NO: 2410004 - RNA, 19 nt, Homo sapiens
  misc_RNA (1)...(19): siRNA sense strand
aggcaaaugguuuaacuau

SEQ ID NO: 2410005 - RNA, 19 nt, Homo sapiens
  misc_RNA (1)...(19): siRNA sense strand
augggaaucacucgagaaa

SEQ ID NO: 2410006 - RNA, 19 nt, Homo sapiens
  misc_RNA (1)...(19): siRNA sense strand
uggcuuacuuggugaucuu

SEQ ID NO: 2410007 - RNA, 19 nt, Homo sapiens
  misc_RNA (1)...(19): siRNA sense strand
uguuauuguuguuggaaac

SEQ ID NO: 2410008 - RNA, 19 nt, Homo sapiens
  misc_RNA (1)...(19): siRNA sense strand
aaaggaaauguuaggauca

SEQ ID NO: 2410009 - RNA, 19 nt, Homo sapiens
  misc_RNA (1)...(19): siRNA sense strand
ccucaugaauaugggcaau

SEQ ID NO: 2410010 - RNA, 19 nt, Homo sapiens
  misc_RNA (1)...(19): siRNA sense strand
ggaaaaucagcaagagcuu

SEQ ID NO: 2410011 - RNA, 19 nt, Homo sapiens
  misc_RNA (1)...(19): siRNA sense strand
cuauaugggcauccgaaau

SEQ ID NO: 2410012 - RNA, 19 nt, Homo sapiens
  misc_RNA (1)...(19): siRNA sense strand
agaaaggaaauguuaggau

SEQ ID NO: 2410013 - RNA, 19 nt, Homo sapiens
  misc_RNA (1)...(19): siRNA sense strand
ucuuaauauuugcggagga

SEQ ID NO: 2410014 - RNA, 19 nt, Homo sapiens
  misc_RNA (1)...(19): siRNA sense strand
cacacuaacccucggacua

SEQ ID NO: 2410015 - RNA, 19 nt, Homo sapiens
  misc_RNA (1)...(19): siRNA sense strand
uagccaaacagaagccaau

SEQ ID NO: 2410016 - RNA, 19 nt, Homo sapiens
  misc_RNA (1)...(19): siRNA sense strand
uuacagacuauaugggcau

SEQ ID NO: 2410017 - RNA, 19 nt, Homo sapiens
  misc_RNA (1)...(19): siRNA sense strand
agaaaaucuucaaggagga

SEQ ID NO: 2410018 - RNA, 19 nt, Homo sapiens
  misc_RNA (1)...(19): siRNA sense strand
ucaaggaggaauaucguau

SEQ ID NO: 2410019 - RNA, 19 nt, Homo sapiens
  misc_RNA (1)...(19): siRNA sense strand
ccaguuucucauagccaaa

SEQ ID NO: 2410020 - RNA, 19 nt, Homo sapiens
  misc_RNA (1)...(19): siRNA sense strand
acagugaaagacucagaaa

SEQ ID NO: 2410021 - RNA, 19 nt, Homo sapiens
  misc_RNA (1)...(19): siRNA sense strand
ggauauugauugacgggau

SEQ ID NO: 2410022 - RNA, 19 nt, Homo sapiens
  misc_RNA (1)...(19): siRNA sense strand
gagcaagggucgucggcau

SEQ ID NO: 2410023 - RNA, 19 nt, Homo sapiens
  misc_RNA (1)...(19): siRNA sense strand
ucaugaaggagaagggcaa

SEQ ID NO: 2410024 - RNA, 19 nt, Homo sapiens
  misc_RNA (1)...(19): siRNA sense strand
ggguggauaugcugggaga

SEQ ID NO: 2410025 - RNA, 19 nt, Homo sapiens
  misc_RNA (1)...(19): siRNA sense strand
gaggaaaugaaguugaaaa

SEQ ID NO: 2410026 - RNA, 19 nt, Homo sapiens
  misc_RNA (1)...(19): siRNA sense strand
cacaagagcgagaggacau

SEQ ID NO: 2410027 - RNA, 19 nt, Homo sapiens
  misc_RNA (1)...(19): siRNA sense strand
gaucgagcguacaagggaa

SEQ ID NO: 2410028 - RNA, 19 nt, Homo sapiens
  misc_RNA (1)...(19): siRNA sense strand
ugaaauacgaaaagggaca

SEQ ID NO: 2410029 - RNA, 19 nt, Homo sapiens
  misc_RNA (1)...(19): siRNA sense strand
gggacauuaaggaagcaua

SEQ ID NO: 2410030 - RNA, 19 nt, Homo sapiens
  misc_RNA (1)...(19): siRNA sense strand
agagcaaguggguggauau

SEQ ID NO: 2410031 - RNA, 19 nt, Homo sapiens
  misc_RNA (1)...(19): siRNA sense strand
cgucacaacccaagaccau

SEQ ID NO: 2410032 - RNA, 19 nt, Homo sapiens
  misc_RNA (1)...(19): siRNA sense strand
cgaaagagcaagugggugg

SEQ ID NO: 2410033 - RNA, 19 nt, Homo sapiens
  misc_RNA (1)...(19): siRNA sense strand
agggaaugcccaugaacau

SEQ ID NO: 2410034 - RNA, 19 nt, Homo sapiens
  misc_RNA (1)...(19): siRNA sense strand
cagaaagcucauagaucga

SEQ ID NO: 2410035 - RNA, 19 nt, Homo sapiens
  misc_RNA (1)...(19): siRNA sense strand
agaucagccgaaagagcaa

SEQ ID NO: 2410036 - RNA, 19 nt, Homo sapiens
  misc_RNA (1)...(19): siRNA sense strand
gcauauauucuucagggau

SEQ ID NO: 2410037 - RNA, 19 nt, Homo sapiens
  misc_RNA (1)...(19): siRNA sense strand
agacagagcugcugggucc

SEQ ID NO: 2410038 - RNA, 19 nt, Homo sapiens
  misc_RNA (1)...(19): siRNA sense strand
gcacaagagcgagaggaca

SEQ ID NO: 2410039 - RNA, 19 nt, Homo sapiens
  misc_RNA (1)...(19): siRNA sense strand
ggauuguacaugagacgga

SEQ ID NO: 2410040 - RNA, 19 nt, Homo sapiens
  misc_RNA (1)...(19): siRNA sense strand
ccggaagauaccagaucau

SEQ ID NO: 2410041 - RNA, 19 nt, Homo sapiens
  misc_RNA (1)...(19): siRNA sense strand
cauauauucuucagggauc

SEQ ID NO: 2410042 - RNA, 19 nt, Homo sapiens
  misc_RNA (1)...(19): siRNA sense strand
cugcuggguccgugccaua

SEQ ID NO: 2410043 - RNA, 19 nt, Homo sapiens
  misc_RNA (1)...(19): siRNA sense strand
ccauaucccaggaggacca

SEQ ID NO: 2410044 - RNA, 19 nt, Homo sapiens
  misc_RNA (1)...(19): siRNA sense strand
gcagaaagcucauagaucg

SEQ ID NO: 2410045 - RNA, 19 nt, Homo sapiens
  misc_RNA (1)...(19): siRNA sense strand
acgcaaagguggcucgaga

SEQ ID NO: 2410046 - RNA, 19 nt, Homo sapiens
  misc_RNA (1)...(19): siRNA sense strand
ccgacuaccugcuggguga

SEQ ID NO: 2410047 - RNA, 19 nt, Homo sapiens
  misc_RNA (1)...(19): siRNA sense strand
uggacacagcugagcguua

SEQ ID NO: 2410048 - RNA, 19 nt, Homo sapiens
  misc_RNA (1)...(19): siRNA sense strand
ccaucuucuuuaagcgcaa

SEQ ID NO: 2410049 - RNA, 19 nt, Homo sapiens
  misc_RNA (1)...(19): siRNA sense strand
gcaaggacaucgacgagca

SEQ ID NO: 2410050 - RNA, 19 nt, Homo sapiens
  misc_RNA (1)...(19): siRNA sense strand
uguccaacgagguggucaa

SEQ ID NO: 2410051 - RNA, 19 nt, Homo sapiens
  misc_RNA (1)...(19): siRNA sense strand
cgguaaacaaagucugcuu

SEQ ID NO: 2410052 - RNA, 19 nt, Homo sapiens
  misc_RNA (1)...(19): siRNA sense strand
uggaaggugaggaggacga

SEQ ID NO: 2410053 - RNA, 19 nt, Homo sapiens
  misc_RNA (1)...(19): siRNA sense strand
ugggugacguggaagguga

SEQ ID NO: 2410054 - RNA, 19 nt, Homo sapiens
  misc_RNA (1)...(19): siRNA sense strand
ccaaugaggauaacgagga

SEQ ID NO: 2410055 - RNA, 19 nt, Homo sapiens
  misc_RNA (1)...(19): siRNA sense strand
ugggugaacgggugcgcaa

SEQ ID NO: 2410056 - RNA, 19 nt, Homo sapiens
  misc_RNA (1)...(19): siRNA sense strand
uggugaaggucugggacau

SEQ ID NO: 2410057 - RNA, 19 nt, Homo sapiens
  misc_RNA (1)...(19): siRNA sense strand
cauaauagcucuaggcaua

SEQ ID NO: 2410058 - RNA, 19 nt, Homo sapiens
  misc_RNA (1)...(19): siRNA sense strand
uugaacaaucccuggaaua

SEQ ID NO: 2410059 - RNA, 19 nt, Homo sapiens
  misc_RNA (1)...(19): siRNA sense strand
gaacaaucccuggaauaaa

SEQ ID NO: 2410060 - RNA, 19 nt, Homo sapiens
  misc_RNA (1)...(19): siRNA sense strand
acauaauacccaagcacau

SEQ ID NO: 2410061 - RNA, 19 nt, Homo sapiens
  misc_RNA (1)...(19): siRNA sense strand
ugaacaaucccuggaauaa

SEQ ID NO: 2410062 - RNA, 19 nt, Homo sapiens
  misc_RNA (1)...(19): siRNA sense strand
ggcuaaggcggaaggauca

SEQ ID NO: 2410063 - RNA, 19 nt, Homo sapiens
  misc_RNA (1)...(19): siRNA sense strand
guucauaauuguaacugga

SEQ ID NO: 2410064 - RNA, 19 nt, Homo sapiens
  misc_RNA (1)...(19): siRNA sense strand
aggacaaguugggaggcua

SEQ ID NO: 2410065 - RNA, 19 nt, Homo sapiens
  misc_RNA (1)...(19): siRNA sense strand
cuggacaaauaaaggcaga

SEQ ID NO: 2410066 - RNA, 19 nt, Homo sapiens
  misc_RNA (1)...(19): siRNA sense strand
aggcuaaggcggaaggauc

SEQ ID NO: 2410067 - RNA, 19 nt, Homo sapiens
  misc_RNA (1)...(19): siRNA sense strand
agacaucauaauagcucua

SEQ ID NO: 2410068 - RNA, 19 nt, Homo sapiens
  misc_RNA (1)...(19): siRNA sense strand
ucauaauagcucuaggcau

SEQ ID NO: 2410069 - RNA, 19 nt, Homo sapiens
  misc_RNA (1)...(19): siRNA sense strand
ggaaggaucacuugagccu

SEQ ID NO: 2410070 - RNA, 19 nt, Homo sapiens
  misc_RNA (1)...(19): siRNA sense strand
gcagauuuuaaaaggacaa

SEQ ID NO: 2410071 - RNA, 19 nt, Homo sapiens
  misc_RNA (1)...(19): siRNA sense strand
ccguagaagaagaaggaau

SEQ ID NO: 2410072 - RNA, 19 nt, Homo sapiens
  misc_RNA (1)...(19): siRNA sense strand
acuaugauacggagagaaa

SEQ ID NO: 2410073 - RNA, 19 nt, Homo sapiens
  misc_RNA (1)...(19): siRNA sense strand
cugcaagagaugaaggcaa

SEQ ID NO: 2410074 - RNA, 19 nt, Homo sapiens
  misc_RNA (1)...(19): siRNA sense strand
gagaaauacgauaaggaca

SEQ ID NO: 2410075 - RNA, 19 nt, Homo sapiens
  misc_RNA (1)...(19): siRNA sense strand
agaagaaggaauaccuaaa

SEQ ID NO: 2410076 - RNA, 19 nt, Homo sapiens
  misc_RNA (1)...(19): siRNA sense strand
ccauuaaggaguugcaaga

SEQ ID NO: 2410077 - RNA, 19 nt, Homo sapiens
  misc_RNA (1)...(19): siRNA sense strand
aggcaaagguaaaggcaag

SEQ ID NO: 2410078 - RNA, 19 nt, Homo sapiens
  misc_RNA (1)...(19): siRNA sense strand
aagguaaaggcaaggauaa

SEQ ID NO: 2410079 - RNA, 19 nt, Homo sapiens
  misc_RNA (1)...(19): siRNA sense strand
accuaaagaaacagacaua

SEQ ID NO: 2410080 - RNA, 19 nt, Homo sapiens
  misc_RNA (1)...(19): siRNA sense strand
aauuugaaguccagaguca

SEQ ID NO: 2410081 - RNA, 19 nt, Homo sapiens
  misc_RNA (1)...(19): siRNA sense strand
guguaacagaacagaggaa

SEQ ID NO: 2410082 - RNA, 19 nt, Homo sapiens
  misc_RNA (1)...(19): siRNA sense strand
aggagcaagaagaagguaa

SEQ ID NO: 2410083 - RNA, 19 nt, Homo sapiens
  misc_RNA (1)...(19): siRNA sense strand
uuagaaaggagcagcagaa

SEQ ID NO: 2410084 - RNA, 19 nt, Homo sapiens
  misc_RNA (1)...(19): siRNA sense strand
uaugauacggagagaaauu

SEQ ID NO: 2410085 - RNA, 19 nt, Homo sapiens
  misc_RNA (1)...(19): siRNA sense strand
acucauacagagauugaaa

SEQ ID NO: 2410086 - RNA, 19 nt, Homo sapiens
  misc_RNA (1)...(19): siRNA sense strand
gaaaaggagaggagcaaga

SEQ ID NO: 2410087 - RNA, 19 nt, Homo sapiens
  misc_RNA (1)...(19): siRNA sense strand
aaggauaagaggagaggca

SEQ ID NO: 2410088 - RNA, 19 nt, Homo sapiens
  misc_RNA (1)...(19): siRNA sense strand
ggaugaaaaccgaagaaga

SEQ ID NO: 2410089 - RNA, 19 nt, Homo sapiens
  misc_RNA (1)...(19): siRNA sense strand
ugauaagagaguaugaaca

SEQ ID NO: 2410090 - RNA, 19 nt, Homo sapiens
  misc_RNA (1)...(19): siRNA sense strand
ggauaagaggagaggcaag

SEQ ID NO: 2410091 - RNA, 19 nt, Homo sapiens
  misc_RNA (1)...(19): siRNA sense strand
gcagauaccauuaaggagu

SEQ ID NO: 2410092 - RNA, 19 nt, Homo sapiens
  misc_RNA (1)...(19): siRNA sense strand
caucauugccagggaggaa

SEQ ID NO: 2410093 - RNA, 19 nt, Homo sapiens
  misc_RNA (1)...(19): siRNA sense strand
aggcagaccaucaugacua

SEQ ID NO: 2410094 - RNA, 19 nt, Homo sapiens
  misc_RNA (1)...(19): siRNA sense strand
ccucaaggaccaacugcaa

SEQ ID NO: 2410095 - RNA, 19 nt, Homo sapiens
  misc_RNA (1)...(19): siRNA sense strand
auucaaaaggcaaagguaa

SEQ ID NO: 2410096 - RNA, 19 nt, Homo sapiens
  misc_RNA (1)...(19): siRNA sense strand
cggagacacugaagaaaau

SEQ ID NO: 2410097 - RNA, 19 nt, Homo sapiens
  misc_RNA (1)...(19): siRNA sense strand
uugagcaaagagagggaaa

SEQ ID NO: 2410098 - RNA, 19 nt, Homo sapiens
  misc_RNA (1)...(19): siRNA sense strand
aggagaggagcaagaagaa

SEQ ID NO: 2410099 - RNA, 19 nt, Homo sapiens
  misc_RNA (1)...(19): siRNA sense strand
caucaugacuacggagaca

SEQ ID NO: 2410100 - RNA, 19 nt, Homo sapiens
  misc_RNA (1)...(19): siRNA sense strand
guaacagaacagaggaacu

SEQ ID NO: 2410101 - RNA, 19 nt, Homo sapiens
  misc_RNA (1)...(19): siRNA sense strand
ccuacaaggcagaccauca

SEQ ID NO: 2410102 - RNA, 19 nt, Homo sapiens
  misc_RNA (1)...(19): siRNA sense strand
agaaggaauaccuaaagaa

SEQ ID NO: 2410103 - RNA, 19 nt, Homo sapiens
  misc_RNA (1)...(19): siRNA sense strand
agacaaaguugauagcaag

SEQ ID NO: 2410104 - RNA, 19 nt, Homo sapiens
  misc_RNA (1)...(19): siRNA sense strand
aagaagacagccuggaaga

SEQ ID NO: 2410105 - RNA, 19 nt, Homo sapiens
  misc_RNA (1)...(19): siRNA sense strand
aagaagaaggaauaccuaa

SEQ ID NO: 2410106 - RNA, 19 nt, Homo sapiens
  misc_RNA (1)...(19): siRNA sense strand
uucaaaaggcaaagguaaa

SEQ ID NO: 2410107 - RNA, 19 nt, Homo sapiens
  misc_RNA (1)...(19): siRNA sense strand
cccggaaacucuagagcca

SEQ ID NO: 2410108 - RNA, 19 nt, Homo sapiens
  misc_RNA (1)...(19): siRNA sense strand
agaggagaggcaagaagaa

SEQ ID NO: 2410109 - RNA, 19 nt, Homo sapiens
  misc_RNA (1)...(19): siRNA sense strand
cggcaguucuggaggacac

SEQ ID NO: 2410110 - RNA, 19 nt, Homo sapiens
  misc_RNA (1)...(19): siRNA sense strand
agaaauacgauaaggacac

SEQ ID NO: 2410111 - RNA, 19 nt, Homo sapiens
  misc_RNA (1)...(19): siRNA sense strand
acgauaaggacacagaaau

SEQ ID NO: 2410112 - RNA, 19 nt, Homo sapiens
  misc_RNA (1)...(19): siRNA sense strand
aaggagaggagcaagaaga

SEQ ID NO: 2410113 - RNA, 19 nt, Homo sapiens
  misc_RNA (1)...(19): siRNA sense strand
aaaugaaucuagaaggaac

SEQ ID NO: 2410114 - RNA, 19 nt, Homo sapiens
  misc_RNA (1)...(19): siRNA sense strand
accuaguaccguagaagaa

SEQ ID NO: 2410115 - RNA, 19 nt, Homo sapiens
  misc_RNA (1)...(19): siRNA sense strand
uuggaauuaaagagcguua

SEQ ID NO: 2410116 - RNA, 19 nt, Homo sapiens
  misc_RNA (1)...(19): siRNA sense strand
acggagacacugaagaaaa

SEQ ID NO: 2410117 - RNA, 19 nt, Homo sapiens
  misc_RNA (1)...(19): siRNA sense strand
ccggacucauacagagauu

SEQ ID NO: 2410118 - RNA, 19 nt, Homo sapiens
  misc_RNA (1)...(19): siRNA sense strand
acauagaaaucaucccaga

SEQ ID NO: 2410119 - RNA, 19 nt, Homo sapiens
  misc_RNA (1)...(19): siRNA sense strand
uugcuaaccucaaggacca

SEQ ID NO: 2410120 - RNA, 19 nt, Homo sapiens
  misc_RNA (1)...(19): siRNA sense strand
cuggaguucuggauggaga

SEQ ID NO: 2410121 - RNA, 19 nt, Homo sapiens
  misc_RNA (1)...(19): siRNA sense strand
aaacaggaucucuuggaau

SEQ ID NO: 2410122 - RNA, 19 nt, Homo sapiens
  misc_RNA (1)...(19): siRNA sense strand
acgaagggagacagagcau

SEQ ID NO: 2410123 - RNA, 19 nt, Homo sapiens
  misc_RNA (1)...(19): siRNA sense strand
ggaagaagaccaaggccca

SEQ ID NO: 2410124 - RNA, 19 nt, Homo sapiens
  misc_RNA (1)...(19): siRNA sense strand
ggaugaaggugauuggacu

SEQ ID NO: 2410125 - RNA, 19 nt, Homo sapiens
  misc_RNA (1)...(19): siRNA sense strand
cagaaaccucaaacagaaa

SEQ ID NO: 2410126 - RNA, 19 nt, Homo sapiens
  misc_RNA (1)...(19): siRNA sense strand
aggaagaacacguuggcuu

SEQ ID NO: 2410127 - RNA, 19 nt, Homo sapiens
  misc_RNA (1)...(19): siRNA sense strand
gugcagaaggcugaagaaa

SEQ ID NO: 2410128 - RNA, 19 nt, Homo sapiens
  misc_RNA (1)...(19): siRNA sense strand
aguugaggaggcugagaaa

SEQ ID NO: 2410129 - RNA, 19 nt, Homo sapiens
  misc_RNA (1)...(19): siRNA sense strand
aagaagaggaagaagacca

SEQ ID NO: 2410130 - RNA, 19 nt, Homo sapiens
  misc_RNA (1)...(19): siRNA sense strand
acucauuggaggaagaaca

SEQ ID NO: 2410131 - RNA, 19 nt, Homo sapiens
  misc_RNA (1)...(19): siRNA sense strand
ggaagaagaucaaaagcca

SEQ ID NO: 2410132 - RNA, 19 nt, Homo sapiens
  misc_RNA (1)...(19): siRNA sense strand
caguagaggaacagcaagu

SEQ ID NO: 2410133 - RNA, 19 nt, Homo sapiens
  misc_RNA (1)...(19): siRNA sense strand
accaagaagaggaagaaga

SEQ ID NO: 2410134 - RNA, 19 nt, Homo sapiens
  misc_RNA (1)...(19): siRNA sense strand
aggaccaagaagaggaaga

SEQ ID NO: 2410135 - RNA, 19 nt, Homo sapiens
  misc_RNA (1)...(19): siRNA sense strand
caucaagagcugcgagauc

SEQ ID NO: 2410136 - RNA, 19 nt, Homo sapiens
  misc_RNA (1)...(19): siRNA sense strand
gaaguuacaggaagggaga

SEQ ID NO: 2410137 - RNA, 19 nt, Homo sapiens
  misc_RNA (1)...(19): siRNA sense strand
ggauagauguuauucgacu

SEQ ID NO: 2410138 - RNA, 19 nt, Homo sapiens
  misc_RNA (1)...(19): siRNA sense strand
gggagaaguuacaggaagg

SEQ ID NO: 2410139 - RNA, 19 nt, Homo sapiens
  misc_RNA (1)...(19): siRNA sense strand
cagaaaaugaugacgauga

SEQ ID NO: 2410140 - RNA, 19 nt, Homo sapiens
  misc_RNA (1)...(19): siRNA sense strand
augaugacgaugaggauga

SEQ ID NO: 2410141 - RNA, 19 nt, Homo sapiens
  misc_RNA (1)...(19): siRNA sense strand
ccaaccagccuuacgggaa

SEQ ID NO: 2410142 - RNA, 19 nt, Homo sapiens
  misc_RNA (1)...(19): siRNA sense strand
gggaggugcagaaggcuga

SEQ ID NO: 2410143 - RNA, 19 nt, Homo sapiens
  misc_RNA (1)...(19): siRNA sense strand
cugcaaagaccucauaaaa

SEQ ID NO: 2410144 - RNA, 19 nt, Homo sapiens
  misc_RNA (1)...(19): siRNA sense strand
aguuaagggagaaguuaca

SEQ ID NO: 2410145 - RNA, 19 nt, Homo sapiens
  misc_RNA (1)...(19): siRNA sense strand
uugaggaggcugagaaagu

SEQ ID NO: 2410146 - RNA, 19 nt, Homo sapiens
  misc_RNA (1)...(19): siRNA sense strand
ugcagaaggcugaagaaaa

SEQ ID NO: 2410147 - RNA, 19 nt, Homo sapiens
  misc_RNA (1)...(19): siRNA sense strand
ugaucaugagcaagaggaa

SEQ ID NO: 2410148 - RNA, 19 nt, Homo sapiens
  misc_RNA (1)...(19): siRNA sense strand
cagaagagaagcuugcaga

SEQ ID NO: 2410149 - RNA, 19 nt, Homo sapiens
  misc_RNA (1)...(19): siRNA sense strand
acucauugcaggaacaaca

SEQ ID NO: 2410150 - RNA, 19 nt, Homo sapiens
  misc_RNA (1)...(19): siRNA sense strand
ccaagaaggggaagaagau

SEQ ID NO: 2410151 - RNA, 19 nt, Homo sapiens
  misc_RNA (1)...(19): siRNA sense strand
aagagaagcuugcagagga

SEQ ID NO: 2410152 - RNA, 19 nt, Homo sapiens
  misc_RNA (1)...(19): siRNA sense strand
aggaacaggacgucagcuu

SEQ ID NO: 2410153 - RNA, 19 nt, Homo sapiens
  misc_RNA (1)...(19): siRNA sense strand
gagaaggcagagaugaaca

SEQ ID NO: 2410154 - RNA, 19 nt, Homo sapiens
  misc_RNA (1)...(19): siRNA sense strand
gcugagaaaguacaggaau

SEQ ID NO: 2410155 - RNA, 19 nt, Homo sapiens
  misc_RNA (1)...(19): siRNA sense strand
cagacauuggugugaucaa

SEQ ID NO: 2410156 - RNA, 19 nt, Homo sapiens
  misc_RNA (1)...(19): siRNA sense strand
uuggugugaucaagugaaa

SEQ ID NO: 2410157 - RNA, 19 nt, Homo sapiens
  misc_RNA (1)...(19): siRNA sense strand
aggaacagcaagucggcuu

SEQ ID NO: 2410158 - RNA, 19 nt, Homo sapiens
  misc_RNA (1)...(19): siRNA sense strand
aucaugagcaagaggaaga

SEQ ID NO: 2410159 - RNA, 19 nt, Homo sapiens
  misc_RNA (1)...(19): siRNA sense strand
cgacuaugaagacugcaaa

SEQ ID NO: 2410160 - RNA, 19 nt, Homo sapiens
  misc_RNA (1)...(19): siRNA sense strand
augaggaugaagauguuaa

SEQ ID NO: 2410161 - RNA, 19 nt, Homo sapiens
  misc_RNA (1)...(19): siRNA sense strand
uggaugagaaagagccuga

SEQ ID NO: 2410162 - RNA, 19 nt, Homo sapiens
  misc_RNA (1)...(19): siRNA sense strand
cuuccagaugggagucaua

SEQ ID NO: 2410163 - RNA, 19 nt, Homo sapiens
  misc_RNA (1)...(19): siRNA sense strand
acugcaaagaccucauaaa

SEQ ID NO: 2410164 - RNA, 19 nt, Homo sapiens
  misc_RNA (1)...(19): siRNA sense strand
gcucauugaaucagcaucu

SEQ ID NO: 2410165 - RNA, 19 nt, Homo sapiens
  misc_RNA (1)...(19): siRNA sense strand
aggaggaagaggaggaaga

SEQ ID NO: 2410166 - RNA, 19 nt, Homo sapiens
  misc_RNA (1)...(19): siRNA sense strand
gcguggagcuguagggacu

SEQ ID NO: 2410167 - RNA, 19 nt, Homo sapiens
  misc_RNA (1)...(19): siRNA sense strand
gggaggaggaagaggagga

SEQ ID NO: 2410168 - RNA, 19 nt, Homo sapiens
  misc_RNA (1)...(19): siRNA sense strand
cagagaagguggaaccaga

SEQ ID NO: 2410169 - RNA, 19 nt, Homo sapiens
  misc_RNA (1)...(19): siRNA sense strand
aggaagaugaagaagaaga

SEQ ID NO: 2410170 - RNA, 19 nt, Homo sapiens
  misc_RNA (1)...(19): siRNA sense strand
aggacaggguggagaacga

SEQ ID NO: 2410171 - RNA, 19 nt, Homo sapiens
  misc_RNA (1)...(19): siRNA sense strand
aggaggaagaugaagaaga

SEQ ID NO: 2410172 - RNA, 19 nt, Homo sapiens
  misc_RNA (1)...(19): siRNA sense strand
aagaugaagaagaagagaa

SEQ ID NO: 2410173 - RNA, 19 nt, Homo sapiens
  misc_RNA (1)...(19): siRNA sense strand
gcgccgaggagaaaagaaa

SEQ ID NO: 2410174 - RNA, 19 nt, Homo sapiens
  misc_RNA (1)...(19): siRNA sense strand
ggguuugcucucaaggaua

SEQ ID NO: 2410175 - RNA, 19 nt, Homo sapiens
  misc_RNA (1)...(19): siRNA sense strand
aggaaggggaggaggaaga

SEQ ID NO: 2410176 - RNA, 19 nt, Homo sapiens
  misc_RNA (1)...(19): siRNA sense strand
cagaagaggaagggacaga

SEQ ID NO: 2410177 - RNA, 19 nt, Homo sapiens
  misc_RNA (1)...(19): siRNA sense strand
uccgaaaguuuguggcaga

SEQ ID NO: 2410178 - RNA, 19 nt, Homo sapiens
  misc_RNA (1)...(19): siRNA sense strand
ccgaaagcgacgagcagca

SEQ ID NO: 2410179 - RNA, 19 nt, Homo sapiens
  misc_RNA (1)...(19): siRNA sense strand
aagaggaggaagaugaaga

SEQ ID NO: 2410180 - RNA, 19 nt, Homo sapiens
  misc_RNA (1)...(19): siRNA sense strand
agguggaaccagaggagga

SEQ ID NO: 2410181 - RNA, 19 nt, Homo sapiens
  misc_RNA (1)...(19): siRNA sense strand
gcacagagaagguggaacc

SEQ ID NO: 2410182 - RNA, 19 nt, Homo sapiens
  misc_RNA (1)...(19): siRNA sense strand
agaugaagaagaagagaag

SEQ ID NO: 2410183 - RNA, 19 nt, Homo sapiens
  misc_RNA (1)...(19): siRNA sense strand
cccagaagaggaagggaca

SEQ ID NO: 2410184 - RNA, 19 nt, Homo sapiens
  misc_RNA (1)...(19): siRNA sense strand
gaagaagagaagagagagg

SEQ ID NO: 2410185 - RNA, 19 nt, Homo sapiens
  misc_RNA (1)...(19): siRNA sense strand
ggcccagaucagaaggcua

SEQ ID NO: 2410186 - RNA, 19 nt, Homo sapiens
  misc_RNA (1)...(19): siRNA sense strand
cagaucaaggugucagcaa

SEQ ID NO: 2410187 - RNA, 19 nt, Homo sapiens
  misc_RNA (1)...(19): siRNA sense strand
gcucaacauccaaaacaaa

SEQ ID NO: 2410188 - RNA, 19 nt, Homo sapiens
  misc_RNA (1)...(19): siRNA sense strand
augaagaagaagagaagag

SEQ ID NO: 2410189 - RNA, 19 nt, Homo sapiens
  misc_RNA (1)...(19): siRNA sense strand
aggugugaaguuagccaaa

SEQ ID NO: 2410190 - RNA, 19 nt, Homo sapiens
  misc_RNA (1)...(19): siRNA sense strand
ccauuaagcaggaggacau

SEQ ID NO: 2410191 - RNA, 19 nt, Homo sapiens
  misc_RNA (1)...(19): siRNA sense strand
cuacaucaggcgaggacaa

SEQ ID NO: 2410192 - RNA, 19 nt, Homo sapiens
  misc_RNA (1)...(19): siRNA sense strand
aggaagaggauuggagcaa

SEQ ID NO: 2410193 - RNA, 19 nt, Homo sapiens
  misc_RNA (1)...(19): siRNA sense strand
ggaaagaagccguugcagu

SEQ ID NO: 2410194 - RNA, 19 nt, Homo sapiens
  misc_RNA (1)...(19): siRNA sense strand
ggcuaaagugagaaccaaa

SEQ ID NO: 2410195 - RNA, 19 nt, Homo sapiens
  misc_RNA (1)...(19): siRNA sense strand
ucguaggauuucugagaga

SEQ ID NO: 2410196 - RNA, 19 nt, Homo sapiens
  misc_RNA (1)...(19): siRNA sense strand
caucuuggcuuuaggcuga

SEQ ID NO: 2410197 - RNA, 19 nt, Homo sapiens
  misc_RNA (1)...(19): siRNA sense strand
aguucaggcccgaggaaga

SEQ ID NO: 2410198 - RNA, 19 nt, Homo sapiens
  misc_RNA (1)...(19): siRNA sense strand
cugcagucccucuaggaaa

SEQ ID NO: 2410199 - RNA, 19 nt, Homo sapiens
  misc_RNA (1)...(19): siRNA sense strand
ucgcaguuccugugagaga

SEQ ID NO: 2410200 - RNA, 19 nt, Homo sapiens
  misc_RNA (1)...(19): siRNA sense strand
gggaauuagcagcccauuu

SEQ ID NO: 2410201 - RNA, 19 nt, Homo sapiens
  misc_RNA (1)...(19): siRNA sense strand
caucauaaauuacagacca

SEQ ID NO: 2410202 - RNA, 19 nt, Homo sapiens
  misc_RNA (1)...(19): siRNA sense strand
guucaaaaggacaguagua

SEQ ID NO: 2410203 - RNA, 19 nt, Homo sapiens
  misc_RNA (1)...(19): siRNA sense strand
gacaguaguagcagaucaa

SEQ ID NO: 2410204 - RNA, 19 nt, Homo sapiens
  misc_RNA (1)...(19): siRNA sense strand
ucgcagucccucagagaga

SEQ ID NO: 2410205 - RNA, 19 nt, Homo sapiens
  misc_RNA (1)...(19): siRNA sense strand
ucgcagucccucagagaga

SEQ ID NO: 2410206 - RNA, 19 nt, Homo sapiens
  misc_RNA (1)...(19): siRNA sense strand
uauccaaugaagagaauca

SEQ ID NO: 2410207 - RNA, 19 nt, Homo sapiens
  misc_RNA (1)...(19): siRNA sense strand
uaggcugagaauugggaaa

SEQ ID NO: 2410208 - RNA, 19 nt, Homo sapiens
  misc_RNA (1)...(19): siRNA sense strand
aguagaaccacaauagaga

SEQ ID NO: 2410209 - RNA, 19 nt, Homo sapiens
  misc_RNA (1)...(19): siRNA sense strand
agagaguccuucuagggaa

SEQ ID NO: 2410210 - RNA, 19 nt, Homo sapiens
  misc_RNA (1)...(19): siRNA sense strand
cgggacaaggccagacaau

SEQ ID NO: 2410211 - RNA, 19 nt, Homo sapiens
  misc_RNA (1)...(19): siRNA sense strand
uaguagcagaucaaagaaa

SEQ ID NO: 2410212 - RNA, 19 nt, Homo sapiens
  misc_RNA (1)...(19): siRNA sense strand
cuagaagaucugcagcuaa

SEQ ID NO: 2410213 - RNA, 19 nt, Homo sapiens
  misc_RNA (1)...(19): siRNA sense strand
gcuaaagugagaaccaaaa

SEQ ID NO: 2410214 - RNA, 19 nt, Homo sapiens
  misc_RNA (1)...(19): siRNA sense strand
aucucaaaguaucgugaaa

SEQ ID NO: 2410215 - RNA, 19 nt, Homo sapiens
  misc_RNA (1)...(19): siRNA sense strand
ccucgggaccacacauaaa

SEQ ID NO: 2410216 - RNA, 19 nt, Homo sapiens
  misc_RNA (1)...(19): siRNA sense strand
uggccgauguucaggacuu

SEQ ID NO: 2410217 - RNA, 19 nt, Homo sapiens
  misc_RNA (1)...(19): siRNA sense strand
cauuuaagaaggaagagga

SEQ ID NO: 2410218 - RNA, 19 nt, Homo sapiens
  misc_RNA (1)...(19): siRNA sense strand
uuaagaaggaagaggauug

SEQ ID NO: 2410219 - RNA, 19 nt, Homo sapiens
  misc_RNA (1)...(19): siRNA sense strand
cgucacagucccuuggaga

SEQ ID NO: 2410220 - RNA, 19 nt, Homo sapiens
  misc_RNA (1)...(19): siRNA sense strand
ccaucacaaaggaaagcua

SEQ ID NO: 2410221 - RNA, 19 nt, Homo sapiens
  misc_RNA (1)...(19): siRNA sense strand
ggccugacuuaguagaaaa

SEQ ID NO: 2410222 - RNA, 19 nt, Homo sapiens
  misc_RNA (1)...(19): siRNA sense strand
acagauucccaaaguggua

SEQ ID NO: 2410223 - RNA, 19 nt, Homo sapiens
  misc_RNA (1)...(19): siRNA sense strand
aguagcagaucaaagaaaa

SEQ ID NO: 2410224 - RNA, 19 nt, Homo sapiens
  misc_RNA (1)...(19): siRNA sense strand
acaaacaguagaaccacaa

SEQ ID NO: 2410225 - RNA, 19 nt, Homo sapiens
  misc_RNA (1)...(19): siRNA sense strand
cagagugauucccagacaa

SEQ ID NO: 2410226 - RNA, 19 nt, Homo sapiens
  misc_RNA (1)...(19): siRNA sense strand
acgcgguccuucugagaga

SEQ ID NO: 2410227 - RNA, 19 nt, Homo sapiens
  misc_RNA (1)...(19): siRNA sense strand
ugucacagucucucugaaa

SEQ ID NO: 2410228 - RNA, 19 nt, Homo sapiens
  misc_RNA (1)...(19): siRNA sense strand
cgggcuaaagugagaacca

SEQ ID NO: 2410229 - RNA, 19 nt, Homo sapiens
  misc_RNA (1)...(19): siRNA sense strand
gcccauuuaagaaggaaga

SEQ ID NO: 2410230 - RNA, 19 nt, Homo sapiens
  misc_RNA (1)...(19): siRNA sense strand
gauuggagcaacucagaca

SEQ ID NO: 2410231 - RNA, 19 nt, Homo sapiens
  misc_RNA (1)...(19): siRNA sense strand
gcucaaccauuaagcagga

SEQ ID NO: 2410232 - RNA, 19 nt, Homo sapiens
  misc_RNA (1)...(19): siRNA sense strand
caacgcaguuccuuggaga

SEQ ID NO: 2410233 - RNA, 19 nt, Homo sapiens
  misc_RNA (1)...(19): siRNA sense strand
acaaccuaccagagaguga

SEQ ID NO: 2410234 - RNA, 19 nt, Homo sapiens
  misc_RNA (1)...(19): siRNA sense strand
gaaagaagccguugcaguc

SEQ ID NO: 2410235 - RNA, 19 nt, Homo sapiens
  misc_RNA (1)...(19): siRNA sense strand
ggacacaguuccucuggga

SEQ ID NO: 2410236 - RNA, 19 nt, Homo sapiens
  misc_RNA (1)...(19): siRNA sense strand
ccuauaucaccaucacaaa

SEQ ID NO: 2410237 - RNA, 19 nt, Homo sapiens
  misc_RNA (1)...(19): siRNA sense strand
caaugaagagaaucaccaa

SEQ ID NO: 2410238 - RNA, 19 nt, Homo sapiens
  misc_RNA (1)...(19): siRNA sense strand
gagagaagcuggcgcaguc

SEQ ID NO: 2410239 - RNA, 19 nt, Homo sapiens
  misc_RNA (1)...(19): siRNA sense strand
aggaaagccaagaggaaga

SEQ ID NO: 2410240 - RNA, 19 nt, Homo sapiens
  misc_RNA (1)...(19): siRNA sense strand
aggcagugcaggugaagaa

SEQ ID NO: 2410241 - RNA, 19 nt, Homo sapiens
  misc_RNA (1)...(19): siRNA sense strand
agaauaaagccaagagcca

SEQ ID NO: 2410242 - RNA, 19 nt, Homo sapiens
  misc_RNA (1)...(19): siRNA sense strand
caagaugaugagauggaaa

SEQ ID NO: 2410243 - RNA, 19 nt, Homo sapiens
  misc_RNA (1)...(19): siRNA sense strand
cuucaaaggaaacaagaau

SEQ ID NO: 2410244 - RNA, 19 nt, Homo sapiens
  misc_RNA (1)...(19): siRNA sense strand
ggaaauggaucucaagcca

SEQ ID NO: 2410245 - RNA, 19 nt, Homo sapiens
  misc_RNA (1)...(19): siRNA sense strand
cagaaggagauuugcaaga

SEQ ID NO: 2410246 - RNA, 19 nt, Homo sapiens
  misc_RNA (1)...(19): siRNA sense strand
cugagaacauccugagcau

SEQ ID NO: 2410247 - RNA, 19 nt, Homo sapiens
  misc_RNA (1)...(19): siRNA sense strand
ggagggagauccugagcca

SEQ ID NO: 2410248 - RNA, 19 nt, Homo sapiens
  misc_RNA (1)...(19): siRNA sense strand
ccucugaacaugagcauca

SEQ ID NO: 2410249 - RNA, 19 nt, Homo sapiens
  misc_RNA (1)...(19): siRNA sense strand
ccaagaugaccauggccaa

SEQ ID NO: 2410250 - RNA, 19 nt, Homo sapiens
  misc_RNA (1)...(19): siRNA sense strand
cagaaggagccaagaugau

SEQ ID NO: 2410251 - RNA, 19 nt, Homo sapiens
  misc_RNA (1)...(19): siRNA sense strand
agaaaguggcucuguucaa

SEQ ID NO: 2410252 - RNA, 19 nt, Homo sapiens
  misc_RNA (1)...(19): siRNA sense strand
ccucaagagaaggugguua

SEQ ID NO: 2410253 - RNA, 19 nt, Homo sapiens
  misc_RNA (1)...(19): siRNA sense strand
cucaagagaaggugguuau

SEQ ID NO: 2410254 - RNA, 19 nt, Homo sapiens
  misc_RNA (1)...(19): siRNA sense strand
gcauggagaauaaagccaa

SEQ ID NO: 2410255 - RNA, 19 nt, Homo sapiens
  misc_RNA (1)...(19): siRNA sense strand
ggaugaagucuuugccgau

SEQ ID NO: 2410256 - RNA, 19 nt, Homo sapiens
  misc_RNA (1)...(19): siRNA sense strand
cccaaagcccagaaggaga

SEQ ID NO: 2410257 - RNA, 19 nt, Homo sapiens
  misc_RNA (1)...(19): siRNA sense strand
cuugauugccaaauacaaa

SEQ ID NO: 2410258 - RNA, 19 nt, Homo sapiens
  misc_RNA (1)...(19): siRNA sense strand
ccuuguaacuugauugcca

SEQ ID NO: 2410259 - RNA, 19 nt, Homo sapiens
  misc_RNA (1)...(19): siRNA sense strand
gccaagaugaugagaugga

SEQ ID NO: 2410260 - RNA, 19 nt, Homo sapiens
  misc_RNA (1)...(19): siRNA sense strand
aagaugaugagauggaaaa

SEQ ID NO: 2410261 - RNA, 19 nt, Homo sapiens
  misc_RNA (1)...(19): siRNA sense strand
agggagauccugagccaca

SEQ ID NO: 2410262 - RNA, 19 nt, Homo sapiens
  misc_RNA (1)...(19): siRNA sense strand
ugaauuugaaaguggagau

SEQ ID NO: 2410263 - RNA, 19 nt, Homo sapiens
  misc_RNA (1)...(19): siRNA sense strand
gcauagaugagauggaccu

SEQ ID NO: 2410264 - RNA, 19 nt, Homo sapiens
  misc_RNA (1)...(19): siRNA sense strand
ugacaauucagaaggccau

SEQ ID NO: 2410265 - RNA, 19 nt, Homo sapiens
  misc_RNA (1)...(19): siRNA sense strand
acucuuggucucuggaaau

SEQ ID NO: 2410266 - RNA, 19 nt, Homo sapiens
  misc_RNA (1)...(19): siRNA sense strand
uucuagaugaagaggacua

SEQ ID NO: 2410267 - RNA, 19 nt, Homo sapiens
  misc_RNA (1)...(19): siRNA sense strand
aaauggaucucaagccaga

SEQ ID NO: 2410268 - RNA, 19 nt, Homo sapiens
  misc_RNA (1)...(19): siRNA sense strand
ggaugaaccuggaggccca

SEQ ID NO: 2410269 - RNA, 19 nt, Homo sapiens
  misc_RNA (1)...(19): siRNA sense strand
agaagacacuggagggcca

SEQ ID NO: 2410270 - RNA, 19 nt, Homo sapiens
  misc_RNA (1)...(19): siRNA sense strand
ccaucaaggucugggacau

SEQ ID NO: 2410271 - RNA, 19 nt, Homo sapiens
  misc_RNA (1)...(19): siRNA sense strand
acuccauugcugugacaaa

SEQ ID NO: 2410272 - RNA, 19 nt, Homo sapiens
  misc_RNA (1)...(19): siRNA sense strand
gcgucuacuccauggguga

SEQ ID NO: 2410273 - RNA, 19 nt, Homo sapiens
  misc_RNA (1)...(19): siRNA sense strand
gggucuggaguauggacaa

SEQ ID NO: 2410274 - RNA, 19 nt, Homo sapiens
  misc_RNA (1)...(19): siRNA sense strand
acagggaccagaauggaaa

SEQ ID NO: 2410275 - RNA, 19 nt, Homo sapiens
  misc_RNA (1)...(19): siRNA sense strand
cccagaaggaccaggagau

SEQ ID NO: 2410276 - RNA, 19 nt, Homo sapiens
  misc_RNA (1)...(19): siRNA sense strand
acaaucaagaucugggaca

SEQ ID NO: 2410277 - RNA, 19 nt, Homo sapiens
  misc_RNA (1)...(19): siRNA sense strand
gcaccaucauuguguggga

SEQ ID NO: 2410278 - RNA, 19 nt, Homo sapiens
  misc_RNA (1)...(19): siRNA sense strand
cagcagaucuucaagugca

SEQ ID NO: 2410279 - RNA, 19 nt, Homo sapiens
  misc_RNA (1)...(19): siRNA sense strand
gcacacguucuguaggaga

SEQ ID NO: 2410280 - RNA, 19 nt, Homo sapiens
  misc_RNA (1)...(19): siRNA sense strand
ugaaggaguuucugcagca

SEQ ID NO: 2410281 - RNA, 19 nt, Homo sapiens
  misc_RNA (1)...(19): siRNA sense strand
agcugaaguugaagaagga

SEQ ID NO: 2410282 - RNA, 19 nt, Homo sapiens
  misc_RNA (1)...(19): siRNA sense strand
acagggaccagaauggaaa

SEQ ID NO: 2410283 - RNA, 19 nt, Homo sapiens
  misc_RNA (1)...(19): siRNA sense strand
ggugauuuggauugugaaa

SEQ ID NO: 2410284 - RNA, 19 nt, Homo sapiens
  misc_RNA (1)...(19): siRNA sense strand
cuuaccaauggcagggaua

SEQ ID NO: 2410285 - RNA, 19 nt, Homo sapiens
  misc_RNA (1)...(19): siRNA sense strand
accuguaaaugguggucua

SEQ ID NO: 2410286 - RNA, 19 nt, Homo sapiens
  misc_RNA (1)...(19): siRNA sense strand
ucuuguuauugguggucua

SEQ ID NO: 2410287 - RNA, 19 nt, Homo sapiens
  misc_RNA (1)...(19): siRNA sense strand
uccagaagcagaaaggaau

SEQ ID NO: 2410288 - RNA, 19 nt, Homo sapiens
  misc_RNA (1)...(19): siRNA sense strand
ggagaaagcuggagggcug

SEQ ID NO: 2410289 - RNA, 19 nt, Homo sapiens
  misc_RNA (1)...(19): siRNA sense strand
ccauaacuaagcagcacaa

SEQ ID NO: 2410290 - RNA, 19 nt, Homo sapiens
  misc_RNA (1)...(19): siRNA sense strand
guaaacaacuugaagccaa

SEQ ID NO: 2410291 - RNA, 19 nt, Homo sapiens
  misc_RNA (1)...(19): siRNA sense strand
gaaagacagucgacgggaa

SEQ ID NO: 2410292 - RNA, 19 nt, Homo sapiens
  misc_RNA (1)...(19): siRNA sense strand
ggauguaccuaaaccgcaa

SEQ ID NO: 2410293 - RNA, 19 nt, Homo sapiens
  misc_RNA (1)...(19): siRNA sense strand
ccaaaggacucuaugcuga

SEQ ID NO: 2410294 - RNA, 19 nt, Homo sapiens
  misc_RNA (1)...(19): siRNA sense strand
aggaaguaagggaagaaau

SEQ ID NO: 2410295 - RNA, 19 nt, Homo sapiens
  misc_RNA (1)...(19): siRNA sense strand
ugggcaaauuauagcaaca

SEQ ID NO: 2410296 - RNA, 19 nt, Homo sapiens
  misc_RNA (1)...(19): siRNA sense strand
agcaacagacagugaggaa

SEQ ID NO: 2410297 - RNA, 19 nt, Homo sapiens
  misc_RNA (1)...(19): siRNA sense strand
caacaucaugggaggacau

SEQ ID NO: 2410298 - RNA, 19 nt, Homo sapiens
  misc_RNA (1)...(19): siRNA sense strand
auaaccaaguguaaggcua

SEQ ID NO: 2410299 - RNA, 19 nt, Homo sapiens
  misc_RNA (1)...(19): siRNA sense strand
agacaagcggcaaagaaaa

SEQ ID NO: 2410300 - RNA, 19 nt, Homo sapiens
  misc_RNA (1)...(19): siRNA sense strand
acauauaacaagagacccu

SEQ ID NO: 2410301 - RNA, 19 nt, Homo sapiens
  misc_RNA (1)...(19): siRNA sense strand
gggcaaagggaaugagugc

SEQ ID NO: 2410302 - RNA, 19 nt, Homo sapiens
  misc_RNA (1)...(19): siRNA sense strand
cagugaggaaguaagggaa

SEQ ID NO: 2410303 - RNA, 19 nt, Homo sapiens
  misc_RNA (1)...(19): siRNA sense strand
aauuauagcaacagacagu

SEQ ID NO: 2410304 - RNA, 19 nt, Homo sapiens
  misc_RNA (1)...(19): siRNA sense strand
cuguggaacauuuaaagaa

SEQ ID NO: 2410305 - RNA, 19 nt, Homo sapiens
  misc_RNA (1)...(19): siRNA sense strand
auggaauaccuaagacaga

SEQ ID NO: 2410306 - RNA, 19 nt, Homo sapiens
  misc_RNA (1)...(19): siRNA sense strand
gggaacaagccaaaaccua

SEQ ID NO: 2410307 - RNA, 19 nt, Homo sapiens
  misc_RNA (1)...(19): siRNA sense strand
cagucgacgggaaggaaga

SEQ ID NO: 2410308 - RNA, 19 nt, Homo sapiens
  misc_RNA (1)...(19): siRNA sense strand
gcgaauuuccuuuugcaaa

SEQ ID NO: 2410309 - RNA, 19 nt, Homo sapiens
  misc_RNA (1)...(19): siRNA sense strand
ugaugguggcgguugcaaa

SEQ ID NO: 2410310 - RNA, 19 nt, Homo sapiens
  misc_RNA (1)...(19): siRNA sense strand
aagucagaauucagagcga

SEQ ID NO: 2410311 - RNA, 19 nt, Homo sapiens
  misc_RNA (1)...(19): siRNA sense strand
aguguaaggcuaaaguaga

SEQ ID NO: 2410312 - RNA, 19 nt, Homo sapiens
  misc_RNA (1)...(19): siRNA sense strand
acaguuggucgcugggcaa

SEQ ID NO: 2410313 - RNA, 19 nt, Homo sapiens
  misc_RNA (1)...(19): siRNA sense strand
gcaaagggaaugagugcag

SEQ ID NO: 2410314 - RNA, 19 nt, Homo sapiens
  misc_RNA (1)...(19): siRNA sense strand
ccacaacacuugaggccaa

SEQ ID NO: 2410315 - RNA, 19 nt, Homo sapiens
  misc_RNA (1)...(19): siRNA sense strand
gcgauagauauuuggacau

SEQ ID NO: 2410316 - RNA, 19 nt, Homo sapiens
  misc_RNA (1)...(19): siRNA sense strand
acgugaauguagcgauaga

SEQ ID NO: 2410317 - RNA, 19 nt, Homo sapiens
  misc_RNA (1)...(19): siRNA sense strand
cggagaaacacaaacacca

SEQ ID NO: 2410318 - RNA, 19 nt, Homo sapiens
  misc_RNA (1)...(19): siRNA sense strand
agcgauagauauuuggaca

SEQ ID NO: 2410319 - RNA, 19 nt, Homo sapiens
  misc_RNA (1)...(19): siRNA sense strand
acaccaggucacggagaaa

SEQ ID NO: 2410320 - RNA, 19 nt, Homo sapiens
  misc_RNA (1)...(19): siRNA sense strand
aagaagagccggagaggga

SEQ ID NO: 2410321 - RNA, 19 nt, Homo sapiens
  misc_RNA (1)...(19): siRNA sense strand
cccgaaaggucuaagaaga

SEQ ID NO: 2410322 - RNA, 19 nt, Homo sapiens
  misc_RNA (1)...(19): siRNA sense strand
gugaagaggaagaagagga

SEQ ID NO: 2410323 - RNA, 19 nt, Homo sapiens
  misc_RNA (1)...(19): siRNA sense strand
cgagaaaggcaucggagca

SEQ ID NO: 2410324 - RNA, 19 nt, Homo sapiens
  misc_RNA (1)...(19): siRNA sense strand
gagcaagaguccaagacgu

SEQ ID NO: 2410325 - RNA, 19 nt, Homo sapiens
  misc_RNA (1)...(19): siRNA sense strand
aagaggaagaagaggagga

SEQ ID NO: 2410326 - RNA, 19 nt, Homo sapiens
  misc_RNA (1)...(19): siRNA sense strand
ccacaagaagagccggaga

SEQ ID NO: 2410327 - RNA, 19 nt, Homo sapiens
  misc_RNA (1)...(19): siRNA sense strand
aguccagugaagaggaaga

SEQ ID NO: 2410328 - RNA, 19 nt, Homo sapiens
  misc_RNA (1)...(19): siRNA sense strand
cacucaaagucucccgaaa

SEQ ID NO: 2410329 - RNA, 19 nt, Homo sapiens
  misc_RNA (1)...(19): siRNA sense strand
gcuaccgagacuuggacaa

SEQ ID NO: 2410330 - RNA, 19 nt, Homo sapiens
  misc_RNA (1)...(19): siRNA sense strand
aggucuaagaagagccaca

SEQ ID NO: 2410331 - RNA, 19 nt, Homo sapiens
  misc_RNA (1)...(19): siRNA sense strand
ccgaaaggucuaagaagag

SEQ ID NO: 2410332 - RNA, 19 nt, Homo sapiens
  misc_RNA (1)...(19): siRNA sense strand
aagaagagccggagaggga

SEQ ID NO: 2410333 - RNA, 19 nt, Homo sapiens
  misc_RNA (1)...(19): siRNA sense strand
cccgaaaggucuaagaaga

SEQ ID NO: 2410334 - RNA, 19 nt, Homo sapiens
  misc_RNA (1)...(19): siRNA sense strand
gugaagaggaagaagagga

SEQ ID NO: 2410335 - RNA, 19 nt, Homo sapiens
  misc_RNA (1)...(19): siRNA sense strand
cgagaaaggcaucggagca

SEQ ID NO: 2410336 - RNA, 19 nt, Homo sapiens
  misc_RNA (1)...(19): siRNA sense strand
acgcuauguauuagaggaa

SEQ ID NO: 2410337 - RNA, 19 nt, Homo sapiens
  misc_RNA (1)...(19): siRNA sense strand
gagcaagaguccaagacgu

SEQ ID NO: 2410338 - RNA, 19 nt, Homo sapiens
  misc_RNA (1)...(19): siRNA sense strand
aagaggaagaagaggagga

SEQ ID NO: 2410339 - RNA, 19 nt, Homo sapiens
  misc_RNA (1)...(19): siRNA sense strand
cagcugaacuuguagucga

SEQ ID NO: 2410340 - RNA, 19 nt, Homo sapiens
  misc_RNA (1)...(19): siRNA sense strand
ccacaagaagagccggaga

SEQ ID NO: 2410341 - RNA, 19 nt, Homo sapiens
  misc_RNA (1)...(19): siRNA sense strand
ugaacuuguagucgauaaa

SEQ ID NO: 2410342 - RNA, 19 nt, Homo sapiens
  misc_RNA (1)...(19): siRNA sense strand
aguccagugaagaggaaga

SEQ ID NO: 2410343 - RNA, 19 nt, Homo sapiens
  misc_RNA (1)...(19): siRNA sense strand
cacucaaagucucccgaaa

SEQ ID NO: 2410344 - RNA, 19 nt, Homo sapiens
  misc_RNA (1)...(19): siRNA sense strand
auuagaggaagcugagcaa

SEQ ID NO: 2410345 - RNA, 19 nt, Homo sapiens
  misc_RNA (1)...(19): siRNA sense strand
gcuaccgagacuuggacaa

SEQ ID NO: 2410346 - RNA, 19 nt, Homo sapiens
  misc_RNA (1)...(19): siRNA sense strand
aggucuaagaagagccaca

SEQ ID NO: 2410347 - RNA, 19 nt, Homo sapiens
  misc_RNA (1)...(19): siRNA sense strand
acuggaaagaggagugcuu

SEQ ID NO: 2410348 - RNA, 19 nt, Homo sapiens
  misc_RNA (1)...(19): siRNA sense strand
gaagaucauucgaacgcga

SEQ ID NO: 2410349 - RNA, 19 nt, Homo sapiens
  misc_RNA (1)...(19): siRNA sense strand
uagaggaagcugagcaacu

SEQ ID NO: 2410350 - RNA, 19 nt, Homo sapiens
  misc_RNA (1)...(19): siRNA sense strand
ccgaaaggucuaagaagag

SEQ ID NO: 2410351 - RNA, 19 nt, Homo sapiens
  misc_RNA (1)...(19): siRNA sense strand
gaucauuauugaagagcga

SEQ ID NO: 2410352 - RNA, 19 nt, Homo sapiens
  misc_RNA (1)...(19): siRNA sense strand
gggaagagcauaccaggca

SEQ ID NO: 2410353 - RNA, 19 nt, Homo sapiens
  misc_RNA (1)...(19): siRNA sense strand
ccucaucacugguggcauc

SEQ ID NO: 2410354 - RNA, 19 nt, Homo sapiens
  misc_RNA (1)...(19): siRNA sense strand
ccaggaucacagaggacau

SEQ ID NO: 2410355 - RNA, 19 nt, Homo sapiens
  misc_RNA (1)...(19): siRNA sense strand
ccauguucucuuugcacaa

SEQ ID NO: 2410356 - RNA, 19 nt, Homo sapiens
  misc_RNA (1)...(19): siRNA sense strand
ccaccuuggacuuggaaga

SEQ ID NO: 2410357 - RNA, 19 nt, Homo sapiens
  misc_RNA (1)...(19): siRNA sense strand
ccuacagcugccugggaaa

SEQ ID NO: 2410358 - RNA, 19 nt, Homo sapiens
  misc_RNA (1)...(19): siRNA sense strand
cagcuauauugguaagacu

SEQ ID NO: 2410359 - RNA, 19 nt, Homo sapiens
  misc_RNA (1)...(19): siRNA sense strand
guacaguggcaccugggaa

SEQ ID NO: 2410360 - RNA, 19 nt, Homo sapiens
  misc_RNA (1)...(19): siRNA sense strand
uacaguggcaccugggaaa

SEQ ID NO: 2410361 - RNA, 19 nt, Homo sapiens
  misc_RNA (1)...(19): siRNA sense strand
gagaauaaguugaggcagc

SEQ ID NO: 2410362 - RNA, 19 nt, Homo sapiens
  misc_RNA (1)...(19): siRNA sense strand
gaacauucuugaaggccuu

SEQ ID NO: 2410363 - RNA, 19 nt, Homo sapiens
  misc_RNA (1)...(19): siRNA sense strand
gggccauugaugaggauga

SEQ ID NO: 2410364 - RNA, 19 nt, Homo sapiens
  misc_RNA (1)...(19): siRNA sense strand
acgcugacauggauggcaa

SEQ ID NO: 2410365 - RNA, 19 nt, Homo sapiens
  misc_RNA (1)...(19): siRNA sense strand
acgaagaaggugacgcgaa

SEQ ID NO: 2410366 - RNA, 19 nt, Homo sapiens
  misc_RNA (1)...(19): siRNA sense strand
gggagacacaagagcguga

SEQ ID NO: 2410367 - RNA, 19 nt, Homo sapiens
  misc_RNA (1)...(19): siRNA sense strand
cagcaaaaccacaaaggau

SEQ ID NO: 2410368 - RNA, 19 nt, Homo sapiens
  misc_RNA (1)...(19): siRNA sense strand
ccagcugaaugauggccaa

SEQ ID NO: 2410369 - RNA, 19 nt, Homo sapiens
  misc_RNA (1)...(19): siRNA sense strand
aggaugaugaugaggagga

SEQ ID NO: 2410370 - RNA, 19 nt, Homo sapiens
  misc_RNA (1)...(19): siRNA sense strand
cggagggugaccugaagaa

SEQ ID NO: 2410371 - RNA, 19 nt, Homo sapiens
  misc_RNA (1)...(19): siRNA sense strand
augaggaggacacggacaa

SEQ ID NO: 2410372 - RNA, 19 nt, Homo sapiens
  misc_RNA (1)...(19): siRNA sense strand
ugacaaagcucuaucggag

SEQ ID NO: 2410373 - RNA, 19 nt, Homo sapiens
  misc_RNA (1)...(19): siRNA sense strand
acagccgacuggaggguau

SEQ ID NO: 2410374 - RNA, 19 nt, Homo sapiens
  misc_RNA (1)...(19): siRNA sense strand
cugagcugguggaugacaa

SEQ ID NO: 2410375 - RNA, 19 nt, Homo sapiens
  misc_RNA (1)...(19): siRNA sense strand
guccagagccugaagagga

SEQ ID NO: 2410376 - RNA, 19 nt, Homo sapiens
  misc_RNA (1)...(19): siRNA sense strand
augaggaugagcugaggaa

SEQ ID NO: 2410377 - RNA, 19 nt, Homo sapiens
  misc_RNA (1)...(19): siRNA sense strand
ucuaccaccucgagggcuu

SEQ ID NO: 2410378 - RNA, 19 nt, Homo sapiens
  misc_RNA (1)...(19): siRNA sense strand
guagaaaugugaugcgaca

SEQ ID NO: 2410379 - RNA, 19 nt, Homo sapiens
  misc_RNA (1)...(19): siRNA sense strand
cugaaugguacuaaacaaa

SEQ ID NO: 2410380 - RNA, 19 nt, Homo sapiens
  misc_RNA (1)...(19): siRNA sense strand
augcacaagcagagaaaca

SEQ ID NO: 2410381 - RNA, 19 nt, Homo sapiens
  misc_RNA (1)...(19): siRNA sense strand
ggaaaugaugugucgguca

SEQ ID NO: 2410382 - RNA, 19 nt, Homo sapiens
  misc_RNA (1)...(19): siRNA sense strand
caguguguguccaggaaau

SEQ ID NO: 2410383 - RNA, 19 nt, Homo sapiens
  misc_RNA (1)...(19): siRNA sense strand
agaggaaugcuaagggaga

SEQ ID NO: 2410384 - RNA, 19 nt, Homo sapiens
  misc_RNA (1)...(19): siRNA sense strand
gauucaggugucaaagaaa

SEQ ID NO: 2410385 - RNA, 19 nt, Homo sapiens
  misc_RNA (1)...(19): siRNA sense strand
ugucauguuccaaggagaa

SEQ ID NO: 2410386 - RNA, 19 nt, Homo sapiens
  misc_RNA (1)...(19): siRNA sense strand
agaccugaaccuugcuaaa

SEQ ID NO: 2410387 - RNA, 19 nt, Homo sapiens
  misc_RNA (1)...(19): siRNA sense strand
cagaguuacuagaccugaa

SEQ ID NO: 2410388 - RNA, 19 nt, Homo sapiens
  misc_RNA (1)...(19): siRNA sense strand
ggguacacacugaggccuu

SEQ ID NO: 2410389 - RNA, 19 nt, Homo sapiens
  misc_RNA (1)...(19): siRNA sense strand
ucaugcacaagcagagaaa

SEQ ID NO: 2410390 - RNA, 19 nt, Homo sapiens
  misc_RNA (1)...(19): siRNA sense strand
aaaagaagucagaaggaga

SEQ ID NO: 2410391 - RNA, 19 nt, Homo sapiens
  misc_RNA (1)...(19): siRNA sense strand
agacuaaucuaaaaggaga

SEQ ID NO: 2410392 - RNA, 19 nt, Homo sapiens
  misc_RNA (1)...(19): siRNA sense strand
gaaaguguguccuggggua

SEQ ID NO: 2410393 - RNA, 19 nt, Homo sapiens
  misc_RNA (1)...(19): siRNA sense strand
acacugaggccuugaugau

SEQ ID NO: 2410394 - RNA, 19 nt, Homo sapiens
  misc_RNA (1)...(19): siRNA sense strand
gcauaaauaaccaagugga

SEQ ID NO: 2410395 - RNA, 19 nt, Homo sapiens
  misc_RNA (1)...(19): siRNA sense strand
ggaaagauucaggugucaa

SEQ ID NO: 2410396 - RNA, 19 nt, Homo sapiens
  misc_RNA (1)...(19): siRNA sense strand
agaagaacuguuugcuauu

SEQ ID NO: 2410397 - RNA, 19 nt, Homo sapiens
  misc_RNA (1)...(19): siRNA sense strand
accucaaaucaaagaagaa

SEQ ID NO: 2410398 - RNA, 19 nt, Homo sapiens
  misc_RNA (1)...(19): siRNA sense strand
gcuggaaauauaaagacau

SEQ ID NO: 2410399 - RNA, 19 nt, Homo sapiens
  misc_RNA (1)...(19): siRNA sense strand
auucaggugucaaagaaaa

SEQ ID NO: 2410400 - RNA, 19 nt, Homo sapiens
  misc_RNA (1)...(19): siRNA sense strand
uuacaacagaggaaugcua

SEQ ID NO: 2410401 - RNA, 19 nt, Homo sapiens
  misc_RNA (1)...(19): siRNA sense strand
aggaaugcuaagggagaau

SEQ ID NO: 2410402 - RNA, 19 nt, Homo sapiens
  misc_RNA (1)...(19): siRNA sense strand
uguucauacugacugguua

SEQ ID NO: 2410403 - RNA, 19 nt, Homo sapiens
  misc_RNA (1)...(19): siRNA sense strand
gaucuuuaugcuggaaaua

SEQ ID NO: 2410404 - RNA, 19 nt, Homo sapiens
  misc_RNA (1)...(19): siRNA sense strand
gcggaaauugauugggaaa

SEQ ID NO: 2410405 - RNA, 19 nt, Homo sapiens
  misc_RNA (1)...(19): siRNA sense strand
cguuaagauuaccggagaa

SEQ ID NO: 2410406 - RNA, 19 nt, Homo sapiens
  misc_RNA (1)...(19): siRNA sense strand
accaaggaauucuggguaa

SEQ ID NO: 2410407 - RNA, 19 nt, Homo sapiens
  misc_RNA (1)...(19): siRNA sense strand
ggguugggacaaagagcaa

SEQ ID NO: 2410408 - RNA, 19 nt, Homo sapiens
  misc_RNA (1)...(19): siRNA sense strand
cggaagaagaagaagaauc

SEQ ID NO: 2410409 - RNA, 19 nt, Homo sapiens
  misc_RNA (1)...(19): siRNA sense strand
guagaugaauugaaggcau

SEQ ID NO: 2410410 - RNA, 19 nt, Homo sapiens
  misc_RNA (1)...(19): siRNA sense strand
cagaaacagucaaugccua

SEQ ID NO: 2410411 - RNA, 19 nt, Homo sapiens
  misc_RNA (1)...(19): siRNA sense strand
guuaagauuaccggagaaa

SEQ ID NO: 2410412 - RNA, 19 nt, Homo sapiens
  misc_RNA (1)...(19): siRNA sense strand
augcugaacaacagagaau

SEQ ID NO: 2410413 - RNA, 19 nt, Homo sapiens
  misc_RNA (1)...(19): siRNA sense strand
agaagaaguccagaagaaa

SEQ ID NO: 2410414 - RNA, 19 nt, Homo sapiens
  misc_RNA (1)...(19): siRNA sense strand
agucuggaaugcugaacaa

SEQ ID NO: 2410415 - RNA, 19 nt, Homo sapiens
  misc_RNA (1)...(19): siRNA sense strand
gugaaucggaagaagaaga

SEQ ID NO: 2410416 - RNA, 19 nt, Homo sapiens
  misc_RNA (1)...(19): siRNA sense strand
agaaagugucugaacaaaa

SEQ ID NO: 2410417 - RNA, 19 nt, Homo sapiens
  misc_RNA (1)...(19): siRNA sense strand
aaagcuaccuccaggaaaa

SEQ ID NO: 2410418 - RNA, 19 nt, Homo sapiens
  misc_RNA (1)...(19): siRNA sense strand
cuguuaaugcugaagaaaa

SEQ ID NO: 2410419 - RNA, 19 nt, Homo sapiens
  misc_RNA (1)...(19): siRNA sense strand
aacaauuggaccaggaaau

SEQ ID NO: 2410420 - RNA, 19 nt, Homo sapiens
  misc_RNA (1)...(19): siRNA sense strand
ucaccaagcuccaggcagu

SEQ ID NO: 2410421 - RNA, 19 nt, Homo sapiens
  misc_RNA (1)...(19): siRNA sense strand
gaagaaaagcaauggggca

SEQ ID NO: 2410422 - RNA, 19 nt, Homo sapiens
  misc_RNA (1)...(19): siRNA sense strand
aagugaaucggaagaagaa

SEQ ID NO: 2410423 - RNA, 19 nt, Homo sapiens
  misc_RNA (1)...(19): siRNA sense strand
aaucggaagaagaagaaga

SEQ ID NO: 2410424 - RNA, 19 nt, Homo sapiens
  misc_RNA (1)...(19): siRNA sense strand
agaagaaagucgcugagca

SEQ ID NO: 2410425 - RNA, 19 nt, Homo sapiens
  misc_RNA (1)...(19): siRNA sense strand
aagaagaagaagaaucaca

SEQ ID NO: 2410426 - RNA, 19 nt, Homo sapiens
  misc_RNA (1)...(19): siRNA sense strand
cauugaacuuguuggagca

SEQ ID NO: 2410427 - RNA, 19 nt, Homo sapiens
  misc_RNA (1)...(19): siRNA sense strand
gaagaaagucgcugagcag

SEQ ID NO: 2410428 - RNA, 19 nt, Homo sapiens
  misc_RNA (1)...(19): siRNA sense strand
ggagaaaugguguugucau

SEQ ID NO: 2410429 - RNA, 19 nt, Homo sapiens
  misc_RNA (1)...(19): siRNA sense strand
gaugacucaccuaaagaaa

SEQ ID NO: 2410430 - RNA, 19 nt, Homo sapiens
  misc_RNA (1)...(19): siRNA sense strand
aagguuugcugcaggaaaa

SEQ ID NO: 2410431 - RNA, 19 nt, Homo sapiens
  misc_RNA (1)...(19): siRNA sense strand
cagcaucagacccgaggaa

SEQ ID NO: 2410432 - RNA, 19 nt, Homo sapiens
  misc_RNA (1)...(19): siRNA sense strand
augccaauaccaaggaauu

SEQ ID NO: 2410433 - RNA, 19 nt, Homo sapiens
  misc_RNA (1)...(19): siRNA sense strand
augaagaaggcuacagcau

SEQ ID NO: 2410434 - RNA, 19 nt, Homo sapiens
  misc_RNA (1)...(19): siRNA sense strand
uccagaacuuauaagcaaa

SEQ ID NO: 2410435 - RNA, 19 nt, Homo sapiens
  misc_RNA (1)...(19): siRNA sense strand
aggaaaaccuggaguugga

SEQ ID NO: 2410436 - RNA, 19 nt, Homo sapiens
  misc_RNA (1)...(19): siRNA sense strand
agaaacagucaaugccuau

SEQ ID NO: 2410437 - RNA, 19 nt, Homo sapiens
  misc_RNA (1)...(19): siRNA sense strand
cggaagaaagaaaaggaca

SEQ ID NO: 2410438 - RNA, 19 nt, Homo sapiens
  misc_RNA (1)...(19): siRNA sense strand
aggaaaaguccgaggcgca

SEQ ID NO: 2410439 - RNA, 19 nt, Homo sapiens
  misc_RNA (1)...(19): siRNA sense strand
gauaugggguucaggccaa

SEQ ID NO: 2410440 - RNA, 19 nt, Homo sapiens
  misc_RNA (1)...(19): siRNA sense strand
cuaccaaaggaaagcacuu

SEQ ID NO: 2410441 - RNA, 19 nt, Homo sapiens
  misc_RNA (1)...(19): siRNA sense strand
gugauaaauuucagcaggu

SEQ ID NO: 2410442 - RNA, 19 nt, Homo sapiens
  misc_RNA (1)...(19): siRNA sense strand
aagcagagugugcgcguga

SEQ ID NO: 2410443 - RNA, 19 nt, Homo sapiens
  misc_RNA (1)...(19): siRNA sense strand
uaacaauuggaccaggaaa

SEQ ID NO: 2410444 - RNA, 19 nt, Homo sapiens
  misc_RNA (1)...(19): siRNA sense strand
auuuagaagaaguccagaa

SEQ ID NO: 2410445 - RNA, 19 nt, Homo sapiens
  misc_RNA (1)...(19): siRNA sense strand
ccacaguugagaaugaaca

SEQ ID NO: 2410446 - RNA, 19 nt, Homo sapiens
  misc_RNA (1)...(19): siRNA sense strand
uuucaaaggagcagaccca

SEQ ID NO: 2410447 - RNA, 19 nt, Homo sapiens
  misc_RNA (1)...(19): siRNA sense strand
acuuguuggagcaggguau

SEQ ID NO: 2410448 - RNA, 19 nt, Homo sapiens
  misc_RNA (1)...(19): siRNA sense strand
aauacuuggcagauaacua

SEQ ID NO: 2410449 - RNA, 19 nt, Homo sapiens
  misc_RNA (1)...(19): siRNA sense strand
uuggaauacggaagaaaga

SEQ ID NO: 2410450 - RNA, 19 nt, Homo sapiens
  misc_RNA (1)...(19): siRNA sense strand
caggaaaauacuuggcaga

SEQ ID NO: 2410451 - RNA, 19 nt, Homo sapiens
  misc_RNA (1)...(19): siRNA sense strand
agucagccacagaggucaa

SEQ ID NO: 2410452 - RNA, 19 nt, Homo sapiens
  misc_RNA (1)...(19): siRNA sense strand
gaauacggaagaaagaaaa

SEQ ID NO: 2410453 - RNA, 19 nt, Homo sapiens
  misc_RNA (1)...(19): siRNA sense strand
caagauuaaaccauugcaa

SEQ ID NO: 2410454 - RNA, 19 nt, Homo sapiens
  misc_RNA (1)...(19): siRNA sense strand
uugaugaacagaagacaga

SEQ ID NO: 2410455 - RNA, 19 nt, Homo sapiens
  misc_RNA (1)...(19): siRNA sense strand
ccaaaguuaacaaggccuu

SEQ ID NO: 2410456 - RNA, 19 nt, Homo sapiens
  misc_RNA (1)...(19): siRNA sense strand
aggagcagacccaagcaaa

SEQ ID NO: 2410457 - RNA, 19 nt, Homo sapiens
  misc_RNA (1)...(19): siRNA sense strand
cuccauugguugugcaguu

SEQ ID NO: 2410458 - RNA, 19 nt, Homo sapiens
  misc_RNA (1)...(19): siRNA sense strand
gugaaaaugaagacgaaua

SEQ ID NO: 2410459 - RNA, 19 nt, Homo sapiens
  misc_RNA (1)...(19): siRNA sense strand
guauugaggcagaagaaaa

SEQ ID NO: 2410460 - RNA, 19 nt, Homo sapiens
  misc_RNA (1)...(19): siRNA sense strand
cauuaauagugagggaaau

SEQ ID NO: 2410461 - RNA, 19 nt, Homo sapiens
  misc_RNA (1)...(19): siRNA sense strand
cgccauuaauagugaggga

SEQ ID NO: 2410462 - RNA, 19 nt, Homo sapiens
  misc_RNA (1)...(19): siRNA sense strand
gcaguuugcuggugggauc

SEQ ID NO: 2410463 - RNA, 19 nt, Homo sapiens
  misc_RNA (1)...(19): siRNA sense strand
cuaggauggauguggguuu

SEQ ID NO: 2410464 - RNA, 19 nt, Homo sapiens
  misc_RNA (1)...(19): siRNA sense strand
guggagaucuggagcagca

SEQ ID NO: 2410465 - RNA, 19 nt, Homo sapiens
  misc_RNA (1)...(19): siRNA sense strand
ugauaguucuguugcccaa

SEQ ID NO: 2410466 - RNA, 19 nt, Homo sapiens
  misc_RNA (1)...(19): siRNA sense strand
ugggaaagccggacgagga

SEQ ID NO: 2410467 - RNA, 19 nt, Homo sapiens
  misc_RNA (1)...(19): siRNA sense strand
gaguaugccuuucugguga

SEQ ID NO: 2410468 - RNA, 19 nt, Homo sapiens
  misc_RNA (1)...(19): siRNA sense strand
gaaauuggucucucgggua

SEQ ID NO: 2410469 - RNA, 19 nt, Homo sapiens
  misc_RNA (1)...(19): siRNA sense strand
guacgacguuggagggauc

SEQ ID NO: 2410470 - RNA, 19 nt, Homo sapiens
  misc_RNA (1)...(19): siRNA sense strand
gaaagaacaaugucagcca

SEQ ID NO: 2410471 - RNA, 19 nt, Homo sapiens
  misc_RNA (1)...(19): siRNA sense strand
uggugaaaaugaagacgaa

SEQ ID NO: 2410472 - RNA, 19 nt, Homo sapiens
  misc_RNA (1)...(19): siRNA sense strand
ggacaagcuaggauggaug

SEQ ID NO: 2410473 - RNA, 19 nt, Homo sapiens
  misc_RNA (1)...(19): siRNA sense strand
ccgcgagacagaaagaaca

SEQ ID NO: 2410474 - RNA, 19 nt, Homo sapiens
  misc_RNA (1)...(19): siRNA sense strand
ucuaggagcuccagccuga

SEQ ID NO: 2410475 - RNA, 19 nt, Homo sapiens
  misc_RNA (1)...(19): siRNA sense strand
cgcgagacagaaagaacaa

SEQ ID NO: 2410476 - RNA, 19 nt, Homo sapiens
  misc_RNA (1)...(19): siRNA sense strand
cagaagaaaacuuugaaga

SEQ ID NO: 2410477 - RNA, 19 nt, Homo sapiens
  misc_RNA (1)...(19): siRNA sense strand
aagacgaauaugagccgaa

SEQ ID NO: 2410478 - RNA, 19 nt, Homo sapiens
  misc_RNA (1)...(19): siRNA sense strand
cagacgagcaccaggacau

SEQ ID NO: 2410479 - RNA, 19 nt, Homo sapiens
  misc_RNA (1)...(19): siRNA sense strand
cagcaggaggacccagaaa

SEQ ID NO: 2410480 - RNA, 19 nt, Homo sapiens
  misc_RNA (1)...(19): siRNA sense strand
cggcccagaaagcgagcaa

SEQ ID NO: 2410481 - RNA, 19 nt, Homo sapiens
  misc_RNA (1)...(19): siRNA sense strand
aggagaaggccguggagac

SEQ ID NO: 2410482 - RNA, 19 nt, Homo sapiens
  misc_RNA (1)...(19): siRNA sense strand
gggagaagguguauuggac

SEQ ID NO: 2410483 - RNA, 19 nt, Homo sapiens
  misc_RNA (1)...(19): siRNA sense strand
gggagaagguguauuggac

SEQ ID NO: 2410484 - RNA, 19 nt, Homo sapiens
  misc_RNA (1)...(19): siRNA sense strand
gggcagagaugcuggccaa

SEQ ID NO: 2410485 - RNA, 19 nt, Homo sapiens
  misc_RNA (1)...(19): siRNA sense strand
cgucugaagaagcggaaaa

SEQ ID NO: 2410486 - RNA, 19 nt, Homo sapiens
  misc_RNA (1)...(19): siRNA sense strand
gcgcaaagaccuaggcccu

SEQ ID NO: 2410487 - RNA, 19 nt, Homo sapiens
  misc_RNA (1)...(19): siRNA sense strand
ugaccgaauccgaggcuau

SEQ ID NO: 2410488 - RNA, 19 nt, Homo sapiens
  misc_RNA (1)...(19): siRNA sense strand
ccgagagcguggagaacgu

SEQ ID NO: 2410489 - RNA, 19 nt, Homo sapiens
  misc_RNA (1)...(19): siRNA sense strand
ccucuaaccucaaagcgau

SEQ ID NO: 2410490 - RNA, 19 nt, Homo sapiens
  misc_RNA (1)...(19): siRNA sense strand
ggcaucagcuaguggagga

SEQ ID NO: 2410491 - RNA, 19 nt, Homo sapiens
  misc_RNA (1)...(19): siRNA sense strand
cgugacauucuguggcauu

SEQ ID NO: 2410492 - RNA, 19 nt, Homo sapiens
  misc_RNA (1)...(19): siRNA sense strand
gcauuguccuucugggugu

SEQ ID NO: 2410493 - RNA, 19 nt, Homo sapiens
  misc_RNA (1)...(19): siRNA sense strand
gaagaaugguuaaagggaa

SEQ ID NO: 2410494 - RNA, 19 nt, Homo sapiens
  misc_RNA (1)...(19): siRNA sense strand
gugaagaagaagagaaaau

SEQ ID NO: 2410495 - RNA, 19 nt, Homo sapiens
  misc_RNA (1)...(19): siRNA sense strand
gaacaaagaucaaugguac

SEQ ID NO: 2410496 - RNA, 19 nt, Homo sapiens
  misc_RNA (1)...(19): siRNA sense strand
cguggaaauuggaggcuga

SEQ ID NO: 2410497 - RNA, 19 nt, Homo sapiens
  misc_RNA (1)...(19): siRNA sense strand
ugaugaaguuguagggcca

SEQ ID NO: 2410498 - RNA, 19 nt, Homo sapiens
  misc_RNA (1)...(19): siRNA sense strand
ggccagaaggaauggaaaa

SEQ ID NO: 2410499 - RNA, 19 nt, Homo sapiens
  misc_RNA (1)...(19): siRNA sense strand
gggccagaaggaauggaaa

SEQ ID NO: 2410500 - RNA, 19 nt, Homo sapiens
  misc_RNA (1)...(19): siRNA sense strand
uaauaaguggagaggaaca

SEQ ID NO: 2410501 - RNA, 19 nt, Homo sapiens
  misc_RNA (1)...(19): siRNA sense strand
ccggugaagaagaagagaa

SEQ ID NO: 2410502 - RNA, 19 nt, Homo sapiens
  misc_RNA (1)...(19): siRNA sense strand
aggcugaaagcaugggauu

SEQ ID NO: 2410503 - RNA, 19 nt, Homo sapiens
  misc_RNA (1)...(19): siRNA sense strand
ggaagaaugguuaaaggga

SEQ ID NO: 2410504 - RNA, 19 nt, Homo sapiens
  misc_RNA (1)...(19): siRNA sense strand
uuguagggccagaaggaau

SEQ ID NO: 2410505 - RNA, 19 nt, Homo sapiens
  misc_RNA (1)...(19): siRNA sense strand
gcagaacaguccaugcuga

SEQ ID NO: 2410506 - RNA, 19 nt, Homo sapiens
  misc_RNA (1)...(19): siRNA sense strand
aauuggaggcugaaagcau

SEQ ID NO: 2410507 - RNA, 19 nt, Homo sapiens
  misc_RNA (1)...(19): siRNA sense strand
augaauuuguugaguggca

SEQ ID NO: 2410508 - RNA, 19 nt, Homo sapiens
  misc_RNA (1)...(19): siRNA sense strand
guguugaaccugaaaauau

SEQ ID NO: 2410509 - RNA, 19 nt, Homo sapiens
  misc_RNA (1)...(19): siRNA sense strand
ggcagcagcaguagcggaa

SEQ ID NO: 2410510 - RNA, 19 nt, Homo sapiens
  misc_RNA (1)...(19): siRNA sense strand
guugaaugauauuucguca

SEQ ID NO: 2410511 - RNA, 19 nt, Homo sapiens
  misc_RNA (1)...(19): siRNA sense strand
uugcaagggauaaagauca

SEQ ID NO: 2410512 - RNA, 19 nt, Homo sapiens
  misc_RNA (1)...(19): siRNA sense strand
gccaaggagaugugggaaa

SEQ ID NO: 2410513 - RNA, 19 nt, Homo sapiens
  misc_RNA (1)...(19): siRNA sense strand
gggagaagaugaaggagga

SEQ ID NO: 2410514 - RNA, 19 nt, Homo sapiens
  misc_RNA (1)...(19): siRNA sense strand
ggcuggaggaagagcgaaa

SEQ ID NO: 2410515 - RNA, 19 nt, Homo sapiens
  misc_RNA (1)...(19): siRNA sense strand
agaagaugaaggaggagaa

SEQ ID NO: 2410516 - RNA, 19 nt, Homo sapiens
  misc_RNA (1)...(19): siRNA sense strand
aagaggagcuggaggcaga

SEQ ID NO: 2410517 - RNA, 19 nt, Homo sapiens
  misc_RNA (1)...(19): siRNA sense strand
gggaaaagagagaggcaga

SEQ ID NO: 2410518 - RNA, 19 nt, Homo sapiens
  misc_RNA (1)...(19): siRNA sense strand
ggaugaaagcugaagagga

SEQ ID NO: 2410519 - RNA, 19 nt, Homo sapiens
  misc_RNA (1)...(19): siRNA sense strand
gggacagacugaugagcga

SEQ ID NO: 2410520 - RNA, 19 nt, Homo sapiens
  misc_RNA (1)...(19): siRNA sense strand
agaaggaggacgagagcca

SEQ ID NO: 2410521 - RNA, 19 nt, Homo sapiens
  misc_RNA (1)...(19): siRNA sense strand
gaugaaagcugaagaggag

SEQ ID NO: 2410522 - RNA, 19 nt, Homo sapiens
  misc_RNA (1)...(19): siRNA sense strand
cuaaagaaggagcaggaga

SEQ ID NO: 2410523 - RNA, 19 nt, Homo sapiens
  misc_RNA (1)...(19): siRNA sense strand
ccgacgggcacaagaggaa

SEQ ID NO: 2410524 - RNA, 19 nt, Homo sapiens
  misc_RNA (1)...(19): siRNA sense strand
aggacaagcuccaggccga

SEQ ID NO: 2410525 - RNA, 19 nt, Homo sapiens
  misc_RNA (1)...(19): siRNA sense strand
agaacaaacgguaugaaaa

SEQ ID NO: 2410526 - RNA, 19 nt, Homo sapiens
  misc_RNA (1)...(19): siRNA sense strand
aggaagagcgaaagcagau

SEQ ID NO: 2410527 - RNA, 19 nt, Homo sapiens
  misc_RNA (1)...(19): siRNA sense strand
aggaggaggaagaggagga

SEQ ID NO: 2410528 - RNA, 19 nt, Homo sapiens
  misc_RNA (1)...(19): siRNA sense strand
agcaaauacaagagaagau

SEQ ID NO: 2410529 - RNA, 19 nt, Homo sapiens
  misc_RNA (1)...(19): siRNA sense strand
ggugggagcuagagaggcu

SEQ ID NO: 2410530 - RNA, 19 nt, Homo sapiens
  misc_RNA (1)...(19): siRNA sense strand
agcaggaggaggaggaaga

SEQ ID NO: 2410531 - RNA, 19 nt, Homo sapiens
  misc_RNA (1)...(19): siRNA sense strand
uagaaaggaugaaagcuga

SEQ ID NO: 2410532 - RNA, 19 nt, Homo sapiens
  misc_RNA (1)...(19): siRNA sense strand
gagcgaaagcagauggaag

SEQ ID NO: 2410533 - RNA, 19 nt, Homo sapiens
  misc_RNA (1)...(19): siRNA sense strand
caggcagaauggagcucua

SEQ ID NO: 2410534 - RNA, 19 nt, Homo sapiens
  misc_RNA (1)...(19): siRNA sense strand
aagaggaaucccugaaaca

SEQ ID NO: 2410535 - RNA, 19 nt, Homo sapiens
  misc_RNA (1)...(19): siRNA sense strand
gaggaaacugauugcugaa

SEQ ID NO: 2410536 - RNA, 19 nt, Homo sapiens
  misc_RNA (1)...(19): siRNA sense strand
gaggaagagcgaaagcaga

SEQ ID NO: 2410537 - RNA, 19 nt, Homo sapiens
  misc_RNA (1)...(19): siRNA sense strand
accagaagcaugucguaaa

SEQ ID NO: 2410538 - RNA, 19 nt, Homo sapiens
  misc_RNA (1)...(19): siRNA sense strand
agaaaggaugaaagcugaa

SEQ ID NO: 2410539 - RNA, 19 nt, Homo sapiens
  misc_RNA (1)...(19): siRNA sense strand
gaaagcagauggaagccuu

SEQ ID NO: 2410540 - RNA, 19 nt, Homo sapiens
  misc_RNA (1)...(19): siRNA sense strand
gaggagaagaggaggaguc

SEQ ID NO: 2410541 - RNA, 19 nt, Homo sapiens
  misc_RNA (1)...(19): siRNA sense strand
cuggaggagcugaggcuga

SEQ ID NO: 2410542 - RNA, 19 nt, Homo sapiens
  misc_RNA (1)...(19): siRNA sense strand
agcaggaggcggagacuau

SEQ ID NO: 2410543 - RNA, 19 nt, Homo sapiens
  misc_RNA (1)...(19): siRNA sense strand
gagaagaugaaggaggaga

SEQ ID NO: 2410544 - RNA, 19 nt, Homo sapiens
  misc_RNA (1)...(19): siRNA sense strand
aagcagaccagcaggagga

SEQ ID NO: 2410545 - RNA, 19 nt, Homo sapiens
  misc_RNA (1)...(19): siRNA sense strand
ucguaaacucuugggaaau

SEQ ID NO: 2410546 - RNA, 19 nt, Homo sapiens
  misc_RNA (1)...(19): siRNA sense strand
cagggagacaacagcaaau

SEQ ID NO: 2410547 - RNA, 19 nt, Homo sapiens
  misc_RNA (1)...(19): siRNA sense strand
agaugaaggaggagaagag

SEQ ID NO: 2410548 - RNA, 19 nt, Homo sapiens
  misc_RNA (1)...(19): siRNA sense strand
agaggaaacugauugcuga

SEQ ID NO: 2410549 - RNA, 19 nt, Homo sapiens
  misc_RNA (1)...(19): siRNA sense strand
aggaggaggaggaagagga

SEQ ID NO: 2410550 - RNA, 19 nt, Homo sapiens
  misc_RNA (1)...(19): siRNA sense strand
cuagaaaggaugaaagcug

SEQ ID NO: 2410551 - RNA, 19 nt, Homo sapiens
  misc_RNA (1)...(19): siRNA sense strand
aggcagagcuggggcguuu

SEQ ID NO: 2410552 - RNA, 19 nt, Homo sapiens
  misc_RNA (1)...(19): siRNA sense strand
gggucugugcugagggcaa

SEQ ID NO: 2410553 - RNA, 19 nt, Homo sapiens
  misc_RNA (1)...(19): siRNA sense strand
caaagaaccugguagcguu

SEQ ID NO: 2410554 - RNA, 19 nt, Homo sapiens
  misc_RNA (1)...(19): siRNA sense strand
ccguggccgugaaggacaa

SEQ ID NO: 2410555 - RNA, 19 nt, Homo sapiens
  misc_RNA (1)...(19): siRNA sense strand
gaagacacgccguugguga

SEQ ID NO: 2410556 - RNA, 19 nt, Homo sapiens
  misc_RNA (1)...(19): siRNA sense strand
cagaagaauuuaaagguga

SEQ ID NO: 2410557 - RNA, 19 nt, Homo sapiens
  misc_RNA (1)...(19): siRNA sense strand
cagaauucaaagaagagaa

SEQ ID NO: 2410558 - RNA, 19 nt, Homo sapiens
  misc_RNA (1)...(19): siRNA sense strand
cugaagaaauugaagcagu

SEQ ID NO: 2410559 - RNA, 19 nt, Homo sapiens
  misc_RNA (1)...(19): siRNA sense strand
gcuuggaauggcagaagaa

SEQ ID NO: 2410560 - RNA, 19 nt, Homo sapiens
  misc_RNA (1)...(19): siRNA sense strand
ucaaauuggagaagcuaau

SEQ ID NO: 2410561 - RNA, 19 nt, Homo sapiens
  misc_RNA (1)...(19): siRNA sense strand
guaaauaaugccagugcca

SEQ ID NO: 2410562 - RNA, 19 nt, Homo sapiens
  misc_RNA (1)...(19): siRNA sense strand
guucuggagcuguggaaga

SEQ ID NO: 2410563 - RNA, 19 nt, Homo sapiens
  misc_RNA (1)...(19): siRNA sense strand
caucaagaaauuuggagga

SEQ ID NO: 2410564 - RNA, 19 nt, Homo sapiens
  misc_RNA (1)...(19): siRNA sense strand
uggcauuggcaaagcuauu

SEQ ID NO: 2410565 - RNA, 19 nt, Homo sapiens
  misc_RNA (1)...(19): siRNA sense strand
acccagaagcaguuagcaa

SEQ ID NO: 2410566 - RNA, 19 nt, Homo sapiens
  misc_RNA (1)...(19): siRNA sense strand
guuaaagccacucaagcaa

SEQ ID NO: 2410567 - RNA, 19 nt, Homo sapiens
  misc_RNA (1)...(19): siRNA sense strand
auguauuguugaugugaga

SEQ ID NO: 2410568 - RNA, 19 nt, Homo sapiens
  misc_RNA (1)...(19): siRNA sense strand
uuggaauggcagaagaauu

SEQ ID NO: 2410569 - RNA, 19 nt, Homo sapiens
  misc_RNA (1)...(19): siRNA sense strand
guauuguugaugugagaga

SEQ ID NO: 2410570 - RNA, 19 nt, Homo sapiens
  misc_RNA (1)...(19): siRNA sense strand
aagccguggcauuggcaaa

SEQ ID NO: 2410571 - RNA, 19 nt, Homo sapiens
  misc_RNA (1)...(19): siRNA sense strand
gcuaaguaugguaugucua

SEQ ID NO: 2410572 - RNA, 19 nt, Homo sapiens
  misc_RNA (1)...(19): siRNA sense strand
ccagaagcaguuagcaaga

SEQ ID NO: 2410573 - RNA, 19 nt, Homo sapiens
  misc_RNA (1)...(19): siRNA sense strand
gcagcaaaggauggagcaa

SEQ ID NO: 2410574 - RNA, 19 nt, Homo sapiens
  misc_RNA (1)...(19): siRNA sense strand
gaaaagcaagggugggaau

SEQ ID NO: 2410575 - RNA, 19 nt, Homo sapiens
  misc_RNA (1)...(19): siRNA sense strand
gagcuguggaagaaacauu

SEQ ID NO: 2410576 - RNA, 19 nt, Homo sapiens
  misc_RNA (1)...(19): siRNA sense strand
aucgaaagccaguguagaa

SEQ ID NO: 2410577 - RNA, 19 nt, Homo sapiens
  misc_RNA (1)...(19): siRNA sense strand
ggcauucaugucagggaaa

SEQ ID NO: 2410578 - RNA, 19 nt, Homo sapiens
  misc_RNA (1)...(19): siRNA sense strand
gucaaugcauuauggccua

SEQ ID NO: 2410579 - RNA, 19 nt, Homo sapiens
  misc_RNA (1)...(19): siRNA sense strand
uggcauucaugucagggaa

SEQ ID NO: 2410580 - RNA, 19 nt, Homo sapiens
  misc_RNA (1)...(19): siRNA sense strand
aauugaagcaguuggagga

SEQ ID NO: 2410581 - RNA, 19 nt, Homo sapiens
  misc_RNA (1)...(19): siRNA sense strand
gaggaaaggccuugccaug

SEQ ID NO: 2410582 - RNA, 19 nt, Homo sapiens
  misc_RNA (1)...(19): siRNA sense strand
gaucugaugaugaacguga

SEQ ID NO: 2410583 - RNA, 19 nt, Homo sapiens
  misc_RNA (1)...(19): siRNA sense strand
ugucagggaaauugaagau

SEQ ID NO: 2410584 - RNA, 19 nt, Homo sapiens
  misc_RNA (1)...(19): siRNA sense strand
auugaaagcagcaaaggau

SEQ ID NO: 2410585 - RNA, 19 nt, Homo sapiens
  misc_RNA (1)...(19): siRNA sense strand
uuccagaauucaaagaaga

SEQ ID NO: 2410586 - RNA, 19 nt, Homo sapiens
  misc_RNA (1)...(19): siRNA sense strand
ggaaugucggauauggaga

SEQ ID NO: 2410587 - RNA, 19 nt, Homo sapiens
  misc_RNA (1)...(19): siRNA sense strand
aggugcaagccguggcauu

SEQ ID NO: 2410588 - RNA, 19 nt, Homo sapiens
  misc_RNA (1)...(19): siRNA sense strand
aucaagaaauuuggaggaa

SEQ ID NO: 2410589 - RNA, 19 nt, Homo sapiens
  misc_RNA (1)...(19): siRNA sense strand
gcagaagaauuuaaaggug

SEQ ID NO: 2410590 - RNA, 19 nt, Homo sapiens
  misc_RNA (1)...(19): siRNA sense strand
guaacauggcccuagcaau

SEQ ID NO: 2410591 - RNA, 19 nt, Homo sapiens
  misc_RNA (1)...(19): siRNA sense strand
agcuaaugaaucagaugaa

SEQ ID NO: 2410592 - RNA, 19 nt, Homo sapiens
  misc_RNA (1)...(19): siRNA sense strand
ccacagaagauaaggagga

SEQ ID NO: 2410593 - RNA, 19 nt, Homo sapiens
  misc_RNA (1)...(19): siRNA sense strand
aggagaaagaagaagaaga

SEQ ID NO: 2410594 - RNA, 19 nt, Homo sapiens
  misc_RNA (1)...(19): siRNA sense strand
gggaauauguccuggcacu

SEQ ID NO: 2410595 - RNA, 19 nt, Homo sapiens
  misc_RNA (1)...(19): siRNA sense strand
ggccgugggcauugggaaa

SEQ ID NO: 2410596 - RNA, 19 nt, Homo sapiens
  misc_RNA (1)...(19): siRNA sense strand
aggaggaugaggagaaaga

SEQ ID NO: 2410597 - RNA, 19 nt, Homo sapiens
  misc_RNA (1)...(19): siRNA sense strand
aggaggaagaagaagagua

SEQ ID NO: 2410598 - RNA, 19 nt, Homo sapiens
  misc_RNA (1)...(19): siRNA sense strand
acaauauggacgaggcuau

SEQ ID NO: 2410599 - RNA, 19 nt, Homo sapiens
  misc_RNA (1)...(19): siRNA sense strand
aagagaaggaagaggagga

SEQ ID NO: 2410600 - RNA, 19 nt, Homo sapiens
  misc_RNA (1)...(19): siRNA sense strand
aagaagaacaugaagagga

SEQ ID NO: 2410601 - RNA, 19 nt, Homo sapiens
  misc_RNA (1)...(19): siRNA sense strand
aggaaacaauacagaaacu

SEQ ID NO: 2410602 - RNA, 19 nt, Homo sapiens
  misc_RNA (1)...(19): siRNA sense strand
aagaggaggaagaagaaga

SEQ ID NO: 2410603 - RNA, 19 nt, Homo sapiens
  misc_RNA (1)...(19): siRNA sense strand
augaagaagaacaugaaga

SEQ ID NO: 2410604 - RNA, 19 nt, Homo sapiens
  misc_RNA (1)...(19): siRNA sense strand
aagaagagaaggaagagga

SEQ ID NO: 2410605 - RNA, 19 nt, Homo sapiens
  misc_RNA (1)...(19): siRNA sense strand
guaugaugaagaagaacau

SEQ ID NO: 2410606 - RNA, 19 nt, Homo sapiens
  misc_RNA (1)...(19): siRNA sense strand
cuucagaggaggaugagga

SEQ ID NO: 2410607 - RNA, 19 nt, Homo sapiens
  misc_RNA (1)...(19): siRNA sense strand
aacuagagacccuggagaa

SEQ ID NO: 2410608 - RNA, 19 nt, Homo sapiens
  misc_RNA (1)...(19): siRNA sense strand
aguaugaugaagaagaaca

SEQ ID NO: 2410609 - RNA, 19 nt, Homo sapiens
  misc_RNA (1)...(19): siRNA sense strand
cccuaagaccacagaagau

SEQ ID NO: 2410610 - RNA, 19 nt, Homo sapiens
  misc_RNA (1)...(19): siRNA sense strand
acagaagauaaggaggaaa

SEQ ID NO: 2410611 - RNA, 19 nt, Homo sapiens
  misc_RNA (1)...(19): siRNA sense strand
augaggagaaagaagaaga

SEQ ID NO: 2410612 - RNA, 19 nt, Homo sapiens
  misc_RNA (1)...(19): siRNA sense strand
gggcauugggaaaggggau

SEQ ID NO: 2410613 - RNA, 19 nt, Homo sapiens
  misc_RNA (1)...(19): siRNA sense strand
ggcacugaagcaagagcua

SEQ ID NO: 2410614 - RNA, 19 nt, Homo sapiens
  misc_RNA (1)...(19): siRNA sense strand
gugacagugaugacaauau

SEQ ID NO: 2410615 - RNA, 19 nt, Homo sapiens
  misc_RNA (1)...(19): siRNA sense strand
cuggagagaaugagaaaca

SEQ ID NO: 2410616 - RNA, 19 nt, Homo sapiens
  misc_RNA (1)...(19): siRNA sense strand
uggcugagugggaggcaaa

SEQ ID NO: 2410617 - RNA, 19 nt, Homo sapiens
  misc_RNA (1)...(19): siRNA sense strand
ugauggaagaagaguggaa

SEQ ID NO: 2410618 - RNA, 19 nt, Homo sapiens
  misc_RNA (1)...(19): siRNA sense strand
aagcagugggccagggaau

SEQ ID NO: 2410619 - RNA, 19 nt, Homo sapiens
  misc_RNA (1)...(19): siRNA sense strand
gccuggagagaaugagaaa

SEQ ID NO: 2410620 - RNA, 19 nt, Homo sapiens
  misc_RNA (1)...(19): siRNA sense strand
gcuugcaguuugaugaaaa

SEQ ID NO: 2410621 - RNA, 19 nt, Homo sapiens
  misc_RNA (1)...(19): siRNA sense strand
uguacaaacuggugggcuc

SEQ ID NO: 2410622 - RNA, 19 nt, Homo sapiens
  misc_RNA (1)...(19): siRNA sense strand
cuggaggagcugauagaca

SEQ ID NO: 2410623 - RNA, 19 nt, Homo sapiens
  misc_RNA (1)...(19): siRNA sense strand
guccagaagacuuggcuca

SEQ ID NO: 2410624 - RNA, 19 nt, Homo sapiens
  misc_RNA (1)...(19): siRNA sense strand
cuuugcagucaguggagaa

SEQ ID NO: 2410625 - RNA, 19 nt, Homo sapiens
  misc_RNA (1)...(19): siRNA sense strand
acgaggcagcugugggcaa

SEQ ID NO: 2410626 - RNA, 19 nt, Homo sapiens
  misc_RNA (1)...(19): siRNA sense strand
cuucauuguuaguggguga

SEQ ID NO: 2410627 - RNA, 19 nt, Homo sapiens
  misc_RNA (1)...(19): siRNA sense strand
agacaaguggugagagaca

SEQ ID NO: 2410628 - RNA, 19 nt, Homo sapiens
  misc_RNA (1)...(19): siRNA sense strand
caaauuaaaucuuggugga

SEQ ID NO: 2410629 - RNA, 19 nt, Homo sapiens
  misc_RNA (1)...(19): siRNA sense strand
acuacauuucugagacaaa

SEQ ID NO: 2410630 - RNA, 19 nt, Homo sapiens
  misc_RNA (1)...(19): siRNA sense strand
ggccagaguucuuggugga

SEQ ID NO: 2410631 - RNA, 19 nt, Homo sapiens
  misc_RNA (1)...(19): siRNA sense strand
ggaagaucucagugguuca

SEQ ID NO: 2410632 - RNA, 19 nt, Homo sapiens
  misc_RNA (1)...(19): siRNA sense strand
agaaguugcauauggccaa

SEQ ID NO: 2410633 - RNA, 19 nt, Homo sapiens
  misc_RNA (1)...(19): siRNA sense strand
uguuagugggugaagaauu

SEQ ID NO: 2410634 - RNA, 19 nt, Homo sapiens
  misc_RNA (1)...(19): siRNA sense strand
acaaguggugagagacaau

SEQ ID NO: 2410635 - RNA, 19 nt, Homo sapiens
  misc_RNA (1)...(19): siRNA sense strand
ucugagacaaagagguuau

SEQ ID NO: 2410636 - RNA, 19 nt, Homo sapiens
  misc_RNA (1)...(19): siRNA sense strand
ccucagcagacgcggaaga

SEQ ID NO: 2410637 - RNA, 19 nt, Homo sapiens
  misc_RNA (1)...(19): siRNA sense strand
aauuaaaucuugguggaga

SEQ ID NO: 2410638 - RNA, 19 nt, Homo sapiens
  misc_RNA (1)...(19): siRNA sense strand
ugguggagaaguugcauau

SEQ ID NO: 2410639 - RNA, 19 nt, Homo sapiens
  misc_RNA (1)...(19): siRNA sense strand
aggaagaguuggaaggaca

SEQ ID NO: 2410640 - RNA, 19 nt, Homo sapiens
  misc_RNA (1)...(19): siRNA sense strand
agaagaucuuagugagcaa

SEQ ID NO: 2410641 - RNA, 19 nt, Homo sapiens
  misc_RNA (1)...(19): siRNA sense strand
gugaggaagaagaaaggaa

SEQ ID NO: 2410642 - RNA, 19 nt, Homo sapiens
  misc_RNA (1)...(19): siRNA sense strand
aggaggaggaggagcgaca

SEQ ID NO: 2410643 - RNA, 19 nt, Homo sapiens
  misc_RNA (1)...(19): siRNA sense strand
gugacaugcaggagcguuu

SEQ ID NO: 2410644 - RNA, 19 nt, Homo sapiens
  misc_RNA (1)...(19): siRNA sense strand
aagcaguggccgacaucaa

SEQ ID NO: 2410645 - RNA, 19 nt, Homo sapiens
  misc_RNA (1)...(19): siRNA sense strand
aggaagaagaaaggaaaga

SEQ ID NO: 2410646 - RNA, 19 nt, Homo sapiens
  misc_RNA (1)...(19): siRNA sense strand
agcugaucgugcugggaaa

SEQ ID NO: 2410647 - RNA, 19 nt, Homo sapiens
  misc_RNA (1)...(19): siRNA sense strand
auguacaacgugaggaaga

SEQ ID NO: 2410648 - RNA, 19 nt, Homo sapiens
  misc_RNA (1)...(19): siRNA sense strand
ugguuaugucguaggaaga

SEQ ID NO: 2410649 - RNA, 19 nt, Homo sapiens
  misc_RNA (1)...(19): siRNA sense strand
uuauguacaacgugaggaa

SEQ ID NO: 2410650 - RNA, 19 nt, Homo sapiens
  misc_RNA (1)...(19): siRNA sense strand
ccuuugaguuugaugcuga

SEQ ID NO: 2410651 - RNA, 19 nt, Homo sapiens
  misc_RNA (1)...(19): siRNA sense strand
gcgaaaagcagcugcagga

SEQ ID NO: 2410652 - RNA, 19 nt, Homo sapiens
  misc_RNA (1)...(19): siRNA sense strand
ggaagaguuggaaggacau

SEQ ID NO: 2410653 - RNA, 19 nt, Homo sapiens
  misc_RNA (1)...(19): siRNA sense strand
ggucauacguuacuccaga

SEQ ID NO: 2410654 - RNA, 19 nt, Homo sapiens
  misc_RNA (1)...(19): siRNA sense strand
aggacagcgcaucaagaaa

SEQ ID NO: 2410655 - RNA, 19 nt, Homo sapiens
  misc_RNA (1)...(19): siRNA sense strand
caucugaagcaguggccga

SEQ ID NO: 2410656 - RNA, 19 nt, Homo sapiens
  misc_RNA (1)...(19): siRNA sense strand
cagcaaaaccuacgggcca

SEQ ID NO: 2410657 - RNA, 19 nt, Homo sapiens
  misc_RNA (1)...(19): siRNA sense strand
acaccuaauuuuaaggaca

SEQ ID NO: 2410658 - RNA, 19 nt, Homo sapiens
  misc_RNA (1)...(19): siRNA sense strand
acaacgugaggaagaagaa

SEQ ID NO: 2410659 - RNA, 19 nt, Homo sapiens
  misc_RNA (1)...(19): siRNA sense strand
uuguuaacaucaaaggaca

SEQ ID NO: 2410660 - RNA, 19 nt, Homo sapiens
  misc_RNA (1)...(19): siRNA sense strand
gaaacaaaguggaccuccu

SEQ ID NO: 2410661 - RNA, 19 nt, Homo sapiens
  misc_RNA (1)...(19): siRNA sense strand
ccggcuauggaguggaaga

SEQ ID NO: 2410662 - RNA, 19 nt, Homo sapiens
  misc_RNA (1)...(19): siRNA sense strand
acaucaaaggacagcgcau

SEQ ID NO: 2410663 - RNA, 19 nt, Homo sapiens
  misc_RNA (1)...(19): siRNA sense strand
ggcucuaagcagaugaaua

SEQ ID NO: 2410664 - RNA, 19 nt, Homo sapiens
  misc_RNA (1)...(19): siRNA sense strand
ugcaaaugggacugagaaa

SEQ ID NO: 2410665 - RNA, 19 nt, Homo sapiens
  misc_RNA (1)...(19): siRNA sense strand
acuagaagucauuaagaca

SEQ ID NO: 2410666 - RNA, 19 nt, Homo sapiens
  misc_RNA (1)...(19): siRNA sense strand
aagauuagcucuccggaca

SEQ ID NO: 2410667 - RNA, 19 nt, Homo sapiens
  misc_RNA (1)...(19): siRNA sense strand
gcauguuacuccaaagcca

SEQ ID NO: 2410668 - RNA, 19 nt, Homo sapiens
  misc_RNA (1)...(19): siRNA sense strand
gaccauuaguggagcugga

SEQ ID NO: 2410669 - RNA, 19 nt, Homo sapiens
  misc_RNA (1)...(19): siRNA sense strand
gcggccagcagaaggagaa

SEQ ID NO: 2410670 - RNA, 19 nt, Homo sapiens
  misc_RNA (1)...(19): siRNA sense strand
acacaagguaugagcagau

SEQ ID NO: 2410671 - RNA, 19 nt, Homo sapiens
  misc_RNA (1)...(19): siRNA sense strand
cgauacaucuucacagcca

SEQ ID NO: 2410672 - RNA, 19 nt, Homo sapiens
  misc_RNA (1)...(19): siRNA sense strand
aguuaaugucaaagaggaa

SEQ ID NO: 2410673 - RNA, 19 nt, Homo sapiens
  misc_RNA (1)...(19): siRNA sense strand
cugcaugaaaucaaagcaa

SEQ ID NO: 2410674 - RNA, 19 nt, Homo sapiens
  misc_RNA (1)...(19): siRNA sense strand
cuuuaugccagaagagaga

SEQ ID NO: 2410675 - RNA, 19 nt, Homo sapiens
  misc_RNA (1)...(19): siRNA sense strand
gcaugaaaucaaagcaaac

SEQ ID NO: 2410676 - RNA, 19 nt, Homo sapiens
  misc_RNA (1)...(19): siRNA sense strand
caguuaaugucaaagagga

SEQ ID NO: 2410677 - RNA, 19 nt, Homo sapiens
  misc_RNA (1)...(19): siRNA sense strand
cuaccauauaugaagguga

SEQ ID NO: 2410678 - RNA, 19 nt, Homo sapiens
  misc_RNA (1)...(19): siRNA sense strand
augucaaagaggaagugaa

SEQ ID NO: 2410679 - RNA, 19 nt, Homo sapiens
  misc_RNA (1)...(19): siRNA sense strand
ccauauaugaaggugagaa

SEQ ID NO: 2410680 - RNA, 19 nt, Homo sapiens
  misc_RNA (1)...(19): siRNA sense strand
cauauaugaaggugagaag

SEQ ID NO: 2410681 - RNA, 19 nt, Homo sapiens
  misc_RNA (1)...(19): siRNA sense strand
gcaagugggcugaggcagu

SEQ ID NO: 2410682 - RNA, 19 nt, Homo sapiens
  misc_RNA (1)...(19): siRNA sense strand
cggcugaucuacuggcuga

SEQ ID NO: 2410683 - RNA, 19 nt, Homo sapiens
  misc_RNA (1)...(19): siRNA sense strand
agucagacagggagggaga

SEQ ID NO: 2410684 - RNA, 19 nt, Homo sapiens
  misc_RNA (1)...(19): siRNA sense strand
cgaagaagucagacaggga

SEQ ID NO: 2410685 - RNA, 19 nt, Homo sapiens
  misc_RNA (1)...(19): siRNA sense strand
gacuauaauccuuggcaca

SEQ ID NO: 2410686 - RNA, 19 nt, Homo sapiens
  misc_RNA (1)...(19): siRNA sense strand
ucaccaaggaaaacagaaa

SEQ ID NO: 2410687 - RNA, 19 nt, Homo sapiens
  misc_RNA (1)...(19): siRNA sense strand
aggaugugaagguguuuaa

SEQ ID NO: 2410688 - RNA, 19 nt, Homo sapiens
  misc_RNA (1)...(19): siRNA sense strand
guuuaaugucaccaaggaa

SEQ ID NO: 2410689 - RNA, 19 nt, Homo sapiens
  misc_RNA (1)...(19): siRNA sense strand
cgacagaaguguacagagg

SEQ ID NO: 2410690 - RNA, 19 nt, Homo sapiens
  misc_RNA (1)...(19): siRNA sense strand
aaggagagguucagcggca

SEQ ID NO: 2410691 - RNA, 19 nt, Homo sapiens
  misc_RNA (1)...(19): siRNA sense strand
aggaugugaaggagagguu

SEQ ID NO: 2410692 - RNA, 19 nt, Homo sapiens
  misc_RNA (1)...(19): siRNA sense strand
aggcacugauuguggggua

SEQ ID NO: 2410693 - RNA, 19 nt, Homo sapiens
  misc_RNA (1)...(19): siRNA sense strand
auacaguggaugugagaga

SEQ ID NO: 2410694 - RNA, 19 nt, Homo sapiens
  misc_RNA (1)...(19): siRNA sense strand
aggacagggaagagauaau

SEQ ID NO: 2410695 - RNA, 19 nt, Homo sapiens
  misc_RNA (1)...(19): siRNA sense strand
cucaagaggaaauggaaga

SEQ ID NO: 2410696 - RNA, 19 nt, Homo sapiens
  misc_RNA (1)...(19): siRNA sense strand
ggaacaauuaucaggucau

SEQ ID NO: 2410697 - RNA, 19 nt, Homo sapiens
  misc_RNA (1)...(19): siRNA sense strand
aggaaauggaagaaauguu

SEQ ID NO: 2410698 - RNA, 19 nt, Homo sapiens
  misc_RNA (1)...(19): siRNA sense strand
ugugagagagauuggaaca

SEQ ID NO: 2410699 - RNA, 19 nt, Homo sapiens
  misc_RNA (1)...(19): siRNA sense strand
cagagguagaggaagaaga

SEQ ID NO: 2410700 - RNA, 19 nt, Homo sapiens
  misc_RNA (1)...(19): siRNA sense strand
aguggaugugagagagauu

SEQ ID NO: 2410701 - RNA, 19 nt, Homo sapiens
  misc_RNA (1)...(19): siRNA sense strand
ugauggugauagaugaaaa

SEQ ID NO: 2410702 - RNA, 19 nt, Homo sapiens
  misc_RNA (1)...(19): siRNA sense strand
aagagauaauaguagcaga

SEQ ID NO: 2410703 - RNA, 19 nt, Homo sapiens
  misc_RNA (1)...(19): siRNA sense strand
gugagagagauuggaacaa

SEQ ID NO: 2410704 - RNA, 19 nt, Homo sapiens
  misc_RNA (1)...(19): siRNA sense strand
uggaacaauuaucagguca

SEQ ID NO: 2410705 - RNA, 19 nt, Homo sapiens
  misc_RNA (1)...(19): siRNA sense strand
uuacuaaggacgagcugau

SEQ ID NO: 2410706 - RNA, 19 nt, Homo sapiens
  misc_RNA (1)...(19): siRNA sense strand
caaguauaugacugaagaa

SEQ ID NO: 2410707 - RNA, 19 nt, Homo sapiens
  misc_RNA (1)...(19): siRNA sense strand
cauuugaagucuuugacca

SEQ ID NO: 2410708 - RNA, 19 nt, Homo sapiens
  misc_RNA (1)...(19): siRNA sense strand
cggacgagaaggacaggga

SEQ ID NO: 2410709 - RNA, 19 nt, Homo sapiens
  misc_RNA (1)...(19): siRNA sense strand
gagaagagaaggaggagga

SEQ ID NO: 2410710 - RNA, 19 nt, Homo sapiens
  misc_RNA (1)...(19): siRNA sense strand
guuuauaagcaguaugaca

SEQ ID NO: 2410711 - RNA, 19 nt, Homo sapiens
  misc_RNA (1)...(19): siRNA sense strand
aggaggaggaagaaauauu

SEQ ID NO: 2410712 - RNA, 19 nt, Homo sapiens
  misc_RNA (1)...(19): siRNA sense strand
aguuggaggaauugugaau

SEQ ID NO: 2410713 - RNA, 19 nt, Homo sapiens
  misc_RNA (1)...(19): siRNA sense strand
uuuaaguaucuguggaaca

SEQ ID NO: 2410714 - RNA, 19 nt, Homo sapiens
  misc_RNA (1)...(19): siRNA sense strand
ucagagaagagaaggagga

SEQ ID NO: 2410715 - RNA, 19 nt, Homo sapiens
  misc_RNA (1)...(19): siRNA sense strand
aggagcagaucgaggucuu

SEQ ID NO: 2410716 - RNA, 19 nt, Homo sapiens
  misc_RNA (1)...(19): siRNA sense strand
ggauagagauagagauggc

SEQ ID NO: 2410717 - RNA, 19 nt, Homo sapiens
  misc_RNA (1)...(19): siRNA sense strand
ggaagaaauauuggaggga

SEQ ID NO: 2410718 - RNA, 19 nt, Homo sapiens
  misc_RNA (1)...(19): siRNA sense strand
gaagaaauauuggagggau

SEQ ID NO: 2410719 - RNA, 19 nt, Homo sapiens
  misc_RNA (1)...(19): siRNA sense strand
augcuaaugaagauggaga

SEQ ID NO: 2410720 - RNA, 19 nt, Homo sapiens
  misc_RNA (1)...(19): siRNA sense strand
cuggauagagauagagaug

SEQ ID NO: 2410721 - RNA, 19 nt, Homo sapiens
  misc_RNA (1)...(19): siRNA sense strand
cggaguuaccggagcggaa

SEQ ID NO: 2410722 - RNA, 19 nt, Homo sapiens
  misc_RNA (1)...(19): siRNA sense strand
agaccauggaugugcggaa

SEQ ID NO: 2410723 - RNA, 19 nt, Homo sapiens
  misc_RNA (1)...(19): siRNA sense strand
aguacugggaucagcgcua

SEQ ID NO: 2410724 - RNA, 19 nt, Homo sapiens
  misc_RNA (1)...(19): siRNA sense strand
gauuuaauguggauggcaa

SEQ ID NO: 2410725 - RNA, 19 nt, Homo sapiens
  misc_RNA (1)...(19): siRNA sense strand
gggacaaggcggugguucu

SEQ ID NO: 2410726 - RNA, 19 nt, Homo sapiens
  misc_RNA (1)...(19): siRNA sense strand
ggccauaagaaccaggaau

SEQ ID NO: 2410727 - RNA, 19 nt, Homo sapiens
  misc_RNA (1)...(19): siRNA sense strand
aguacaagggccauaagaa

SEQ ID NO: 2410728 - RNA, 19 nt, Homo sapiens
  misc_RNA (1)...(19): siRNA sense strand
ggacaaagacacaggggag

SEQ ID NO: 2410729 - RNA, 19 nt, Homo sapiens
  misc_RNA (1)...(19): siRNA sense strand
gugugaaggugucagacca

SEQ ID NO: 2410730 - RNA, 19 nt, Homo sapiens
  misc_RNA (1)...(19): siRNA sense strand
gcuccuggacaaagacaca

SEQ ID NO: 2410731 - RNA, 19 nt, Homo sapiens
  misc_RNA (1)...(19): siRNA sense strand
agcuagaaacauugggaaa

SEQ ID NO: 2410732 - RNA, 19 nt, Homo sapiens
  misc_RNA (1)...(19): siRNA sense strand
ccaugguugaagagggaaa

SEQ ID NO: 2410733 - RNA, 19 nt, Homo sapiens
  misc_RNA (1)...(19): siRNA sense strand
ugaacagaguagaagaaaa

SEQ ID NO: 2410734 - RNA, 19 nt, Homo sapiens
  misc_RNA (1)...(19): siRNA sense strand
guuaaaagagcuagaaaca

SEQ ID NO: 2410735 - RNA, 19 nt, Homo sapiens
  misc_RNA (1)...(19): siRNA sense strand
cggaacagaucuaacccaa

SEQ ID NO: 2410736 - RNA, 19 nt, Homo sapiens
  misc_RNA (1)...(19): siRNA sense strand
caaacaucucaaagaggaa

SEQ ID NO: 2410737 - RNA, 19 nt, Homo sapiens
  misc_RNA (1)...(19): siRNA sense strand
acacuaugguuuuggacaa

SEQ ID NO: 2410738 - RNA, 19 nt, Homo sapiens
  misc_RNA (1)...(19): siRNA sense strand
aaacauugggaaaggacuu

SEQ ID NO: 2410739 - RNA, 19 nt, Homo sapiens
  misc_RNA (1)...(19): siRNA sense strand
acugaacagaguagaagaa

SEQ ID NO: 2410740 - RNA, 19 nt, Homo sapiens
  misc_RNA (1)...(19): siRNA sense strand
agaauuugucugugaaagu

SEQ ID NO: 2410741 - RNA, 19 nt, Homo sapiens
  misc_RNA (1)...(19): siRNA sense strand
gagcuagaaacauugggaa

SEQ ID NO: 2410742 - RNA, 19 nt, Homo sapiens
  misc_RNA (1)...(19): siRNA sense strand
cugagaagcagaaugcaga

SEQ ID NO: 2410743 - RNA, 19 nt, Homo sapiens
  misc_RNA (1)...(19): siRNA sense strand
aggaacaggguuuagugaa

SEQ ID NO: 2410744 - RNA, 19 nt, Homo sapiens
  misc_RNA (1)...(19): siRNA sense strand
agcagaaugcagaaggaga

SEQ ID NO: 2410745 - RNA, 19 nt, Homo sapiens
  misc_RNA (1)...(19): siRNA sense strand
ggagauuaaacgaggaaaa

SEQ ID NO: 2410746 - RNA, 19 nt, Homo sapiens
  misc_RNA (1)...(19): siRNA sense strand
aaaugaagcacgaggaaaa

SEQ ID NO: 2410747 - RNA, 19 nt, Homo sapiens
  misc_RNA (1)...(19): siRNA sense strand
agcucaaauacgagagaaa

SEQ ID NO: 2410748 - RNA, 19 nt, Homo sapiens
  misc_RNA (1)...(19): siRNA sense strand
ccuacaagacagcgcaaau

SEQ ID NO: 2410749 - RNA, 19 nt, Homo sapiens
  misc_RNA (1)...(19): siRNA sense strand
ggaagaaaaugaagcacga

SEQ ID NO: 2410750 - RNA, 19 nt, Homo sapiens
  misc_RNA (1)...(19): siRNA sense strand
aagaaaagucgcaaaggaa

SEQ ID NO: 2410751 - RNA, 19 nt, Homo sapiens
  misc_RNA (1)...(19): siRNA sense strand
uaaugaaagucuuggugga

SEQ ID NO: 2410752 - RNA, 19 nt, Homo sapiens
  misc_RNA (1)...(19): siRNA sense strand
uguaagucaaauagagaca

SEQ ID NO: 2410753 - RNA, 19 nt, Homo sapiens
  misc_RNA (1)...(19): siRNA sense strand
ccacacagaagcagcccua

SEQ ID NO: 2410754 - RNA, 19 nt, Homo sapiens
  misc_RNA (1)...(19): siRNA sense strand
ccuagugacaccaggccua

SEQ ID NO: 2410755 - RNA, 19 nt, Homo sapiens
  misc_RNA (1)...(19): siRNA sense strand
cuguacuucaggagauuaa

SEQ ID NO: 2410756 - RNA, 19 nt, Homo sapiens
  misc_RNA (1)...(19): siRNA sense strand
aauugguugugaugugaaa

SEQ ID NO: 2410757 - RNA, 19 nt, Homo sapiens
  misc_RNA (1)...(19): siRNA sense strand
caggagauuaaacgaggaa

SEQ ID NO: 2410758 - RNA, 19 nt, Homo sapiens
  misc_RNA (1)...(19): siRNA sense strand
auguaggggaggaagaaaa

SEQ ID NO: 2410759 - RNA, 19 nt, Homo sapiens
  misc_RNA (1)...(19): siRNA sense strand
agacaaggaauguggacag

SEQ ID NO: 2410760 - RNA, 19 nt, Homo sapiens
  misc_RNA (1)...(19): siRNA sense strand
ggagauuaaacgaggaaaa

SEQ ID NO: 2410761 - RNA, 19 nt, Homo sapiens
  misc_RNA (1)...(19): siRNA sense strand
aaaugaagcacgaggaaaa

SEQ ID NO: 2410762 - RNA, 19 nt, Homo sapiens
  misc_RNA (1)...(19): siRNA sense strand
agcucaaauacgagagaaa

SEQ ID NO: 2410763 - RNA, 19 nt, Homo sapiens
  misc_RNA (1)...(19): siRNA sense strand
ccuacaagacagcgcaaau

SEQ ID NO: 2410764 - RNA, 19 nt, Homo sapiens
  misc_RNA (1)...(19): siRNA sense strand
ggaagaaaaugaagcacga

SEQ ID NO: 2410765 - RNA, 19 nt, Homo sapiens
  misc_RNA (1)...(19): siRNA sense strand
aagaaaagucgcaaaggaa

SEQ ID NO: 2410766 - RNA, 19 nt, Homo sapiens
  misc_RNA (1)...(19): siRNA sense strand
uaaugaaagucuuggugga

SEQ ID NO: 2410767 - RNA, 19 nt, Homo sapiens
  misc_RNA (1)...(19): siRNA sense strand
uguaagucaaauagagaca

SEQ ID NO: 2410768 - RNA, 19 nt, Homo sapiens
  misc_RNA (1)...(19): siRNA sense strand
ccacacagaagcagcccua

SEQ ID NO: 2410769 - RNA, 19 nt, Homo sapiens
  misc_RNA (1)...(19): siRNA sense strand
ccuagugacaccaggccua

SEQ ID NO: 2410770 - RNA, 19 nt, Homo sapiens
  misc_RNA (1)...(19): siRNA sense strand
cuguacuucaggagauuaa

SEQ ID NO: 2410771 - RNA, 19 nt, Homo sapiens
  misc_RNA (1)...(19): siRNA sense strand
aauugguugugaugugaaa

SEQ ID NO: 2410772 - RNA, 19 nt, Homo sapiens
  misc_RNA (1)...(19): siRNA sense strand
caggagauuaaacgaggaa

SEQ ID NO: 2410773 - RNA, 19 nt, Homo sapiens
  misc_RNA (1)...(19): siRNA sense strand
auguaggggaggaagaaaa

SEQ ID NO: 2410774 - RNA, 19 nt, Homo sapiens
  misc_RNA (1)...(19): siRNA sense strand
agacaaggaauguggacag

SEQ ID NO: 2410775 - RNA, 19 nt, Homo sapiens
  misc_RNA (1)...(19): siRNA sense strand
ccagagaguucauggcgaa

SEQ ID NO: 2410776 - RNA, 19 nt, Homo sapiens
  misc_RNA (1)...(19): siRNA sense strand
acagaugagcagagggacu

SEQ ID NO: 2410777 - RNA, 19 nt, Homo sapiens
  misc_RNA (1)...(19): siRNA sense strand
acacagaugagcagaggga

SEQ ID NO: 2410778 - RNA, 19 nt, Homo sapiens
  misc_RNA (1)...(19): siRNA sense strand
aagaaaacauacugguaga

SEQ ID NO: 2410779 - RNA, 19 nt, Homo sapiens
  misc_RNA (1)...(19): siRNA sense strand
gagcagagggacuacguga

SEQ ID NO: 2410780 - RNA, 19 nt, Homo sapiens
  misc_RNA (1)...(19): siRNA sense strand
ugagagaacgacaagaaaa

SEQ ID NO: 2410781 - RNA, 19 nt, Homo sapiens
  misc_RNA (1)...(19): siRNA sense strand
caccaaauggagauggaga

SEQ ID NO: 2410782 - RNA, 19 nt, Homo sapiens
  misc_RNA (1)...(19): siRNA sense strand
uggcgaacacagaguccua

SEQ ID NO: 2410783 - RNA, 19 nt, Homo sapiens
  misc_RNA (1)...(19): siRNA sense strand
ccucaugaagauagagaag

SEQ ID NO: 2410784 - RNA, 19 nt, Homo sapiens
  misc_RNA (1)...(19): siRNA sense strand
aaguggauuuccugggaca

SEQ ID NO: 2410785 - RNA, 19 nt, Homo sapiens
  misc_RNA (1)...(19): siRNA sense strand
ucugagagugagagaacga

SEQ ID NO: 2410786 - RNA, 19 nt, Homo sapiens
  misc_RNA (1)...(19): siRNA sense strand
ccaaaagggaggaccugaa

SEQ ID NO: 2410787 - RNA, 19 nt, Homo sapiens
  misc_RNA (1)...(19): siRNA sense strand
agauagagauaaauggaca

SEQ ID NO: 2410788 - RNA, 19 nt, Homo sapiens
  misc_RNA (1)...(19): siRNA sense strand
caguaauggagaaacccua

SEQ ID NO: 2410789 - RNA, 19 nt, Homo sapiens
  misc_RNA (1)...(19): siRNA sense strand
ugccuuugagauagagaua

SEQ ID NO: 2410790 - RNA, 19 nt, Homo sapiens
  misc_RNA (1)...(19): siRNA sense strand
agagauaaauggacagcug

SEQ ID NO: 2410791 - RNA, 19 nt, Homo sapiens
  misc_RNA (1)...(19): siRNA sense strand
cagcaaagcuugaaagagg

SEQ ID NO: 2410792 - RNA, 19 nt, Homo sapiens
  misc_RNA (1)...(19): siRNA sense strand
ccuauguaguggagccgaa

SEQ ID NO: 2410793 - RNA, 19 nt, Homo sapiens
  misc_RNA (1)...(19): siRNA sense strand
cguuugagaaagagaagca

SEQ ID NO: 2410794 - RNA, 19 nt, Homo sapiens
  misc_RNA (1)...(19): siRNA sense strand
uguugagggccaagggaga

SEQ ID NO: 2410795 - RNA, 19 nt, Homo sapiens
  misc_RNA (1)...(19): siRNA sense strand
ccacaagggcuuuggcaag

SEQ ID NO: 2410796 - RNA, 19 nt, Homo sapiens
  misc_RNA (1)...(19): siRNA sense strand
gagaaagagaagcaggacu

SEQ ID NO: 2410797 - RNA, 19 nt, Homo sapiens
  misc_RNA (1)...(19): siRNA sense strand
cuaugagggcacugaggau

SEQ ID NO: 2410798 - RNA, 19 nt, Homo sapiens
  misc_RNA (1)...(19): siRNA sense strand
cagguggcaaagagggaaa

SEQ ID NO: 2410799 - RNA, 19 nt, Homo sapiens
  misc_RNA (1)...(19): siRNA sense strand
gcaaagagggaaagagagg

SEQ ID NO: 2410800 - RNA, 19 nt, Homo sapiens
  misc_RNA (1)...(19): siRNA sense strand
aagaaugcugagauguaua

SEQ ID NO: 2410801 - RNA, 19 nt, Homo sapiens
  misc_RNA (1)...(19): siRNA sense strand
gcuggagagcagagaggca

SEQ ID NO: 2410802 - RNA, 19 nt, Homo sapiens
  misc_RNA (1)...(19): siRNA sense strand
ggaugaaggagggugucaa

SEQ ID NO: 2410803 - RNA, 19 nt, Homo sapiens
  misc_RNA (1)...(19): siRNA sense strand
gcaucagccaugaggagca

SEQ ID NO: 2410804 - RNA, 19 nt, Homo sapiens
  misc_RNA (1)...(19): siRNA sense strand
ggagauugcccgagacgga

SEQ ID NO: 2410805 - RNA, 19 nt, Homo sapiens
  misc_RNA (1)...(19): siRNA sense strand
agaucugugaugaggugaa

SEQ ID NO: 2410806 - RNA, 19 nt, Homo sapiens
  misc_RNA (1)...(19): siRNA sense strand
gugcggagauugcccgaga

SEQ ID NO: 2410807 - RNA, 19 nt, Homo sapiens
  misc_RNA (1)...(19): siRNA sense strand
cugagaaagccaagaagau

SEQ ID NO: 2410808 - RNA, 19 nt, Homo sapiens
  misc_RNA (1)...(19): siRNA sense strand
aguuagaggacuuggaguu

SEQ ID NO: 2410809 - RNA, 19 nt, Homo sapiens
  misc_RNA (1)...(19): siRNA sense strand
aaacguaaccugaagcgaa

SEQ ID NO: 2410810 - RNA, 19 nt, Homo sapiens
  misc_RNA (1)...(19): siRNA sense strand
agcaaagagcagcuagaaa

SEQ ID NO: 2410811 - RNA, 19 nt, Homo sapiens
  misc_RNA (1)...(19): siRNA sense strand
gcagaggccuugagcagga

SEQ ID NO: 2410812 - RNA, 19 nt, Homo sapiens
  misc_RNA (1)...(19): siRNA sense strand
cgcuagaagaggaguuaga

SEQ ID NO: 2410813 - RNA, 19 nt, Homo sapiens
  misc_RNA (1)...(19): siRNA sense strand
ccagcaaagagcagcuaga

SEQ ID NO: 2410814 - RNA, 19 nt, Homo sapiens
  misc_RNA (1)...(19): siRNA sense strand
aggcaaguauaucgcguca

SEQ ID NO: 2410815 - RNA, 19 nt, Homo sapiens
  misc_RNA (1)...(19): siRNA sense strand
uagaagaggaguuagagga

SEQ ID NO: 2410816 - RNA, 19 nt, Homo sapiens
  misc_RNA (1)...(19): siRNA sense strand
accugaagcgaaaggagaa

SEQ ID NO: 2410817 - RNA, 19 nt, Homo sapiens
  misc_RNA (1)...(19): siRNA sense strand
cagccaguguggaggccaa

SEQ ID NO: 2410818 - RNA, 19 nt, Homo sapiens
  misc_RNA (1)...(19): siRNA sense strand
acgcucagaaacagggaaa

SEQ ID NO: 2410819 - RNA, 19 nt, Homo sapiens
  misc_RNA (1)...(19): siRNA sense strand
gaggaugauuacagggacu

SEQ ID NO: 2410820 - RNA, 19 nt, Homo sapiens
  misc_RNA (1)...(19): siRNA sense strand
uccuaaugauggugaugaa

SEQ ID NO: 2410821 - RNA, 19 nt, Homo sapiens
  misc_RNA (1)...(19): siRNA sense strand
gggaagugauacugaggag

SEQ ID NO: 2410822 - RNA, 19 nt, Homo sapiens
  misc_RNA (1)...(19): siRNA sense strand
uguggaggccaaaggauau

SEQ ID NO: 2410823 - RNA, 19 nt, Homo sapiens
  misc_RNA (1)...(19): siRNA sense strand
cgcaggacgcucagaaaca

SEQ ID NO: 2410824 - RNA, 19 nt, Homo sapiens
  misc_RNA (1)...(19): siRNA sense strand
cuaaugauggugaugaaaa

SEQ ID NO: 2410825 - RNA, 19 nt, Homo sapiens
  misc_RNA (1)...(19): siRNA sense strand
ccaaagacguagacuggac

SEQ ID NO: 2410826 - RNA, 19 nt, Homo sapiens
  misc_RNA (1)...(19): siRNA sense strand
aggagcagauuuugaggua

SEQ ID NO: 2410827 - RNA, 19 nt, Homo sapiens
  misc_RNA (1)...(19): siRNA sense strand
ccuuaaagacacagcugaa

SEQ ID NO: 2410828 - RNA, 19 nt, Homo sapiens
  misc_RNA (1)...(19): siRNA sense strand
gaugagaaauuuaagcaga

SEQ ID NO: 2410829 - RNA, 19 nt, Homo sapiens
  misc_RNA (1)...(19): siRNA sense strand
gauugugagaacagugaaa

SEQ ID NO: 2410830 - RNA, 19 nt, Homo sapiens
  misc_RNA (1)...(19): siRNA sense strand
uggaggauuuagagaggga

SEQ ID NO: 2410831 - RNA, 19 nt, Homo sapiens
  misc_RNA (1)...(19): siRNA sense strand
ccuaaaagugauugugaga

SEQ ID NO: 2410832 - RNA, 19 nt, Homo sapiens
  misc_RNA (1)...(19): siRNA sense strand
agaucuggguucagcaaca

SEQ ID NO: 2410833 - RNA, 19 nt, Homo sapiens
  misc_RNA (1)...(19): siRNA sense strand
gcagaaugggaguacucaa

SEQ ID NO: 2410834 - RNA, 19 nt, Homo sapiens
  misc_RNA (1)...(19): siRNA sense strand
gccaagaauuguuucguca

SEQ ID NO: 2410835 - RNA, 19 nt, Homo sapiens
  misc_RNA (1)...(19): siRNA sense strand
uaucauagcugcugaggcu

SEQ ID NO: 2410836 - RNA, 19 nt, Homo sapiens
  misc_RNA (1)...(19): siRNA sense strand
ucuuagaacugcugguacu

SEQ ID NO: 2410837 - RNA, 19 nt, Homo sapiens
  misc_RNA (1)...(19): siRNA sense strand
uccagaaagcggcgaggaa

SEQ ID NO: 2410838 - RNA, 19 nt, Homo sapiens
  misc_RNA (1)...(19): siRNA sense strand
cagugaaacagcaacaaaa

SEQ ID NO: 2410839 - RNA, 19 nt, Homo sapiens
  misc_RNA (1)...(19): siRNA sense strand
agugaaaguagaagauaac

SEQ ID NO: 2410840 - RNA, 19 nt, Homo sapiens
  misc_RNA (1)...(19): siRNA sense strand
ggaauuaaguuguccagac

SEQ ID NO: 2410841 - RNA, 19 nt, Homo sapiens
  misc_RNA (1)...(19): siRNA sense strand
uggagcaguuccugagcau

SEQ ID NO: 2410842 - RNA, 19 nt, Homo sapiens
  misc_RNA (1)...(19): siRNA sense strand
cgggaaagucaaaggggaa

SEQ ID NO: 2410843 - RNA, 19 nt, Homo sapiens
  misc_RNA (1)...(19): siRNA sense strand
cggaaggagaacugcaaau

SEQ ID NO: 2410844 - RNA, 19 nt, Homo sapiens
  misc_RNA (1)...(19): siRNA sense strand
cggaccagaagucgggaaa

SEQ ID NO: 2410845 - RNA, 19 nt, Homo sapiens
  misc_RNA (1)...(19): siRNA sense strand
acgaauacucggaccagaa

SEQ ID NO: 2410846 - RNA, 19 nt, Homo sapiens
  misc_RNA (1)...(19): siRNA sense strand
cgaccuagacaaaggguuc

SEQ ID NO: 2410847 - RNA, 19 nt, Homo sapiens
  misc_RNA (1)...(19): siRNA sense strand
ccgaauccugcuuuggaaa

SEQ ID NO: 2410848 - RNA, 19 nt, Homo sapiens
  misc_RNA (1)...(19): siRNA sense strand
aggacauccagcuagauua

SEQ ID NO: 2410849 - RNA, 19 nt, Homo sapiens
  misc_RNA (1)...(19): siRNA sense strand
acaugaugcccgaggagaa

SEQ ID NO: 2410850 - RNA, 19 nt, Homo sapiens
  misc_RNA (1)...(19): siRNA sense strand
cagaagaaggcccuggaga

SEQ ID NO: 2410851 - RNA, 19 nt, Homo sapiens
  misc_RNA (1)...(19): siRNA sense strand
ggaagaaagaggagaggca

SEQ ID NO: 2410852 - RNA, 19 nt, Homo sapiens
  misc_RNA (1)...(19): siRNA sense strand
uuucagaagacgaggcaga

SEQ ID NO: 2410853 - RNA, 19 nt, Homo sapiens
  misc_RNA (1)...(19): siRNA sense strand
ccgaacuggcccuggacua

SEQ ID NO: 2410854 - RNA, 19 nt, Homo sapiens
  misc_RNA (1)...(19): siRNA sense strand
uccugaagugacagagaaa

SEQ ID NO: 2410855 - RNA, 19 nt, Homo sapiens
  misc_RNA (1)...(19): siRNA sense strand
cuggaaaggaagcugaaaa

SEQ ID NO: 2410856 - RNA, 19 nt, Homo sapiens
  misc_RNA (1)...(19): siRNA sense strand
gcaaaacagaagagaaaag

SEQ ID NO: 2410857 - RNA, 19 nt, Homo sapiens
  misc_RNA (1)...(19): siRNA sense strand
ugaagaaggcgucagcaga

SEQ ID NO: 2410858 - RNA, 19 nt, Homo sapiens
  misc_RNA (1)...(19): siRNA sense strand
cagcauugugagagcgaaa

SEQ ID NO: 2410859 - RNA, 19 nt, Homo sapiens
  misc_RNA (1)...(19): siRNA sense strand
ggagaagauaagaaggcuu

SEQ ID NO: 2410860 - RNA, 19 nt, Homo sapiens
  misc_RNA (1)...(19): siRNA sense strand
acaacaauuaggaaggcaa

SEQ ID NO: 2410861 - RNA, 19 nt, Homo sapiens
  misc_RNA (1)...(19): siRNA sense strand
augagauggagguggacua

SEQ ID NO: 2410862 - RNA, 19 nt, Homo sapiens
  misc_RNA (1)...(19): siRNA sense strand
acgaugagauggaggugga

SEQ ID NO: 2410863 - RNA, 19 nt, Homo sapiens
  misc_RNA (1)...(19): siRNA sense strand
aagaaggcuugaagaggau

SEQ ID NO: 2410864 - RNA, 19 nt, Homo sapiens
  misc_RNA (1)...(19): siRNA sense strand
uaagaaggcuugaagagga

SEQ ID NO: 2410865 - RNA, 19 nt, Homo sapiens
  misc_RNA (1)...(19): siRNA sense strand
gugaacuagaggagaagau

SEQ ID NO: 2410866 - RNA, 19 nt, Homo sapiens
  misc_RNA (1)...(19): siRNA sense strand
cuagaggagaagauaagaa

SEQ ID NO: 2410867 - RNA, 19 nt, Homo sapiens
  misc_RNA (1)...(19): siRNA sense strand
uggcaacuuuacaggaaaa

SEQ ID NO: 2410868 - RNA, 19 nt, Homo sapiens
  misc_RNA (1)...(19): siRNA sense strand
augauacaguccagaguga

SEQ ID NO: 2410869 - RNA, 19 nt, Homo sapiens
  misc_RNA (1)...(19): siRNA sense strand
cuggcaacuuuacaggaaa

SEQ ID NO: 2410870 - RNA, 19 nt, Homo sapiens
  misc_RNA (1)...(19): siRNA sense strand
ugguauauacguggacaaa

SEQ ID NO: 2410871 - RNA, 19 nt, Homo sapiens
  misc_RNA (1)...(19): siRNA sense strand
acugagagcucgucggucu

SEQ ID NO: 2410872 - RNA, 19 nt, Homo sapiens
  misc_RNA (1)...(19): siRNA sense strand
uuaugauggugaaugguau

SEQ ID NO: 2410873 - RNA, 19 nt, Homo sapiens
  misc_RNA (1)...(19): siRNA sense strand
agacugugaaagaagaaga

SEQ ID NO: 2410874 - RNA, 19 nt, Homo sapiens
  misc_RNA (1)...(19): siRNA sense strand
gcaggaaucuauagagagc

SEQ ID NO: 2410875 - RNA, 19 nt, Homo sapiens
  misc_RNA (1)...(19): siRNA sense strand
uggaaaagcaccagaauac

SEQ ID NO: 2410876 - RNA, 19 nt, Homo sapiens
  misc_RNA (1)...(19): siRNA sense strand
cuugaagaggauaggcaca

SEQ ID NO: 2410877 - RNA, 19 nt, Homo sapiens
  misc_RNA (1)...(19): siRNA sense strand
gacuauauuaugaugguga

SEQ ID NO: 2410878 - RNA, 19 nt, Homo sapiens
  misc_RNA (1)...(19): siRNA sense strand
uaugauggugaaugguaua

SEQ ID NO: 2410879 - RNA, 19 nt, Homo sapiens
  misc_RNA (1)...(19): siRNA sense strand
ccaugaugaaguuugguuu

SEQ ID NO: 2410880 - RNA, 19 nt, Homo sapiens
  misc_RNA (1)...(19): siRNA sense strand
acaagaagucauagcugga

SEQ ID NO: 2410881 - RNA, 19 nt, Homo sapiens
  misc_RNA (1)...(19): siRNA sense strand
cagcauugauauuaccuca

SEQ ID NO: 2410882 - RNA, 19 nt, Homo sapiens
  misc_RNA (1)...(19): siRNA sense strand
agauaagaaggcuugaaga

SEQ ID NO: 2410883 - RNA, 19 nt, Homo sapiens
  misc_RNA (1)...(19): siRNA sense strand
ugcuagaucugaagaggga

SEQ ID NO: 2410884 - RNA, 19 nt, Homo sapiens
  misc_RNA (1)...(19): siRNA sense strand
acgucaagcuacagcgaaa

SEQ ID NO: 2410885 - RNA, 19 nt, Homo sapiens
  misc_RNA (1)...(19): siRNA sense strand
gaacugaggaagaaaggga

SEQ ID NO: 2410886 - RNA, 19 nt, Homo sapiens
  misc_RNA (1)...(19): siRNA sense strand
cccuacagcaggagcacaa

SEQ ID NO: 2410887 - RNA, 19 nt, Homo sapiens
  misc_RNA (1)...(19): siRNA sense strand
agugguuggauaagagcaa

SEQ ID NO: 2410888 - RNA, 19 nt, Homo sapiens
  misc_RNA (1)...(19): siRNA sense strand
ugaacugacuaauggggaa

SEQ ID NO: 2410889 - RNA, 19 nt, Homo sapiens
  misc_RNA (1)...(19): siRNA sense strand
agcacaaggccgagaucau

SEQ ID NO: 2410890 - RNA, 19 nt, Homo sapiens
  misc_RNA (1)...(19): siRNA sense strand
ccaggaguggccagaacaa

SEQ ID NO: 2410891 - RNA, 19 nt, Homo sapiens
  misc_RNA (1)...(19): siRNA sense strand
caggaauggcccagggaau

SEQ ID NO: 2410892 - RNA, 19 nt, Homo sapiens
  misc_RNA (1)...(19): siRNA sense strand
aggaagagaagcagcgaau

SEQ ID NO: 2410893 - RNA, 19 nt, Homo sapiens
  misc_RNA (1)...(19): siRNA sense strand
augcagaggaagagaagca

SEQ ID NO: 2410894 - RNA, 19 nt, Homo sapiens
  misc_RNA (1)...(19): siRNA sense strand
gcaaccagcucguggcacu

SEQ ID NO: 2410895 - RNA, 19 nt, Homo sapiens
  misc_RNA (1)...(19): siRNA sense strand
gcaaagaggaagaccgccu

SEQ ID NO: 2410896 - RNA, 19 nt, Homo sapiens
  misc_RNA (1)...(19): siRNA sense strand
cacaagagcuggcgcagga

SEQ ID NO: 2410897 - RNA, 19 nt, Homo sapiens
  misc_RNA (1)...(19): siRNA sense strand
acugacaugcagaggaaga

SEQ ID NO: 2410898 - RNA, 19 nt, Homo sapiens
  misc_RNA (1)...(19): siRNA sense strand
ccagugaagaggagcagga

SEQ ID NO: 2410899 - RNA, 19 nt, Homo sapiens
  misc_RNA (1)...(19): siRNA sense strand
gaggaagagaagcagcgaa

SEQ ID NO: 2410900 - RNA, 19 nt, Homo sapiens
  misc_RNA (1)...(19): siRNA sense strand
uguccuuccuggaggcaga

SEQ ID NO: 2410901 - RNA, 19 nt, Homo sapiens
  misc_RNA (1)...(19): siRNA sense strand
gccaggaagcucugaggau

SEQ ID NO: 2410902 - RNA, 19 nt, Homo sapiens
  misc_RNA (1)...(19): siRNA sense strand
uggacagaguauggagaga

SEQ ID NO: 2410903 - RNA, 19 nt, Homo sapiens
  misc_RNA (1)...(19): siRNA sense strand
ccauugaggugcagaggga

SEQ ID NO: 2410904 - RNA, 19 nt, Homo sapiens
  misc_RNA (1)...(19): siRNA sense strand
caugacagauggacggaca

SEQ ID NO: 2410905 - RNA, 19 nt, Homo sapiens
  misc_RNA (1)...(19): siRNA sense strand
gggcagucaagcagcaaga

SEQ ID NO: 2410906 - RNA, 19 nt, Homo sapiens
  misc_RNA (1)...(19): siRNA sense strand
ucaacaagacuaugcgcau

SEQ ID NO: 2410907 - RNA, 19 nt, Homo sapiens
  misc_RNA (1)...(19): siRNA sense strand
auugaggugcagagggaga

SEQ ID NO: 2410908 - RNA, 19 nt, Homo sapiens
  misc_RNA (1)...(19): siRNA sense strand
gagcauuaccaaagagaca

SEQ ID NO: 2410909 - RNA, 19 nt, Homo sapiens
  misc_RNA (1)...(19): siRNA sense strand
acauaagauacaaggagaa

SEQ ID NO: 2410910 - RNA, 19 nt, Homo sapiens
  misc_RNA (1)...(19): siRNA sense strand
gaaugugagcagagugaau

SEQ ID NO: 2410911 - RNA, 19 nt, Homo sapiens
  misc_RNA (1)...(19): siRNA sense strand
gagggaaugaggagagaga

SEQ ID NO: 2410912 - RNA, 19 nt, Homo sapiens
  misc_RNA (1)...(19): siRNA sense strand
gggaaugaggagagagauc

SEQ ID NO: 2410913 - RNA, 19 nt, Homo sapiens
  misc_RNA (1)...(19): siRNA sense strand
agaagauggcugaguguga

SEQ ID NO: 2410914 - RNA, 19 nt, Homo sapiens
  misc_RNA (1)...(19): siRNA sense strand
caaauguuguauaaggcaa

SEQ ID NO: 2410915 - RNA, 19 nt, Homo sapiens
  misc_RNA (1)...(19): siRNA sense strand
aaguucagcaccagagaaa

SEQ ID NO: 2410916 - RNA, 19 nt, Homo sapiens
  misc_RNA (1)...(19): siRNA sense strand
aguagaaggcuuuaagaca

SEQ ID NO: 2410917 - RNA, 19 nt, Homo sapiens
  misc_RNA (1)...(19): siRNA sense strand
uuguauaaggcaacaguua

SEQ ID NO: 2410918 - RNA, 19 nt, Homo sapiens
  misc_RNA (1)...(19): siRNA sense strand
gugaaugugagcagaguga

SEQ ID NO: 2410919 - RNA, 19 nt, Homo sapiens
  misc_RNA (1)...(19): siRNA sense strand
cagagaaaucagaacaaaa

SEQ ID NO: 2410920 - RNA, 19 nt, Homo sapiens
  misc_RNA (1)...(19): siRNA sense strand
ccgaagaucgucuggccaa

SEQ ID NO: 2410921 - RNA, 19 nt, Homo sapiens
  misc_RNA (1)...(19): siRNA sense strand
cacauaagauacaaggaga

SEQ ID NO: 2410922 - RNA, 19 nt, Homo sapiens
  misc_RNA (1)...(19): siRNA sense strand
ugcccgaauucgugaggaa

SEQ ID NO: 2410923 - RNA, 19 nt, Homo sapiens
  misc_RNA (1)...(19): siRNA sense strand
caucgaggacagacggauu

SEQ ID NO: 2410924 - RNA, 19 nt, Homo sapiens
  misc_RNA (1)...(19): siRNA sense strand
guguaagaagaaagaagau

SEQ ID NO: 2410925 - RNA, 19 nt, Homo sapiens
  misc_RNA (1)...(19): siRNA sense strand
acugaaagacuuggagcaa

SEQ ID NO: 2410926 - RNA, 19 nt, Homo sapiens
  misc_RNA (1)...(19): siRNA sense strand
aggcagaaaaugaggacuu

SEQ ID NO: 2410927 - RNA, 19 nt, Homo sapiens
  misc_RNA (1)...(19): siRNA sense strand
agucauggaugcuugaaaa

SEQ ID NO: 2410928 - RNA, 19 nt, Homo sapiens
  misc_RNA (1)...(19): siRNA sense strand
gcacuaacaagauggggaa

SEQ ID NO: 2410929 - RNA, 19 nt, Homo sapiens
  misc_RNA (1)...(19): siRNA sense strand
augaggacuugcugaagaa

SEQ ID NO: 2410930 - RNA, 19 nt, Homo sapiens
  misc_RNA (1)...(19): siRNA sense strand
agaacaaauugaagggcuc

SEQ ID NO: 2410931 - RNA, 19 nt, Homo sapiens
  misc_RNA (1)...(19): siRNA sense strand
cgaagaucgucuggccaaa

SEQ ID NO: 2410932 - RNA, 19 nt, Homo sapiens
  misc_RNA (1)...(19): siRNA sense strand
gggugcaguguaagaagaa

SEQ ID NO: 2410933 - RNA, 19 nt, Homo sapiens
  misc_RNA (1)...(19): siRNA sense strand
agaccaaacuuucucgaga

SEQ ID NO: 2410934 - RNA, 19 nt, Homo sapiens
  misc_RNA (1)...(19): siRNA sense strand
aggacuugcugaagaaacu

SEQ ID NO: 2410935 - RNA, 19 nt, Homo sapiens
  misc_RNA (1)...(19): siRNA sense strand
gagaacaaauugaagggcu

SEQ ID NO: 2410936 - RNA, 19 nt, Homo sapiens
  misc_RNA (1)...(19): siRNA sense strand
aaauacaaguucagcacca

SEQ ID NO: 2410937 - RNA, 19 nt, Homo sapiens
  misc_RNA (1)...(19): siRNA sense strand
cuugugaaggacagcauaa

SEQ ID NO: 2410938 - RNA, 19 nt, Homo sapiens
  misc_RNA (1)...(19): siRNA sense strand
acggauucaccuugaggaa

SEQ ID NO: 2410939 - RNA, 19 nt, Homo sapiens
  misc_RNA (1)...(19): siRNA sense strand
gaaugaggagagagaucuu

SEQ ID NO: 2410940 - RNA, 19 nt, Homo sapiens
  misc_RNA (1)...(19): siRNA sense strand
ccuggaaguagaaggcuuu

SEQ ID NO: 2410941 - RNA, 19 nt, Homo sapiens
  misc_RNA (1)...(19): siRNA sense strand
uggaagcacugcaggcuca

SEQ ID NO: 2410942 - RNA, 19 nt, Homo sapiens
  misc_RNA (1)...(19): siRNA sense strand
agucgaaaguguuuggucu

SEQ ID NO: 2410943 - RNA, 19 nt, Homo sapiens
  misc_RNA (1)...(19): siRNA sense strand
uggcugagugugaggcaga

SEQ ID NO: 2410944 - RNA, 19 nt, Homo sapiens
  misc_RNA (1)...(19): siRNA sense strand
caaaagaagaccaucgaga

SEQ ID NO: 2410945 - RNA, 19 nt, Homo sapiens
  misc_RNA (1)...(19): siRNA sense strand
auauuaaaguucuccgaca

SEQ ID NO: 2410946 - RNA, 19 nt, Homo sapiens
  misc_RNA (1)...(19): siRNA sense strand
gaaucagggagcuagaaga

SEQ ID NO: 2410947 - RNA, 19 nt, Homo sapiens
  misc_RNA (1)...(19): siRNA sense strand
cagcagagggaggaagaga

SEQ ID NO: 2410948 - RNA, 19 nt, Homo sapiens
  misc_RNA (1)...(19): siRNA sense strand
gggagcuagaagacaagaa

SEQ ID NO: 2410949 - RNA, 19 nt, Homo sapiens
  misc_RNA (1)...(19): siRNA sense strand
aguguaagaagaaagaaga

SEQ ID NO: 2410950 - RNA, 19 nt, Homo sapiens
  misc_RNA (1)...(19): siRNA sense strand
gugauuugcagcagaggga

SEQ ID NO: 2410951 - RNA, 19 nt, Homo sapiens
  misc_RNA (1)...(19): siRNA sense strand
ggaaauacaaguucagcac

SEQ ID NO: 2410952 - RNA, 19 nt, Homo sapiens
  misc_RNA (1)...(19): siRNA sense strand
guucagcaccagagaaauc

SEQ ID NO: 2410953 - RNA, 19 nt, Homo sapiens
  misc_RNA (1)...(19): siRNA sense strand
ggagacgaguggugggaga

SEQ ID NO: 2410954 - RNA, 19 nt, Homo sapiens
  misc_RNA (1)...(19): siRNA sense strand
agauaagaaaggagguauu

SEQ ID NO: 2410955 - RNA, 19 nt, Homo sapiens
  misc_RNA (1)...(19): siRNA sense strand
acauaaagguccaggcgca

SEQ ID NO: 2410956 - RNA, 19 nt, Homo sapiens
  misc_RNA (1)...(19): siRNA sense strand
acacagaagugaugcagca

SEQ ID NO: 2410957 - RNA, 19 nt, Homo sapiens
  misc_RNA (1)...(19): siRNA sense strand
ggggagaauuaaagaacuu

SEQ ID NO: 2410958 - RNA, 19 nt, Homo sapiens
  misc_RNA (1)...(19): siRNA sense strand
auucagaggagacggcaaa

SEQ ID NO: 2410959 - RNA, 19 nt, Homo sapiens
  misc_RNA (1)...(19): siRNA sense strand
agucagaauccuugaaacu

SEQ ID NO: 2410960 - RNA, 19 nt, Homo sapiens
  misc_RNA (1)...(19): siRNA sense strand
cagguaaaguugcuggaga

SEQ ID NO: 2410961 - RNA, 19 nt, Homo sapiens
  misc_RNA (1)...(19): siRNA sense strand
gagaauaccaccaagacca

SEQ ID NO: 2410962 - RNA, 19 nt, Homo sapiens
  misc_RNA (1)...(19): siRNA sense strand
cagaagugaugcagcagga

SEQ ID NO: 2410963 - RNA, 19 nt, Homo sapiens
  misc_RNA (1)...(19): siRNA sense strand
aggaaaagaagaaagaaga

SEQ ID NO: 2410964 - RNA, 19 nt, Homo sapiens
  misc_RNA (1)...(19): siRNA sense strand
agguccaggcgcagguaaa

SEQ ID NO: 2410965 - RNA, 19 nt, Homo sapiens
  misc_RNA (1)...(19): siRNA sense strand
aucagauggugaaggagaa

SEQ ID NO: 2410966 - RNA, 19 nt, Homo sapiens
  misc_RNA (1)...(19): siRNA sense strand
uugcaaaaucagaaccaaa

SEQ ID NO: 2410967 - RNA, 19 nt, Homo sapiens
  misc_RNA (1)...(19): siRNA sense strand
ccuguuuccucaaggccaa

SEQ ID NO: 2410968 - RNA, 19 nt, Homo sapiens
  misc_RNA (1)...(19): siRNA sense strand
agaaccacagugagaagaa

SEQ ID NO: 2410969 - RNA, 19 nt, Homo sapiens
  misc_RNA (1)...(19): siRNA sense strand
cauucagaggagacggcaa

SEQ ID NO: 2410970 - RNA, 19 nt, Homo sapiens
  misc_RNA (1)...(19): siRNA sense strand
ccaaaggaaagaaaagaga

SEQ ID NO: 2410971 - RNA, 19 nt, Homo sapiens
  misc_RNA (1)...(19): siRNA sense strand
accaaacagccuaaagaau

SEQ ID NO: 2410972 - RNA, 19 nt, Homo sapiens
  misc_RNA (1)...(19): siRNA sense strand
ugauacaaccaaaggaaag

SEQ ID NO: 2410973 - RNA, 19 nt, Homo sapiens
  misc_RNA (1)...(19): siRNA sense strand
ccaucagggaagaagacaa

SEQ ID NO: 2410974 - RNA, 19 nt, Homo sapiens
  misc_RNA (1)...(19): siRNA sense strand
gaagaaaccaucagggaag

SEQ ID NO: 2410975 - RNA, 19 nt, Homo sapiens
  misc_RNA (1)...(19): siRNA sense strand
ugaagaaaccaucagggaa

SEQ ID NO: 2410976 - RNA, 19 nt, Homo sapiens
  misc_RNA (1)...(19): siRNA sense strand
ugaaagaugaagaggguag

SEQ ID NO: 2410977 - RNA, 19 nt, Homo sapiens
  misc_RNA (1)...(19): siRNA sense strand
ugugaaagaugaagagggu

SEQ ID NO: 2410978 - RNA, 19 nt, Homo sapiens
  misc_RNA (1)...(19): siRNA sense strand
cucagauaccagagaagaa

SEQ ID NO: 2410979 - RNA, 19 nt, Homo sapiens
  misc_RNA (1)...(19): siRNA sense strand
agaaaggaaaagaagcaaa

SEQ ID NO: 2410980 - RNA, 19 nt, Homo sapiens
  misc_RNA (1)...(19): siRNA sense strand
ccauauaaccaaagccauc

SEQ ID NO: 2410981 - RNA, 19 nt, Homo sapiens
  misc_RNA (1)...(19): siRNA sense strand
ggccugugaucgaggacau

SEQ ID NO: 2410982 - RNA, 19 nt, Homo sapiens
  misc_RNA (1)...(19): siRNA sense strand
auaccagagaagaaaggaa

SEQ ID NO: 2410983 - RNA, 19 nt, Homo sapiens
  misc_RNA (1)...(19): siRNA sense strand
uggaugugaaugugaaaga

SEQ ID NO: 2410984 - RNA, 19 nt, Homo sapiens
  misc_RNA (1)...(19): siRNA sense strand
acauaaggaacuagucaca

SEQ ID NO: 2410985 - RNA, 19 nt, Homo sapiens
  misc_RNA (1)...(19): siRNA sense strand
ccagguacaaacaggucaa

SEQ ID NO: 2410986 - RNA, 19 nt, Homo sapiens
  misc_RNA (1)...(19): siRNA sense strand
ugaucgaggacauaaggaa

SEQ ID NO: 2410987 - RNA, 19 nt, Homo sapiens
  misc_RNA (1)...(19): siRNA sense strand
uuggaaagcacuuggugau

SEQ ID NO: 2410988 - RNA, 19 nt, Homo sapiens
  misc_RNA (1)...(19): siRNA sense strand
agagaagaaaggaaaagaa

SEQ ID NO: 2410989 - RNA, 19 nt, Homo sapiens
  misc_RNA (1)...(19): siRNA sense strand
ugugaaugugaaagaugaa

SEQ ID NO: 2410990 - RNA, 19 nt, Homo sapiens
  misc_RNA (1)...(19): siRNA sense strand
aggaaaagaagcaaauaca

SEQ ID NO: 2410991 - RNA, 19 nt, Homo sapiens
  misc_RNA (1)...(19): siRNA sense strand
aguucaaguucgaggucaa

SEQ ID NO: 2410992 - RNA, 19 nt, Homo sapiens
  misc_RNA (1)...(19): siRNA sense strand
aagcagaagagcaguucaa

SEQ ID NO: 2410993 - RNA, 19 nt, Homo sapiens
  misc_RNA (1)...(19): siRNA sense strand
gugaugacaaagacggcaa

SEQ ID NO: 2410994 - RNA, 19 nt, Homo sapiens
  misc_RNA (1)...(19): siRNA sense strand
ggaccagcuuuguuggcau

SEQ ID NO: 2410995 - RNA, 19 nt, Homo sapiens
  misc_RNA (1)...(19): siRNA sense strand
acacuaaaggggagaacau

SEQ ID NO: 2410996 - RNA, 19 nt, Homo sapiens
  misc_RNA (1)...(19): siRNA sense strand
guuccaaagcagaagagca

SEQ ID NO: 2410997 - RNA, 19 nt, Homo sapiens
  misc_RNA (1)...(19): siRNA sense strand
auauguucuuccugacaaa

SEQ ID NO: 2410998 - RNA, 19 nt, Homo sapiens
  misc_RNA (1)...(19): siRNA sense strand
cuguaagaacccucaguuu

SEQ ID NO: 2410999 - RNA, 19 nt, Homo sapiens
  misc_RNA (1)...(19): siRNA sense strand
acuaaaggggagaacauua

SEQ ID NO: 2411000 - RNA, 19 nt, Homo sapiens
  misc_RNA (1)...(19): siRNA sense strand
cugggauguggaugaguua

SEQ ID NO: 2411001 - RNA, 19 nt, Homo sapiens
  misc_RNA (1)...(19): siRNA sense strand
cgucagcaucggaagauca

SEQ ID NO: 2411002 - RNA, 19 nt, Homo sapiens
  misc_RNA (1)...(19): siRNA sense strand
cuguaggcaacaaggauga

SEQ ID NO: 2411003 - RNA, 19 nt, Homo sapiens
  misc_RNA (1)...(19): siRNA sense strand
cuuuauugaugccaagaca

SEQ ID NO: 2411004 - RNA, 19 nt, Homo sapiens
  misc_RNA (1)...(19): siRNA sense strand
acgaaaucuccuggaacaa

SEQ ID NO: 2411005 - RNA, 19 nt, Homo sapiens
  misc_RNA (1)...(19): siRNA sense strand
gggagaaugaagaggagga

SEQ ID NO: 2411006 - RNA, 19 nt, Homo sapiens
  misc_RNA (1)...(19): siRNA sense strand
uuaacaaacuauugcgaca

SEQ ID NO: 2411007 - RNA, 19 nt, Homo sapiens
  misc_RNA (1)...(19): siRNA sense strand
agaaugaagaggaggagga

SEQ ID NO: 2411008 - RNA, 19 nt, Homo sapiens
  misc_RNA (1)...(19): siRNA sense strand
augaagaggaggaggagga

SEQ ID NO: 2411009 - RNA, 19 nt, Homo sapiens
  misc_RNA (1)...(19): siRNA sense strand
cugagaaggaacaagaaau

SEQ ID NO: 2411010 - RNA, 19 nt, Homo sapiens
  misc_RNA (1)...(19): siRNA sense strand
ccgcugagaggaugagcaa

SEQ ID NO: 2411011 - RNA, 19 nt, Homo sapiens
  misc_RNA (1)...(19): siRNA sense strand
cuacaagaaaugggagaau

SEQ ID NO: 2411012 - RNA, 19 nt, Homo sapiens
  misc_RNA (1)...(19): siRNA sense strand
aggaggaggaggaggagga

SEQ ID NO: 2411013 - RNA, 19 nt, Homo sapiens
  misc_RNA (1)...(19): siRNA sense strand
gguuaaaacagaugaaugu

SEQ ID NO: 2411014 - RNA, 19 nt, Homo sapiens
  misc_RNA (1)...(19): siRNA sense strand
aggaggaggaggaggagca

SEQ ID NO: 2411015 - RNA, 19 nt, Homo sapiens
  misc_RNA (1)...(19): siRNA sense strand
aagaggaggaggaggagga

SEQ ID NO: 2411016 - RNA, 19 nt, Homo sapiens
  misc_RNA (1)...(19): siRNA sense strand
aguuaagacacguucagaa

SEQ ID NO: 2411017 - RNA, 19 nt, Homo sapiens
  misc_RNA (1)...(19): siRNA sense strand
acggcaacucuuaagguua

SEQ ID NO: 2411018 - RNA, 19 nt, Homo sapiens
  misc_RNA (1)...(19): siRNA sense strand
ucugagaaggaacaagaaa

SEQ ID NO: 2411019 - RNA, 19 nt, Homo sapiens
  misc_RNA (1)...(19): siRNA sense strand
ccggaucaucaaugggauu

SEQ ID NO: 2411020 - RNA, 19 nt, Homo sapiens
  misc_RNA (1)...(19): siRNA sense strand
cugccaugguauuccacua

SEQ ID NO: 2411021 - RNA, 19 nt, Homo sapiens
  misc_RNA (1)...(19): siRNA sense strand
acuacaaacccaaucgcua

SEQ ID NO: 2411022 - RNA, 19 nt, Homo sapiens
  misc_RNA (1)...(19): siRNA sense strand
gcuccauggacuugaagaa

SEQ ID NO: 2411023 - RNA, 19 nt, Homo sapiens
  misc_RNA (1)...(19): siRNA sense strand
aggaagaguaucagauuca

SEQ ID NO: 2411024 - RNA, 19 nt, Homo sapiens
  misc_RNA (1)...(19): siRNA sense strand
aggaaauggaaaugacaga

SEQ ID NO: 2411025 - RNA, 19 nt, Homo sapiens
  misc_RNA (1)...(19): siRNA sense strand
caauagaauaccuggcuca

SEQ ID NO: 2411026 - RNA, 19 nt, Homo sapiens
  misc_RNA (1)...(19): siRNA sense strand
gaauaugacaguagccuca

SEQ ID NO: 2411027 - RNA, 19 nt, Homo sapiens
  misc_RNA (1)...(19): siRNA sense strand
ccauauucaugcaggagga

SEQ ID NO: 2411028 - RNA, 19 nt, Homo sapiens
  misc_RNA (1)...(19): siRNA sense strand
cagaaaugcugaaacagga

SEQ ID NO: 2411029 - RNA, 19 nt, Homo sapiens
  misc_RNA (1)...(19): siRNA sense strand
gccucaaggaaauggaaau

SEQ ID NO: 2411030 - RNA, 19 nt, Homo sapiens
  misc_RNA (1)...(19): siRNA sense strand
acgaagaagaccauauuca

SEQ ID NO: 2411031 - RNA, 19 nt, Homo sapiens
  misc_RNA (1)...(19): siRNA sense strand
aggaaaacagcaaaagcaa

SEQ ID NO: 2411032 - RNA, 19 nt, Homo sapiens
  misc_RNA (1)...(19): siRNA sense strand
ucaaaaugccacaagaaau

SEQ ID NO: 2411033 - RNA, 19 nt, Homo sapiens
  misc_RNA (1)...(19): siRNA sense strand
agaaaugcugaaacaggaa

SEQ ID NO: 2411034 - RNA, 19 nt, Homo sapiens
  misc_RNA (1)...(19): siRNA sense strand
aggccuugaagcaggaauu

SEQ ID NO: 2411035 - RNA, 19 nt, Homo sapiens
  misc_RNA (1)...(19): siRNA sense strand
ucaugcaggaggacacaaa

SEQ ID NO: 2411036 - RNA, 19 nt, Homo sapiens
  misc_RNA (1)...(19): siRNA sense strand
gaaauaaauuacaaggagg

SEQ ID NO: 2411037 - RNA, 19 nt, Homo sapiens
  misc_RNA (1)...(19): siRNA sense strand
ugcugaaacaggaagagua

SEQ ID NO: 2411038 - RNA, 19 nt, Homo sapiens
  misc_RNA (1)...(19): siRNA sense strand
cuggaaaggauuuggaaca

SEQ ID NO: 2411039 - RNA, 19 nt, Homo sapiens
  misc_RNA (1)...(19): siRNA sense strand
aaucaacaguucugggcaa

SEQ ID NO: 2411040 - RNA, 19 nt, Homo sapiens
  misc_RNA (1)...(19): siRNA sense strand
gaaucaggucagaaagcaa

SEQ ID NO: 2411041 - RNA, 19 nt, Homo sapiens
  misc_RNA (1)...(19): siRNA sense strand
gagauugguacaagcgcaa

SEQ ID NO: 2411042 - RNA, 19 nt, Homo sapiens
  misc_RNA (1)...(19): siRNA sense strand
aaacaaaagaagaggagca

SEQ ID NO: 2411043 - RNA, 19 nt, Homo sapiens
  misc_RNA (1)...(19): siRNA sense strand
caaaagaagaggagcaacu

SEQ ID NO: 2411044 - RNA, 19 nt, Homo sapiens
  misc_RNA (1)...(19): siRNA sense strand
gggccugagaacugaauca

SEQ ID NO: 2411045 - RNA, 19 nt, Homo sapiens
  misc_RNA (1)...(19): siRNA sense strand
cggacuucuacaaggaauu

SEQ ID NO: 2411046 - RNA, 19 nt, Homo sapiens
  misc_RNA (1)...(19): siRNA sense strand
aggauuuggaacaagcuua

SEQ ID NO: 2411047 - RNA, 19 nt, Homo sapiens
  misc_RNA (1)...(19): siRNA sense strand
uuucagaagcacauguauu

SEQ ID NO: 2411048 - RNA, 19 nt, Homo sapiens
  misc_RNA (1)...(19): siRNA sense strand
acgaggaggacgaggauga

SEQ ID NO: 2411049 - RNA, 19 nt, Homo sapiens
  misc_RNA (1)...(19): siRNA sense strand
uccagaagcugaagcggaa

SEQ ID NO: 2411050 - RNA, 19 nt, Homo sapiens
  misc_RNA (1)...(19): siRNA sense strand
ccacacagcaguacgccaa

SEQ ID NO: 2411051 - RNA, 19 nt, Homo sapiens
  misc_RNA (1)...(19): siRNA sense strand
aggacaacgaggaggacga

SEQ ID NO: 2411052 - RNA, 19 nt, Homo sapiens
  misc_RNA (1)...(19): siRNA sense strand
gagaggacaacgaggagga

SEQ ID NO: 2411053 - RNA, 19 nt, Homo sapiens
  misc_RNA (1)...(19): siRNA sense strand
ccacagagacagagaccuc

SEQ ID NO: 2411054 - RNA, 19 nt, Homo sapiens
  misc_RNA (1)...(19): siRNA sense strand
cggcuuaacaccagcgacu

SEQ ID NO: 2411055 - RNA, 19 nt, Homo sapiens
  misc_RNA (1)...(19): siRNA sense strand
ccagagaggacaacgagga

SEQ ID NO: 2411056 - RNA, 19 nt, Homo sapiens
  misc_RNA (1)...(19): siRNA sense strand
cagaagcugaagcggaaau

SEQ ID NO: 2411057 - RNA, 19 nt, Homo sapiens
  misc_RNA (1)...(19): siRNA sense strand
ccgacaucccagugccuua

SEQ ID NO: 2411058 - RNA, 19 nt, Homo sapiens
  misc_RNA (1)...(19): siRNA sense strand
gguucgagacgguggaugu

SEQ ID NO: 2411059 - RNA, 19 nt, Homo sapiens
  misc_RNA (1)...(19): siRNA sense strand
ggauguugcagcugaucau

SEQ ID NO: 2411060 - RNA, 19 nt, Homo sapiens
  misc_RNA (1)...(19): siRNA sense strand
aagaagaagaugacaggca

SEQ ID NO: 2411061 - RNA, 19 nt, Homo sapiens
  misc_RNA (1)...(19): siRNA sense strand
ccaccaggguagagggaag

SEQ ID NO: 2411062 - RNA, 19 nt, Homo sapiens
  misc_RNA (1)...(19): siRNA sense strand
aagaggauggagugagaga

SEQ ID NO: 2411063 - RNA, 19 nt, Homo sapiens
  misc_RNA (1)...(19): siRNA sense strand
ccaaggccuacgagagaca

SEQ ID NO: 2411064 - RNA, 19 nt, Homo sapiens
  misc_RNA (1)...(19): siRNA sense strand
ugaaacaucuacugggcga

SEQ ID NO: 2411065 - RNA, 19 nt, Homo sapiens
  misc_RNA (1)...(19): siRNA sense strand
gaccaggagugauggcuca

SEQ ID NO: 2411066 - RNA, 19 nt, Homo sapiens
  misc_RNA (1)...(19): siRNA sense strand
ugaagaaucugaaguuaga

SEQ ID NO: 2411067 - RNA, 19 nt, Homo sapiens
  misc_RNA (1)...(19): siRNA sense strand
ccugaagaaucugaaguua

SEQ ID NO: 2411068 - RNA, 19 nt, Homo sapiens
  misc_RNA (1)...(19): siRNA sense strand
ccuucuacggccagggcaa

SEQ ID NO: 2411069 - RNA, 19 nt, Homo sapiens
  misc_RNA (1)...(19): siRNA sense strand
gggcagucuuucuggccuu

SEQ ID NO: 2411070 - RNA, 19 nt, Homo sapiens
  misc_RNA (1)...(19): siRNA sense strand
cggguugcuuccagggaga

SEQ ID NO: 2411071 - RNA, 19 nt, Homo sapiens
  misc_RNA (1)...(19): siRNA sense strand
cuaugaaaucuucgggcuu

SEQ ID NO: 2411072 - RNA, 19 nt, Homo sapiens
  misc_RNA (1)...(19): siRNA sense strand
gcagcuaccaagaggcuca

SEQ ID NO: 2411073 - RNA, 19 nt, Homo sapiens
  misc_RNA (1)...(19): siRNA sense strand
gagccaucgccuaugaaau

SEQ ID NO: 2411074 - RNA, 19 nt, Homo sapiens
  misc_RNA (1)...(19): siRNA sense strand
gguaagggcugcagugcug

SEQ ID NO: 2411075 - RNA, 19 nt, Homo sapiens
  misc_RNA (1)...(19): siRNA sense strand
cagcgagaggccagcaaga

SEQ ID NO: 2411076 - RNA, 19 nt, Homo sapiens
  misc_RNA (1)...(19): siRNA sense strand
cagugauugacuacagcaa

SEQ ID NO: 2411077 - RNA, 19 nt, Homo sapiens
  misc_RNA (1)...(19): siRNA sense strand
ggaaauaaacucaagcuga

SEQ ID NO: 2411078 - RNA, 19 nt, Homo sapiens
  misc_RNA (1)...(19): siRNA sense strand
cgaaauuugaagaugacau

SEQ ID NO: 2411079 - RNA, 19 nt, Homo sapiens
  misc_RNA (1)...(19): siRNA sense strand
gcuuaacagagaucgaaau

SEQ ID NO: 2411080 - RNA, 19 nt, Homo sapiens
  misc_RNA (1)...(19): siRNA sense strand
ggcuuaacagagaucgaaa

SEQ ID NO: 2411081 - RNA, 19 nt, Homo sapiens
  misc_RNA (1)...(19): siRNA sense strand
ucgaaauggacaugaauac

SEQ ID NO: 2411082 - RNA, 19 nt, Homo sapiens
  misc_RNA (1)...(19): siRNA sense strand
aggcauggagccagcguca

SEQ ID NO: 2411083 - RNA, 19 nt, Homo sapiens
  misc_RNA (1)...(19): siRNA sense strand
cugcauguguggagacaac

SEQ ID NO: 2411084 - RNA, 19 nt, Homo sapiens
  misc_RNA (1)...(19): siRNA sense strand
cggaagagcugcugucccu

SEQ ID NO: 2411085 - RNA, 19 nt, Homo sapiens
  misc_RNA (1)...(19): siRNA sense strand
ggaaauugcuucugggaac

SEQ ID NO: 2411086 - RNA, 19 nt, Homo sapiens
  misc_RNA (1)...(19): siRNA sense strand
ggacagaggacgaggacac

SEQ ID NO: 2411087 - RNA, 19 nt, Homo sapiens
  misc_RNA (1)...(19): siRNA sense strand
uggcagugcuggugggcau

SEQ ID NO: 2411088 - RNA, 19 nt, Homo sapiens
  misc_RNA (1)...(19): siRNA sense strand
ucuacaagcaggugaccaa

SEQ ID NO: 2411089 - RNA, 19 nt, Homo sapiens
  misc_RNA (1)...(19): siRNA sense strand
caucaggaauuacgggaca

SEQ ID NO: 2411090 - RNA, 19 nt, Homo sapiens
  misc_RNA (1)...(19): siRNA sense strand
guaaauugcuagaaggccu

SEQ ID NO: 2411091 - RNA, 19 nt, Homo sapiens
  misc_RNA (1)...(19): siRNA sense strand
gggaaauugcuucugggaa

SEQ ID NO: 2411092 - RNA, 19 nt, Homo sapiens
  misc_RNA (1)...(19): siRNA sense strand
cggagcaaagggugggaga

SEQ ID NO: 2411093 - RNA, 19 nt, Homo sapiens
  misc_RNA (1)...(19): siRNA sense strand
cgaacgggacccuggaaaa

SEQ ID NO: 2411094 - RNA, 19 nt, Homo sapiens
  misc_RNA (1)...(19): siRNA sense strand
guggcuauuugcagagaca

SEQ ID NO: 2411095 - RNA, 19 nt, Homo sapiens
  misc_RNA (1)...(19): siRNA sense strand
cgaagaugcuccagggcug

SEQ ID NO: 2411096 - RNA, 19 nt, Homo sapiens
  misc_RNA (1)...(19): siRNA sense strand
ccuugugaguccagggcca

SEQ ID NO: 2411097 - RNA, 19 nt, Homo sapiens
  misc_RNA (1)...(19): siRNA sense strand
cuggaaaaguuguggaaug

SEQ ID NO: 2411098 - RNA, 19 nt, Homo sapiens
  misc_RNA (1)...(19): siRNA sense strand
gaguacaggccgacagaac

SEQ ID NO: 2411099 - RNA, 19 nt, Homo sapiens
  misc_RNA (1)...(19): siRNA sense strand
ggagcaaagggugggagaa

SEQ ID NO: 2411100 - RNA, 19 nt, Homo sapiens
  misc_RNA (1)...(19): siRNA sense strand
agaaguggcuauuugcaga

SEQ ID NO: 2411101 - RNA, 19 nt, Homo sapiens
  misc_RNA (1)...(19): siRNA sense strand
gcgccaagaugcacugcga

SEQ ID NO: 2411102 - RNA, 19 nt, Homo sapiens
  misc_RNA (1)...(19): siRNA sense strand
ccgaacgggacccuggaaa

SEQ ID NO: 2411103 - RNA, 19 nt, Homo sapiens
  misc_RNA (1)...(19): siRNA sense strand
gguucauacuggugagaaa

SEQ ID NO: 2411104 - RNA, 19 nt, Homo sapiens
  misc_RNA (1)...(19): siRNA sense strand
auguaaagaauguggcaaa

SEQ ID NO: 2411105 - RNA, 19 nt, Homo sapiens
  misc_RNA (1)...(19): siRNA sense strand
aauucacauuggagagaaa

SEQ ID NO: 2411106 - RNA, 19 nt, Homo sapiens
  misc_RNA (1)...(19): siRNA sense strand
aauucauacuagagagaga

SEQ ID NO: 2411107 - RNA, 19 nt, Homo sapiens
  misc_RNA (1)...(19): siRNA sense strand
augugaagaauguggcaaa

SEQ ID NO: 2411108 - RNA, 19 nt, Homo sapiens
  misc_RNA (1)...(19): siRNA sense strand
ccuuacaagacaucaaaua

SEQ ID NO: 2411109 - RNA, 19 nt, Homo sapiens
  misc_RNA (1)...(19): siRNA sense strand
aauucacacuggaaggaaa

SEQ ID NO: 2411110 - RNA, 19 nt, Homo sapiens
  misc_RNA (1)...(19): siRNA sense strand
ggagaaaagccuuacaaau

SEQ ID NO: 2411111 - RNA, 19 nt, Homo sapiens
  misc_RNA (1)...(19): siRNA sense strand
auguaguaaauguggcaaa

SEQ ID NO: 2411112 - RNA, 19 nt, Homo sapiens
  misc_RNA (1)...(19): siRNA sense strand
guucaaaccugguaugcca

SEQ ID NO: 2411113 - RNA, 19 nt, Homo sapiens
  misc_RNA (1)...(19): siRNA sense strand
guguaaagaauguggcaag

SEQ ID NO: 2411114 - RNA, 19 nt, Homo sapiens
  misc_RNA (1)...(19): siRNA sense strand
uggcaaggucuuuaaucaa

SEQ ID NO: 2411115 - RNA, 19 nt, Homo sapiens
  misc_RNA (1)...(19): siRNA sense strand
ccuuauacgacaucgaaaa

SEQ ID NO: 2411116 - RNA, 19 nt, Homo sapiens
  misc_RNA (1)...(19): siRNA sense strand
agguacaagucuucucuaa

SEQ ID NO: 2411117 - RNA, 19 nt, Homo sapiens
  misc_RNA (1)...(19): siRNA sense strand
ccugguaugccaucagaaa

SEQ ID NO: 2411118 - RNA, 19 nt, Homo sapiens
  misc_RNA (1)...(19): siRNA sense strand
auucauaucuagcagaaca

SEQ ID NO: 2411119 - RNA, 19 nt, Homo sapiens
  misc_RNA (1)...(19): siRNA sense strand
aaucagaccuuauacgaca

SEQ ID NO: 2411120 - RNA, 19 nt, Homo sapiens
  misc_RNA (1)...(19): siRNA sense strand
agaauucauacuagagaga

SEQ ID NO: 2411121 - RNA, 19 nt, Homo sapiens
  misc_RNA (1)...(19): siRNA sense strand
caaagcauuucgagggugu

SEQ ID NO: 2411122 - RNA, 19 nt, Homo sapiens
  misc_RNA (1)...(19): siRNA sense strand
ugacaaggucuucaaucaa

SEQ ID NO: 2411123 - RNA, 19 nt, Homo sapiens
  misc_RNA (1)...(19): siRNA sense strand
aauucauacuggagagaag

SEQ ID NO: 2411124 - RNA, 19 nt, Homo sapiens
  misc_RNA (1)...(19): siRNA sense strand
aauucauacuggagagaag

SEQ ID NO: 2411125 - RNA, 19 nt, Homo sapiens
  misc_RNA (1)...(19): siRNA sense strand
gaagaauguggcaaagcau

SEQ ID NO: 2411126 - RNA, 19 nt, Homo sapiens
  misc_RNA (1)...(19): siRNA sense strand
cauacuagagagagaccuu

SEQ ID NO: 2411127 - RNA, 19 nt, Homo sapiens
  misc_RNA (1)...(19): siRNA sense strand
ggcacagcguuuagagagu

SEQ ID NO: 2411128 - RNA, 19 nt, Homo sapiens
  misc_RNA (1)...(19): siRNA sense strand
aauucauacuggagagaag

SEQ ID NO: 2411129 - RNA, 19 nt, Homo sapiens
  misc_RNA (1)...(19): siRNA sense strand
ccuuacaaaugucaugaau

SEQ ID NO: 2411130 - RNA, 19 nt, Homo sapiens
  misc_RNA (1)...(19): siRNA sense strand
ccuuacaaaugucaugaau

SEQ ID NO: 2411131 - RNA, 19 nt, Homo sapiens
  misc_RNA (1)...(19): siRNA sense strand
uguaaagaauguggcaaga

SEQ ID NO: 2411132 - RNA, 19 nt, Homo sapiens
  misc_RNA (1)...(19): siRNA sense strand
ucaccaaucaccauagaau

SEQ ID NO: 2411133 - RNA, 19 nt, Homo sapiens
  misc_RNA (1)...(19): siRNA sense strand
uugcacaacaucaaagaau

SEQ ID NO: 2411134 - RNA, 19 nt, Homo sapiens
  misc_RNA (1)...(19): siRNA sense strand
aguaaauguggcaaagcau

SEQ ID NO: 2411135 - RNA, 19 nt, Homo sapiens
  misc_RNA (1)...(19): siRNA sense strand
ccuuacaaaugugaagaau

SEQ ID NO: 2411136 - RNA, 19 nt, Homo sapiens
  misc_RNA (1)...(19): siRNA sense strand
auguaaagaaugugacaag

SEQ ID NO: 2411137 - RNA, 19 nt, Homo sapiens
  misc_RNA (1)...(19): siRNA sense strand
cuugcaauccauacugaaa

SEQ ID NO: 2411138 - RNA, 19 nt, Homo sapiens
  misc_RNA (1)...(19): siRNA sense strand
uggagaagacgcugggcaa

SEQ ID NO: 2411139 - RNA, 19 nt, Homo sapiens
  misc_RNA (1)...(19): siRNA sense strand
ugaugaagguggagcggga

SEQ ID NO: 2411140 - RNA, 19 nt, Homo sapiens
  misc_RNA (1)...(19): siRNA sense strand
gcuucagggccgaguacaa

SEQ ID NO: 2411141 - RNA, 19 nt, Homo sapiens
  misc_RNA (1)...(19): siRNA sense strand
uggacaaagaagaacaaau

SEQ ID NO: 2411142 - RNA, 19 nt, Homo sapiens
  misc_RNA (1)...(19): siRNA sense strand
gcgggaaacacgagccaga

SEQ ID NO: 2411143 - RNA, 19 nt, Homo sapiens
  misc_RNA (1)...(19): siRNA sense strand
ccgacguccuagagagcau

SEQ ID NO: 2411144 - RNA, 19 nt, Homo sapiens
  misc_RNA (1)...(19): siRNA sense strand
cgggagaagcugucggagu

SEQ ID NO: 2411145 - RNA, 19 nt, Homo sapiens
  misc_RNA (1)...(19): siRNA sense strand
gggagaagcugucggaguc

SEQ ID NO: 2411146 - RNA, 19 nt, Homo sapiens
  misc_RNA (1)...(19): siRNA sense strand
gguucaagcgaguggugga

SEQ ID NO: 2411147 - RNA, 19 nt, Homo sapiens
  misc_RNA (1)...(19): siRNA sense strand
cgaaaguucuuccgccaga

SEQ ID NO: 2411148 - RNA, 19 nt, Homo sapiens
  misc_RNA (1)...(19): siRNA sense strand
aggaggagaaccaagaaaa

SEQ ID NO: 2411149 - RNA, 19 nt, Homo sapiens
  misc_RNA (1)...(19): siRNA sense strand
cagagaucccguagcguca

SEQ ID NO: 2411150 - RNA, 19 nt, Homo sapiens
  misc_RNA (1)...(19): siRNA sense strand
gagcggaaguccauggaag

SEQ ID NO: 2411151 - RNA, 19 nt, Homo sapiens
  misc_RNA (1)...(19): siRNA sense strand
acgacgucuacgagaacaa

SEQ ID NO: 2411152 - RNA, 19 nt, Homo sapiens
  misc_RNA (1)...(19): siRNA sense strand
ugaucgaaguggagcccga

SEQ ID NO: 2411153 - RNA, 19 nt, Homo sapiens
  misc_RNA (1)...(19): siRNA sense strand
gcgcuggacuucugccaca

SEQ ID NO: 2411154 - RNA, 19 nt, Homo sapiens
  misc_RNA (1)...(19): siRNA sense strand
accuaaagcccgagaaccu

SEQ ID NO: 2411155 - RNA, 19 nt, Homo sapiens
  misc_RNA (1)...(19): siRNA sense strand
gugcaagagcugugggaag

SEQ ID NO: 2411156 - RNA, 19 nt, Homo sapiens
  misc_RNA (1)...(19): siRNA sense strand
caggauaacaggaagcaga

SEQ ID NO: 2411157 - RNA, 19 nt, Homo sapiens
  misc_RNA (1)...(19): siRNA sense strand
cggcacagaaaucaagaau

SEQ ID NO: 2411158 - RNA, 19 nt, Homo sapiens
  misc_RNA (1)...(19): siRNA sense strand
aggauaacaggaagcagaa

SEQ ID NO: 2411159 - RNA, 19 nt, Homo sapiens
  misc_RNA (1)...(19): siRNA sense strand
ggaaugugugcaagggcga

SEQ ID NO: 2411160 - RNA, 19 nt, Homo sapiens
  misc_RNA (1)...(19): siRNA sense strand
ugucggaccuccagcccaa

SEQ ID NO: 2411161 - RNA, 19 nt, Homo sapiens
  misc_RNA (1)...(19): siRNA sense strand
ccaaagacguggaccggac

SEQ ID NO: 2411162 - RNA, 19 nt, Homo sapiens
  misc_RNA (1)...(19): siRNA sense strand
ggaaggaaugcaugugcca

SEQ ID NO: 2411163 - RNA, 19 nt, Homo sapiens
  misc_RNA (1)...(19): siRNA sense strand
cggccagauguuugcagaa

SEQ ID NO: 2411164 - RNA, 19 nt, Homo sapiens
  misc_RNA (1)...(19): siRNA sense strand
uugcagaaggcgaagagau

SEQ ID NO: 2411165 - RNA, 19 nt, Homo sapiens
  misc_RNA (1)...(19): siRNA sense strand
agaacugaagacagaaaca

SEQ ID NO: 2411166 - RNA, 19 nt, Homo sapiens
  misc_RNA (1)...(19): siRNA sense strand
aaggaaugcaugugccaga

SEQ ID NO: 2411167 - RNA, 19 nt, Homo sapiens
  misc_RNA (1)...(19): siRNA sense strand
gauguuugcagaaggcgaa

SEQ ID NO: 2411168 - RNA, 19 nt, Homo sapiens
  misc_RNA (1)...(19): siRNA sense strand
aggacaaaguggaggaaga

SEQ ID NO: 2411169 - RNA, 19 nt, Homo sapiens
  misc_RNA (1)...(19): siRNA sense strand
ggcaaagagcagagccaaa

SEQ ID NO: 2411170 - RNA, 19 nt, Homo sapiens
  misc_RNA (1)...(19): siRNA sense strand
gggaaagccuucagggaac

SEQ ID NO: 2411171 - RNA, 19 nt, Homo sapiens
  misc_RNA (1)...(19): siRNA sense strand
ggcaacagaacgagggauu

SEQ ID NO: 2411172 - RNA, 19 nt, Homo sapiens
  misc_RNA (1)...(19): siRNA sense strand
augugaugcuggagaacua

SEQ ID NO: 2411173 - RNA, 19 nt, Homo sapiens
  misc_RNA (1)...(19): siRNA sense strand
ccuaauugugcccgagaaa

SEQ ID NO: 2411174 - RNA, 19 nt, Homo sapiens
  misc_RNA (1)...(19): siRNA sense strand
cugucaagaaugugggcaa

SEQ ID NO: 2411175 - RNA, 19 nt, Homo sapiens
  misc_RNA (1)...(19): siRNA sense strand
ggaagaaagaggagagcag

SEQ ID NO: 2411176 - RNA, 19 nt, Homo sapiens
  misc_RNA (1)...(19): siRNA sense strand
auguaaucagugugagaaa

SEQ ID NO: 2411177 - RNA, 19 nt, Homo sapiens
  misc_RNA (1)...(19): siRNA sense strand
caauguaaucagugugaga

SEQ ID NO: 2411178 - RNA, 19 nt, Homo sapiens
  misc_RNA (1)...(19): siRNA sense strand
aacccauaccagagagaaa

SEQ ID NO: 2411179 - RNA, 19 nt, Homo sapiens
  misc_RNA (1)...(19): siRNA sense strand
gagcagagccaaaggcaac

SEQ ID NO: 2411180 - RNA, 19 nt, Homo sapiens
  misc_RNA (1)...(19): siRNA sense strand
gaagcauccuccagggaca

SEQ ID NO: 2411181 - RNA, 19 nt, Homo sapiens
  misc_RNA (1)...(19): siRNA sense strand
ugggaaagccuucagggaa

SEQ ID NO: 2411182 - RNA, 19 nt, Homo sapiens
  misc_RNA (1)...(19): siRNA sense strand
auguagucagugugggaaa

SEQ ID NO: 2411183 - RNA, 19 nt, Homo sapiens
  misc_RNA (1)...(19): siRNA sense strand
gggaaaaccuucacgagga

SEQ ID NO: 2411184 - RNA, 19 nt, Homo sapiens
  misc_RNA (1)...(19): siRNA sense strand
gccaaaggcaacagaacga

SEQ ID NO: 2411185 - RNA, 19 nt, Homo sapiens
  misc_RNA (1)...(19): siRNA sense strand
ugauuuugcaccagagaaa

SEQ ID NO: 2411186 - RNA, 19 nt, Homo sapiens
  misc_RNA (1)...(19): siRNA sense strand
gaauguagucaguguggga

SEQ ID NO: 2411187 - RNA, 19 nt, Homo sapiens
  misc_RNA (1)...(19): siRNA sense strand
caggaaacaugcaaggacu

SEQ ID NO: 2411188 - RNA, 19 nt, Homo sapiens
  misc_RNA (1)...(19): siRNA sense strand
acacaggagagaagcccua

SEQ ID NO: 2411189 - RNA, 19 nt, Homo sapiens
  misc_RNA (1)...(19): siRNA sense strand
cugaagagucacaugcgaa

SEQ ID NO: 2411190 - RNA, 19 nt, Homo sapiens
  misc_RNA (1)...(19): siRNA sense strand
aagagagaccauuaggaau

SEQ ID NO: 2411191 - RNA, 19 nt, Homo sapiens
  misc_RNA (1)...(19): siRNA sense strand
aauucaugcuggagaggca

SEQ ID NO: 2411192 - RNA, 19 nt, Homo sapiens
  misc_RNA (1)...(19): siRNA sense strand
acuuaaacccgaagaguug

SEQ ID NO: 2411193 - RNA, 19 nt, Homo sapiens
  misc_RNA (1)...(19): siRNA sense strand
ccuccagggacaugcaaau

SEQ ID NO: 2411194 - RNA, 19 nt, Homo sapiens
  misc_RNA (1)...(19): siRNA sense strand
ggagagaagcccuacgagu

SEQ ID NO: 2411195 - RNA, 19 nt, Homo sapiens
  misc_RNA (1)...(19): siRNA sense strand
gggagaaacuguaugagug

SEQ ID NO: 2411196 - RNA, 19 nt, Homo sapiens
  misc_RNA (1)...(19): siRNA sense strand
gggaacuccaccaugcaaa

SEQ ID NO: 2411197 - RNA, 19 nt, Homo sapiens
  misc_RNA (1)...(19): siRNA sense strand
agagaaaccacacaggaga

SEQ ID NO: 2411198 - RNA, 19 nt, Homo sapiens
  misc_RNA (1)...(19): siRNA sense strand
agagcagagccaaaggcaa

SEQ ID NO: 2411199 - RNA, 19 nt, Homo sapiens
  misc_RNA (1)...(19): siRNA sense strand
augcagccagugugggaaa

SEQ ID NO: 2411200 - RNA, 19 nt, Homo sapiens
  misc_RNA (1)...(19): siRNA sense strand
gugcacaagaggauacaca

SEQ ID NO: 2411201 - RNA, 19 nt, Homo sapiens
  misc_RNA (1)...(19): siRNA sense strand
aggauguggccguggaguu

SEQ ID NO: 2411202 - RNA, 19 nt, Homo sapiens
  misc_RNA (1)...(19): siRNA sense strand
cauagaagagagggagaca

SEQ ID NO: 2411203 - RNA, 19 nt, Homo sapiens
  misc_RNA (1)...(19): siRNA sense strand
gcaagaagcccuaugcaug

SEQ ID NO: 2411204 - RNA, 19 nt, Homo sapiens
  misc_RNA (1)...(19): siRNA sense strand
gggcaaagagcagagccaa

SEQ ID NO: 2411205 - RNA, 19 nt, Homo sapiens
  misc_RNA (1)...(19): siRNA sense strand
gugcaaacccaaugcguug

SEQ ID NO: 2411206 - RNA, 19 nt, Homo sapiens
  misc_RNA (1)...(19): siRNA sense strand
acgaggaacuuuaaccuga

SEQ ID NO: 2411207 - RNA, 19 nt, Homo sapiens
  misc_RNA (1)...(19): siRNA sense strand
cccuacgaguguaaagauu

SEQ ID NO: 2411208 - RNA, 19 nt, Homo sapiens
  misc_RNA (1)...(19): siRNA sense strand
caaccucagccuggagaaa

SEQ ID NO: 2411209 - RNA, 19 nt, Homo sapiens
  misc_RNA (1)...(19): siRNA sense strand
gugccaggaaugugggcga

SEQ ID NO: 2411210 - RNA, 19 nt, Homo sapiens
  misc_RNA (1)...(19): siRNA sense strand
ggcaagaagcccuaugcau

SEQ ID NO: 2411211 - RNA, 19 nt, Homo sapiens
  misc_RNA (1)...(19): siRNA sense strand
gagccaagugagagggaaa

SEQ ID NO: 2411212 - RNA, 19 nt, Homo sapiens
  misc_RNA (1)...(19): siRNA sense strand
ucauaaacgaggaaggaaa

SEQ ID NO: 2411213 - RNA, 19 nt, Homo sapiens
  misc_RNA (1)...(19): siRNA sense strand
aggaagaagaugaagacua

SEQ ID NO: 2411214 - RNA, 19 nt, Homo sapiens
  misc_RNA (1)...(19): siRNA sense strand
aggaauggcccaagaggaa

SEQ ID NO: 2411215 - RNA, 19 nt, Homo sapiens
  misc_RNA (1)...(19): siRNA sense strand
uggaugaagaugagaagaa

SEQ ID NO: 2411216 - RNA, 19 nt, Homo sapiens
  misc_RNA (1)...(19): siRNA sense strand
gggaaggaucagaggagga

SEQ ID NO: 2411217 - RNA, 19 nt, Homo sapiens
  misc_RNA (1)...(19): siRNA sense strand
uuugaaagccggagaugaa

SEQ ID NO: 2411218 - RNA, 19 nt, Homo sapiens
  misc_RNA (1)...(19): siRNA sense strand
ccagagugcuuaaaggaga

SEQ ID NO: 2411219 - RNA, 19 nt, Homo sapiens
  misc_RNA (1)...(19): siRNA sense strand
gcucuuguacauugggaaa

SEQ ID NO: 2411220 - RNA, 19 nt, Homo sapiens
  misc_RNA (1)...(19): siRNA sense strand
aaggaucagaggaggaaua

SEQ ID NO: 2411221 - RNA, 19 nt, Homo sapiens
  misc_RNA (1)...(19): siRNA sense strand
ccauauaggucgaaggcug

SEQ ID NO: 2411222 - RNA, 19 nt, Homo sapiens
  misc_RNA (1)...(19): siRNA sense strand
cgugugaaccagugaguga

SEQ ID NO: 2411223 - RNA, 19 nt, Homo sapiens
  misc_RNA (1)...(19): siRNA sense strand
ugucagaaaauguggcaaa

SEQ ID NO: 2411224 - RNA, 19 nt, Homo sapiens
  misc_RNA (1)...(19): siRNA sense strand
uugucaucauugugggaaa

SEQ ID NO: 2411225 - RNA, 19 nt, Homo sapiens
  misc_RNA (1)...(19): siRNA sense strand
gcuuaaaggagaugaaccu

SEQ ID NO: 2411226 - RNA, 19 nt, Homo sapiens
  misc_RNA (1)...(19): siRNA sense strand
aggacugguucguuguaaa

SEQ ID NO: 2411227 - RNA, 19 nt, Homo sapiens
  misc_RNA (1)...(19): siRNA sense strand
gggaggaagcaacggccua

SEQ ID NO: 2411228 - RNA, 19 nt, Homo sapiens
  misc_RNA (1)...(19): siRNA sense strand
gcacaggagcagaaggucu

SEQ ID NO: 2411229 - RNA, 19 nt, Homo sapiens
  misc_RNA (1)...(19): siRNA sense strand
cagcagcacaggagcagaa

SEQ ID NO: 2411230 - RNA, 19 nt, Homo sapiens
  misc_RNA (1)...(19): siRNA sense strand
guaaggaaccagagcagga

SEQ ID NO: 2411231 - RNA, 19 nt, Homo sapiens
  misc_RNA (1)...(19): siRNA sense strand
augaagaugagaagaauca

SEQ ID NO: 2411232 - RNA, 19 nt, Homo sapiens
  misc_RNA (1)...(19): siRNA sense strand
uucuaaagagacugggaaa

SEQ ID NO: 2411233 - RNA, 19 nt, Homo sapiens
  misc_RNA (1)...(19): siRNA sense strand
uugaaaagcugaugaagau

SEQ ID NO: 2411234 - RNA, 19 nt, Homo sapiens
  misc_RNA (1)...(19): siRNA sense strand
cugcagagcuggaaaagau

SEQ ID NO: 2411235 - RNA, 19 nt, Homo sapiens
  misc_RNA (1)...(19): siRNA sense strand
cuacauaaauggaagacag

SEQ ID NO: 2411236 - RNA, 19 nt, Homo sapiens
  misc_RNA (1)...(19): siRNA sense strand
ggaggaauaaugaggaacu

SEQ ID NO: 2411237 - RNA, 19 nt, Homo sapiens
  misc_RNA (1)...(19): siRNA sense strand
ccugaugaucgaaaguuaa

SEQ ID NO: 2411238 - RNA, 19 nt, Homo sapiens
  misc_RNA (1)...(19): siRNA sense strand
agaugaagacuaucgagaa

SEQ ID NO: 2411239 - RNA, 19 nt, Homo sapiens
  misc_RNA (1)...(19): siRNA sense strand
accugaugaucgaaaguua

SEQ ID NO: 2411240 - RNA, 19 nt, Homo sapiens
  misc_RNA (1)...(19): siRNA sense strand
agaugaaauagaugagcca

SEQ ID NO: 2411241 - RNA, 19 nt, Homo sapiens
  misc_RNA (1)...(19): siRNA sense strand
ggcaggaagaagaugaaga

SEQ ID NO: 2411242 - RNA, 19 nt, Homo sapiens
  misc_RNA (1)...(19): siRNA sense strand
gaggaagaccauagagggu

SEQ ID NO: 2411243 - RNA, 19 nt, Homo sapiens
  misc_RNA (1)...(19): siRNA sense strand
gaguaucagccaaggggaa

SEQ ID NO: 2411244 - RNA, 19 nt, Homo sapiens
  misc_RNA (1)...(19): siRNA sense strand
caggacagccagagugcuu

SEQ ID NO: 2411245 - RNA, 19 nt, Homo sapiens
  misc_RNA (1)...(19): siRNA sense strand
cugaugaucgaaaguuaaa

SEQ ID NO: 2411246 - RNA, 19 nt, Homo sapiens
  misc_RNA (1)...(19): siRNA sense strand
cagcagaggagcacgagga

SEQ ID NO: 2411247 - RNA, 19 nt, Homo sapiens
  misc_RNA (1)...(19): siRNA sense strand
auagaugagccaagugaga

SEQ ID NO: 2411248 - RNA, 19 nt, Homo sapiens
  misc_RNA (1)...(19): siRNA sense strand
cagagugcuuaaaggagau

SEQ ID NO: 2411249 - RNA, 19 nt, Homo sapiens
  misc_RNA (1)...(19): siRNA sense strand
cggaaggaaccaccaguuu

SEQ ID NO: 2411250 - RNA, 19 nt, Homo sapiens
  misc_RNA (1)...(19): siRNA sense strand
guucuaaagagacugggaa

SEQ ID NO: 2411251 - RNA, 19 nt, Homo sapiens
  misc_RNA (1)...(19): siRNA sense strand
gugucaaguaucacaucaa

SEQ ID NO: 2411252 - RNA, 19 nt, Homo sapiens
  misc_RNA (1)...(19): siRNA sense strand
agggucagguggaguauca

SEQ ID NO: 2411253 - RNA, 19 nt, Homo sapiens
  misc_RNA (1)...(19): siRNA sense strand
ggaaaaccauauaggucga

SEQ ID NO: 2411254 - RNA, 19 nt, Homo sapiens
  misc_RNA (1)...(19): siRNA sense strand
guacuacauaaauggaaga

SEQ ID NO: 2411255 - RNA, 19 nt, Homo sapiens
  misc_RNA (1)...(19): siRNA sense strand
aauggaagacagauaucaa

SEQ ID NO: 2411256 - RNA, 19 nt, Homo sapiens
  misc_RNA (1)...(19): siRNA sense strand
gcggcagcaagaagaagaa

SEQ ID NO: 2411257 - RNA, 19 nt, Homo sapiens
  misc_RNA (1)...(19): siRNA sense strand
agaagaaacgagagggaau

SEQ ID NO: 2411258 - RNA, 19 nt, Homo sapiens
  misc_RNA (1)...(19): siRNA sense strand
uuugaugaguugagaacaa

SEQ ID NO: 2411259 - RNA, 19 nt, Homo sapiens
  misc_RNA (1)...(19): siRNA sense strand
gguagaaugaggagcaaaa

SEQ ID NO: 2411260 - RNA, 19 nt, Homo sapiens
  misc_RNA (1)...(19): siRNA sense strand
aggaaguggucgugagcca

SEQ ID NO: 2411261 - RNA, 19 nt, Homo sapiens
  misc_RNA (1)...(19): siRNA sense strand
uaaagaagaggaagggcaa

SEQ ID NO: 2411262 - RNA, 19 nt, Homo sapiens
  misc_RNA (1)...(19): siRNA sense strand
cuucagauuuccagcacaa

SEQ ID NO: 2411263 - RNA, 19 nt, Homo sapiens
  misc_RNA (1)...(19): siRNA sense strand
cuauauaugaacuggagaa

SEQ ID NO: 2411264 - RNA, 19 nt, Homo sapiens
  misc_RNA (1)...(19): siRNA sense strand
guaaagaagaggaagggca

SEQ ID NO: 2411265 - RNA, 19 nt, Homo sapiens
  misc_RNA (1)...(19): siRNA sense strand
gaagaagaaacgagaggga

SEQ ID NO: 2411266 - RNA, 19 nt, Homo sapiens
  misc_RNA (1)...(19): siRNA sense strand
acgaauagucugaguagau

SEQ ID NO: 2411267 - RNA, 19 nt, Homo sapiens
  misc_RNA (1)...(19): siRNA sense strand
cugaagaaccguugcccaa

SEQ ID NO: 2411268 - RNA, 19 nt, Homo sapiens
  misc_RNA (1)...(19): siRNA sense strand
agauagaacaugaugacau

SEQ ID NO: 2411269 - RNA, 19 nt, Homo sapiens
  misc_RNA (1)...(19): siRNA sense strand
guuuaagagaagucguuua

SEQ ID NO: 2411270 - RNA, 19 nt, Homo sapiens
  misc_RNA (1)...(19): siRNA sense strand
ccaagguaaagaagaggaa

SEQ ID NO: 2411271 - RNA, 19 nt, Homo sapiens
  misc_RNA (1)...(19): siRNA sense strand
cuucauuguuuguggacca

SEQ ID NO: 2411272 - RNA, 19 nt, Homo sapiens
  misc_RNA (1)...(19): siRNA sense strand
caugaaagaaugcuggcaa

SEQ ID NO: 2411273 - RNA, 19 nt, Homo sapiens
  misc_RNA (1)...(19): siRNA sense strand
uuugcuacuugaagagaua

SEQ ID NO: 2411274 - RNA, 19 nt, Homo sapiens
  misc_RNA (1)...(19): siRNA sense strand
gauugcaaagaaaggauaa

SEQ ID NO: 2411275 - RNA, 19 nt, Homo sapiens
  misc_RNA (1)...(19): siRNA sense strand
aaagaugcucagagagaga

SEQ ID NO: 2411276 - RNA, 19 nt, Homo sapiens
  misc_RNA (1)...(19): siRNA sense strand
uggcagagcgcgagaucga

SEQ ID NO: 2411277 - RNA, 19 nt, Homo sapiens
  misc_RNA (1)...(19): siRNA sense strand
ugcccaaggaagagaagaa

SEQ ID NO: 2411278 - RNA, 19 nt, Homo sapiens
  misc_RNA (1)...(19): siRNA sense strand
gguccugugaagagccaaa

SEQ ID NO: 2411279 - RNA, 19 nt, Homo sapiens
  misc_RNA (1)...(19): siRNA sense strand
ggagagaacuaaaucccau

SEQ ID NO: 2411280 - RNA, 19 nt, Homo sapiens
  misc_RNA (1)...(19): siRNA sense strand
auggauuagaacacagaaa

SEQ ID NO: 2411281 - RNA, 19 nt, Homo sapiens
  misc_RNA (1)...(19): siRNA sense strand
ggguagaaugaggagcaaa

SEQ ID NO: 2411282 - RNA, 19 nt, Homo sapiens
  misc_RNA (1)...(19): siRNA sense strand
ccuuaauucucgaacaguu

SEQ ID NO: 2411283 - RNA, 19 nt, Homo sapiens
  misc_RNA (1)...(19): siRNA sense strand
acacagaaaaccaaaacaa

SEQ ID NO: 2411284 - RNA, 19 nt, Homo sapiens
  misc_RNA (1)...(19): siRNA sense strand
acuugaagagauagaacau

SEQ ID NO: 2411285 - RNA, 19 nt, Homo sapiens
  misc_RNA (1)...(19): siRNA sense strand
gggaacugcucaccggaga

SEQ ID NO: 2411286 - RNA, 19 nt, Homo sapiens
  misc_RNA (1)...(19): siRNA sense strand
aguugagaacaaaggaaaa

SEQ ID NO: 2411287 - RNA, 19 nt, Homo sapiens
  misc_RNA (1)...(19): siRNA sense strand
gaacaaaggaaaaggagcu

SEQ ID NO: 2411288 - RNA, 19 nt, Homo sapiens
  misc_RNA (1)...(19): siRNA sense strand
ggaacacagucuuucgaca

SEQ ID NO: 2411289 - RNA, 19 nt, Homo sapiens
  misc_RNA (1)...(19): siRNA sense strand
gcugccaaggagagaacua

SEQ ID NO: 2411290 - RNA, 19 nt, Homo sapiens
  misc_RNA (1)...(19): siRNA sense strand
agggaauggcacaggacca

SEQ ID NO: 2411291 - RNA, 19 nt, Homo sapiens
  misc_RNA (1)...(19): siRNA sense strand
agggcaaguuuaagagaag

SEQ ID NO: 2411292 - RNA, 19 nt, Homo sapiens
  misc_RNA (1)...(19): siRNA sense strand
agcaauaaaacuuggggaa

SEQ ID NO: 2411293 - RNA, 19 nt, Homo sapiens
  misc_RNA (1)...(19): siRNA sense strand
aagagaagaagaaacgaga

SEQ ID NO: 2411294 - RNA, 19 nt, Homo sapiens
  misc_RNA (1)...(19): siRNA sense strand
acagcggacaugugggaau

SEQ ID NO: 2411295 - RNA, 19 nt, Homo sapiens
  misc_RNA (1)...(19): siRNA sense strand
ccacaaagugccugcugca

SEQ ID NO: 2411296 - RNA, 19 nt, Homo sapiens
  misc_RNA (1)...(19): siRNA sense strand
ggguagcagucaauaaacu

SEQ ID NO: 2411297 - RNA, 19 nt, Homo sapiens
  misc_RNA (1)...(19): siRNA sense strand
aggaagggcaaguuuaaga

SEQ ID NO: 2411298 - RNA, 19 nt, Homo sapiens
  misc_RNA (1)...(19): siRNA sense strand
cguuuaaagcucaaagaug

SEQ ID NO: 2411299 - RNA, 19 nt, Homo sapiens
  misc_RNA (1)...(19): siRNA sense strand
ggaacugcucaccggagaa

SEQ ID NO: 2411300 - RNA, 19 nt, Homo sapiens
  misc_RNA (1)...(19): siRNA sense strand
guuuaaagcucaaagaugg

SEQ ID NO: 2411301 - RNA, 19 nt, Homo sapiens
  misc_RNA (1)...(19): siRNA sense strand
aagauagaacagauugcaa

SEQ ID NO: 2411302 - RNA, 19 nt, Homo sapiens
  misc_RNA (1)...(19): siRNA sense strand
gggaacaaaucacaagaca

SEQ ID NO: 2411303 - RNA, 19 nt, Homo sapiens
  misc_RNA (1)...(19): siRNA sense strand
cguaaucagcacaaagaau

SEQ ID NO: 2411304 - RNA, 19 nt, Homo sapiens
  misc_RNA (1)...(19): siRNA sense strand
ggauaacagugguagccau

SEQ ID NO: 2411305 - RNA, 19 nt, Homo sapiens
  misc_RNA (1)...(19): siRNA sense strand
caaaacaaguugaugguga

SEQ ID NO: 2411306 - RNA, 19 nt, Homo sapiens
  misc_RNA (1)...(19): siRNA sense strand
ccugugaggaggugaucaa

SEQ ID NO: 2411307 - RNA, 19 nt, Homo sapiens
  misc_RNA (1)...(19): siRNA sense strand
auucaagauuucaugggaa

SEQ ID NO: 2411308 - RNA, 19 nt, Homo sapiens
  misc_RNA (1)...(19): siRNA sense strand
auucaauacuggaaagcca

SEQ ID NO: 2411309 - RNA, 19 nt, Homo sapiens
  misc_RNA (1)...(19): siRNA sense strand
guggaaaauuagaaggcau

SEQ ID NO: 2411310 - RNA, 19 nt, Homo sapiens
  misc_RNA (1)...(19): siRNA sense strand
aucacaagacaguggcaua

SEQ ID NO: 2411311 - RNA, 19 nt, Homo sapiens
  misc_RNA (1)...(19): siRNA sense strand
uggagaaggcugaagugau

SEQ ID NO: 2411312 - RNA, 19 nt, Homo sapiens
  misc_RNA (1)...(19): siRNA sense strand
uggcagaaaucacugguca

SEQ ID NO: 2411313 - RNA, 19 nt, Homo sapiens
  misc_RNA (1)...(19): siRNA sense strand
gguuugagauugccgcaga

SEQ ID NO: 2411314 - RNA, 19 nt, Homo sapiens
  misc_RNA (1)...(19): siRNA sense strand
cugaauucaauacuggaaa

SEQ ID NO: 2411315 - RNA, 19 nt, Homo sapiens
  misc_RNA (1)...(19): siRNA sense strand
acacaaggauguucccaca

SEQ ID NO: 2411316 - RNA, 19 nt, Homo sapiens
  misc_RNA (1)...(19): siRNA sense strand
ggacgggaacaaaucacaa

SEQ ID NO: 2411317 - RNA, 19 nt, Homo sapiens
  misc_RNA (1)...(19): siRNA sense strand
uguuauugcuccuguggga

SEQ ID NO: 2411318 - RNA, 19 nt, Homo sapiens
  misc_RNA (1)...(19): siRNA sense strand
gucugaauggagugaaauu

SEQ ID NO: 2411319 - RNA, 19 nt, Homo sapiens
  misc_RNA (1)...(19): siRNA sense strand
cagccaucugucaaggaua

SEQ ID NO: 2411320 - RNA, 19 nt, Homo sapiens
  misc_RNA (1)...(19): siRNA sense strand
agaagaagguggagcggaa

SEQ ID NO: 2411321 - RNA, 19 nt, Homo sapiens
  misc_RNA (1)...(19): siRNA sense strand
gugcagaaacagugggaca

SEQ ID NO: 2411322 - RNA, 19 nt, Homo sapiens
  misc_RNA (1)...(19): siRNA sense strand
gggcagaugaagaggagga

SEQ ID NO: 2411323 - RNA, 19 nt, Homo sapiens
  misc_RNA (1)...(19): siRNA sense strand
gaagcagagaauugcgaaa

SEQ ID NO: 2411324 - RNA, 19 nt, Homo sapiens
  misc_RNA (1)...(19): siRNA sense strand
aggaggaagcggagacuuu

SEQ ID NO: 2411325 - RNA, 19 nt, Homo sapiens
  misc_RNA (1)...(19): siRNA sense strand
acgaagaagaucaagaaaa

SEQ ID NO: 2411326 - RNA, 19 nt, Homo sapiens
  misc_RNA (1)...(19): siRNA sense strand
ccagaaaggcaaagagcgu

SEQ ID NO: 2411327 - RNA, 19 nt, Homo sapiens
  misc_RNA (1)...(19): siRNA sense strand
guucugaagcugaaggaga

SEQ ID NO: 2411328 - RNA, 19 nt, Homo sapiens
  misc_RNA (1)...(19): siRNA sense strand
cgggugaagugguggaagu

SEQ ID NO: 2411329 - RNA, 19 nt, Homo sapiens
  misc_RNA (1)...(19): siRNA sense strand
cugaagaaggaacuggaua

SEQ ID NO: 2411330 - RNA, 19 nt, Homo sapiens
  misc_RNA (1)...(19): siRNA sense strand
gcccgaaggguuagagaca

SEQ ID NO: 2411331 - RNA, 19 nt, Homo sapiens
  misc_RNA (1)...(19): siRNA sense strand
gggaggagaaggaagcaga

SEQ ID NO: 2411332 - RNA, 19 nt, Homo sapiens
  misc_RNA (1)...(19): siRNA sense strand
aggagaaggaagcagagaa

SEQ ID NO: 2411333 - RNA, 19 nt, Homo sapiens
  misc_RNA (1)...(19): siRNA sense strand
ggugcuaaucggaagaaga

SEQ ID NO: 2411334 - RNA, 19 nt, Homo sapiens
  misc_RNA (1)...(19): siRNA sense strand
acucagacuccgaggacga

SEQ ID NO: 2411335 - RNA, 19 nt, Homo sapiens
  misc_RNA (1)...(19): siRNA sense strand
ccaaacugaacgaagaaga

SEQ ID NO: 2411336 - RNA, 19 nt, Homo sapiens
  misc_RNA (1)...(19): siRNA sense strand
guguccaggugcagaaaca

SEQ ID NO: 2411337 - RNA, 19 nt, Homo sapiens
  misc_RNA (1)...(19): siRNA sense strand
cgaaagcagggccgagaau

SEQ ID NO: 2411338 - RNA, 19 nt, Homo sapiens
  misc_RNA (1)...(19): siRNA sense strand
gaaauuagcccuagguccu

SEQ ID NO: 2411339 - RNA, 19 nt, Homo sapiens
  misc_RNA (1)...(19): siRNA sense strand
gguggaagucggagacagu

SEQ ID NO: 2411340 - RNA, 19 nt, Homo sapiens
  misc_RNA (1)...(19): siRNA sense strand
caggugaagaggagggcga

SEQ ID NO: 2411341 - RNA, 19 nt, Homo sapiens
  misc_RNA (1)...(19): siRNA sense strand
caaugugggcagaugaaga

SEQ ID NO: 2411342 - RNA, 19 nt, Homo sapiens
  misc_RNA (1)...(19): siRNA sense strand
gcucuagaaauuagcccua

SEQ ID NO: 2411343 - RNA, 19 nt, Homo sapiens
  misc_RNA (1)...(19): siRNA sense strand
ggucaaugugggcagauga

SEQ ID NO: 2411344 - RNA, 19 nt, Homo sapiens
  misc_RNA (1)...(19): siRNA sense strand
uaggaaacagggaagggaa

SEQ ID NO: 2411345 - RNA, 19 nt, Homo sapiens
  misc_RNA (1)...(19): siRNA sense strand
agcagaaauggaagaaauu

SEQ ID NO: 2411346 - RNA, 19 nt, Homo sapiens
  misc_RNA (1)...(19): siRNA sense strand
ggaagaaaagaaagcucua

SEQ ID NO: 2411347 - RNA, 19 nt, Homo sapiens
  misc_RNA (1)...(19): siRNA sense strand
ccaaaggugcuaaucggaa

SEQ ID NO: 2411348 - RNA, 19 nt, Homo sapiens
  misc_RNA (1)...(19): siRNA sense strand
ugcacuacccagaggaaau

SEQ ID NO: 2411349 - RNA, 19 nt, Homo sapiens
  misc_RNA (1)...(19): siRNA sense strand
acuccgaggacgagagcca

SEQ ID NO: 2411350 - RNA, 19 nt, Homo sapiens
  misc_RNA (1)...(19): siRNA sense strand
cagaaaagggacaggagca

SEQ ID NO: 2411351 - RNA, 19 nt, Homo sapiens
  misc_RNA (1)...(19): siRNA sense strand
ccaaauaacaagugagccc

SEQ ID NO: 2411352 - RNA, 19 nt, Homo sapiens
  misc_RNA (1)...(19): siRNA sense strand
uggaggagauggagccguu

SEQ ID NO: 2411353 - RNA, 19 nt, Homo sapiens
  misc_RNA (1)...(19): siRNA sense strand
ggaagaaagggcagcgggu

SEQ ID NO: 2411354 - RNA, 19 nt, Homo sapiens
  misc_RNA (1)...(19): siRNA sense strand
ggccaagcuuccugaacca

SEQ ID NO: 2411355 - RNA, 19 nt, Homo sapiens
  misc_RNA (1)...(19): siRNA sense strand
gaggaaauugcaagagaag

SEQ ID NO: 2411356 - RNA, 19 nt, Homo sapiens
  misc_RNA (1)...(19): siRNA sense strand
gcuaaucggaagaagaacu

SEQ ID NO: 2411357 - RNA, 19 nt, Homo sapiens
  misc_RNA (1)...(19): siRNA sense strand
caggcagagcugaggcaga

SEQ ID NO: 2411358 - RNA, 19 nt, Homo sapiens
  misc_RNA (1)...(19): siRNA sense strand
ucauccaguaugugaacaa

SEQ ID NO: 2411359 - RNA, 19 nt, Homo sapiens
  misc_RNA (1)...(19): siRNA sense strand
gcgaaagcagggccgagaa

SEQ ID NO: 2411360 - RNA, 19 nt, Homo sapiens
  misc_RNA (1)...(19): siRNA sense strand
uguugaaauccaaggacca

SEQ ID NO: 2411361 - RNA, 19 nt, Homo sapiens
  misc_RNA (1)...(19): siRNA sense strand
ccugggagaagaugggaca

SEQ ID NO: 2411362 - RNA, 19 nt, Homo sapiens
  misc_RNA (1)...(19): siRNA sense strand
gggauuacgaacagcucuu

SEQ ID NO: 2411363 - RNA, 19 nt, Homo sapiens
  misc_RNA (1)...(19): siRNA sense strand
aauccaaggaccacgaaga

SEQ ID NO: 2411364 - RNA, 19 nt, Homo sapiens
  misc_RNA (1)...(19): siRNA sense strand
caucaaagcagaaaaggga

SEQ ID NO: 2411365 - RNA, 19 nt, Homo sapiens
  misc_RNA (1)...(19): siRNA sense strand
acgaagucgcacagaaguu

SEQ ID NO: 2411366 - RNA, 19 nt, Homo sapiens
  misc_RNA (1)...(19): siRNA sense strand
ccauaacgccgaugccaca

SEQ ID NO: 2411367 - RNA, 19 nt, Homo sapiens
  misc_RNA (1)...(19): siRNA sense strand
ucauugauguugaugcaga

SEQ ID NO: 2411368 - RNA, 19 nt, Homo sapiens
  misc_RNA (1)...(19): siRNA sense strand
aggaaucaggugugaccaa

SEQ ID NO: 2411369 - RNA, 19 nt, Homo sapiens
  misc_RNA (1)...(19): siRNA sense strand
ggccugaacugcaacgaga

SEQ ID NO: 2411370 - RNA, 19 nt, Homo sapiens
  misc_RNA (1)...(19): siRNA sense strand
ucaugauggaggagcugaa

SEQ ID NO: 2411371 - RNA, 19 nt, Homo sapiens
  misc_RNA (1)...(19): siRNA sense strand
uggacaaaggcuucaaaga

SEQ ID NO: 2411372 - RNA, 19 nt, Homo sapiens
  misc_RNA (1)...(19): siRNA sense strand
ccaagugugugcuggagga

SEQ ID NO: 2411373 - RNA, 19 nt, Homo sapiens
  misc_RNA (1)...(19): siRNA sense strand
uggaggagcugaaucccua

SEQ ID NO: 2411374 - RNA, 19 nt, Homo sapiens
  misc_RNA (1)...(19): siRNA sense strand
cuucaaaggaaucaggugu

SEQ ID NO: 2411375 - RNA, 19 nt, Homo sapiens
  misc_RNA (1)...(19): siRNA sense strand
cagccauauuccuggucau

SEQ ID NO: 2411376 - RNA, 19 nt, Homo sapiens
  misc_RNA (1)...(19): siRNA sense strand
ccuuaaaagaccugggaaa

SEQ ID NO: 2411377 - RNA, 19 nt, Homo sapiens
  misc_RNA (1)...(19): siRNA sense strand
guguguagccacugggaaa

SEQ ID NO: 2411378 - RNA, 19 nt, Homo sapiens
  misc_RNA (1)...(19): siRNA sense strand
cggcaucaaaugugacaaa

SEQ ID NO: 2411379 - RNA, 19 nt, Homo sapiens
  misc_RNA (1)...(19): siRNA sense strand
agacacaagcagaagggaa

SEQ ID NO: 2411380 - RNA, 19 nt, Homo sapiens
  misc_RNA (1)...(19): siRNA sense strand
gacagaagcuauaugggaa

SEQ ID NO: 2411381 - RNA, 19 nt, Homo sapiens
  misc_RNA (1)...(19): siRNA sense strand
acagaagcuauaugggaaa

SEQ ID NO: 2411382 - RNA, 19 nt, Homo sapiens
  misc_RNA (1)...(19): siRNA sense strand
ggagaaugcucuugcccuu

SEQ ID NO: 2411383 - RNA, 19 nt, Homo sapiens
  misc_RNA (1)...(19): siRNA sense strand
guguuaucauaguuggaaa

SEQ ID NO: 2411384 - RNA, 19 nt, Homo sapiens
  misc_RNA (1)...(19): siRNA sense strand
cugaacagcuuaagccgaa

SEQ ID NO: 2411385 - RNA, 19 nt, Homo sapiens
  misc_RNA (1)...(19): siRNA sense strand
aagcagaagggaaaggaau

SEQ ID NO: 2411386 - RNA, 19 nt, Homo sapiens
  misc_RNA (1)...(19): siRNA sense strand
ggggagaagacuauguaua

SEQ ID NO: 2411387 - RNA, 19 nt, Homo sapiens
  misc_RNA (1)...(19): siRNA sense strand
gaguguuguccaaggagua

SEQ ID NO: 2411388 - RNA, 19 nt, Homo sapiens
  misc_RNA (1)...(19): siRNA sense strand
gguuauguggagaugaaau

SEQ ID NO: 2411389 - RNA, 19 nt, Homo sapiens
  misc_RNA (1)...(19): siRNA sense strand
ccauaugcagagaucaaua

SEQ ID NO: 2411390 - RNA, 19 nt, Homo sapiens
  misc_RNA (1)...(19): siRNA sense strand
caguggcagauuugggaaa

SEQ ID NO: 2411391 - RNA, 19 nt, Homo sapiens
  misc_RNA (1)...(19): siRNA sense strand
cgacauggggagaagacua

SEQ ID NO: 2411392 - RNA, 19 nt, Homo sapiens
  misc_RNA (1)...(19): siRNA sense strand
cugauaugccaaugucaaa

SEQ ID NO: 2411393 - RNA, 19 nt, Homo sapiens
  misc_RNA (1)...(19): siRNA sense strand
cugggaaccuaugggauaa

SEQ ID NO: 2411394 - RNA, 19 nt, Homo sapiens
  misc_RNA (1)...(19): siRNA sense strand
cuucaggaacauauggcua

SEQ ID NO: 2411395 - RNA, 19 nt, Homo sapiens
  misc_RNA (1)...(19): siRNA sense strand
gggagcgagaugugaucaa

SEQ ID NO: 2411396 - RNA, 19 nt, Homo sapiens
  misc_RNA (1)...(19): siRNA sense strand
gggaacggugccaggauga

SEQ ID NO: 2411397 - RNA, 19 nt, Homo sapiens
  misc_RNA (1)...(19): siRNA sense strand
cggauggaagggagcgaga

SEQ ID NO: 2411398 - RNA, 19 nt, Homo sapiens
  misc_RNA (1)...(19): siRNA sense strand
caaucaacuguuugugaau

SEQ ID NO: 2411399 - RNA, 19 nt, Homo sapiens
  misc_RNA (1)...(19): siRNA sense strand
caggaaugucuaugaaguu

SEQ ID NO: 2411400 - RNA, 19 nt, Homo sapiens
  misc_RNA (1)...(19): siRNA sense strand
cagagaugccagugccaga

SEQ ID NO: 2411401 - RNA, 19 nt, Homo sapiens
  misc_RNA (1)...(19): siRNA sense strand
gggaaguguuaccacguga

SEQ ID NO: 2411402 - RNA, 19 nt, Homo sapiens
  misc_RNA (1)...(19): siRNA sense strand
ucuuuguccuccugguaaa

SEQ ID NO: 2411403 - RNA, 19 nt, Homo sapiens
  misc_RNA (1)...(19): siRNA sense strand
agggaaaggaaucaagcau

SEQ ID NO: 2411404 - RNA, 19 nt, Homo sapiens
  misc_RNA (1)...(19): siRNA sense strand
uccaaggaguauucagcaa

SEQ ID NO: 2411405 - RNA, 19 nt, Homo sapiens
  misc_RNA (1)...(19): siRNA sense strand
ucaacggagggaaguguua

SEQ ID NO: 2411406 - RNA, 19 nt, Homo sapiens
  misc_RNA (1)...(19): siRNA sense strand
ccccauaugcagagaucaa

SEQ ID NO: 2411407 - RNA, 19 nt, Homo sapiens
  misc_RNA (1)...(19): siRNA sense strand
ggaaaggaaucaagcaugc

SEQ ID NO: 2411408 - RNA, 19 nt, Homo sapiens
  misc_RNA (1)...(19): siRNA sense strand
aguugaaccuacagugagu

SEQ ID NO: 2411409 - RNA, 19 nt, Homo sapiens
  misc_RNA (1)...(19): siRNA sense strand
ccuaauguguguagccacu

SEQ ID NO: 2411410 - RNA, 19 nt, Homo sapiens
  misc_RNA (1)...(19): siRNA sense strand
cuaugaaguugaaccuaca

SEQ ID NO: 2411411 - RNA, 19 nt, Homo sapiens
  misc_RNA (1)...(19): siRNA sense strand
gcaagaggacaguggaggu

SEQ ID NO: 2411412 - RNA, 19 nt, Homo sapiens
  misc_RNA (1)...(19): siRNA sense strand
gcagaagggaaaggaauca

SEQ ID NO: 2411413 - RNA, 19 nt, Homo sapiens
  misc_RNA (1)...(19): siRNA sense strand
cagcaaugguggaaacgcu

SEQ ID NO: 2411414 - RNA, 19 nt, Homo sapiens
  misc_RNA (1)...(19): siRNA sense strand
caagcagaagggaaaggaa

SEQ ID NO: 2411415 - RNA, 19 nt, Homo sapiens
  misc_RNA (1)...(19): siRNA sense strand
ccgagggucgcuuuggaaa

SEQ ID NO: 2411416 - RNA, 19 nt, Homo sapiens
  misc_RNA (1)...(19): siRNA sense strand
ggacagggcucuacugcac

SEQ ID NO: 2411417 - RNA, 19 nt, Homo sapiens
  misc_RNA (1)...(19): siRNA sense strand
guguaauaacuuuggacaa

SEQ ID NO: 2411418 - RNA, 19 nt, Homo sapiens
  misc_RNA (1)...(19): siRNA sense strand
ggaauguauuugacgggaa

SEQ ID NO: 2411419 - RNA, 19 nt, Homo sapiens
  misc_RNA (1)...(19): siRNA sense strand
gcaugguggagcaggauaa

SEQ ID NO: 2411420 - RNA, 19 nt, Homo sapiens
  misc_RNA (1)...(19): siRNA sense strand
gagaagagcugcaggcugu

SEQ ID NO: 2411421 - RNA, 19 nt, Homo sapiens
  misc_RNA (1)...(19): siRNA sense strand
acauaaucccagagggcau

SEQ ID NO: 2411422 - RNA, 19 nt, Homo sapiens
  misc_RNA (1)...(19): siRNA sense strand
guguacaaacccugaaauu

SEQ ID NO: 2411423 - RNA, 19 nt, Homo sapiens
  misc_RNA (1)...(19): siRNA sense strand
cuuaaagguugcuagaaca

SEQ ID NO: 2411424 - RNA, 19 nt, Homo sapiens
  misc_RNA (1)...(19): siRNA sense strand
cucaagaacaacagggaga

SEQ ID NO: 2411425 - RNA, 19 nt, Homo sapiens
  misc_RNA (1)...(19): siRNA sense strand
ggccugaaguaaagcaaca

SEQ ID NO: 2411426 - RNA, 19 nt, Homo sapiens
  misc_RNA (1)...(19): siRNA sense strand
acgauuugcucuaaagaca

SEQ ID NO: 2411427 - RNA, 19 nt, Homo sapiens
  misc_RNA (1)...(19): siRNA sense strand
ccaugaauccaaacaggaa

SEQ ID NO: 2411428 - RNA, 19 nt, Homo sapiens
  misc_RNA (1)...(19): siRNA sense strand
caaaauagaucucggcuca

SEQ ID NO: 2411429 - RNA, 19 nt, Homo sapiens
  misc_RNA (1)...(19): siRNA sense strand
gagcaggauaagagagaug

SEQ ID NO: 2411430 - RNA, 19 nt, Homo sapiens
  misc_RNA (1)...(19): siRNA sense strand
gcagaaagcuaccuggugu

SEQ ID NO: 2411431 - RNA, 19 nt, Homo sapiens
  misc_RNA (1)...(19): siRNA sense strand
ucaaagaacuggcagagca

SEQ ID NO: 2411432 - RNA, 19 nt, Homo sapiens
  misc_RNA (1)...(19): siRNA sense strand
gcaggauaagagagaugaa

SEQ ID NO: 2411433 - RNA, 19 nt, Homo sapiens
  misc_RNA (1)...(19): siRNA sense strand
gaugaaugggugaaacgaa

SEQ ID NO: 2411434 - RNA, 19 nt, Homo sapiens
  misc_RNA (1)...(19): siRNA sense strand
ccugaaucuaggcaagaaa

SEQ ID NO: 2411435 - RNA, 19 nt, Homo sapiens
  misc_RNA (1)...(19): siRNA sense strand
cagaaagcuaccuggugua

SEQ ID NO: 2411436 - RNA, 19 nt, Homo sapiens
  misc_RNA (1)...(19): siRNA sense strand
gagagaugaaugggugaaa

SEQ ID NO: 2411437 - RNA, 19 nt, Homo sapiens
  misc_RNA (1)...(19): siRNA sense strand
cgcuuugccuggaggauuu

SEQ ID NO: 2411438 - RNA, 19 nt, Homo sapiens
  misc_RNA (1)...(19): siRNA sense strand
aggccugcaugaaggagaa

SEQ ID NO: 2411439 - RNA, 19 nt, Homo sapiens
  misc_RNA (1)...(19): siRNA sense strand
aggcaagaaauuaugugua

SEQ ID NO: 2411440 - RNA, 19 nt, Homo sapiens
  misc_RNA (1)...(19): siRNA sense strand
cccugaaauuaaacaagaa

SEQ ID NO: 2411441 - RNA, 19 nt, Homo sapiens
  misc_RNA (1)...(19): siRNA sense strand
uggagcaggauaagagaga

SEQ ID NO: 2411442 - RNA, 19 nt, Homo sapiens
  misc_RNA (1)...(19): siRNA sense strand
ucuuaaagguugcuagaac

SEQ ID NO: 2411443 - RNA, 19 nt, Homo sapiens
  misc_RNA (1)...(19): siRNA sense strand
cccuagaagaugagcuuga

SEQ ID NO: 2411444 - RNA, 19 nt, Homo sapiens
  misc_RNA (1)...(19): siRNA sense strand
caucauauuagcuguguca

SEQ ID NO: 2411445 - RNA, 19 nt, Homo sapiens
  misc_RNA (1)...(19): siRNA sense strand
ucauauuagcugugucaga

SEQ ID NO: 2411446 - RNA, 19 nt, Homo sapiens
  misc_RNA (1)...(19): siRNA sense strand
ccucaagagaagagcugca

SEQ ID NO: 2411447 - RNA, 19 nt, Homo sapiens
  misc_RNA (1)...(19): siRNA sense strand
accaagagccagaaauaca

SEQ ID NO: 2411448 - RNA, 19 nt, Homo sapiens
  misc_RNA (1)...(19): siRNA sense strand
cccuggaagacgagugauu

SEQ ID NO: 2411449 - RNA, 19 nt, Homo sapiens
  misc_RNA (1)...(19): siRNA sense strand
cagcauaacugucuuggga

SEQ ID NO: 2411450 - RNA, 19 nt, Homo sapiens
  misc_RNA (1)...(19): siRNA sense strand
ccuccuuggcaacgacaua

SEQ ID NO: 2411451 - RNA, 19 nt, Homo sapiens
  misc_RNA (1)...(19): siRNA sense strand
acgccuaguuugaaaauau

SEQ ID NO: 2411452 - RNA, 19 nt, Homo sapiens
  misc_RNA (1)...(19): siRNA sense strand
ccauauaucgaaaguucuu

SEQ ID NO: 2411453 - RNA, 19 nt, Homo sapiens
  misc_RNA (1)...(19): siRNA sense strand
gggugugagagguuugcaa

SEQ ID NO: 2411454 - RNA, 19 nt, Homo sapiens
  misc_RNA (1)...(19): siRNA sense strand
ggguuaugcuguggagguu

SEQ ID NO: 2411455 - RNA, 19 nt, Homo sapiens
  misc_RNA (1)...(19): siRNA sense strand
aggacgggcucuggguaua

SEQ ID NO: 2411456 - RNA, 19 nt, Homo sapiens
  misc_RNA (1)...(19): siRNA sense strand
aagcagacaguaugagcau

SEQ ID NO: 2411457 - RNA, 19 nt, Homo sapiens
  misc_RNA (1)...(19): siRNA sense strand
acgcugaaaucaaucaaaa

SEQ ID NO: 2411458 - RNA, 19 nt, Homo sapiens
  misc_RNA (1)...(19): siRNA sense strand
gugagagguuugcaaggau

SEQ ID NO: 2411459 - RNA, 19 nt, Homo sapiens
  misc_RNA (1)...(19): siRNA sense strand
acccaaagguguaauaacu

SEQ ID NO: 2411460 - RNA, 19 nt, Homo sapiens
  misc_RNA (1)...(19): siRNA sense strand
ccaaauuccacaaccugaa

SEQ ID NO: 2411461 - RNA, 19 nt, Homo sapiens
  misc_RNA (1)...(19): siRNA sense strand
ccauugugguugaugccau

SEQ ID NO: 2411462 - RNA, 19 nt, Homo sapiens
  misc_RNA (1)...(19): siRNA sense strand
caggacgggcucuggguau

SEQ ID NO: 2411463 - RNA, 19 nt, Homo sapiens
  misc_RNA (1)...(19): siRNA sense strand
gcuaugaggcugaggauga

SEQ ID NO: 2411464 - RNA, 19 nt, Homo sapiens
  misc_RNA (1)...(19): siRNA sense strand
gcgcacaggcagaggaacu

SEQ ID NO: 2411465 - RNA, 19 nt, Homo sapiens
  misc_RNA (1)...(19): siRNA sense strand
ucgaauggccaaacugaua

SEQ ID NO: 2411466 - RNA, 19 nt, Homo sapiens
  misc_RNA (1)...(19): siRNA sense strand
cagcagacgcccuccuaaa

SEQ ID NO: 2411467 - RNA, 19 nt, Homo sapiens
  misc_RNA (1)...(19): siRNA sense strand
agggcaaguacaagcgcaa

SEQ ID NO: 2411468 - RNA, 19 nt, Homo sapiens
  misc_RNA (1)...(19): siRNA sense strand
ggguauaugagaacggacu

SEQ ID NO: 2411469 - RNA, 19 nt, Homo sapiens
  misc_RNA (1)...(19): siRNA sense strand
ggaugaggcugggaugcaa

SEQ ID NO: 2411470 - RNA, 19 nt, Homo sapiens
  misc_RNA (1)...(19): siRNA sense strand
cagcgacaguucaggaagu

SEQ ID NO: 2411471 - RNA, 19 nt, Homo sapiens
  misc_RNA (1)...(19): siRNA sense strand
agguuaaggagaaggugga

SEQ ID NO: 2411472 - RNA, 19 nt, Homo sapiens
  misc_RNA (1)...(19): siRNA sense strand
cgacaguucaggaagucuu

SEQ ID NO: 2411473 - RNA, 19 nt, Homo sapiens
  misc_RNA (1)...(19): siRNA sense strand
ccaaaagcuucgagagcau

SEQ ID NO: 2411474 - RNA, 19 nt, Homo sapiens
  misc_RNA (1)...(19): siRNA sense strand
gagaagcuguugaaggaga

SEQ ID NO: 2411475 - RNA, 19 nt, Homo sapiens
  misc_RNA (1)...(19): siRNA sense strand
ccgaugggucugugaagaa

SEQ ID NO: 2411476 - RNA, 19 nt, Homo sapiens
  misc_RNA (1)...(19): siRNA sense strand
gugugaaggcgcugaccua

SEQ ID NO: 2411477 - RNA, 19 nt, Homo sapiens
  misc_RNA (1)...(19): siRNA sense strand
cggcacaguuggagguaac

SEQ ID NO: 2411478 - RNA, 19 nt, Homo sapiens
  misc_RNA (1)...(19): siRNA sense strand
gcagaauacacauuggaga

SEQ ID NO: 2411479 - RNA, 19 nt, Homo sapiens
  misc_RNA (1)...(19): siRNA sense strand
agagaagagcagugagaag

SEQ ID NO: 2411480 - RNA, 19 nt, Homo sapiens
  misc_RNA (1)...(19): siRNA sense strand
gaguucaggaaguggauga

SEQ ID NO: 2411481 - RNA, 19 nt, Homo sapiens
  misc_RNA (1)...(19): siRNA sense strand
caugaaggaagguggcaga

SEQ ID NO: 2411482 - RNA, 19 nt, Homo sapiens
  misc_RNA (1)...(19): siRNA sense strand
ggaaaauggugguggcuug

SEQ ID NO: 2411483 - RNA, 19 nt, Homo sapiens
  misc_RNA (1)...(19): siRNA sense strand
ccccgaaaaccuuggaaaa

SEQ ID NO: 2411484 - RNA, 19 nt, Homo sapiens
  misc_RNA (1)...(19): siRNA sense strand
cugaaggagcgguuugcaa

SEQ ID NO: 2411485 - RNA, 19 nt, Homo sapiens
  misc_RNA (1)...(19): siRNA sense strand
auucaagcgcagaaggaga

SEQ ID NO: 2411486 - RNA, 19 nt, Homo sapiens
  misc_RNA (1)...(19): siRNA sense strand
gagaagggccugagagagc

SEQ ID NO: 2411487 - RNA, 19 nt, Homo sapiens
  misc_RNA (1)...(19): siRNA sense strand
agcggaagcccaagaagaa

SEQ ID NO: 2411488 - RNA, 19 nt, Homo sapiens
  misc_RNA (1)...(19): siRNA sense strand
ggagaagcugucuggccua

SEQ ID NO: 2411489 - RNA, 19 nt, Homo sapiens
  misc_RNA (1)...(19): siRNA sense strand
aagaguggagggagcgaau

SEQ ID NO: 2411490 - RNA, 19 nt, Homo sapiens
  misc_RNA (1)...(19): siRNA sense strand
cgcaagaagaagcuaaaca

SEQ ID NO: 2411491 - RNA, 19 nt, Homo sapiens
  misc_RNA (1)...(19): siRNA sense strand
ccuacaacgaccugauuca

SEQ ID NO: 2411492 - RNA, 19 nt, Homo sapiens
  misc_RNA (1)...(19): siRNA sense strand
ucagaagaguggagggagc

SEQ ID NO: 2411493 - RNA, 19 nt, Homo sapiens
  misc_RNA (1)...(19): siRNA sense strand
gaggagaucaggaggcugu

SEQ ID NO: 2411494 - RNA, 19 nt, Homo sapiens
  misc_RNA (1)...(19): siRNA sense strand
gcauuguggagcuagagaa

SEQ ID NO: 2411495 - RNA, 19 nt, Homo sapiens
  misc_RNA (1)...(19): siRNA sense strand
caaucuccuuagaaagcaa

SEQ ID NO: 2411496 - RNA, 19 nt, Homo sapiens
  misc_RNA (1)...(19): siRNA sense strand
acaguagaaacuugaguga

SEQ ID NO: 2411497 - RNA, 19 nt, Homo sapiens
  misc_RNA (1)...(19): siRNA sense strand
ucggagaagcagaggcacu

SEQ ID NO: 2411498 - RNA, 19 nt, Homo sapiens
  misc_RNA (1)...(19): siRNA sense strand
acucuggugcugaggaaga

SEQ ID NO: 2411499 - RNA, 19 nt, Homo sapiens
  misc_RNA (1)...(19): siRNA sense strand
agugaagccaagaggagga

SEQ ID NO: 2411500 - RNA, 19 nt, Homo sapiens
  misc_RNA (1)...(19): siRNA sense strand
ccaugucccugcaggccaa

SEQ ID NO: 2411501 - RNA, 19 nt, Homo sapiens
  misc_RNA (1)...(19): siRNA sense strand
cuacaagcaucacuggcaa

SEQ ID NO: 2411502 - RNA, 19 nt, Homo sapiens
  misc_RNA (1)...(19): siRNA sense strand
ccuacguggaggcggagua

SEQ ID NO: 2411503 - RNA, 19 nt, Homo sapiens
  misc_RNA (1)...(19): siRNA sense strand
cugcuucccugaugggcua

SEQ ID NO: 2411504 - RNA, 19 nt, Homo sapiens
  misc_RNA (1)...(19): siRNA sense strand
gcaagaccauugugaugaa

SEQ ID NO: 2411505 - RNA, 19 nt, Homo sapiens
  misc_RNA (1)...(19): siRNA sense strand
aggaagauuguguggucaa

SEQ ID NO: 2411506 - RNA, 19 nt, Homo sapiens
  misc_RNA (1)...(19): siRNA sense strand
acaacaagucugaguacau

SEQ ID NO: 2411507 - RNA, 19 nt, Homo sapiens
  misc_RNA (1)...(19): siRNA sense strand
gugaaaagucguaguguca

SEQ ID NO: 2411508 - RNA, 19 nt, Homo sapiens
  misc_RNA (1)...(19): siRNA sense strand
acgucauuguguugugaaa

SEQ ID NO: 2411509 - RNA, 19 nt, Homo sapiens
  misc_RNA (1)...(19): siRNA sense strand
cagucaguguuguguggaa

SEQ ID NO: 2411510 - RNA, 19 nt, Homo sapiens
  misc_RNA (1)...(19): siRNA sense strand
cauucaagaaguucagcaa

SEQ ID NO: 2411511 - RNA, 19 nt, Homo sapiens
  misc_RNA (1)...(19): siRNA sense strand
cugcaaaauucuugacaac

SEQ ID NO: 2411512 - RNA, 19 nt, Homo sapiens
  misc_RNA (1)...(19): siRNA sense strand
gcaucugggaacaaaguca

SEQ ID NO: 2411513 - RNA, 19 nt, Homo sapiens
  misc_RNA (1)...(19): siRNA sense strand
acugaagauccgagaguaa

SEQ ID NO: 2411514 - RNA, 19 nt, Homo sapiens
  misc_RNA (1)...(19): siRNA sense strand
ggaaauguauuaagggaga

SEQ ID NO: 2411515 - RNA, 19 nt, Homo sapiens
  misc_RNA (1)...(19): siRNA sense strand
caguggaacgcaagggaaa

SEQ ID NO: 2411516 - RNA, 19 nt, Homo sapiens
  misc_RNA (1)...(19): siRNA sense strand
aaauuaaacuggagugcga

SEQ ID NO: 2411517 - RNA, 19 nt, Homo sapiens
  misc_RNA (1)...(19): siRNA sense strand
cuacaaagaaagaaggagu

SEQ ID NO: 2411518 - RNA, 19 nt, Homo sapiens
  misc_RNA (1)...(19): siRNA sense strand
aagaaacacaagaagagaa

SEQ ID NO: 2411519 - RNA, 19 nt, Homo sapiens
  misc_RNA (1)...(19): siRNA sense strand
cgaugaugaaauagauaca

SEQ ID NO: 2411520 - RNA, 19 nt, Homo sapiens
  misc_RNA (1)...(19): siRNA sense strand
gucaggaaucagaagauaa

SEQ ID NO: 2411521 - RNA, 19 nt, Homo sapiens
  misc_RNA (1)...(19): siRNA sense strand
augcagagauagaaaagaa

SEQ ID NO: 2411522 - RNA, 19 nt, Homo sapiens
  misc_RNA (1)...(19): siRNA sense strand
auuuagacacucugcaaua

SEQ ID NO: 2411523 - RNA, 19 nt, Homo sapiens
  misc_RNA (1)...(19): siRNA sense strand
caugaugcagagauagaaa

SEQ ID NO: 2411524 - RNA, 19 nt, Homo sapiens
  misc_RNA (1)...(19): siRNA sense strand
agaaagaaggaguaaaaga

SEQ ID NO: 2411525 - RNA, 19 nt, Homo sapiens
  misc_RNA (1)...(19): siRNA sense strand
uugaagaaacacaagaaga

SEQ ID NO: 2411526 - RNA, 19 nt, Homo sapiens
  misc_RNA (1)...(19): siRNA sense strand
cuaaagagaagcagcagca

SEQ ID NO: 2411527 - RNA, 19 nt, Homo sapiens
  misc_RNA (1)...(19): siRNA sense strand
cagaagaaaaugaagcgaa

SEQ ID NO: 2411528 - RNA, 19 nt, Homo sapiens
  misc_RNA (1)...(19): siRNA sense strand
aguugaagaaacacaagaa

SEQ ID NO: 2411529 - RNA, 19 nt, Homo sapiens
  misc_RNA (1)...(19): siRNA sense strand
aaggaaauguauuaaggga

SEQ ID NO: 2411530 - RNA, 19 nt, Homo sapiens
  misc_RNA (1)...(19): siRNA sense strand
cugaaaagaagucauguaa

SEQ ID NO: 2411531 - RNA, 19 nt, Homo sapiens
  misc_RNA (1)...(19): siRNA sense strand
agaauggcaaacagaagaa

SEQ ID NO: 2411532 - RNA, 19 nt, Homo sapiens
  misc_RNA (1)...(19): siRNA sense strand
augguaaaccuaaagagaa

SEQ ID NO: 2411533 - RNA, 19 nt, Homo sapiens
  misc_RNA (1)...(19): siRNA sense strand
caaaauguuaucagggaga

SEQ ID NO: 2411534 - RNA, 19 nt, Homo sapiens
  misc_RNA (1)...(19): siRNA sense strand
cagaaguugaagaaacaca

SEQ ID NO: 2411535 - RNA, 19 nt, Homo sapiens
  misc_RNA (1)...(19): siRNA sense strand
uggaaacaaaggaucaaau

SEQ ID NO: 2411536 - RNA, 19 nt, Homo sapiens
  misc_RNA (1)...(19): siRNA sense strand
ugacgaaagaaucgaugau

SEQ ID NO: 2411537 - RNA, 19 nt, Homo sapiens
  misc_RNA (1)...(19): siRNA sense strand
gcucaaugccaaagcccaa

SEQ ID NO: 2411538 - RNA, 19 nt, Homo sapiens
  misc_RNA (1)...(19): siRNA sense strand
gggugguguuaacggguaa

SEQ ID NO: 2411539 - RNA, 19 nt, Homo sapiens
  misc_RNA (1)...(19): siRNA sense strand
ccgaaggcaccgagcagaa

SEQ ID NO: 2411540 - RNA, 19 nt, Homo sapiens
  misc_RNA (1)...(19): siRNA sense strand
caggaaggaccaagcggaa

SEQ ID NO: 2411541 - RNA, 19 nt, Homo sapiens
  misc_RNA (1)...(19): siRNA sense strand
gcaacaaacuaaagcggcu

SEQ ID NO: 2411542 - RNA, 19 nt, Homo sapiens
  misc_RNA (1)...(19): siRNA sense strand
gggaauuguguuuggacca

SEQ ID NO: 2411543 - RNA, 19 nt, Homo sapiens
  misc_RNA (1)...(19): siRNA sense strand
acacagacccugaagagga

SEQ ID NO: 2411544 - RNA, 19 nt, Homo sapiens
  misc_RNA (1)...(19): siRNA sense strand
ggaccaagggaguggggau

SEQ ID NO: 2411545 - RNA, 19 nt, Homo sapiens
  misc_RNA (1)...(19): siRNA sense strand
ggaacuuggcaguggucca

SEQ ID NO: 2411546 - RNA, 19 nt, Homo sapiens
  misc_RNA (1)...(19): siRNA sense strand
agucggaccacgagacaga

SEQ ID NO: 2411547 - RNA, 19 nt, Homo sapiens
  misc_RNA (1)...(19): siRNA sense strand
acgaagaagaggagucgga

SEQ ID NO: 2411548 - RNA, 19 nt, Homo sapiens
  misc_RNA (1)...(19): siRNA sense strand
ggauaaaagaggucuagau

SEQ ID NO: 2411549 - RNA, 19 nt, Homo sapiens
  misc_RNA (1)...(19): siRNA sense strand
gggaggacgaagaagagga

SEQ ID NO: 2411550 - RNA, 19 nt, Homo sapiens
  misc_RNA (1)...(19): siRNA sense strand
acaagaauuaauaggcuca

SEQ ID NO: 2411551 - RNA, 19 nt, Homo sapiens
  misc_RNA (1)...(19): siRNA sense strand
aggcaaagggcuucagauc

SEQ ID NO: 2411552 - RNA, 19 nt, Homo sapiens
  misc_RNA (1)...(19): siRNA sense strand
uuaauaggcucaaugccaa

SEQ ID NO: 2411553 - RNA, 19 nt, Homo sapiens
  misc_RNA (1)...(19): siRNA sense strand
cccagaacagccaggacaa

SEQ ID NO: 2411554 - RNA, 19 nt, Homo sapiens
  misc_RNA (1)...(19): siRNA sense strand
uaauaggcucaaugccaaa

SEQ ID NO: 2411555 - RNA, 19 nt, Homo sapiens
  misc_RNA (1)...(19): siRNA sense strand
auguaaagcaugugggaaa

SEQ ID NO: 2411556 - RNA, 19 nt, Homo sapiens
  misc_RNA (1)...(19): siRNA sense strand
ugguggaaauggagagaaa

SEQ ID NO: 2411557 - RNA, 19 nt, Homo sapiens
  misc_RNA (1)...(19): siRNA sense strand
acuuagaacuagaggaaaa

SEQ ID NO: 2411558 - RNA, 19 nt, Homo sapiens
  misc_RNA (1)...(19): siRNA sense strand
gugcaacaaaugugggaaa

SEQ ID NO: 2411559 - RNA, 19 nt, Homo sapiens
  misc_RNA (1)...(19): siRNA sense strand
auguaaggaaugugggaaa

SEQ ID NO: 2411560 - RNA, 19 nt, Homo sapiens
  misc_RNA (1)...(19): siRNA sense strand
gaucaaacucagagaaacu

SEQ ID NO: 2411561 - RNA, 19 nt, Homo sapiens
  misc_RNA (1)...(19): siRNA sense strand
gaguguaaucaaugugaaa

SEQ ID NO: 2411562 - RNA, 19 nt, Homo sapiens
  misc_RNA (1)...(19): siRNA sense strand
aauuuaugguggagagaga

SEQ ID NO: 2411563 - RNA, 19 nt, Homo sapiens
  misc_RNA (1)...(19): siRNA sense strand
auauaaggaaugugggcaa

SEQ ID NO: 2411564 - RNA, 19 nt, Homo sapiens
  misc_RNA (1)...(19): siRNA sense strand
augugaugcuggagaacua

SEQ ID NO: 2411565 - RNA, 19 nt, Homo sapiens
  misc_RNA (1)...(19): siRNA sense strand
cuuaagacucacaggagaa

SEQ ID NO: 2411566 - RNA, 19 nt, Homo sapiens
  misc_RNA (1)...(19): siRNA sense strand
uggaucaaacucagagaaa

SEQ ID NO: 2411567 - RNA, 19 nt, Homo sapiens
  misc_RNA (1)...(19): siRNA sense strand
ccguaugagugcaacaaau

SEQ ID NO: 2411568 - RNA, 19 nt, Homo sapiens
  misc_RNA (1)...(19): siRNA sense strand
ccacauaucuuauucgaca

SEQ ID NO: 2411569 - RNA, 19 nt, Homo sapiens
  misc_RNA (1)...(19): siRNA sense strand
uuguaaugaauguggcaaa

SEQ ID NO: 2411570 - RNA, 19 nt, Homo sapiens
  misc_RNA (1)...(19): siRNA sense strand
augugaggaaugugggaaa

SEQ ID NO: 2411571 - RNA, 19 nt, Homo sapiens
  misc_RNA (1)...(19): siRNA sense strand
caguagauugggagaguca

SEQ ID NO: 2411572 - RNA, 19 nt, Homo sapiens
  misc_RNA (1)...(19): siRNA sense strand
gagaagucacagugcagaa

SEQ ID NO: 2411573 - RNA, 19 nt, Homo sapiens
  misc_RNA (1)...(19): siRNA sense strand
ccuuaagacucacaggaga

SEQ ID NO: 2411574 - RNA, 19 nt, Homo sapiens
  misc_RNA (1)...(19): siRNA sense strand
augucaggaaugugggaaa

SEQ ID NO: 2411575 - RNA, 19 nt, Homo sapiens
  misc_RNA (1)...(19): siRNA sense strand
auguaaggaauguggaaaa

SEQ ID NO: 2411576 - RNA, 19 nt, Homo sapiens
  misc_RNA (1)...(19): siRNA sense strand
cuguaaucaaugugaaaca

SEQ ID NO: 2411577 - RNA, 19 nt, Homo sapiens
  misc_RNA (1)...(19): siRNA sense strand
uguaagaauuuauggugga

SEQ ID NO: 2411578 - RNA, 19 nt, Homo sapiens
  misc_RNA (1)...(19): siRNA sense strand
caauguaaggaauguggaa

SEQ ID NO: 2411579 - RNA, 19 nt, Homo sapiens
  misc_RNA (1)...(19): siRNA sense strand
ucagagaauguguaagaau

SEQ ID NO: 2411580 - RNA, 19 nt, Homo sapiens
  misc_RNA (1)...(19): siRNA sense strand
aagucauaguguggagaaa

SEQ ID NO: 2411581 - RNA, 19 nt, Homo sapiens
  misc_RNA (1)...(19): siRNA sense strand
gcaaacucaagauggagaa

SEQ ID NO: 2411582 - RNA, 19 nt, Homo sapiens
  misc_RNA (1)...(19): siRNA sense strand
aggaacuguuugacuuuaa

SEQ ID NO: 2411583 - RNA, 19 nt, Homo sapiens
  misc_RNA (1)...(19): siRNA sense strand
cuauaagaaucuaguugca

SEQ ID NO: 2411584 - RNA, 19 nt, Homo sapiens
  misc_RNA (1)...(19): siRNA sense strand
aacucacacucaagagaaa

SEQ ID NO: 2411585 - RNA, 19 nt, Homo sapiens
  misc_RNA (1)...(19): siRNA sense strand
aaagaaaaccugugagugu

SEQ ID NO: 2411586 - RNA, 19 nt, Homo sapiens
  misc_RNA (1)...(19): siRNA sense strand
acaaauuacucucaggacu

SEQ ID NO: 2411587 - RNA, 19 nt, Homo sapiens
  misc_RNA (1)...(19): siRNA sense strand
aggaguaugucgaaaccuu

SEQ ID NO: 2411588 - RNA, 19 nt, Homo sapiens
  misc_RNA (1)...(19): siRNA sense strand
gaacauaagaaauuuggca

SEQ ID NO: 2411589 - RNA, 19 nt, Homo sapiens
  misc_RNA (1)...(19): siRNA sense strand
cgaacucacacuggagaaa

SEQ ID NO: 2411590 - RNA, 19 nt, Homo sapiens
  misc_RNA (1)...(19): siRNA sense strand
aggauguggcuguggacuu

SEQ ID NO: 2411591 - RNA, 19 nt, Homo sapiens
  misc_RNA (1)...(19): siRNA sense strand
acucaagagaaaccauaua

SEQ ID NO: 2411592 - RNA, 19 nt, Homo sapiens
  misc_RNA (1)...(19): siRNA sense strand
cgacauuugagaagucaca

SEQ ID NO: 2411593 - RNA, 19 nt, Homo sapiens
  misc_RNA (1)...(19): siRNA sense strand
cuaugaauguaaagcaugu

SEQ ID NO: 2411594 - RNA, 19 nt, Homo sapiens
  misc_RNA (1)...(19): siRNA sense strand
gcgaacucacacuggagaa

SEQ ID NO: 2411595 - RNA, 19 nt, Homo sapiens
  misc_RNA (1)...(19): siRNA sense strand
guggcugggugguugacaa

SEQ ID NO: 2411596 - RNA, 19 nt, Homo sapiens
  misc_RNA (1)...(19): siRNA sense strand
uaguagaguguuaccuaua

SEQ ID NO: 2411597 - RNA, 19 nt, Homo sapiens
  misc_RNA (1)...(19): siRNA sense strand
caacauucacauaaggguu

SEQ ID NO: 2411598 - RNA, 19 nt, Homo sapiens
  misc_RNA (1)...(19): siRNA sense strand
aaaccauuuuggagaggaa

SEQ ID NO: 2411599 - RNA, 19 nt, Homo sapiens
  misc_RNA (1)...(19): siRNA sense strand
ccucauuucuuauucgaca

SEQ ID NO: 2411600 - RNA, 19 nt, Homo sapiens
  misc_RNA (1)...(19): siRNA sense strand
uggagaaaccauauaagga

SEQ ID NO: 2411601 - RNA, 19 nt, Homo sapiens
  misc_RNA (1)...(19): siRNA sense strand
gcuggagaacuauaagaau

SEQ ID NO: 2411602 - RNA, 19 nt, Homo sapiens
  misc_RNA (1)...(19): siRNA sense strand
agaaaaccugugaguguaa

SEQ ID NO: 2411603 - RNA, 19 nt, Homo sapiens
  misc_RNA (1)...(19): siRNA sense strand
uggcugggugguugacaaa

SEQ ID NO: 2411604 - RNA, 19 nt, Homo sapiens
  misc_RNA (1)...(19): siRNA sense strand
aggagaacuuacuuuagaa

SEQ ID NO: 2411605 - RNA, 19 nt, Homo sapiens
  misc_RNA (1)...(19): siRNA sense strand
ugagaauagaagagccaaa

SEQ ID NO: 2411606 - RNA, 19 nt, Homo sapiens
  misc_RNA (1)...(19): siRNA sense strand
aggucaaagaggaggaaga

SEQ ID NO: 2411607 - RNA, 19 nt, Homo sapiens
  misc_RNA (1)...(19): siRNA sense strand
cugaagaggucaaagagga

SEQ ID NO: 2411608 - RNA, 19 nt, Homo sapiens
  misc_RNA (1)...(19): siRNA sense strand
agcccaaggcggagaagaa

SEQ ID NO: 2411609 - RNA, 19 nt, Homo sapiens
  misc_RNA (1)...(19): siRNA sense strand
ucaaagaggaggaagagga

SEQ ID NO: 2411610 - RNA, 19 nt, Homo sapiens
  misc_RNA (1)...(19): siRNA sense strand
cugcgaaggaggcuggcaa

SEQ ID NO: 2411611 - RNA, 19 nt, Homo sapiens
  misc_RNA (1)...(19): siRNA sense strand
caagaaacaugcugcccuu

SEQ ID NO: 2411612 - RNA, 19 nt, Homo sapiens
  misc_RNA (1)...(19): siRNA sense strand
cagcaggagaaaaguuaaa

SEQ ID NO: 2411613 - RNA, 19 nt, Homo sapiens
  misc_RNA (1)...(19): siRNA sense strand
cagagggcauuaauggcaa

SEQ ID NO: 2411614 - RNA, 19 nt, Homo sapiens
  misc_RNA (1)...(19): siRNA sense strand
aaggagaccucgagggcac

SEQ ID NO: 2411615 - RNA, 19 nt, Homo sapiens
  misc_RNA (1)...(19): siRNA sense strand
gccaaauggaggagacauc

SEQ ID NO: 2411616 - RNA, 19 nt, Homo sapiens
  misc_RNA (1)...(19): siRNA sense strand
aggagacaucagagggcau

SEQ ID NO: 2411617 - RNA, 19 nt, Homo sapiens
  misc_RNA (1)...(19): siRNA sense strand
aggaggaagaggaugcaca

SEQ ID NO: 2411618 - RNA, 19 nt, Homo sapiens
  misc_RNA (1)...(19): siRNA sense strand
gauugaaagcaaagccuca

SEQ ID NO: 2411619 - RNA, 19 nt, Homo sapiens
  misc_RNA (1)...(19): siRNA sense strand
ugccauuggucaugagcau

SEQ ID NO: 2411620 - RNA, 19 nt, Homo sapiens
  misc_RNA (1)...(19): siRNA sense strand
cuguagaagggcacauaau

SEQ ID NO: 2411621 - RNA, 19 nt, Homo sapiens
  misc_RNA (1)...(19): siRNA sense strand
cuggaauagauuugggcca

SEQ ID NO: 2411622 - RNA, 19 nt, Homo sapiens
  misc_RNA (1)...(19): siRNA sense strand
agagguuucuacaggaaca

SEQ ID NO: 2411623 - RNA, 19 nt, Homo sapiens
  misc_RNA (1)...(19): siRNA sense strand
cuacaggaacacgaggaaa

SEQ ID NO: 2411624 - RNA, 19 nt, Homo sapiens
  misc_RNA (1)...(19): siRNA sense strand
cugacacguuggagaacaa

SEQ ID NO: 2411625 - RNA, 19 nt, Homo sapiens
  misc_RNA (1)...(19): siRNA sense strand
agaacaagguacaagacca

SEQ ID NO: 2411626 - RNA, 19 nt, Homo sapiens
  misc_RNA (1)...(19): siRNA sense strand
ccacauaguuggaaugccu

SEQ ID NO: 2411627 - RNA, 19 nt, Homo sapiens
  misc_RNA (1)...(19): siRNA sense strand
cugagaaggaaaucaacaa

SEQ ID NO: 2411628 - RNA, 19 nt, Homo sapiens
  misc_RNA (1)...(19): siRNA sense strand
gaaaucaacaauaugggaa

SEQ ID NO: 2411629 - RNA, 19 nt, Homo sapiens
  misc_RNA (1)...(19): siRNA sense strand
aagugaugaaguugacaaa

SEQ ID NO: 2411630 - RNA, 19 nt, Homo sapiens
  misc_RNA (1)...(19): siRNA sense strand
ugacaaagauggugcuggu

SEQ ID NO: 2411631 - RNA, 19 nt, Homo sapiens
  misc_RNA (1)...(19): siRNA sense strand
ccaaaacagaagugaugaa

SEQ ID NO: 2411632 - RNA, 19 nt, Homo sapiens
  misc_RNA (1)...(19): siRNA sense strand
cguuggagaacaagguaca

SEQ ID NO: 2411633 - RNA, 19 nt, Homo sapiens
  misc_RNA (1)...(19): siRNA sense strand
uggccuucuauguggguua

SEQ ID NO: 2411634 - RNA, 19 nt, Homo sapiens
  misc_RNA (1)...(19): siRNA sense strand
agagcgacugagaaggaaa

SEQ ID NO: 2411635 - RNA, 19 nt, Homo sapiens
  misc_RNA (1)...(19): siRNA sense strand
gggagauguaucaacagaa

SEQ ID NO: 2411636 - RNA, 19 nt, Homo sapiens
  misc_RNA (1)...(19): siRNA sense strand
caucaaauuuaaagacggu

SEQ ID NO: 2411637 - RNA, 19 nt, Homo sapiens
  misc_RNA (1)...(19): siRNA sense strand
ugaacuuacagauggaaca

SEQ ID NO: 2411638 - RNA, 19 nt, Homo sapiens
  misc_RNA (1)...(19): siRNA sense strand
aauccaaagaagagcgacu

SEQ ID NO: 2411639 - RNA, 19 nt, Homo sapiens
  misc_RNA (1)...(19): siRNA sense strand
gggucuacucgaaggucau

SEQ ID NO: 2411640 - RNA, 19 nt, Homo sapiens
  misc_RNA (1)...(19): siRNA sense strand
cugccgaacuuuuaaacaa

SEQ ID NO: 2411641 - RNA, 19 nt, Homo sapiens
  misc_RNA (1)...(19): siRNA sense strand
caauuugccuguagugcca

SEQ ID NO: 2411642 - RNA, 19 nt, Homo sapiens
  misc_RNA (1)...(19): siRNA sense strand
ccugagagaaguugggauu

SEQ ID NO: 2411643 - RNA, 19 nt, Homo sapiens
  misc_RNA (1)...(19): siRNA sense strand
uuaugaaggugaugggaga

SEQ ID NO: 2411644 - RNA, 19 nt, Homo sapiens
  misc_RNA (1)...(19): siRNA sense strand
cgauuuaaauguagaccga

SEQ ID NO: 2411645 - RNA, 19 nt, Homo sapiens
  misc_RNA (1)...(19): siRNA sense strand
gcaggaggguacaggccaa

SEQ ID NO: 2411646 - RNA, 19 nt, Homo sapiens
  misc_RNA (1)...(19): siRNA sense strand
agagagaauuguuggacga

SEQ ID NO: 2411647 - RNA, 19 nt, Homo sapiens
  misc_RNA (1)...(19): siRNA sense strand
aguacaaagagaagaucua

SEQ ID NO: 2411648 - RNA, 19 nt, Homo sapiens
  misc_RNA (1)...(19): siRNA sense strand
cuguagaagccuaugauau

SEQ ID NO: 2411649 - RNA, 19 nt, Homo sapiens
  misc_RNA (1)...(19): siRNA sense strand
auuuaaauguagaccgaga

SEQ ID NO: 2411650 - RNA, 19 nt, Homo sapiens
  misc_RNA (1)...(19): siRNA sense strand
gcaugaacagaaugaaaga

SEQ ID NO: 2411651 - RNA, 19 nt, Homo sapiens
  misc_RNA (1)...(19): siRNA sense strand
ugucuauugcugugguaaa

SEQ ID NO: 2411652 - RNA, 19 nt, Homo sapiens
  misc_RNA (1)...(19): siRNA sense strand
caauguacgaugaaggaca

SEQ ID NO: 2411653 - RNA, 19 nt, Homo sapiens
  misc_RNA (1)...(19): siRNA sense strand
cgauggauuuaguguugaa

SEQ ID NO: 2411654 - RNA, 19 nt, Homo sapiens
  misc_RNA (1)...(19): siRNA sense strand
caccaaaugaccugagaga

SEQ ID NO: 2411655 - RNA, 19 nt, Homo sapiens
  misc_RNA (1)...(19): siRNA sense strand
cuacauagcuggaaccugu

SEQ ID NO: 2411656 - RNA, 19 nt, Homo sapiens
  misc_RNA (1)...(19): siRNA sense strand
ccaaaagcuguguagaaaa

SEQ ID NO: 2411657 - RNA, 19 nt, Homo sapiens
  misc_RNA (1)...(19): siRNA sense strand
cuucagaaccagcagaaaa

SEQ ID NO: 2411658 - RNA, 19 nt, Homo sapiens
  misc_RNA (1)...(19): siRNA sense strand
gaccaaugugcuaaguaua

SEQ ID NO: 2411659 - RNA, 19 nt, Homo sapiens
  misc_RNA (1)...(19): siRNA sense strand
agccuaugauauugagcua

SEQ ID NO: 2411660 - RNA, 19 nt, Homo sapiens
  misc_RNA (1)...(19): siRNA sense strand
agaccaacugauaaguaua

SEQ ID NO: 2411661 - RNA, 19 nt, Homo sapiens
  misc_RNA (1)...(19): siRNA sense strand
cccacaaacacucaggaaa

SEQ ID NO: 2411662 - RNA, 19 nt, Homo sapiens
  misc_RNA (1)...(19): siRNA sense strand
ucauuauggucaucaggaa

SEQ ID NO: 2411663 - RNA, 19 nt, Homo sapiens
  misc_RNA (1)...(19): siRNA sense strand
cagacauuguaguggaagu

SEQ ID NO: 2411664 - RNA, 19 nt, Homo sapiens
  misc_RNA (1)...(19): siRNA sense strand
uggaaguggaucacgggaa

SEQ ID NO: 2411665 - RNA, 19 nt, Homo sapiens
  misc_RNA (1)...(19): siRNA sense strand
augaacagaaugaaagaga

SEQ ID NO: 2411666 - RNA, 19 nt, Homo sapiens
  misc_RNA (1)...(19): siRNA sense strand
ggaugaaaguguaugagac

SEQ ID NO: 2411667 - RNA, 19 nt, Homo sapiens
  misc_RNA (1)...(19): siRNA sense strand
gauaaguauacuagacagu

SEQ ID NO: 2411668 - RNA, 19 nt, Homo sapiens
  misc_RNA (1)...(19): siRNA sense strand
agcuggaaccuguggaaau

SEQ ID NO: 2411669 - RNA, 19 nt, Homo sapiens
  misc_RNA (1)...(19): siRNA sense strand
aggaaggguguuuaaacua

SEQ ID NO: 2411670 - RNA, 19 nt, Homo sapiens
  misc_RNA (1)...(19): siRNA sense strand
uggaguacaaagagaagau

SEQ ID NO: 2411671 - RNA, 19 nt, Homo sapiens
  misc_RNA (1)...(19): siRNA sense strand
guggaaaucaucaacguau

SEQ ID NO: 2411672 - RNA, 19 nt, Homo sapiens
  misc_RNA (1)...(19): siRNA sense strand
ccaugugaucaguccauaa

SEQ ID NO: 2411673 - RNA, 19 nt, Homo sapiens
  misc_RNA (1)...(19): siRNA sense strand
ggguacaggccaagcagca

SEQ ID NO: 2411674 - RNA, 19 nt, Homo sapiens
  misc_RNA (1)...(19): siRNA sense strand
aauaaauggacucguaaga

SEQ ID NO: 2411675 - RNA, 19 nt, Homo sapiens
  misc_RNA (1)...(19): siRNA sense strand
acucggagaucgaucaaaa

SEQ ID NO: 2411676 - RNA, 19 nt, Homo sapiens
  misc_RNA (1)...(19): siRNA sense strand
gcgcgaugccaguugcaau

SEQ ID NO: 2411677 - RNA, 19 nt, Homo sapiens
  misc_RNA (1)...(19): siRNA sense strand
gcuguggaguacaaagaga

SEQ ID NO: 2411678 - RNA, 19 nt, Homo sapiens
  misc_RNA (1)...(19): siRNA sense strand
gugugucaccaaagaacaa

SEQ ID NO: 2411679 - RNA, 19 nt, Homo sapiens
  misc_RNA (1)...(19): siRNA sense strand
ccgagaagagcauguuuau

SEQ ID NO: 2411680 - RNA, 19 nt, Homo sapiens
  misc_RNA (1)...(19): siRNA sense strand
ugacagacauuguagugga

SEQ ID NO: 2411681 - RNA, 19 nt, Homo sapiens
  misc_RNA (1)...(19): siRNA sense strand
augaaggugaugggagaaa

SEQ ID NO: 2411682 - RNA, 19 nt, Homo sapiens
  misc_RNA (1)...(19): siRNA sense strand
augaaggacaguugacaga

SEQ ID NO: 2411683 - RNA, 19 nt, Homo sapiens
  misc_RNA (1)...(19): siRNA sense strand
guuugagcaugaacagaau

SEQ ID NO: 2411684 - RNA, 19 nt, Homo sapiens
  misc_RNA (1)...(19): siRNA sense strand
agccaaaagcuguguagaa

SEQ ID NO: 2411685 - RNA, 19 nt, Homo sapiens
  misc_RNA (1)...(19): siRNA sense strand
ggaaagaagcaaacagugc

SEQ ID NO: 2411686 - RNA, 19 nt, Homo sapiens
  misc_RNA (1)...(19): siRNA sense strand
gguguuuaaacuaugcaaa

SEQ ID NO: 2411687 - RNA, 19 nt, Homo sapiens
  misc_RNA (1)...(19): siRNA sense strand
uuacauugcaggaggguac

SEQ ID NO: 2411688 - RNA, 19 nt, Homo sapiens
  misc_RNA (1)...(19): siRNA sense strand
acguauguuuacuguagaa

SEQ ID NO: 2411689 - RNA, 19 nt, Homo sapiens
  misc_RNA (1)...(19): siRNA sense strand
ccaucgaccauaaggcaga

SEQ ID NO: 2411690 - RNA, 19 nt, Homo sapiens
  misc_RNA (1)...(19): siRNA sense strand
gcuuagcagcuguauacaa

SEQ ID NO: 2411691 - RNA, 19 nt, Homo sapiens
  misc_RNA (1)...(19): siRNA sense strand
guacacagaggcuuggaau

SEQ ID NO: 2411692 - RNA, 19 nt, Homo sapiens
  misc_RNA (1)...(19): siRNA sense strand
uuguaguggaaguggauca

SEQ ID NO: 2411693 - RNA, 19 nt, Homo sapiens
  misc_RNA (1)...(19): siRNA sense strand
acaaaagaccaacugauaa

SEQ ID NO: 2411694 - RNA, 19 nt, Homo sapiens
  misc_RNA (1)...(19): siRNA sense strand
gagaauuguuggacgacug

SEQ ID NO: 2411695 - RNA, 19 nt, Homo sapiens
  misc_RNA (1)...(19): siRNA sense strand
cuguggaguacaaagagaa

SEQ ID NO: 2411696 - RNA, 19 nt, Homo sapiens
  misc_RNA (1)...(19): siRNA sense strand
acuagcggccuuacagaaa

SEQ ID NO: 2411697 - RNA, 19 nt, Homo sapiens
  misc_RNA (1)...(19): siRNA sense strand
ggucauuguuggagccuca

SEQ ID NO: 2411698 - RNA, 19 nt, Homo sapiens
  misc_RNA (1)...(19): siRNA sense strand
ccuucuuacauuugagauu

SEQ ID NO: 2411699 - RNA, 19 nt, Homo sapiens
  misc_RNA (1)...(19): siRNA sense strand
auaucgagcagaaggagaa

SEQ ID NO: 2411700 - RNA, 19 nt, Homo sapiens
  misc_RNA (1)...(19): siRNA sense strand
ggucacuagaguuagaaau

SEQ ID NO: 2411701 - RNA, 19 nt, Homo sapiens
  misc_RNA (1)...(19): siRNA sense strand
cuguggaaguuaaugguca

SEQ ID NO: 2411702 - RNA, 19 nt, Homo sapiens
  misc_RNA (1)...(19): siRNA sense strand
cgaaagaaggccagggugg

SEQ ID NO: 2411703 - RNA, 19 nt, Homo sapiens
  misc_RNA (1)...(19): siRNA sense strand
ggagaaacguguguggagu

SEQ ID NO: 2411704 - RNA, 19 nt, Homo sapiens
  misc_RNA (1)...(19): siRNA sense strand
uguggaaguuaauggucau

SEQ ID NO: 2411705 - RNA, 19 nt, Homo sapiens
  misc_RNA (1)...(19): siRNA sense strand
agauaaugaagaaaccgaa

SEQ ID NO: 2411706 - RNA, 19 nt, Homo sapiens
  misc_RNA (1)...(19): siRNA sense strand
gcccugagcuggaugacca

SEQ ID NO: 2411707 - RNA, 19 nt, Homo sapiens
  misc_RNA (1)...(19): siRNA sense strand
cggagagcgaugaggacaa

SEQ ID NO: 2411708 - RNA, 19 nt, Homo sapiens
  misc_RNA (1)...(19): siRNA sense strand
acgagguccuggaggugaa

SEQ ID NO: 2411709 - RNA, 19 nt, Homo sapiens
  misc_RNA (1)...(19): siRNA sense strand
cgucauaagccugggaagu

SEQ ID NO: 2411710 - RNA, 19 nt, Homo sapiens
  misc_RNA (1)...(19): siRNA sense strand
cggacaugaugaucgccaa

SEQ ID NO: 2411711 - RNA, 19 nt, Homo sapiens
  misc_RNA (1)...(19): siRNA sense strand
ccaagaugguggaggagca

SEQ ID NO: 2411712 - RNA, 19 nt, Homo sapiens
  misc_RNA (1)...(19): siRNA sense strand
ggucauuaggaaacagcaa

SEQ ID NO: 2411713 - RNA, 19 nt, Homo sapiens
  misc_RNA (1)...(19): siRNA sense strand
ccauguacugugagaggau

SEQ ID NO: 2411714 - RNA, 19 nt, Homo sapiens
  misc_RNA (1)...(19): siRNA sense strand
ggacaagacccgaacggcu

SEQ ID NO: 2411715 - RNA, 19 nt, Homo sapiens
  misc_RNA (1)...(19): siRNA sense strand
auguacugugagaggauaa

SEQ ID NO: 2411716 - RNA, 19 nt, Homo sapiens
  misc_RNA (1)...(19): siRNA sense strand
gaagagauuuacaugcuga

SEQ ID NO: 2411717 - RNA, 19 nt, Homo sapiens
  misc_RNA (1)...(19): siRNA sense strand
ugugagaggauaaggagga

SEQ ID NO: 2411718 - RNA, 19 nt, Homo sapiens
  misc_RNA (1)...(19): siRNA sense strand
uagcagggcuuuuggguga

SEQ ID NO: 2411719 - RNA, 19 nt, Homo sapiens
  misc_RNA (1)...(19): siRNA sense strand
ucuccagagcggugaccaa

SEQ ID NO: 2411720 - RNA, 19 nt, Homo sapiens
  misc_RNA (1)...(19): siRNA sense strand
gaucccugguggaagaaaa

SEQ ID NO: 2411721 - RNA, 19 nt, Homo sapiens
  misc_RNA (1)...(19): siRNA sense strand
aggauaaggaggaaauuuu

SEQ ID NO: 2411722 - RNA, 19 nt, Homo sapiens
  misc_RNA (1)...(19): siRNA sense strand
gcgaaaagguggaaggaca

SEQ ID NO: 2411723 - RNA, 19 nt, Homo sapiens
  misc_RNA (1)...(19): siRNA sense strand
ccggaaacgaagaggagaa

SEQ ID NO: 2411724 - RNA, 19 nt, Homo sapiens
  misc_RNA (1)...(19): siRNA sense strand
ggagcaaggaggagcggaa

SEQ ID NO: 2411725 - RNA, 19 nt, Homo sapiens
  misc_RNA (1)...(19): siRNA sense strand
cauuuaugucggagaggua

SEQ ID NO: 2411726 - RNA, 19 nt, Homo sapiens
  misc_RNA (1)...(19): siRNA sense strand
augaagaagcggaacaaga

SEQ ID NO: 2411727 - RNA, 19 nt, Homo sapiens
  misc_RNA (1)...(19): siRNA sense strand
acagcaagcccgagcucaa

SEQ ID NO: 2411728 - RNA, 19 nt, Homo sapiens
  misc_RNA (1)...(19): siRNA sense strand
aagugaugcugcaggugaa

SEQ ID NO: 2411729 - RNA, 19 nt, Homo sapiens
  misc_RNA (1)...(19): siRNA sense strand
augaggaguaugagcgcua

SEQ ID NO: 2411730 - RNA, 19 nt, Homo sapiens
  misc_RNA (1)...(19): siRNA sense strand
agguaaaucccaacagcau

SEQ ID NO: 2411731 - RNA, 19 nt, Homo sapiens
  misc_RNA (1)...(19): siRNA sense strand
uggccaugcuggaggagga

SEQ ID NO: 2411732 - RNA, 19 nt, Homo sapiens
  misc_RNA (1)...(19): siRNA sense strand
aggagguggagcuguauaa

SEQ ID NO: 2411733 - RNA, 19 nt, Homo sapiens
  misc_RNA (1)...(19): siRNA sense strand
agcuaaggcaccuggaauu

SEQ ID NO: 2411734 - RNA, 19 nt, Homo sapiens
  misc_RNA (1)...(19): siRNA sense strand
ccaugaagaagcggaacaa

SEQ ID NO: 2411735 - RNA, 19 nt, Homo sapiens
  misc_RNA (1)...(19): siRNA sense strand
acgaggaggaccugggcau

SEQ ID NO: 2411736 - RNA, 19 nt, Homo sapiens
  misc_RNA (1)...(19): siRNA sense strand
auaucauggcgcugggcaa

SEQ ID NO: 2411737 - RNA, 19 nt, Homo sapiens
  misc_RNA (1)...(19): siRNA sense strand
gagaagucggacaaggaca

SEQ ID NO: 2411738 - RNA, 19 nt, Homo sapiens
  misc_RNA (1)...(19): siRNA sense strand
aaaccaugaagaagcggaa

SEQ ID NO: 2411739 - RNA, 19 nt, Homo sapiens
  misc_RNA (1)...(19): siRNA sense strand
ucggagagguaaaucccaa

SEQ ID NO: 2411740 - RNA, 19 nt, Homo sapiens
  misc_RNA (1)...(19): siRNA sense strand
aguacaaagugaugcugca

SEQ ID NO: 2411741 - RNA, 19 nt, Homo sapiens
  misc_RNA (1)...(19): siRNA sense strand
cggagaagucguugagauc

SEQ ID NO: 2411742 - RNA, 19 nt, Homo sapiens
  misc_RNA (1)...(19): siRNA sense strand
gcgcuguggcugugaacau

SEQ ID NO: 2411743 - RNA, 19 nt, Homo sapiens
  misc_RNA (1)...(19): siRNA sense strand
acuucaagccagaauacaa

SEQ ID NO: 2411744 - RNA, 19 nt, Homo sapiens
  misc_RNA (1)...(19): siRNA sense strand
aggacuacucggaggacau

SEQ ID NO: 2411745 - RNA, 19 nt, Homo sapiens
  misc_RNA (1)...(19): siRNA sense strand
ccaccaaccagcaggagga

SEQ ID NO: 2411746 - RNA, 19 nt, Homo sapiens
  misc_RNA (1)...(19): siRNA sense strand
aggaaagccaggagaacaa

SEQ ID NO: 2411747 - RNA, 19 nt, Homo sapiens
  misc_RNA (1)...(19): siRNA sense strand
cugcaggaauuaagggaga

SEQ ID NO: 2411748 - RNA, 19 nt, Homo sapiens
  misc_RNA (1)...(19): siRNA sense strand
aagagaaaguggagcgacu

SEQ ID NO: 2411749 - RNA, 19 nt, Homo sapiens
  misc_RNA (1)...(19): siRNA sense strand
ugggaaagauggagagccu

SEQ ID NO: 2411750 - RNA, 19 nt, Homo sapiens
  misc_RNA (1)...(19): siRNA sense strand
agggaaacgagguaagaga

SEQ ID NO: 2411751 - RNA, 19 nt, Homo sapiens
  misc_RNA (1)...(19): siRNA sense strand
aggcgauaagggagaacaa

SEQ ID NO: 2411752 - RNA, 19 nt, Homo sapiens
  misc_RNA (1)...(19): siRNA sense strand
ugaagaagcacgcagggaa

SEQ ID NO: 2411753 - RNA, 19 nt, Homo sapiens
  misc_RNA (1)...(19): siRNA sense strand
ccaauggaaugaaaggaga

SEQ ID NO: 2411754 - RNA, 19 nt, Homo sapiens
  misc_RNA (1)...(19): siRNA sense strand
caauggaaugaaaggagaa

SEQ ID NO: 2411755 - RNA, 19 nt, Homo sapiens
  misc_RNA (1)...(19): siRNA sense strand
acucaaaggcucaaaggga

SEQ ID NO: 2411756 - RNA, 19 nt, Homo sapiens
  misc_RNA (1)...(19): siRNA sense strand
gaaacaaggugaaucagga

SEQ ID NO: 2411757 - RNA, 19 nt, Homo sapiens
  misc_RNA (1)...(19): siRNA sense strand
gggugagaagggugaucua

SEQ ID NO: 2411758 - RNA, 19 nt, Homo sapiens
  misc_RNA (1)...(19): siRNA sense strand
caguaggacagaauggaau

SEQ ID NO: 2411759 - RNA, 19 nt, Homo sapiens
  misc_RNA (1)...(19): siRNA sense strand
aggaauggauggagagcag

SEQ ID NO: 2411760 - RNA, 19 nt, Homo sapiens
  misc_RNA (1)...(19): siRNA sense strand
ucaaaggcucaaagggaga

SEQ ID NO: 2411761 - RNA, 19 nt, Homo sapiens
  misc_RNA (1)...(19): siRNA sense strand
agaacaaggugaucaggga

SEQ ID NO: 2411762 - RNA, 19 nt, Homo sapiens
  misc_RNA (1)...(19): siRNA sense strand
ggggaaacaaggugaauca

SEQ ID NO: 2411763 - RNA, 19 nt, Homo sapiens
  misc_RNA (1)...(19): siRNA sense strand
ccguggaaugccaggagua

SEQ ID NO: 2411764 - RNA, 19 nt, Homo sapiens
  misc_RNA (1)...(19): siRNA sense strand
ucauagacuacaacggcaa

SEQ ID NO: 2411765 - RNA, 19 nt, Homo sapiens
  misc_RNA (1)...(19): siRNA sense strand
ccugauuaagggugaccaa

SEQ ID NO: 2411766 - RNA, 19 nt, Homo sapiens
  misc_RNA (1)...(19): siRNA sense strand
aggaguacccggugaacca

SEQ ID NO: 2411767 - RNA, 19 nt, Homo sapiens
  misc_RNA (1)...(19): siRNA sense strand
caaaaggcgauaagggaga

SEQ ID NO: 2411768 - RNA, 19 nt, Homo sapiens
  misc_RNA (1)...(19): siRNA sense strand
cggugaaccaggaaagcca

SEQ ID NO: 2411769 - RNA, 19 nt, Homo sapiens
  misc_RNA (1)...(19): siRNA sense strand
uaagagaggccgaagagga

SEQ ID NO: 2411770 - RNA, 19 nt, Homo sapiens
  misc_RNA (1)...(19): siRNA sense strand
gagaggccgaagaggagaa

SEQ ID NO: 2411771 - RNA, 19 nt, Homo sapiens
  misc_RNA (1)...(19): siRNA sense strand
ggggauaaagggagaacca

SEQ ID NO: 2411772 - RNA, 19 nt, Homo sapiens
  misc_RNA (1)...(19): siRNA sense strand
aggccgaagaggagaaucu

SEQ ID NO: 2411773 - RNA, 19 nt, Homo sapiens
  misc_RNA (1)...(19): siRNA sense strand
gcuaaaauaagaaucgcaa

SEQ ID NO: 2411774 - RNA, 19 nt, Homo sapiens
  misc_RNA (1)...(19): siRNA sense strand
agguaagagaggccgaaga

SEQ ID NO: 2411775 - RNA, 19 nt, Homo sapiens
  misc_RNA (1)...(19): siRNA sense strand
aagaaucgcaagagaagca

SEQ ID NO: 2411776 - RNA, 19 nt, Homo sapiens
  misc_RNA (1)...(19): siRNA sense strand
cugagaucauagacuacaa

SEQ ID NO: 2411777 - RNA, 19 nt, Homo sapiens
  misc_RNA (1)...(19): siRNA sense strand
uacaagggccaaagggaga

SEQ ID NO: 2411778 - RNA, 19 nt, Homo sapiens
  misc_RNA (1)...(19): siRNA sense strand
uggauuaccgggagccaau

SEQ ID NO: 2411779 - RNA, 19 nt, Homo sapiens
  misc_RNA (1)...(19): siRNA sense strand
agaacaaggugaaaaggga

SEQ ID NO: 2411780 - RNA, 19 nt, Homo sapiens
  misc_RNA (1)...(19): siRNA sense strand
cugcaggucccaaaggaga

SEQ ID NO: 2411781 - RNA, 19 nt, Homo sapiens
  misc_RNA (1)...(19): siRNA sense strand
cuauggugcaagagaaagu

SEQ ID NO: 2411782 - RNA, 19 nt, Homo sapiens
  misc_RNA (1)...(19): siRNA sense strand
cuaugggcugccugggaaa

SEQ ID NO: 2411783 - RNA, 19 nt, Homo sapiens
  misc_RNA (1)...(19): siRNA sense strand
aggaaagccaggagaacaa

SEQ ID NO: 2411784 - RNA, 19 nt, Homo sapiens
  misc_RNA (1)...(19): siRNA sense strand
cugcaggaauuaagggaga

SEQ ID NO: 2411785 - RNA, 19 nt, Homo sapiens
  misc_RNA (1)...(19): siRNA sense strand
aagagaaaguggagcgacu

SEQ ID NO: 2411786 - RNA, 19 nt, Homo sapiens
  misc_RNA (1)...(19): siRNA sense strand
ugggaaagauggagagccu

SEQ ID NO: 2411787 - RNA, 19 nt, Homo sapiens
  misc_RNA (1)...(19): siRNA sense strand
agggaaacgagguaagaga

SEQ ID NO: 2411788 - RNA, 19 nt, Homo sapiens
  misc_RNA (1)...(19): siRNA sense strand
aggcgauaagggagaacaa

SEQ ID NO: 2411789 - RNA, 19 nt, Homo sapiens
  misc_RNA (1)...(19): siRNA sense strand
ugaagaagcacgcagggaa

SEQ ID NO: 2411790 - RNA, 19 nt, Homo sapiens
  misc_RNA (1)...(19): siRNA sense strand
ccaauggaaugaaaggaga

SEQ ID NO: 2411791 - RNA, 19 nt, Homo sapiens
  misc_RNA (1)...(19): siRNA sense strand
caauggaaugaaaggagaa

SEQ ID NO: 2411792 - RNA, 19 nt, Homo sapiens
  misc_RNA (1)...(19): siRNA sense strand
acucaaaggcucaaaggga

SEQ ID NO: 2411793 - RNA, 19 nt, Homo sapiens
  misc_RNA (1)...(19): siRNA sense strand
gaaacaaggugaaucagga

SEQ ID NO: 2411794 - RNA, 19 nt, Homo sapiens
  misc_RNA (1)...(19): siRNA sense strand
gggugagaagggugaucua

SEQ ID NO: 2411795 - RNA, 19 nt, Homo sapiens
  misc_RNA (1)...(19): siRNA sense strand
caguaggacagaauggaau

SEQ ID NO: 2411796 - RNA, 19 nt, Homo sapiens
  misc_RNA (1)...(19): siRNA sense strand
aggaauggauggagagcag

SEQ ID NO: 2411797 - RNA, 19 nt, Homo sapiens
  misc_RNA (1)...(19): siRNA sense strand
ucaaaggcucaaagggaga

SEQ ID NO: 2411798 - RNA, 19 nt, Homo sapiens
  misc_RNA (1)...(19): siRNA sense strand
agaacaaggugaucaggga

SEQ ID NO: 2411799 - RNA, 19 nt, Homo sapiens
  misc_RNA (1)...(19): siRNA sense strand
ggggaaacaaggugaauca

SEQ ID NO: 2411800 - RNA, 19 nt, Homo sapiens
  misc_RNA (1)...(19): siRNA sense strand
ccguggaaugccaggagua

SEQ ID NO: 2411801 - RNA, 19 nt, Homo sapiens
  misc_RNA (1)...(19): siRNA sense strand
ucauagacuacaacggcaa

SEQ ID NO: 2411802 - RNA, 19 nt, Homo sapiens
  misc_RNA (1)...(19): siRNA sense strand
ccugauuaagggugaccaa

SEQ ID NO: 2411803 - RNA, 19 nt, Homo sapiens
  misc_RNA (1)...(19): siRNA sense strand
aggaguacccggugaacca

SEQ ID NO: 2411804 - RNA, 19 nt, Homo sapiens
  misc_RNA (1)...(19): siRNA sense strand
caaaaggcgauaagggaga

SEQ ID NO: 2411805 - RNA, 19 nt, Homo sapiens
  misc_RNA (1)...(19): siRNA sense strand
cggugaaccaggaaagcca

SEQ ID NO: 2411806 - RNA, 19 nt, Homo sapiens
  misc_RNA (1)...(19): siRNA sense strand
uaagagaggccgaagagga

SEQ ID NO: 2411807 - RNA, 19 nt, Homo sapiens
  misc_RNA (1)...(19): siRNA sense strand
gagaggccgaagaggagaa

SEQ ID NO: 2411808 - RNA, 19 nt, Homo sapiens
  misc_RNA (1)...(19): siRNA sense strand
ggggauaaagggagaacca

SEQ ID NO: 2411809 - RNA, 19 nt, Homo sapiens
  misc_RNA (1)...(19): siRNA sense strand
aggccgaagaggagaaucu

SEQ ID NO: 2411810 - RNA, 19 nt, Homo sapiens
  misc_RNA (1)...(19): siRNA sense strand
gcuaaaauaagaaucgcaa

SEQ ID NO: 2411811 - RNA, 19 nt, Homo sapiens
  misc_RNA (1)...(19): siRNA sense strand
agguaagagaggccgaaga

SEQ ID NO: 2411812 - RNA, 19 nt, Homo sapiens
  misc_RNA (1)...(19): siRNA sense strand
aagaaucgcaagagaagca

SEQ ID NO: 2411813 - RNA, 19 nt, Homo sapiens
  misc_RNA (1)...(19): siRNA sense strand
cugagaucauagacuacaa

SEQ ID NO: 2411814 - RNA, 19 nt, Homo sapiens
  misc_RNA (1)...(19): siRNA sense strand
uacaagggccaaagggaga

SEQ ID NO: 2411815 - RNA, 19 nt, Homo sapiens
  misc_RNA (1)...(19): siRNA sense strand
uggauuaccgggagccaau

SEQ ID NO: 2411816 - RNA, 19 nt, Homo sapiens
  misc_RNA (1)...(19): siRNA sense strand
agaacaaggugaaaaggga

SEQ ID NO: 2411817 - RNA, 19 nt, Homo sapiens
  misc_RNA (1)...(19): siRNA sense strand
cugcaggucccaaaggaga

SEQ ID NO: 2411818 - RNA, 19 nt, Homo sapiens
  misc_RNA (1)...(19): siRNA sense strand
cuauggugcaagagaaagu

SEQ ID NO: 2411819 - RNA, 19 nt, Homo sapiens
  misc_RNA (1)...(19): siRNA sense strand
cuaugggcugccugggaaa

SEQ ID NO: 2411820 - RNA, 19 nt, Homo sapiens
  misc_RNA (1)...(19): siRNA sense strand
agaugaaggugguggagga

SEQ ID NO: 2411821 - RNA, 19 nt, Homo sapiens
  misc_RNA (1)...(19): siRNA sense strand
gguuugagacccuggaaaa

SEQ ID NO: 2411822 - RNA, 19 nt, Homo sapiens
  misc_RNA (1)...(19): siRNA sense strand
cuuaaagaccccagaagaa

SEQ ID NO: 2411823 - RNA, 19 nt, Homo sapiens
  misc_RNA (1)...(19): siRNA sense strand
gggaccagguagagcagga

SEQ ID NO: 2411824 - RNA, 19 nt, Homo sapiens
  misc_RNA (1)...(19): siRNA sense strand
ggagcuggcguguggaaaa

SEQ ID NO: 2411825 - RNA, 19 nt, Homo sapiens
  misc_RNA (1)...(19): siRNA sense strand
cgaagaugaagguggugga

SEQ ID NO: 2411826 - RNA, 19 nt, Homo sapiens
  misc_RNA (1)...(19): siRNA sense strand
cggcaggugcagcgaagau

SEQ ID NO: 2411827 - RNA, 19 nt, Homo sapiens
  misc_RNA (1)...(19): siRNA sense strand
cagcgaagaugaagguggu

SEQ ID NO: 2411828 - RNA, 19 nt, Homo sapiens
  misc_RNA (1)...(19): siRNA sense strand
caugagaaguugcugagga

SEQ ID NO: 2411829 - RNA, 19 nt, Homo sapiens
  misc_RNA (1)...(19): siRNA sense strand
gcaucuggcacgaguggga

SEQ ID NO: 2411830 - RNA, 19 nt, Homo sapiens
  misc_RNA (1)...(19): siRNA sense strand
gagaaguugcugaggacac

SEQ ID NO: 2411831 - RNA, 19 nt, Homo sapiens
  misc_RNA (1)...(19): siRNA sense strand
ggucaaugugcaaggacaa

SEQ ID NO: 2411832 - RNA, 19 nt, Homo sapiens
  misc_RNA (1)...(19): siRNA sense strand
ugggaguagugcagaggaa

SEQ ID NO: 2411833 - RNA, 19 nt, Homo sapiens
  misc_RNA (1)...(19): siRNA sense strand
ccagagucucacaggguua

SEQ ID NO: 2411834 - RNA, 19 nt, Homo sapiens
  misc_RNA (1)...(19): siRNA sense strand
gcuggauaucagagagcua

SEQ ID NO: 2411835 - RNA, 19 nt, Homo sapiens
  misc_RNA (1)...(19): siRNA sense strand
aguuagaguucuuggagca

SEQ ID NO: 2411836 - RNA, 19 nt, Homo sapiens
  misc_RNA (1)...(19): siRNA sense strand
ggaacauacaauuggagau

SEQ ID NO: 2411837 - RNA, 19 nt, Homo sapiens
  misc_RNA (1)...(19): siRNA sense strand
uggcugagguugaagcaga

SEQ ID NO: 2411838 - RNA, 19 nt, Homo sapiens
  misc_RNA (1)...(19): siRNA sense strand
ggacagugguauguggaga

SEQ ID NO: 2411839 - RNA, 19 nt, Homo sapiens
  misc_RNA (1)...(19): siRNA sense strand
ggacaaagcaucaagagag

SEQ ID NO: 2411840 - RNA, 19 nt, Homo sapiens
  misc_RNA (1)...(19): siRNA sense strand
cauaauaccccaaagggaa

SEQ ID NO: 2411841 - RNA, 19 nt, Homo sapiens
  misc_RNA (1)...(19): siRNA sense strand
acagagagacacagagcca

SEQ ID NO: 2411842 - RNA, 19 nt, Homo sapiens
  misc_RNA (1)...(19): siRNA sense strand
aggacaaagcaucaagaga

SEQ ID NO: 2411843 - RNA, 19 nt, Homo sapiens
  misc_RNA (1)...(19): siRNA sense strand
ggaguagugcagaggaagu

SEQ ID NO: 2411844 - RNA, 19 nt, Homo sapiens
  misc_RNA (1)...(19): siRNA sense strand
agagagacacagagccaga

SEQ ID NO: 2411845 - RNA, 19 nt, Homo sapiens
  misc_RNA (1)...(19): siRNA sense strand
cacagauccuggagggcau

SEQ ID NO: 2411846 - RNA, 19 nt, Homo sapiens
  misc_RNA (1)...(19): siRNA sense strand
uggucaaugugcaaggaca

SEQ ID NO: 2411847 - RNA, 19 nt, Homo sapiens
  misc_RNA (1)...(19): siRNA sense strand
gggaacauacaauuggaga

SEQ ID NO: 2411848 - RNA, 19 nt, Homo sapiens
  misc_RNA (1)...(19): siRNA sense strand
uuuggugguuggaggaauu

SEQ ID NO: 2411849 - RNA, 19 nt, Homo sapiens
  misc_RNA (1)...(19): siRNA sense strand
ggaucaaccgagcaggaca

SEQ ID NO: 2411850 - RNA, 19 nt, Homo sapiens
  misc_RNA (1)...(19): siRNA sense strand
agugaaguugacagauuua

SEQ ID NO: 2411851 - RNA, 19 nt, Homo sapiens
  misc_RNA (1)...(19): siRNA sense strand
gggccgucucugugauauu

SEQ ID NO: 2411852 - RNA, 19 nt, Homo sapiens
  misc_RNA (1)...(19): siRNA sense strand
aagcagugaaguugacaga

SEQ ID NO: 2411853 - RNA, 19 nt, Homo sapiens
  misc_RNA (1)...(19): siRNA sense strand
uuaauguggcugagguuga

SEQ ID NO: 2411854 - RNA, 19 nt, Homo sapiens
  misc_RNA (1)...(19): siRNA sense strand
ccaugaaggagguggacga

SEQ ID NO: 2411855 - RNA, 19 nt, Homo sapiens
  misc_RNA (1)...(19): siRNA sense strand
aggaugaggaagaggagau

SEQ ID NO: 2411856 - RNA, 19 nt, Homo sapiens
  misc_RNA (1)...(19): siRNA sense strand
acacggugguggagcccua

SEQ ID NO: 2411857 - RNA, 19 nt, Homo sapiens
  misc_RNA (1)...(19): siRNA sense strand
ugaaggagguggacgagca

SEQ ID NO: 2411858 - RNA, 19 nt, Homo sapiens
  misc_RNA (1)...(19): siRNA sense strand
gcuacuucguggaguggau

SEQ ID NO: 2411859 - RNA, 19 nt, Homo sapiens
  misc_RNA (1)...(19): siRNA sense strand
cggugaacauggugcccuu

SEQ ID NO: 2411860 - RNA, 19 nt, Homo sapiens
  misc_RNA (1)...(19): siRNA sense strand
gcagggaacaacugggcga

SEQ ID NO: 2411861 - RNA, 19 nt, Homo sapiens
  misc_RNA (1)...(19): siRNA sense strand
cuuuugaggaugaggaaga

SEQ ID NO: 2411862 - RNA, 19 nt, Homo sapiens
  misc_RNA (1)...(19): siRNA sense strand
gagccaggcaccauggaca

SEQ ID NO: 2411863 - RNA, 19 nt, Homo sapiens
  misc_RNA (1)...(19): siRNA sense strand
cgaaagggcacuacacgga

SEQ ID NO: 2411864 - RNA, 19 nt, Homo sapiens
  misc_RNA (1)...(19): siRNA sense strand
cagcaagauccgugaggag

SEQ ID NO: 2411865 - RNA, 19 nt, Homo sapiens
  misc_RNA (1)...(19): siRNA sense strand
uggaggaguacgugcgcua

SEQ ID NO: 2411866 - RNA, 19 nt, Homo sapiens
  misc_RNA (1)...(19): siRNA sense strand
cugcaugacaggugggaac

SEQ ID NO: 2411867 - RNA, 19 nt, Homo sapiens
  misc_RNA (1)...(19): siRNA sense strand
augagaaggcccacgagaa

SEQ ID NO: 2411868 - RNA, 19 nt, Homo sapiens
  misc_RNA (1)...(19): siRNA sense strand
ccaaaucgcccaagccuca

SEQ ID NO: 2411869 - RNA, 19 nt, Homo sapiens
  misc_RNA (1)...(19): siRNA sense strand
agcagggcguggaggagua

SEQ ID NO: 2411870 - RNA, 19 nt, Homo sapiens
  misc_RNA (1)...(19): siRNA sense strand
gggccuggagacagaugaa

SEQ ID NO: 2411871 - RNA, 19 nt, Homo sapiens
  misc_RNA (1)...(19): siRNA sense strand
gcauggacgaggagcagca

SEQ ID NO: 2411872 - RNA, 19 nt, Homo sapiens
  misc_RNA (1)...(19): siRNA sense strand
cggucugggaggaagccaa

SEQ ID NO: 2411873 - RNA, 19 nt, Homo sapiens
  misc_RNA (1)...(19): siRNA sense strand
ucugcuaccucaaggccua

SEQ ID NO: 2411874 - RNA, 19 nt, Homo sapiens
  misc_RNA (1)...(19): siRNA sense strand
ccaagauggguuugaacau

SEQ ID NO: 2411875 - RNA, 19 nt, Homo sapiens
  misc_RNA (1)...(19): siRNA sense strand
augagaaagauguugggaa

SEQ ID NO: 2411876 - RNA, 19 nt, Homo sapiens
  misc_RNA (1)...(19): siRNA sense strand
cuuucuacccggaggauga

SEQ ID NO: 2411877 - RNA, 19 nt, Homo sapiens
  misc_RNA (1)...(19): siRNA sense strand
cgucaugucugcaggcgca

SEQ ID NO: 2411878 - RNA, 19 nt, Homo sapiens
  misc_RNA (1)...(19): siRNA sense strand
augagaagcuccuggugca

SEQ ID NO: 2411879 - RNA, 19 nt, Homo sapiens
  misc_RNA (1)...(19): siRNA sense strand
auauggcagcucugggaua

SEQ ID NO: 2411880 - RNA, 19 nt, Homo sapiens
  misc_RNA (1)...(19): siRNA sense strand
aggaaaacguacugaauau

SEQ ID NO: 2411881 - RNA, 19 nt, Homo sapiens
  misc_RNA (1)...(19): siRNA sense strand
agauucagcuggaggaaaa

SEQ ID NO: 2411882 - RNA, 19 nt, Homo sapiens
  misc_RNA (1)...(19): siRNA sense strand
aggcugaaucugagaaaca

SEQ ID NO: 2411883 - RNA, 19 nt, Homo sapiens
  misc_RNA (1)...(19): siRNA sense strand
auagcaaccuggaggagaa

SEQ ID NO: 2411884 - RNA, 19 nt, Homo sapiens
  misc_RNA (1)...(19): siRNA sense strand
ccuuugaugcuuugauuaa

SEQ ID NO: 2411885 - RNA, 19 nt, Homo sapiens
  misc_RNA (1)...(19): siRNA sense strand
gaggaaaauccauggaauu

SEQ ID NO: 2411886 - RNA, 19 nt, Homo sapiens
  misc_RNA (1)...(19): siRNA sense strand
cugaaagacuggacagaac

SEQ ID NO: 2411887 - RNA, 19 nt, Homo sapiens
  misc_RNA (1)...(19): siRNA sense strand
cuaugaaucucgacgccaa

SEQ ID NO: 2411888 - RNA, 19 nt, Homo sapiens
  misc_RNA (1)...(19): siRNA sense strand
cugaauaucaacugugaga

SEQ ID NO: 2411889 - RNA, 19 nt, Homo sapiens
  misc_RNA (1)...(19): siRNA sense strand
ggaggaaaauccauggaau

SEQ ID NO: 2411890 - RNA, 19 nt, Homo sapiens
  misc_RNA (1)...(19): siRNA sense strand
gguccuuaccugauaauau

SEQ ID NO: 2411891 - RNA, 19 nt, Homo sapiens
  misc_RNA (1)...(19): siRNA sense strand
gcagaaggaaggagaccca

SEQ ID NO: 2411892 - RNA, 19 nt, Homo sapiens
  misc_RNA (1)...(19): siRNA sense strand
ugaacauauuggagggauc

SEQ ID NO: 2411893 - RNA, 19 nt, Homo sapiens
  misc_RNA (1)...(19): siRNA sense strand
ggaaaugcuuuguggggca

SEQ ID NO: 2411894 - RNA, 19 nt, Homo sapiens
  misc_RNA (1)...(19): siRNA sense strand
auaucaacugugagaacaa

SEQ ID NO: 2411895 - RNA, 19 nt, Homo sapiens
  misc_RNA (1)...(19): siRNA sense strand
ccuuuagguugcaugggaa

SEQ ID NO: 2411896 - RNA, 19 nt, Homo sapiens
  misc_RNA (1)...(19): siRNA sense strand
cuuuagguugcaugggaaa

SEQ ID NO: 2411897 - RNA, 19 nt, Homo sapiens
  misc_RNA (1)...(19): siRNA sense strand
cggcuuucauccagauaga

SEQ ID NO: 2411898 - RNA, 19 nt, Homo sapiens
  misc_RNA (1)...(19): siRNA sense strand
gaauacaguucuuuggacu

SEQ ID NO: 2411899 - RNA, 19 nt, Homo sapiens
  misc_RNA (1)...(19): siRNA sense strand
cugucuuaauucugggauu

SEQ ID NO: 2411900 - RNA, 19 nt, Homo sapiens
  misc_RNA (1)...(19): siRNA sense strand
ugaaagggguucuggauca

SEQ ID NO: 2411901 - RNA, 19 nt, Homo sapiens
  misc_RNA (1)...(19): siRNA sense strand
gccaaaaccaagacagaau

SEQ ID NO: 2411902 - RNA, 19 nt, Homo sapiens
  misc_RNA (1)...(19): siRNA sense strand
cugugagaacaaaggauuu

SEQ ID NO: 2411903 - RNA, 19 nt, Homo sapiens
  misc_RNA (1)...(19): siRNA sense strand
acuuacugcacuuaggaaa

SEQ ID NO: 2411904 - RNA, 19 nt, Homo sapiens
  misc_RNA (1)...(19): siRNA sense strand
gggcauucagcaaacuuaa

SEQ ID NO: 2411905 - RNA, 19 nt, Homo sapiens
  misc_RNA (1)...(19): siRNA sense strand
cuugaaacgccgaaaggga

SEQ ID NO: 2411906 - RNA, 19 nt, Homo sapiens
  misc_RNA (1)...(19): siRNA sense strand
gacuuuaucugaauggcaa

SEQ ID NO: 2411907 - RNA, 19 nt, Homo sapiens
  misc_RNA (1)...(19): siRNA sense strand
ucaaaauauugcugagcga

SEQ ID NO: 2411908 - RNA, 19 nt, Homo sapiens
  misc_RNA (1)...(19): siRNA sense strand
aaaccaagacagaaucaau

SEQ ID NO: 2411909 - RNA, 19 nt, Homo sapiens
  misc_RNA (1)...(19): siRNA sense strand
cggacuaccucgaaguucu

SEQ ID NO: 2411910 - RNA, 19 nt, Homo sapiens
  misc_RNA (1)...(19): siRNA sense strand
acaacggguuacaggagau

SEQ ID NO: 2411911 - RNA, 19 nt, Homo sapiens
  misc_RNA (1)...(19): siRNA sense strand
ccaagacagaaucaauaaa

SEQ ID NO: 2411912 - RNA, 19 nt, Homo sapiens
  misc_RNA (1)...(19): siRNA sense strand
ggggaauaggcuaaaagua

SEQ ID NO: 2411913 - RNA, 19 nt, Homo sapiens
  misc_RNA (1)...(19): siRNA sense strand
gcaauuaccuugaagugcu

SEQ ID NO: 2411914 - RNA, 19 nt, Homo sapiens
  misc_RNA (1)...(19): siRNA sense strand
ccaggcugaaucugagaaa

SEQ ID NO: 2411915 - RNA, 19 nt, Homo sapiens
  misc_RNA (1)...(19): siRNA sense strand
ucucugaccugcagcccaa

SEQ ID NO: 2411916 - RNA, 19 nt, Homo sapiens
  misc_RNA (1)...(19): siRNA sense strand
uugauggacugcagagcuu

SEQ ID NO: 2411917 - RNA, 19 nt, Homo sapiens
  misc_RNA (1)...(19): siRNA sense strand
cgauaaaacagacggccau

SEQ ID NO: 2411918 - RNA, 19 nt, Homo sapiens
  misc_RNA (1)...(19): siRNA sense strand
uauggaacucccaggaaau

SEQ ID NO: 2411919 - RNA, 19 nt, Homo sapiens
  misc_RNA (1)...(19): siRNA sense strand
gcaaacuuaacaagcucaa

SEQ ID NO: 2411920 - RNA, 19 nt, Homo sapiens
  misc_RNA (1)...(19): siRNA sense strand
uggaauugcacuugugacu

SEQ ID NO: 2411921 - RNA, 19 nt, Homo sapiens
  misc_RNA (1)...(19): siRNA sense strand
cgaccaguccaaagaaacu

SEQ ID NO: 2411922 - RNA, 19 nt, Homo sapiens
  misc_RNA (1)...(19): siRNA sense strand
ugugcgaagaaaaggaaaa

SEQ ID NO: 2411923 - RNA, 19 nt, Homo sapiens
  misc_RNA (1)...(19): siRNA sense strand
gccacugagcugcuagaaa

SEQ ID NO: 2411924 - RNA, 19 nt, Homo sapiens
  misc_RNA (1)...(19): siRNA sense strand
aaguggaacuggaggaaaa

SEQ ID NO: 2411925 - RNA, 19 nt, Homo sapiens
  misc_RNA (1)...(19): siRNA sense strand
ccaggaaagaggaggagga

SEQ ID NO: 2411926 - RNA, 19 nt, Homo sapiens
  misc_RNA (1)...(19): siRNA sense strand
gguccaggaaagaggagga

SEQ ID NO: 2411927 - RNA, 19 nt, Homo sapiens
  misc_RNA (1)...(19): siRNA sense strand
aguagaugcaguuaaggaa

SEQ ID NO: 2411928 - RNA, 19 nt, Homo sapiens
  misc_RNA (1)...(19): siRNA sense strand
ccaagaugaugaaugcuga

SEQ ID NO: 2411929 - RNA, 19 nt, Homo sapiens
  misc_RNA (1)...(19): siRNA sense strand
cugaaaaucaaguggaacu

SEQ ID NO: 2411930 - RNA, 19 nt, Homo sapiens
  misc_RNA (1)...(19): siRNA sense strand
agauauugucagaaccaua

SEQ ID NO: 2411931 - RNA, 19 nt, Homo sapiens
  misc_RNA (1)...(19): siRNA sense strand
aguacagagagaagaggaa

SEQ ID NO: 2411932 - RNA, 19 nt, Homo sapiens
  misc_RNA (1)...(19): siRNA sense strand
acaucuggguugaagguga

SEQ ID NO: 2411933 - RNA, 19 nt, Homo sapiens
  misc_RNA (1)...(19): siRNA sense strand
aaagauacaucaaggccuu

SEQ ID NO: 2411934 - RNA, 19 nt, Homo sapiens
  misc_RNA (1)...(19): siRNA sense strand
ggcaagaguagaaggagca

SEQ ID NO: 2411935 - RNA, 19 nt, Homo sapiens
  misc_RNA (1)...(19): siRNA sense strand
acagaagaucauuaagaga

SEQ ID NO: 2411936 - RNA, 19 nt, Homo sapiens
  misc_RNA (1)...(19): siRNA sense strand
cuguguggcaagaguagaa

SEQ ID NO: 2411937 - RNA, 19 nt, Homo sapiens
  misc_RNA (1)...(19): siRNA sense strand
gguacaaagcccuggaaca

SEQ ID NO: 2411938 - RNA, 19 nt, Homo sapiens
  misc_RNA (1)...(19): siRNA sense strand
aagagaaacgggagcuaaa

SEQ ID NO: 2411939 - RNA, 19 nt, Homo sapiens
  misc_RNA (1)...(19): siRNA sense strand
agacggaacagcagagaau

SEQ ID NO: 2411940 - RNA, 19 nt, Homo sapiens
  misc_RNA (1)...(19): siRNA sense strand
aggagaagcaagugcggaa

SEQ ID NO: 2411941 - RNA, 19 nt, Homo sapiens
  misc_RNA (1)...(19): siRNA sense strand
gcaagaaguggcugggaca

SEQ ID NO: 2411942 - RNA, 19 nt, Homo sapiens
  misc_RNA (1)...(19): siRNA sense strand
ucuuacugaugcagagaaa

SEQ ID NO: 2411943 - RNA, 19 nt, Homo sapiens
  misc_RNA (1)...(19): siRNA sense strand
aagcugaggugaagcggua

SEQ ID NO: 2411944 - RNA, 19 nt, Homo sapiens
  misc_RNA (1)...(19): siRNA sense strand
ggucguggucacaggcaaa

SEQ ID NO: 2411945 - RNA, 19 nt, Homo sapiens
  misc_RNA (1)...(19): siRNA sense strand
gaaaagaagaaggaagaaa

SEQ ID NO: 2411946 - RNA, 19 nt, Homo sapiens
  misc_RNA (1)...(19): siRNA sense strand
gcaaagcgccugaggagca

SEQ ID NO: 2411947 - RNA, 19 nt, Homo sapiens
  misc_RNA (1)...(19): siRNA sense strand
gacccaaaugagagagaau

SEQ ID NO: 2411948 - RNA, 19 nt, Homo sapiens
  misc_RNA (1)...(19): siRNA sense strand
ggagaagaaaggagcaagu

SEQ ID NO: 2411949 - RNA, 19 nt, Homo sapiens
  misc_RNA (1)...(19): siRNA sense strand
gugaacagccaguggaagu

SEQ ID NO: 2411950 - RNA, 19 nt, Homo sapiens
  misc_RNA (1)...(19): siRNA sense strand
augcagagucucaaggcaa

SEQ ID NO: 2411951 - RNA, 19 nt, Homo sapiens
  misc_RNA (1)...(19): siRNA sense strand
gcgcuuuaacugccagaaa

SEQ ID NO: 2411952 - RNA, 19 nt, Homo sapiens
  misc_RNA (1)...(19): siRNA sense strand
gagaaguaccugucggcuu

SEQ ID NO: 2411953 - RNA, 19 nt, Homo sapiens
  misc_RNA (1)...(19): siRNA sense strand
cugccagaaaccagauaua

SEQ ID NO: 2411954 - RNA, 19 nt, Homo sapiens
  misc_RNA (1)...(19): siRNA sense strand
gcuacuaugaagaggcuga

SEQ ID NO: 2411955 - RNA, 19 nt, Homo sapiens
  misc_RNA (1)...(19): siRNA sense strand
aggagaggcuugaaaagaa

SEQ ID NO: 2411956 - RNA, 19 nt, Homo sapiens
  misc_RNA (1)...(19): siRNA sense strand
gcgucauucacaaggagaa

SEQ ID NO: 2411957 - RNA, 19 nt, Homo sapiens
  misc_RNA (1)...(19): siRNA sense strand
ugaccagugcagagaucaa

SEQ ID NO: 2411958 - RNA, 19 nt, Homo sapiens
  misc_RNA (1)...(19): siRNA sense strand
uugaaaagaagaaggaaga

SEQ ID NO: 2411959 - RNA, 19 nt, Homo sapiens
  misc_RNA (1)...(19): siRNA sense strand
gcaucauggaggugaagga

SEQ ID NO: 2411960 - RNA, 19 nt, Homo sapiens
  misc_RNA (1)...(19): siRNA sense strand
aggaggagcuguaugacga

SEQ ID NO: 2411961 - RNA, 19 nt, Homo sapiens
  misc_RNA (1)...(19): siRNA sense strand
ugaaggaaauugacgagga

SEQ ID NO: 2411962 - RNA, 19 nt, Homo sapiens
  misc_RNA (1)...(19): siRNA sense strand
aaggagcaucugaaggaaa

SEQ ID NO: 2411963 - RNA, 19 nt, Homo sapiens
  misc_RNA (1)...(19): siRNA sense strand
gaaaguucucagagcccaa

SEQ ID NO: 2411964 - RNA, 19 nt, Homo sapiens
  misc_RNA (1)...(19): siRNA sense strand
ggucacaggcaaaggcacu

SEQ ID NO: 2411965 - RNA, 19 nt, Homo sapiens
  misc_RNA (1)...(19): siRNA sense strand
gcucugaugaggaguacau

SEQ ID NO: 2411966 - RNA, 19 nt, Homo sapiens
  misc_RNA (1)...(19): siRNA sense strand
ugcagagucucaaggcaaa

SEQ ID NO: 2411967 - RNA, 19 nt, Homo sapiens
  misc_RNA (1)...(19): siRNA sense strand
gaaucugggcaggaagaaa

SEQ ID NO: 2411968 - RNA, 19 nt, Homo sapiens
  misc_RNA (1)...(19): siRNA sense strand
gggacaaucaccugcacuu

SEQ ID NO: 2411969 - RNA, 19 nt, Homo sapiens
  misc_RNA (1)...(19): siRNA sense strand
gcucagggucauccaggaa

SEQ ID NO: 2411970 - RNA, 19 nt, Homo sapiens
  misc_RNA (1)...(19): siRNA sense strand
gguacacagaggagaagga

SEQ ID NO: 2411971 - RNA, 19 nt, Homo sapiens
  misc_RNA (1)...(19): siRNA sense strand
ccuacgaguccuacgauga

SEQ ID NO: 2411972 - RNA, 19 nt, Homo sapiens
  misc_RNA (1)...(19): siRNA sense strand
agagcaaggaccaggcuga

SEQ ID NO: 2411973 - RNA, 19 nt, Homo sapiens
  misc_RNA (1)...(19): siRNA sense strand
gagcaagguggcccagcaa

SEQ ID NO: 2411974 - RNA, 19 nt, Homo sapiens
  misc_RNA (1)...(19): siRNA sense strand
caucaacaagcaacagaau

SEQ ID NO: 2411975 - RNA, 19 nt, Homo sapiens
  misc_RNA (1)...(19): siRNA sense strand
cgaugaaugccgaugugau

SEQ ID NO: 2411976 - RNA, 19 nt, Homo sapiens
  misc_RNA (1)...(19): siRNA sense strand
ccggaugcccagcgcuuua

SEQ ID NO: 2411977 - RNA, 19 nt, Homo sapiens
  misc_RNA (1)...(19): siRNA sense strand
ggcaagaaucggacagaag

SEQ ID NO: 2411978 - RNA, 19 nt, Homo sapiens
  misc_RNA (1)...(19): siRNA sense strand
gcuccaagacagacccaga

SEQ ID NO: 2411979 - RNA, 19 nt, Homo sapiens
  misc_RNA (1)...(19): siRNA sense strand
aaggacagguugcgcguga

SEQ ID NO: 2411980 - RNA, 19 nt, Homo sapiens
  misc_RNA (1)...(19): siRNA sense strand
aaucugggcaggaagaaau

SEQ ID NO: 2411981 - RNA, 19 nt, Homo sapiens
  misc_RNA (1)...(19): siRNA sense strand
ucagcaucauggaggugaa

SEQ ID NO: 2411982 - RNA, 19 nt, Homo sapiens
  misc_RNA (1)...(19): siRNA sense strand
ugggagaagaaaggagcaa

SEQ ID NO: 2411983 - RNA, 19 nt, Homo sapiens
  misc_RNA (1)...(19): siRNA sense strand
cagaaaccaaagacgucaa

SEQ ID NO: 2411984 - RNA, 19 nt, Homo sapiens
  misc_RNA (1)...(19): siRNA sense strand
cggucguggucacaggcaa

SEQ ID NO: 2411985 - RNA, 19 nt, Homo sapiens
  misc_RNA (1)...(19): siRNA sense strand
augaagaggacggcagcaa

SEQ ID NO: 2411986 - RNA, 19 nt, Homo sapiens
  misc_RNA (1)...(19): siRNA sense strand
acacagaggagaaggagag

SEQ ID NO: 2411987 - RNA, 19 nt, Homo sapiens
  misc_RNA (1)...(19): siRNA sense strand
cagaggagaaggagaggcu

SEQ ID NO: 2411988 - RNA, 19 nt, Homo sapiens
  misc_RNA (1)...(19): siRNA sense strand
agaagaagaaggagcgcaa

SEQ ID NO: 2411989 - RNA, 19 nt, Homo sapiens
  misc_RNA (1)...(19): siRNA sense strand
ggaccaacaugcagcgcuu

SEQ ID NO: 2411990 - RNA, 19 nt, Homo sapiens
  misc_RNA (1)...(19): siRNA sense strand
uggaggaagaacugaagaa

SEQ ID NO: 2411991 - RNA, 19 nt, Homo sapiens
  misc_RNA (1)...(19): siRNA sense strand
ucccagagcaccagggcaa

SEQ ID NO: 2411992 - RNA, 19 nt, Homo sapiens
  misc_RNA (1)...(19): siRNA sense strand
ccaagacccucaagcggaa

SEQ ID NO: 2411993 - RNA, 19 nt, Homo sapiens
  misc_RNA (1)...(19): siRNA sense strand
agauggugauugagaacga

SEQ ID NO: 2411994 - RNA, 19 nt, Homo sapiens
  misc_RNA (1)...(19): siRNA sense strand
cgggcaagcucaagacgga

SEQ ID NO: 2411995 - RNA, 19 nt, Homo sapiens
  misc_RNA (1)...(19): siRNA sense strand
uguaugagucagaugagaa

SEQ ID NO: 2411996 - RNA, 19 nt, Homo sapiens
  misc_RNA (1)...(19): siRNA sense strand
aagaagaaggagcgcaaca

SEQ ID NO: 2411997 - RNA, 19 nt, Homo sapiens
  misc_RNA (1)...(19): siRNA sense strand
gcgaaguggaucccagcaa

SEQ ID NO: 2411998 - RNA, 19 nt, Homo sapiens
  misc_RNA (1)...(19): siRNA sense strand
gugccaagaccaaggagga

SEQ ID NO: 2411999 - RNA, 19 nt, Homo sapiens
  misc_RNA (1)...(19): siRNA sense strand
gggaguugaaagagguguu

SEQ ID NO: 2412000 - RNA, 19 nt, Homo sapiens
  misc_RNA (1)...(19): siRNA sense strand
uguuagaagacgagggccu

SEQ ID NO: 2412001 - RNA, 19 nt, Homo sapiens
  misc_RNA (1)...(19): siRNA sense strand
ccaccaagaagcuggagga

SEQ ID NO: 2412002 - RNA, 19 nt, Homo sapiens
  misc_RNA (1)...(19): siRNA sense strand
gguugauguccguggagga

SEQ ID NO: 2412003 - RNA, 19 nt, Homo sapiens
  misc_RNA (1)...(19): siRNA sense strand
ugaagaaggaccacgcaga

SEQ ID NO: 2412004 - RNA, 19 nt, Homo sapiens
  misc_RNA (1)...(19): siRNA sense strand
acuccaaacagaagaucau

SEQ ID NO: 2412005 - RNA, 19 nt, Homo sapiens
  misc_RNA (1)...(19): siRNA sense strand
cgggagaccgacaagaaga

SEQ ID NO: 2412006 - RNA, 19 nt, Homo sapiens
  misc_RNA (1)...(19): siRNA sense strand
agaagaaguaccugugcga

SEQ ID NO: 2412007 - RNA, 19 nt, Homo sapiens
  misc_RNA (1)...(19): siRNA sense strand
cgcagaagcuggugcugga

SEQ ID NO: 2412008 - RNA, 19 nt, Homo sapiens
  misc_RNA (1)...(19): siRNA sense strand
ugugggugaucgaggccaa

SEQ ID NO: 2412009 - RNA, 19 nt, Homo sapiens
  misc_RNA (1)...(19): siRNA sense strand
ccguggaggaagaacugaa

SEQ ID NO: 2412010 - RNA, 19 nt, Homo sapiens
  misc_RNA (1)...(19): siRNA sense strand
ccaaggaccugccagccaa

SEQ ID NO: 2412011 - RNA, 19 nt, Homo sapiens
  misc_RNA (1)...(19): siRNA sense strand
aguaugagacccuguucaa

SEQ ID NO: 2412012 - RNA, 19 nt, Homo sapiens
  misc_RNA (1)...(19): siRNA sense strand
accucaagcuagugggcca

SEQ ID NO: 2412013 - RNA, 19 nt, Homo sapiens
  misc_RNA (1)...(19): siRNA sense strand
gggacagcccagaacugaa

SEQ ID NO: 2412014 - RNA, 19 nt, Homo sapiens
  misc_RNA (1)...(19): siRNA sense strand
ccaccaaggccauugagga

SEQ ID NO: 2412015 - RNA, 19 nt, Homo sapiens
  misc_RNA (1)...(19): siRNA sense strand
cgggauaaguggauggaga

SEQ ID NO: 2412016 - RNA, 19 nt, Homo sapiens
  misc_RNA (1)...(19): siRNA sense strand
aggaagagguggucaucaa

SEQ ID NO: 2412017 - RNA, 19 nt, Homo sapiens
  misc_RNA (1)...(19): siRNA sense strand
agaagaagaaggagcgcaa

SEQ ID NO: 2412018 - RNA, 19 nt, Homo sapiens
  misc_RNA (1)...(19): siRNA sense strand
gggauaaguggauggagaa

SEQ ID NO: 2412019 - RNA, 19 nt, Homo sapiens
  misc_RNA (1)...(19): siRNA sense strand
ggaccaacaugcagcgcuu

SEQ ID NO: 2412020 - RNA, 19 nt, Homo sapiens
  misc_RNA (1)...(19): siRNA sense strand
uggaggaagaacugaagaa

SEQ ID NO: 2412021 - RNA, 19 nt, Homo sapiens
  misc_RNA (1)...(19): siRNA sense strand
ucccagagcaccagggcaa

SEQ ID NO: 2412022 - RNA, 19 nt, Homo sapiens
  misc_RNA (1)...(19): siRNA sense strand
ccaagacccucaagcggaa

SEQ ID NO: 2412023 - RNA, 19 nt, Homo sapiens
  misc_RNA (1)...(19): siRNA sense strand
agauggugauugagaacga

SEQ ID NO: 2412024 - RNA, 19 nt, Homo sapiens
  misc_RNA (1)...(19): siRNA sense strand
cgggcaagcucaagacgga

SEQ ID NO: 2412025 - RNA, 19 nt, Homo sapiens
  misc_RNA (1)...(19): siRNA sense strand
uguaugagucagaugagaa

SEQ ID NO: 2412026 - RNA, 19 nt, Homo sapiens
  misc_RNA (1)...(19): siRNA sense strand
aagaagaaggagcgcaaca

SEQ ID NO: 2412027 - RNA, 19 nt, Homo sapiens
  misc_RNA (1)...(19): siRNA sense strand
gcgaaguggaucccagcaa

SEQ ID NO: 2412028 - RNA, 19 nt, Homo sapiens
  misc_RNA (1)...(19): siRNA sense strand
gugccaagaccaaggagga

SEQ ID NO: 2412029 - RNA, 19 nt, Homo sapiens
  misc_RNA (1)...(19): siRNA sense strand
gggaguugaaagagguguu

SEQ ID NO: 2412030 - RNA, 19 nt, Homo sapiens
  misc_RNA (1)...(19): siRNA sense strand
uguuagaagacgagggccu

SEQ ID NO: 2412031 - RNA, 19 nt, Homo sapiens
  misc_RNA (1)...(19): siRNA sense strand
ccaccaagaagcuggagga

SEQ ID NO: 2412032 - RNA, 19 nt, Homo sapiens
  misc_RNA (1)...(19): siRNA sense strand
gguugauguccguggagga

SEQ ID NO: 2412033 - RNA, 19 nt, Homo sapiens
  misc_RNA (1)...(19): siRNA sense strand
uggaggaagagguggucau

SEQ ID NO: 2412034 - RNA, 19 nt, Homo sapiens
  misc_RNA (1)...(19): siRNA sense strand
ugaagaaggaccacgcaga

SEQ ID NO: 2412035 - RNA, 19 nt, Homo sapiens
  misc_RNA (1)...(19): siRNA sense strand
acuccaaacagaagaucau

SEQ ID NO: 2412036 - RNA, 19 nt, Homo sapiens
  misc_RNA (1)...(19): siRNA sense strand
cgggagaccgacaagaaga

SEQ ID NO: 2412037 - RNA, 19 nt, Homo sapiens
  misc_RNA (1)...(19): siRNA sense strand
agaagaaguaccugugcga

SEQ ID NO: 2412038 - RNA, 19 nt, Homo sapiens
  misc_RNA (1)...(19): siRNA sense strand
cgcagaagcuggugcugga

SEQ ID NO: 2412039 - RNA, 19 nt, Homo sapiens
  misc_RNA (1)...(19): siRNA sense strand
ugugggugaucgaggccaa

SEQ ID NO: 2412040 - RNA, 19 nt, Homo sapiens
  misc_RNA (1)...(19): siRNA sense strand
ccguggaggaagaacugaa

SEQ ID NO: 2412041 - RNA, 19 nt, Homo sapiens
  misc_RNA (1)...(19): siRNA sense strand
ccaaggaccugccagccaa

SEQ ID NO: 2412042 - RNA, 19 nt, Homo sapiens
  misc_RNA (1)...(19): siRNA sense strand
aguaugagacccuguucaa

SEQ ID NO: 2412043 - RNA, 19 nt, Homo sapiens
  misc_RNA (1)...(19): siRNA sense strand
accucaagcuagugggcca

SEQ ID NO: 2412044 - RNA, 19 nt, Homo sapiens
  misc_RNA (1)...(19): siRNA sense strand
gggacagcccagaacugaa

SEQ ID NO: 2412045 - RNA, 19 nt, Homo sapiens
  misc_RNA (1)...(19): siRNA sense strand
gcauggaggaagagguggu

SEQ ID NO: 2412046 - RNA, 19 nt, Homo sapiens
  misc_RNA (1)...(19): siRNA sense strand
ccaccaaggccauugagga

SEQ ID NO: 2412047 - RNA, 19 nt, Homo sapiens
  misc_RNA (1)...(19): siRNA sense strand
cuuuagauuuccuggugaa

SEQ ID NO: 2412048 - RNA, 19 nt, Homo sapiens
  misc_RNA (1)...(19): siRNA sense strand
cuauauuguaccuggaaga

SEQ ID NO: 2412049 - RNA, 19 nt, Homo sapiens
  misc_RNA (1)...(19): siRNA sense strand
guaccaggccagauggaga

SEQ ID NO: 2412050 - RNA, 19 nt, Homo sapiens
  misc_RNA (1)...(19): siRNA sense strand
ggagagaaacagaaagccu

SEQ ID NO: 2412051 - RNA, 19 nt, Homo sapiens
  misc_RNA (1)...(19): siRNA sense strand
uggugaaguccaaugaaau

SEQ ID NO: 2412052 - RNA, 19 nt, Homo sapiens
  misc_RNA (1)...(19): siRNA sense strand
gagagaaacagaaagccuu

SEQ ID NO: 2412053 - RNA, 19 nt, Homo sapiens
  misc_RNA (1)...(19): siRNA sense strand
auauuagcccuguggguau

SEQ ID NO: 2412054 - RNA, 19 nt, Homo sapiens
  misc_RNA (1)...(19): siRNA sense strand
cuuuauuuaugcagugaca

SEQ ID NO: 2412055 - RNA, 19 nt, Homo sapiens
  misc_RNA (1)...(19): siRNA sense strand
ccaugacugcaaacagaaa

SEQ ID NO: 2412056 - RNA, 19 nt, Homo sapiens
  misc_RNA (1)...(19): siRNA sense strand
ucuuggagagaaacagaaa

SEQ ID NO: 2412057 - RNA, 19 nt, Homo sapiens
  misc_RNA (1)...(19): siRNA sense strand
ugaugauaccucuggcaau

SEQ ID NO: 2412058 - RNA, 19 nt, Homo sapiens
  misc_RNA (1)...(19): siRNA sense strand
augacugcaaacagaaaua

SEQ ID NO: 2412059 - RNA, 19 nt, Homo sapiens
  misc_RNA (1)...(19): siRNA sense strand
gugucuugcuagucugaau

SEQ ID NO: 2412060 - RNA, 19 nt, Homo sapiens
  misc_RNA (1)...(19): siRNA sense strand
cauccaacuccaugcaaaa

SEQ ID NO: 2412061 - RNA, 19 nt, Homo sapiens
  misc_RNA (1)...(19): siRNA sense strand
aacagaaagccuugaagau

SEQ ID NO: 2412062 - RNA, 19 nt, Homo sapiens
  misc_RNA (1)...(19): siRNA sense strand
cguugaagaaaguuggaaa

SEQ ID NO: 2412063 - RNA, 19 nt, Homo sapiens
  misc_RNA (1)...(19): siRNA sense strand
guugaagaaaguuggaaaa

SEQ ID NO: 2412064 - RNA, 19 nt, Homo sapiens
  misc_RNA (1)...(19): siRNA sense strand
ggggaucauaacuggaaua

SEQ ID NO: 2412065 - RNA, 19 nt, Homo sapiens
  misc_RNA (1)...(19): siRNA sense strand
ccugaauacaguaaagcca

SEQ ID NO: 2412066 - RNA, 19 nt, Homo sapiens
  misc_RNA (1)...(19): siRNA sense strand
aacuggaauaagaggacua

SEQ ID NO: 2412067 - RNA, 19 nt, Homo sapiens
  misc_RNA (1)...(19): siRNA sense strand
ccucaaagucuaugggaca

SEQ ID NO: 2412068 - RNA, 19 nt, Homo sapiens
  misc_RNA (1)...(19): siRNA sense strand
cgguagaguggguggagaa

SEQ ID NO: 2412069 - RNA, 19 nt, Homo sapiens
  misc_RNA (1)...(19): siRNA sense strand
acggagaucaacagagaaa

SEQ ID NO: 2412070 - RNA, 19 nt, Homo sapiens
  misc_RNA (1)...(19): siRNA sense strand
agauaugcaaacagaguaa

SEQ ID NO: 2412071 - RNA, 19 nt, Homo sapiens
  misc_RNA (1)...(19): siRNA sense strand
agagaaaacuauuggguca

SEQ ID NO: 2412072 - RNA, 19 nt, Homo sapiens
  misc_RNA (1)...(19): siRNA sense strand
uggaaggggcagagauuaa

SEQ ID NO: 2412073 - RNA, 19 nt, Homo sapiens
  misc_RNA (1)...(19): siRNA sense strand
agaaagagauugaagaggu

SEQ ID NO: 2412074 - RNA, 19 nt, Homo sapiens
  misc_RNA (1)...(19): siRNA sense strand
cagcaggagauccgagcua

SEQ ID NO: 2412075 - RNA, 19 nt, Homo sapiens
  misc_RNA (1)...(19): siRNA sense strand
ugcugaaccugguggaaau

SEQ ID NO: 2412076 - RNA, 19 nt, Homo sapiens
  misc_RNA (1)...(19): siRNA sense strand
gcaagaagauugaccugga

SEQ ID NO: 2412077 - RNA, 19 nt, Homo sapiens
  misc_RNA (1)...(19): siRNA sense strand
gggcagacgagaaguggga

SEQ ID NO: 2412078 - RNA, 19 nt, Homo sapiens
  misc_RNA (1)...(19): siRNA sense strand
gagacauccaagagggcau

SEQ ID NO: 2412079 - RNA, 19 nt, Homo sapiens
  misc_RNA (1)...(19): siRNA sense strand
gccuaugggcagacgagaa

SEQ ID NO: 2412080 - RNA, 19 nt, Homo sapiens
  misc_RNA (1)...(19): siRNA sense strand
uggucgggcugcaggagaa

SEQ ID NO: 2412081 - RNA, 19 nt, Homo sapiens
  misc_RNA (1)...(19): siRNA sense strand
ggaaauagggaauagcugu

SEQ ID NO: 2412082 - RNA, 19 nt, Homo sapiens
  misc_RNA (1)...(19): siRNA sense strand
agugaggagcagaaagaga

SEQ ID NO: 2412083 - RNA, 19 nt, Homo sapiens
  misc_RNA (1)...(19): siRNA sense strand
agaccauacuccugcugaa

SEQ ID NO: 2412084 - RNA, 19 nt, Homo sapiens
  misc_RNA (1)...(19): siRNA sense strand
caagauuguucuaagggca

SEQ ID NO: 2412085 - RNA, 19 nt, Homo sapiens
  misc_RNA (1)...(19): siRNA sense strand
guguggaggaagugcugaa

SEQ ID NO: 2412086 - RNA, 19 nt, Homo sapiens
  misc_RNA (1)...(19): siRNA sense strand
ccugguggaaauagggaau

SEQ ID NO: 2412087 - RNA, 19 nt, Homo sapiens
  misc_RNA (1)...(19): siRNA sense strand
gguagaguggguggagaaa

SEQ ID NO: 2412088 - RNA, 19 nt, Homo sapiens
  misc_RNA (1)...(19): siRNA sense strand
gguggagaaagcagucaaa

SEQ ID NO: 2412089 - RNA, 19 nt, Homo sapiens
  misc_RNA (1)...(19): siRNA sense strand
gcaggagauccgagcuaga

SEQ ID NO: 2412090 - RNA, 19 nt, Homo sapiens
  misc_RNA (1)...(19): siRNA sense strand
uggcuuugggucagaacaa

SEQ ID NO: 2412091 - RNA, 19 nt, Homo sapiens
  misc_RNA (1)...(19): siRNA sense strand
ccucggacaaugugguuau

SEQ ID NO: 2412092 - RNA, 19 nt, Homo sapiens
  misc_RNA (1)...(19): siRNA sense strand
ccacauaugagaagcugga

SEQ ID NO: 2412093 - RNA, 19 nt, Homo sapiens
  misc_RNA (1)...(19): siRNA sense strand
aaccaaggccagccggaaa

SEQ ID NO: 2412094 - RNA, 19 nt, Homo sapiens
  misc_RNA (1)...(19): siRNA sense strand
guguaugauuuguugaacu

SEQ ID NO: 2412095 - RNA, 19 nt, Homo sapiens
  misc_RNA (1)...(19): siRNA sense strand
gauuuagcugggaaugaaa

SEQ ID NO: 2412096 - RNA, 19 nt, Homo sapiens
  misc_RNA (1)...(19): siRNA sense strand
uguugaacuggaagaagaa

SEQ ID NO: 2412097 - RNA, 19 nt, Homo sapiens
  misc_RNA (1)...(19): siRNA sense strand
augcaguguuccagaucau

SEQ ID NO: 2412098 - RNA, 19 nt, Homo sapiens
  misc_RNA (1)...(19): siRNA sense strand
gcuggaaggggcagagauu

SEQ ID NO: 2412099 - RNA, 19 nt, Homo sapiens
  misc_RNA (1)...(19): siRNA sense strand
acgugaagagcaagguaga

SEQ ID NO: 2412100 - RNA, 19 nt, Homo sapiens
  misc_RNA (1)...(19): siRNA sense strand
gcagauacaaccaaggcca

SEQ ID NO: 2412101 - RNA, 19 nt, Homo sapiens
  misc_RNA (1)...(19): siRNA sense strand
ggguggagaaagcagucaa

SEQ ID NO: 2412102 - RNA, 19 nt, Homo sapiens
  misc_RNA (1)...(19): siRNA sense strand
acuacgaaaucaugcacau

SEQ ID NO: 2412103 - RNA, 19 nt, Homo sapiens
  misc_RNA (1)...(19): siRNA sense strand
cguugauuuagcugggaau

SEQ ID NO: 2412104 - RNA, 19 nt, Homo sapiens
  misc_RNA (1)...(19): siRNA sense strand
ugggaaugaaagaggagca

SEQ ID NO: 2412105 - RNA, 19 nt, Homo sapiens
  misc_RNA (1)...(19): siRNA sense strand
aggagcagaaagagauuga

SEQ ID NO: 2412106 - RNA, 19 nt, Homo sapiens
  misc_RNA (1)...(19): siRNA sense strand
ccacuauccgauuggacau

SEQ ID NO: 2412107 - RNA, 19 nt, Homo sapiens
  misc_RNA (1)...(19): siRNA sense strand
gcaagaaguucccaggcau

SEQ ID NO: 2412108 - RNA, 19 nt, Homo sapiens
  misc_RNA (1)...(19): siRNA sense strand
ucgacaagcacaagaccaa

SEQ ID NO: 2412109 - RNA, 19 nt, Homo sapiens
  misc_RNA (1)...(19): siRNA sense strand
aaagaaugggaguggcaau

SEQ ID NO: 2412110 - RNA, 19 nt, Homo sapiens
  misc_RNA (1)...(19): siRNA sense strand
cugagguccuggaggugaa

SEQ ID NO: 2412111 - RNA, 19 nt, Homo sapiens
  misc_RNA (1)...(19): siRNA sense strand
uguacaagcaggugaucuu

SEQ ID NO: 2412112 - RNA, 19 nt, Homo sapiens
  misc_RNA (1)...(19): siRNA sense strand
acauggaggcccuggugaa

SEQ ID NO: 2412113 - RNA, 19 nt, Homo sapiens
  misc_RNA (1)...(19): siRNA sense strand
aggccacagaagugagcaa

SEQ ID NO: 2412114 - RNA, 19 nt, Homo sapiens
  misc_RNA (1)...(19): siRNA sense strand
ucaaagaaugggaguggca

SEQ ID NO: 2412115 - RNA, 19 nt, Homo sapiens
  misc_RNA (1)...(19): siRNA sense strand
agacugagguccuggaggu

SEQ ID NO: 2412116 - RNA, 19 nt, Homo sapiens
  misc_RNA (1)...(19): siRNA sense strand
auggaaagaauauggcaaa

SEQ ID NO: 2412117 - RNA, 19 nt, Homo sapiens
  misc_RNA (1)...(19): siRNA sense strand
ccauugugucuguggaaau

SEQ ID NO: 2412118 - RNA, 19 nt, Homo sapiens
  misc_RNA (1)...(19): siRNA sense strand
agaaaaugcaucagaaaga

SEQ ID NO: 2412119 - RNA, 19 nt, Homo sapiens
  misc_RNA (1)...(19): siRNA sense strand
aguaggaaacguugcaaau

SEQ ID NO: 2412120 - RNA, 19 nt, Homo sapiens
  misc_RNA (1)...(19): siRNA sense strand
uaguaggaaacguugcaaa

SEQ ID NO: 2412121 - RNA, 19 nt, Homo sapiens
  misc_RNA (1)...(19): siRNA sense strand
uauggaaagaauauggcaa

SEQ ID NO: 2412122 - RNA, 19 nt, Homo sapiens
  misc_RNA (1)...(19): siRNA sense strand
uugcaaauuccgauggcuu

SEQ ID NO: 2412123 - RNA, 19 nt, Homo sapiens
  misc_RNA (1)...(19): siRNA sense strand
augccauagucaaagaaaa

SEQ ID NO: 2412124 - RNA, 19 nt, Homo sapiens
  misc_RNA (1)...(19): siRNA sense strand
cuugaaaaguaauggaaga

SEQ ID NO: 2412125 - RNA, 19 nt, Homo sapiens
  misc_RNA (1)...(19): siRNA sense strand
ccgagagcuugaaaaguaa

SEQ ID NO: 2412126 - RNA, 19 nt, Homo sapiens
  misc_RNA (1)...(19): siRNA sense strand
ucacgauggaaguugcuaa

SEQ ID NO: 2412127 - RNA, 19 nt, Homo sapiens
  misc_RNA (1)...(19): siRNA sense strand
gaggagagaaguaggccaa

SEQ ID NO: 2412128 - RNA, 19 nt, Homo sapiens
  misc_RNA (1)...(19): siRNA sense strand
agaacaugggagaaggaaa

SEQ ID NO: 2412129 - RNA, 19 nt, Homo sapiens
  misc_RNA (1)...(19): siRNA sense strand
ggguaaacgauuccagcaa

SEQ ID NO: 2412130 - RNA, 19 nt, Homo sapiens
  misc_RNA (1)...(19): siRNA sense strand
cugaagggaaggugaagaa

SEQ ID NO: 2412131 - RNA, 19 nt, Homo sapiens
  misc_RNA (1)...(19): siRNA sense strand
ugaagaagaacaugggaga

SEQ ID NO: 2412132 - RNA, 19 nt, Homo sapiens
  misc_RNA (1)...(19): siRNA sense strand
gggaaagaccagacgucau

SEQ ID NO: 2412133 - RNA, 19 nt, Homo sapiens
  misc_RNA (1)...(19): siRNA sense strand
gaaggaaagaagagggugu

SEQ ID NO: 2412134 - RNA, 19 nt, Homo sapiens
  misc_RNA (1)...(19): siRNA sense strand
gggaaggugaagaagaaca

SEQ ID NO: 2412135 - RNA, 19 nt, Homo sapiens
  misc_RNA (1)...(19): siRNA sense strand
cgguagaugcugucgaaga

SEQ ID NO: 2412136 - RNA, 19 nt, Homo sapiens
  misc_RNA (1)...(19): siRNA sense strand
ggaagugcuacguggacau

SEQ ID NO: 2412137 - RNA, 19 nt, Homo sapiens
  misc_RNA (1)...(19): siRNA sense strand
uugaagaaaccucgcggaa

SEQ ID NO: 2412138 - RNA, 19 nt, Homo sapiens
  misc_RNA (1)...(19): siRNA sense strand
ucaaaguggaacagcugaa

SEQ ID NO: 2412139 - RNA, 19 nt, Homo sapiens
  misc_RNA (1)...(19): siRNA sense strand
uguuaaagaugcagauccu

SEQ ID NO: 2412140 - RNA, 19 nt, Homo sapiens
  misc_RNA (1)...(19): siRNA sense strand
aggcaaucacgaagaaguu

SEQ ID NO: 2412141 - RNA, 19 nt, Homo sapiens
  misc_RNA (1)...(19): siRNA sense strand
ggaucaaaguggaacagcu

SEQ ID NO: 2412142 - RNA, 19 nt, Homo sapiens
  misc_RNA (1)...(19): siRNA sense strand
ucacgaagaaguugaaaau

SEQ ID NO: 2412143 - RNA, 19 nt, Homo sapiens
  misc_RNA (1)...(19): siRNA sense strand
aaggaaacuuuaagccuga

SEQ ID NO: 2412144 - RNA, 19 nt, Homo sapiens
  misc_RNA (1)...(19): siRNA sense strand
ccaccaaaggacuugaaga

SEQ ID NO: 2412145 - RNA, 19 nt, Homo sapiens
  misc_RNA (1)...(19): siRNA sense strand
cagcagacacucuuggaca

SEQ ID NO: 2412146 - RNA, 19 nt, Homo sapiens
  misc_RNA (1)...(19): siRNA sense strand
ugucugaagggaaggugaa

SEQ ID NO: 2412147 - RNA, 19 nt, Homo sapiens
  misc_RNA (1)...(19): siRNA sense strand
cugcagcaaaugaggugua

SEQ ID NO: 2412148 - RNA, 19 nt, Homo sapiens
  misc_RNA (1)...(19): siRNA sense strand
ccccaaaggaugagaagga

SEQ ID NO: 2412149 - RNA, 19 nt, Homo sapiens
  misc_RNA (1)...(19): siRNA sense strand
ugucaacaguggacgcuga

SEQ ID NO: 2412150 - RNA, 19 nt, Homo sapiens
  misc_RNA (1)...(19): siRNA sense strand
gggaagugcuacguggaca

SEQ ID NO: 2412151 - RNA, 19 nt, Homo sapiens
  misc_RNA (1)...(19): siRNA sense strand
caggugaugagaagcgcaa

SEQ ID NO: 2412152 - RNA, 19 nt, Homo sapiens
  misc_RNA (1)...(19): siRNA sense strand
gagaaggaaagaagagggu

SEQ ID NO: 2412153 - RNA, 19 nt, Homo sapiens
  misc_RNA (1)...(19): siRNA sense strand
aaauaugugaagaggaaac

SEQ ID NO: 2412154 - RNA, 19 nt, Homo sapiens
  misc_RNA (1)...(19): siRNA sense strand
ccaaaggaugagaaggauc

SEQ ID NO: 2412155 - RNA, 19 nt, Homo sapiens
  misc_RNA (1)...(19): siRNA sense strand
gaacaugguccaagggagc

SEQ ID NO: 2412156 - RNA, 19 nt, Homo sapiens
  misc_RNA (1)...(19): siRNA sense strand
uggccaggaaagauuguua

SEQ ID NO: 2412157 - RNA, 19 nt, Homo sapiens
  misc_RNA (1)...(19): siRNA sense strand
ccgcaagcgagccuguuaa

SEQ ID NO: 2412158 - RNA, 19 nt, Homo sapiens
  misc_RNA (1)...(19): siRNA sense strand
ucucaugggaaguggaauc

SEQ ID NO: 2412159 - RNA, 19 nt, Homo sapiens
  misc_RNA (1)...(19): siRNA sense strand
caagggagcuucauggcca

SEQ ID NO: 2412160 - RNA, 19 nt, Homo sapiens
  misc_RNA (1)...(19): siRNA sense strand
ggagaagggaggaaggaga

SEQ ID NO: 2412161 - RNA, 19 nt, Homo sapiens
  misc_RNA (1)...(19): siRNA sense strand
cagauucacucuugggcau

SEQ ID NO: 2412162 - RNA, 19 nt, Homo sapiens
  misc_RNA (1)...(19): siRNA sense strand
ccugguaucaguaagggaa

SEQ ID NO: 2412163 - RNA, 19 nt, Homo sapiens
  misc_RNA (1)...(19): siRNA sense strand
cguugagagaauaguagaa

SEQ ID NO: 2412164 - RNA, 19 nt, Homo sapiens
  misc_RNA (1)...(19): siRNA sense strand
augagaagauuaaugcaga

SEQ ID NO: 2412165 - RNA, 19 nt, Homo sapiens
  misc_RNA (1)...(19): siRNA sense strand
gauuaaugcagaaaaguca

SEQ ID NO: 2412166 - RNA, 19 nt, Homo sapiens
  misc_RNA (1)...(19): siRNA sense strand
gcaagagagaagcgggaga

SEQ ID NO: 2412167 - RNA, 19 nt, Homo sapiens
  misc_RNA (1)...(19): siRNA sense strand
cggcaagagagaagcggga

SEQ ID NO: 2412168 - RNA, 19 nt, Homo sapiens
  misc_RNA (1)...(19): siRNA sense strand
ccgagaaggaugcggggua

SEQ ID NO: 2412169 - RNA, 19 nt, Homo sapiens
  misc_RNA (1)...(19): siRNA sense strand
gagagaagcgggagaggac

SEQ ID NO: 2412170 - RNA, 19 nt, Homo sapiens
  misc_RNA (1)...(19): siRNA sense strand
augucaagcccgagaagga

SEQ ID NO: 2412171 - RNA, 19 nt, Homo sapiens
  misc_RNA (1)...(19): siRNA sense strand
ggaaaagcugacaaagaaa

SEQ ID NO: 2412172 - RNA, 19 nt, Homo sapiens
  misc_RNA (1)...(19): siRNA sense strand
aaauaaaauuggagcgguu

SEQ ID NO: 2412173 - RNA, 19 nt, Homo sapiens
  misc_RNA (1)...(19): siRNA sense strand
ugcaaauggcugaagagaa

SEQ ID NO: 2412174 - RNA, 19 nt, Homo sapiens
  misc_RNA (1)...(19): siRNA sense strand
ugaaaguagcagauguaga

SEQ ID NO: 2412175 - RNA, 19 nt, Homo sapiens
  misc_RNA (1)...(19): siRNA sense strand
acggaaaagcugacaaaga

SEQ ID NO: 2412176 - RNA, 19 nt, Homo sapiens
  misc_RNA (1)...(19): siRNA sense strand
agggcaggucucugugaaa

SEQ ID NO: 2412177 - RNA, 19 nt, Homo sapiens
  misc_RNA (1)...(19): siRNA sense strand
uccucuaggcauugauuaa

SEQ ID NO: 2412178 - RNA, 19 nt, Homo sapiens
  misc_RNA (1)...(19): siRNA sense strand
aagcacaacugaaagagca

SEQ ID NO: 2412179 - RNA, 19 nt, Homo sapiens
  misc_RNA (1)...(19): siRNA sense strand
acaagugaccauugcccua

SEQ ID NO: 2412180 - RNA, 19 nt, Homo sapiens
  misc_RNA (1)...(19): siRNA sense strand
ucuacaucuuccugggaga

SEQ ID NO: 2412181 - RNA, 19 nt, Homo sapiens
  misc_RNA (1)...(19): siRNA sense strand
gauaagaagaucaaggaug

SEQ ID NO: 2412182 - RNA, 19 nt, Homo sapiens
  misc_RNA (1)...(19): siRNA sense strand
ugucaaaagccaaggcaga

SEQ ID NO: 2412183 - RNA, 19 nt, Homo sapiens
  misc_RNA (1)...(19): siRNA sense strand
agaucaaggauguucucaa

SEQ ID NO: 2412184 - RNA, 19 nt, Homo sapiens
  misc_RNA (1)...(19): siRNA sense strand
ccuauaagcaagaagcucu

SEQ ID NO: 2412185 - RNA, 19 nt, Homo sapiens
  misc_RNA (1)...(19): siRNA sense strand
uggaguucgccgugggcua

SEQ ID NO: 2412186 - RNA, 19 nt, Homo sapiens
  misc_RNA (1)...(19): siRNA sense strand
ccgggaucgagcugagaau

SEQ ID NO: 2412187 - RNA, 19 nt, Homo sapiens
  misc_RNA (1)...(19): siRNA sense strand
aguucauacuggagagaaa

SEQ ID NO: 2412188 - RNA, 19 nt, Homo sapiens
  misc_RNA (1)...(19): siRNA sense strand
gaguaauacaggagaagua

SEQ ID NO: 2412189 - RNA, 19 nt, Homo sapiens
  misc_RNA (1)...(19): siRNA sense strand
guguaaugagugugggaaa

SEQ ID NO: 2412190 - RNA, 19 nt, Homo sapiens
  misc_RNA (1)...(19): siRNA sense strand
aauccauacuggugggaaa

SEQ ID NO: 2412191 - RNA, 19 nt, Homo sapiens
  misc_RNA (1)...(19): siRNA sense strand
acgugauguuggagaauua

SEQ ID NO: 2412192 - RNA, 19 nt, Homo sapiens
  misc_RNA (1)...(19): siRNA sense strand
aguucauacuggagguaaa

SEQ ID NO: 2412193 - RNA, 19 nt, Homo sapiens
  misc_RNA (1)...(19): siRNA sense strand
guguaaugaauguggcaaa

SEQ ID NO: 2412194 - RNA, 19 nt, Homo sapiens
  misc_RNA (1)...(19): siRNA sense strand
guguaaucagugugggaaa

SEQ ID NO: 2412195 - RNA, 19 nt, Homo sapiens
  misc_RNA (1)...(19): siRNA sense strand
cacaaagggaagaguaaua

SEQ ID NO: 2412196 - RNA, 19 nt, Homo sapiens
  misc_RNA (1)...(19): siRNA sense strand
aauucauaccggagagaaa

SEQ ID NO: 2412197 - RNA, 19 nt, Homo sapiens
  misc_RNA (1)...(19): siRNA sense strand
ccgaauuuguaaugaaaga

SEQ ID NO: 2412198 - RNA, 19 nt, Homo sapiens
  misc_RNA (1)...(19): siRNA sense strand
guguaaugaguguggcaaa

SEQ ID NO: 2412199 - RNA, 19 nt, Homo sapiens
  misc_RNA (1)...(19): siRNA sense strand
guguaaugaguguggcaaa

SEQ ID NO: 2412200 - RNA, 19 nt, Homo sapiens
  misc_RNA (1)...(19): siRNA sense strand
guauaaugaguauggcaaa

SEQ ID NO: 2412201 - RNA, 19 nt, Homo sapiens
  misc_RNA (1)...(19): siRNA sense strand
caucaaagcuugcaaggca

SEQ ID NO: 2412202 - RNA, 19 nt, Homo sapiens
  misc_RNA (1)...(19): siRNA sense strand
aaguacaaauagcaggaaa

SEQ ID NO: 2412203 - RNA, 19 nt, Homo sapiens
  misc_RNA (1)...(19): siRNA sense strand
uugcaaggcaucagagaau

SEQ ID NO: 2412204 - RNA, 19 nt, Homo sapiens
  misc_RNA (1)...(19): siRNA sense strand
ccuuauaaguguaaugagu

SEQ ID NO: 2412205 - RNA, 19 nt, Homo sapiens
  misc_RNA (1)...(19): siRNA sense strand
guguaaugagugcggcaaa

SEQ ID NO: 2412206 - RNA, 19 nt, Homo sapiens
  misc_RNA (1)...(19): siRNA sense strand
guguaaugagugcggcaaa

SEQ ID NO: 2412207 - RNA, 19 nt, Homo sapiens
  misc_RNA (1)...(19): siRNA sense strand
ggaaagacaggaaagccaa

SEQ ID NO: 2412208 - RNA, 19 nt, Homo sapiens
  misc_RNA (1)...(19): siRNA sense strand
cagugauguuggaaagaca

SEQ ID NO: 2412209 - RNA, 19 nt, Homo sapiens
  misc_RNA (1)...(19): siRNA sense strand
ggucuuuagucgaaauuca

SEQ ID NO: 2412210 - RNA, 19 nt, Homo sapiens
  misc_RNA (1)...(19): siRNA sense strand
cuuacaaaucacuggagaa

SEQ ID NO: 2412211 - RNA, 19 nt, Homo sapiens
  misc_RNA (1)...(19): siRNA sense strand
ggagaaaagccuuacaaau

SEQ ID NO: 2412212 - RNA, 19 nt, Homo sapiens
  misc_RNA (1)...(19): siRNA sense strand
ggagaaaagccuuacaaau

SEQ ID NO: 2412213 - RNA, 19 nt, Homo sapiens
  misc_RNA (1)...(19): siRNA sense strand
guucaaaccuugcaagcca

SEQ ID NO: 2412214 - RNA, 19 nt, Homo sapiens
  misc_RNA (1)...(19): siRNA sense strand
gcucagaggacuuuguaca

SEQ ID NO: 2412215 - RNA, 19 nt, Homo sapiens
  misc_RNA (1)...(19): siRNA sense strand
acaggaaagccaagacauu

SEQ ID NO: 2412216 - RNA, 19 nt, Homo sapiens
  misc_RNA (1)...(19): siRNA sense strand
ggcaaggucuuuaggcgua

SEQ ID NO: 2412217 - RNA, 19 nt, Homo sapiens
  misc_RNA (1)...(19): siRNA sense strand
acaaauagcaggaaaccca

SEQ ID NO: 2412218 - RNA, 19 nt, Homo sapiens
  misc_RNA (1)...(19): siRNA sense strand
gguaauucacaccggagaa

SEQ ID NO: 2412219 - RNA, 19 nt, Homo sapiens
  misc_RNA (1)...(19): siRNA sense strand
aguauaaugaguauggcaa

SEQ ID NO: 2412220 - RNA, 19 nt, Homo sapiens
  misc_RNA (1)...(19): siRNA sense strand
uacacaaagggaagaguaa

SEQ ID NO: 2412221 - RNA, 19 nt, Homo sapiens
  misc_RNA (1)...(19): siRNA sense strand
acaaauguaacguguggaa

SEQ ID NO: 2412222 - RNA, 19 nt, Homo sapiens
  misc_RNA (1)...(19): siRNA sense strand
augcagagaugcugaagga

SEQ ID NO: 2412223 - RNA, 19 nt, Homo sapiens
  misc_RNA (1)...(19): siRNA sense strand
agaaaccauaugaguguaa

SEQ ID NO: 2412224 - RNA, 19 nt, Homo sapiens
  misc_RNA (1)...(19): siRNA sense strand
uggaaagacaggaaagcca

SEQ ID NO: 2412225 - RNA, 19 nt, Homo sapiens
  misc_RNA (1)...(19): siRNA sense strand
ggucauccauacuggugaa

SEQ ID NO: 2412226 - RNA, 19 nt, Homo sapiens
  misc_RNA (1)...(19): siRNA sense strand
uuucaaggcaucagcgaau

SEQ ID NO: 2412227 - RNA, 19 nt, Homo sapiens
  misc_RNA (1)...(19): siRNA sense strand
gggauguggcuauagaauu

SEQ ID NO: 2412228 - RNA, 19 nt, Homo sapiens
  misc_RNA (1)...(19): siRNA sense strand
gggaauggaucaaagcugu

SEQ ID NO: 2412229 - RNA, 19 nt, Homo sapiens
  misc_RNA (1)...(19): siRNA sense strand
cuacacaaagggaagagua

SEQ ID NO: 2412230 - RNA, 19 nt, Homo sapiens
  misc_RNA (1)...(19): siRNA sense strand
ccuuauauguguaaugagu

SEQ ID NO: 2412231 - RNA, 19 nt, Homo sapiens
  misc_RNA (1)...(19): siRNA sense strand
ugauaaaagagaugcaaga

SEQ ID NO: 2412232 - RNA, 19 nt, Homo sapiens
  misc_RNA (1)...(19): siRNA sense strand
accauaugagugugggaaa

SEQ ID NO: 2412233 - RNA, 19 nt, Homo sapiens
  misc_RNA (1)...(19): siRNA sense strand
gugggaaacccuuuaguau

SEQ ID NO: 2412234 - RNA, 19 nt, Homo sapiens
  misc_RNA (1)...(19): siRNA sense strand
cuuccgaauuuguaaugaa

SEQ ID NO: 2412235 - RNA, 19 nt, Homo sapiens
  misc_RNA (1)...(19): siRNA sense strand
agucaucagagaagucaua

SEQ ID NO: 2412236 - RNA, 19 nt, Homo sapiens
  misc_RNA (1)...(19): siRNA sense strand
uuacaaaucacuggagaau

SEQ ID NO: 2412237 - RNA, 19 nt, Homo sapiens
  misc_RNA (1)...(19): siRNA sense strand
uuacaaaugcaaugagugu

SEQ ID NO: 2412238 - RNA, 19 nt, Homo sapiens
  misc_RNA (1)...(19): siRNA sense strand
cuuguaagacaucgaggaa

SEQ ID NO: 2412239 - RNA, 19 nt, Homo sapiens
  misc_RNA (1)...(19): siRNA sense strand
uggauuaagccuucaguca

SEQ ID NO: 2412240 - RNA, 19 nt, Homo sapiens
  misc_RNA (1)...(19): siRNA sense strand
aaauguaaugaguguggua

SEQ ID NO: 2412241 - RNA, 19 nt, Homo sapiens
  misc_RNA (1)...(19): siRNA sense strand
ggaagagaugaacaugaua

SEQ ID NO: 2412242 - RNA, 19 nt, Homo sapiens
  misc_RNA (1)...(19): siRNA sense strand
guucaugccaagaccgaaa

SEQ ID NO: 2412243 - RNA, 19 nt, Homo sapiens
  misc_RNA (1)...(19): siRNA sense strand
acuuuguuacugugagaaa

SEQ ID NO: 2412244 - RNA, 19 nt, Homo sapiens
  misc_RNA (1)...(19): siRNA sense strand
acuuuguuacugugagaaa

SEQ ID NO: 2412245 - RNA, 19 nt, Homo sapiens
  misc_RNA (1)...(19): siRNA sense strand
acuuuguuacugugagaaa

SEQ ID NO: 2412246 - RNA, 19 nt, Homo sapiens
  misc_RNA (1)...(19): siRNA sense strand
uggaagaggaggaaggcaa

SEQ ID NO: 2412247 - RNA, 19 nt, Homo sapiens
  misc_RNA (1)...(19): siRNA sense strand
gcuucagccuggaggagaa

SEQ ID NO: 2412248 - RNA, 19 nt, Homo sapiens
  misc_RNA (1)...(19): siRNA sense strand
aggaagacacgguggaaga

SEQ ID NO: 2412249 - RNA, 19 nt, Homo sapiens
  misc_RNA (1)...(19): siRNA sense strand
agucagaggguguggucaa

SEQ ID NO: 2412250 - RNA, 19 nt, Homo sapiens
  misc_RNA (1)...(19): siRNA sense strand
gaggagaagaagaagguga

SEQ ID NO: 2412251 - RNA, 19 nt, Homo sapiens
  misc_RNA (1)...(19): siRNA sense strand
aggagaagaagaaggugaa

SEQ ID NO: 2412252 - RNA, 19 nt, Homo sapiens
  misc_RNA (1)...(19): siRNA sense strand
ucuaaugagucggaggaaa

SEQ ID NO: 2412253 - RNA, 19 nt, Homo sapiens
  misc_RNA (1)...(19): siRNA sense strand
augaguacguacagagaga

SEQ ID NO: 2412254 - RNA, 19 nt, Homo sapiens
  misc_RNA (1)...(19): siRNA sense strand
caggaauaccagagggagu

SEQ ID NO: 2412255 - RNA, 19 nt, Homo sapiens
  misc_RNA (1)...(19): siRNA sense strand
cuucaaacgcuguggaaac

SEQ ID NO: 2412256 - RNA, 19 nt, Homo sapiens
  misc_RNA (1)...(19): siRNA sense strand
cugaggaagaagcggaaau

SEQ ID NO: 2412257 - RNA, 19 nt, Homo sapiens
  misc_RNA (1)...(19): siRNA sense strand
agucggagccugagagcga

SEQ ID NO: 2412258 - RNA, 19 nt, Homo sapiens
  misc_RNA (1)...(19): siRNA sense strand
ugucggacguggaggagau

SEQ ID NO: 2412259 - RNA, 19 nt, Homo sapiens
  misc_RNA (1)...(19): siRNA sense strand
aggaggaggaggagaagga

SEQ ID NO: 2412260 - RNA, 19 nt, Homo sapiens
  misc_RNA (1)...(19): siRNA sense strand
aggaggaaggcaaguuuaa

SEQ ID NO: 2412261 - RNA, 19 nt, Homo sapiens
  misc_RNA (1)...(19): siRNA sense strand
cuuccaaacugcugggagu

SEQ ID NO: 2412262 - RNA, 19 nt, Homo sapiens
  misc_RNA (1)...(19): siRNA sense strand
cggcaagaccgggaagcaa

SEQ ID NO: 2412263 - RNA, 19 nt, Homo sapiens
  misc_RNA (1)...(19): siRNA sense strand
cagaagaugaaccgggaca

SEQ ID NO: 2412264 - RNA, 19 nt, Homo sapiens
  misc_RNA (1)...(19): siRNA sense strand
agaaggacgaggagggcga

SEQ ID NO: 2412265 - RNA, 19 nt, Homo sapiens
  misc_RNA (1)...(19): siRNA sense strand
agaugaaccgggacaacaa

SEQ ID NO: 2412266 - RNA, 19 nt, Homo sapiens
  misc_RNA (1)...(19): siRNA sense strand
uggcaaagaagauaagcuu

SEQ ID NO: 2412267 - RNA, 19 nt, Homo sapiens
  misc_RNA (1)...(19): siRNA sense strand
ccaucaagucggagccuga

SEQ ID NO: 2412268 - RNA, 19 nt, Homo sapiens
  misc_RNA (1)...(19): siRNA sense strand
gcaaggagcucaaccacga

SEQ ID NO: 2412269 - RNA, 19 nt, Homo sapiens
  misc_RNA (1)...(19): siRNA sense strand
augaaguacccgaaaguga

SEQ ID NO: 2412270 - RNA, 19 nt, Homo sapiens
  misc_RNA (1)...(19): siRNA sense strand
cucaggaggaggaggagaa

SEQ ID NO: 2412271 - RNA, 19 nt, Homo sapiens
  misc_RNA (1)...(19): siRNA sense strand
gugacaucuuucugggaga

SEQ ID NO: 2412272 - RNA, 19 nt, Homo sapiens
  misc_RNA (1)...(19): siRNA sense strand
ggcuggagauggaggagga

SEQ ID NO: 2412273 - RNA, 19 nt, Homo sapiens
  misc_RNA (1)...(19): siRNA sense strand
gggaagaagcccaaagcac

SEQ ID NO: 2412274 - RNA, 19 nt, Homo sapiens
  misc_RNA (1)...(19): siRNA sense strand
cuaaugagucggaggaaag

SEQ ID NO: 2412275 - RNA, 19 nt, Homo sapiens
  misc_RNA (1)...(19): siRNA sense strand
ccacggaggucucugccaa

SEQ ID NO: 2412276 - RNA, 19 nt, Homo sapiens
  misc_RNA (1)...(19): siRNA sense strand
acgacgagaacgaggacuu

SEQ ID NO: 2412277 - RNA, 19 nt, Homo sapiens
  misc_RNA (1)...(19): siRNA sense strand
gagaagaagaaggugaaga

SEQ ID NO: 2412278 - RNA, 19 nt, Homo sapiens
  misc_RNA (1)...(19): siRNA sense strand
aggaggaggagaaggacga

SEQ ID NO: 2412279 - RNA, 19 nt, Homo sapiens
  misc_RNA (1)...(19): siRNA sense strand
cggagaacagccuggccaa

SEQ ID NO: 2412280 - RNA, 19 nt, Homo sapiens
  misc_RNA (1)...(19): siRNA sense strand
ccgagaugucugugagugu

SEQ ID NO: 2412281 - RNA, 19 nt, Homo sapiens
  misc_RNA (1)...(19): siRNA sense strand
ucugcaaggacaugaagaa

SEQ ID NO: 2412282 - RNA, 19 nt, Homo sapiens
  misc_RNA (1)...(19): siRNA sense strand
ggccaggucagauggacaa

SEQ ID NO: 2412283 - RNA, 19 nt, Homo sapiens
  misc_RNA (1)...(19): siRNA sense strand
acuccuuaaccgagaucaa

SEQ ID NO: 2412284 - RNA, 19 nt, Homo sapiens
  misc_RNA (1)...(19): siRNA sense strand
gggacaacaaggaagggca

SEQ ID NO: 2412285 - RNA, 19 nt, Homo sapiens
  misc_RNA (1)...(19): siRNA sense strand
cgucaucagccuagaguuc

SEQ ID NO: 2412286 - RNA, 19 nt, Homo sapiens
  misc_RNA (1)...(19): siRNA sense strand
gaggaaagugugaagucca

SEQ ID NO: 2412287 - RNA, 19 nt, Homo sapiens
  misc_RNA (1)...(19): siRNA sense strand
ugagcagggagcugagcaa

SEQ ID NO: 2412288 - RNA, 19 nt, Homo sapiens
  misc_RNA (1)...(19): siRNA sense strand
agggcaaagauuucaacua

SEQ ID NO: 2412289 - RNA, 19 nt, Homo sapiens
  misc_RNA (1)...(19): siRNA sense strand
uggacuggguggacaacau

SEQ ID NO: 2412290 - RNA, 19 nt, Homo sapiens
  misc_RNA (1)...(19): siRNA sense strand
uuaaggagucagagggugu

SEQ ID NO: 2412291 - RNA, 19 nt, Homo sapiens
  misc_RNA (1)...(19): siRNA sense strand
acgccauugcagagaugaa

SEQ ID NO: 2412292 - RNA, 19 nt, Homo sapiens
  misc_RNA (1)...(19): siRNA sense strand
cugaugagcgugaaagguu

SEQ ID NO: 2412293 - RNA, 19 nt, Homo sapiens
  misc_RNA (1)...(19): siRNA sense strand
gugacuuggccaaagaaga

SEQ ID NO: 2412294 - RNA, 19 nt, Homo sapiens
  misc_RNA (1)...(19): siRNA sense strand
ugguggacuggguggacaa

SEQ ID NO: 2412295 - RNA, 19 nt, Homo sapiens
  misc_RNA (1)...(19): siRNA sense strand
ggaaggaagacacggugga

SEQ ID NO: 2412296 - RNA, 19 nt, Homo sapiens
  misc_RNA (1)...(19): siRNA sense strand
acgacgugcaccugaggaa

SEQ ID NO: 2412297 - RNA, 19 nt, Homo sapiens
  misc_RNA (1)...(19): siRNA sense strand
ugucaggcaaacagaguga

SEQ ID NO: 2412298 - RNA, 19 nt, Homo sapiens
  misc_RNA (1)...(19): siRNA sense strand
ugguagaccugguggacug

SEQ ID NO: 2412299 - RNA, 19 nt, Homo sapiens
  misc_RNA (1)...(19): siRNA sense strand
aguuuaaccucaugcucau

SEQ ID NO: 2412300 - RNA, 19 nt, Homo sapiens
  misc_RNA (1)...(19): siRNA sense strand
agcaggaacccgaggacga

SEQ ID NO: 2412301 - RNA, 19 nt, Homo sapiens
  misc_RNA (1)...(19): siRNA sense strand
gggaagaucuggaaggaga

SEQ ID NO: 2412302 - RNA, 19 nt, Homo sapiens
  misc_RNA (1)...(19): siRNA sense strand
gcaccuuugaggaggaaau

SEQ ID NO: 2412303 - RNA, 19 nt, Homo sapiens
  misc_RNA (1)...(19): siRNA sense strand
augaguaugaugaggacaa

SEQ ID NO: 2412304 - RNA, 19 nt, Homo sapiens
  misc_RNA (1)...(19): siRNA sense strand
ucagaagagcuuagggcau

SEQ ID NO: 2412305 - RNA, 19 nt, Homo sapiens
  misc_RNA (1)...(19): siRNA sense strand
gggcaguagccauggggaa

SEQ ID NO: 2412306 - RNA, 19 nt, Homo sapiens
  misc_RNA (1)...(19): siRNA sense strand
gcaaaucccaaguggcaga

SEQ ID NO: 2412307 - RNA, 19 nt, Homo sapiens
  misc_RNA (1)...(19): siRNA sense strand
uggagauggcccugagaga

SEQ ID NO: 2412308 - RNA, 19 nt, Homo sapiens
  misc_RNA (1)...(19): siRNA sense strand
ugauuguggaugaggucua

SEQ ID NO: 2412309 - RNA, 19 nt, Homo sapiens
  misc_RNA (1)...(19): siRNA sense strand
aggcaaaucccaaguggca

SEQ ID NO: 2412310 - RNA, 19 nt, Homo sapiens
  misc_RNA (1)...(19): siRNA sense strand
cugagggugugaaggucaa

SEQ ID NO: 2412311 - RNA, 19 nt, Homo sapiens
  misc_RNA (1)...(19): siRNA sense strand
uugagaagucuguugggua

SEQ ID NO: 2412312 - RNA, 19 nt, Homo sapiens
  misc_RNA (1)...(19): siRNA sense strand
ggucacugggcuagacaca

SEQ ID NO: 2412313 - RNA, 19 nt, Homo sapiens
  misc_RNA (1)...(19): siRNA sense strand
ccaggagccaagugaccaa

SEQ ID NO: 2412314 - RNA, 19 nt, Homo sapiens
  misc_RNA (1)...(19): siRNA sense strand
cucuagaggaagaaugauu

SEQ ID NO: 2412315 - RNA, 19 nt, Homo sapiens
  misc_RNA (1)...(19): siRNA sense strand
ugagaagucuguuggguac

SEQ ID NO: 2412316 - RNA, 19 nt, Homo sapiens
  misc_RNA (1)...(19): siRNA sense strand
gaggagggcuacaggaccu

SEQ ID NO: 2412317 - RNA, 19 nt, Homo sapiens
  misc_RNA (1)...(19): siRNA sense strand
gugugaaggucaaaggccu

SEQ ID NO: 2412318 - RNA, 19 nt, Homo sapiens
  misc_RNA (1)...(19): siRNA sense strand
acgugugucucuauggcaa

SEQ ID NO: 2412319 - RNA, 19 nt, Homo sapiens
  misc_RNA (1)...(19): siRNA sense strand
auucagcugaggagggcua

SEQ ID NO: 2412320 - RNA, 19 nt, Homo sapiens
  misc_RNA (1)...(19): siRNA sense strand
gcaacauccggcuggccua

SEQ ID NO: 2412321 - RNA, 19 nt, Homo sapiens
  misc_RNA (1)...(19): siRNA sense strand
aggugugacugaugggaau

SEQ ID NO: 2412322 - RNA, 19 nt, Homo sapiens
  misc_RNA (1)...(19): siRNA sense strand
cugaagaagaagaccagca

SEQ ID NO: 2412323 - RNA, 19 nt, Homo sapiens
  misc_RNA (1)...(19): siRNA sense strand
aggcugaagaagaagacca

SEQ ID NO: 2412324 - RNA, 19 nt, Homo sapiens
  misc_RNA (1)...(19): siRNA sense strand
uggagaaacuggaaggcua

SEQ ID NO: 2412325 - RNA, 19 nt, Homo sapiens
  misc_RNA (1)...(19): siRNA sense strand
gaacaagucuggugggagu

SEQ ID NO: 2412326 - RNA, 19 nt, Homo sapiens
  misc_RNA (1)...(19): siRNA sense strand
agaugauggagcagagaua

SEQ ID NO: 2412327 - RNA, 19 nt, Homo sapiens
  misc_RNA (1)...(19): siRNA sense strand
aaagaaagcugcagagccu

SEQ ID NO: 2412328 - RNA, 19 nt, Homo sapiens
  misc_RNA (1)...(19): siRNA sense strand
acgaagacgacgaggagga

SEQ ID NO: 2412329 - RNA, 19 nt, Homo sapiens
  misc_RNA (1)...(19): siRNA sense strand
gcaaguacagcaaggccaa

SEQ ID NO: 2412330 - RNA, 19 nt, Homo sapiens
  misc_RNA (1)...(19): siRNA sense strand
agaguguggaggagaacaa

SEQ ID NO: 2412331 - RNA, 19 nt, Homo sapiens
  misc_RNA (1)...(19): siRNA sense strand
uggacaagcuggacgcuga

SEQ ID NO: 2412332 - RNA, 19 nt, Homo sapiens
  misc_RNA (1)...(19): siRNA sense strand
agaaaggaggagauggaca

SEQ ID NO: 2412333 - RNA, 19 nt, Homo sapiens
  misc_RNA (1)...(19): siRNA sense strand
aauccaagaaggaggacuu

SEQ ID NO: 2412334 - RNA, 19 nt, Homo sapiens
  misc_RNA (1)...(19): siRNA sense strand
cugaguacgagcuggagaa

SEQ ID NO: 2412335 - RNA, 19 nt, Homo sapiens
  misc_RNA (1)...(19): siRNA sense strand
agcagaguguggaggagaa

SEQ ID NO: 2412336 - RNA, 19 nt, Homo sapiens
  misc_RNA (1)...(19): siRNA sense strand
uggaggaggacgacgaaga

SEQ ID NO: 2412337 - RNA, 19 nt, Homo sapiens
  misc_RNA (1)...(19): siRNA sense strand
aggagaacaaggagcgcau

SEQ ID NO: 2412338 - RNA, 19 nt, Homo sapiens
  misc_RNA (1)...(19): siRNA sense strand
cagacaugggccuggagaa

SEQ ID NO: 2412339 - RNA, 19 nt, Homo sapiens
  misc_RNA (1)...(19): siRNA sense strand
agauuaagccgguggaggu

SEQ ID NO: 2412340 - RNA, 19 nt, Homo sapiens
  misc_RNA (1)...(19): siRNA sense strand
ucacugaggcagagaucca

SEQ ID NO: 2412341 - RNA, 19 nt, Homo sapiens
  misc_RNA (1)...(19): siRNA sense strand
ugaacgagaacguggacca

SEQ ID NO: 2412342 - RNA, 19 nt, Homo sapiens
  misc_RNA (1)...(19): siRNA sense strand
gcuccaacguccaccgcau

SEQ ID NO: 2412343 - RNA, 19 nt, Homo sapiens
  misc_RNA (1)...(19): siRNA sense strand
cagcagaaggagaucgagu

SEQ ID NO: 2412344 - RNA, 19 nt, Homo sapiens
  misc_RNA (1)...(19): siRNA sense strand
aggcagagauccagcagcu

SEQ ID NO: 2412345 - RNA, 19 nt, Homo sapiens
  misc_RNA (1)...(19): siRNA sense strand
cuuacuccaacgaggauua

SEQ ID NO: 2412346 - RNA, 19 nt, Homo sapiens
  misc_RNA (1)...(19): siRNA sense strand
gagcagaguguggaggaga

SEQ ID NO: 2412347 - RNA, 19 nt, Homo sapiens
  misc_RNA (1)...(19): siRNA sense strand
caaggagcgcauggagaaa

SEQ ID NO: 2412348 - RNA, 19 nt, Homo sapiens
  misc_RNA (1)...(19): siRNA sense strand
ugguggagguggauggaac

SEQ ID NO: 2412349 - RNA, 19 nt, Homo sapiens
  misc_RNA (1)...(19): siRNA sense strand
gggagaugauggagcagag

SEQ ID NO: 2412350 - RNA, 19 nt, Homo sapiens
  misc_RNA (1)...(19): siRNA sense strand
cuggaaggaaacuugcaaa

SEQ ID NO: 2412351 - RNA, 19 nt, Homo sapiens
  misc_RNA (1)...(19): siRNA sense strand
guagagaauuugugccaga

SEQ ID NO: 2412352 - RNA, 19 nt, Homo sapiens
  misc_RNA (1)...(19): siRNA sense strand
aaucaaaacuucuggguca

SEQ ID NO: 2412353 - RNA, 19 nt, Homo sapiens
  misc_RNA (1)...(19): siRNA sense strand
ccuuagaucagcaaagcaa

SEQ ID NO: 2412354 - RNA, 19 nt, Homo sapiens
  misc_RNA (1)...(19): siRNA sense strand
cacuaaaacucgaagauau

SEQ ID NO: 2412355 - RNA, 19 nt, Homo sapiens
  misc_RNA (1)...(19): siRNA sense strand
ccuuaaaccagcaaaccaa

SEQ ID NO: 2412356 - RNA, 19 nt, Homo sapiens
  misc_RNA (1)...(19): siRNA sense strand
agguaauaaagguagagaa

SEQ ID NO: 2412357 - RNA, 19 nt, Homo sapiens
  misc_RNA (1)...(19): siRNA sense strand
agugaugauucaacaacaa

SEQ ID NO: 2412358 - RNA, 19 nt, Homo sapiens
  misc_RNA (1)...(19): siRNA sense strand
ggaaaucugaggaggaacu

SEQ ID NO: 2412359 - RNA, 19 nt, Homo sapiens
  misc_RNA (1)...(19): siRNA sense strand
cuuuagacgugcaagccaa

SEQ ID NO: 2412360 - RNA, 19 nt, Homo sapiens
  misc_RNA (1)...(19): siRNA sense strand
agguggagaaagugccaaa

SEQ ID NO: 2412361 - RNA, 19 nt, Homo sapiens
  misc_RNA (1)...(19): siRNA sense strand
gcuacagacaucaagacaa

SEQ ID NO: 2412362 - RNA, 19 nt, Homo sapiens
  misc_RNA (1)...(19): siRNA sense strand
agaagaagcccucagaaaa

SEQ ID NO: 2412363 - RNA, 19 nt, Homo sapiens
  misc_RNA (1)...(19): siRNA sense strand
ccaucuaagucuacaucau

SEQ ID NO: 2412364 - RNA, 19 nt, Homo sapiens
  misc_RNA (1)...(19): siRNA sense strand
ccaaauuuucagaggaaga

SEQ ID NO: 2412365 - RNA, 19 nt, Homo sapiens
  misc_RNA (1)...(19): siRNA sense strand
aaguuauggaagagaccaa

SEQ ID NO: 2412366 - RNA, 19 nt, Homo sapiens
  misc_RNA (1)...(19): siRNA sense strand
ccuuagaccagcaaaucaa

SEQ ID NO: 2412367 - RNA, 19 nt, Homo sapiens
  misc_RNA (1)...(19): siRNA sense strand
ccucaaaaccagcaaauuu

SEQ ID NO: 2412368 - RNA, 19 nt, Homo sapiens
  misc_RNA (1)...(19): siRNA sense strand
caaccagguaauaaaggua

SEQ ID NO: 2412369 - RNA, 19 nt, Homo sapiens
  misc_RNA (1)...(19): siRNA sense strand
gcacuuaauuacaucgguu

SEQ ID NO: 2412370 - RNA, 19 nt, Homo sapiens
  misc_RNA (1)...(19): siRNA sense strand
cauauuaccugaagccuca

SEQ ID NO: 2412371 - RNA, 19 nt, Homo sapiens
  misc_RNA (1)...(19): siRNA sense strand
ggcaauuccacaaaggcaa

SEQ ID NO: 2412372 - RNA, 19 nt, Homo sapiens
  misc_RNA (1)...(19): siRNA sense strand
acaggauaccucacaguaa

SEQ ID NO: 2412373 - RNA, 19 nt, Homo sapiens
  misc_RNA (1)...(19): siRNA sense strand
ggaacuccauagaagaaaa

SEQ ID NO: 2412374 - RNA, 19 nt, Homo sapiens
  misc_RNA (1)...(19): siRNA sense strand
agacugauaaggagcaaaa

SEQ ID NO: 2412375 - RNA, 19 nt, Homo sapiens
  misc_RNA (1)...(19): siRNA sense strand
aaaccaagcuucugcagga

SEQ ID NO: 2412376 - RNA, 19 nt, Homo sapiens
  misc_RNA (1)...(19): siRNA sense strand
caagacaaguacugccaga

SEQ ID NO: 2412377 - RNA, 19 nt, Homo sapiens
  misc_RNA (1)...(19): siRNA sense strand
aacaauacccagaaggaca

SEQ ID NO: 2412378 - RNA, 19 nt, Homo sapiens
  misc_RNA (1)...(19): siRNA sense strand
cauacuaucccaagacaca

SEQ ID NO: 2412379 - RNA, 19 nt, Homo sapiens
  misc_RNA (1)...(19): siRNA sense strand
gcaaagcaaaggcuggcaa

SEQ ID NO: 2412380 - RNA, 19 nt, Homo sapiens
  misc_RNA (1)...(19): siRNA sense strand
aaauauguccauucagcua

SEQ ID NO: 2412381 - RNA, 19 nt, Homo sapiens
  misc_RNA (1)...(19): siRNA sense strand
ucuucuaaucugacagcua

SEQ ID NO: 2412382 - RNA, 19 nt, Homo sapiens
  misc_RNA (1)...(19): siRNA sense strand
auggaagagaccaaagaau

SEQ ID NO: 2412383 - RNA, 19 nt, Homo sapiens
  misc_RNA (1)...(19): siRNA sense strand
agguagagaauuugugcca

SEQ ID NO: 2412384 - RNA, 19 nt, Homo sapiens
  misc_RNA (1)...(19): siRNA sense strand
caguagaaggccugucaga

SEQ ID NO: 2412385 - RNA, 19 nt, Homo sapiens
  misc_RNA (1)...(19): siRNA sense strand
acaauacccagaaggacaa

SEQ ID NO: 2412386 - RNA, 19 nt, Homo sapiens
  misc_RNA (1)...(19): siRNA sense strand
cccagaaggacaaucuaaa

SEQ ID NO: 2412387 - RNA, 19 nt, Homo sapiens
  misc_RNA (1)...(19): siRNA sense strand
agaagcaaacccaggauca

SEQ ID NO: 2412388 - RNA, 19 nt, Homo sapiens
  misc_RNA (1)...(19): siRNA sense strand
agaauuugugccagaugaa

SEQ ID NO: 2412389 - RNA, 19 nt, Homo sapiens
  misc_RNA (1)...(19): siRNA sense strand
ucccaggacagaagggcaa

SEQ ID NO: 2412390 - RNA, 19 nt, Homo sapiens
  misc_RNA (1)...(19): siRNA sense strand
gagaccaaagaauggaaau

SEQ ID NO: 2412391 - RNA, 19 nt, Homo sapiens
  misc_RNA (1)...(19): siRNA sense strand
auggaaaucugaggaggaa

SEQ ID NO: 2412392 - RNA, 19 nt, Homo sapiens
  misc_RNA (1)...(19): siRNA sense strand
cguagauaagcaagcucaa

SEQ ID NO: 2412393 - RNA, 19 nt, Homo sapiens
  misc_RNA (1)...(19): siRNA sense strand
cucuaaucauugugggcuu

SEQ ID NO: 2412394 - RNA, 19 nt, Homo sapiens
  misc_RNA (1)...(19): siRNA sense strand
acaguaaccgauaagaaau

SEQ ID NO: 2412395 - RNA, 19 nt, Homo sapiens
  misc_RNA (1)...(19): siRNA sense strand
uguuaucuuuggaggcuau

SEQ ID NO: 2412396 - RNA, 19 nt, Homo sapiens
  misc_RNA (1)...(19): siRNA sense strand
cucccacacuagagaagaa

SEQ ID NO: 2412397 - RNA, 19 nt, Homo sapiens
  misc_RNA (1)...(19): siRNA sense strand
ucccaaauuuucagaggaa

SEQ ID NO: 2412398 - RNA, 19 nt, Homo sapiens
  misc_RNA (1)...(19): siRNA sense strand
aauggaaaucugaggagga

SEQ ID NO: 2412399 - RNA, 19 nt, Homo sapiens
  misc_RNA (1)...(19): siRNA sense strand
gcaaaucaaagacuggcua

SEQ ID NO: 2412400 - RNA, 19 nt, Homo sapiens
  misc_RNA (1)...(19): siRNA sense strand
gagucaacaucccaggaca

SEQ ID NO: 2412401 - RNA, 19 nt, Homo sapiens
  misc_RNA (1)...(19): siRNA sense strand
caauacuuaaggagacauu

SEQ ID NO: 2412402 - RNA, 19 nt, Homo sapiens
  misc_RNA (1)...(19): siRNA sense strand
cagugaugauucaacaaca

SEQ ID NO: 2412403 - RNA, 19 nt, Homo sapiens
  misc_RNA (1)...(19): siRNA sense strand
ccagaugaacaaaagcaaa

SEQ ID NO: 2412404 - RNA, 19 nt, Homo sapiens
  misc_RNA (1)...(19): siRNA sense strand
gcagaaauccuuagaccag

SEQ ID NO: 2412405 - RNA, 19 nt, Homo sapiens
  misc_RNA (1)...(19): siRNA sense strand
cuaaagagcaacucccaga

SEQ ID NO: 2412406 - RNA, 19 nt, Homo sapiens
  misc_RNA (1)...(19): siRNA sense strand
ugaagaucagcaagccaaa

SEQ ID NO: 2412407 - RNA, 19 nt, Homo sapiens
  misc_RNA (1)...(19): siRNA sense strand
gcagacugauaaggagcaa

SEQ ID NO: 2412408 - RNA, 19 nt, Homo sapiens
  misc_RNA (1)...(19): siRNA sense strand
ccgugguguuugaaagcaa

SEQ ID NO: 2412409 - RNA, 19 nt, Homo sapiens
  misc_RNA (1)...(19): siRNA sense strand
cauagaaagacuuggagga

SEQ ID NO: 2412410 - RNA, 19 nt, Homo sapiens
  misc_RNA (1)...(19): siRNA sense strand
ggucaaaaggggcaggaau

SEQ ID NO: 2412411 - RNA, 19 nt, Homo sapiens
  misc_RNA (1)...(19): siRNA sense strand
acguacggagagugggaaa

SEQ ID NO: 2412412 - RNA, 19 nt, Homo sapiens
  misc_RNA (1)...(19): siRNA sense strand
acggagagugggaaagaga

SEQ ID NO: 2412413 - RNA, 19 nt, Homo sapiens
  misc_RNA (1)...(19): siRNA sense strand
ccugaaugccugggaagaa

SEQ ID NO: 2412414 - RNA, 19 nt, Homo sapiens
  misc_RNA (1)...(19): siRNA sense strand
gucaaaaggggcaggaauu

SEQ ID NO: 2412415 - RNA, 19 nt, Homo sapiens
  misc_RNA (1)...(19): siRNA sense strand
ccgacuuacaccagcagaa

SEQ ID NO: 2412416 - RNA, 19 nt, Homo sapiens
  misc_RNA (1)...(19): siRNA sense strand
agguggagaccaacaagaa

SEQ ID NO: 2412417 - RNA, 19 nt, Homo sapiens
  misc_RNA (1)...(19): siRNA sense strand
guggagaccaacaagaaca

SEQ ID NO: 2412418 - RNA, 19 nt, Homo sapiens
  misc_RNA (1)...(19): siRNA sense strand
gaccuacguuggagggcuu

SEQ ID NO: 2412419 - RNA, 19 nt, Homo sapiens
  misc_RNA (1)...(19): siRNA sense strand
gcaaagaauagauagggaa

SEQ ID NO: 2412420 - RNA, 19 nt, Homo sapiens
  misc_RNA (1)...(19): siRNA sense strand
gggcauugaggaugaaaca

SEQ ID NO: 2412421 - RNA, 19 nt, Homo sapiens
  misc_RNA (1)...(19): siRNA sense strand
ucuaaaaccauguggcaaa

SEQ ID NO: 2412422 - RNA, 19 nt, Homo sapiens
  misc_RNA (1)...(19): siRNA sense strand
aaagacaggcagaggaaaa

SEQ ID NO: 2412423 - RNA, 19 nt, Homo sapiens
  misc_RNA (1)...(19): siRNA sense strand
ggagguuagaggagcagaa

SEQ ID NO: 2412424 - RNA, 19 nt, Homo sapiens
  misc_RNA (1)...(19): siRNA sense strand
gggagauuauuuauggaga

SEQ ID NO: 2412425 - RNA, 19 nt, Homo sapiens
  misc_RNA (1)...(19): siRNA sense strand
gaaaucagcaccugggaca

SEQ ID NO: 2412426 - RNA, 19 nt, Homo sapiens
  misc_RNA (1)...(19): siRNA sense strand
gguaagacaggcagcccua

SEQ ID NO: 2412427 - RNA, 19 nt, Homo sapiens
  misc_RNA (1)...(19): siRNA sense strand
uggaggagcagcaaagaau

SEQ ID NO: 2412428 - RNA, 19 nt, Homo sapiens
  misc_RNA (1)...(19): siRNA sense strand
cagugagggcauugaggau

SEQ ID NO: 2412429 - RNA, 19 nt, Homo sapiens
  misc_RNA (1)...(19): siRNA sense strand
gugaaggcagcaugagaga

SEQ ID NO: 2412430 - RNA, 19 nt, Homo sapiens
  misc_RNA (1)...(19): siRNA sense strand
gagaaagacaggcagagga

SEQ ID NO: 2412431 - RNA, 19 nt, Homo sapiens
  misc_RNA (1)...(19): siRNA sense strand
gguuagaggagcagaagag

SEQ ID NO: 2412432 - RNA, 19 nt, Homo sapiens
  misc_RNA (1)...(19): siRNA sense strand
caaagaauagauagggaac

SEQ ID NO: 2412433 - RNA, 19 nt, Homo sapiens
  misc_RNA (1)...(19): siRNA sense strand
gggaaaaucuggcugacca

SEQ ID NO: 2412434 - RNA, 19 nt, Homo sapiens
  misc_RNA (1)...(19): siRNA sense strand
ugaggagguuagaggagca

SEQ ID NO: 2412435 - RNA, 19 nt, Homo sapiens
  misc_RNA (1)...(19): siRNA sense strand
gaugaugaacagucagcau

SEQ ID NO: 2412436 - RNA, 19 nt, Homo sapiens
  misc_RNA (1)...(19): siRNA sense strand
agcaaagaauagauaggga

SEQ ID NO: 2412437 - RNA, 19 nt, Homo sapiens
  misc_RNA (1)...(19): siRNA sense strand
acuucaagcuaacaaucaa

SEQ ID NO: 2412438 - RNA, 19 nt, Homo sapiens
  misc_RNA (1)...(19): siRNA sense strand
cagugaaggcagcaugaga

SEQ ID NO: 2412439 - RNA, 19 nt, Homo sapiens
  misc_RNA (1)...(19): siRNA sense strand
ccucauuuggccugcagaa

SEQ ID NO: 2412440 - RNA, 19 nt, Homo sapiens
  misc_RNA (1)...(19): siRNA sense strand
ggagauuauuuauggagag

SEQ ID NO: 2412441 - RNA, 19 nt, Homo sapiens
  misc_RNA (1)...(19): siRNA sense strand
acucaaccauaguggggaa

SEQ ID NO: 2412442 - RNA, 19 nt, Homo sapiens
  misc_RNA (1)...(19): siRNA sense strand
aggaauaguagaugaugaa

SEQ ID NO: 2412443 - RNA, 19 nt, Homo sapiens
  misc_RNA (1)...(19): siRNA sense strand
cuauggaacaggaggauga

SEQ ID NO: 2412444 - RNA, 19 nt, Homo sapiens
  misc_RNA (1)...(19): siRNA sense strand
gcagagagcucauuggguu

SEQ ID NO: 2412445 - RNA, 19 nt, Homo sapiens
  misc_RNA (1)...(19): siRNA sense strand
caauucaagaugugcuaaa

SEQ ID NO: 2412446 - RNA, 19 nt, Homo sapiens
  misc_RNA (1)...(19): siRNA sense strand
agaaaauguuacugugcaa

SEQ ID NO: 2412447 - RNA, 19 nt, Homo sapiens
  misc_RNA (1)...(19): siRNA sense strand
aguuggacaaggaaggaaa

SEQ ID NO: 2412448 - RNA, 19 nt, Homo sapiens
  misc_RNA (1)...(19): siRNA sense strand
auaucgacaauuugggaaa

SEQ ID NO: 2412449 - RNA, 19 nt, Homo sapiens
  misc_RNA (1)...(19): siRNA sense strand
uggacgaagaaaaggaaaa

SEQ ID NO: 2412450 - RNA, 19 nt, Homo sapiens
  misc_RNA (1)...(19): siRNA sense strand
acgaagaaaaggaaaacaa

SEQ ID NO: 2412451 - RNA, 19 nt, Homo sapiens
  misc_RNA (1)...(19): siRNA sense strand
uggaacaggaggaugauau

SEQ ID NO: 2412452 - RNA, 19 nt, Homo sapiens
  misc_RNA (1)...(19): siRNA sense strand
ucaaguaauuucaggccau

SEQ ID NO: 2412453 - RNA, 19 nt, Homo sapiens
  misc_RNA (1)...(19): siRNA sense strand
ugguauuauuggugaaaug

SEQ ID NO: 2412454 - RNA, 19 nt, Homo sapiens
  misc_RNA (1)...(19): siRNA sense strand
auucaacagaggaagaaau

SEQ ID NO: 2412455 - RNA, 19 nt, Homo sapiens
  misc_RNA (1)...(19): siRNA sense strand
ccuuuaugaaacuggauuu

SEQ ID NO: 2412456 - RNA, 19 nt, Homo sapiens
  misc_RNA (1)...(19): siRNA sense strand
aggccauucaacagaggaa

SEQ ID NO: 2412457 - RNA, 19 nt, Homo sapiens
  misc_RNA (1)...(19): siRNA sense strand
caucaguguggacgaagaa

SEQ ID NO: 2412458 - RNA, 19 nt, Homo sapiens
  misc_RNA (1)...(19): siRNA sense strand
aagaacacuacaugaaaca

SEQ ID NO: 2412459 - RNA, 19 nt, Homo sapiens
  misc_RNA (1)...(19): siRNA sense strand
gcaagguugauuauggaga

SEQ ID NO: 2412460 - RNA, 19 nt, Homo sapiens
  misc_RNA (1)...(19): siRNA sense strand
agaauucaaacgugguauu

SEQ ID NO: 2412461 - RNA, 19 nt, Homo sapiens
  misc_RNA (1)...(19): siRNA sense strand
acgugguauuauuggugaa

SEQ ID NO: 2412462 - RNA, 19 nt, Homo sapiens
  misc_RNA (1)...(19): siRNA sense strand
uaguagaugaugaagacuu

SEQ ID NO: 2412463 - RNA, 19 nt, Homo sapiens
  misc_RNA (1)...(19): siRNA sense strand
cuuccagauucaaagauga

SEQ ID NO: 2412464 - RNA, 19 nt, Homo sapiens
  misc_RNA (1)...(19): siRNA sense strand
ucaucaguguggacgaaga

SEQ ID NO: 2412465 - RNA, 19 nt, Homo sapiens
  misc_RNA (1)...(19): siRNA sense strand
ucugaaugacaauggcaau

SEQ ID NO: 2412466 - RNA, 19 nt, Homo sapiens
  misc_RNA (1)...(19): siRNA sense strand
aggaagaagaagaaggaau

SEQ ID NO: 2412467 - RNA, 19 nt, Homo sapiens
  misc_RNA (1)...(19): siRNA sense strand
gagaagaagcugcuggcua

SEQ ID NO: 2412468 - RNA, 19 nt, Homo sapiens
  misc_RNA (1)...(19): siRNA sense strand
ugaagaaacuccaggccau

SEQ ID NO: 2412469 - RNA, 19 nt, Homo sapiens
  misc_RNA (1)...(19): siRNA sense strand
cggauuuagcugcuggaaa

SEQ ID NO: 2412470 - RNA, 19 nt, Homo sapiens
  misc_RNA (1)...(19): siRNA sense strand
ugaccauagaccuggaaau

SEQ ID NO: 2412471 - RNA, 19 nt, Homo sapiens
  misc_RNA (1)...(19): siRNA sense strand
cuaaguacgaggagcgagu

SEQ ID NO: 2412472 - RNA, 19 nt, Homo sapiens
  misc_RNA (1)...(19): siRNA sense strand
aucaggaguuacagaggaa

SEQ ID NO: 2412473 - RNA, 19 nt, Homo sapiens
  misc_RNA (1)...(19): siRNA sense strand
aggaauauaucgauggccu

SEQ ID NO: 2412474 - RNA, 19 nt, Homo sapiens
  misc_RNA (1)...(19): siRNA sense strand
ggaacaagcagucggcgca

SEQ ID NO: 2412475 - RNA, 19 nt, Homo sapiens
  misc_RNA (1)...(19): siRNA sense strand
aagcagucggcgcaagaaa

SEQ ID NO: 2412476 - RNA, 19 nt, Homo sapiens
  misc_RNA (1)...(19): siRNA sense strand
aggcagugauaguggcauc

SEQ ID NO: 2412477 - RNA, 19 nt, Homo sapiens
  misc_RNA (1)...(19): siRNA sense strand
acgaggagcgagugcugaa

SEQ ID NO: 2412478 - RNA, 19 nt, Homo sapiens
  misc_RNA (1)...(19): siRNA sense strand
ccaaguaccugaagccucu

SEQ ID NO: 2412479 - RNA, 19 nt, Homo sapiens
  misc_RNA (1)...(19): siRNA sense strand
gagcaaggcaccagcacca

SEQ ID NO: 2412480 - RNA, 19 nt, Homo sapiens
  misc_RNA (1)...(19): siRNA sense strand
ggaaggagcuagcugcagu

SEQ ID NO: 2412481 - RNA, 19 nt, Homo sapiens
  misc_RNA (1)...(19): siRNA sense strand
ggaccuuauccacgcggaa

SEQ ID NO: 2412482 - RNA, 19 nt, Homo sapiens
  misc_RNA (1)...(19): siRNA sense strand
cgucguagccucuguggga

SEQ ID NO: 2412483 - RNA, 19 nt, Homo sapiens
  misc_RNA (1)...(19): siRNA sense strand
gagcaaggcaccagcacca

SEQ ID NO: 2412484 - RNA, 19 nt, Homo sapiens
  misc_RNA (1)...(19): siRNA sense strand
ggaaggagcuagcugcagu

SEQ ID NO: 2412485 - RNA, 19 nt, Homo sapiens
  misc_RNA (1)...(19): siRNA sense strand
ggaccuuauccacgcggaa

SEQ ID NO: 2412486 - RNA, 19 nt, Homo sapiens
  misc_RNA (1)...(19): siRNA sense strand
cgucguagccucuguggga

SEQ ID NO: 2412487 - RNA, 19 nt, Homo sapiens
  misc_RNA (1)...(19): siRNA sense strand
auggaaaagcugagggaaa

SEQ ID NO: 2412488 - RNA, 19 nt, Homo sapiens
  misc_RNA (1)...(19): siRNA sense strand
ccuuugaauguuagugaau

SEQ ID NO: 2412489 - RNA, 19 nt, Homo sapiens
  misc_RNA (1)...(19): siRNA sense strand
cugcaguauagaugggaca

SEQ ID NO: 2412490 - RNA, 19 nt, Homo sapiens
  misc_RNA (1)...(19): siRNA sense strand
ggaaaaugucaaccaggaa

SEQ ID NO: 2412491 - RNA, 19 nt, Homo sapiens
  misc_RNA (1)...(19): siRNA sense strand
aaacaaucucaucguggaa

SEQ ID NO: 2412492 - RNA, 19 nt, Homo sapiens
  misc_RNA (1)...(19): siRNA sense strand
gaauaaaacuggugcgcaa

SEQ ID NO: 2412493 - RNA, 19 nt, Homo sapiens
  misc_RNA (1)...(19): siRNA sense strand
cugaaagaacuuaaaggaa

SEQ ID NO: 2412494 - RNA, 19 nt, Homo sapiens
  misc_RNA (1)...(19): siRNA sense strand
cgaguagaucccagugaaa

SEQ ID NO: 2412495 - RNA, 19 nt, Homo sapiens
  misc_RNA (1)...(19): siRNA sense strand
agucauaagcagagaugga

SEQ ID NO: 2412496 - RNA, 19 nt, Homo sapiens
  misc_RNA (1)...(19): siRNA sense strand
ugucaaugguagaaguaca

SEQ ID NO: 2412497 - RNA, 19 nt, Homo sapiens
  misc_RNA (1)...(19): siRNA sense strand
ugaaagaacuuaaaggaag

SEQ ID NO: 2412498 - RNA, 19 nt, Homo sapiens
  misc_RNA (1)...(19): siRNA sense strand
cugcauuguaggagguuau

SEQ ID NO: 2412499 - RNA, 19 nt, Homo sapiens
  misc_RNA (1)...(19): siRNA sense strand
ggagcaucacauagagaau

SEQ ID NO: 2412500 - RNA, 19 nt, Homo sapiens
  misc_RNA (1)...(19): siRNA sense strand
gucaugagaaggugguaaa

SEQ ID NO: 2412501 - RNA, 19 nt, Homo sapiens
  misc_RNA (1)...(19): siRNA sense strand
ggugaaauuaccagcauca

SEQ ID NO: 2412502 - RNA, 19 nt, Homo sapiens
  misc_RNA (1)...(19): siRNA sense strand
ccgaggagcagcuuggaau

SEQ ID NO: 2412503 - RNA, 19 nt, Homo sapiens
  misc_RNA (1)...(19): siRNA sense strand
acaucauucuaaaggucaa

SEQ ID NO: 2412504 - RNA, 19 nt, Homo sapiens
  misc_RNA (1)...(19): siRNA sense strand
auggucagcuugaggagaa

SEQ ID NO: 2412505 - RNA, 19 nt, Homo sapiens
  misc_RNA (1)...(19): siRNA sense strand
cauaagcagagauggaaga

SEQ ID NO: 2412506 - RNA, 19 nt, Homo sapiens
  misc_RNA (1)...(19): siRNA sense strand
gaguguucuucgaaggaca

SEQ ID NO: 2412507 - RNA, 19 nt, Homo sapiens
  misc_RNA (1)...(19): siRNA sense strand
aagaauuagauguggugau

SEQ ID NO: 2412508 - RNA, 19 nt, Homo sapiens
  misc_RNA (1)...(19): siRNA sense strand
gcaucaagaucaaucgagu

SEQ ID NO: 2412509 - RNA, 19 nt, Homo sapiens
  misc_RNA (1)...(19): siRNA sense strand
cggaggagucauaagcaga

SEQ ID NO: 2412510 - RNA, 19 nt, Homo sapiens
  misc_RNA (1)...(19): siRNA sense strand
gggucauguggcuggaauu

SEQ ID NO: 2412511 - RNA, 19 nt, Homo sapiens
  misc_RNA (1)...(19): siRNA sense strand
cgaaggacaaagagcggga

SEQ ID NO: 2412512 - RNA, 19 nt, Homo sapiens
  misc_RNA (1)...(19): siRNA sense strand
cauuguaggagguuaugaa

SEQ ID NO: 2412513 - RNA, 19 nt, Homo sapiens
  misc_RNA (1)...(19): siRNA sense strand
cagagauggaagaauaaaa

SEQ ID NO: 2412514 - RNA, 19 nt, Homo sapiens
  misc_RNA (1)...(19): siRNA sense strand
uggacaugaucuucgauau

SEQ ID NO: 2412515 - RNA, 19 nt, Homo sapiens
  misc_RNA (1)...(19): siRNA sense strand
agcagagauggaagaauaa

SEQ ID NO: 2412516 - RNA, 19 nt, Homo sapiens
  misc_RNA (1)...(19): siRNA sense strand
aguaugagccccaggaaga

SEQ ID NO: 2412517 - RNA, 19 nt, Homo sapiens
  misc_RNA (1)...(19): siRNA sense strand
uaggagguuaugaagaaua

SEQ ID NO: 2412518 - RNA, 19 nt, Homo sapiens
  misc_RNA (1)...(19): siRNA sense strand
acuauuagaagcagaucau

SEQ ID NO: 2412519 - RNA, 19 nt, Homo sapiens
  misc_RNA (1)...(19): siRNA sense strand
uuaccagcaucaagaucaa

SEQ ID NO: 2412520 - RNA, 19 nt, Homo sapiens
  misc_RNA (1)...(19): siRNA sense strand
ggagcagcuuggaauaaaa

SEQ ID NO: 2412521 - RNA, 19 nt, Homo sapiens
  misc_RNA (1)...(19): siRNA sense strand
uggaagucaaagaguauga

SEQ ID NO: 2412522 - RNA, 19 nt, Homo sapiens
  misc_RNA (1)...(19): siRNA sense strand
cagcauacaaugauggaag

SEQ ID NO: 2412523 - RNA, 19 nt, Homo sapiens
  misc_RNA (1)...(19): siRNA sense strand
uggauggcgguguggcaua

SEQ ID NO: 2412524 - RNA, 19 nt, Homo sapiens
  misc_RNA (1)...(19): siRNA sense strand
gcauacaaugauggaagaa

SEQ ID NO: 2412525 - RNA, 19 nt, Homo sapiens
  misc_RNA (1)...(19): siRNA sense strand
ccugauuccagauggugaa

SEQ ID NO: 2412526 - RNA, 19 nt, Homo sapiens
  misc_RNA (1)...(19): siRNA sense strand
caggaagccggcuggaaca

SEQ ID NO: 2412527 - RNA, 19 nt, Homo sapiens
  misc_RNA (1)...(19): siRNA sense strand
ugucaugagaaggugguaa

SEQ ID NO: 2412528 - RNA, 19 nt, Homo sapiens
  misc_RNA (1)...(19): siRNA sense strand
ugguagaaguacaucagga

SEQ ID NO: 2412529 - RNA, 19 nt, Homo sapiens
  misc_RNA (1)...(19): siRNA sense strand
gcggaaacugagaaagcaa

SEQ ID NO: 2412530 - RNA, 19 nt, Homo sapiens
  misc_RNA (1)...(19): siRNA sense strand
aaacaaaagcagagauaca

SEQ ID NO: 2412531 - RNA, 19 nt, Homo sapiens
  misc_RNA (1)...(19): siRNA sense strand
gaugcagcggcgagggaaa

SEQ ID NO: 2412532 - RNA, 19 nt, Homo sapiens
  misc_RNA (1)...(19): siRNA sense strand
cagaagaacuuauagugga

SEQ ID NO: 2412533 - RNA, 19 nt, Homo sapiens
  misc_RNA (1)...(19): siRNA sense strand
gagaugauuuacaggagga

SEQ ID NO: 2412534 - RNA, 19 nt, Homo sapiens
  misc_RNA (1)...(19): siRNA sense strand
agggaaaccacggaaguaa

SEQ ID NO: 2412535 - RNA, 19 nt, Homo sapiens
  misc_RNA (1)...(19): siRNA sense strand
aaaggagaauguugcggaa

SEQ ID NO: 2412536 - RNA, 19 nt, Homo sapiens
  misc_RNA (1)...(19): siRNA sense strand
aggagaauguugcggaaac

SEQ ID NO: 2412537 - RNA, 19 nt, Homo sapiens
  misc_RNA (1)...(19): siRNA sense strand
agccaaacacacagaacau

SEQ ID NO: 2412538 - RNA, 19 nt, Homo sapiens
  misc_RNA (1)...(19): siRNA sense strand
ccacggaaguaaacccuga

SEQ ID NO: 2412539 - RNA, 19 nt, Homo sapiens
  misc_RNA (1)...(19): siRNA sense strand
augaauaugcugaacuaga

SEQ ID NO: 2412540 - RNA, 19 nt, Homo sapiens
  misc_RNA (1)...(19): siRNA sense strand
caacaaagaacgaaaccuc

SEQ ID NO: 2412541 - RNA, 19 nt, Homo sapiens
  misc_RNA (1)...(19): siRNA sense strand
cugaacuagaagaagaaaa

SEQ ID NO: 2412542 - RNA, 19 nt, Homo sapiens
  misc_RNA (1)...(19): siRNA sense strand
ccgguagacauuucagcaa

SEQ ID NO: 2412543 - RNA, 19 nt, Homo sapiens
  misc_RNA (1)...(19): siRNA sense strand
aacaaaugccauagggugu

SEQ ID NO: 2412544 - RNA, 19 nt, Homo sapiens
  misc_RNA (1)...(19): siRNA sense strand
gcacagaccugcucgggaa

SEQ ID NO: 2412545 - RNA, 19 nt, Homo sapiens
  misc_RNA (1)...(19): siRNA sense strand
ggcccaaugcagaggguga

SEQ ID NO: 2412546 - RNA, 19 nt, Homo sapiens
  misc_RNA (1)...(19): siRNA sense strand
gggaugaccaugagcgugu

SEQ ID NO: 2412547 - RNA, 19 nt, Homo sapiens
  misc_RNA (1)...(19): siRNA sense strand
ucugagauccgaugggaga

SEQ ID NO: 2412548 - RNA, 19 nt, Homo sapiens
  misc_RNA (1)...(19): siRNA sense strand
aggagaaggcggaggacaa

SEQ ID NO: 2412549 - RNA, 19 nt, Homo sapiens
  misc_RNA (1)...(19): siRNA sense strand
ucgcuaagaugaagggcua

SEQ ID NO: 2412550 - RNA, 19 nt, Homo sapiens
  misc_RNA (1)...(19): siRNA sense strand
gggagagcgcagaggacaa

SEQ ID NO: 2412551 - RNA, 19 nt, Homo sapiens
  misc_RNA (1)...(19): siRNA sense strand
agguagagaagaagaaaga

SEQ ID NO: 2412552 - RNA, 19 nt, Homo sapiens
  misc_RNA (1)...(19): siRNA sense strand
gcgacaggauggagagcga

SEQ ID NO: 2412553 - RNA, 19 nt, Homo sapiens
  misc_RNA (1)...(19): siRNA sense strand
gcgcagaggacaaggagca

SEQ ID NO: 2412554 - RNA, 19 nt, Homo sapiens
  misc_RNA (1)...(19): siRNA sense strand
guaaagacaaguacgggaa

SEQ ID NO: 2412555 - RNA, 19 nt, Homo sapiens
  misc_RNA (1)...(19): siRNA sense strand
aggagaaggaggagaagga

SEQ ID NO: 2412556 - RNA, 19 nt, Homo sapiens
  misc_RNA (1)...(19): siRNA sense strand
aaugaagggcugugggaga

SEQ ID NO: 2412557 - RNA, 19 nt, Homo sapiens
  misc_RNA (1)...(19): siRNA sense strand
ccgaugugucugugaagaa

SEQ ID NO: 2412558 - RNA, 19 nt, Homo sapiens
  misc_RNA (1)...(19): siRNA sense strand
agaucgaggcggugcagaa

SEQ ID NO: 2412559 - RNA, 19 nt, Homo sapiens
  misc_RNA (1)...(19): siRNA sense strand
cggugcagaaagugaacaa

SEQ ID NO: 2412560 - RNA, 19 nt, Homo sapiens
  misc_RNA (1)...(19): siRNA sense strand
gaggaagacgccugcgcua

SEQ ID NO: 2412561 - RNA, 19 nt, Homo sapiens
  misc_RNA (1)...(19): siRNA sense strand
aggagaagcaacaagccaa

SEQ ID NO: 2412562 - RNA, 19 nt, Homo sapiens
  misc_RNA (1)...(19): siRNA sense strand
gcccaaagaucgaggcggu

SEQ ID NO: 2412563 - RNA, 19 nt, Homo sapiens
  misc_RNA (1)...(19): siRNA sense strand
agcaggagaaggaggagaa

SEQ ID NO: 2412564 - RNA, 19 nt, Homo sapiens
  misc_RNA (1)...(19): siRNA sense strand
acgacaaauguaaagacaa

SEQ ID NO: 2412565 - RNA, 19 nt, Homo sapiens
  misc_RNA (1)...(19): siRNA sense strand
ccaacaagaggaaaggcuu

SEQ ID NO: 2412566 - RNA, 19 nt, Homo sapiens
  misc_RNA (1)...(19): siRNA sense strand
gcgcuaaagaugucggucu

SEQ ID NO: 2412567 - RNA, 19 nt, Homo sapiens
  misc_RNA (1)...(19): siRNA sense strand
aaaccuggccagaaggaga

SEQ ID NO: 2412568 - RNA, 19 nt, Homo sapiens
  misc_RNA (1)...(19): siRNA sense strand
cugggauggagaaggagaa

SEQ ID NO: 2412569 - RNA, 19 nt, Homo sapiens
  misc_RNA (1)...(19): siRNA sense strand
gggagcaggagaaggagga

SEQ ID NO: 2412570 - RNA, 19 nt, Homo sapiens
  misc_RNA (1)...(19): siRNA sense strand
ucagacaagaguagcgaca

SEQ ID NO: 2412571 - RNA, 19 nt, Homo sapiens
  misc_RNA (1)...(19): siRNA sense strand
uggagaaggagaaggccga

SEQ ID NO: 2412572 - RNA, 19 nt, Homo sapiens
  misc_RNA (1)...(19): siRNA sense strand
ccagugagcuccuccgaca

SEQ ID NO: 2412573 - RNA, 19 nt, Homo sapiens
  misc_RNA (1)...(19): siRNA sense strand
cgauggacaggaagguaga

SEQ ID NO: 2412574 - RNA, 19 nt, Homo sapiens
  misc_RNA (1)...(19): siRNA sense strand
cugccaggaucgacgacau

SEQ ID NO: 2412575 - RNA, 19 nt, Homo sapiens
  misc_RNA (1)...(19): siRNA sense strand
uggacaggaagguagagaa

SEQ ID NO: 2412576 - RNA, 19 nt, Homo sapiens
  misc_RNA (1)...(19): siRNA sense strand
uggaagcugaugaggcuaa

SEQ ID NO: 2412577 - RNA, 19 nt, Homo sapiens
  misc_RNA (1)...(19): siRNA sense strand
ccggcaagggagaguacaa

SEQ ID NO: 2412578 - RNA, 19 nt, Homo sapiens
  misc_RNA (1)...(19): siRNA sense strand
agggagaguacaagaucau

SEQ ID NO: 2412579 - RNA, 19 nt, Homo sapiens
  misc_RNA (1)...(19): siRNA sense strand
ggaaugccggcaagggaga

SEQ ID NO: 2412580 - RNA, 19 nt, Homo sapiens
  misc_RNA (1)...(19): siRNA sense strand
gugaaauaaggaaggaaga

SEQ ID NO: 2412581 - RNA, 19 nt, Homo sapiens
  misc_RNA (1)...(19): siRNA sense strand
gcauaucaagugaggaaaa

SEQ ID NO: 2412582 - RNA, 19 nt, Homo sapiens
  misc_RNA (1)...(19): siRNA sense strand
gguuccaguauuagacaaa

SEQ ID NO: 2412583 - RNA, 19 nt, Homo sapiens
  misc_RNA (1)...(19): siRNA sense strand
aggaagauggaauggaaaa

SEQ ID NO: 2412584 - RNA, 19 nt, Homo sapiens
  misc_RNA (1)...(19): siRNA sense strand
uggaaaggcaaauggaguu

SEQ ID NO: 2412585 - RNA, 19 nt, Homo sapiens
  misc_RNA (1)...(19): siRNA sense strand
cagaaguguggcugaaaga

SEQ ID NO: 2412586 - RNA, 19 nt, Homo sapiens
  misc_RNA (1)...(19): siRNA sense strand
uggaaagguugcaaaggga

SEQ ID NO: 2412587 - RNA, 19 nt, Homo sapiens
  misc_RNA (1)...(19): siRNA sense strand
aguaggacccagaaggaga

SEQ ID NO: 2412588 - RNA, 19 nt, Homo sapiens
  misc_RNA (1)...(19): siRNA sense strand
aaggaagauggaauggaaa

SEQ ID NO: 2412589 - RNA, 19 nt, Homo sapiens
  misc_RNA (1)...(19): siRNA sense strand
cugaaaacuugaaaaccaa

SEQ ID NO: 2412590 - RNA, 19 nt, Homo sapiens
  misc_RNA (1)...(19): siRNA sense strand
gcaaagaaguuaucccaac

SEQ ID NO: 2412591 - RNA, 19 nt, Homo sapiens
  misc_RNA (1)...(19): siRNA sense strand
auauaacaguccaagguga

SEQ ID NO: 2412592 - RNA, 19 nt, Homo sapiens
  misc_RNA (1)...(19): siRNA sense strand
ggagggaauugauguggga

SEQ ID NO: 2412593 - RNA, 19 nt, Homo sapiens
  misc_RNA (1)...(19): siRNA sense strand
ggugaaauaaggaaggaag

SEQ ID NO: 2412594 - RNA, 19 nt, Homo sapiens
  misc_RNA (1)...(19): siRNA sense strand
uguucagcaaguagauaaa

SEQ ID NO: 2412595 - RNA, 19 nt, Homo sapiens
  misc_RNA (1)...(19): siRNA sense strand
acugaaaacuugaaaacca

SEQ ID NO: 2412596 - RNA, 19 nt, Homo sapiens
  misc_RNA (1)...(19): siRNA sense strand
ccaacaaagaagaguuuac

SEQ ID NO: 2412597 - RNA, 19 nt, Homo sapiens
  misc_RNA (1)...(19): siRNA sense strand
cuuuagugacauugaacuu

SEQ ID NO: 2412598 - RNA, 19 nt, Homo sapiens
  misc_RNA (1)...(19): siRNA sense strand
ugcaaagggagcauacaaa

SEQ ID NO: 2412599 - RNA, 19 nt, Homo sapiens
  misc_RNA (1)...(19): siRNA sense strand
gaacaguauuucuaccuga

SEQ ID NO: 2412600 - RNA, 19 nt, Homo sapiens
  misc_RNA (1)...(19): siRNA sense strand
ucuggaagacaguggcauu

SEQ ID NO: 2412601 - RNA, 19 nt, Homo sapiens
  misc_RNA (1)...(19): siRNA sense strand
gguuaggaacucagcgacu

SEQ ID NO: 2412602 - RNA, 19 nt, Homo sapiens
  misc_RNA (1)...(19): siRNA sense strand
cugaaaacacugaaaacuu

SEQ ID NO: 2412603 - RNA, 19 nt, Homo sapiens
  misc_RNA (1)...(19): siRNA sense strand
uggaagaaugcaugcagau

SEQ ID NO: 2412604 - RNA, 19 nt, Homo sapiens
  misc_RNA (1)...(19): siRNA sense strand
auaaauggugaggaagaaa

SEQ ID NO: 2412605 - RNA, 19 nt, Homo sapiens
  misc_RNA (1)...(19): siRNA sense strand
uugcaaagggagcauacaa

SEQ ID NO: 2412606 - RNA, 19 nt, Homo sapiens
  misc_RNA (1)...(19): siRNA sense strand
aggaaggcaaagaaguuau

SEQ ID NO: 2412607 - RNA, 19 nt, Homo sapiens
  misc_RNA (1)...(19): siRNA sense strand
ugaaauaaggaaggaagau

SEQ ID NO: 2412608 - RNA, 19 nt, Homo sapiens
  misc_RNA (1)...(19): siRNA sense strand
ggucaaggaaggaggguug

SEQ ID NO: 2412609 - RNA, 19 nt, Homo sapiens
  misc_RNA (1)...(19): siRNA sense strand
aggagggaacucugggcua

SEQ ID NO: 2412610 - RNA, 19 nt, Homo sapiens
  misc_RNA (1)...(19): siRNA sense strand
cagcgggaacucaggguga

SEQ ID NO: 2412611 - RNA, 19 nt, Homo sapiens
  misc_RNA (1)...(19): siRNA sense strand
uggaggugccagagagacu

SEQ ID NO: 2412612 - RNA, 19 nt, Homo sapiens
  misc_RNA (1)...(19): siRNA sense strand
uggacauggaggagggaac

SEQ ID NO: 2412613 - RNA, 19 nt, Homo sapiens
  misc_RNA (1)...(19): siRNA sense strand
cuaccugggcgaaaggaga

SEQ ID NO: 2412614 - RNA, 19 nt, Homo sapiens
  misc_RNA (1)...(19): siRNA sense strand
aagacuggcuugaccgaca

SEQ ID NO: 2412615 - RNA, 19 nt, Homo sapiens
  misc_RNA (1)...(19): siRNA sense strand
augagaaggaggugcagaa

SEQ ID NO: 2412616 - RNA, 19 nt, Homo sapiens
  misc_RNA (1)...(19): siRNA sense strand
ggaaaggaacaggaagcau

SEQ ID NO: 2412617 - RNA, 19 nt, Homo sapiens
  misc_RNA (1)...(19): siRNA sense strand
ggaacaggaagcaugcgua

SEQ ID NO: 2412618 - RNA, 19 nt, Homo sapiens
  misc_RNA (1)...(19): siRNA sense strand
cuggcaaagacaagaauaa

SEQ ID NO: 2412619 - RNA, 19 nt, Homo sapiens
  misc_RNA (1)...(19): siRNA sense strand
cauuaagauccacgagaca

SEQ ID NO: 2412620 - RNA, 19 nt, Homo sapiens
  misc_RNA (1)...(19): siRNA sense strand
gugaaagagaagaggaggu

SEQ ID NO: 2412621 - RNA, 19 nt, Homo sapiens
  misc_RNA (1)...(19): siRNA sense strand
ggcaaagacaagaauaaaa

SEQ ID NO: 2412622 - RNA, 19 nt, Homo sapiens
  misc_RNA (1)...(19): siRNA sense strand
agagaaacggauucgggaa

SEQ ID NO: 2412623 - RNA, 19 nt, Homo sapiens
  misc_RNA (1)...(19): siRNA sense strand
cagugaagagaaacggauu

SEQ ID NO: 2412624 - RNA, 19 nt, Homo sapiens
  misc_RNA (1)...(19): siRNA sense strand
acacauuguuugcugccua

SEQ ID NO: 2412625 - RNA, 19 nt, Homo sapiens
  misc_RNA (1)...(19): siRNA sense strand
agguucgagugaagaucaa

SEQ ID NO: 2412626 - RNA, 19 nt, Homo sapiens
  misc_RNA (1)...(19): siRNA sense strand
auaaaagcguccugcagaa

SEQ ID NO: 2412627 - RNA, 19 nt, Homo sapiens
  misc_RNA (1)...(19): siRNA sense strand
aaguaauguuggagaacua

SEQ ID NO: 2412628 - RNA, 19 nt, Homo sapiens
  misc_RNA (1)...(19): siRNA sense strand
gauucauacgggagagaaa

SEQ ID NO: 2412629 - RNA, 19 nt, Homo sapiens
  misc_RNA (1)...(19): siRNA sense strand
gugcagugugugugggaaa

SEQ ID NO: 2412630 - RNA, 19 nt, Homo sapiens
  misc_RNA (1)...(19): siRNA sense strand
aggaaguaauguuggagaa

SEQ ID NO: 2412631 - RNA, 19 nt, Homo sapiens
  misc_RNA (1)...(19): siRNA sense strand
augcagagaauguggcaaa

SEQ ID NO: 2412632 - RNA, 19 nt, Homo sapiens
  misc_RNA (1)...(19): siRNA sense strand
aacugaaagaggagagaaa

SEQ ID NO: 2412633 - RNA, 19 nt, Homo sapiens
  misc_RNA (1)...(19): siRNA sense strand
aucacauacuggagagaaa

SEQ ID NO: 2412634 - RNA, 19 nt, Homo sapiens
  misc_RNA (1)...(19): siRNA sense strand
aauuugugcaggagggaaa

SEQ ID NO: 2412635 - RNA, 19 nt, Homo sapiens
  misc_RNA (1)...(19): siRNA sense strand
guagaagauaugcaggaaa

SEQ ID NO: 2412636 - RNA, 19 nt, Homo sapiens
  misc_RNA (1)...(19): siRNA sense strand
augcagugauuguggaaga

SEQ ID NO: 2412637 - RNA, 19 nt, Homo sapiens
  misc_RNA (1)...(19): siRNA sense strand
aggaauuugaacagagaau

SEQ ID NO: 2412638 - RNA, 19 nt, Homo sapiens
  misc_RNA (1)...(19): siRNA sense strand
gaacagagaauaagccuca

SEQ ID NO: 2412639 - RNA, 19 nt, Homo sapiens
  misc_RNA (1)...(19): siRNA sense strand
auguagugauuguggaaca

SEQ ID NO: 2412640 - RNA, 19 nt, Homo sapiens
  misc_RNA (1)...(19): siRNA sense strand
ggucauugucauucgaaga

SEQ ID NO: 2412641 - RNA, 19 nt, Homo sapiens
  misc_RNA (1)...(19): siRNA sense strand
aacccauacaggagagaaa

SEQ ID NO: 2412642 - RNA, 19 nt, Homo sapiens
  misc_RNA (1)...(19): siRNA sense strand
ccuuaugaauguagugagu

SEQ ID NO: 2412643 - RNA, 19 nt, Homo sapiens
  misc_RNA (1)...(19): siRNA sense strand
ccagaaagucacagcucau

SEQ ID NO: 2412644 - RNA, 19 nt, Homo sapiens
  misc_RNA (1)...(19): siRNA sense strand
cgaacucauacaagagcaa

SEQ ID NO: 2412645 - RNA, 19 nt, Homo sapiens
  misc_RNA (1)...(19): siRNA sense strand
gaguagaagauaugcagga

SEQ ID NO: 2412646 - RNA, 19 nt, Homo sapiens
  misc_RNA (1)...(19): siRNA sense strand
auguggugaaugugggaaa

SEQ ID NO: 2412647 - RNA, 19 nt, Homo sapiens
  misc_RNA (1)...(19): siRNA sense strand
cuuuguaguuaaucaggaa

SEQ ID NO: 2412648 - RNA, 19 nt, Homo sapiens
  misc_RNA (1)...(19): siRNA sense strand
cccuacagaugcagcgaau

SEQ ID NO: 2412649 - RNA, 19 nt, Homo sapiens
  misc_RNA (1)...(19): siRNA sense strand
ccuagugggcagaaaugua

SEQ ID NO: 2412650 - RNA, 19 nt, Homo sapiens
  misc_RNA (1)...(19): siRNA sense strand
auguagugaauguggaaaa

SEQ ID NO: 2412651 - RNA, 19 nt, Homo sapiens
  misc_RNA (1)...(19): siRNA sense strand
gcucaauagacaucagcga

SEQ ID NO: 2412652 - RNA, 19 nt, Homo sapiens
  misc_RNA (1)...(19): siRNA sense strand
uuaugaauguagugagugu

SEQ ID NO: 2412653 - RNA, 19 nt, Homo sapiens
  misc_RNA (1)...(19): siRNA sense strand
agggauaguagaaggagca

SEQ ID NO: 2412654 - RNA, 19 nt, Homo sapiens
  misc_RNA (1)...(19): siRNA sense strand
gggaaaacauucaugagga

SEQ ID NO: 2412655 - RNA, 19 nt, Homo sapiens
  misc_RNA (1)...(19): siRNA sense strand
aggaaaagauucugaugca

SEQ ID NO: 2412656 - RNA, 19 nt, Homo sapiens
  misc_RNA (1)...(19): siRNA sense strand
agaagcaagucgaagcuca

SEQ ID NO: 2412657 - RNA, 19 nt, Homo sapiens
  misc_RNA (1)...(19): siRNA sense strand
agucacagcucauggucca

SEQ ID NO: 2412658 - RNA, 19 nt, Homo sapiens
  misc_RNA (1)...(19): siRNA sense strand
gcccuaaaucacagcucaa

SEQ ID NO: 2412659 - RNA, 19 nt, Homo sapiens
  misc_RNA (1)...(19): siRNA sense strand
aaauguagugauuguggaa

SEQ ID NO: 2412660 - RNA, 19 nt, Homo sapiens
  misc_RNA (1)...(19): siRNA sense strand
gcgccuagugggcagaaau

SEQ ID NO: 2412661 - RNA, 19 nt, Homo sapiens
  misc_RNA (1)...(19): siRNA sense strand
agagaauaagccucacaaa

SEQ ID NO: 2412662 - RNA, 19 nt, Homo sapiens
  misc_RNA (1)...(19): siRNA sense strand
ucaauaggguaucgaggca

SEQ ID NO: 2412663 - RNA, 19 nt, Homo sapiens
  misc_RNA (1)...(19): siRNA sense strand
aguagaagauaugcaggaa

SEQ ID NO: 2412664 - RNA, 19 nt, Homo sapiens
  misc_RNA (1)...(19): siRNA sense strand
aagauguggcugugggcuu

SEQ ID NO: 2412665 - RNA, 19 nt, Homo sapiens
  misc_RNA (1)...(19): siRNA sense strand
ugaccagacaucagaggau

SEQ ID NO: 2412666 - RNA, 19 nt, Homo sapiens
  misc_RNA (1)...(19): siRNA sense strand
ccccaugaauguagugaau

SEQ ID NO: 2412667 - RNA, 19 nt, Homo sapiens
  misc_RNA (1)...(19): siRNA sense strand
gaagcaagucgaagcucau

SEQ ID NO: 2412668 - RNA, 19 nt, Homo sapiens
  misc_RNA (1)...(19): siRNA sense strand
gaggagagagcaaggcagu

SEQ ID NO: 2412669 - RNA, 19 nt, Homo sapiens
  misc_RNA (1)...(19): siRNA sense strand
cuccauaucaagugugaca

SEQ ID NO: 2412670 - RNA, 19 nt, Homo sapiens
  misc_RNA (1)...(19): siRNA sense strand
gcuuauucaacaucagaga

SEQ ID NO: 2412671 - RNA, 19 nt, Homo sapiens
  misc_RNA (1)...(19): siRNA sense strand
aggcauaccucacugcaca

SEQ ID NO: 2412672 - RNA, 19 nt, Homo sapiens
  misc_RNA (1)...(19): siRNA sense strand
gggagagaaaccuuaugaa

SEQ ID NO: 2412673 - RNA, 19 nt, Homo sapiens
  misc_RNA (1)...(19): siRNA sense strand
gucugugaggagagagcaa

SEQ ID NO: 2412674 - RNA, 19 nt, Homo sapiens
  misc_RNA (1)...(19): siRNA sense strand
agaaaaggcuggaagguca

SEQ ID NO: 2412675 - RNA, 19 nt, Homo sapiens
  misc_RNA (1)...(19): siRNA sense strand
augacaagcaugagaccaa

SEQ ID NO: 2412676 - RNA, 19 nt, Homo sapiens
  misc_RNA (1)...(19): siRNA sense strand
gggaugaggaucugggcga

SEQ ID NO: 2412677 - RNA, 19 nt, Homo sapiens
  misc_RNA (1)...(19): siRNA sense strand
cggagagucuacagcguga

SEQ ID NO: 2412678 - RNA, 19 nt, Homo sapiens
  misc_RNA (1)...(19): siRNA sense strand
cugcuuaugaugaagaaau

SEQ ID NO: 2412679 - RNA, 19 nt, Homo sapiens
  misc_RNA (1)...(19): siRNA sense strand
gcgacaugggcgaagauga

SEQ ID NO: 2412680 - RNA, 19 nt, Homo sapiens
  misc_RNA (1)...(19): siRNA sense strand
ucuaugaggagauggaaca

SEQ ID NO: 2412681 - RNA, 19 nt, Homo sapiens
  misc_RNA (1)...(19): siRNA sense strand
ccugugaugcugaaggcaa

SEQ ID NO: 2412682 - RNA, 19 nt, Homo sapiens
  misc_RNA (1)...(19): siRNA sense strand
gccaugaagagaaggugua

SEQ ID NO: 2412683 - RNA, 19 nt, Homo sapiens
  misc_RNA (1)...(19): siRNA sense strand
aagagaaggagauggaagu

SEQ ID NO: 2412684 - RNA, 19 nt, Homo sapiens
  misc_RNA (1)...(19): siRNA sense strand
ggaaggauaugcagaggcu

SEQ ID NO: 2412685 - RNA, 19 nt, Homo sapiens
  misc_RNA (1)...(19): siRNA sense strand
gcgaagaugaggaagccca

SEQ ID NO: 2412686 - RNA, 19 nt, Homo sapiens
  misc_RNA (1)...(19): siRNA sense strand
uguuggaagaugaaaguga

SEQ ID NO: 2412687 - RNA, 19 nt, Homo sapiens
  misc_RNA (1)...(19): siRNA sense strand
agauggaacaacaaaucaa

SEQ ID NO: 2412688 - RNA, 19 nt, Homo sapiens
  misc_RNA (1)...(19): siRNA sense strand
agaaggagacucaggagca

SEQ ID NO: 2412689 - RNA, 19 nt, Homo sapiens
  misc_RNA (1)...(19): siRNA sense strand
guaaggagcaggagcugga

SEQ ID NO: 2412690 - RNA, 19 nt, Homo sapiens
  misc_RNA (1)...(19): siRNA sense strand
ccaagaagcccaugaggag

SEQ ID NO: 2412691 - RNA, 19 nt, Homo sapiens
  misc_RNA (1)...(19): siRNA sense strand
guuucaagcccgcagucaa

SEQ ID NO: 2412692 - RNA, 19 nt, Homo sapiens
  misc_RNA (1)...(19): siRNA sense strand
cugagaauaccaagcugaa

SEQ ID NO: 2412693 - RNA, 19 nt, Homo sapiens
  misc_RNA (1)...(19): siRNA sense strand
gcugagaauaccaagcuga

SEQ ID NO: 2412694 - RNA, 19 nt, Homo sapiens
  misc_RNA (1)...(19): siRNA sense strand
caagagaaggagauggaag

SEQ ID NO: 2412695 - RNA, 19 nt, Homo sapiens
  misc_RNA (1)...(19): siRNA sense strand
augacaagauagauggaga

SEQ ID NO: 2412696 - RNA, 19 nt, Homo sapiens
  misc_RNA (1)...(19): siRNA sense strand
caaugaaagcaaagccaga

SEQ ID NO: 2412697 - RNA, 19 nt, Homo sapiens
  misc_RNA (1)...(19): siRNA sense strand
cugaaagagccaauaguca

SEQ ID NO: 2412698 - RNA, 19 nt, Homo sapiens
  misc_RNA (1)...(19): siRNA sense strand
gaggaauguaugaggaucu

SEQ ID NO: 2412699 - RNA, 19 nt, Homo sapiens
  misc_RNA (1)...(19): siRNA sense strand
gaguuuaaggauagaagca

SEQ ID NO: 2412700 - RNA, 19 nt, Homo sapiens
  misc_RNA (1)...(19): siRNA sense strand
ucuccaugaagaagagcaa

SEQ ID NO: 2412701 - RNA, 19 nt, Homo sapiens
  misc_RNA (1)...(19): siRNA sense strand
acuuggaaaggcugcgaaa

SEQ ID NO: 2412702 - RNA, 19 nt, Homo sapiens
  misc_RNA (1)...(19): siRNA sense strand
ccucaagaugaucccgaua

SEQ ID NO: 2412703 - RNA, 19 nt, Homo sapiens
  misc_RNA (1)...(19): siRNA sense strand
uaugaggaucugaagcaaa

SEQ ID NO: 2412704 - RNA, 19 nt, Homo sapiens
  misc_RNA (1)...(19): siRNA sense strand
ccuggauugugaagguaga

SEQ ID NO: 2412705 - RNA, 19 nt, Homo sapiens
  misc_RNA (1)...(19): siRNA sense strand
augaagaagagcaacauca

SEQ ID NO: 2412706 - RNA, 19 nt, Homo sapiens
  misc_RNA (1)...(19): siRNA sense strand
ccauaaagcagauguggag

SEQ ID NO: 2412707 - RNA, 19 nt, Homo sapiens
  misc_RNA (1)...(19): siRNA sense strand
gggaauucuacaaggcaga

SEQ ID NO: 2412708 - RNA, 19 nt, Homo sapiens
  misc_RNA (1)...(19): siRNA sense strand
caggagaggcucagggaga

SEQ ID NO: 2412709 - RNA, 19 nt, Homo sapiens
  misc_RNA (1)...(19): siRNA sense strand
cugugaaagagaaggaaga

SEQ ID NO: 2412710 - RNA, 19 nt, Homo sapiens
  misc_RNA (1)...(19): siRNA sense strand
ugacagaggaggagcagga

SEQ ID NO: 2412711 - RNA, 19 nt, Homo sapiens
  misc_RNA (1)...(19): siRNA sense strand
gcgucuaugcgcaggaaga

SEQ ID NO: 2412712 - RNA, 19 nt, Homo sapiens
  misc_RNA (1)...(19): siRNA sense strand
gcgaauggguggauggccu

SEQ ID NO: 2412713 - RNA, 19 nt, Homo sapiens
  misc_RNA (1)...(19): siRNA sense strand
aggaggagcaggaggccau

SEQ ID NO: 2412714 - RNA, 19 nt, Homo sapiens
  misc_RNA (1)...(19): siRNA sense strand
gcaacaucuuucugggcga

SEQ ID NO: 2412715 - RNA, 19 nt, Homo sapiens
  misc_RNA (1)...(19): siRNA sense strand
gagcugcacuucuggguga

SEQ ID NO: 2412716 - RNA, 19 nt, Homo sapiens
  misc_RNA (1)...(19): siRNA sense strand
cugaaggacuguuggaccu

SEQ ID NO: 2412717 - RNA, 19 nt, Homo sapiens
  misc_RNA (1)...(19): siRNA sense strand
cuggagcagccgugcgaau

SEQ ID NO: 2412718 - RNA, 19 nt, Homo sapiens
  misc_RNA (1)...(19): siRNA sense strand
aggcaaugcuguugguggu

SEQ ID NO: 2412719 - RNA, 19 nt, Homo sapiens
  misc_RNA (1)...(19): siRNA sense strand
acggagaggaugaggguga

SEQ ID NO: 2412720 - RNA, 19 nt, Homo sapiens
  misc_RNA (1)...(19): siRNA sense strand
cagcuguaguugagcccua

SEQ ID NO: 2412721 - RNA, 19 nt, Homo sapiens
  misc_RNA (1)...(19): siRNA sense strand
gcuucaagguuggcauuaa

SEQ ID NO: 2412722 - RNA, 19 nt, Homo sapiens
  misc_RNA (1)...(19): siRNA sense strand
cuucagggcuucuugguuu

SEQ ID NO: 2412723 - RNA, 19 nt, Homo sapiens
  misc_RNA (1)...(19): siRNA sense strand
gugcugacggagaggauga

SEQ ID NO: 2412724 - RNA, 19 nt, Homo sapiens
  misc_RNA (1)...(19): siRNA sense strand
gagcaauaccacagcuguu

SEQ ID NO: 2412725 - RNA, 19 nt, Homo sapiens
  misc_RNA (1)...(19): siRNA sense strand
gcaccggucuucagggcuu

SEQ ID NO: 2412726 - RNA, 19 nt, Homo sapiens
  misc_RNA (1)...(19): siRNA sense strand
gcaaggaagaugcugccaa

SEQ ID NO: 2412727 - RNA, 19 nt, Homo sapiens
  misc_RNA (1)...(19): siRNA sense strand
cagauagugcugacggaga

SEQ ID NO: 2412728 - RNA, 19 nt, Homo sapiens
  misc_RNA (1)...(19): siRNA sense strand
ugguagacaaugaggccau

SEQ ID NO: 2412729 - RNA, 19 nt, Homo sapiens
  misc_RNA (1)...(19): siRNA sense strand
gugccuucaugguagacaa

SEQ ID NO: 2412730 - RNA, 19 nt, Homo sapiens
  misc_RNA (1)...(19): siRNA sense strand
cuucaagguuggcauuaau

SEQ ID NO: 2412731 - RNA, 19 nt, Homo sapiens
  misc_RNA (1)...(19): siRNA sense strand
gauuauggcaagaagucca

SEQ ID NO: 2412732 - RNA, 19 nt, Homo sapiens
  misc_RNA (1)...(19): siRNA sense strand
ccgccuuauuagccagauu

SEQ ID NO: 2412733 - RNA, 19 nt, Homo sapiens
  misc_RNA (1)...(19): siRNA sense strand
cuggcaaauaugaagguaa

SEQ ID NO: 2412734 - RNA, 19 nt, Homo sapiens
  misc_RNA (1)...(19): siRNA sense strand
ucaggaagccagacagauu

SEQ ID NO: 2412735 - RNA, 19 nt, Homo sapiens
  misc_RNA (1)...(19): siRNA sense strand
ccagacagauucaaguauu

SEQ ID NO: 2412736 - RNA, 19 nt, Homo sapiens
  misc_RNA (1)...(19): siRNA sense strand
agaagaaagcaaaaccaaa

SEQ ID NO: 2412737 - RNA, 19 nt, Homo sapiens
  misc_RNA (1)...(19): siRNA sense strand
aagaugcugccaagggaaa

SEQ ID NO: 2412738 - RNA, 19 nt, Homo sapiens
  misc_RNA (1)...(19): siRNA sense strand
agagaagagagaaaacaaa

SEQ ID NO: 2412739 - RNA, 19 nt, Homo sapiens
  misc_RNA (1)...(19): siRNA sense strand
gaagaugcugccaagggaa

SEQ ID NO: 2412740 - RNA, 19 nt, Homo sapiens
  misc_RNA (1)...(19): siRNA sense strand
ggagagaaucuucgggcuu

SEQ ID NO: 2412741 - RNA, 19 nt, Homo sapiens
  misc_RNA (1)...(19): siRNA sense strand
cugaaaagacaguggcgaa

SEQ ID NO: 2412742 - RNA, 19 nt, Homo sapiens
  misc_RNA (1)...(19): siRNA sense strand
gcagaaaaccagaagcaga

SEQ ID NO: 2412743 - RNA, 19 nt, Homo sapiens
  misc_RNA (1)...(19): siRNA sense strand
ggugauaggagcaggacac

SEQ ID NO: 2412744 - RNA, 19 nt, Homo sapiens
  misc_RNA (1)...(19): siRNA sense strand
gagacgagauaacacggaa

SEQ ID NO: 2412745 - RNA, 19 nt, Homo sapiens
  misc_RNA (1)...(19): siRNA sense strand
aggcuguguucaaggaguu

SEQ ID NO: 2412746 - RNA, 19 nt, Homo sapiens
  misc_RNA (1)...(19): siRNA sense strand
aaacaugggcugaggcuuc

SEQ ID NO: 2412747 - RNA, 19 nt, Homo sapiens
  misc_RNA (1)...(19): siRNA sense strand
cagaaaaccagaagcagau

SEQ ID NO: 2412748 - RNA, 19 nt, Homo sapiens
  misc_RNA (1)...(19): siRNA sense strand
agacaguggcgaaggugca

SEQ ID NO: 2412749 - RNA, 19 nt, Homo sapiens
  misc_RNA (1)...(19): siRNA sense strand
ccggcguggagacgagaua

SEQ ID NO: 2412750 - RNA, 19 nt, Homo sapiens
  misc_RNA (1)...(19): siRNA sense strand
agagagacgcuuaugcaga

SEQ ID NO: 2412751 - RNA, 19 nt, Homo sapiens
  misc_RNA (1)...(19): siRNA sense strand
gagcaggacacaacggacu

SEQ ID NO: 2412752 - RNA, 19 nt, Homo sapiens
  misc_RNA (1)...(19): siRNA sense strand
aucuggagcugaagaaaca

SEQ ID NO: 2412753 - RNA, 19 nt, Homo sapiens
  misc_RNA (1)...(19): siRNA sense strand
agaaggaugcccaggucuu

SEQ ID NO: 2412754 - RNA, 19 nt, Homo sapiens
  misc_RNA (1)...(19): siRNA sense strand
ggaauacccagcagggaca

SEQ ID NO: 2412755 - RNA, 19 nt, Homo sapiens
  misc_RNA (1)...(19): siRNA sense strand
cgcucagauuucagaggaa

SEQ ID NO: 2412756 - RNA, 19 nt, Homo sapiens
  misc_RNA (1)...(19): siRNA sense strand
cucagauuucagaggaaua

SEQ ID NO: 2412757 - RNA, 19 nt, Homo sapiens
  misc_RNA (1)...(19): siRNA sense strand
acgugauggugaagaagca

SEQ ID NO: 2412758 - RNA, 19 nt, Homo sapiens
  misc_RNA (1)...(19): siRNA sense strand
aggaguggcuggaggagcu

SEQ ID NO: 2412759 - RNA, 19 nt, Homo sapiens
  misc_RNA (1)...(19): siRNA sense strand
acucgaacguuuagagcaa

SEQ ID NO: 2412760 - RNA, 19 nt, Homo sapiens
  misc_RNA (1)...(19): siRNA sense strand
gcaagaaggcaguggagga

SEQ ID NO: 2412761 - RNA, 19 nt, Homo sapiens
  misc_RNA (1)...(19): siRNA sense strand
ccaccaaggaggagacaga

SEQ ID NO: 2412762 - RNA, 19 nt, Homo sapiens
  misc_RNA (1)...(19): siRNA sense strand
ggauaggaugcuaagagaa

SEQ ID NO: 2412763 - RNA, 19 nt, Homo sapiens
  misc_RNA (1)...(19): siRNA sense strand
ucaagaagaauaaggccaa

SEQ ID NO: 2412764 - RNA, 19 nt, Homo sapiens
  misc_RNA (1)...(19): siRNA sense strand
aagaauaaggccaaggaga

SEQ ID NO: 2412765 - RNA, 19 nt, Homo sapiens
  misc_RNA (1)...(19): siRNA sense strand
ugguaaagccccagaaaga

SEQ ID NO: 2412766 - RNA, 19 nt, Homo sapiens
  misc_RNA (1)...(19): siRNA sense strand
caaugaaagagaugcaaaa

SEQ ID NO: 2412767 - RNA, 19 nt, Homo sapiens
  misc_RNA (1)...(19): siRNA sense strand
gccaaggagaacaagaaua

SEQ ID NO: 2412768 - RNA, 19 nt, Homo sapiens
  misc_RNA (1)...(19): siRNA sense strand
agaaaaggacucagagaga

SEQ ID NO: 2412769 - RNA, 19 nt, Homo sapiens
  misc_RNA (1)...(19): siRNA sense strand
gcauaauucuucaggugca

SEQ ID NO: 2412770 - RNA, 19 nt, Homo sapiens
  misc_RNA (1)...(19): siRNA sense strand
ccgcuauauugaugacgaa

SEQ ID NO: 2412771 - RNA, 19 nt, Homo sapiens
  misc_RNA (1)...(19): siRNA sense strand
gagcaaaggaggaaagcag

SEQ ID NO: 2412772 - RNA, 19 nt, Homo sapiens
  misc_RNA (1)...(19): siRNA sense strand
agaaaaggaggaagaggaa

SEQ ID NO: 2412773 - RNA, 19 nt, Homo sapiens
  misc_RNA (1)...(19): siRNA sense strand
aggaggaagaggaagauga

SEQ ID NO: 2412774 - RNA, 19 nt, Homo sapiens
  misc_RNA (1)...(19): siRNA sense strand
ggugacugccagaaagcaa

SEQ ID NO: 2412775 - RNA, 19 nt, Homo sapiens
  misc_RNA (1)...(19): siRNA sense strand
cagagagagaugagcugua

SEQ ID NO: 2412776 - RNA, 19 nt, Homo sapiens
  misc_RNA (1)...(19): siRNA sense strand
aggccaaggagaacaagaa

SEQ ID NO: 2412777 - RNA, 19 nt, Homo sapiens
  misc_RNA (1)...(19): siRNA sense strand
aggaggagacagaggacca

SEQ ID NO: 2412778 - RNA, 19 nt, Homo sapiens
  misc_RNA (1)...(19): siRNA sense strand
aagaggaagaugauggaga

SEQ ID NO: 2412779 - RNA, 19 nt, Homo sapiens
  misc_RNA (1)...(19): siRNA sense strand
aaaaggaggaagaggaaga

SEQ ID NO: 2412780 - RNA, 19 nt, Homo sapiens
  misc_RNA (1)...(19): siRNA sense strand
guuuagagcaaaggaggaa

SEQ ID NO: 2412781 - RNA, 19 nt, Homo sapiens
  misc_RNA (1)...(19): siRNA sense strand
gaucaagaaaccauggcau

SEQ ID NO: 2412782 - RNA, 19 nt, Homo sapiens
  misc_RNA (1)...(19): siRNA sense strand
cguaagaggaauuugaaac

SEQ ID NO: 2412783 - RNA, 19 nt, Homo sapiens
  misc_RNA (1)...(19): siRNA sense strand
uaacugacauacagcgaga

SEQ ID NO: 2412784 - RNA, 19 nt, Homo sapiens
  misc_RNA (1)...(19): siRNA sense strand
gauuugaacagaagcgcuu

SEQ ID NO: 2412785 - RNA, 19 nt, Homo sapiens
  misc_RNA (1)...(19): siRNA sense strand
gcuauauugaugacgaaga

SEQ ID NO: 2412786 - RNA, 19 nt, Homo sapiens
  misc_RNA (1)...(19): siRNA sense strand
uaaacaaaguccagggcac

SEQ ID NO: 2412787 - RNA, 19 nt, Homo sapiens
  misc_RNA (1)...(19): siRNA sense strand
gagaugagcuguaugccca

SEQ ID NO: 2412788 - RNA, 19 nt, Homo sapiens
  misc_RNA (1)...(19): siRNA sense strand
uggaggaugcaaugaaaga

SEQ ID NO: 2412789 - RNA, 19 nt, Homo sapiens
  misc_RNA (1)...(19): siRNA sense strand
gaugcuaagagaacaggaa

SEQ ID NO: 2412790 - RNA, 19 nt, Homo sapiens
  misc_RNA (1)...(19): siRNA sense strand
acagcaaauaugaguauga

SEQ ID NO: 2412791 - RNA, 19 nt, Homo sapiens
  misc_RNA (1)...(19): siRNA sense strand
gggaaugcggauuguggau

SEQ ID NO: 2412792 - RNA, 19 nt, Homo sapiens
  misc_RNA (1)...(19): siRNA sense strand
agaaggcaguggaggaacu

SEQ ID NO: 2412793 - RNA, 19 nt, Homo sapiens
  misc_RNA (1)...(19): siRNA sense strand
gcucaaggaacaggaucaa

SEQ ID NO: 2412794 - RNA, 19 nt, Homo sapiens
  misc_RNA (1)...(19): siRNA sense strand
ucguaagaggaauuugaaa

SEQ ID NO: 2412795 - RNA, 19 nt, Homo sapiens
  misc_RNA (1)...(19): siRNA sense strand
cguuuagagcaaaggagga

SEQ ID NO: 2412796 - RNA, 19 nt, Homo sapiens
  misc_RNA (1)...(19): siRNA sense strand
uggccaacuucaucaagaa

SEQ ID NO: 2412797 - RNA, 19 nt, Homo sapiens
  misc_RNA (1)...(19): siRNA sense strand
gggacggaguggacagauc

SEQ ID NO: 2412798 - RNA, 19 nt, Homo sapiens
  misc_RNA (1)...(19): siRNA sense strand
gaacagaagcgcuuugcca

SEQ ID NO: 2412799 - RNA, 19 nt, Homo sapiens
  misc_RNA (1)...(19): siRNA sense strand
ggccagaagagguaaagca

SEQ ID NO: 2412800 - RNA, 19 nt, Homo sapiens
  misc_RNA (1)...(19): siRNA sense strand
cggaauagaccuagacacc

SEQ ID NO: 2412801 - RNA, 19 nt, Homo sapiens
  misc_RNA (1)...(19): siRNA sense strand
gcagaaaaggacucagaga

SEQ ID NO: 2412802 - RNA, 19 nt, Homo sapiens
  misc_RNA (1)...(19): siRNA sense strand
ccagaagagguaaagcaga

SEQ ID NO: 2412803 - RNA, 19 nt, Homo sapiens
  misc_RNA (1)...(19): siRNA sense strand
uaaagcagauggaggccuu

SEQ ID NO: 2412804 - RNA, 19 nt, Homo sapiens
  misc_RNA (1)...(19): siRNA sense strand
ccugacacaucuaggagga

SEQ ID NO: 2412805 - RNA, 19 nt, Homo sapiens
  misc_RNA (1)...(19): siRNA sense strand
augcuaagagaacaggaaa

SEQ ID NO: 2412806 - RNA, 19 nt, Homo sapiens
  misc_RNA (1)...(19): siRNA sense strand
cggcaagggaaugcggauu

SEQ ID NO: 2412807 - RNA, 19 nt, Homo sapiens
  misc_RNA (1)...(19): siRNA sense strand
aaaaggacucagagagaga

SEQ ID NO: 2412808 - RNA, 19 nt, Homo sapiens
  misc_RNA (1)...(19): siRNA sense strand
agagcagcgucgagggaua

SEQ ID NO: 2412809 - RNA, 19 nt, Homo sapiens
  misc_RNA (1)...(19): siRNA sense strand
uggaaauggaccaagaaua

SEQ ID NO: 2412810 - RNA, 19 nt, Homo sapiens
  misc_RNA (1)...(19): siRNA sense strand
gagcagaaggagagagacu

SEQ ID NO: 2412811 - RNA, 19 nt, Homo sapiens
  misc_RNA (1)...(19): siRNA sense strand
ccaaaguggacaagaccaa

SEQ ID NO: 2412812 - RNA, 19 nt, Homo sapiens
  misc_RNA (1)...(19): siRNA sense strand
gcaaugaguuugugcagca

SEQ ID NO: 2412813 - RNA, 19 nt, Homo sapiens
  misc_RNA (1)...(19): siRNA sense strand
agaccaacuauguggagaa

SEQ ID NO: 2412814 - RNA, 19 nt, Homo sapiens
  misc_RNA (1)...(19): siRNA sense strand
uugaggaagaccuggaaua

SEQ ID NO: 2412815 - RNA, 19 nt, Homo sapiens
  misc_RNA (1)...(19): siRNA sense strand
caagaggagcagaaggaga

SEQ ID NO: 2412816 - RNA, 19 nt, Homo sapiens
  misc_RNA (1)...(19): siRNA sense strand
guacaguucuauaaggcau

SEQ ID NO: 2412817 - RNA, 19 nt, Homo sapiens
  misc_RNA (1)...(19): siRNA sense strand
uggugaaagugcagaucuu

SEQ ID NO: 2412818 - RNA, 19 nt, Homo sapiens
  misc_RNA (1)...(19): siRNA sense strand
uggaagaagcuaagauacu

SEQ ID NO: 2412819 - RNA, 19 nt, Homo sapiens
  misc_RNA (1)...(19): siRNA sense strand
ggauggaccuagcggggaa

SEQ ID NO: 2412820 - RNA, 19 nt, Homo sapiens
  misc_RNA (1)...(19): siRNA sense strand
cagcacggcaggagaccaa

SEQ ID NO: 2412821 - RNA, 19 nt, Homo sapiens
  misc_RNA (1)...(19): siRNA sense strand
gacaauacguaauggccau

SEQ ID NO: 2412822 - RNA, 19 nt, Homo sapiens
  misc_RNA (1)...(19): siRNA sense strand
gcaccuaaugaauguggaa

SEQ ID NO: 2412823 - RNA, 19 nt, Homo sapiens
  misc_RNA (1)...(19): siRNA sense strand
aggagcagaaggagagaga

SEQ ID NO: 2412824 - RNA, 19 nt, Homo sapiens
  misc_RNA (1)...(19): siRNA sense strand
acuucagacuucagaauga

SEQ ID NO: 2412825 - RNA, 19 nt, Homo sapiens
  misc_RNA (1)...(19): siRNA sense strand
gguuauugcaccuaaugaa

SEQ ID NO: 2412826 - RNA, 19 nt, Homo sapiens
  misc_RNA (1)...(19): siRNA sense strand
gcuaugugcugaagccaga

SEQ ID NO: 2412827 - RNA, 19 nt, Homo sapiens
  misc_RNA (1)...(19): siRNA sense strand
ggugaucagcggucagcaa

SEQ ID NO: 2412828 - RNA, 19 nt, Homo sapiens
  misc_RNA (1)...(19): siRNA sense strand
gugaaggggaagaaguuaa

SEQ ID NO: 2412829 - RNA, 19 nt, Homo sapiens
  misc_RNA (1)...(19): siRNA sense strand
caucaaggaggcuggcaau

SEQ ID NO: 2412830 - RNA, 19 nt, Homo sapiens
  misc_RNA (1)...(19): siRNA sense strand
accuaaugaauguggaaau

SEQ ID NO: 2412831 - RNA, 19 nt, Homo sapiens
  misc_RNA (1)...(19): siRNA sense strand
caacaagguuaccgccaca

SEQ ID NO: 2412832 - RNA, 19 nt, Homo sapiens
  misc_RNA (1)...(19): siRNA sense strand
agaccuggaauaugaggaa

SEQ ID NO: 2412833 - RNA, 19 nt, Homo sapiens
  misc_RNA (1)...(19): siRNA sense strand
uggaauaugaggaagagga

SEQ ID NO: 2412834 - RNA, 19 nt, Homo sapiens
  misc_RNA (1)...(19): siRNA sense strand
ggagcagaaccuucagaau

SEQ ID NO: 2412835 - RNA, 19 nt, Homo sapiens
  misc_RNA (1)...(19): siRNA sense strand
cgugauauccagaguucuu

SEQ ID NO: 2412836 - RNA, 19 nt, Homo sapiens
  misc_RNA (1)...(19): siRNA sense strand
gcugaugggcagaagcuga

SEQ ID NO: 2412837 - RNA, 19 nt, Homo sapiens
  misc_RNA (1)...(19): siRNA sense strand
agaagaaauccaagcccau

SEQ ID NO: 2412838 - RNA, 19 nt, Homo sapiens
  misc_RNA (1)...(19): siRNA sense strand
uccaagaaguucagcgguu

SEQ ID NO: 2412839 - RNA, 19 nt, Homo sapiens
  misc_RNA (1)...(19): siRNA sense strand
cuggaacccuggaaggaga

SEQ ID NO: 2412840 - RNA, 19 nt, Homo sapiens
  misc_RNA (1)...(19): siRNA sense strand
ucucugaaaccaaggccaa

SEQ ID NO: 2412841 - RNA, 19 nt, Homo sapiens
  misc_RNA (1)...(19): siRNA sense strand
ccugcaugcaacaagguua

SEQ ID NO: 2412842 - RNA, 19 nt, Homo sapiens
  misc_RNA (1)...(19): siRNA sense strand
aagaagaaauccaagccca

SEQ ID NO: 2412843 - RNA, 19 nt, Homo sapiens
  misc_RNA (1)...(19): siRNA sense strand
ggagguggauguaugggau

SEQ ID NO: 2412844 - RNA, 19 nt, Homo sapiens
  misc_RNA (1)...(19): siRNA sense strand
ucaucaaggaggcuggcaa

SEQ ID NO: 2412845 - RNA, 19 nt, Homo sapiens
  misc_RNA (1)...(19): siRNA sense strand
caagaaguucagcgguuau

SEQ ID NO: 2412846 - RNA, 19 nt, Homo sapiens
  misc_RNA (1)...(19): siRNA sense strand
agucagaauuggcgcugga

SEQ ID NO: 2412847 - RNA, 19 nt, Homo sapiens
  misc_RNA (1)...(19): siRNA sense strand
uggcguucgucuagacaca

SEQ ID NO: 2412848 - RNA, 19 nt, Homo sapiens
  misc_RNA (1)...(19): siRNA sense strand
cuuccaucuuuguguauau

SEQ ID NO: 2412849 - RNA, 19 nt, Homo sapiens
  misc_RNA (1)...(19): siRNA sense strand
ucaaagaugucguggccac

SEQ ID NO: 2412850 - RNA, 19 nt, Homo sapiens
  misc_RNA (1)...(19): siRNA sense strand
gggagcagcagcagaccau

SEQ ID NO: 2412851 - RNA, 19 nt, Homo sapiens
  misc_RNA (1)...(19): siRNA sense strand
agacaauacguaauggcca

SEQ ID NO: 2412852 - RNA, 19 nt, Homo sapiens
  misc_RNA (1)...(19): siRNA sense strand
agaaagaggaggaggagga

SEQ ID NO: 2412853 - RNA, 19 nt, Homo sapiens
  misc_RNA (1)...(19): siRNA sense strand
ggaaacugcuggaaggcga

SEQ ID NO: 2412854 - RNA, 19 nt, Homo sapiens
  misc_RNA (1)...(19): siRNA sense strand
uggagaaugaucugaggaa

SEQ ID NO: 2412855 - RNA, 19 nt, Homo sapiens
  misc_RNA (1)...(19): siRNA sense strand
aggggaaaguuuugaagaa

SEQ ID NO: 2412856 - RNA, 19 nt, Homo sapiens
  misc_RNA (1)...(19): siRNA sense strand
ggcucuugacauugagaua

SEQ ID NO: 2412857 - RNA, 19 nt, Homo sapiens
  misc_RNA (1)...(19): siRNA sense strand
uuaagaaagaggaggagga

SEQ ID NO: 2412858 - RNA, 19 nt, Homo sapiens
  misc_RNA (1)...(19): siRNA sense strand
aggaacaccaagagugaga

SEQ ID NO: 2412859 - RNA, 19 nt, Homo sapiens
  misc_RNA (1)...(19): siRNA sense strand
auauuagaggagacaguaa

SEQ ID NO: 2412860 - RNA, 19 nt, Homo sapiens
  misc_RNA (1)...(19): siRNA sense strand
aagaaauauuagaggagac

SEQ ID NO: 2412861 - RNA, 19 nt, Homo sapiens
  misc_RNA (1)...(19): siRNA sense strand
ccaacgaguacaagaucau

SEQ ID NO: 2412862 - RNA, 19 nt, Homo sapiens
  misc_RNA (1)...(19): siRNA sense strand
gaagaaugguacaagucca

SEQ ID NO: 2412863 - RNA, 19 nt, Homo sapiens
  misc_RNA (1)...(19): siRNA sense strand
ccgagaaaucaaauauaga

SEQ ID NO: 2412864 - RNA, 19 nt, Homo sapiens
  misc_RNA (1)...(19): siRNA sense strand
aagaggaggaggaggagga

SEQ ID NO: 2412865 - RNA, 19 nt, Homo sapiens
  misc_RNA (1)...(19): siRNA sense strand
uggacgugacuguggcuaa

SEQ ID NO: 2412866 - RNA, 19 nt, Homo sapiens
  misc_RNA (1)...(19): siRNA sense strand
aaauauuagaggagacagu

SEQ ID NO: 2412867 - RNA, 19 nt, Homo sapiens
  misc_RNA (1)...(19): siRNA sense strand
agauagcagcuuacaggaa

SEQ ID NO: 2412868 - RNA, 19 nt, Homo sapiens
  misc_RNA (1)...(19): siRNA sense strand
gaagaaauauuagaggaga

SEQ ID NO: 2412869 - RNA, 19 nt, Homo sapiens
  misc_RNA (1)...(19): siRNA sense strand
aagaaugguacaaguccaa

SEQ ID NO: 2412870 - RNA, 19 nt, Homo sapiens
  misc_RNA (1)...(19): siRNA sense strand
aggacuugcucaaugucaa

SEQ ID NO: 2412871 - RNA, 19 nt, Homo sapiens
  misc_RNA (1)...(19): siRNA sense strand
ugggcuaucacuuaagaaa

SEQ ID NO: 2412872 - RNA, 19 nt, Homo sapiens
  misc_RNA (1)...(19): siRNA sense strand
agaagaagguggagucgcu

SEQ ID NO: 2412873 - RNA, 19 nt, Homo sapiens
  misc_RNA (1)...(19): siRNA sense strand
agaaauauuagaggagaca

SEQ ID NO: 2412874 - RNA, 19 nt, Homo sapiens
  misc_RNA (1)...(19): siRNA sense strand
aagaaaaccgagaaaucaa

SEQ ID NO: 2412875 - RNA, 19 nt, Homo sapiens
  misc_RNA (1)...(19): siRNA sense strand
cuaagaaaaccgagaaauc

SEQ ID NO: 2412876 - RNA, 19 nt, Homo sapiens
  misc_RNA (1)...(19): siRNA sense strand
gcuccauggucaagcucau

SEQ ID NO: 2412877 - RNA, 19 nt, Homo sapiens
  misc_RNA (1)...(19): siRNA sense strand
uggucaagcucaucggcau

SEQ ID NO: 2412878 - RNA, 19 nt, Homo sapiens
  misc_RNA (1)...(19): siRNA sense strand
cuuuaaauaugaagcguga

SEQ ID NO: 2412879 - RNA, 19 nt, Homo sapiens
  misc_RNA (1)...(19): siRNA sense strand
uguuguagucagugggaau

SEQ ID NO: 2412880 - RNA, 19 nt, Homo sapiens
  misc_RNA (1)...(19): siRNA sense strand
cgugaaaaucaaaggagaa

SEQ ID NO: 2412881 - RNA, 19 nt, Homo sapiens
  misc_RNA (1)...(19): siRNA sense strand
ggaaagaggacacgcacga

SEQ ID NO: 2412882 - RNA, 19 nt, Homo sapiens
  misc_RNA (1)...(19): siRNA sense strand
ggugauggaaugugggcuu

SEQ ID NO: 2412883 - RNA, 19 nt, Homo sapiens
  misc_RNA (1)...(19): siRNA sense strand
caagaauugcacaggaaaa

SEQ ID NO: 2412884 - RNA, 19 nt, Homo sapiens
  misc_RNA (1)...(19): siRNA sense strand
guggaagagcaguugaaau

SEQ ID NO: 2412885 - RNA, 19 nt, Homo sapiens
  misc_RNA (1)...(19): siRNA sense strand
gggcauagcagauggcaug

SEQ ID NO: 2412886 - RNA, 19 nt, Homo sapiens
  misc_RNA (1)...(19): siRNA sense strand
gagaagugguuauggagcu

SEQ ID NO: 2412887 - RNA, 19 nt, Homo sapiens
  misc_RNA (1)...(19): siRNA sense strand
aaacaaaguugguggccug

SEQ ID NO: 2412888 - RNA, 19 nt, Homo sapiens
  misc_RNA (1)...(19): siRNA sense strand
ccggccaguuauugaacaa

SEQ ID NO: 2412889 - RNA, 19 nt, Homo sapiens
  misc_RNA (1)...(19): siRNA sense strand
gguaaugaaagcaugggau

SEQ ID NO: 2412890 - RNA, 19 nt, Homo sapiens
  misc_RNA (1)...(19): siRNA sense strand
gcagauggcauguugcaga

SEQ ID NO: 2412891 - RNA, 19 nt, Homo sapiens
  misc_RNA (1)...(19): siRNA sense strand
ccugcuugggugauagaua

SEQ ID NO: 2412892 - RNA, 19 nt, Homo sapiens
  misc_RNA (1)...(19): siRNA sense strand
ccgauugggcauagcagau

SEQ ID NO: 2412893 - RNA, 19 nt, Homo sapiens
  misc_RNA (1)...(19): siRNA sense strand
cagaacaugaugaugccua

SEQ ID NO: 2412894 - RNA, 19 nt, Homo sapiens
  misc_RNA (1)...(19): siRNA sense strand
guguggaagagcaguugaa

SEQ ID NO: 2412895 - RNA, 19 nt, Homo sapiens
  misc_RNA (1)...(19): siRNA sense strand
caaaucuggaaguguggaa

SEQ ID NO: 2412896 - RNA, 19 nt, Homo sapiens
  misc_RNA (1)...(19): siRNA sense strand
aagaaauggucaggagcca

SEQ ID NO: 2412897 - RNA, 19 nt, Homo sapiens
  misc_RNA (1)...(19): siRNA sense strand
acgugaaaaucaaaggaga

SEQ ID NO: 2412898 - RNA, 19 nt, Homo sapiens
  misc_RNA (1)...(19): siRNA sense strand
gaaggacgcugaugcgcua

SEQ ID NO: 2412899 - RNA, 19 nt, Homo sapiens
  misc_RNA (1)...(19): siRNA sense strand
cgugguugaagcagaaaga

SEQ ID NO: 2412900 - RNA, 19 nt, Homo sapiens
  misc_RNA (1)...(19): siRNA sense strand
gcuuccaggucaaggccua

SEQ ID NO: 2412901 - RNA, 19 nt, Homo sapiens
  misc_RNA (1)...(19): siRNA sense strand
aggcagccacugaggacaa

SEQ ID NO: 2412902 - RNA, 19 nt, Homo sapiens
  misc_RNA (1)...(19): siRNA sense strand
ccacaaaggcuacugcuga

SEQ ID NO: 2412903 - RNA, 19 nt, Homo sapiens
  misc_RNA (1)...(19): siRNA sense strand
gaggagagcagcugccaca

SEQ ID NO: 2412904 - RNA, 19 nt, Homo sapiens
  misc_RNA (1)...(19): siRNA sense strand
ucucagagcuguacccuca

SEQ ID NO: 2412905 - RNA, 19 nt, Homo sapiens
  misc_RNA (1)...(19): siRNA sense strand
aggucaaggccuacacuuu

SEQ ID NO: 2412906 - RNA, 19 nt, Homo sapiens
  misc_RNA (1)...(19): siRNA sense strand
gccaauucucagagcugua

SEQ ID NO: 2412907 - RNA, 19 nt, Homo sapiens
  misc_RNA (1)...(19): siRNA sense strand
ccacggaagaagaggaagu

SEQ ID NO: 2412908 - RNA, 19 nt, Homo sapiens
  misc_RNA (1)...(19): siRNA sense strand
gcaucuaccuacuuggaga

SEQ ID NO: 2412909 - RNA, 19 nt, Homo sapiens
  misc_RNA (1)...(19): siRNA sense strand
aaggaaaagacgaggugaa

SEQ ID NO: 2412910 - RNA, 19 nt, Homo sapiens
  misc_RNA (1)...(19): siRNA sense strand
gcaaauggugcaaggugga

SEQ ID NO: 2412911 - RNA, 19 nt, Homo sapiens
  misc_RNA (1)...(19): siRNA sense strand
acaucucacaggaaggaaa

SEQ ID NO: 2412912 - RNA, 19 nt, Homo sapiens
  misc_RNA (1)...(19): siRNA sense strand
aggaaaagacgaggugaaa

SEQ ID NO: 2412913 - RNA, 19 nt, Homo sapiens
  misc_RNA (1)...(19): siRNA sense strand
aagacgaggugaaacccaa

SEQ ID NO: 2412914 - RNA, 19 nt, Homo sapiens
  misc_RNA (1)...(19): siRNA sense strand
aagcucaaccacuggaaau

SEQ ID NO: 2412915 - RNA, 19 nt, Homo sapiens
  misc_RNA (1)...(19): siRNA sense strand
caucaaagaagacaggacu

SEQ ID NO: 2412916 - RNA, 19 nt, Homo sapiens
  misc_RNA (1)...(19): siRNA sense strand
cagaaagugaugcgcaaua

SEQ ID NO: 2412917 - RNA, 19 nt, Homo sapiens
  misc_RNA (1)...(19): siRNA sense strand
uccagaaagugaugcgcaa

SEQ ID NO: 2412918 - RNA, 19 nt, Homo sapiens
  misc_RNA (1)...(19): siRNA sense strand
aaaccagaggaguggcaua

SEQ ID NO: 2412919 - RNA, 19 nt, Homo sapiens
  misc_RNA (1)...(19): siRNA sense strand
gaagagaaugugcgggaca

SEQ ID NO: 2412920 - RNA, 19 nt, Homo sapiens
  misc_RNA (1)...(19): siRNA sense strand
cccaaagagccgcuggaaa

SEQ ID NO: 2412921 - RNA, 19 nt, Homo sapiens
  misc_RNA (1)...(19): siRNA sense strand
aggaagagaaugugcggga

SEQ ID NO: 2412922 - RNA, 19 nt, Homo sapiens
  misc_RNA (1)...(19): siRNA sense strand
agugaggagcccaggaaaa

SEQ ID NO: 2412923 - RNA, 19 nt, Homo sapiens
  misc_RNA (1)...(19): siRNA sense strand
ugcaggaucuccagggcaa

SEQ ID NO: 2412924 - RNA, 19 nt, Homo sapiens
  misc_RNA (1)...(19): siRNA sense strand
guguccgaacugugggaaa

SEQ ID NO: 2412925 - RNA, 19 nt, Homo sapiens
  misc_RNA (1)...(19): siRNA sense strand
gucaagagcuucacgcaga

SEQ ID NO: 2412926 - RNA, 19 nt, Homo sapiens
  misc_RNA (1)...(19): siRNA sense strand
uggaugaagaagugaccau

SEQ ID NO: 2412927 - RNA, 19 nt, Homo sapiens
  misc_RNA (1)...(19): siRNA sense strand
uggaaaacggcaaggccaa

SEQ ID NO: 2412928 - RNA, 19 nt, Homo sapiens
  misc_RNA (1)...(19): siRNA sense strand
ggauacaccugcagccgga

SEQ ID NO: 2412929 - RNA, 19 nt, Homo sapiens
  misc_RNA (1)...(19): siRNA sense strand
gggagaggagaaugagcca

SEQ ID NO: 2412930 - RNA, 19 nt, Homo sapiens
  misc_RNA (1)...(19): siRNA sense strand
gaaggaaacgugaggagcu

SEQ ID NO: 2412931 - RNA, 19 nt, Homo sapiens
  misc_RNA (1)...(19): siRNA sense strand
agacuggcuucuauggaga

SEQ ID NO: 2412932 - RNA, 19 nt, Homo sapiens
  misc_RNA (1)...(19): siRNA sense strand
agggacaaacauugagcuu

SEQ ID NO: 2412933 - RNA, 19 nt, Homo sapiens
  misc_RNA (1)...(19): siRNA sense strand
guaaaaggaaacuggacaa

SEQ ID NO: 2412934 - RNA, 19 nt, Homo sapiens
  misc_RNA (1)...(19): siRNA sense strand
caacaaacgagauggaggu

SEQ ID NO: 2412935 - RNA, 19 nt, Homo sapiens
  misc_RNA (1)...(19): siRNA sense strand
uagaaaugugguuagacaa

SEQ ID NO: 2412936 - RNA, 19 nt, Homo sapiens
  misc_RNA (1)...(19): siRNA sense strand
cguaaaaggaaacuggaca

SEQ ID NO: 2412937 - RNA, 19 nt, Homo sapiens
  misc_RNA (1)...(19): siRNA sense strand
ggacagagauggcugccca

SEQ ID NO: 2412938 - RNA, 19 nt, Homo sapiens
  misc_RNA (1)...(19): siRNA sense strand
caggagaaggacagagaug

SEQ ID NO: 2412939 - RNA, 19 nt, Homo sapiens
  misc_RNA (1)...(19): siRNA sense strand
aucggaagacugugugaaa

SEQ ID NO: 2412940 - RNA, 19 nt, Homo sapiens
  misc_RNA (1)...(19): siRNA sense strand
gccuauuauuguaaggagu

SEQ ID NO: 2412941 - RNA, 19 nt, Homo sapiens
  misc_RNA (1)...(19): siRNA sense strand
ccgcacaugcauuggguca

SEQ ID NO: 2412942 - RNA, 19 nt, Homo sapiens
  misc_RNA (1)...(19): siRNA sense strand
gcaucgaaauugagcucgu

SEQ ID NO: 2412943 - RNA, 19 nt, Homo sapiens
  misc_RNA (1)...(19): siRNA sense strand
agauagagcaagaaagcau

SEQ ID NO: 2412944 - RNA, 19 nt, Homo sapiens
  misc_RNA (1)...(19): siRNA sense strand
gguauaacuaauugggaca

SEQ ID NO: 2412945 - RNA, 19 nt, Homo sapiens
  misc_RNA (1)...(19): siRNA sense strand
aagaagaagaggaagauca

SEQ ID NO: 2412946 - RNA, 19 nt, Homo sapiens
  misc_RNA (1)...(19): siRNA sense strand
aggaagaucaggacuauua

SEQ ID NO: 2412947 - RNA, 19 nt, Homo sapiens
  misc_RNA (1)...(19): siRNA sense strand
guaaggaggacgaggagga

SEQ ID NO: 2412948 - RNA, 19 nt, Homo sapiens
  misc_RNA (1)...(19): siRNA sense strand
aagaggaagaucaggacua

SEQ ID NO: 2412949 - RNA, 19 nt, Homo sapiens
  misc_RNA (1)...(19): siRNA sense strand
ggacgaagaugaagagcug

SEQ ID NO: 2412950 - RNA, 19 nt, Homo sapiens
  misc_RNA (1)...(19): siRNA sense strand
aagcauacgaugaggacga

SEQ ID NO: 2412951 - RNA, 19 nt, Homo sapiens
  misc_RNA (1)...(19): siRNA sense strand
aggaagaagaagaagagga

SEQ ID NO: 2412952 - RNA, 19 nt, Homo sapiens
  misc_RNA (1)...(19): siRNA sense strand
ggaguaaugaucagggcau

SEQ ID NO: 2412953 - RNA, 19 nt, Homo sapiens
  misc_RNA (1)...(19): siRNA sense strand
cgaggaggaagaagaagaa

SEQ ID NO: 2412954 - RNA, 19 nt, Homo sapiens
  misc_RNA (1)...(19): siRNA sense strand
aggaggaagaagaagaaga

SEQ ID NO: 2412955 - RNA, 19 nt, Homo sapiens
  misc_RNA (1)...(19): siRNA sense strand
acgaagaugaagagcugua

SEQ ID NO: 2412956 - RNA, 19 nt, Homo sapiens
  misc_RNA (1)...(19): siRNA sense strand
gaauugaugucuaccgaga

SEQ ID NO: 2412957 - RNA, 19 nt, Homo sapiens
  misc_RNA (1)...(19): siRNA sense strand
acgaggaggaagaagaaga

SEQ ID NO: 2412958 - RNA, 19 nt, Homo sapiens
  misc_RNA (1)...(19): siRNA sense strand
ggaguaaggaggacgagga

SEQ ID NO: 2412959 - RNA, 19 nt, Homo sapiens
  misc_RNA (1)...(19): siRNA sense strand
augaaugggaggaggagga

SEQ ID NO: 2412960 - RNA, 19 nt, Homo sapiens
  misc_RNA (1)...(19): siRNA sense strand
cgagaauccaggagccaca

SEQ ID NO: 2412961 - RNA, 19 nt, Homo sapiens
  misc_RNA (1)...(19): siRNA sense strand
uggaggagguggugcagga

SEQ ID NO: 2412962 - RNA, 19 nt, Homo sapiens
  misc_RNA (1)...(19): siRNA sense strand
aggaaauaaaguuggaaac

SEQ ID NO: 2412963 - RNA, 19 nt, Homo sapiens
  misc_RNA (1)...(19): siRNA sense strand
ccaacuugcagcuggccaa

SEQ ID NO: 2412964 - RNA, 19 nt, Homo sapiens
  misc_RNA (1)...(19): siRNA sense strand
accagaacgaggaggaaga

SEQ ID NO: 2412965 - RNA, 19 nt, Homo sapiens
  misc_RNA (1)...(19): siRNA sense strand
gugccaucugcuuggauua

SEQ ID NO: 2412966 - RNA, 19 nt, Homo sapiens
  misc_RNA (1)...(19): siRNA sense strand
augaagagcuguauccuga

SEQ ID NO: 2412967 - RNA, 19 nt, Homo sapiens
  misc_RNA (1)...(19): siRNA sense strand
acgaggaggaccagaacga

SEQ ID NO: 2412968 - RNA, 19 nt, Homo sapiens
  misc_RNA (1)...(19): siRNA sense strand
ggaaacaacucugguggga

SEQ ID NO: 2412969 - RNA, 19 nt, Homo sapiens
  misc_RNA (1)...(19): siRNA sense strand
aggaggacgaggaggacca

SEQ ID NO: 2412970 - RNA, 19 nt, Homo sapiens
  misc_RNA (1)...(19): siRNA sense strand
aggacgaggaggaccagaa

SEQ ID NO: 2412971 - RNA, 19 nt, Homo sapiens
  misc_RNA (1)...(19): siRNA sense strand
ugugggacgaggaggaaga

SEQ ID NO: 2412972 - RNA, 19 nt, Homo sapiens
  misc_RNA (1)...(19): siRNA sense strand
cauacgaugaggacgaaga

SEQ ID NO: 2412973 - RNA, 19 nt, Homo sapiens
  misc_RNA (1)...(19): siRNA sense strand
aagaagaggaagaucagga

SEQ ID NO: 2412974 - RNA, 19 nt, Homo sapiens
  misc_RNA (1)...(19): siRNA sense strand
aagaugaaugggaggagga

SEQ ID NO: 2412975 - RNA, 19 nt, Homo sapiens
  misc_RNA (1)...(19): siRNA sense strand
gauaagagauggucaggga

SEQ ID NO: 2412976 - RNA, 19 nt, Homo sapiens
  misc_RNA (1)...(19): siRNA sense strand
acaaagacuacgaagagaa

SEQ ID NO: 2412977 - RNA, 19 nt, Homo sapiens
  misc_RNA (1)...(19): siRNA sense strand
agaacaaagacuacgaaga

SEQ ID NO: 2412978 - RNA, 19 nt, Homo sapiens
  misc_RNA (1)...(19): siRNA sense strand
caguaaagccaguagccau

SEQ ID NO: 2412979 - RNA, 19 nt, Homo sapiens
  misc_RNA (1)...(19): siRNA sense strand
ucuuaagagugaugacaga

SEQ ID NO: 2412980 - RNA, 19 nt, Homo sapiens
  misc_RNA (1)...(19): siRNA sense strand
guucacaguuuauggcgua

SEQ ID NO: 2412981 - RNA, 19 nt, Homo sapiens
  misc_RNA (1)...(19): siRNA sense strand
acagaagauaugagaagau

SEQ ID NO: 2412982 - RNA, 19 nt, Homo sapiens
  misc_RNA (1)...(19): siRNA sense strand
aguaugaggaggagaaaau

SEQ ID NO: 2412983 - RNA, 19 nt, Homo sapiens
  misc_RNA (1)...(19): siRNA sense strand
guuauauuccagaggcaau

SEQ ID NO: 2412984 - RNA, 19 nt, Homo sapiens
  misc_RNA (1)...(19): siRNA sense strand
uaagagauggucagggaau

SEQ ID NO: 2412985 - RNA, 19 nt, Homo sapiens
  misc_RNA (1)...(19): siRNA sense strand
cgaucacccuagauaacaa

SEQ ID NO: 2412986 - RNA, 19 nt, Homo sapiens
  misc_RNA (1)...(19): siRNA sense strand
aguaaagccaguagccauu

SEQ ID NO: 2412987 - RNA, 19 nt, Homo sapiens
  misc_RNA (1)...(19): siRNA sense strand
cugcugcuauccagagaaa

SEQ ID NO: 2412988 - RNA, 19 nt, Homo sapiens
  misc_RNA (1)...(19): siRNA sense strand
aagcagauccagagagaug

SEQ ID NO: 2412989 - RNA, 19 nt, Homo sapiens
  misc_RNA (1)...(19): siRNA sense strand
gcuggaauuaauagaccaa

SEQ ID NO: 2412990 - RNA, 19 nt, Homo sapiens
  misc_RNA (1)...(19): siRNA sense strand
cagaggaagaggaggccga

SEQ ID NO: 2412991 - RNA, 19 nt, Homo sapiens
  misc_RNA (1)...(19): siRNA sense strand
uguaagaagaaaucaccua

SEQ ID NO: 2412992 - RNA, 19 nt, Homo sapiens
  misc_RNA (1)...(19): siRNA sense strand
cuuaaauauuagucggaac

SEQ ID NO: 2412993 - RNA, 19 nt, Homo sapiens
  misc_RNA (1)...(19): siRNA sense strand
aaauaaggaccaagcagau

SEQ ID NO: 2412994 - RNA, 19 nt, Homo sapiens
  misc_RNA (1)...(19): siRNA sense strand
uuccauaacaggacagaau

SEQ ID NO: 2412995 - RNA, 19 nt, Homo sapiens
  misc_RNA (1)...(19): siRNA sense strand
ggccggaaacugagggagu

SEQ ID NO: 2412996 - RNA, 19 nt, Homo sapiens
  misc_RNA (1)...(19): siRNA sense strand
agacgaucacccuagauaa

SEQ ID NO: 2412997 - RNA, 19 nt, Homo sapiens
  misc_RNA (1)...(19): siRNA sense strand
acagaauucaagacagaga

SEQ ID NO: 2412998 - RNA, 19 nt, Homo sapiens
  misc_RNA (1)...(19): siRNA sense strand
agagagaagaagagcugga

SEQ ID NO: 2412999 - RNA, 19 nt, Homo sapiens
  misc_RNA (1)...(19): siRNA sense strand
uugagagaccuuaauguaa

SEQ ID NO: 2413000 - RNA, 19 nt, Homo sapiens
  misc_RNA (1)...(19): siRNA sense strand
ucuucgaguagcagagauu

SEQ ID NO: 2413001 - RNA, 19 nt, Homo sapiens
  misc_RNA (1)...(19): siRNA sense strand
cuauuaaguucaccugcaa

SEQ ID NO: 2413002 - RNA, 19 nt, Homo sapiens
  misc_RNA (1)...(19): siRNA sense strand
aagaaaucaccuaguacau

SEQ ID NO: 2413003 - RNA, 19 nt, Homo sapiens
  misc_RNA (1)...(19): siRNA sense strand
gauaggagaccguuggguu

SEQ ID NO: 2413004 - RNA, 19 nt, Homo sapiens
  misc_RNA (1)...(19): siRNA sense strand
ugcaguaugaggaggagaa

SEQ ID NO: 2413005 - RNA, 19 nt, Homo sapiens
  misc_RNA (1)...(19): siRNA sense strand
gugucagggcagaaaccaa

SEQ ID NO: 2413006 - RNA, 19 nt, Homo sapiens
  misc_RNA (1)...(19): siRNA sense strand
aaggcaaaguccacauauu

SEQ ID NO: 2413007 - RNA, 19 nt, Homo sapiens
  misc_RNA (1)...(19): siRNA sense strand
ccuggaacuucaucagaga

SEQ ID NO: 2413008 - RNA, 19 nt, Homo sapiens
  misc_RNA (1)...(19): siRNA sense strand
aauucaagacagagagaag

SEQ ID NO: 2413009 - RNA, 19 nt, Homo sapiens
  misc_RNA (1)...(19): siRNA sense strand
guguaauuugccauugaaa

SEQ ID NO: 2413010 - RNA, 19 nt, Homo sapiens
  misc_RNA (1)...(19): siRNA sense strand
aacaaacggcggaguggaa

SEQ ID NO: 2413011 - RNA, 19 nt, Homo sapiens
  misc_RNA (1)...(19): siRNA sense strand
gcaguaugaggaggagaaa

SEQ ID NO: 2413012 - RNA, 19 nt, Homo sapiens
  misc_RNA (1)...(19): siRNA sense strand
auaggagaccguuggguuu

SEQ ID NO: 2413013 - RNA, 19 nt, Homo sapiens
  misc_RNA (1)...(19): siRNA sense strand
caugaagaacuguacucaa

SEQ ID NO: 2413014 - RNA, 19 nt, Homo sapiens
  misc_RNA (1)...(19): siRNA sense strand
uggaauuaauagaccaacu

SEQ ID NO: 2413015 - RNA, 19 nt, Homo sapiens
  misc_RNA (1)...(19): siRNA sense strand
aaauauuagucggaaccaa

SEQ ID NO: 2413016 - RNA, 19 nt, Homo sapiens
  misc_RNA (1)...(19): siRNA sense strand
gcagagauuacuaaagaac

SEQ ID NO: 2413017 - RNA, 19 nt, Homo sapiens
  misc_RNA (1)...(19): siRNA sense strand
ggagaaacauuuaggucga

SEQ ID NO: 2413018 - RNA, 19 nt, Homo sapiens
  misc_RNA (1)...(19): siRNA sense strand
ugccaguaaaggaggauua

SEQ ID NO: 2413019 - RNA, 19 nt, Homo sapiens
  misc_RNA (1)...(19): siRNA sense strand
ugguaaaugcagcugguau

SEQ ID NO: 2413020 - RNA, 19 nt, Homo sapiens
  misc_RNA (1)...(19): siRNA sense strand
aggaggauuaguuggauuu

SEQ ID NO: 2413021 - RNA, 19 nt, Homo sapiens
  misc_RNA (1)...(19): siRNA sense strand
agacuugaaagaagaacau

SEQ ID NO: 2413022 - RNA, 19 nt, Homo sapiens
  misc_RNA (1)...(19): siRNA sense strand
cugugauguugcuaaagaa

SEQ ID NO: 2413023 - RNA, 19 nt, Homo sapiens
  misc_RNA (1)...(19): siRNA sense strand
acagauaugacgaaagacu

SEQ ID NO: 2413024 - RNA, 19 nt, Homo sapiens
  misc_RNA (1)...(19): siRNA sense strand
uggagaaacuauugaggug

SEQ ID NO: 2413025 - RNA, 19 nt, Homo sapiens
  misc_RNA (1)...(19): siRNA sense strand
gaauguaguugcaccagga

SEQ ID NO: 2413026 - RNA, 19 nt, Homo sapiens
  misc_RNA (1)...(19): siRNA sense strand
gggaaggggcagagcagaa

SEQ ID NO: 2413027 - RNA, 19 nt, Homo sapiens
  misc_RNA (1)...(19): siRNA sense strand
gggcagagcagaagguggu

SEQ ID NO: 2413028 - RNA, 19 nt, Homo sapiens
  misc_RNA (1)...(19): siRNA sense strand
ccucaucauuugugugcca

SEQ ID NO: 2413029 - RNA, 19 nt, Homo sapiens
  misc_RNA (1)...(19): siRNA sense strand
agauguacaacgacccaaa

SEQ ID NO: 2413030 - RNA, 19 nt, Homo sapiens
  misc_RNA (1)...(19): siRNA sense strand
uggcaacaucuuugaggau

SEQ ID NO: 2413031 - RNA, 19 nt, Homo sapiens
  misc_RNA (1)...(19): siRNA sense strand
gcucaauccugauggaguc

SEQ ID NO: 2413032 - RNA, 19 nt, Homo sapiens
  misc_RNA (1)...(19): siRNA sense strand
agagaggagccaagugcaa

SEQ ID NO: 2413033 - RNA, 19 nt, Homo sapiens
  misc_RNA (1)...(19): siRNA sense strand
gaaaguagcagcuggccuu

SEQ ID NO: 2413034 - RNA, 19 nt, Homo sapiens
  misc_RNA (1)...(19): siRNA sense strand
gugacuuucucaaggguga

SEQ ID NO: 2413035 - RNA, 19 nt, Homo sapiens
  misc_RNA (1)...(19): siRNA sense strand
gaguuaaagaagcagguca

SEQ ID NO: 2413036 - RNA, 19 nt, Homo sapiens
  misc_RNA (1)...(19): siRNA sense strand
gcuauaagaagacaggaga

SEQ ID NO: 2413037 - RNA, 19 nt, Homo sapiens
  misc_RNA (1)...(19): siRNA sense strand
aggaggaugaggauggcua

SEQ ID NO: 2413038 - RNA, 19 nt, Homo sapiens
  misc_RNA (1)...(19): siRNA sense strand
cggcugaggcagaaaguag

SEQ ID NO: 2413039 - RNA, 19 nt, Homo sapiens
  misc_RNA (1)...(19): siRNA sense strand
agguacuacuggaacaaaa

SEQ ID NO: 2413040 - RNA, 19 nt, Homo sapiens
  misc_RNA (1)...(19): siRNA sense strand
augagguacuacuggaaca

SEQ ID NO: 2413041 - RNA, 19 nt, Homo sapiens
  misc_RNA (1)...(19): siRNA sense strand
ggaaucacaaugagccaca

SEQ ID NO: 2413042 - RNA, 19 nt, Homo sapiens
  misc_RNA (1)...(19): siRNA sense strand
ccauaguaacagugaguca

SEQ ID NO: 2413043 - RNA, 19 nt, Homo sapiens
  misc_RNA (1)...(19): siRNA sense strand
aguccaaaguacaaccaaa

SEQ ID NO: 2413044 - RNA, 19 nt, Homo sapiens
  misc_RNA (1)...(19): siRNA sense strand
ggaaaauggcagauguauu

SEQ ID NO: 2413045 - RNA, 19 nt, Homo sapiens
  misc_RNA (1)...(19): siRNA sense strand
ggaauuagacuaccggcaa

SEQ ID NO: 2413046 - RNA, 19 nt, Homo sapiens
  misc_RNA (1)...(19): siRNA sense strand
ggaaccuaacauagcaaua

SEQ ID NO: 2413047 - RNA, 19 nt, Homo sapiens
  misc_RNA (1)...(19): siRNA sense strand
caaacauguggcaaggaua

SEQ ID NO: 2413048 - RNA, 19 nt, Homo sapiens
  misc_RNA (1)...(19): siRNA sense strand
gaagaagauuguuagcaca

SEQ ID NO: 2413049 - RNA, 19 nt, Homo sapiens
  misc_RNA (1)...(19): siRNA sense strand
ccuagaugccagugaagau

SEQ ID NO: 2413050 - RNA, 19 nt, Homo sapiens
  misc_RNA (1)...(19): siRNA sense strand
agacuaccggcaagagaaa

SEQ ID NO: 2413051 - RNA, 19 nt, Homo sapiens
  misc_RNA (1)...(19): siRNA sense strand
ccauuauccucaucagcaa

SEQ ID NO: 2413052 - RNA, 19 nt, Homo sapiens
  misc_RNA (1)...(19): siRNA sense strand
cuuccaaaguguugauguu

SEQ ID NO: 2413053 - RNA, 19 nt, Homo sapiens
  misc_RNA (1)...(19): siRNA sense strand
cugaaagugacaaugcaaa

SEQ ID NO: 2413054 - RNA, 19 nt, Homo sapiens
  misc_RNA (1)...(19): siRNA sense strand
ucaccaggaaagucagaaa

SEQ ID NO: 2413055 - RNA, 19 nt, Homo sapiens
  misc_RNA (1)...(19): siRNA sense strand
aagaauaaccagaaccuga

SEQ ID NO: 2413056 - RNA, 19 nt, Homo sapiens
  misc_RNA (1)...(19): siRNA sense strand
cuacacagggauugcaaau

SEQ ID NO: 2413057 - RNA, 19 nt, Homo sapiens
  misc_RNA (1)...(19): siRNA sense strand
caagcaaaacugaugaaaa

SEQ ID NO: 2413058 - RNA, 19 nt, Homo sapiens
  misc_RNA (1)...(19): siRNA sense strand
acaugaacgcuuuaggcua

SEQ ID NO: 2413059 - RNA, 19 nt, Homo sapiens
  misc_RNA (1)...(19): siRNA sense strand
caaaagucuuccagaguga

SEQ ID NO: 2413060 - RNA, 19 nt, Homo sapiens
  misc_RNA (1)...(19): siRNA sense strand
cagaaaggagcuagcaguu

SEQ ID NO: 2413061 - RNA, 19 nt, Homo sapiens
  misc_RNA (1)...(19): siRNA sense strand
aagaaaguugccauaguaa

SEQ ID NO: 2413062 - RNA, 19 nt, Homo sapiens
  misc_RNA (1)...(19): siRNA sense strand
auuccuugucuuuggguaa

SEQ ID NO: 2413063 - RNA, 19 nt, Homo sapiens
  misc_RNA (1)...(19): siRNA sense strand
agacaagggcacugaugga

SEQ ID NO: 2413064 - RNA, 19 nt, Homo sapiens
  misc_RNA (1)...(19): siRNA sense strand
gcuuuaggcuacuggaaac

SEQ ID NO: 2413065 - RNA, 19 nt, Homo sapiens
  misc_RNA (1)...(19): siRNA sense strand
agugacaaugcaaaggaaa

SEQ ID NO: 2413066 - RNA, 19 nt, Homo sapiens
  misc_RNA (1)...(19): siRNA sense strand
uagcaauacagucagcaaa

SEQ ID NO: 2413067 - RNA, 19 nt, Homo sapiens
  misc_RNA (1)...(19): siRNA sense strand
augcuucaccugaggcaaa

SEQ ID NO: 2413068 - RNA, 19 nt, Homo sapiens
  misc_RNA (1)...(19): siRNA sense strand
ggaauuugucagcgaagga

SEQ ID NO: 2413069 - RNA, 19 nt, Homo sapiens
  misc_RNA (1)...(19): siRNA sense strand
ccucuuuguguuuggaauu

SEQ ID NO: 2413070 - RNA, 19 nt, Homo sapiens
  misc_RNA (1)...(19): siRNA sense strand
cagaagaguggaaaggacu

SEQ ID NO: 2413071 - RNA, 19 nt, Homo sapiens
  misc_RNA (1)...(19): siRNA sense strand
gagauguacaauugcuaau

SEQ ID NO: 2413072 - RNA, 19 nt, Homo sapiens
  misc_RNA (1)...(19): siRNA sense strand
ccaauaaauuaacugcuga

SEQ ID NO: 2413073 - RNA, 19 nt, Homo sapiens
  misc_RNA (1)...(19): siRNA sense strand
gcagaaaggagcuagcagu

SEQ ID NO: 2413074 - RNA, 19 nt, Homo sapiens
  misc_RNA (1)...(19): siRNA sense strand
auacaaauguggauggccu

SEQ ID NO: 2413075 - RNA, 19 nt, Homo sapiens
  misc_RNA (1)...(19): siRNA sense strand
gcuaucgucuauugggaga

SEQ ID NO: 2413076 - RNA, 19 nt, Homo sapiens
  misc_RNA (1)...(19): siRNA sense strand
ggaagaauaaccagaaccu

SEQ ID NO: 2413077 - RNA, 19 nt, Homo sapiens
  misc_RNA (1)...(19): siRNA sense strand
aaugguggaaccugggaaa

SEQ ID NO: 2413078 - RNA, 19 nt, Homo sapiens
  misc_RNA (1)...(19): siRNA sense strand
gggaauuagacuaccggca

SEQ ID NO: 2413079 - RNA, 19 nt, Homo sapiens
  misc_RNA (1)...(19): siRNA sense strand
ucagauugucaccaggaaa

SEQ ID NO: 2413080 - RNA, 19 nt, Homo sapiens
  misc_RNA (1)...(19): siRNA sense strand
cgcuuuaggcuacuggaaa

SEQ ID NO: 2413081 - RNA, 19 nt, Homo sapiens
  misc_RNA (1)...(19): siRNA sense strand
aauuaacugcugagaacau

SEQ ID NO: 2413082 - RNA, 19 nt, Homo sapiens
  misc_RNA (1)...(19): siRNA sense strand
ggacugggcaucuggagga

SEQ ID NO: 2413083 - RNA, 19 nt, Homo sapiens
  misc_RNA (1)...(19): siRNA sense strand
gccugugucuauuggaauu

SEQ ID NO: 2413084 - RNA, 19 nt, Homo sapiens
  misc_RNA (1)...(19): siRNA sense strand
aagaagauuguuagcacau

SEQ ID NO: 2413085 - RNA, 19 nt, Homo sapiens
  misc_RNA (1)...(19): siRNA sense strand
auggagagauagaauuaca

SEQ ID NO: 2413086 - RNA, 19 nt, Homo sapiens
  misc_RNA (1)...(19): siRNA sense strand
agcaauacagucagcaaau

SEQ ID NO: 2413087 - RNA, 19 nt, Homo sapiens
  misc_RNA (1)...(19): siRNA sense strand
caggauccaaagaggaaaa

SEQ ID NO: 2413088 - RNA, 19 nt, Homo sapiens
  misc_RNA (1)...(19): siRNA sense strand
uggcaauuccagaacccaa

SEQ ID NO: 2413089 - RNA, 19 nt, Homo sapiens
  misc_RNA (1)...(19): siRNA sense strand
ugaagaagauuguuagcac

SEQ ID NO: 2413090 - RNA, 19 nt, Homo sapiens
  misc_RNA (1)...(19): siRNA sense strand
gcacauuaucuguugcagu

SEQ ID NO: 2413091 - RNA, 19 nt, Homo sapiens
  misc_RNA (1)...(19): siRNA sense strand
gugacaaugcaaaggaaag

SEQ ID NO: 2413092 - RNA, 19 nt, Homo sapiens
  misc_RNA (1)...(19): siRNA sense strand
agauaaaacaggagagaca

SEQ ID NO: 2413093 - RNA, 19 nt, Homo sapiens
  misc_RNA (1)...(19): siRNA sense strand
ccuucaugguggagagaga

SEQ ID NO: 2413094 - RNA, 19 nt, Homo sapiens
  misc_RNA (1)...(19): siRNA sense strand
gggagaaccuucagccaga

SEQ ID NO: 2413095 - RNA, 19 nt, Homo sapiens
  misc_RNA (1)...(19): siRNA sense strand
aggugaugcuggagaacuu

SEQ ID NO: 2413096 - RNA, 19 nt, Homo sapiens
  misc_RNA (1)...(19): siRNA sense strand
uggaagagccuuuggucau

SEQ ID NO: 2413097 - RNA, 19 nt, Homo sapiens
  misc_RNA (1)...(19): siRNA sense strand
aggucuaaauccaaggaau

SEQ ID NO: 2413098 - RNA, 19 nt, Homo sapiens
  misc_RNA (1)...(19): siRNA sense strand
aguuagagaugcagcagau

SEQ ID NO: 2413099 - RNA, 19 nt, Homo sapiens
  misc_RNA (1)...(19): siRNA sense strand
agguaguaucaguggaaaa

SEQ ID NO: 2413100 - RNA, 19 nt, Homo sapiens
  misc_RNA (1)...(19): siRNA sense strand
gauacagaauucaggcaga

SEQ ID NO: 2413101 - RNA, 19 nt, Homo sapiens
  misc_RNA (1)...(19): siRNA sense strand
auguaauaaaugugggaga

SEQ ID NO: 2413102 - RNA, 19 nt, Homo sapiens
  misc_RNA (1)...(19): siRNA sense strand
aagauguggcuguggaauu

SEQ ID NO: 2413103 - RNA, 19 nt, Homo sapiens
  misc_RNA (1)...(19): siRNA sense strand
cccuaugaaugcagugaau

SEQ ID NO: 2413104 - RNA, 19 nt, Homo sapiens
  misc_RNA (1)...(19): siRNA sense strand
gggagagccuucagccaga

SEQ ID NO: 2413105 - RNA, 19 nt, Homo sapiens
  misc_RNA (1)...(19): siRNA sense strand
gggagagccuucagccaga

SEQ ID NO: 2413106 - RNA, 19 nt, Homo sapiens
  misc_RNA (1)...(19): siRNA sense strand
augcagugaaugugggaga

SEQ ID NO: 2413107 - RNA, 19 nt, Homo sapiens
  misc_RNA (1)...(19): siRNA sense strand
auggaauggauuugggaga

SEQ ID NO: 2413108 - RNA, 19 nt, Homo sapiens
  misc_RNA (1)...(19): siRNA sense strand
aggagagacaccugaaaca

SEQ ID NO: 2413109 - RNA, 19 nt, Homo sapiens
  misc_RNA (1)...(19): siRNA sense strand
ccguaugaaugcagugacu

SEQ ID NO: 2413110 - RNA, 19 nt, Homo sapiens
  misc_RNA (1)...(19): siRNA sense strand
gaauucagccagugggagu

SEQ ID NO: 2413111 - RNA, 19 nt, Homo sapiens
  misc_RNA (1)...(19): siRNA sense strand
aaauguaaugaguguggaa

SEQ ID NO: 2413112 - RNA, 19 nt, Homo sapiens
  misc_RNA (1)...(19): siRNA sense strand
cccuaugaaugccgggaau

SEQ ID NO: 2413113 - RNA, 19 nt, Homo sapiens
  misc_RNA (1)...(19): siRNA sense strand
agaaggaccucuacaggga

SEQ ID NO: 2413114 - RNA, 19 nt, Homo sapiens
  misc_RNA (1)...(19): siRNA sense strand
cuaugaaugcagugaaugu

SEQ ID NO: 2413115 - RNA, 19 nt, Homo sapiens
  misc_RNA (1)...(19): siRNA sense strand
cacucagacuggaagagaa

SEQ ID NO: 2413116 - RNA, 19 nt, Homo sapiens
  misc_RNA (1)...(19): siRNA sense strand
ccuuauuaaacaucagaga

SEQ ID NO: 2413117 - RNA, 19 nt, Homo sapiens
  misc_RNA (1)...(19): siRNA sense strand
gcgaugucacacuggagaa

SEQ ID NO: 2413118 - RNA, 19 nt, Homo sapiens
  misc_RNA (1)...(19): siRNA sense strand
guggaagagccuuugguca

SEQ ID NO: 2413119 - RNA, 19 nt, Homo sapiens
  misc_RNA (1)...(19): siRNA sense strand
uggauuugggagaagcuua

SEQ ID NO: 2413120 - RNA, 19 nt, Homo sapiens
  misc_RNA (1)...(19): siRNA sense strand
cgaugucacacuggagaaa

SEQ ID NO: 2413121 - RNA, 19 nt, Homo sapiens
  misc_RNA (1)...(19): siRNA sense strand
auguaaugaauguggacga

SEQ ID NO: 2413122 - RNA, 19 nt, Homo sapiens
  misc_RNA (1)...(19): siRNA sense strand
gacuggaagagaaggucua

SEQ ID NO: 2413123 - RNA, 19 nt, Homo sapiens
  misc_RNA (1)...(19): siRNA sense strand
aagaacucauacuggagaa

SEQ ID NO: 2413124 - RNA, 19 nt, Homo sapiens
  misc_RNA (1)...(19): siRNA sense strand
ugugauggccaguuagaga

SEQ ID NO: 2413125 - RNA, 19 nt, Homo sapiens
  misc_RNA (1)...(19): siRNA sense strand
ucaaagaacucauacugga

SEQ ID NO: 2413126 - RNA, 19 nt, Homo sapiens
  misc_RNA (1)...(19): siRNA sense strand
ccuuagcagagauuauaaa

SEQ ID NO: 2413127 - RNA, 19 nt, Homo sapiens
  misc_RNA (1)...(19): siRNA sense strand
ugaauguggacgagccuuu

SEQ ID NO: 2413128 - RNA, 19 nt, Homo sapiens
  misc_RNA (1)...(19): siRNA sense strand
ucagagaagucaugcugga

SEQ ID NO: 2413129 - RNA, 19 nt, Homo sapiens
  misc_RNA (1)...(19): siRNA sense strand
ggugcaggguagagggauu

SEQ ID NO: 2413130 - RNA, 19 nt, Homo sapiens
  misc_RNA (1)...(19): siRNA sense strand
ggaacaaccuggagcgucu

SEQ ID NO: 2413131 - RNA, 19 nt, Homo sapiens
  misc_RNA (1)...(19): siRNA sense strand
uugcaauggcggaggcaga

SEQ ID NO: 2413132 - RNA, 19 nt, Homo sapiens
  misc_RNA (1)...(19): siRNA sense strand
ggguagagggauuaugaca

SEQ ID NO: 2413133 - RNA, 19 nt, Homo sapiens
  misc_RNA (1)...(19): siRNA sense strand
ccuggagggccuagaccua

SEQ ID NO: 2413134 - RNA, 19 nt, Homo sapiens
  misc_RNA (1)...(19): siRNA sense strand
aggaagggccucaggagca

SEQ ID NO: 2413135 - RNA, 19 nt, Homo sapiens
  misc_RNA (1)...(19): siRNA sense strand
gugugaagcuggcagggca

SEQ ID NO: 2413136 - RNA, 19 nt, Homo sapiens
  misc_RNA (1)...(19): siRNA sense strand
aggagggccugguggagau

SEQ ID NO: 2413137 - RNA, 19 nt, Homo sapiens
  misc_RNA (1)...(19): siRNA sense strand
uggaguuguaccuggagaa

SEQ ID NO: 2413138 - RNA, 19 nt, Homo sapiens
  misc_RNA (1)...(19): siRNA sense strand
aggagcagccagaggagga

SEQ ID NO: 2413139 - RNA, 19 nt, Homo sapiens
  misc_RNA (1)...(19): siRNA sense strand
acgccacggucuacgggaa

SEQ ID NO: 2413140 - RNA, 19 nt, Homo sapiens
  misc_RNA (1)...(19): siRNA sense strand
acaucgaggcggugagcaa

SEQ ID NO: 2413141 - RNA, 19 nt, Homo sapiens
  misc_RNA (1)...(19): siRNA sense strand
uggcaaugguggaggugca

SEQ ID NO: 2413142 - RNA, 19 nt, Homo sapiens
  misc_RNA (1)...(19): siRNA sense strand
cggugagcaacgugcacaa

SEQ ID NO: 2413143 - RNA, 19 nt, Homo sapiens
  misc_RNA (1)...(19): siRNA sense strand
gccauaagacugaccgaca

SEQ ID NO: 2413144 - RNA, 19 nt, Homo sapiens
  misc_RNA (1)...(19): siRNA sense strand
gcaccugcauccugcccaa

SEQ ID NO: 2413145 - RNA, 19 nt, Homo sapiens
  misc_RNA (1)...(19): siRNA sense strand
gcaagaagacagcuguaua

SEQ ID NO: 2413146 - RNA, 19 nt, Homo sapiens
  misc_RNA (1)...(19): siRNA sense strand
ccacagagcuggcuagcau

SEQ ID NO: 2413147 - RNA, 19 nt, Homo sapiens
  misc_RNA (1)...(19): siRNA sense strand
gagaguaaccucaucauua

SEQ ID NO: 2413148 - RNA, 19 nt, Homo sapiens
  misc_RNA (1)...(19): siRNA sense strand
cggcccaggugaagaaaga

SEQ ID NO: 2413149 - RNA, 19 nt, Homo sapiens
  misc_RNA (1)...(19): siRNA sense strand
ggugaagaaagaaccgaaa

SEQ ID NO: 2413150 - RNA, 19 nt, Homo sapiens
  misc_RNA (1)...(19): siRNA sense strand
gagcagacugagcgggauu

SEQ ID NO: 2413151 - RNA, 19 nt, Homo sapiens
  misc_RNA (1)...(19): siRNA sense strand
gggaaacgcaaaaggcaua

SEQ ID NO: 2413152 - RNA, 19 nt, Homo sapiens
  misc_RNA (1)...(19): siRNA sense strand
caucauuacauaugcggua

SEQ ID NO: 2413153 - RNA, 19 nt, Homo sapiens
  misc_RNA (1)...(19): siRNA sense strand
ucacaaagugccaaccaua

SEQ ID NO: 2413154 - RNA, 19 nt, Homo sapiens
  misc_RNA (1)...(19): siRNA sense strand
caagaagacagcuguauau

SEQ ID NO: 2413155 - RNA, 19 nt, Homo sapiens
  misc_RNA (1)...(19): siRNA sense strand
ugaacaugcucgugaccau

SEQ ID NO: 2413156 - RNA, 19 nt, Homo sapiens
  misc_RNA (1)...(19): siRNA sense strand
gcaccuacaccuugggcuu

SEQ ID NO: 2413157 - RNA, 19 nt, Homo sapiens
  misc_RNA (1)...(19): siRNA sense strand
ccucaauagcucuacagua

SEQ ID NO: 2413158 - RNA, 19 nt, Homo sapiens
  misc_RNA (1)...(19): siRNA sense strand
agggacaaaucgugggcca

SEQ ID NO: 2413159 - RNA, 19 nt, Homo sapiens
  misc_RNA (1)...(19): siRNA sense strand
uggcccucauggagaguaa

SEQ ID NO: 2413160 - RNA, 19 nt, Homo sapiens
  misc_RNA (1)...(19): siRNA sense strand
agaucuaccuauuggaugu

SEQ ID NO: 2413161 - RNA, 19 nt, Homo sapiens
  misc_RNA (1)...(19): siRNA sense strand
gggacaaaucgugggccaa

SEQ ID NO: 2413162 - RNA, 19 nt, Homo sapiens
  misc_RNA (1)...(19): siRNA sense strand
ggucauugucuguaucuau

SEQ ID NO: 2413163 - RNA, 19 nt, Homo sapiens
  misc_RNA (1)...(19): siRNA sense strand
gaagacagcuguauauguu

SEQ ID NO: 2413164 - RNA, 19 nt, Homo sapiens
  misc_RNA (1)...(19): siRNA sense strand
ucacacagggaaacgcaaa

SEQ ID NO: 2413165 - RNA, 19 nt, Homo sapiens
  misc_RNA (1)...(19): siRNA sense strand
guuucuuccuucagaucua

SEQ ID NO: 2413166 - RNA, 19 nt, Homo sapiens
  misc_RNA (1)...(19): siRNA sense strand
gcccauacaucaaacuuau

SEQ ID NO: 2413167 - RNA, 19 nt, Homo sapiens
  misc_RNA (1)...(19): siRNA sense strand
gugcgggagcagagagaac

SEQ ID NO: 2413168 - RNA, 19 nt, Homo sapiens
  misc_RNA (1)...(19): siRNA sense strand
aggugaagaaagaaccgaa

SEQ ID NO: 2413169 - RNA, 19 nt, Homo sapiens
  misc_RNA (1)...(19): siRNA sense strand
gcagagagaacccuaugaa

SEQ ID NO: 2413170 - RNA, 19 nt, Homo sapiens
  misc_RNA (1)...(19): siRNA sense strand
uggcaagaagacagcugua

SEQ ID NO: 2413171 - RNA, 19 nt, Homo sapiens
  misc_RNA (1)...(19): siRNA sense strand
gugaagaaguacugggcca

SEQ ID NO: 2413172 - RNA, 19 nt, Homo sapiens
  misc_RNA (1)...(19): siRNA sense strand
gggacaaggacauggcaca

SEQ ID NO: 2413173 - RNA, 19 nt, Homo sapiens
  misc_RNA (1)...(19): siRNA sense strand
ugcaagaaauagugcgguu

SEQ ID NO: 2413174 - RNA, 19 nt, Homo sapiens
  misc_RNA (1)...(19): siRNA sense strand
caaagaugcuucauggcca

SEQ ID NO: 2413175 - RNA, 19 nt, Homo sapiens
  misc_RNA (1)...(19): siRNA sense strand
ccgggaaggaggaacucaa

SEQ ID NO: 2413176 - RNA, 19 nt, Homo sapiens
  misc_RNA (1)...(19): siRNA sense strand
guguaaugguguuggcuug

SEQ ID NO: 2413177 - RNA, 19 nt, Homo sapiens
  misc_RNA (1)...(19): siRNA sense strand
ucaauaagcccuacggucu

SEQ ID NO: 2413178 - RNA, 19 nt, Homo sapiens
  misc_RNA (1)...(19): siRNA sense strand
acaaguacucagacuggaa

SEQ ID NO: 2413179 - RNA, 19 nt, Homo sapiens
  misc_RNA (1)...(19): siRNA sense strand
agaaggaggcgcaaggcca

SEQ ID NO: 2413180 - RNA, 19 nt, Homo sapiens
  misc_RNA (1)...(19): siRNA sense strand
acacaaagaaggagccggu

SEQ ID NO: 2413181 - RNA, 19 nt, Homo sapiens
  misc_RNA (1)...(19): siRNA sense strand
gguccgggaaggaggaacu

SEQ ID NO: 2413182 - RNA, 19 nt, Homo sapiens
  misc_RNA (1)...(19): siRNA sense strand
aggaucaaaaugagaacaa

SEQ ID NO: 2413183 - RNA, 19 nt, Homo sapiens
  misc_RNA (1)...(19): siRNA sense strand
agaucaaguccauggagaa

SEQ ID NO: 2413184 - RNA, 19 nt, Homo sapiens
  misc_RNA (1)...(19): siRNA sense strand
gccagaagguggugcgcuu

SEQ ID NO: 2413185 - RNA, 19 nt, Homo sapiens
  misc_RNA (1)...(19): siRNA sense strand
uggacgaccgggagcgaaa

SEQ ID NO: 2413186 - RNA, 19 nt, Homo sapiens
  misc_RNA (1)...(19): siRNA sense strand
cgaaggacagggaggccaa

SEQ ID NO: 2413187 - RNA, 19 nt, Homo sapiens
  misc_RNA (1)...(19): siRNA sense strand
acaaagagucagauggagu

SEQ ID NO: 2413188 - RNA, 19 nt, Homo sapiens
  misc_RNA (1)...(19): siRNA sense strand
cgucauucuggaagaucaa

SEQ ID NO: 2413189 - RNA, 19 nt, Homo sapiens
  misc_RNA (1)...(19): siRNA sense strand
cagaucaaguccauggaga

SEQ ID NO: 2413190 - RNA, 19 nt, Homo sapiens
  misc_RNA (1)...(19): siRNA sense strand
ccaggaagaucaugcagga

SEQ ID NO: 2413191 - RNA, 19 nt, Homo sapiens
  misc_RNA (1)...(19): siRNA sense strand
aggaagaucaugcaggaca

SEQ ID NO: 2413192 - RNA, 19 nt, Homo sapiens
  misc_RNA (1)...(19): siRNA sense strand
ccugggaaacaaagaguca

SEQ ID NO: 2413193 - RNA, 19 nt, Homo sapiens
  misc_RNA (1)...(19): siRNA sense strand
ccaccaggaaggaggagga

SEQ ID NO: 2413194 - RNA, 19 nt, Homo sapiens
  misc_RNA (1)...(19): siRNA sense strand
ucaugcaggacaaggagaa

SEQ ID NO: 2413195 - RNA, 19 nt, Homo sapiens
  misc_RNA (1)...(19): siRNA sense strand
ugggaaacaaagagucaga

SEQ ID NO: 2413196 - RNA, 19 nt, Homo sapiens
  misc_RNA (1)...(19): siRNA sense strand
gauuugauuuucuggacaa

SEQ ID NO: 2413197 - RNA, 19 nt, Homo sapiens
  misc_RNA (1)...(19): siRNA sense strand
gugaaauuuuggaggucaa

SEQ ID NO: 2413198 - RNA, 19 nt, Homo sapiens
  misc_RNA (1)...(19): siRNA sense strand
uagcagagucccaggcaga

SEQ ID NO: 2413199 - RNA, 19 nt, Homo sapiens
  misc_RNA (1)...(19): siRNA sense strand
uuaaacaagaagagcccaa

SEQ ID NO: 2413200 - RNA, 19 nt, Homo sapiens
  misc_RNA (1)...(19): siRNA sense strand
gggaagaguuucggccaga

SEQ ID NO: 2413201 - RNA, 19 nt, Homo sapiens
  misc_RNA (1)...(19): siRNA sense strand
gcugcaaucugcugcgaca

SEQ ID NO: 2413202 - RNA, 19 nt, Homo sapiens
  misc_RNA (1)...(19): siRNA sense strand
ucaaaguggcugagggcgu

SEQ ID NO: 2413203 - RNA, 19 nt, Homo sapiens
  misc_RNA (1)...(19): siRNA sense strand
ccuuugaggaugugccaga

SEQ ID NO: 2413204 - RNA, 19 nt, Homo sapiens
  misc_RNA (1)...(19): siRNA sense strand
gaggaaaaggggugugcuu

SEQ ID NO: 2413205 - RNA, 19 nt, Homo sapiens
  misc_RNA (1)...(19): siRNA sense strand
gugccugaccuuugaggau

SEQ ID NO: 2413206 - RNA, 19 nt, Homo sapiens
  misc_RNA (1)...(19): siRNA sense strand
ugaggaugugccagagaau

SEQ ID NO: 2413207 - RNA, 19 nt, Homo sapiens
  misc_RNA (1)...(19): siRNA sense strand
agaaacagauccuggagcu

SEQ ID NO: 2413208 - RNA, 19 nt, Homo sapiens
  misc_RNA (1)...(19): siRNA sense strand
gaaggaauugccugcggaa

SEQ ID NO: 2413209 - RNA, 19 nt, Homo sapiens
  misc_RNA (1)...(19): siRNA sense strand
agaacaacaaacuggaaga

SEQ ID NO: 2413210 - RNA, 19 nt, Homo sapiens
  misc_RNA (1)...(19): siRNA sense strand
cugaggaaccauuugggaa

SEQ ID NO: 2413211 - RNA, 19 nt, Homo sapiens
  misc_RNA (1)...(19): siRNA sense strand
ccaucuaccccgugggcua

SEQ ID NO: 2413212 - RNA, 19 nt, Homo sapiens
  misc_RNA (1)...(19): siRNA sense strand
gcucaggacuauaagcacu

SEQ ID NO: 2413213 - RNA, 19 nt, Homo sapiens
  misc_RNA (1)...(19): siRNA sense strand
aagaaaacuaagaaggaga

SEQ ID NO: 2413214 - RNA, 19 nt, Homo sapiens
  misc_RNA (1)...(19): siRNA sense strand
gaucaaggaugguggugug

SEQ ID NO: 2413215 - RNA, 19 nt, Homo sapiens
  misc_RNA (1)...(19): siRNA sense strand
aucaauuaccaguggguga

SEQ ID NO: 2413216 - RNA, 19 nt, Homo sapiens
  misc_RNA (1)...(19): siRNA sense strand
aaggcaaagagaacaacaa

SEQ ID NO: 2413217 - RNA, 19 nt, Homo sapiens
  misc_RNA (1)...(19): siRNA sense strand
cggagaaugaugcagcuau

SEQ ID NO: 2413218 - RNA, 19 nt, Homo sapiens
  misc_RNA (1)...(19): siRNA sense strand
guuugaagcagcagagcaa

SEQ ID NO: 2413219 - RNA, 19 nt, Homo sapiens
  misc_RNA (1)...(19): siRNA sense strand
uggcaaacgugcuggggaa

SEQ ID NO: 2413220 - RNA, 19 nt, Homo sapiens
  misc_RNA (1)...(19): siRNA sense strand
cuuuauuccucaaggcaau

SEQ ID NO: 2413221 - RNA, 19 nt, Homo sapiens
  misc_RNA (1)...(19): siRNA sense strand
cgggaagcuguaagauuaa

SEQ ID NO: 2413222 - RNA, 19 nt, Homo sapiens
  misc_RNA (1)...(19): siRNA sense strand
ccuugaaugcguggagaaa

SEQ ID NO: 2413223 - RNA, 19 nt, Homo sapiens
  misc_RNA (1)...(19): siRNA sense strand
ccgcugucgugcugggaau

SEQ ID NO: 2413224 - RNA, 19 nt, Homo sapiens
  misc_RNA (1)...(19): siRNA sense strand
ugauaaaggcaaccagaca

SEQ ID NO: 2413225 - RNA, 19 nt, Homo sapiens
  misc_RNA (1)...(19): siRNA sense strand
aagaaaggaaugagcuaca

SEQ ID NO: 2413226 - RNA, 19 nt, Homo sapiens
  misc_RNA (1)...(19): siRNA sense strand
ggaaugagcuacaggaagc

SEQ ID NO: 2413227 - RNA, 19 nt, Homo sapiens
  misc_RNA (1)...(19): siRNA sense strand
agcuagaacuaaugcaaaa

SEQ ID NO: 2413228 - RNA, 19 nt, Homo sapiens
  misc_RNA (1)...(19): siRNA sense strand
gcaucaggaacuaaggaga

SEQ ID NO: 2413229 - RNA, 19 nt, Homo sapiens
  misc_RNA (1)...(19): siRNA sense strand
gauucggagcccugagcaa

SEQ ID NO: 2413230 - RNA, 19 nt, Homo sapiens
  misc_RNA (1)...(19): siRNA sense strand
caucagaaacuaccgggaa

SEQ ID NO: 2413231 - RNA, 19 nt, Homo sapiens
  misc_RNA (1)...(19): siRNA sense strand
gagcaaaguuaccggacag

SEQ ID NO: 2413232 - RNA, 19 nt, Homo sapiens
  misc_RNA (1)...(19): siRNA sense strand
aaaagaaaggaaugagcua

SEQ ID NO: 2413233 - RNA, 19 nt, Homo sapiens
  misc_RNA (1)...(19): siRNA sense strand
ccucgacaauacagguaau

SEQ ID NO: 2413234 - RNA, 19 nt, Homo sapiens
  misc_RNA (1)...(19): siRNA sense strand
uggugagggccguaaacua

SEQ ID NO: 2413235 - RNA, 19 nt, Homo sapiens
  misc_RNA (1)...(19): siRNA sense strand
cagaauagccugaaacggu

SEQ ID NO: 2413236 - RNA, 19 nt, Homo sapiens
  misc_RNA (1)...(19): siRNA sense strand
gcuuuauuccucaaggcaa

SEQ ID NO: 2413237 - RNA, 19 nt, Homo sapiens
  misc_RNA (1)...(19): siRNA sense strand
agcugaagcaguuggaaga

SEQ ID NO: 2413238 - RNA, 19 nt, Homo sapiens
  misc_RNA (1)...(19): siRNA sense strand
gccuugaaugcguggagaa

SEQ ID NO: 2413239 - RNA, 19 nt, Homo sapiens
  misc_RNA (1)...(19): siRNA sense strand
ccucaaggcaauuaaagca

SEQ ID NO: 2413240 - RNA, 19 nt, Homo sapiens
  misc_RNA (1)...(19): siRNA sense strand
aucagcgacuggaggguaa

SEQ ID NO: 2413241 - RNA, 19 nt, Homo sapiens
  misc_RNA (1)...(19): siRNA sense strand
cgaguggcggagugaggaa

SEQ ID NO: 2413242 - RNA, 19 nt, Homo sapiens
  misc_RNA (1)...(19): siRNA sense strand
ccaaguauguucaugccau

SEQ ID NO: 2413243 - RNA, 19 nt, Homo sapiens
  misc_RNA (1)...(19): siRNA sense strand
aagcuagaacuaaugcaaa

SEQ ID NO: 2413244 - RNA, 19 nt, Homo sapiens
  misc_RNA (1)...(19): siRNA sense strand
agagcaaaguuaccggaca

SEQ ID NO: 2413245 - RNA, 19 nt, Homo sapiens
  misc_RNA (1)...(19): siRNA sense strand
aaggaaugagcuacaggaa

SEQ ID NO: 2413246 - RNA, 19 nt, Homo sapiens
  misc_RNA (1)...(19): siRNA sense strand
ucauguucucguuggcaaa

SEQ ID NO: 2413247 - RNA, 19 nt, Homo sapiens
  misc_RNA (1)...(19): siRNA sense strand
acaaauacaucauggguga

SEQ ID NO: 2413248 - RNA, 19 nt, Homo sapiens
  misc_RNA (1)...(19): siRNA sense strand
acaagaaauuggagcugga

SEQ ID NO: 2413249 - RNA, 19 nt, Homo sapiens
  misc_RNA (1)...(19): siRNA sense strand
ggaaaguucuaucugguca

SEQ ID NO: 2413250 - RNA, 19 nt, Homo sapiens
  misc_RNA (1)...(19): siRNA sense strand
ucauauuccugaagcccaa

SEQ ID NO: 2413251 - RNA, 19 nt, Homo sapiens
  misc_RNA (1)...(19): siRNA sense strand
aguccaagggaaaguucua

SEQ ID NO: 2413252 - RNA, 19 nt, Homo sapiens
  misc_RNA (1)...(19): siRNA sense strand
gaagauugaugaaagugca

SEQ ID NO: 2413253 - RNA, 19 nt, Homo sapiens
  misc_RNA (1)...(19): siRNA sense strand
acuguagagcucagagaaa

SEQ ID NO: 2413254 - RNA, 19 nt, Homo sapiens
  misc_RNA (1)...(19): siRNA sense strand
gggagcugcuagagaccga

SEQ ID NO: 2413255 - RNA, 19 nt, Homo sapiens
  misc_RNA (1)...(19): siRNA sense strand
gcuccagcaguaugagaau

SEQ ID NO: 2413256 - RNA, 19 nt, Homo sapiens
  misc_RNA (1)...(19): siRNA sense strand
uugcaaugacaaagccaaa

SEQ ID NO: 2413257 - RNA, 19 nt, Homo sapiens
  misc_RNA (1)...(19): siRNA sense strand
ccaugaagcaggugcacca

SEQ ID NO: 2413258 - RNA, 19 nt, Homo sapiens
  misc_RNA (1)...(19): siRNA sense strand
aguccauggugaagagucu

SEQ ID NO: 2413259 - RNA, 19 nt, Homo sapiens
  misc_RNA (1)...(19): siRNA sense strand
uucaauagaugcugggagu

SEQ ID NO: 2413260 - RNA, 19 nt, Homo sapiens
  misc_RNA (1)...(19): siRNA sense strand
ccaaguguguggaugacca

SEQ ID NO: 2413261 - RNA, 19 nt, Homo sapiens
  misc_RNA (1)...(19): siRNA sense strand
aguaaggagcuucagguga

SEQ ID NO: 2413262 - RNA, 19 nt, Homo sapiens
  misc_RNA (1)...(19): siRNA sense strand
gccuguuauuggaaagaua

SEQ ID NO: 2413263 - RNA, 19 nt, Homo sapiens
  misc_RNA (1)...(19): siRNA sense strand
gguuagagacagucaacga

SEQ ID NO: 2413264 - RNA, 19 nt, Homo sapiens
  misc_RNA (1)...(19): siRNA sense strand
ugaugaugaaauugaggaa

SEQ ID NO: 2413265 - RNA, 19 nt, Homo sapiens
  misc_RNA (1)...(19): siRNA sense strand
ggaauaaaauuaagagccu

SEQ ID NO: 2413266 - RNA, 19 nt, Homo sapiens
  misc_RNA (1)...(19): siRNA sense strand
uaugaagacccuaaggcua

SEQ ID NO: 2413267 - RNA, 19 nt, Homo sapiens
  misc_RNA (1)...(19): siRNA sense strand
caggaaagaucaauggaug

SEQ ID NO: 2413268 - RNA, 19 nt, Homo sapiens
  misc_RNA (1)...(19): siRNA sense strand
acccuaaggcuaagaaaga

SEQ ID NO: 2413269 - RNA, 19 nt, Homo sapiens
  misc_RNA (1)...(19): siRNA sense strand
uggauucagaugaggaaau

SEQ ID NO: 2413270 - RNA, 19 nt, Homo sapiens
  misc_RNA (1)...(19): siRNA sense strand
uggacaacuaagacauuua

SEQ ID NO: 2413271 - RNA, 19 nt, Homo sapiens
  misc_RNA (1)...(19): siRNA sense strand
aggaaagaucaauggaugu

SEQ ID NO: 2413272 - RNA, 19 nt, Homo sapiens
  misc_RNA (1)...(19): siRNA sense strand
agagacagucaacgacaaa

SEQ ID NO: 2413273 - RNA, 19 nt, Homo sapiens
  misc_RNA (1)...(19): siRNA sense strand
acagaugcaagcuggaauu

SEQ ID NO: 2413274 - RNA, 19 nt, Homo sapiens
  misc_RNA (1)...(19): siRNA sense strand
uuagauugcaacagugauu

SEQ ID NO: 2413275 - RNA, 19 nt, Homo sapiens
  misc_RNA (1)...(19): siRNA sense strand
aaucaugaccagaucugaa

SEQ ID NO: 2413276 - RNA, 19 nt, Homo sapiens
  misc_RNA (1)...(19): siRNA sense strand
guguagagaaugugggaaa

SEQ ID NO: 2413277 - RNA, 19 nt, Homo sapiens
  misc_RNA (1)...(19): siRNA sense strand
ccuuaugaguguagagaau

SEQ ID NO: 2413278 - RNA, 19 nt, Homo sapiens
  misc_RNA (1)...(19): siRNA sense strand
ggagaaaggccguaugaau

SEQ ID NO: 2413279 - RNA, 19 nt, Homo sapiens
  misc_RNA (1)...(19): siRNA sense strand
guguggagaaugugggaaa

SEQ ID NO: 2413280 - RNA, 19 nt, Homo sapiens
  misc_RNA (1)...(19): siRNA sense strand
gugcagugauuguggaaaa

SEQ ID NO: 2413281 - RNA, 19 nt, Homo sapiens
  misc_RNA (1)...(19): siRNA sense strand
ccuuguaagcagagaauuu

SEQ ID NO: 2413282 - RNA, 19 nt, Homo sapiens
  misc_RNA (1)...(19): siRNA sense strand
gugugagguaugugggaaa

SEQ ID NO: 2413283 - RNA, 19 nt, Homo sapiens
  misc_RNA (1)...(19): siRNA sense strand
ccguaugaaugcagugaau

SEQ ID NO: 2413284 - RNA, 19 nt, Homo sapiens
  misc_RNA (1)...(19): siRNA sense strand
gaguggagcauguggaaaa

SEQ ID NO: 2413285 - RNA, 19 nt, Homo sapiens
  misc_RNA (1)...(19): siRNA sense strand
ggcaauaagcacagcguga

SEQ ID NO: 2413286 - RNA, 19 nt, Homo sapiens
  misc_RNA (1)...(19): siRNA sense strand
uuguagggaaugugggaaa

SEQ ID NO: 2413287 - RNA, 19 nt, Homo sapiens
  misc_RNA (1)...(19): siRNA sense strand
gugcagugaauguggaaaa

SEQ ID NO: 2413288 - RNA, 19 nt, Homo sapiens
  misc_RNA (1)...(19): siRNA sense strand
guaaagaaacguaagcuca

SEQ ID NO: 2413289 - RNA, 19 nt, Homo sapiens
  misc_RNA (1)...(19): siRNA sense strand
agucgaaagagcagccuua

SEQ ID NO: 2413290 - RNA, 19 nt, Homo sapiens
  misc_RNA (1)...(19): siRNA sense strand
aggucacacuggagagaga

SEQ ID NO: 2413291 - RNA, 19 nt, Homo sapiens
  misc_RNA (1)...(19): siRNA sense strand
acuaauuacaguuguggaa

SEQ ID NO: 2413292 - RNA, 19 nt, Homo sapiens
  misc_RNA (1)...(19): siRNA sense strand
uuguggagagugugggaaa

SEQ ID NO: 2413293 - RNA, 19 nt, Homo sapiens
  misc_RNA (1)...(19): siRNA sense strand
ccuuacaaguguggagaau

SEQ ID NO: 2413294 - RNA, 19 nt, Homo sapiens
  misc_RNA (1)...(19): siRNA sense strand
ccaagaagaagcugcugua

SEQ ID NO: 2413295 - RNA, 19 nt, Homo sapiens
  misc_RNA (1)...(19): siRNA sense strand
cccuaugagugcaaggaau

SEQ ID NO: 2413296 - RNA, 19 nt, Homo sapiens
  misc_RNA (1)...(19): siRNA sense strand
uguuaugugugcagugauu

SEQ ID NO: 2413297 - RNA, 19 nt, Homo sapiens
  misc_RNA (1)...(19): siRNA sense strand
gcgaggucauacuggagaa

SEQ ID NO: 2413298 - RNA, 19 nt, Homo sapiens
  misc_RNA (1)...(19): siRNA sense strand
ccuuaugaaugcaccaaau

SEQ ID NO: 2413299 - RNA, 19 nt, Homo sapiens
  misc_RNA (1)...(19): siRNA sense strand
agaaagagugucagagaag

SEQ ID NO: 2413300 - RNA, 19 nt, Homo sapiens
  misc_RNA (1)...(19): siRNA sense strand
cugugaggagugcgggaaa

SEQ ID NO: 2413301 - RNA, 19 nt, Homo sapiens
  misc_RNA (1)...(19): siRNA sense strand
cuacagaaagagugucaga

SEQ ID NO: 2413302 - RNA, 19 nt, Homo sapiens
  misc_RNA (1)...(19): siRNA sense strand
ugggaaaucuuuuggucaa

SEQ ID NO: 2413303 - RNA, 19 nt, Homo sapiens
  misc_RNA (1)...(19): siRNA sense strand
ugggaaaucuuuuggucaa

SEQ ID NO: 2413304 - RNA, 19 nt, Homo sapiens
  misc_RNA (1)...(19): siRNA sense strand
gccauaugcgugugaggua

SEQ ID NO: 2413305 - RNA, 19 nt, Homo sapiens
  misc_RNA (1)...(19): siRNA sense strand
aggauugugccaagaagaa

SEQ ID NO: 2413306 - RNA, 19 nt, Homo sapiens
  misc_RNA (1)...(19): siRNA sense strand
gaggauucacacuggagaa

SEQ ID NO: 2413307 - RNA, 19 nt, Homo sapiens
  misc_RNA (1)...(19): siRNA sense strand
aaacguaagcucagggugu

SEQ ID NO: 2413308 - RNA, 19 nt, Homo sapiens
  misc_RNA (1)...(19): siRNA sense strand
gggaaaucuuuuagucaga

SEQ ID NO: 2413309 - RNA, 19 nt, Homo sapiens
  misc_RNA (1)...(19): siRNA sense strand
gagaaaggccguaugaaug

SEQ ID NO: 2413310 - RNA, 19 nt, Homo sapiens
  misc_RNA (1)...(19): siRNA sense strand
aagaguucauucuggacaa

SEQ ID NO: 2413311 - RNA, 19 nt, Homo sapiens
  misc_RNA (1)...(19): siRNA sense strand
ggggaaagaccuuacaauu

SEQ ID NO: 2413312 - RNA, 19 nt, Homo sapiens
  misc_RNA (1)...(19): siRNA sense strand
ugacuauacaucagaggau

SEQ ID NO: 2413313 - RNA, 19 nt, Homo sapiens
  misc_RNA (1)...(19): siRNA sense strand
caucacaagcagaagcuga

SEQ ID NO: 2413314 - RNA, 19 nt, Homo sapiens
  misc_RNA (1)...(19): siRNA sense strand
cucauuaaacacaggagaa

SEQ ID NO: 2413315 - RNA, 19 nt, Homo sapiens
  misc_RNA (1)...(19): siRNA sense strand
cagaguucacacaggagaa

SEQ ID NO: 2413316 - RNA, 19 nt, Homo sapiens
  misc_RNA (1)...(19): siRNA sense strand
aagaagaagcugcuguaga

SEQ ID NO: 2413317 - RNA, 19 nt, Homo sapiens
  misc_RNA (1)...(19): siRNA sense strand
aagcagaagcugaacagga

SEQ ID NO: 2413318 - RNA, 19 nt, Homo sapiens
  misc_RNA (1)...(19): siRNA sense strand
gguuguugguguggaucaa

SEQ ID NO: 2413319 - RNA, 19 nt, Homo sapiens
  misc_RNA (1)...(19): siRNA sense strand
ccucauucaacaucagcaa

SEQ ID NO: 2413320 - RNA, 19 nt, Homo sapiens
  misc_RNA (1)...(19): siRNA sense strand
ucacugaacaccagagacu

SEQ ID NO: 2413321 - RNA, 19 nt, Homo sapiens
  misc_RNA (1)...(19): siRNA sense strand
ucauuaaacacaggagaau

SEQ ID NO: 2413322 - RNA, 19 nt, Homo sapiens
  misc_RNA (1)...(19): siRNA sense strand
aguuauuccacaccagaaa

SEQ ID NO: 2413323 - RNA, 19 nt, Homo sapiens
  misc_RNA (1)...(19): siRNA sense strand
aagauguggcugugaacuu

SEQ ID NO: 2413324 - RNA, 19 nt, Homo sapiens
  misc_RNA (1)...(19): siRNA sense strand
cauuaaacacaggagaauu

SEQ ID NO: 2413325 - RNA, 19 nt, Homo sapiens
  misc_RNA (1)...(19): siRNA sense strand
ggagaaaggccauaugcgu

SEQ ID NO: 2413326 - RNA, 19 nt, Homo sapiens
  misc_RNA (1)...(19): siRNA sense strand
ccauaugcgugugagguau

SEQ ID NO: 2413327 - RNA, 19 nt, Homo sapiens
  misc_RNA (1)...(19): siRNA sense strand
aaagagugucagagaagca

SEQ ID NO: 2413328 - RNA, 19 nt, Homo sapiens
  misc_RNA (1)...(19): siRNA sense strand
uguagagaaugugggaaau

SEQ ID NO: 2413329 - RNA, 19 nt, Homo sapiens
  misc_RNA (1)...(19): siRNA sense strand
cuguggggaaugugggaaa

SEQ ID NO: 2413330 - RNA, 19 nt, Homo sapiens
  misc_RNA (1)...(19): siRNA sense strand
agggaaugugggaaauuau

SEQ ID NO: 2413331 - RNA, 19 nt, Homo sapiens
  misc_RNA (1)...(19): siRNA sense strand
cagcagaacuggacgccua

SEQ ID NO: 2413332 - RNA, 19 nt, Homo sapiens
  misc_RNA (1)...(19): siRNA sense strand
ucaagagcgccgagggcaa

SEQ ID NO: 2413333 - RNA, 19 nt, Homo sapiens
  misc_RNA (1)...(19): siRNA sense strand
ccgcacagucaauggcuau

SEQ ID NO: 2413334 - RNA, 19 nt, Homo sapiens
  misc_RNA (1)...(19): siRNA sense strand
agcaagagugugugcaaca

SEQ ID NO: 2413335 - RNA, 19 nt, Homo sapiens
  misc_RNA (1)...(19): siRNA sense strand
ccggaaaggcacugagcug

SEQ ID NO: 2413336 - RNA, 19 nt, Homo sapiens
  misc_RNA (1)...(19): siRNA sense strand
gggcaagggcuaugagacg

SEQ ID NO: 2413337 - RNA, 19 nt, Homo sapiens
  misc_RNA (1)...(19): siRNA sense strand
ggucaugagucucgggcua

SEQ ID NO: 2413338 - RNA, 19 nt, Homo sapiens
  misc_RNA (1)...(19): siRNA sense strand
gcugauaucuggaggcacu

SEQ ID NO: 2413339 - RNA, 19 nt, Homo sapiens
  misc_RNA (1)...(19): siRNA sense strand
ucaaauuaccccagacaaa

SEQ ID NO: 2413340 - RNA, 19 nt, Homo sapiens
  misc_RNA (1)...(19): siRNA sense strand
gggcagaaggacagcgacu

SEQ ID NO: 2413341 - RNA, 19 nt, Homo sapiens
  misc_RNA (1)...(19): siRNA sense strand
gcaaacuacuuucaggaga

SEQ ID NO: 2413342 - RNA, 19 nt, Homo sapiens
  misc_RNA (1)...(19): siRNA sense strand
caggaacaguggaggccau

SEQ ID NO: 2413343 - RNA, 19 nt, Homo sapiens
  misc_RNA (1)...(19): siRNA sense strand
agucaguccagaugggaau

SEQ ID NO: 2413344 - RNA, 19 nt, Homo sapiens
  misc_RNA (1)...(19): siRNA sense strand
cagauggcacuguggaaau

SEQ ID NO: 2413345 - RNA, 19 nt, Homo sapiens
  misc_RNA (1)...(19): siRNA sense strand
aagcagugggugcggacaa

SEQ ID NO: 2413346 - RNA, 19 nt, Homo sapiens
  misc_RNA (1)...(19): siRNA sense strand
aguauaugggcgugucuaa

SEQ ID NO: 2413347 - RNA, 19 nt, Homo sapiens
  misc_RNA (1)...(19): siRNA sense strand
agaagguggaaguaaagaa

SEQ ID NO: 2413348 - RNA, 19 nt, Homo sapiens
  misc_RNA (1)...(19): siRNA sense strand
acaucuaacagcagugaga

SEQ ID NO: 2413349 - RNA, 19 nt, Homo sapiens
  misc_RNA (1)...(19): siRNA sense strand
ccaagagaccgaugcacau

SEQ ID NO: 2413350 - RNA, 19 nt, Homo sapiens
  misc_RNA (1)...(19): siRNA sense strand
cuuacaauaaccagucaaa

SEQ ID NO: 2413351 - RNA, 19 nt, Homo sapiens
  misc_RNA (1)...(19): siRNA sense strand
ccucaaaaggguuuccaaa

SEQ ID NO: 2413352 - RNA, 19 nt, Homo sapiens
  misc_RNA (1)...(19): siRNA sense strand
ugaaagaacacucguggca

SEQ ID NO: 2413353 - RNA, 19 nt, Homo sapiens
  misc_RNA (1)...(19): siRNA sense strand
cccaagagaccgaugcaca

SEQ ID NO: 2413354 - RNA, 19 nt, Homo sapiens
  misc_RNA (1)...(19): siRNA sense strand
ugucuaagcggaagugcau

SEQ ID NO: 2413355 - RNA, 19 nt, Homo sapiens
  misc_RNA (1)...(19): siRNA sense strand
cccauguggaaguuggaua

SEQ ID NO: 2413356 - RNA, 19 nt, Homo sapiens
  misc_RNA (1)...(19): siRNA sense strand
aaagaacacucguggcagu

SEQ ID NO: 2413357 - RNA, 19 nt, Homo sapiens
  misc_RNA (1)...(19): siRNA sense strand
ggacaaaaccguuccagca

SEQ ID NO: 2413358 - RNA, 19 nt, Homo sapiens
  misc_RNA (1)...(19): siRNA sense strand
gaacauuaucuguagcugu

SEQ ID NO: 2413359 - RNA, 19 nt, Homo sapiens
  misc_RNA (1)...(19): siRNA sense strand
auguggaggccgugagcaa

SEQ ID NO: 2413360 - RNA, 19 nt, Homo sapiens
  misc_RNA (1)...(19): siRNA sense strand
uggccaugguggaggugca

SEQ ID NO: 2413361 - RNA, 19 nt, Homo sapiens
  misc_RNA (1)...(19): siRNA sense strand
cugaaggccuccagcagga

SEQ ID NO: 2413362 - RNA, 19 nt, Homo sapiens
  misc_RNA (1)...(19): siRNA sense strand
gcaccugcauccugcccaa

SEQ ID NO: 2413363 - RNA, 19 nt, Homo sapiens
  misc_RNA (1)...(19): siRNA sense strand
gggaagaauuugcaaggga

SEQ ID NO: 2413364 - RNA, 19 nt, Homo sapiens
  misc_RNA (1)...(19): siRNA sense strand
acauuugaacacagagaaa

SEQ ID NO: 2413365 - RNA, 19 nt, Homo sapiens
  misc_RNA (1)...(19): siRNA sense strand
ucgcaaaggaccaugggaa

SEQ ID NO: 2413366 - RNA, 19 nt, Homo sapiens
  misc_RNA (1)...(19): siRNA sense strand
ccugaagggacgggagaaa

SEQ ID NO: 2413367 - RNA, 19 nt, Homo sapiens
  misc_RNA (1)...(19): siRNA sense strand
ggaagaauuugcaagggau

SEQ ID NO: 2413368 - RNA, 19 nt, Homo sapiens
  misc_RNA (1)...(19): siRNA sense strand
agugagauaccuauggaaa

SEQ ID NO: 2413369 - RNA, 19 nt, Homo sapiens
  misc_RNA (1)...(19): siRNA sense strand
cagaugaagcagagagucu

SEQ ID NO: 2413370 - RNA, 19 nt, Homo sapiens
  misc_RNA (1)...(19): siRNA sense strand
augaggaagcugaggauga

SEQ ID NO: 2413371 - RNA, 19 nt, Homo sapiens
  misc_RNA (1)...(19): siRNA sense strand
gagcuuaaggccaagggaa

SEQ ID NO: 2413372 - RNA, 19 nt, Homo sapiens
  misc_RNA (1)...(19): siRNA sense strand
agacaauuucaguguggua

SEQ ID NO: 2413373 - RNA, 19 nt, Homo sapiens
  misc_RNA (1)...(19): siRNA sense strand
ggaggaagaugacugggaa

SEQ ID NO: 2413374 - RNA, 19 nt, Homo sapiens
  misc_RNA (1)...(19): siRNA sense strand
gaggaagaugacugggaau

SEQ ID NO: 2413375 - RNA, 19 nt, Homo sapiens
  misc_RNA (1)...(19): siRNA sense strand
gugagauaccuauggaaaa

SEQ ID NO: 2413376 - RNA, 19 nt, Homo sapiens
  misc_RNA (1)...(19): siRNA sense strand
acuuaauguucucaagcaa

SEQ ID NO: 2413377 - RNA, 19 nt, Homo sapiens
  misc_RNA (1)...(19): siRNA sense strand
cauucaacgcauagacaau

SEQ ID NO: 2413378 - RNA, 19 nt, Homo sapiens
  misc_RNA (1)...(19): siRNA sense strand
accuaaaauuggagcuuaa

SEQ ID NO: 2413379 - RNA, 19 nt, Homo sapiens
  misc_RNA (1)...(19): siRNA sense strand
ccaagaaagugaaugucca

SEQ ID NO: 2413380 - RNA, 19 nt, Homo sapiens
  misc_RNA (1)...(19): siRNA sense strand
gaacaugcuucaaaggacu

SEQ ID NO: 2413381 - RNA, 19 nt, Homo sapiens
  misc_RNA (1)...(19): siRNA sense strand
ccccagaacuuuacagcaa

SEQ ID NO: 2413382 - RNA, 19 nt, Homo sapiens
  misc_RNA (1)...(19): siRNA sense strand
cagaacagugauggaaaua

SEQ ID NO: 2413383 - RNA, 19 nt, Homo sapiens
  misc_RNA (1)...(19): siRNA sense strand
auuugaacacagagaaaga

SEQ ID NO: 2413384 - RNA, 19 nt, Homo sapiens
  misc_RNA (1)...(19): siRNA sense strand
acggaaggccuaccagaaa

SEQ ID NO: 2413385 - RNA, 19 nt, Homo sapiens
  misc_RNA (1)...(19): siRNA sense strand
ggaugaggaagcugaggau

SEQ ID NO: 2413386 - RNA, 19 nt, Homo sapiens
  misc_RNA (1)...(19): siRNA sense strand
ccagagagcagcugccuga

SEQ ID NO: 2413387 - RNA, 19 nt, Homo sapiens
  misc_RNA (1)...(19): siRNA sense strand
agaccagcuuguaguaaca

SEQ ID NO: 2413388 - RNA, 19 nt, Homo sapiens
  misc_RNA (1)...(19): siRNA sense strand
uagcaaggggcaagauuua

SEQ ID NO: 2413389 - RNA, 19 nt, Homo sapiens
  misc_RNA (1)...(19): siRNA sense strand
agaaggauuugucuggcaa

SEQ ID NO: 2413390 - RNA, 19 nt, Homo sapiens
  misc_RNA (1)...(19): siRNA sense strand
uuaauagacuccagggaac

SEQ ID NO: 2413391 - RNA, 19 nt, Homo sapiens
  misc_RNA (1)...(19): siRNA sense strand
gggccgaauaaguguaguu

SEQ ID NO: 2413392 - RNA, 19 nt, Homo sapiens
  misc_RNA (1)...(19): siRNA sense strand
gcauagacaauuucagugu

SEQ ID NO: 2413393 - RNA, 19 nt, Homo sapiens
  misc_RNA (1)...(19): siRNA sense strand
ccagaacuuuacagcaaca

SEQ ID NO: 2413394 - RNA, 19 nt, Homo sapiens
  misc_RNA (1)...(19): siRNA sense strand
gagaaggauuugucuggca

SEQ ID NO: 2413395 - RNA, 19 nt, Homo sapiens
  misc_RNA (1)...(19): siRNA sense strand
gggaggaagaugacuggga

SEQ ID NO: 2413396 - RNA, 19 nt, Homo sapiens
  misc_RNA (1)...(19): siRNA sense strand
uuuaauagacuccagggaa

SEQ ID NO: 2413397 - RNA, 19 nt, Homo sapiens
  misc_RNA (1)...(19): siRNA sense strand
ugacauuugaacacagaga

SEQ ID NO: 2413398 - RNA, 19 nt, Homo sapiens
  misc_RNA (1)...(19): siRNA sense strand
ccuggagagggccgaauaa

SEQ ID NO: 2413399 - RNA, 19 nt, Homo sapiens
  misc_RNA (1)...(19): siRNA sense strand
ggaugaugguuuugauagu

SEQ ID NO: 2413400 - RNA, 19 nt, Homo sapiens
  misc_RNA (1)...(19): siRNA sense strand
cagacucgguacagcguga

SEQ ID NO: 2413401 - RNA, 19 nt, Homo sapiens
  misc_RNA (1)...(19): siRNA sense strand
uuauauaaguggugaugag

SEQ ID NO: 2413402 - RNA, 19 nt, Homo sapiens
  misc_RNA (1)...(19): siRNA sense strand
guaguaacaaacugauaga

SEQ ID NO: 2413403 - RNA, 19 nt, Homo sapiens
  misc_RNA (1)...(19): siRNA sense strand
gcauaguucuggggaggaa

SEQ ID NO: 2413404 - RNA, 19 nt, Homo sapiens
  misc_RNA (1)...(19): siRNA sense strand
ggacgaaacugcucuccca

SEQ ID NO: 2413405 - RNA, 19 nt, Homo sapiens
  misc_RNA (1)...(19): siRNA sense strand
gugaauguggcaagagcuu

SEQ ID NO: 2413406 - RNA, 19 nt, Homo sapiens
  misc_RNA (1)...(19): siRNA sense strand
cggaagacacccuguacca

SEQ ID NO: 2413407 - RNA, 19 nt, Homo sapiens
  misc_RNA (1)...(19): siRNA sense strand
ggcaaggguuucaagcaca

SEQ ID NO: 2413408 - RNA, 19 nt, Homo sapiens
  misc_RNA (1)...(19): siRNA sense strand
caggaaaaggagaaggaau

SEQ ID NO: 2413409 - RNA, 19 nt, Homo sapiens
  misc_RNA (1)...(19): siRNA sense strand
gcaacgaagaagacaacca

SEQ ID NO: 2413410 - RNA, 19 nt, Homo sapiens
  misc_RNA (1)...(19): siRNA sense strand
aaggaauggcaacgaagaa

SEQ ID NO: 2413411 - RNA, 19 nt, Homo sapiens
  misc_RNA (1)...(19): siRNA sense strand
aggaaaaggagaaggaaug

SEQ ID NO: 2413412 - RNA, 19 nt, Homo sapiens
  misc_RNA (1)...(19): siRNA sense strand
auguaaggaaugugggaaa

SEQ ID NO: 2413413 - RNA, 19 nt, Homo sapiens
  misc_RNA (1)...(19): siRNA sense strand
augugauguuggagaauua

SEQ ID NO: 2413414 - RNA, 19 nt, Homo sapiens
  misc_RNA (1)...(19): siRNA sense strand
ccuuaugaaugcaaagaau

SEQ ID NO: 2413415 - RNA, 19 nt, Homo sapiens
  misc_RNA (1)...(19): siRNA sense strand
aauccauacaggugagaaa

SEQ ID NO: 2413416 - RNA, 19 nt, Homo sapiens
  misc_RNA (1)...(19): siRNA sense strand
aaucaagaugugagaccaa

SEQ ID NO: 2413417 - RNA, 19 nt, Homo sapiens
  misc_RNA (1)...(19): siRNA sense strand
aauucauacuggcaagaaa

SEQ ID NO: 2413418 - RNA, 19 nt, Homo sapiens
  misc_RNA (1)...(19): siRNA sense strand
ucucaggaggagugggaau

SEQ ID NO: 2413419 - RNA, 19 nt, Homo sapiens
  misc_RNA (1)...(19): siRNA sense strand
gggaauguggaaagaacuu

SEQ ID NO: 2413420 - RNA, 19 nt, Homo sapiens
  misc_RNA (1)...(19): siRNA sense strand
auguaaggaauguggaaaa

SEQ ID NO: 2413421 - RNA, 19 nt, Homo sapiens
  misc_RNA (1)...(19): siRNA sense strand
cccuaugaauguaaggaau

SEQ ID NO: 2413422 - RNA, 19 nt, Homo sapiens
  misc_RNA (1)...(19): siRNA sense strand
cccuaugaauguaaggaau

SEQ ID NO: 2413423 - RNA, 19 nt, Homo sapiens
  misc_RNA (1)...(19): siRNA sense strand
gagaauucauacuggggaa

SEQ ID NO: 2413424 - RNA, 19 nt, Homo sapiens
  misc_RNA (1)...(19): siRNA sense strand
agauaugugggaaggcuua

SEQ ID NO: 2413425 - RNA, 19 nt, Homo sapiens
  misc_RNA (1)...(19): siRNA sense strand
uuucagagaugauugggaa

SEQ ID NO: 2413426 - RNA, 19 nt, Homo sapiens
  misc_RNA (1)...(19): siRNA sense strand
uuacuagacaucagagaau

SEQ ID NO: 2413427 - RNA, 19 nt, Homo sapiens
  misc_RNA (1)...(19): siRNA sense strand
agugggaaauaauggaaaa

SEQ ID NO: 2413428 - RNA, 19 nt, Homo sapiens
  misc_RNA (1)...(19): siRNA sense strand
auguaaggaauguggcaau

SEQ ID NO: 2413429 - RNA, 19 nt, Homo sapiens
  misc_RNA (1)...(19): siRNA sense strand
cccuaugaauguaagauau

SEQ ID NO: 2413430 - RNA, 19 nt, Homo sapiens
  misc_RNA (1)...(19): siRNA sense strand
cagugggaaauaauggaaa

SEQ ID NO: 2413431 - RNA, 19 nt, Homo sapiens
  misc_RNA (1)...(19): siRNA sense strand
gcucagaccuuacucgaca

SEQ ID NO: 2413432 - RNA, 19 nt, Homo sapiens
  misc_RNA (1)...(19): siRNA sense strand
cugugcaucuaaagaauau

SEQ ID NO: 2413433 - RNA, 19 nt, Homo sapiens
  misc_RNA (1)...(19): siRNA sense strand
guuugcuacacaugagaua

SEQ ID NO: 2413434 - RNA, 19 nt, Homo sapiens
  misc_RNA (1)...(19): siRNA sense strand
gaauguaagauauguggga

SEQ ID NO: 2413435 - RNA, 19 nt, Homo sapiens
  misc_RNA (1)...(19): siRNA sense strand
guucaaacuucacucgaca

SEQ ID NO: 2413436 - RNA, 19 nt, Homo sapiens
  misc_RNA (1)...(19): siRNA sense strand
gaacuuuaauuaugaccca

SEQ ID NO: 2413437 - RNA, 19 nt, Homo sapiens
  misc_RNA (1)...(19): siRNA sense strand
uguuggagaauuacagcaa

SEQ ID NO: 2413438 - RNA, 19 nt, Homo sapiens
  misc_RNA (1)...(19): siRNA sense strand
acucacucaucaucagaaa

SEQ ID NO: 2413439 - RNA, 19 nt, Homo sapiens
  misc_RNA (1)...(19): siRNA sense strand
ggccuuuaguaguggcuca

SEQ ID NO: 2413440 - RNA, 19 nt, Homo sapiens
  misc_RNA (1)...(19): siRNA sense strand
uuacucaacaucagagaau

SEQ ID NO: 2413441 - RNA, 19 nt, Homo sapiens
  misc_RNA (1)...(19): siRNA sense strand
agaugugagaccaagaaau

SEQ ID NO: 2413442 - RNA, 19 nt, Homo sapiens
  misc_RNA (1)...(19): siRNA sense strand
aggaaaaccuuuagacaug

SEQ ID NO: 2413443 - RNA, 19 nt, Homo sapiens
  misc_RNA (1)...(19): siRNA sense strand
augcaaagaaugcgggaag

SEQ ID NO: 2413444 - RNA, 19 nt, Homo sapiens
  misc_RNA (1)...(19): siRNA sense strand
ugugagaccaagaaauuau

SEQ ID NO: 2413445 - RNA, 19 nt, Homo sapiens
  misc_RNA (1)...(19): siRNA sense strand
ccuucacauuacagcaaau

SEQ ID NO: 2413446 - RNA, 19 nt, Homo sapiens
  misc_RNA (1)...(19): siRNA sense strand
acccuaugaauguaagaua

SEQ ID NO: 2413447 - RNA, 19 nt, Homo sapiens
  misc_RNA (1)...(19): siRNA sense strand
agugagaaacccuaugaau

SEQ ID NO: 2413448 - RNA, 19 nt, Homo sapiens
  misc_RNA (1)...(19): siRNA sense strand
auugagaagccuuaugaau

SEQ ID NO: 2413449 - RNA, 19 nt, Homo sapiens
  misc_RNA (1)...(19): siRNA sense strand
aggaagaggaagaggaaga

SEQ ID NO: 2413450 - RNA, 19 nt, Homo sapiens
  misc_RNA (1)...(19): siRNA sense strand
gggaagaggaagaggagga

SEQ ID NO: 2413451 - RNA, 19 nt, Homo sapiens
  misc_RNA (1)...(19): siRNA sense strand
gggaagagauagagccgga

SEQ ID NO: 2413452 - RNA, 19 nt, Homo sapiens
  misc_RNA (1)...(19): siRNA sense strand
aagaggaagaggaggaaga

SEQ ID NO: 2413453 - RNA, 19 nt, Homo sapiens
  misc_RNA (1)...(19): siRNA sense strand
aagaggaggaagaggaaga

SEQ ID NO: 2413454 - RNA, 19 nt, Homo sapiens
  misc_RNA (1)...(19): siRNA sense strand
ccggauuggcuguggcauu

SEQ ID NO: 2413455 - RNA, 19 nt, Homo sapiens
  misc_RNA (1)...(19): siRNA sense strand
aggaagaggaggaagagga

SEQ ID NO: 2413456 - RNA, 19 nt, Homo sapiens
  misc_RNA (1)...(19): siRNA sense strand
aggaaggggaagaggaaga

SEQ ID NO: 2413457 - RNA, 19 nt, Homo sapiens
  misc_RNA (1)...(19): siRNA sense strand
cgauaucaggagagguuca

SEQ ID NO: 2413458 - RNA, 19 nt, Homo sapiens
  misc_RNA (1)...(19): siRNA sense strand
aguacuuagggaagggcaa

SEQ ID NO: 2413459 - RNA, 19 nt, Homo sapiens
  misc_RNA (1)...(19): siRNA sense strand
gggcaaaagcaucguggau

SEQ ID NO: 2413460 - RNA, 19 nt, Homo sapiens
  misc_RNA (1)...(19): siRNA sense strand
ccaggaaggggaagaggaa

SEQ ID NO: 2413461 - RNA, 19 nt, Homo sapiens
  misc_RNA (1)...(19): siRNA sense strand
agaggaagaggaagaggau

SEQ ID NO: 2413462 - RNA, 19 nt, Homo sapiens
  misc_RNA (1)...(19): siRNA sense strand
agaggauggggaagagaua

SEQ ID NO: 2413463 - RNA, 19 nt, Homo sapiens
  misc_RNA (1)...(19): siRNA sense strand
uggcaagaucauugggaag

SEQ ID NO: 2413464 - RNA, 19 nt, Homo sapiens
  misc_RNA (1)...(19): siRNA sense strand
ucauggaaacucuggugaa

SEQ ID NO: 2413465 - RNA, 19 nt, Homo sapiens
  misc_RNA (1)...(19): siRNA sense strand
agugaugacaguugugaca

SEQ ID NO: 2413466 - RNA, 19 nt, Homo sapiens
  misc_RNA (1)...(19): siRNA sense strand
aggaagaggaagaggaugg

SEQ ID NO: 2413467 - RNA, 19 nt, Homo sapiens
  misc_RNA (1)...(19): siRNA sense strand
aggaggaagaggaagagga

SEQ ID NO: 2413468 - RNA, 19 nt, Homo sapiens
  misc_RNA (1)...(19): siRNA sense strand
ugaacaagauggaugaccu

SEQ ID NO: 2413469 - RNA, 19 nt, Homo sapiens
  misc_RNA (1)...(19): siRNA sense strand
acaagauggaugaccucaa

SEQ ID NO: 2413470 - RNA, 19 nt, Homo sapiens
  misc_RNA (1)...(19): siRNA sense strand
uaacaaagaugaagccgau

SEQ ID NO: 2413471 - RNA, 19 nt, Homo sapiens
  misc_RNA (1)...(19): siRNA sense strand
gccaaagggcagaaauaau

SEQ ID NO: 2413472 - RNA, 19 nt, Homo sapiens
  misc_RNA (1)...(19): siRNA sense strand
ucagaagugaagaggagaa

SEQ ID NO: 2413473 - RNA, 19 nt, Homo sapiens
  misc_RNA (1)...(19): siRNA sense strand
cagaagugaagaggagaaa

SEQ ID NO: 2413474 - RNA, 19 nt, Homo sapiens
  misc_RNA (1)...(19): siRNA sense strand
uggucuaucuggugugaau

SEQ ID NO: 2413475 - RNA, 19 nt, Homo sapiens
  misc_RNA (1)...(19): siRNA sense strand
ucauauggauucauggaca

SEQ ID NO: 2413476 - RNA, 19 nt, Homo sapiens
  misc_RNA (1)...(19): siRNA sense strand
agaccaaagagucaggaau

SEQ ID NO: 2413477 - RNA, 19 nt, Homo sapiens
  misc_RNA (1)...(19): siRNA sense strand
cuacugacaaagaagacua

SEQ ID NO: 2413478 - RNA, 19 nt, Homo sapiens
  misc_RNA (1)...(19): siRNA sense strand
aaaggacgaaagugggaua

SEQ ID NO: 2413479 - RNA, 19 nt, Homo sapiens
  misc_RNA (1)...(19): siRNA sense strand
aauaaguuggcgagcuuua

SEQ ID NO: 2413480 - RNA, 19 nt, Homo sapiens
  misc_RNA (1)...(19): siRNA sense strand
auguauacaaccugccaaa

SEQ ID NO: 2413481 - RNA, 19 nt, Homo sapiens
  misc_RNA (1)...(19): siRNA sense strand
ucucagaagugaagaggag

SEQ ID NO: 2413482 - RNA, 19 nt, Homo sapiens
  misc_RNA (1)...(19): siRNA sense strand
ggagaaacagcauaggguu

SEQ ID NO: 2413483 - RNA, 19 nt, Homo sapiens
  misc_RNA (1)...(19): siRNA sense strand
gugugaauauauuguggau

SEQ ID NO: 2413484 - RNA, 19 nt, Homo sapiens
  misc_RNA (1)...(19): siRNA sense strand
ucuuauagcccuggaguga

SEQ ID NO: 2413485 - RNA, 19 nt, Homo sapiens
  misc_RNA (1)...(19): siRNA sense strand
ggauucauggacagcuaaa

SEQ ID NO: 2413486 - RNA, 19 nt, Homo sapiens
  misc_RNA (1)...(19): siRNA sense strand
agauaggagaggcuaguau

SEQ ID NO: 2413487 - RNA, 19 nt, Homo sapiens
  misc_RNA (1)...(19): siRNA sense strand
caggaaugcuugggagagu

SEQ ID NO: 2413488 - RNA, 19 nt, Homo sapiens
  misc_RNA (1)...(19): siRNA sense strand
ccacaugaucuggcagcaa

SEQ ID NO: 2413489 - RNA, 19 nt, Homo sapiens
  misc_RNA (1)...(19): siRNA sense strand
uagacaacuucuugaucau

SEQ ID NO: 2413490 - RNA, 19 nt, Homo sapiens
  misc_RNA (1)...(19): siRNA sense strand
auggauucauggacagcua

SEQ ID NO: 2413491 - RNA, 19 nt, Homo sapiens
  misc_RNA (1)...(19): siRNA sense strand
caagaugagaaaagaaaca

SEQ ID NO: 2413492 - RNA, 19 nt, Homo sapiens
  misc_RNA (1)...(19): siRNA sense strand
guguugaguuauagcccuu

SEQ ID NO: 2413493 - RNA, 19 nt, Homo sapiens
  misc_RNA (1)...(19): siRNA sense strand
gaaaagaaacagaggcuag

SEQ ID NO: 2413494 - RNA, 19 nt, Homo sapiens
  misc_RNA (1)...(19): siRNA sense strand
gugaagaggagaaacagca

SEQ ID NO: 2413495 - RNA, 19 nt, Homo sapiens
  misc_RNA (1)...(19): siRNA sense strand
cuaacaaagaugaagccga

SEQ ID NO: 2413496 - RNA, 19 nt, Homo sapiens
  misc_RNA (1)...(19): siRNA sense strand
cuggaaugauauauacuga

SEQ ID NO: 2413497 - RNA, 19 nt, Homo sapiens
  misc_RNA (1)...(19): siRNA sense strand
gcucuaaacaagccgcaga

SEQ ID NO: 2413498 - RNA, 19 nt, Homo sapiens
  misc_RNA (1)...(19): siRNA sense strand
uguucagacaccaaauaaa

SEQ ID NO: 2413499 - RNA, 19 nt, Homo sapiens
  misc_RNA (1)...(19): siRNA sense strand
ucuacaucauaaagaccaa

SEQ ID NO: 2413500 - RNA, 19 nt, Homo sapiens
  misc_RNA (1)...(19): siRNA sense strand
gagaaaagaaacagaggcu

SEQ ID NO: 2413501 - RNA, 19 nt, Homo sapiens
  misc_RNA (1)...(19): siRNA sense strand
ccucugguauauugagcuu

SEQ ID NO: 2413502 - RNA, 19 nt, Homo sapiens
  misc_RNA (1)...(19): siRNA sense strand
ggcaagaguggcuaugaau

SEQ ID NO: 2413503 - RNA, 19 nt, Homo sapiens
  misc_RNA (1)...(19): siRNA sense strand
guguagaguauaagcauaa

SEQ ID NO: 2413504 - RNA, 19 nt, Homo sapiens
  misc_RNA (1)...(19): siRNA sense strand
aagagauggcugugaaaua

SEQ ID NO: 2413505 - RNA, 19 nt, Homo sapiens
  misc_RNA (1)...(19): siRNA sense strand
cugcuguacaagagaguaa

SEQ ID NO: 2413506 - RNA, 19 nt, Homo sapiens
  misc_RNA (1)...(19): siRNA sense strand
ucuacuugguaauggaaua

SEQ ID NO: 2413507 - RNA, 19 nt, Homo sapiens
  misc_RNA (1)...(19): siRNA sense strand
ugaagagcaccuugggaaa

SEQ ID NO: 2413508 - RNA, 19 nt, Homo sapiens
  misc_RNA (1)...(19): siRNA sense strand
aagaauaguaagagggacu

SEQ ID NO: 2413509 - RNA, 19 nt, Homo sapiens
  misc_RNA (1)...(19): siRNA sense strand
cuggaaugaaagagcuaaa

SEQ ID NO: 2413510 - RNA, 19 nt, Homo sapiens
  misc_RNA (1)...(19): siRNA sense strand
guugaaaaguuaugcgcaa

SEQ ID NO: 2413511 - RNA, 19 nt, Homo sapiens
  misc_RNA (1)...(19): siRNA sense strand
uguggauucuggugggaua

SEQ ID NO: 2413512 - RNA, 19 nt, Homo sapiens
  misc_RNA (1)...(19): siRNA sense strand
cggcaaauuguaugcagua

SEQ ID NO: 2413513 - RNA, 19 nt, Homo sapiens
  misc_RNA (1)...(19): siRNA sense strand
cugaagagcaccuugggaa

SEQ ID NO: 2413514 - RNA, 19 nt, Homo sapiens
  misc_RNA (1)...(19): siRNA sense strand
aagcauaacgaaaugacaa

SEQ ID NO: 2413515 - RNA, 19 nt, Homo sapiens
  misc_RNA (1)...(19): siRNA sense strand
ccagaugaugaaacagaua

SEQ ID NO: 2413516 - RNA, 19 nt, Homo sapiens
  misc_RNA (1)...(19): siRNA sense strand
ggccagaaggugaagaaaa

SEQ ID NO: 2413517 - RNA, 19 nt, Homo sapiens
  misc_RNA (1)...(19): siRNA sense strand
gcucaaagugcaguagaaa

SEQ ID NO: 2413518 - RNA, 19 nt, Homo sapiens
  misc_RNA (1)...(19): siRNA sense strand
cuuuagaugcaauggauau

SEQ ID NO: 2413519 - RNA, 19 nt, Homo sapiens
  misc_RNA (1)...(19): siRNA sense strand
gugcuaauaaggagaacau

SEQ ID NO: 2413520 - RNA, 19 nt, Homo sapiens
  misc_RNA (1)...(19): siRNA sense strand
acuugaaaccggacaauau

SEQ ID NO: 2413521 - RNA, 19 nt, Homo sapiens
  misc_RNA (1)...(19): siRNA sense strand
ugaugaaacaccacaacaa

SEQ ID NO: 2413522 - RNA, 19 nt, Homo sapiens
  misc_RNA (1)...(19): siRNA sense strand
gauucagauagaagcauua

SEQ ID NO: 2413523 - RNA, 19 nt, Homo sapiens
  misc_RNA (1)...(19): siRNA sense strand
cccuaugucuguagaucaa

SEQ ID NO: 2413524 - RNA, 19 nt, Homo sapiens
  misc_RNA (1)...(19): siRNA sense strand
agaaaagaccucaccaaaa

SEQ ID NO: 2413525 - RNA, 19 nt, Homo sapiens
  misc_RNA (1)...(19): siRNA sense strand
acaccagauugccaagaaa

SEQ ID NO: 2413526 - RNA, 19 nt, Homo sapiens
  misc_RNA (1)...(19): siRNA sense strand
acucagaaccauccagaau

SEQ ID NO: 2413527 - RNA, 19 nt, Homo sapiens
  misc_RNA (1)...(19): siRNA sense strand
ugaagagauggcugugaaa

SEQ ID NO: 2413528 - RNA, 19 nt, Homo sapiens
  misc_RNA (1)...(19): siRNA sense strand
aggaaagugaugaagcauu

SEQ ID NO: 2413529 - RNA, 19 nt, Homo sapiens
  misc_RNA (1)...(19): siRNA sense strand
uguguagaguauaagcaua

SEQ ID NO: 2413530 - RNA, 19 nt, Homo sapiens
  misc_RNA (1)...(19): siRNA sense strand
caacaaaaugacugugcua

SEQ ID NO: 2413531 - RNA, 19 nt, Homo sapiens
  misc_RNA (1)...(19): siRNA sense strand
auacaaagagagcuggaau

SEQ ID NO: 2413532 - RNA, 19 nt, Homo sapiens
  misc_RNA (1)...(19): siRNA sense strand
acgccuuauucuagcaaau

SEQ ID NO: 2413533 - RNA, 19 nt, Homo sapiens
  misc_RNA (1)...(19): siRNA sense strand
cauugaugauacaaagaga

SEQ ID NO: 2413534 - RNA, 19 nt, Homo sapiens
  misc_RNA (1)...(19): siRNA sense strand
agugauguggacugggaaa

SEQ ID NO: 2413535 - RNA, 19 nt, Homo sapiens
  misc_RNA (1)...(19): siRNA sense strand
agguccaagcugagagaga

SEQ ID NO: 2413536 - RNA, 19 nt, Homo sapiens
  misc_RNA (1)...(19): siRNA sense strand
aaucagaucaagucgggaa

SEQ ID NO: 2413537 - RNA, 19 nt, Homo sapiens
  misc_RNA (1)...(19): siRNA sense strand
augaagagauggcugugaa

SEQ ID NO: 2413538 - RNA, 19 nt, Homo sapiens
  misc_RNA (1)...(19): siRNA sense strand
agcauaacgaaaugacaaa

SEQ ID NO: 2413539 - RNA, 19 nt, Homo sapiens
  misc_RNA (1)...(19): siRNA sense strand
gugcaggaccuuaagcuau

SEQ ID NO: 2413540 - RNA, 19 nt, Homo sapiens
  misc_RNA (1)...(19): siRNA sense strand
ugaaagagcuaaaacguca

SEQ ID NO: 2413541 - RNA, 19 nt, Homo sapiens
  misc_RNA (1)...(19): siRNA sense strand
ggcaaaaccuagacaagau

SEQ ID NO: 2413542 - RNA, 19 nt, Homo sapiens
  misc_RNA (1)...(19): siRNA sense strand
ggcaaauuguaugcaguaa

SEQ ID NO: 2413543 - RNA, 19 nt, Homo sapiens
  misc_RNA (1)...(19): siRNA sense strand
uuguguaaaccuugcuaaa

SEQ ID NO: 2413544 - RNA, 19 nt, Homo sapiens
  misc_RNA (1)...(19): siRNA sense strand
gggacuugaaaccggacaa

SEQ ID NO: 2413545 - RNA, 19 nt, Homo sapiens
  misc_RNA (1)...(19): siRNA sense strand
gcuuaacaguugaagugca

SEQ ID NO: 2413546 - RNA, 19 nt, Homo sapiens
  misc_RNA (1)...(19): siRNA sense strand
agauucagauagaagcauu

SEQ ID NO: 2413547 - RNA, 19 nt, Homo sapiens
  misc_RNA (1)...(19): siRNA sense strand
acaaaaugacugugcuaau

SEQ ID NO: 2413548 - RNA, 19 nt, Homo sapiens
  misc_RNA (1)...(19): siRNA sense strand
aagaaaugcuguugcuuuu

SEQ ID NO: 2413549 - RNA, 19 nt, Homo sapiens
  misc_RNA (1)...(19): siRNA sense strand
ugauaaugcucaaagugca

SEQ ID NO: 2413550 - RNA, 19 nt, Homo sapiens
  misc_RNA (1)...(19): siRNA sense strand
ccauugaggaauucagcau

SEQ ID NO: 2413551 - RNA, 19 nt, Homo sapiens
  misc_RNA (1)...(19): siRNA sense strand
gguucauaucccauggcua

SEQ ID NO: 2413552 - RNA, 19 nt, Homo sapiens
  misc_RNA (1)...(19): siRNA sense strand
ccgaagagugugagaagag

SEQ ID NO: 2413553 - RNA, 19 nt, Homo sapiens
  misc_RNA (1)...(19): siRNA sense strand
aaauauggacacugacaca

SEQ ID NO: 2413554 - RNA, 19 nt, Homo sapiens
  misc_RNA (1)...(19): siRNA sense strand
gaauaggaucgcagugcca

SEQ ID NO: 2413555 - RNA, 19 nt, Homo sapiens
  misc_RNA (1)...(19): siRNA sense strand
ugcucaaagugcaguagaa

SEQ ID NO: 2413556 - RNA, 19 nt, Homo sapiens
  misc_RNA (1)...(19): siRNA sense strand
ugaaaaguuaugcgcaaaa

SEQ ID NO: 2413557 - RNA, 19 nt, Homo sapiens
  misc_RNA (1)...(19): siRNA sense strand
caguugaagugcaggaccu

SEQ ID NO: 2413558 - RNA, 19 nt, Homo sapiens
  misc_RNA (1)...(19): siRNA sense strand
gggcagaaaggcggcaaau

SEQ ID NO: 2413559 - RNA, 19 nt, Homo sapiens
  misc_RNA (1)...(19): siRNA sense strand
augcaguaaagguuguuaa

SEQ ID NO: 2413560 - RNA, 19 nt, Homo sapiens
  misc_RNA (1)...(19): siRNA sense strand
uugaagugcaggaccuuaa

SEQ ID NO: 2413561 - RNA, 19 nt, Homo sapiens
  misc_RNA (1)...(19): siRNA sense strand
ggaaucauccacagggacu

SEQ ID NO: 2413562 - RNA, 19 nt, Homo sapiens
  misc_RNA (1)...(19): siRNA sense strand
gcuuauuucuaaugagggu

SEQ ID NO: 2413563 - RNA, 19 nt, Homo sapiens
  misc_RNA (1)...(19): siRNA sense strand
gggauuuaacacaccaauu

SEQ ID NO: 2413564 - RNA, 19 nt, Homo sapiens
  misc_RNA (1)...(19): siRNA sense strand
gcacuggcacuaagcaaaa

SEQ ID NO: 2413565 - RNA, 19 nt, Homo sapiens
  misc_RNA (1)...(19): siRNA sense strand
ggacaaagggcucggacga

SEQ ID NO: 2413566 - RNA, 19 nt, Homo sapiens
  misc_RNA (1)...(19): siRNA sense strand
aggaaauggcagaguacga

SEQ ID NO: 2413567 - RNA, 19 nt, Homo sapiens
  misc_RNA (1)...(19): siRNA sense strand
gcugauacaggaagggaca

SEQ ID NO: 2413568 - RNA, 19 nt, Homo sapiens
  misc_RNA (1)...(19): siRNA sense strand
agcuggagauacaggaaau

SEQ ID NO: 2413569 - RNA, 19 nt, Homo sapiens
  misc_RNA (1)...(19): siRNA sense strand
ugauacaggaagggacaaa

SEQ ID NO: 2413570 - RNA, 19 nt, Homo sapiens
  misc_RNA (1)...(19): siRNA sense strand
agauacaggaaauggcaga

SEQ ID NO: 2413571 - RNA, 19 nt, Homo sapiens
  misc_RNA (1)...(19): siRNA sense strand
cagaauauuuaacagcuga

SEQ ID NO: 2413572 - RNA, 19 nt, Homo sapiens
  misc_RNA (1)...(19): siRNA sense strand
acgaguuggcugucaguuu

SEQ ID NO: 2413573 - RNA, 19 nt, Homo sapiens
  misc_RNA (1)...(19): siRNA sense strand
ucaagaaauucaaaggaga

SEQ ID NO: 2413574 - RNA, 19 nt, Homo sapiens
  misc_RNA (1)...(19): siRNA sense strand
augagaaagcucugacaaa

SEQ ID NO: 2413575 - RNA, 19 nt, Homo sapiens
  misc_RNA (1)...(19): siRNA sense strand
uagcugagguuaugggaga

SEQ ID NO: 2413576 - RNA, 19 nt, Homo sapiens
  misc_RNA (1)...(19): siRNA sense strand
ccucagaagaauuugaaga

SEQ ID NO: 2413577 - RNA, 19 nt, Homo sapiens
  misc_RNA (1)...(19): siRNA sense strand
aagacaagugguucagaaa

SEQ ID NO: 2413578 - RNA, 19 nt, Homo sapiens
  misc_RNA (1)...(19): siRNA sense strand
cagaaagaucaaagaccau

SEQ ID NO: 2413579 - RNA, 19 nt, Homo sapiens
  misc_RNA (1)...(19): siRNA sense strand
acgacaagaguaucagaaa

SEQ ID NO: 2413580 - RNA, 19 nt, Homo sapiens
  misc_RNA (1)...(19): siRNA sense strand
ucagaaagaucaaagacca

SEQ ID NO: 2413581 - RNA, 19 nt, Homo sapiens
  misc_RNA (1)...(19): siRNA sense strand
caguguugauagagacuca

SEQ ID NO: 2413582 - RNA, 19 nt, Homo sapiens
  misc_RNA (1)...(19): siRNA sense strand
ucaaaggagaccuggccua

SEQ ID NO: 2413583 - RNA, 19 nt, Homo sapiens
  misc_RNA (1)...(19): siRNA sense strand
gagaggaacuuaaggacuc

SEQ ID NO: 2413584 - RNA, 19 nt, Homo sapiens
  misc_RNA (1)...(19): siRNA sense strand
guggaagcgaauagcagua

SEQ ID NO: 2413585 - RNA, 19 nt, Homo sapiens
  misc_RNA (1)...(19): siRNA sense strand
uguugauagcugagguuau

SEQ ID NO: 2413586 - RNA, 19 nt, Homo sapiens
  misc_RNA (1)...(19): siRNA sense strand
cguuugcuuuggagaggaa

SEQ ID NO: 2413587 - RNA, 19 nt, Homo sapiens
  misc_RNA (1)...(19): siRNA sense strand
gguuaugggagaagauauc

SEQ ID NO: 2413588 - RNA, 19 nt, Homo sapiens
  misc_RNA (1)...(19): siRNA sense strand
gcugaaagcaugugccucu

SEQ ID NO: 2413589 - RNA, 19 nt, Homo sapiens
  misc_RNA (1)...(19): siRNA sense strand
gcuuuggagaggaacuuaa

SEQ ID NO: 2413590 - RNA, 19 nt, Homo sapiens
  misc_RNA (1)...(19): siRNA sense strand
ggagaggaacuuaaggacu

SEQ ID NO: 2413591 - RNA, 19 nt, Homo sapiens
  misc_RNA (1)...(19): siRNA sense strand
gggauguccaggaagguca

SEQ ID NO: 2413592 - RNA, 19 nt, Homo sapiens
  misc_RNA (1)...(19): siRNA sense strand
gggcaaauuggcagaggcu

SEQ ID NO: 2413593 - RNA, 19 nt, Homo sapiens
  misc_RNA (1)...(19): siRNA sense strand
agguuaugggagaagauau

SEQ ID NO: 2413594 - RNA, 19 nt, Homo sapiens
  misc_RNA (1)...(19): siRNA sense strand
gugcugacucucaagaaau

SEQ ID NO: 2413595 - RNA, 19 nt, Homo sapiens
  misc_RNA (1)...(19): siRNA sense strand
uuaaggacucagcaggaaa

SEQ ID NO: 2413596 - RNA, 19 nt, Homo sapiens
  misc_RNA (1)...(19): siRNA sense strand
guuugcagaacuuggagaa

SEQ ID NO: 2413597 - RNA, 19 nt, Homo sapiens
  misc_RNA (1)...(19): siRNA sense strand
uugcagaacuuggagaaaa

SEQ ID NO: 2413598 - RNA, 19 nt, Homo sapiens
  misc_RNA (1)...(19): siRNA sense strand
ggcagaaaagagagaaaca

SEQ ID NO: 2413599 - RNA, 19 nt, Homo sapiens
  misc_RNA (1)...(19): siRNA sense strand
gaaccagaggcgugggcaa

SEQ ID NO: 2413600 - RNA, 19 nt, Homo sapiens
  misc_RNA (1)...(19): siRNA sense strand
acaccaaggaagaagaaca

SEQ ID NO: 2413601 - RNA, 19 nt, Homo sapiens
  misc_RNA (1)...(19): siRNA sense strand
aggaagaagaacaaauaca

SEQ ID NO: 2413602 - RNA, 19 nt, Homo sapiens
  misc_RNA (1)...(19): siRNA sense strand
guuaucuauggguggguua

SEQ ID NO: 2413603 - RNA, 19 nt, Homo sapiens
  misc_RNA (1)...(19): siRNA sense strand
ccuggguggagaaggcuaa

SEQ ID NO: 2413604 - RNA, 19 nt, Homo sapiens
  misc_RNA (1)...(19): siRNA sense strand
gagaaggcuaacagaacca

SEQ ID NO: 2413605 - RNA, 19 nt, Homo sapiens
  misc_RNA (1)...(19): siRNA sense strand
aagaacaaauacagaccca

SEQ ID NO: 2413606 - RNA, 19 nt, Homo sapiens
  misc_RNA (1)...(19): siRNA sense strand
ccucaggaucucaggccuu

SEQ ID NO: 2413607 - RNA, 19 nt, Homo sapiens
  misc_RNA (1)...(19): siRNA sense strand
gggcauaggguuugggaag

SEQ ID NO: 2413608 - RNA, 19 nt, Homo sapiens
  misc_RNA (1)...(19): siRNA sense strand
acaagcuacacgaaagaaa

SEQ ID NO: 2413609 - RNA, 19 nt, Homo sapiens
  misc_RNA (1)...(19): siRNA sense strand
uggaagagaucaaggcccu

SEQ ID NO: 2413610 - RNA, 19 nt, Homo sapiens
  misc_RNA (1)...(19): siRNA sense strand
gguuuggggcauaggguuu

SEQ ID NO: 2413611 - RNA, 19 nt, Homo sapiens
  misc_RNA (1)...(19): siRNA sense strand
gcugagaacuugcuggagu

SEQ ID NO: 2413612 - RNA, 19 nt, Homo sapiens
  misc_RNA (1)...(19): siRNA sense strand
ggacagaggcuacacggau

SEQ ID NO: 2413613 - RNA, 19 nt, Homo sapiens
  misc_RNA (1)...(19): siRNA sense strand
gcucuuggaugaugggacu

SEQ ID NO: 2413614 - RNA, 19 nt, Homo sapiens
  misc_RNA (1)...(19): siRNA sense strand
aguccaagccagagcacca

SEQ ID NO: 2413615 - RNA, 19 nt, Homo sapiens
  misc_RNA (1)...(19): siRNA sense strand
cggaaaaggcagccaagau

SEQ ID NO: 2413616 - RNA, 19 nt, Homo sapiens
  misc_RNA (1)...(19): siRNA sense strand
aggcagaaggaucccgcaa

SEQ ID NO: 2413617 - RNA, 19 nt, Homo sapiens
  misc_RNA (1)...(19): siRNA sense strand
ggaaagagauggugugcug

SEQ ID NO: 2413618 - RNA, 19 nt, Homo sapiens
  misc_RNA (1)...(19): siRNA sense strand
gcuuauucccagaaagaga

SEQ ID NO: 2413619 - RNA, 19 nt, Homo sapiens
  misc_RNA (1)...(19): siRNA sense strand
augagaaagaggagagucu

SEQ ID NO: 2413620 - RNA, 19 nt, Homo sapiens
  misc_RNA (1)...(19): siRNA sense strand
cugaagaauugcuuggcca

SEQ ID NO: 2413621 - RNA, 19 nt, Homo sapiens
  misc_RNA (1)...(19): siRNA sense strand
agucuuuguugcuggcuau

SEQ ID NO: 2413622 - RNA, 19 nt, Homo sapiens
  misc_RNA (1)...(19): siRNA sense strand
uugcugugcaugagaaaga

SEQ ID NO: 2413623 - RNA, 19 nt, Homo sapiens
  misc_RNA (1)...(19): siRNA sense strand
ggauugaugacaaaggagu

SEQ ID NO: 2413624 - RNA, 19 nt, Homo sapiens
  misc_RNA (1)...(19): siRNA sense strand
aggacuuuguuaucagcaa

SEQ ID NO: 2413625 - RNA, 19 nt, Homo sapiens
  misc_RNA (1)...(19): siRNA sense strand
aggaagaaaaggagaaaua

SEQ ID NO: 2413626 - RNA, 19 nt, Homo sapiens
  misc_RNA (1)...(19): siRNA sense strand
uggcaaaggcaucagaaau

SEQ ID NO: 2413627 - RNA, 19 nt, Homo sapiens
  misc_RNA (1)...(19): siRNA sense strand
gggaggaagaaaaggagaa

SEQ ID NO: 2413628 - RNA, 19 nt, Homo sapiens
  misc_RNA (1)...(19): siRNA sense strand
ccguaaggccagccggaau

SEQ ID NO: 2413629 - RNA, 19 nt, Homo sapiens
  misc_RNA (1)...(19): siRNA sense strand
gaacaaagaucaaacacac

SEQ ID NO: 2413630 - RNA, 19 nt, Homo sapiens
  misc_RNA (1)...(19): siRNA sense strand
ccaagaagguauuauggca

SEQ ID NO: 2413631 - RNA, 19 nt, Homo sapiens
  misc_RNA (1)...(19): siRNA sense strand
ugggauuauucuagcaaca

SEQ ID NO: 2413632 - RNA, 19 nt, Homo sapiens
  misc_RNA (1)...(19): siRNA sense strand
aggagaaauacgcagaaau

SEQ ID NO: 2413633 - RNA, 19 nt, Homo sapiens
  misc_RNA (1)...(19): siRNA sense strand
acgcagaaauggcucgaga

SEQ ID NO: 2413634 - RNA, 19 nt, Homo sapiens
  misc_RNA (1)...(19): siRNA sense strand
ggugaaauuccacgaggau

SEQ ID NO: 2413635 - RNA, 19 nt, Homo sapiens
  misc_RNA (1)...(19): siRNA sense strand
uguuugaagcauauggcaa

SEQ ID NO: 2413636 - RNA, 19 nt, Homo sapiens
  misc_RNA (1)...(19): siRNA sense strand
ggagaagauccccgaacua

SEQ ID NO: 2413637 - RNA, 19 nt, Homo sapiens
  misc_RNA (1)...(19): siRNA sense strand
aagaagguauuauggcaga

SEQ ID NO: 2413638 - RNA, 19 nt, Homo sapiens
  misc_RNA (1)...(19): siRNA sense strand
ugauagaaccagagucaac

SEQ ID NO: 2413639 - RNA, 19 nt, Homo sapiens
  misc_RNA (1)...(19): siRNA sense strand
ggaggaagaaaaggagaaa

SEQ ID NO: 2413640 - RNA, 19 nt, Homo sapiens
  misc_RNA (1)...(19): siRNA sense strand
gaagcuaaggguugggagu

SEQ ID NO: 2413641 - RNA, 19 nt, Homo sapiens
  misc_RNA (1)...(19): siRNA sense strand
aaugaggaacaaagaucaa

SEQ ID NO: 2413642 - RNA, 19 nt, Homo sapiens
  misc_RNA (1)...(19): siRNA sense strand
aggaauuacccgcuuacua

SEQ ID NO: 2413643 - RNA, 19 nt, Homo sapiens
  misc_RNA (1)...(19): siRNA sense strand
aagcauauggcaaaggcau

SEQ ID NO: 2413644 - RNA, 19 nt, Homo sapiens
  misc_RNA (1)...(19): siRNA sense strand
auggcaaaggcaucagaaa

SEQ ID NO: 2413645 - RNA, 19 nt, Homo sapiens
  misc_RNA (1)...(19): siRNA sense strand
ucaucaaagaagucguaaa

SEQ ID NO: 2413646 - RNA, 19 nt, Homo sapiens
  misc_RNA (1)...(19): siRNA sense strand
aagaagucguaaagagcca

SEQ ID NO: 2413647 - RNA, 19 nt, Homo sapiens
  misc_RNA (1)...(19): siRNA sense strand
ucacauaggauuucagcca

SEQ ID NO: 2413648 - RNA, 19 nt, Homo sapiens
  misc_RNA (1)...(19): siRNA sense strand
cuccugaagaaauggcaaa

SEQ ID NO: 2413649 - RNA, 19 nt, Homo sapiens
  misc_RNA (1)...(19): siRNA sense strand
ccuuuauggugcuacaaaa

SEQ ID NO: 2413650 - RNA, 19 nt, Homo sapiens
  misc_RNA (1)...(19): siRNA sense strand
gugauaaaaucgaagcaaa

SEQ ID NO: 2413651 - RNA, 19 nt, Homo sapiens
  misc_RNA (1)...(19): siRNA sense strand
uggcaaaucuagaccgaga

SEQ ID NO: 2413652 - RNA, 19 nt, Homo sapiens
  misc_RNA (1)...(19): siRNA sense strand
uggagagauaucagaaaua

SEQ ID NO: 2413653 - RNA, 19 nt, Homo sapiens
  misc_RNA (1)...(19): siRNA sense strand
cagccaagauacugcggaa

SEQ ID NO: 2413654 - RNA, 19 nt, Homo sapiens
  misc_RNA (1)...(19): siRNA sense strand
gggaaaugucggagaccca

SEQ ID NO: 2413655 - RNA, 19 nt, Homo sapiens
  misc_RNA (1)...(19): siRNA sense strand
uggaggaugaagacagaua

SEQ ID NO: 2413656 - RNA, 19 nt, Homo sapiens
  misc_RNA (1)...(19): siRNA sense strand
agauuuaggcauuggagau

SEQ ID NO: 2413657 - RNA, 19 nt, Homo sapiens
  misc_RNA (1)...(19): siRNA sense strand
cuggagagauaucagaaau

SEQ ID NO: 2413658 - RNA, 19 nt, Homo sapiens
  misc_RNA (1)...(19): siRNA sense strand
cggaagagcaagucagaug

SEQ ID NO: 2413659 - RNA, 19 nt, Homo sapiens
  misc_RNA (1)...(19): siRNA sense strand
gauaauugcucaagccugu

SEQ ID NO: 2413660 - RNA, 19 nt, Homo sapiens
  misc_RNA (1)...(19): siRNA sense strand
auuagauacucaaguggua

SEQ ID NO: 2413661 - RNA, 19 nt, Homo sapiens
  misc_RNA (1)...(19): siRNA sense strand
aggagaaaaucaugguauu

SEQ ID NO: 2413662 - RNA, 19 nt, Homo sapiens
  misc_RNA (1)...(19): siRNA sense strand
gauuaagcuccauguggua

SEQ ID NO: 2413663 - RNA, 19 nt, Homo sapiens
  misc_RNA (1)...(19): siRNA sense strand
uggcaugauuaccaguaua

SEQ ID NO: 2413664 - RNA, 19 nt, Homo sapiens
  misc_RNA (1)...(19): siRNA sense strand
cuucagcaacaguggaaau

SEQ ID NO: 2413665 - RNA, 19 nt, Homo sapiens
  misc_RNA (1)...(19): siRNA sense strand
uggcagaagcaaugaaauc

SEQ ID NO: 2413666 - RNA, 19 nt, Homo sapiens
  misc_RNA (1)...(19): siRNA sense strand
uucacaaagcaguaagaaa

SEQ ID NO: 2413667 - RNA, 19 nt, Homo sapiens
  misc_RNA (1)...(19): siRNA sense strand
guauaggauaauugcucaa

SEQ ID NO: 2413668 - RNA, 19 nt, Homo sapiens
  misc_RNA (1)...(19): siRNA sense strand
aaaucuagaccgagaaacu

SEQ ID NO: 2413669 - RNA, 19 nt, Homo sapiens
  misc_RNA (1)...(19): siRNA sense strand
cauuaaagcagauguccuu

SEQ ID NO: 2413670 - RNA, 19 nt, Homo sapiens
  misc_RNA (1)...(19): siRNA sense strand
agagaaauauaaugcgugu

SEQ ID NO: 2413671 - RNA, 19 nt, Homo sapiens
  misc_RNA (1)...(19): siRNA sense strand
cguuggaagucaaagaacu

SEQ ID NO: 2413672 - RNA, 19 nt, Homo sapiens
  misc_RNA (1)...(19): siRNA sense strand
agaccgagaaacugugcaa

SEQ ID NO: 2413673 - RNA, 19 nt, Homo sapiens
  misc_RNA (1)...(19): siRNA sense strand
cuacauuggcagcaugauu

SEQ ID NO: 2413674 - RNA, 19 nt, Homo sapiens
  misc_RNA (1)...(19): siRNA sense strand
cucaagugguagaacgaga

SEQ ID NO: 2413675 - RNA, 19 nt, Homo sapiens
  misc_RNA (1)...(19): siRNA sense strand
gaguaugacaccagccuca

SEQ ID NO: 2413676 - RNA, 19 nt, Homo sapiens
  misc_RNA (1)...(19): siRNA sense strand
agaucuaauuccuguggau

SEQ ID NO: 2413677 - RNA, 19 nt, Homo sapiens
  misc_RNA (1)...(19): siRNA sense strand
ggcacgaagcgaagagagu

SEQ ID NO: 2413678 - RNA, 19 nt, Homo sapiens
  misc_RNA (1)...(19): siRNA sense strand
aagucaaagaacucagcaa

SEQ ID NO: 2413679 - RNA, 19 nt, Homo sapiens
  misc_RNA (1)...(19): siRNA sense strand
guacaguugauauagaaga

SEQ ID NO: 2413680 - RNA, 19 nt, Homo sapiens
  misc_RNA (1)...(19): siRNA sense strand
cacgaagcgaagagaguga

SEQ ID NO: 2413681 - RNA, 19 nt, Homo sapiens
  misc_RNA (1)...(19): siRNA sense strand
aaacagagcuagaugagug

SEQ ID NO: 2413682 - RNA, 19 nt, Homo sapiens
  misc_RNA (1)...(19): siRNA sense strand
auucagaagcaacgaacuu

SEQ ID NO: 2413683 - RNA, 19 nt, Homo sapiens
  misc_RNA (1)...(19): siRNA sense strand
caacaucagccaagauacu

SEQ ID NO: 2413684 - RNA, 19 nt, Homo sapiens
  misc_RNA (1)...(19): siRNA sense strand
cucagcgacuggagagcaa

SEQ ID NO: 2413685 - RNA, 19 nt, Homo sapiens
  misc_RNA (1)...(19): siRNA sense strand
acuuccaggugcugaauuu

SEQ ID NO: 2413686 - RNA, 19 nt, Homo sapiens
  misc_RNA (1)...(19): siRNA sense strand
ugaaaguuuuggagaaguu

SEQ ID NO: 2413687 - RNA, 19 nt, Homo sapiens
  misc_RNA (1)...(19): siRNA sense strand
ccucacacgcugccagaau

SEQ ID NO: 2413688 - RNA, 19 nt, Homo sapiens
  misc_RNA (1)...(19): siRNA sense strand
acuggagagauaucagaaa

SEQ ID NO: 2413689 - RNA, 19 nt, Homo sapiens
  misc_RNA (1)...(19): siRNA sense strand
agacaugguuagcaaaaga

SEQ ID NO: 2413690 - RNA, 19 nt, Homo sapiens
  misc_RNA (1)...(19): siRNA sense strand
ccucguuggaagucaaaga

SEQ ID NO: 2413691 - RNA, 19 nt, Homo sapiens
  misc_RNA (1)...(19): siRNA sense strand
caaagaacucagcaaggau

SEQ ID NO: 2413692 - RNA, 19 nt, Homo sapiens
  misc_RNA (1)...(19): siRNA sense strand
ccaugugguaccuguggaa

SEQ ID NO: 2413693 - RNA, 19 nt, Homo sapiens
  misc_RNA (1)...(19): siRNA sense strand
ugguuaagcaagaagaauu

SEQ ID NO: 2413694 - RNA, 19 nt, Homo sapiens
  misc_RNA (1)...(19): siRNA sense strand
gcagcaagauugaagaagu

SEQ ID NO: 2413695 - RNA, 19 nt, Homo sapiens
  misc_RNA (1)...(19): siRNA sense strand
caguuaaaggagaagaaga

SEQ ID NO: 2413696 - RNA, 19 nt, Homo sapiens
  misc_RNA (1)...(19): siRNA sense strand
gcacacaggaugaagcaca

SEQ ID NO: 2413697 - RNA, 19 nt, Homo sapiens
  misc_RNA (1)...(19): siRNA sense strand
gaugcaagugauugagcaa

SEQ ID NO: 2413698 - RNA, 19 nt, Homo sapiens
  misc_RNA (1)...(19): siRNA sense strand
gugauugagcaaagggaca

SEQ ID NO: 2413699 - RNA, 19 nt, Homo sapiens
  misc_RNA (1)...(19): siRNA sense strand
agaaaaugcucaaggagga

SEQ ID NO: 2413700 - RNA, 19 nt, Homo sapiens
  misc_RNA (1)...(19): siRNA sense strand
aggaggagagccagaaaga

SEQ ID NO: 2413701 - RNA, 19 nt, Homo sapiens
  misc_RNA (1)...(19): siRNA sense strand
cuucugagauccagggugu

SEQ ID NO: 2413702 - RNA, 19 nt, Homo sapiens
  misc_RNA (1)...(19): siRNA sense strand
cagcaagauugaagaaguc

SEQ ID NO: 2413703 - RNA, 19 nt, Homo sapiens
  misc_RNA (1)...(19): siRNA sense strand
agaagcagauucaggcaca

SEQ ID NO: 2413704 - RNA, 19 nt, Homo sapiens
  misc_RNA (1)...(19): siRNA sense strand
ccucaaagcuggggagcga

SEQ ID NO: 2413705 - RNA, 19 nt, Homo sapiens
  misc_RNA (1)...(19): siRNA sense strand
agaggaaggugcugccuga

SEQ ID NO: 2413706 - RNA, 19 nt, Homo sapiens
  misc_RNA (1)...(19): siRNA sense strand
aguuaaaggagaagaagac

SEQ ID NO: 2413707 - RNA, 19 nt, Homo sapiens
  misc_RNA (1)...(19): siRNA sense strand
ccuuagaggaacaacgcau

SEQ ID NO: 2413708 - RNA, 19 nt, Homo sapiens
  misc_RNA (1)...(19): siRNA sense strand
ucuauaaggcucaggccau

SEQ ID NO: 2413709 - RNA, 19 nt, Homo sapiens
  misc_RNA (1)...(19): siRNA sense strand
gcucauagccaaugccauc

SEQ ID NO: 2413710 - RNA, 19 nt, Homo sapiens
  misc_RNA (1)...(19): siRNA sense strand
acuuagaagaagaaagaag

SEQ ID NO: 2413711 - RNA, 19 nt, Homo sapiens
  misc_RNA (1)...(19): siRNA sense strand
gguuuaagcugguucugga

SEQ ID NO: 2413712 - RNA, 19 nt, Homo sapiens
  misc_RNA (1)...(19): siRNA sense strand
ggaacaagcucaaggggag

SEQ ID NO: 2413713 - RNA, 19 nt, Homo sapiens
  misc_RNA (1)...(19): siRNA sense strand
cagaaagaugagaaggauc

SEQ ID NO: 2413714 - RNA, 19 nt, Homo sapiens
  misc_RNA (1)...(19): siRNA sense strand
ccagacaaagaaaggacau

SEQ ID NO: 2413715 - RNA, 19 nt, Homo sapiens
  misc_RNA (1)...(19): siRNA sense strand
uggaauuagaagaucauca

SEQ ID NO: 2413716 - RNA, 19 nt, Homo sapiens
  misc_RNA (1)...(19): siRNA sense strand
aaagaaaggacaucaggga

SEQ ID NO: 2413717 - RNA, 19 nt, Homo sapiens
  misc_RNA (1)...(19): siRNA sense strand
aucuaaacgaagagcaaga

SEQ ID NO: 2413718 - RNA, 19 nt, Homo sapiens
  misc_RNA (1)...(19): siRNA sense strand
cccucagacucaaagacaa

SEQ ID NO: 2413719 - RNA, 19 nt, Homo sapiens
  misc_RNA (1)...(19): siRNA sense strand
agagaggggcucaggagaa

SEQ ID NO: 2413720 - RNA, 19 nt, Homo sapiens
  misc_RNA (1)...(19): siRNA sense strand
ccuccaagaauccagacaa

SEQ ID NO: 2413721 - RNA, 19 nt, Homo sapiens
  misc_RNA (1)...(19): siRNA sense strand
aagaauccagacaaagaaa

SEQ ID NO: 2413722 - RNA, 19 nt, Homo sapiens
  misc_RNA (1)...(19): siRNA sense strand
aggaacaacgcaucagaga

SEQ ID NO: 2413723 - RNA, 19 nt, Homo sapiens
  misc_RNA (1)...(19): siRNA sense strand
cugcagcaagauugaagaa

SEQ ID NO: 2413724 - RNA, 19 nt, Homo sapiens
  misc_RNA (1)...(19): siRNA sense strand
agaagaucaucaaagcaga

SEQ ID NO: 2413725 - RNA, 19 nt, Homo sapiens
  misc_RNA (1)...(19): siRNA sense strand
gauuagagauagaaggaga

SEQ ID NO: 2413726 - RNA, 19 nt, Homo sapiens
  misc_RNA (1)...(19): siRNA sense strand
aggguaaagauuagagaua

SEQ ID NO: 2413727 - RNA, 19 nt, Homo sapiens
  misc_RNA (1)...(19): siRNA sense strand
agcaauagggcuaggguaa

SEQ ID NO: 2413728 - RNA, 19 nt, Homo sapiens
  misc_RNA (1)...(19): siRNA sense strand
gugaaaagcagaagaaauu

SEQ ID NO: 2413729 - RNA, 19 nt, Homo sapiens
  misc_RNA (1)...(19): siRNA sense strand
ggcugcaaguagugggaaa

SEQ ID NO: 2413730 - RNA, 19 nt, Homo sapiens
  misc_RNA (1)...(19): siRNA sense strand
aggugaggcuaaagaacaa

SEQ ID NO: 2413731 - RNA, 19 nt, Homo sapiens
  misc_RNA (1)...(19): siRNA sense strand
ugacugaagaggagaaaga

SEQ ID NO: 2413732 - RNA, 19 nt, Homo sapiens
  misc_RNA (1)...(19): siRNA sense strand
ccaggaaguagcaaagaaa

SEQ ID NO: 2413733 - RNA, 19 nt, Homo sapiens
  misc_RNA (1)...(19): siRNA sense strand
auagagagcaauagggcua

SEQ ID NO: 2413734 - RNA, 19 nt, Homo sapiens
  misc_RNA (1)...(19): siRNA sense strand
cgagaaagugaaagaacau

SEQ ID NO: 2413735 - RNA, 19 nt, Homo sapiens
  misc_RNA (1)...(19): siRNA sense strand
gcagaagaaauuggagaaa

SEQ ID NO: 2413736 - RNA, 19 nt, Homo sapiens
  misc_RNA (1)...(19): siRNA sense strand
agaaagaaagaauggaaca

SEQ ID NO: 2413737 - RNA, 19 nt, Homo sapiens
  misc_RNA (1)...(19): siRNA sense strand
cugaagaggagaaagagua

SEQ ID NO: 2413738 - RNA, 19 nt, Homo sapiens
  misc_RNA (1)...(19): siRNA sense strand
ggaaggaguaggucgggaa

SEQ ID NO: 2413739 - RNA, 19 nt, Homo sapiens
  misc_RNA (1)...(19): siRNA sense strand
acgagaaagugaaagaaca

SEQ ID NO: 2413740 - RNA, 19 nt, Homo sapiens
  misc_RNA (1)...(19): siRNA sense strand
caagagaagcagacgguga

SEQ ID NO: 2413741 - RNA, 19 nt, Homo sapiens
  misc_RNA (1)...(19): siRNA sense strand
gggaacgugaacaggauaa

SEQ ID NO: 2413742 - RNA, 19 nt, Homo sapiens
  misc_RNA (1)...(19): siRNA sense strand
agaaagaauggaacaacaa

SEQ ID NO: 2413743 - RNA, 19 nt, Homo sapiens
  misc_RNA (1)...(19): siRNA sense strand
aaaugauguugcugacaaa

SEQ ID NO: 2413744 - RNA, 19 nt, Homo sapiens
  misc_RNA (1)...(19): siRNA sense strand
aagagaaagacgacgaaau

SEQ ID NO: 2413745 - RNA, 19 nt, Homo sapiens
  misc_RNA (1)...(19): siRNA sense strand
cgcaguaggagucgagaua

SEQ ID NO: 2413746 - RNA, 19 nt, Homo sapiens
  misc_RNA (1)...(19): siRNA sense strand
cgugaaaagcagaagaaau

SEQ ID NO: 2413747 - RNA, 19 nt, Homo sapiens
  misc_RNA (1)...(19): siRNA sense strand
aagaaagaauggaacaaca

SEQ ID NO: 2413748 - RNA, 19 nt, Homo sapiens
  misc_RNA (1)...(19): siRNA sense strand
uagcauugaaagagaaaga

SEQ ID NO: 2413749 - RNA, 19 nt, Homo sapiens
  misc_RNA (1)...(19): siRNA sense strand
agagagacguagaaguaga

SEQ ID NO: 2413750 - RNA, 19 nt, Homo sapiens
  misc_RNA (1)...(19): siRNA sense strand
agucaggaugauagauuaa

SEQ ID NO: 2413751 - RNA, 19 nt, Homo sapiens
  misc_RNA (1)...(19): siRNA sense strand
gugaugaggaagaagaaga

SEQ ID NO: 2413752 - RNA, 19 nt, Homo sapiens
  misc_RNA (1)...(19): siRNA sense strand
aggaaacgagaaagugaaa

SEQ ID NO: 2413753 - RNA, 19 nt, Homo sapiens
  misc_RNA (1)...(19): siRNA sense strand
ccccagaaucgaagagaaa

SEQ ID NO: 2413754 - RNA, 19 nt, Homo sapiens
  misc_RNA (1)...(19): siRNA sense strand
ccaaagaugcacaccgcaa

SEQ ID NO: 2413755 - RNA, 19 nt, Homo sapiens
  misc_RNA (1)...(19): siRNA sense strand
agcauaaaggugaggcuaa

SEQ ID NO: 2413756 - RNA, 19 nt, Homo sapiens
  misc_RNA (1)...(19): siRNA sense strand
aggaagaagaagacacuga

SEQ ID NO: 2413757 - RNA, 19 nt, Homo sapiens
  misc_RNA (1)...(19): siRNA sense strand
gcagcuauuacaugauaaa

SEQ ID NO: 2413758 - RNA, 19 nt, Homo sapiens
  misc_RNA (1)...(19): siRNA sense strand
augauaaacagauggaaga

SEQ ID NO: 2413759 - RNA, 19 nt, Homo sapiens
  misc_RNA (1)...(19): siRNA sense strand
gagcaauagggcuagggua

SEQ ID NO: 2413760 - RNA, 19 nt, Homo sapiens
  misc_RNA (1)...(19): siRNA sense strand
gugaacaggauaaaagaaa

SEQ ID NO: 2413761 - RNA, 19 nt, Homo sapiens
  misc_RNA (1)...(19): siRNA sense strand
acuagaagcaagagaagca

SEQ ID NO: 2413762 - RNA, 19 nt, Homo sapiens
  misc_RNA (1)...(19): siRNA sense strand
acaaauugacgcaguaaaa

SEQ ID NO: 2413763 - RNA, 19 nt, Homo sapiens
  misc_RNA (1)...(19): siRNA sense strand
gguuauggaucaggagaca

SEQ ID NO: 2413764 - RNA, 19 nt, Homo sapiens
  misc_RNA (1)...(19): siRNA sense strand
cgacgaaaucggaguccuu

SEQ ID NO: 2413765 - RNA, 19 nt, Homo sapiens
  misc_RNA (1)...(19): siRNA sense strand
acaaagaaagggaacguga

SEQ ID NO: 2413766 - RNA, 19 nt, Homo sapiens
  misc_RNA (1)...(19): siRNA sense strand
aggagaaagaguaucaaau

SEQ ID NO: 2413767 - RNA, 19 nt, Homo sapiens
  misc_RNA (1)...(19): siRNA sense strand
ugaaagagaaagacgacga

SEQ ID NO: 2413768 - RNA, 19 nt, Homo sapiens
  misc_RNA (1)...(19): siRNA sense strand
uggaaaucuuagugggaac

SEQ ID NO: 2413769 - RNA, 19 nt, Homo sapiens
  misc_RNA (1)...(19): siRNA sense strand
auuugauagugaugaggaa

SEQ ID NO: 2413770 - RNA, 19 nt, Homo sapiens
  misc_RNA (1)...(19): siRNA sense strand
agaagaagacacugaaaau

SEQ ID NO: 2413771 - RNA, 19 nt, Homo sapiens
  misc_RNA (1)...(19): siRNA sense strand
gaaaagcagcaaacagaaa

SEQ ID NO: 2413772 - RNA, 19 nt, Homo sapiens
  misc_RNA (1)...(19): siRNA sense strand
aagagaacuccaaaugaaa

SEQ ID NO: 2413773 - RNA, 19 nt, Homo sapiens
  misc_RNA (1)...(19): siRNA sense strand
ugaagaggagaaagaguau

SEQ ID NO: 2413774 - RNA, 19 nt, Homo sapiens
  misc_RNA (1)...(19): siRNA sense strand
auucuagacaggauaguaa

SEQ ID NO: 2413775 - RNA, 19 nt, Homo sapiens
  misc_RNA (1)...(19): siRNA sense strand
ggugaugugguuaaugaaa

SEQ ID NO: 2413776 - RNA, 19 nt, Homo sapiens
  misc_RNA (1)...(19): siRNA sense strand
ggaaguucuaguaguggua

SEQ ID NO: 2413777 - RNA, 19 nt, Homo sapiens
  misc_RNA (1)...(19): siRNA sense strand
aaggagaggagucgaagua

SEQ ID NO: 2413778 - RNA, 19 nt, Homo sapiens
  misc_RNA (1)...(19): siRNA sense strand
agaaagacaaagaaaggga

SEQ ID NO: 2413779 - RNA, 19 nt, Homo sapiens
  misc_RNA (1)...(19): siRNA sense strand
agacaggauaguaagaaaa

SEQ ID NO: 2413780 - RNA, 19 nt, Homo sapiens
  misc_RNA (1)...(19): siRNA sense strand
aagcagaagaaauuggaga

SEQ ID NO: 2413781 - RNA, 19 nt, Homo sapiens
  misc_RNA (1)...(19): siRNA sense strand
auuaagaaccuuugcacaa

SEQ ID NO: 2413782 - RNA, 19 nt, Homo sapiens
  misc_RNA (1)...(19): siRNA sense strand
cugcaggaacauugaagua

SEQ ID NO: 2413783 - RNA, 19 nt, Homo sapiens
  misc_RNA (1)...(19): siRNA sense strand
uuugauuuccagagggaua

SEQ ID NO: 2413784 - RNA, 19 nt, Homo sapiens
  misc_RNA (1)...(19): siRNA sense strand
aaucuaaauggguguacaa

SEQ ID NO: 2413785 - RNA, 19 nt, Homo sapiens
  misc_RNA (1)...(19): siRNA sense strand
auauuaaaguccacgccua

SEQ ID NO: 2413786 - RNA, 19 nt, Homo sapiens
  misc_RNA (1)...(19): siRNA sense strand
ucucauuacuauaugcaga

SEQ ID NO: 2413787 - RNA, 19 nt, Homo sapiens
  misc_RNA (1)...(19): siRNA sense strand
gaauauuggaaguggcaag

SEQ ID NO: 2413788 - RNA, 19 nt, Homo sapiens
  misc_RNA (1)...(19): siRNA sense strand
gggccgaguaguggagaau

SEQ ID NO: 2413789 - RNA, 19 nt, Homo sapiens
  misc_RNA (1)...(19): siRNA sense strand
acgugaacggagugaccaa

SEQ ID NO: 2413790 - RNA, 19 nt, Homo sapiens
  misc_RNA (1)...(19): siRNA sense strand
aauuaacagaugugggcuu

SEQ ID NO: 2413791 - RNA, 19 nt, Homo sapiens
  misc_RNA (1)...(19): siRNA sense strand
agagcagguuugagauguu

SEQ ID NO: 2413792 - RNA, 19 nt, Homo sapiens
  misc_RNA (1)...(19): siRNA sense strand
caggaauugccaugaacuu

SEQ ID NO: 2413793 - RNA, 19 nt, Homo sapiens
  misc_RNA (1)...(19): siRNA sense strand
cagauaacagauagcacau

SEQ ID NO: 2413794 - RNA, 19 nt, Homo sapiens
  misc_RNA (1)...(19): siRNA sense strand
cuugcaaaucacagaugaa

SEQ ID NO: 2413795 - RNA, 19 nt, Homo sapiens
  misc_RNA (1)...(19): siRNA sense strand
ggagggacgugaacggagu

SEQ ID NO: 2413796 - RNA, 19 nt, Homo sapiens
  misc_RNA (1)...(19): siRNA sense strand
ggagaauauuucaaaacga

SEQ ID NO: 2413797 - RNA, 19 nt, Homo sapiens
  misc_RNA (1)...(19): siRNA sense strand
uguacuagccuuagcaagu

SEQ ID NO: 2413798 - RNA, 19 nt, Homo sapiens
  misc_RNA (1)...(19): siRNA sense strand
ucuuggagugggagacaau

SEQ ID NO: 2413799 - RNA, 19 nt, Homo sapiens
  misc_RNA (1)...(19): siRNA sense strand
ggcuuagaauauuggaagu

SEQ ID NO: 2413800 - RNA, 19 nt, Homo sapiens
  misc_RNA (1)...(19): siRNA sense strand
gggauguugaauuuggaaa

SEQ ID NO: 2413801 - RNA, 19 nt, Homo sapiens
  misc_RNA (1)...(19): siRNA sense strand
cggauugggugcaaggagu

SEQ ID NO: 2413802 - RNA, 19 nt, Homo sapiens
  misc_RNA (1)...(19): siRNA sense strand
ggugcaaggaguugguguu

SEQ ID NO: 2413803 - RNA, 19 nt, Homo sapiens
  misc_RNA (1)...(19): siRNA sense strand
aggaguugguguugaugga

SEQ ID NO: 2413804 - RNA, 19 nt, Homo sapiens
  misc_RNA (1)...(19): siRNA sense strand
ugguguugauggaggagca

SEQ ID NO: 2413805 - RNA, 19 nt, Homo sapiens
  misc_RNA (1)...(19): siRNA sense strand
gggauguugaauuuggaaa

SEQ ID NO: 2413806 - RNA, 19 nt, Homo sapiens
  misc_RNA (1)...(19): siRNA sense strand
cggauugggugcaaggagu

SEQ ID NO: 2413807 - RNA, 19 nt, Homo sapiens
  misc_RNA (1)...(19): siRNA sense strand
ggugcaaggaguugguguu

SEQ ID NO: 2413808 - RNA, 19 nt, Homo sapiens
  misc_RNA (1)...(19): siRNA sense strand
aggaguugguguugaugga

SEQ ID NO: 2413809 - RNA, 19 nt, Homo sapiens
  misc_RNA (1)...(19): siRNA sense strand
ugguguugauggaggagca

SEQ ID NO: 2413810 - RNA, 19 nt, Homo sapiens
  misc_RNA (1)...(19): siRNA sense strand
aggaacagaagcaggccua

SEQ ID NO: 2413811 - RNA, 19 nt, Homo sapiens
  misc_RNA (1)...(19): siRNA sense strand
cagaucaaggugagaccaa

SEQ ID NO: 2413812 - RNA, 19 nt, Homo sapiens
  misc_RNA (1)...(19): siRNA sense strand
aggccaagaacccgaagaa

SEQ ID NO: 2413813 - RNA, 19 nt, Homo sapiens
  misc_RNA (1)...(19): siRNA sense strand
aggaauaucugaaggcccu

SEQ ID NO: 2413814 - RNA, 19 nt, Homo sapiens
  misc_RNA (1)...(19): siRNA sense strand
ccuacaacggccagagcga

SEQ ID NO: 2413815 - RNA, 19 nt, Homo sapiens
  misc_RNA (1)...(19): siRNA sense strand
ggucagaaccccagugcca

SEQ ID NO: 2413816 - RNA, 19 nt, Homo sapiens
  misc_RNA (1)...(19): siRNA sense strand
ugggagaggaacagaagca

SEQ ID NO: 2413817 - RNA, 19 nt, Homo sapiens
  misc_RNA (1)...(19): siRNA sense strand
gaagcagcaaagaaggaau

SEQ ID NO: 2413818 - RNA, 19 nt, Homo sapiens
  misc_RNA (1)...(19): siRNA sense strand
aggcaaacccaccagccaa

SEQ ID NO: 2413819 - RNA, 19 nt, Homo sapiens
  misc_RNA (1)...(19): siRNA sense strand
gaggaagacagaagcagca

SEQ ID NO: 2413820 - RNA, 19 nt, Homo sapiens
  misc_RNA (1)...(19): siRNA sense strand
accaagagcacucaggcaa

SEQ ID NO: 2413821 - RNA, 19 nt, Homo sapiens
  misc_RNA (1)...(19): siRNA sense strand
agguguacguguuagucaa

SEQ ID NO: 2413822 - RNA, 19 nt, Homo sapiens
  misc_RNA (1)...(19): siRNA sense strand
gacagaauaucuugcccua

SEQ ID NO: 2413823 - RNA, 19 nt, Homo sapiens
  misc_RNA (1)...(19): siRNA sense strand
ccgaggaggaacaggugaa

SEQ ID NO: 2413824 - RNA, 19 nt, Homo sapiens
  misc_RNA (1)...(19): siRNA sense strand
cuacagagguggaggcccu

SEQ ID NO: 2413825 - RNA, 19 nt, Homo sapiens
  misc_RNA (1)...(19): siRNA sense strand
gcagcauugaggaggagaa

SEQ ID NO: 2413826 - RNA, 19 nt, Homo sapiens
  misc_RNA (1)...(19): siRNA sense strand
cgugagaagcagccggaca

SEQ ID NO: 2413827 - RNA, 19 nt, Homo sapiens
  misc_RNA (1)...(19): siRNA sense strand
gugcuaagaucaaacggga

SEQ ID NO: 2413828 - RNA, 19 nt, Homo sapiens
  misc_RNA (1)...(19): siRNA sense strand
ggacagugcccauuccaca

SEQ ID NO: 2413829 - RNA, 19 nt, Homo sapiens
  misc_RNA (1)...(19): siRNA sense strand
ggagaccagugaaggacca

SEQ ID NO: 2413830 - RNA, 19 nt, Homo sapiens
  misc_RNA (1)...(19): siRNA sense strand
ggaacaaauucaacgggaa

SEQ ID NO: 2413831 - RNA, 19 nt, Homo sapiens
  misc_RNA (1)...(19): siRNA sense strand
uggcagaaacaauggaaca

SEQ ID NO: 2413832 - RNA, 19 nt, Homo sapiens
  misc_RNA (1)...(19): siRNA sense strand
cugaggaagaccugaacaa

SEQ ID NO: 2413833 - RNA, 19 nt, Homo sapiens
  misc_RNA (1)...(19): siRNA sense strand
aagaauaauccgcgacaca

SEQ ID NO: 2413834 - RNA, 19 nt, Homo sapiens
  misc_RNA (1)...(19): siRNA sense strand
ucuuaaucuaugagaguga

SEQ ID NO: 2413835 - RNA, 19 nt, Homo sapiens
  misc_RNA (1)...(19): siRNA sense strand
ugccaagaaaugugggauu

SEQ ID NO: 2413836 - RNA, 19 nt, Homo sapiens
  misc_RNA (1)...(19): siRNA sense strand
agagugaaaucaaggggaa

SEQ ID NO: 2413837 - RNA, 19 nt, Homo sapiens
  misc_RNA (1)...(19): siRNA sense strand
gccaaaagaaagagcauca

SEQ ID NO: 2413838 - RNA, 19 nt, Homo sapiens
  misc_RNA (1)...(19): siRNA sense strand
ggcagaaacaauggaacaa

SEQ ID NO: 2413839 - RNA, 19 nt, Homo sapiens
  misc_RNA (1)...(19): siRNA sense strand
aaucagaagaagaaggaug

SEQ ID NO: 2413840 - RNA, 19 nt, Homo sapiens
  misc_RNA (1)...(19): siRNA sense strand
gagugaaaucaaggggaaa

SEQ ID NO: 2413841 - RNA, 19 nt, Homo sapiens
  misc_RNA (1)...(19): siRNA sense strand
ggucaaggcaccugggcaa

SEQ ID NO: 2413842 - RNA, 19 nt, Homo sapiens
  misc_RNA (1)...(19): siRNA sense strand
guguggaaggagagauaua

SEQ ID NO: 2413843 - RNA, 19 nt, Homo sapiens
  misc_RNA (1)...(19): siRNA sense strand
uggaagaugucaagagcca

SEQ ID NO: 2413844 - RNA, 19 nt, Homo sapiens
  misc_RNA (1)...(19): siRNA sense strand
ccaggagaugugugacaaa

SEQ ID NO: 2413845 - RNA, 19 nt, Homo sapiens
  misc_RNA (1)...(19): siRNA sense strand
caggaaauucgcuggccaa

SEQ ID NO: 2413846 - RNA, 19 nt, Homo sapiens
  misc_RNA (1)...(19): siRNA sense strand
ggagagauauacugugcca

SEQ ID NO: 2413847 - RNA, 19 nt, Homo sapiens
  misc_RNA (1)...(19): siRNA sense strand
aggaaggcgagguggacuu

SEQ ID NO: 2413848 - RNA, 19 nt, Homo sapiens
  misc_RNA (1)...(19): siRNA sense strand
cgguggaggcccaguacau

SEQ ID NO: 2413849 - RNA, 19 nt, Homo sapiens
  misc_RNA (1)...(19): siRNA sense strand
cgguggagcuguuugacga

SEQ ID NO: 2413850 - RNA, 19 nt, Homo sapiens
  misc_RNA (1)...(19): siRNA sense strand
agcccuaccugaaggaaaa

SEQ ID NO: 2413851 - RNA, 19 nt, Homo sapiens
  misc_RNA (1)...(19): siRNA sense strand
ccgucaagcacaacaacau

SEQ ID NO: 2413852 - RNA, 19 nt, Homo sapiens
  misc_RNA (1)...(19): siRNA sense strand
gcaggaaauucgcuggcca

SEQ ID NO: 2413853 - RNA, 19 nt, Homo sapiens
  misc_RNA (1)...(19): siRNA sense strand
agggcugacuuuagugaca

SEQ ID NO: 2413854 - RNA, 19 nt, Homo sapiens
  misc_RNA (1)...(19): siRNA sense strand
aagcccuaccugaaggaaa

SEQ ID NO: 2413855 - RNA, 19 nt, Homo sapiens
  misc_RNA (1)...(19): siRNA sense strand
ccgcagaagaacagaagac

SEQ ID NO: 2413856 - RNA, 19 nt, Homo sapiens
  misc_RNA (1)...(19): siRNA sense strand
cagaagaacagaagaccuc

SEQ ID NO: 2413857 - RNA, 19 nt, Homo sapiens
  misc_RNA (1)...(19): siRNA sense strand
uuaaugaagaguugggaau

SEQ ID NO: 2413858 - RNA, 19 nt, Homo sapiens
  misc_RNA (1)...(19): siRNA sense strand
aaguaagaagcaagaagaa

SEQ ID NO: 2413859 - RNA, 19 nt, Homo sapiens
  misc_RNA (1)...(19): siRNA sense strand
aagaaguggagcagcgcua

SEQ ID NO: 2413860 - RNA, 19 nt, Homo sapiens
  misc_RNA (1)...(19): siRNA sense strand
cgucaaaguaagaagcaag

SEQ ID NO: 2413861 - RNA, 19 nt, Homo sapiens
  misc_RNA (1)...(19): siRNA sense strand
agauaugaagcaucaacaa

SEQ ID NO: 2413862 - RNA, 19 nt, Homo sapiens
  misc_RNA (1)...(19): siRNA sense strand
agcaagaagaaguggagca

SEQ ID NO: 2413863 - RNA, 19 nt, Homo sapiens
  misc_RNA (1)...(19): siRNA sense strand
aaccggaaccuguggacaa

SEQ ID NO: 2413864 - RNA, 19 nt, Homo sapiens
  misc_RNA (1)...(19): siRNA sense strand
cggugaagcuggcugacca

SEQ ID NO: 2413865 - RNA, 19 nt, Homo sapiens
  misc_RNA (1)...(19): siRNA sense strand
gagacagaacugggagaau

SEQ ID NO: 2413866 - RNA, 19 nt, Homo sapiens
  misc_RNA (1)...(19): siRNA sense strand
ccaaugaucucuucagcca

SEQ ID NO: 2413867 - RNA, 19 nt, Homo sapiens
  misc_RNA (1)...(19): siRNA sense strand
cagagacagaacugggaga

SEQ ID NO: 2413868 - RNA, 19 nt, Homo sapiens
  misc_RNA (1)...(19): siRNA sense strand
gaggaugacuuucacccaa

SEQ ID NO: 2413869 - RNA, 19 nt, Homo sapiens
  misc_RNA (1)...(19): siRNA sense strand
aaccggaaccuguggacaa

SEQ ID NO: 2413870 - RNA, 19 nt, Homo sapiens
  misc_RNA (1)...(19): siRNA sense strand
cggugaagcuggcugacca

SEQ ID NO: 2413871 - RNA, 19 nt, Homo sapiens
  misc_RNA (1)...(19): siRNA sense strand
gagacagaacugggagaau

SEQ ID NO: 2413872 - RNA, 19 nt, Homo sapiens
  misc_RNA (1)...(19): siRNA sense strand
ccaaugaucucuucagcca

SEQ ID NO: 2413873 - RNA, 19 nt, Homo sapiens
  misc_RNA (1)...(19): siRNA sense strand
cagagacagaacugggaga

SEQ ID NO: 2413874 - RNA, 19 nt, Homo sapiens
  misc_RNA (1)...(19): siRNA sense strand
gaggaugacuuucacccaa

SEQ ID NO: 2413875 - RNA, 19 nt, Homo sapiens
  misc_RNA (1)...(19): siRNA sense strand
cugcagaggucacagggaa

SEQ ID NO: 2413876 - RNA, 19 nt, Homo sapiens
  misc_RNA (1)...(19): siRNA sense strand
aagaagaaaucagggccaa

SEQ ID NO: 2413877 - RNA, 19 nt, Homo sapiens
  misc_RNA (1)...(19): siRNA sense strand
aggaagcauuucagagacu

SEQ ID NO: 2413878 - RNA, 19 nt, Homo sapiens
  misc_RNA (1)...(19): siRNA sense strand
acaggaagcauuucagaga

SEQ ID NO: 2413879 - RNA, 19 nt, Homo sapiens
  misc_RNA (1)...(19): siRNA sense strand
cagagacuccaaagaagaa

SEQ ID NO: 2413880 - RNA, 19 nt, Homo sapiens
  misc_RNA (1)...(19): siRNA sense strand
acagaacaguaauacgcua

SEQ ID NO: 2413881 - RNA, 19 nt, Homo sapiens
  misc_RNA (1)...(19): siRNA sense strand
aaagaagaaaucagggcca

SEQ ID NO: 2413882 - RNA, 19 nt, Homo sapiens
  misc_RNA (1)...(19): siRNA sense strand
ucagagacuccaaagaaga

SEQ ID NO: 2413883 - RNA, 19 nt, Homo sapiens
  misc_RNA (1)...(19): siRNA sense strand
ggaggauggugcagggcaa

SEQ ID NO: 2413884 - RNA, 19 nt, Homo sapiens
  misc_RNA (1)...(19): siRNA sense strand
ccgaggaaguuuugaggaa

SEQ ID NO: 2413885 - RNA, 19 nt, Homo sapiens
  misc_RNA (1)...(19): siRNA sense strand
cuaaaagugcggaggucaa

SEQ ID NO: 2413886 - RNA, 19 nt, Homo sapiens
  misc_RNA (1)...(19): siRNA sense strand
cagaagaaggagagaagcu

SEQ ID NO: 2413887 - RNA, 19 nt, Homo sapiens
  misc_RNA (1)...(19): siRNA sense strand
cgacauuacugaccgagga

SEQ ID NO: 2413888 - RNA, 19 nt, Homo sapiens
  misc_RNA (1)...(19): siRNA sense strand
uagugagauuucugaccaa

SEQ ID NO: 2413889 - RNA, 19 nt, Homo sapiens
  misc_RNA (1)...(19): siRNA sense strand
gaggaaguuuugaggaagu

SEQ ID NO: 2413890 - RNA, 19 nt, Homo sapiens
  misc_RNA (1)...(19): siRNA sense strand
cacagaagaaggagagaag

SEQ ID NO: 2413891 - RNA, 19 nt, Homo sapiens
  misc_RNA (1)...(19): siRNA sense strand
guaucaaggcugaaggaga

SEQ ID NO: 2413892 - RNA, 19 nt, Homo sapiens
  misc_RNA (1)...(19): siRNA sense strand
gaucaaagaugaggccaca

SEQ ID NO: 2413893 - RNA, 19 nt, Homo sapiens
  misc_RNA (1)...(19): siRNA sense strand
uccugaaugucuuggagaa

SEQ ID NO: 2413894 - RNA, 19 nt, Homo sapiens
  misc_RNA (1)...(19): siRNA sense strand
agaugaggccacaaggaca

SEQ ID NO: 2413895 - RNA, 19 nt, Homo sapiens
  misc_RNA (1)...(19): siRNA sense strand
gggcaaguccauuggcaac

SEQ ID NO: 2413896 - RNA, 19 nt, Homo sapiens
  misc_RNA (1)...(19): siRNA sense strand
guaucaaggcugaaggaga

SEQ ID NO: 2413897 - RNA, 19 nt, Homo sapiens
  misc_RNA (1)...(19): siRNA sense strand
gaucaaagaugaggccaca

SEQ ID NO: 2413898 - RNA, 19 nt, Homo sapiens
  misc_RNA (1)...(19): siRNA sense strand
uccugaaugucuuggagaa

SEQ ID NO: 2413899 - RNA, 19 nt, Homo sapiens
  misc_RNA (1)...(19): siRNA sense strand
gggcaaguccauuggcaac

SEQ ID NO: 2413900 - RNA, 19 nt, Homo sapiens
  misc_RNA (1)...(19): siRNA sense strand
agaugaggccacaaggaca

SEQ ID NO: 2413901 - RNA, 19 nt, Homo sapiens
  misc_RNA (1)...(19): siRNA sense strand
caacauugcuuuauggcau

SEQ ID NO: 2413902 - RNA, 19 nt, Homo sapiens
  misc_RNA (1)...(19): siRNA sense strand
cuggaaugguauuguggaa

SEQ ID NO: 2413903 - RNA, 19 nt, Homo sapiens
  misc_RNA (1)...(19): siRNA sense strand
cuuuauugcagcaggaauu

SEQ ID NO: 2413904 - RNA, 19 nt, Homo sapiens
  misc_RNA (1)...(19): siRNA sense strand
guauuguggaauuggagaa

SEQ ID NO: 2413905 - RNA, 19 nt, Homo sapiens
  misc_RNA (1)...(19): siRNA sense strand
gaaucaaggcgcaggcguu

SEQ ID NO: 2413906 - RNA, 19 nt, Homo sapiens
  misc_RNA (1)...(19): siRNA sense strand
gaguuuugcuaguggaaga

SEQ ID NO: 2413907 - RNA, 19 nt, Homo sapiens
  misc_RNA (1)...(19): siRNA sense strand
augaagauauuguacgaga

SEQ ID NO: 2413908 - RNA, 19 nt, Homo sapiens
  misc_RNA (1)...(19): siRNA sense strand
agauauuguacgagacagu

SEQ ID NO: 2413909 - RNA, 19 nt, Homo sapiens
  misc_RNA (1)...(19): siRNA sense strand
uguacgagacaguggacau

SEQ ID NO: 2413910 - RNA, 19 nt, Homo sapiens
  misc_RNA (1)...(19): siRNA sense strand
uggaaacaacaaagcuuau

SEQ ID NO: 2413911 - RNA, 19 nt, Homo sapiens
  misc_RNA (1)...(19): siRNA sense strand
ugggcuggguagagaucaa

SEQ ID NO: 2413912 - RNA, 19 nt, Homo sapiens
  misc_RNA (1)...(19): siRNA sense strand
ggguagagaucaacagcag

SEQ ID NO: 2413913 - RNA, 19 nt, Homo sapiens
  misc_RNA (1)...(19): siRNA sense strand
cagugcuguuuguggguau

SEQ ID NO: 2413914 - RNA, 19 nt, Homo sapiens
  misc_RNA (1)...(19): siRNA sense strand
cuucauguguccuggaaac

SEQ ID NO: 2413915 - RNA, 19 nt, Homo sapiens
  misc_RNA (1)...(19): siRNA sense strand
cuuuaacagaacucggaua

SEQ ID NO: 2413916 - RNA, 19 nt, Homo sapiens
  misc_RNA (1)...(19): siRNA sense strand
ccugagaagcaccgagcca

SEQ ID NO: 2413917 - RNA, 19 nt, Homo sapiens
  misc_RNA (1)...(19): siRNA sense strand
agauaagguaacugacaaa

SEQ ID NO: 2413918 - RNA, 19 nt, Homo sapiens
  misc_RNA (1)...(19): siRNA sense strand
caacaggagccaaggcaca

SEQ ID NO: 2413919 - RNA, 19 nt, Homo sapiens
  misc_RNA (1)...(19): siRNA sense strand
cccuaaaggagaacuggaa

SEQ ID NO: 2413920 - RNA, 19 nt, Homo sapiens
  misc_RNA (1)...(19): siRNA sense strand
ccuaaaggagaacuggaau

SEQ ID NO: 2413921 - RNA, 19 nt, Homo sapiens
  misc_RNA (1)...(19): siRNA sense strand
caaagaagcuuaugugcga

SEQ ID NO: 2413922 - RNA, 19 nt, Homo sapiens
  misc_RNA (1)...(19): siRNA sense strand
agauagagaggcugggcua

SEQ ID NO: 2413923 - RNA, 19 nt, Homo sapiens
  misc_RNA (1)...(19): siRNA sense strand
uggcugaagcugaggaaga

SEQ ID NO: 2413924 - RNA, 19 nt, Homo sapiens
  misc_RNA (1)...(19): siRNA sense strand
agggaaagaaggagcagau

SEQ ID NO: 2413925 - RNA, 19 nt, Homo sapiens
  misc_RNA (1)...(19): siRNA sense strand
uggugaagaggaagaggaa

SEQ ID NO: 2413926 - RNA, 19 nt, Homo sapiens
  misc_RNA (1)...(19): siRNA sense strand
aagaaggagcagauagaga

SEQ ID NO: 2413927 - RNA, 19 nt, Homo sapiens
  misc_RNA (1)...(19): siRNA sense strand
aggaagaggaaacaaguau

SEQ ID NO: 2413928 - RNA, 19 nt, Homo sapiens
  misc_RNA (1)...(19): siRNA sense strand
auaaggaggcgaaggccaa

SEQ ID NO: 2413929 - RNA, 19 nt, Homo sapiens
  misc_RNA (1)...(19): siRNA sense strand
gaugaggaacacagggaca

SEQ ID NO: 2413930 - RNA, 19 nt, Homo sapiens
  misc_RNA (1)...(19): siRNA sense strand
ccgaagaaaccccgagaau

SEQ ID NO: 2413931 - RNA, 19 nt, Homo sapiens
  misc_RNA (1)...(19): siRNA sense strand
ggaagaacccggaguccca

SEQ ID NO: 2413932 - RNA, 19 nt, Homo sapiens
  misc_RNA (1)...(19): siRNA sense strand
ggcgauacugggaggaaga

SEQ ID NO: 2413933 - RNA, 19 nt, Homo sapiens
  misc_RNA (1)...(19): siRNA sense strand
aagaggaagaggaagguca

SEQ ID NO: 2413934 - RNA, 19 nt, Homo sapiens
  misc_RNA (1)...(19): siRNA sense strand
ggguaacaaagaagcuuau

SEQ ID NO: 2413935 - RNA, 19 nt, Homo sapiens
  misc_RNA (1)...(19): siRNA sense strand
cagccaaagccaaagcaga

SEQ ID NO: 2413936 - RNA, 19 nt, Homo sapiens
  misc_RNA (1)...(19): siRNA sense strand
gugaagaggaagaggaagg

SEQ ID NO: 2413937 - RNA, 19 nt, Homo sapiens
  misc_RNA (1)...(19): siRNA sense strand
ggcuaugacccgcaggcua

SEQ ID NO: 2413938 - RNA, 19 nt, Homo sapiens
  misc_RNA (1)...(19): siRNA sense strand
aagcugaggaagaggaaac

SEQ ID NO: 2413939 - RNA, 19 nt, Homo sapiens
  misc_RNA (1)...(19): siRNA sense strand
ccgcugugaccgaguaaca

SEQ ID NO: 2413940 - RNA, 19 nt, Homo sapiens
  misc_RNA (1)...(19): siRNA sense strand
gccaggagugggaggugaa

SEQ ID NO: 2413941 - RNA, 19 nt, Homo sapiens
  misc_RNA (1)...(19): siRNA sense strand
aggugaaggcccugcuaga

SEQ ID NO: 2413942 - RNA, 19 nt, Homo sapiens
  misc_RNA (1)...(19): siRNA sense strand
ccuuccagccaaagccaaa

SEQ ID NO: 2413943 - RNA, 19 nt, Homo sapiens
  misc_RNA (1)...(19): siRNA sense strand
cauaaggaggcgaaggcca

SEQ ID NO: 2413944 - RNA, 19 nt, Homo sapiens
  misc_RNA (1)...(19): siRNA sense strand
ggcucgauguuaugaguca

SEQ ID NO: 2413945 - RNA, 19 nt, Homo sapiens
  misc_RNA (1)...(19): siRNA sense strand
cuggaagacaccuggcuuu

SEQ ID NO: 2413946 - RNA, 19 nt, Homo sapiens
  misc_RNA (1)...(19): siRNA sense strand
ccucguaacaagaagaauc

SEQ ID NO: 2413947 - RNA, 19 nt, Homo sapiens
  misc_RNA (1)...(19): siRNA sense strand
uggguaacaaagaagcuua

SEQ ID NO: 2413948 - RNA, 19 nt, Homo sapiens
  misc_RNA (1)...(19): siRNA sense strand
uggccgagguggaugucau

SEQ ID NO: 2413949 - RNA, 19 nt, Homo sapiens
  misc_RNA (1)...(19): siRNA sense strand
aacuucagaccaagagaaa

SEQ ID NO: 2413950 - RNA, 19 nt, Homo sapiens
  misc_RNA (1)...(19): siRNA sense strand
caaagauaugccaggcuga

SEQ ID NO: 2413951 - RNA, 19 nt, Homo sapiens
  misc_RNA (1)...(19): siRNA sense strand
uuguggaggcuguggacau

SEQ ID NO: 2413952 - RNA, 19 nt, Homo sapiens
  misc_RNA (1)...(19): siRNA sense strand
gcaaugugcucuucgcuga

SEQ ID NO: 2413953 - RNA, 19 nt, Homo sapiens
  misc_RNA (1)...(19): siRNA sense strand
ugacagacauccugaccca

SEQ ID NO: 2413954 - RNA, 19 nt, Homo sapiens
  misc_RNA (1)...(19): siRNA sense strand
gggaacacauccaggacac

SEQ ID NO: 2413955 - RNA, 19 nt, Homo sapiens
  misc_RNA (1)...(19): siRNA sense strand
ggauggaggcucuguggca

SEQ ID NO: 2413956 - RNA, 19 nt, Homo sapiens
  misc_RNA (1)...(19): siRNA sense strand
gggaagcacugcagagcug

SEQ ID NO: 2413957 - RNA, 19 nt, Homo sapiens
  misc_RNA (1)...(19): siRNA sense strand
accagaaagugacgggcaa

SEQ ID NO: 2413958 - RNA, 19 nt, Homo sapiens
  misc_RNA (1)...(19): siRNA sense strand
uggugaaugacgugaauga

SEQ ID NO: 2413959 - RNA, 19 nt, Homo sapiens
  misc_RNA (1)...(19): siRNA sense strand
acgagggccugaugggcaa

SEQ ID NO: 2413960 - RNA, 19 nt, Homo sapiens
  misc_RNA (1)...(19): siRNA sense strand
ggugcgagguggaugcaga

SEQ ID NO: 2413961 - RNA, 19 nt, Homo sapiens
  misc_RNA (1)...(19): siRNA sense strand
accagaaagugacgggcaa

SEQ ID NO: 2413962 - RNA, 19 nt, Homo sapiens
  misc_RNA (1)...(19): siRNA sense strand
uggugaaugacgugaauga

SEQ ID NO: 2413963 - RNA, 19 nt, Homo sapiens
  misc_RNA (1)...(19): siRNA sense strand
acgagggccugaugggcaa

SEQ ID NO: 2413964 - RNA, 19 nt, Homo sapiens
  misc_RNA (1)...(19): siRNA sense strand
ggugcgagguggaugcaga

SEQ ID NO: 2413965 - RNA, 19 nt, Homo sapiens
  misc_RNA (1)...(19): siRNA sense strand
ggaagaugcuaaugggaac

SEQ ID NO: 2413966 - RNA, 19 nt, Homo sapiens
  misc_RNA (1)...(19): siRNA sense strand
cagcaagaucaaauaacaa

SEQ ID NO: 2413967 - RNA, 19 nt, Homo sapiens
  misc_RNA (1)...(19): siRNA sense strand
aggaagaugcuaaugggaa

SEQ ID NO: 2413968 - RNA, 19 nt, Homo sapiens
  misc_RNA (1)...(19): siRNA sense strand
gcacaucuguuuauggaca

SEQ ID NO: 2413969 - RNA, 19 nt, Homo sapiens
  misc_RNA (1)...(19): siRNA sense strand
gcauauugaagaagagaac

SEQ ID NO: 2413970 - RNA, 19 nt, Homo sapiens
  misc_RNA (1)...(19): siRNA sense strand
uguaagaaaggaaagguau

SEQ ID NO: 2413971 - RNA, 19 nt, Homo sapiens
  misc_RNA (1)...(19): siRNA sense strand
gaagacugugacugagaaa

SEQ ID NO: 2413972 - RNA, 19 nt, Homo sapiens
  misc_RNA (1)...(19): siRNA sense strand
auguaagaaaggaaaggua

SEQ ID NO: 2413973 - RNA, 19 nt, Homo sapiens
  misc_RNA (1)...(19): siRNA sense strand
ugggaagauuucagugaca

SEQ ID NO: 2413974 - RNA, 19 nt, Homo sapiens
  misc_RNA (1)...(19): siRNA sense strand
ggacucgacuguaaggaca

SEQ ID NO: 2413975 - RNA, 19 nt, Homo sapiens
  misc_RNA (1)...(19): siRNA sense strand
cauuugacccagaagagaa

SEQ ID NO: 2413976 - RNA, 19 nt, Homo sapiens
  misc_RNA (1)...(19): siRNA sense strand
ugacaguaucagaaacauu

SEQ ID NO: 2413977 - RNA, 19 nt, Homo sapiens
  misc_RNA (1)...(19): siRNA sense strand
augagaagacugugacuga

SEQ ID NO: 2413978 - RNA, 19 nt, Homo sapiens
  misc_RNA (1)...(19): siRNA sense strand
ggguauuacuacaacucuu

SEQ ID NO: 2413979 - RNA, 19 nt, Homo sapiens
  misc_RNA (1)...(19): siRNA sense strand
gcuaccaggaagaugcuaa

SEQ ID NO: 2413980 - RNA, 19 nt, Homo sapiens
  misc_RNA (1)...(19): siRNA sense strand
aggacaaauuucagcugau

SEQ ID NO: 2413981 - RNA, 19 nt, Homo sapiens
  misc_RNA (1)...(19): siRNA sense strand
cagaaacauuugacccaga

SEQ ID NO: 2413982 - RNA, 19 nt, Homo sapiens
  misc_RNA (1)...(19): siRNA sense strand
agaaacauuccauggccua

SEQ ID NO: 2413983 - RNA, 19 nt, Homo sapiens
  misc_RNA (1)...(19): siRNA sense strand
ccugcaacgcacagcacaa

SEQ ID NO: 2413984 - RNA, 19 nt, Homo sapiens
  misc_RNA (1)...(19): siRNA sense strand
uguaacaaccacagaaacu

SEQ ID NO: 2413985 - RNA, 19 nt, Homo sapiens
  misc_RNA (1)...(19): siRNA sense strand
agacugugacugagaaaau

SEQ ID NO: 2413986 - RNA, 19 nt, Homo sapiens
  misc_RNA (1)...(19): siRNA sense strand
ugucacagcaagaucaaau

SEQ ID NO: 2413987 - RNA, 19 nt, Homo sapiens
  misc_RNA (1)...(19): siRNA sense strand
auaacggccuccagagaca

SEQ ID NO: 2413988 - RNA, 19 nt, Homo sapiens
  misc_RNA (1)...(19): siRNA sense strand
ucugaaacacaaaguaaca

SEQ ID NO: 2413989 - RNA, 19 nt, Homo sapiens
  misc_RNA (1)...(19): siRNA sense strand
agugacaguaucagaaaca

SEQ ID NO: 2413990 - RNA, 19 nt, Homo sapiens
  misc_RNA (1)...(19): siRNA sense strand
ucuacauguaagaaaggaa

SEQ ID NO: 2413991 - RNA, 19 nt, Homo sapiens
  misc_RNA (1)...(19): siRNA sense strand
gcauugauugucacagcaa

SEQ ID NO: 2413992 - RNA, 19 nt, Homo sapiens
  misc_RNA (1)...(19): siRNA sense strand
agaaaccacaagugacaau

SEQ ID NO: 2413993 - RNA, 19 nt, Homo sapiens
  misc_RNA (1)...(19): siRNA sense strand
cuugauugacgaagacuuu

SEQ ID NO: 2413994 - RNA, 19 nt, Homo sapiens
  misc_RNA (1)...(19): siRNA sense strand
ggaagauuucagugacagu

SEQ ID NO: 2413995 - RNA, 19 nt, Homo sapiens
  misc_RNA (1)...(19): siRNA sense strand
ccucaaugguuuagcaugc

SEQ ID NO: 2413996 - RNA, 19 nt, Homo sapiens
  misc_RNA (1)...(19): siRNA sense strand
aacgaagcauauugaagaa

SEQ ID NO: 2413997 - RNA, 19 nt, Homo sapiens
  misc_RNA (1)...(19): siRNA sense strand
agucaaccacaaauguaaa

SEQ ID NO: 2413998 - RNA, 19 nt, Homo sapiens
  misc_RNA (1)...(19): siRNA sense strand
ggagaucacuucagggaca

SEQ ID NO: 2413999 - RNA, 19 nt, Homo sapiens
  misc_RNA (1)...(19): siRNA sense strand
gaaacuggauauauggaga

SEQ ID NO: 2414000 - RNA, 19 nt, Homo sapiens
  misc_RNA (1)...(19): siRNA sense strand
cugaagaacuggaacagca

SEQ ID NO: 2414001 - RNA, 19 nt, Homo sapiens
  misc_RNA (1)...(19): siRNA sense strand
ccauuguuguuuacggcua

SEQ ID NO: 2414002 - RNA, 19 nt, Homo sapiens
  misc_RNA (1)...(19): siRNA sense strand
gauaugugcuucaugccaa

SEQ ID NO: 2414003 - RNA, 19 nt, Homo sapiens
  misc_RNA (1)...(19): siRNA sense strand
ucaucauggcagugguaau

SEQ ID NO: 2414004 - RNA, 19 nt, Homo sapiens
  misc_RNA (1)...(19): siRNA sense strand
ccuaucacgucaugcggaa

SEQ ID NO: 2414005 - RNA, 19 nt, Homo sapiens
  misc_RNA (1)...(19): siRNA sense strand
ugugggaguccuuggaaau

SEQ ID NO: 2414006 - RNA, 19 nt, Homo sapiens
  misc_RNA (1)...(19): siRNA sense strand
auuuacagcaugugucuaa

SEQ ID NO: 2414007 - RNA, 19 nt, Homo sapiens
  misc_RNA (1)...(19): siRNA sense strand
ucucugaagaacuggaaca

SEQ ID NO: 2414008 - RNA, 19 nt, Homo sapiens
  misc_RNA (1)...(19): siRNA sense strand
aggaauaggcagguugcua

SEQ ID NO: 2414009 - RNA, 19 nt, Homo sapiens
  misc_RNA (1)...(19): siRNA sense strand
uugugggaguccuuggaaa

SEQ ID NO: 2414010 - RNA, 19 nt, Homo sapiens
  misc_RNA (1)...(19): siRNA sense strand
uggaaauaccauuguuguu

SEQ ID NO: 2414011 - RNA, 19 nt, Homo sapiens
  misc_RNA (1)...(19): siRNA sense strand
cggaaugugaggaucgcuu

SEQ ID NO: 2414012 - RNA, 19 nt, Homo sapiens
  misc_RNA (1)...(19): siRNA sense strand
augaaucaacugagacaca

SEQ ID NO: 2414013 - RNA, 19 nt, Homo sapiens
  misc_RNA (1)...(19): siRNA sense strand
cgggaagccuuguacccaa

SEQ ID NO: 2414014 - RNA, 19 nt, Homo sapiens
  misc_RNA (1)...(19): siRNA sense strand
agcaggaggcgcagcuaaa

SEQ ID NO: 2414015 - RNA, 19 nt, Homo sapiens
  misc_RNA (1)...(19): siRNA sense strand
ccucuggaaaggagaacau

SEQ ID NO: 2414016 - RNA, 19 nt, Homo sapiens
  misc_RNA (1)...(19): siRNA sense strand
ccugaugaggagaggggaa

SEQ ID NO: 2414017 - RNA, 19 nt, Homo sapiens
  misc_RNA (1)...(19): siRNA sense strand
gugacaugccugcuggcua

SEQ ID NO: 2414018 - RNA, 19 nt, Homo sapiens
  misc_RNA (1)...(19): siRNA sense strand
agauauaacccaagagcau

SEQ ID NO: 2414019 - RNA, 19 nt, Homo sapiens
  misc_RNA (1)...(19): siRNA sense strand
aggaaugauaacaggaauu

SEQ ID NO: 2414020 - RNA, 19 nt, Homo sapiens
  misc_RNA (1)...(19): siRNA sense strand
augaaagaaguauggcuua

SEQ ID NO: 2414021 - RNA, 19 nt, Homo sapiens
  misc_RNA (1)...(19): siRNA sense strand
ggucaauuggaaauaagaa

SEQ ID NO: 2414022 - RNA, 19 nt, Homo sapiens
  misc_RNA (1)...(19): siRNA sense strand
caugaaagaaguauggcuu

SEQ ID NO: 2414023 - RNA, 19 nt, Homo sapiens
  misc_RNA (1)...(19): siRNA sense strand
uucaaggaguaaaggguuu

SEQ ID NO: 2414024 - RNA, 19 nt, Homo sapiens
  misc_RNA (1)...(19): siRNA sense strand
gcaguaucaugcuggccaa

SEQ ID NO: 2414025 - RNA, 19 nt, Homo sapiens
  misc_RNA (1)...(19): siRNA sense strand
aaggaaugauaacaggaau

SEQ ID NO: 2414026 - RNA, 19 nt, Homo sapiens
  misc_RNA (1)...(19): siRNA sense strand
agucguugccugagaaaau

SEQ ID NO: 2414027 - RNA, 19 nt, Homo sapiens
  misc_RNA (1)...(19): siRNA sense strand
ucauaauacacaagcgcca

SEQ ID NO: 2414028 - RNA, 19 nt, Homo sapiens
  misc_RNA (1)...(19): siRNA sense strand
gcuuaauucaaggaguaaa

SEQ ID NO: 2414029 - RNA, 19 nt, Homo sapiens
  misc_RNA (1)...(19): siRNA sense strand
cccaagagcaugaaagaag

SEQ ID NO: 2414030 - RNA, 19 nt, Homo sapiens
  misc_RNA (1)...(19): siRNA sense strand
uggacugguuucagcaaca

SEQ ID NO: 2414031 - RNA, 19 nt, Homo sapiens
  misc_RNA (1)...(19): siRNA sense strand
cguagcagauauaacccaa

SEQ ID NO: 2414032 - RNA, 19 nt, Homo sapiens
  misc_RNA (1)...(19): siRNA sense strand
acuuaaagaacugccaaua

SEQ ID NO: 2414033 - RNA, 19 nt, Homo sapiens
  misc_RNA (1)...(19): siRNA sense strand
uuaugaggucaauuggaaa

SEQ ID NO: 2414034 - RNA, 19 nt, Homo sapiens
  misc_RNA (1)...(19): siRNA sense strand
acgaaaggcauuugggaca

SEQ ID NO: 2414035 - RNA, 19 nt, Homo sapiens
  misc_RNA (1)...(19): siRNA sense strand
acuuaggaacaaagaggua

SEQ ID NO: 2414036 - RNA, 19 nt, Homo sapiens
  misc_RNA (1)...(19): siRNA sense strand
acaaagagguaaaggaagc

SEQ ID NO: 2414037 - RNA, 19 nt, Homo sapiens
  misc_RNA (1)...(19): siRNA sense strand
uuaggaacaaagagguaaa

SEQ ID NO: 2414038 - RNA, 19 nt, Homo sapiens
  misc_RNA (1)...(19): siRNA sense strand
cuuacuaacuucuccgcaa

SEQ ID NO: 2414039 - RNA, 19 nt, Homo sapiens
  misc_RNA (1)...(19): siRNA sense strand
gucacaaagaaguggauca

SEQ ID NO: 2414040 - RNA, 19 nt, Homo sapiens
  misc_RNA (1)...(19): siRNA sense strand
agcaaaugaggcugaacua

SEQ ID NO: 2414041 - RNA, 19 nt, Homo sapiens
  misc_RNA (1)...(19): siRNA sense strand
cugguaaacauaugcaaca

SEQ ID NO: 2414042 - RNA, 19 nt, Homo sapiens
  misc_RNA (1)...(19): siRNA sense strand
gcuccaaagaccggggaaa

SEQ ID NO: 2414043 - RNA, 19 nt, Homo sapiens
  misc_RNA (1)...(19): siRNA sense strand
gguaaauaagaguguccca

SEQ ID NO: 2414044 - RNA, 19 nt, Homo sapiens
  misc_RNA (1)...(19): siRNA sense strand
uuggauaagcugaaggaaa

SEQ ID NO: 2414045 - RNA, 19 nt, Homo sapiens
  misc_RNA (1)...(19): siRNA sense strand
cugugagcuuggagaguaa

SEQ ID NO: 2414046 - RNA, 19 nt, Homo sapiens
  misc_RNA (1)...(19): siRNA sense strand
aagaagauguacugggaga

SEQ ID NO: 2414047 - RNA, 19 nt, Homo sapiens
  misc_RNA (1)...(19): siRNA sense strand
gggagaugaaacagaggaa

SEQ ID NO: 2414048 - RNA, 19 nt, Homo sapiens
  misc_RNA (1)...(19): siRNA sense strand
gaggcaaagaagaggaaaa

SEQ ID NO: 2414049 - RNA, 19 nt, Homo sapiens
  misc_RNA (1)...(19): siRNA sense strand
augcugaagaggaggcaaa

SEQ ID NO: 2414050 - RNA, 19 nt, Homo sapiens
  misc_RNA (1)...(19): siRNA sense strand
ggaaaagagcagagcgcuu

SEQ ID NO: 2414051 - RNA, 19 nt, Homo sapiens
  misc_RNA (1)...(19): siRNA sense strand
gcugaaggaaagagcucaa

SEQ ID NO: 2414052 - RNA, 19 nt, Homo sapiens
  misc_RNA (1)...(19): siRNA sense strand
cugaagaugaugagaaacu

SEQ ID NO: 2414053 - RNA, 19 nt, Homo sapiens
  misc_RNA (1)...(19): siRNA sense strand
cugaaauaccacagacuga

SEQ ID NO: 2414054 - RNA, 19 nt, Homo sapiens
  misc_RNA (1)...(19): siRNA sense strand
agucugaagaugaugagaa

SEQ ID NO: 2414055 - RNA, 19 nt, Homo sapiens
  misc_RNA (1)...(19): siRNA sense strand
gagcagagcgcuuugggau

SEQ ID NO: 2414056 - RNA, 19 nt, Homo sapiens
  misc_RNA (1)...(19): siRNA sense strand
aggcaaaugaagaagaugu

SEQ ID NO: 2414057 - RNA, 19 nt, Homo sapiens
  misc_RNA (1)...(19): siRNA sense strand
agauguacugggagaugaa

SEQ ID NO: 2414058 - RNA, 19 nt, Homo sapiens
  misc_RNA (1)...(19): siRNA sense strand
ggaaggagcgauuugggau

SEQ ID NO: 2414059 - RNA, 19 nt, Homo sapiens
  misc_RNA (1)...(19): siRNA sense strand
augaaacagaggaagaaga

SEQ ID NO: 2414060 - RNA, 19 nt, Homo sapiens
  misc_RNA (1)...(19): siRNA sense strand
agagaagaaaguggugaaa

SEQ ID NO: 2414061 - RNA, 19 nt, Homo sapiens
  misc_RNA (1)...(19): siRNA sense strand
uaagaaagcugcucgggca

SEQ ID NO: 2414062 - RNA, 19 nt, Homo sapiens
  misc_RNA (1)...(19): siRNA sense strand
cuaugguuaacuuggauaa

SEQ ID NO: 2414063 - RNA, 19 nt, Homo sapiens
  misc_RNA (1)...(19): siRNA sense strand
agaugaaacagaggaagaa

SEQ ID NO: 2414064 - RNA, 19 nt, Homo sapiens
  misc_RNA (1)...(19): siRNA sense strand
aagaagaaacaaagcccau

SEQ ID NO: 2414065 - RNA, 19 nt, Homo sapiens
  misc_RNA (1)...(19): siRNA sense strand
ugaagaagauguacuggga

SEQ ID NO: 2414066 - RNA, 19 nt, Homo sapiens
  misc_RNA (1)...(19): siRNA sense strand
ggugaaaauuacaucugaa

SEQ ID NO: 2414067 - RNA, 19 nt, Homo sapiens
  misc_RNA (1)...(19): siRNA sense strand
cagaggcaaagaagaggaa

SEQ ID NO: 2414068 - RNA, 19 nt, Homo sapiens
  misc_RNA (1)...(19): siRNA sense strand
agaugaugagaaacugaaa

SEQ ID NO: 2414069 - RNA, 19 nt, Homo sapiens
  misc_RNA (1)...(19): siRNA sense strand
caaaugaagaagauguacu

SEQ ID NO: 2414070 - RNA, 19 nt, Homo sapiens
  misc_RNA (1)...(19): siRNA sense strand
guccagaggcuguggguga

SEQ ID NO: 2414071 - RNA, 19 nt, Homo sapiens
  misc_RNA (1)...(19): siRNA sense strand
ggguagaggagaaguucau

SEQ ID NO: 2414072 - RNA, 19 nt, Homo sapiens
  misc_RNA (1)...(19): siRNA sense strand
gaggagaaguucaugacca

SEQ ID NO: 2414073 - RNA, 19 nt, Homo sapiens
  misc_RNA (1)...(19): siRNA sense strand
ugaccauggugcugggcau

SEQ ID NO: 2414074 - RNA, 19 nt, Homo sapiens
  misc_RNA (1)...(19): siRNA sense strand
gggcacuguccuugggcau

SEQ ID NO: 2414075 - RNA, 19 nt, Homo sapiens
  misc_RNA (1)...(19): siRNA sense strand
gggcauugguccagugcug

SEQ ID NO: 2414076 - RNA, 19 nt, Homo sapiens
  misc_RNA (1)...(19): siRNA sense strand
acacuaugaugaaggcguu

SEQ ID NO: 2414077 - RNA, 19 nt, Homo sapiens
  misc_RNA (1)...(19): siRNA sense strand
gagugauggcuucgggaaa

SEQ ID NO: 2414078 - RNA, 19 nt, Homo sapiens
  misc_RNA (1)...(19): siRNA sense strand
aguuuaugucacagagaaa

SEQ ID NO: 2414079 - RNA, 19 nt, Homo sapiens
  misc_RNA (1)...(19): siRNA sense strand
gguugauguugaugcaaau

SEQ ID NO: 2414080 - RNA, 19 nt, Homo sapiens
  misc_RNA (1)...(19): siRNA sense strand
ugcuaaugaaguugagaaa

SEQ ID NO: 2414081 - RNA, 19 nt, Homo sapiens
  misc_RNA (1)...(19): siRNA sense strand
agguugauguugaugcaaa

SEQ ID NO: 2414082 - RNA, 19 nt, Homo sapiens
  misc_RNA (1)...(19): siRNA sense strand
ucacagagaaaguggcuca

SEQ ID NO: 2414083 - RNA, 19 nt, Homo sapiens
  misc_RNA (1)...(19): siRNA sense strand
cgagaugagcugacaacau

SEQ ID NO: 2414084 - RNA, 19 nt, Homo sapiens
  misc_RNA (1)...(19): siRNA sense strand
guuacuagaugcuugggaa

SEQ ID NO: 2414085 - RNA, 19 nt, Homo sapiens
  misc_RNA (1)...(19): siRNA sense strand
aaugaagacagcugaagaa

SEQ ID NO: 2414086 - RNA, 19 nt, Homo sapiens
  misc_RNA (1)...(19): siRNA sense strand
ggauccaaguugaccaaaa

SEQ ID NO: 2414087 - RNA, 19 nt, Homo sapiens
  misc_RNA (1)...(19): siRNA sense strand
agaaaggagcagaguaugu

SEQ ID NO: 2414088 - RNA, 19 nt, Homo sapiens
  misc_RNA (1)...(19): siRNA sense strand
gcaaggagcaaaugccaca

SEQ ID NO: 2414089 - RNA, 19 nt, Homo sapiens
  misc_RNA (1)...(19): siRNA sense strand
gagcaaaugccacacgaga

SEQ ID NO: 2414090 - RNA, 19 nt, Homo sapiens
  misc_RNA (1)...(19): siRNA sense strand
ggaagagacaagaggacac

SEQ ID NO: 2414091 - RNA, 19 nt, Homo sapiens
  misc_RNA (1)...(19): siRNA sense strand
uccagaaggaggugaaaca

SEQ ID NO: 2414092 - RNA, 19 nt, Homo sapiens
  misc_RNA (1)...(19): siRNA sense strand
uugaagagauuccaggaga

SEQ ID NO: 2414093 - RNA, 19 nt, Homo sapiens
  misc_RNA (1)...(19): siRNA sense strand
agcacaauaugguggauga

SEQ ID NO: 2414094 - RNA, 19 nt, Homo sapiens
  misc_RNA (1)...(19): siRNA sense strand
aaagaaaggaggucaggca

SEQ ID NO: 2414095 - RNA, 19 nt, Homo sapiens
  misc_RNA (1)...(19): siRNA sense strand
aggagaaaggagcagagua

SEQ ID NO: 2414096 - RNA, 19 nt, Homo sapiens
  misc_RNA (1)...(19): siRNA sense strand
agacaagaggacaccaauu

SEQ ID NO: 2414097 - RNA, 19 nt, Homo sapiens
  misc_RNA (1)...(19): siRNA sense strand
acaucauacucuacaccua

SEQ ID NO: 2414098 - RNA, 19 nt, Homo sapiens
  misc_RNA (1)...(19): siRNA sense strand
caaaauguaccuugagaca

SEQ ID NO: 2414099 - RNA, 19 nt, Homo sapiens
  misc_RNA (1)...(19): siRNA sense strand
ccgagucucccaaggcaaa

SEQ ID NO: 2414100 - RNA, 19 nt, Homo sapiens
  misc_RNA (1)...(19): siRNA sense strand
gcaaagagccuguucaccu

SEQ ID NO: 2414101 - RNA, 19 nt, Homo sapiens
  misc_RNA (1)...(19): siRNA sense strand
caucaaagaaaggagguca

SEQ ID NO: 2414102 - RNA, 19 nt, Homo sapiens
  misc_RNA (1)...(19): siRNA sense strand
cuagccaggaggaggagaa

SEQ ID NO: 2414103 - RNA, 19 nt, Homo sapiens
  misc_RNA (1)...(19): siRNA sense strand
ggauuggcaaagaugcuaa

SEQ ID NO: 2414104 - RNA, 19 nt, Homo sapiens
  misc_RNA (1)...(19): siRNA sense strand
agagacaagaggacaccaa

SEQ ID NO: 2414105 - RNA, 19 nt, Homo sapiens
  misc_RNA (1)...(19): siRNA sense strand
gagugacugugguggcaga

SEQ ID NO: 2414106 - RNA, 19 nt, Homo sapiens
  misc_RNA (1)...(19): siRNA sense strand
cuguucaccuacugaguuu

SEQ ID NO: 2414107 - RNA, 19 nt, Homo sapiens
  misc_RNA (1)...(19): siRNA sense strand
cggagaaaccuggcaucua

SEQ ID NO: 2414108 - RNA, 19 nt, Homo sapiens
  misc_RNA (1)...(19): siRNA sense strand
acucauauggugaauucua

SEQ ID NO: 2414109 - RNA, 19 nt, Homo sapiens
  misc_RNA (1)...(19): siRNA sense strand
ccaagaaggcgaggagcca

SEQ ID NO: 2414110 - RNA, 19 nt, Homo sapiens
  misc_RNA (1)...(19): siRNA sense strand
caagacggaaagagggaga

SEQ ID NO: 2414111 - RNA, 19 nt, Homo sapiens
  misc_RNA (1)...(19): siRNA sense strand
ugggugaccaagacggaaa

SEQ ID NO: 2414112 - RNA, 19 nt, Homo sapiens
  misc_RNA (1)...(19): siRNA sense strand
ccucaauagugcuggcuac

SEQ ID NO: 2414113 - RNA, 19 nt, Homo sapiens
  misc_RNA (1)...(19): siRNA sense strand
aagaggaaugugauggaga

SEQ ID NO: 2414114 - RNA, 19 nt, Homo sapiens
  misc_RNA (1)...(19): siRNA sense strand
aggucuuggugguaaauua

SEQ ID NO: 2414115 - RNA, 19 nt, Homo sapiens
  misc_RNA (1)...(19): siRNA sense strand
gaguaggagcaaacagcaa

SEQ ID NO: 2414116 - RNA, 19 nt, Homo sapiens
  misc_RNA (1)...(19): siRNA sense strand
aggaggucuuggugguaaa

SEQ ID NO: 2414117 - RNA, 19 nt, Homo sapiens
  misc_RNA (1)...(19): siRNA sense strand
uggagaaggaaucgaagaa

SEQ ID NO: 2414118 - RNA, 19 nt, Homo sapiens
  misc_RNA (1)...(19): siRNA sense strand
uuuaauagaaggagcacau

SEQ ID NO: 2414119 - RNA, 19 nt, Homo sapiens
  misc_RNA (1)...(19): siRNA sense strand
agguggagaagguggaaaa

SEQ ID NO: 2414120 - RNA, 19 nt, Homo sapiens
  misc_RNA (1)...(19): siRNA sense strand
aguuggaauuguacaaaga

SEQ ID NO: 2414121 - RNA, 19 nt, Homo sapiens
  misc_RNA (1)...(19): siRNA sense strand
uugaaaggccagaaacgaa

SEQ ID NO: 2414122 - RNA, 19 nt, Homo sapiens
  misc_RNA (1)...(19): siRNA sense strand
ggguuuaauagaaggagca

SEQ ID NO: 2414123 - RNA, 19 nt, Homo sapiens
  misc_RNA (1)...(19): siRNA sense strand
acucaauacaggacagcuu

SEQ ID NO: 2414124 - RNA, 19 nt, Homo sapiens
  misc_RNA (1)...(19): siRNA sense strand
ucguuuagguggagaaggu

SEQ ID NO: 2414125 - RNA, 19 nt, Homo sapiens
  misc_RNA (1)...(19): siRNA sense strand
guugcguguuguucagaaa

SEQ ID NO: 2414126 - RNA, 19 nt, Homo sapiens
  misc_RNA (1)...(19): siRNA sense strand
cagugauuucaaacagaua

SEQ ID NO: 2414127 - RNA, 19 nt, Homo sapiens
  misc_RNA (1)...(19): siRNA sense strand
ugaacaaaggaaugggcca

SEQ ID NO: 2414128 - RNA, 19 nt, Homo sapiens
  misc_RNA (1)...(19): siRNA sense strand
gauccgguggaauggguua

SEQ ID NO: 2414129 - RNA, 19 nt, Homo sapiens
  misc_RNA (1)...(19): siRNA sense strand
aagaguuggaauuguacaa

SEQ ID NO: 2414130 - RNA, 19 nt, Homo sapiens
  misc_RNA (1)...(19): siRNA sense strand
aguaggagcaaacagcaaa

SEQ ID NO: 2414131 - RNA, 19 nt, Homo sapiens
  misc_RNA (1)...(19): siRNA sense strand
auagaaagaacuagacaac

SEQ ID NO: 2414132 - RNA, 19 nt, Homo sapiens
  misc_RNA (1)...(19): siRNA sense strand
ggacuugccagaugcccaa

SEQ ID NO: 2414133 - RNA, 19 nt, Homo sapiens
  misc_RNA (1)...(19): siRNA sense strand
acauaugaacaaaggaaug

SEQ ID NO: 2414134 - RNA, 19 nt, Homo sapiens
  misc_RNA (1)...(19): siRNA sense strand
ggacucagacuuacgguca

SEQ ID NO: 2414135 - RNA, 19 nt, Homo sapiens
  misc_RNA (1)...(19): siRNA sense strand
cccaggaaacuuuggaaaa

SEQ ID NO: 2414136 - RNA, 19 nt, Homo sapiens
  misc_RNA (1)...(19): siRNA sense strand
aauaguggaaagugaccaa

SEQ ID NO: 2414137 - RNA, 19 nt, Homo sapiens
  misc_RNA (1)...(19): siRNA sense strand
agcucaaccuuuauggauu

SEQ ID NO: 2414138 - RNA, 19 nt, Homo sapiens
  misc_RNA (1)...(19): siRNA sense strand
ggacucagacuuacgguca

SEQ ID NO: 2414139 - RNA, 19 nt, Homo sapiens
  misc_RNA (1)...(19): siRNA sense strand
cccaggaaacuuuggaaaa

SEQ ID NO: 2414140 - RNA, 19 nt, Homo sapiens
  misc_RNA (1)...(19): siRNA sense strand
aauaguggaaagugaccaa

SEQ ID NO: 2414141 - RNA, 19 nt, Homo sapiens
  misc_RNA (1)...(19): siRNA sense strand
agcucaaccuuuauggauu

SEQ ID NO: 2414142 - RNA, 19 nt, Homo sapiens
  misc_RNA (1)...(19): siRNA sense strand
gacccaggcaagugguaaa

SEQ ID NO: 2414143 - RNA, 19 nt, Homo sapiens
  misc_RNA (1)...(19): siRNA sense strand
ccaggcaagugguaaauau

SEQ ID NO: 2414144 - RNA, 19 nt, Homo sapiens
  misc_RNA (1)...(19): siRNA sense strand
ucguggagggcgaggucua

SEQ ID NO: 2414145 - RNA, 19 nt, Homo sapiens
  misc_RNA (1)...(19): siRNA sense strand
uggaugacuucgagaguug

SEQ ID NO: 2414146 - RNA, 19 nt, Homo sapiens
  misc_RNA (1)...(19): siRNA sense strand
gggcauaggcucagcaaaa

SEQ ID NO: 2414147 - RNA, 19 nt, Homo sapiens
  misc_RNA (1)...(19): siRNA sense strand
aagaaaaggaggaagaaaa

SEQ ID NO: 2414148 - RNA, 19 nt, Homo sapiens
  misc_RNA (1)...(19): siRNA sense strand
ggaagaugucaguggagaa

SEQ ID NO: 2414149 - RNA, 19 nt, Homo sapiens
  misc_RNA (1)...(19): siRNA sense strand
ccaaagaaagauagagcau

SEQ ID NO: 2414150 - RNA, 19 nt, Homo sapiens
  misc_RNA (1)...(19): siRNA sense strand
aaaccaaacagaagaggaa

SEQ ID NO: 2414151 - RNA, 19 nt, Homo sapiens
  misc_RNA (1)...(19): siRNA sense strand
ggaacagugaagaggagaa

SEQ ID NO: 2414152 - RNA, 19 nt, Homo sapiens
  misc_RNA (1)...(19): siRNA sense strand
gagaaaagacagaagaaga

SEQ ID NO: 2414153 - RNA, 19 nt, Homo sapiens
  misc_RNA (1)...(19): siRNA sense strand
cagaaauauugacagacaa

SEQ ID NO: 2414154 - RNA, 19 nt, Homo sapiens
  misc_RNA (1)...(19): siRNA sense strand
gaauagaaucauggaggaa

SEQ ID NO: 2414155 - RNA, 19 nt, Homo sapiens
  misc_RNA (1)...(19): siRNA sense strand
ccagaagagaaucagaaua

SEQ ID NO: 2414156 - RNA, 19 nt, Homo sapiens
  misc_RNA (1)...(19): siRNA sense strand
ugaacagagaccaaagaaa

SEQ ID NO: 2414157 - RNA, 19 nt, Homo sapiens
  misc_RNA (1)...(19): siRNA sense strand
ccaaagaaugccuuagaau

SEQ ID NO: 2414158 - RNA, 19 nt, Homo sapiens
  misc_RNA (1)...(19): siRNA sense strand
gugaagaggaagacauuga

SEQ ID NO: 2414159 - RNA, 19 nt, Homo sapiens
  misc_RNA (1)...(19): siRNA sense strand
auagaaucauggaggaaaa

SEQ ID NO: 2414160 - RNA, 19 nt, Homo sapiens
  misc_RNA (1)...(19): siRNA sense strand
ccaggaaacaauccagaaa

SEQ ID NO: 2414161 - RNA, 19 nt, Homo sapiens
  misc_RNA (1)...(19): siRNA sense strand
cguuaugucuauaguugaa

SEQ ID NO: 2414162 - RNA, 19 nt, Homo sapiens
  misc_RNA (1)...(19): siRNA sense strand
caaacuacugauaggaaau

SEQ ID NO: 2414163 - RNA, 19 nt, Homo sapiens
  misc_RNA (1)...(19): siRNA sense strand
caggggagacagagagaaa

SEQ ID NO: 2414164 - RNA, 19 nt, Homo sapiens
  misc_RNA (1)...(19): siRNA sense strand
ccuaaagacaguuuccaaa

SEQ ID NO: 2414165 - RNA, 19 nt, Homo sapiens
  misc_RNA (1)...(19): siRNA sense strand
uguaaaagaaagggagaaa

SEQ ID NO: 2414166 - RNA, 19 nt, Homo sapiens
  misc_RNA (1)...(19): siRNA sense strand
agacaacacaccaaagaau

SEQ ID NO: 2414167 - RNA, 19 nt, Homo sapiens
  misc_RNA (1)...(19): siRNA sense strand
aauaagaaaaggaggaaga

SEQ ID NO: 2414168 - RNA, 19 nt, Homo sapiens
  misc_RNA (1)...(19): siRNA sense strand
ugaaaagaccagaagagaa

SEQ ID NO: 2414169 - RNA, 19 nt, Homo sapiens
  misc_RNA (1)...(19): siRNA sense strand
cagaacagucagaauagaa

SEQ ID NO: 2414170 - RNA, 19 nt, Homo sapiens
  misc_RNA (1)...(19): siRNA sense strand
cuucauugauggucuacaa

SEQ ID NO: 2414171 - RNA, 19 nt, Homo sapiens
  misc_RNA (1)...(19): siRNA sense strand
caucagaaccaggaaacaa

SEQ ID NO: 2414172 - RNA, 19 nt, Homo sapiens
  misc_RNA (1)...(19): siRNA sense strand
ugggaagaaccuaaggaau

SEQ ID NO: 2414173 - RNA, 19 nt, Homo sapiens
  misc_RNA (1)...(19): siRNA sense strand
agaauagaaucauggagga

SEQ ID NO: 2414174 - RNA, 19 nt, Homo sapiens
  misc_RNA (1)...(19): siRNA sense strand
ccaauuuaucugaugaaga

SEQ ID NO: 2414175 - RNA, 19 nt, Homo sapiens
  misc_RNA (1)...(19): siRNA sense strand
acacaaaagcacacaaaga

SEQ ID NO: 2414176 - RNA, 19 nt, Homo sapiens
  misc_RNA (1)...(19): siRNA sense strand
gcaugaagguagaaaagca

SEQ ID NO: 2414177 - RNA, 19 nt, Homo sapiens
  misc_RNA (1)...(19): siRNA sense strand
agacagaagaagauugguu

SEQ ID NO: 2414178 - RNA, 19 nt, Homo sapiens
  misc_RNA (1)...(19): siRNA sense strand
cagagaccaaagaaagaua

SEQ ID NO: 2414179 - RNA, 19 nt, Homo sapiens
  misc_RNA (1)...(19): siRNA sense strand
acugauaggaaaugaagau

SEQ ID NO: 2414180 - RNA, 19 nt, Homo sapiens
  misc_RNA (1)...(19): siRNA sense strand
ggauucauucauagaaaca

SEQ ID NO: 2414181 - RNA, 19 nt, Homo sapiens
  misc_RNA (1)...(19): siRNA sense strand
gaacagugaagaggagaau

SEQ ID NO: 2414182 - RNA, 19 nt, Homo sapiens
  misc_RNA (1)...(19): siRNA sense strand
ucagacaagaguagguaau

SEQ ID NO: 2414183 - RNA, 19 nt, Homo sapiens
  misc_RNA (1)...(19): siRNA sense strand
ccugauacuucgugcucuu

SEQ ID NO: 2414184 - RNA, 19 nt, Homo sapiens
  misc_RNA (1)...(19): siRNA sense strand
agaaaagacagaagaagau

SEQ ID NO: 2414185 - RNA, 19 nt, Homo sapiens
  misc_RNA (1)...(19): siRNA sense strand
aaagaugggaagaaccuaa

SEQ ID NO: 2414186 - RNA, 19 nt, Homo sapiens
  misc_RNA (1)...(19): siRNA sense strand
cagcaucagaaccaggaaa

SEQ ID NO: 2414187 - RNA, 19 nt, Homo sapiens
  misc_RNA (1)...(19): siRNA sense strand
ccuuguugccugaugacua

SEQ ID NO: 2414188 - RNA, 19 nt, Homo sapiens
  misc_RNA (1)...(19): siRNA sense strand
ggggagacagagagaaaga

SEQ ID NO: 2414189 - RNA, 19 nt, Homo sapiens
  misc_RNA (1)...(19): siRNA sense strand
gauagaaagcugaaaagau

SEQ ID NO: 2414190 - RNA, 19 nt, Homo sapiens
  misc_RNA (1)...(19): siRNA sense strand
gagaaaugugaccuguuaa

SEQ ID NO: 2414191 - RNA, 19 nt, Homo sapiens
  misc_RNA (1)...(19): siRNA sense strand
auccagaaauauugacaga

SEQ ID NO: 2414192 - RNA, 19 nt, Homo sapiens
  misc_RNA (1)...(19): siRNA sense strand
aagaaagggagaaauguga

SEQ ID NO: 2414193 - RNA, 19 nt, Homo sapiens
  misc_RNA (1)...(19): siRNA sense strand
gcugaaaagaugggaagaa

SEQ ID NO: 2414194 - RNA, 19 nt, Homo sapiens
  misc_RNA (1)...(19): siRNA sense strand
aggagaggagcaugagaaa

SEQ ID NO: 2414195 - RNA, 19 nt, Homo sapiens
  misc_RNA (1)...(19): siRNA sense strand
gaaacaagcuucuagacca

SEQ ID NO: 2414196 - RNA, 19 nt, Homo sapiens
  misc_RNA (1)...(19): siRNA sense strand
ucgaaagaggcgacgaaau

SEQ ID NO: 2414197 - RNA, 19 nt, Homo sapiens
  misc_RNA (1)...(19): siRNA sense strand
acaauugguagcuggaaau

SEQ ID NO: 2414198 - RNA, 19 nt, Homo sapiens
  misc_RNA (1)...(19): siRNA sense strand
gguuguucccauuaguaaa

SEQ ID NO: 2414199 - RNA, 19 nt, Homo sapiens
  misc_RNA (1)...(19): siRNA sense strand
cgaaaugcaggcaaggaca

SEQ ID NO: 2414200 - RNA, 19 nt, Homo sapiens
  misc_RNA (1)...(19): siRNA sense strand
augagaaacugcagcaacu

SEQ ID NO: 2414201 - RNA, 19 nt, Homo sapiens
  misc_RNA (1)...(19): siRNA sense strand
cugagaaguucaaggagcu

SEQ ID NO: 2414202 - RNA, 19 nt, Homo sapiens
  misc_RNA (1)...(19): siRNA sense strand
uguuggaauugcagagcca

SEQ ID NO: 2414203 - RNA, 19 nt, Homo sapiens
  misc_RNA (1)...(19): siRNA sense strand
aagaaauggcacagcagga

SEQ ID NO: 2414204 - RNA, 19 nt, Homo sapiens
  misc_RNA (1)...(19): siRNA sense strand
ggaauauaauccugaggug

SEQ ID NO: 2414205 - RNA, 19 nt, Homo sapiens
  misc_RNA (1)...(19): siRNA sense strand
gcgacgaaaugcaggcaag

SEQ ID NO: 2414206 - RNA, 19 nt, Homo sapiens
  misc_RNA (1)...(19): siRNA sense strand
acagcaggaacgaaagcaa

SEQ ID NO: 2414207 - RNA, 19 nt, Homo sapiens
  misc_RNA (1)...(19): siRNA sense strand
uggcacuagcugagaaguu

SEQ ID NO: 2414208 - RNA, 19 nt, Homo sapiens
  misc_RNA (1)...(19): siRNA sense strand
gagaaagagcuugugaaaa

SEQ ID NO: 2414209 - RNA, 19 nt, Homo sapiens
  misc_RNA (1)...(19): siRNA sense strand
uuucaggagaggagcauga

SEQ ID NO: 2414210 - RNA, 19 nt, Homo sapiens
  misc_RNA (1)...(19): siRNA sense strand
gcagauaagcacaggccuc

SEQ ID NO: 2414211 - RNA, 19 nt, Homo sapiens
  misc_RNA (1)...(19): siRNA sense strand
ugaugaacucaguggaaua

SEQ ID NO: 2414212 - RNA, 19 nt, Homo sapiens
  misc_RNA (1)...(19): siRNA sense strand
aggcaaaucauguggucaa

SEQ ID NO: 2414213 - RNA, 19 nt, Homo sapiens
  misc_RNA (1)...(19): siRNA sense strand
cagugaaacaugagguuau

SEQ ID NO: 2414214 - RNA, 19 nt, Homo sapiens
  misc_RNA (1)...(19): siRNA sense strand
uggagaagugugagaagaa

SEQ ID NO: 2414215 - RNA, 19 nt, Homo sapiens
  misc_RNA (1)...(19): siRNA sense strand
gagagauguugaugagcau

SEQ ID NO: 2414216 - RNA, 19 nt, Homo sapiens
  misc_RNA (1)...(19): siRNA sense strand
gggaauggaacuugaaaau

SEQ ID NO: 2414217 - RNA, 19 nt, Homo sapiens
  misc_RNA (1)...(19): siRNA sense strand
guccaguucuagagggaau

SEQ ID NO: 2414218 - RNA, 19 nt, Homo sapiens
  misc_RNA (1)...(19): siRNA sense strand
ggaaaaucaaccagaaauu

SEQ ID NO: 2414219 - RNA, 19 nt, Homo sapiens
  misc_RNA (1)...(19): siRNA sense strand
gcaaacauggacaggccaa

SEQ ID NO: 2414220 - RNA, 19 nt, Homo sapiens
  misc_RNA (1)...(19): siRNA sense strand
gcuggauucacgauggaaa

SEQ ID NO: 2414221 - RNA, 19 nt, Homo sapiens
  misc_RNA (1)...(19): siRNA sense strand
cgaaaaguggagagauuau

SEQ ID NO: 2414222 - RNA, 19 nt, Homo sapiens
  misc_RNA (1)...(19): siRNA sense strand
ugauaaagauggaaauccu

SEQ ID NO: 2414223 - RNA, 19 nt, Homo sapiens
  misc_RNA (1)...(19): siRNA sense strand
guggagagauuaugggaug

SEQ ID NO: 2414224 - RNA, 19 nt, Homo sapiens
  misc_RNA (1)...(19): siRNA sense strand
agacagaugcugagcccuu

SEQ ID NO: 2414225 - RNA, 19 nt, Homo sapiens
  misc_RNA (1)...(19): siRNA sense strand
ccguggaaauugcugacua

SEQ ID NO: 2414226 - RNA, 19 nt, Homo sapiens
  misc_RNA (1)...(19): siRNA sense strand
gggauuauaucaauggagu

SEQ ID NO: 2414227 - RNA, 19 nt, Homo sapiens
  misc_RNA (1)...(19): siRNA sense strand
gauuaugggauguucgaga

SEQ ID NO: 2414228 - RNA, 19 nt, Homo sapiens
  misc_RNA (1)...(19): siRNA sense strand
uucgaaaaguggagagauu

SEQ ID NO: 2414229 - RNA, 19 nt, Homo sapiens
  misc_RNA (1)...(19): siRNA sense strand
agccuuuaccacaggaaua

SEQ ID NO: 2414230 - RNA, 19 nt, Homo sapiens
  misc_RNA (1)...(19): siRNA sense strand
ggacaggccaauagcagga

SEQ ID NO: 2414231 - RNA, 19 nt, Homo sapiens
  misc_RNA (1)...(19): siRNA sense strand
augggauguucgagauaau

SEQ ID NO: 2414232 - RNA, 19 nt, Homo sapiens
  misc_RNA (1)...(19): siRNA sense strand
cgagauaauaagauaguuc

SEQ ID NO: 2414233 - RNA, 19 nt, Homo sapiens
  misc_RNA (1)...(19): siRNA sense strand
gagcagugggugugccaga

SEQ ID NO: 2414234 - RNA, 19 nt, Homo sapiens
  misc_RNA (1)...(19): siRNA sense strand
agagagauguugaugagca

SEQ ID NO: 2414235 - RNA, 19 nt, Homo sapiens
  misc_RNA (1)...(19): siRNA sense strand
gcgauuucuuauuuagaga

SEQ ID NO: 2414236 - RNA, 19 nt, Homo sapiens
  misc_RNA (1)...(19): siRNA sense strand
uagcagacaaugugcaaca

SEQ ID NO: 2414237 - RNA, 19 nt, Homo sapiens
  misc_RNA (1)...(19): siRNA sense strand
uggcauuaauggaggacac

SEQ ID NO: 2414238 - RNA, 19 nt, Homo sapiens
  misc_RNA (1)...(19): siRNA sense strand
guugaugagcauuuaagaa

SEQ ID NO: 2414239 - RNA, 19 nt, Homo sapiens
  misc_RNA (1)...(19): siRNA sense strand
guggaauaccugcagaaga

SEQ ID NO: 2414240 - RNA, 19 nt, Homo sapiens
  misc_RNA (1)...(19): siRNA sense strand
caggaauucaguuggcauu

SEQ ID NO: 2414241 - RNA, 19 nt, Homo sapiens
  misc_RNA (1)...(19): siRNA sense strand
guuauggagaagugugaga

SEQ ID NO: 2414242 - RNA, 19 nt, Homo sapiens
  misc_RNA (1)...(19): siRNA sense strand
agacaggaccagagagcag

SEQ ID NO: 2414243 - RNA, 19 nt, Homo sapiens
  misc_RNA (1)...(19): siRNA sense strand
caguggaauaccugcagaa

SEQ ID NO: 2414244 - RNA, 19 nt, Homo sapiens
  misc_RNA (1)...(19): siRNA sense strand
agcucagauuguagaauau

SEQ ID NO: 2414245 - RNA, 19 nt, Homo sapiens
  misc_RNA (1)...(19): siRNA sense strand
cauucuaccaugauaaaga

SEQ ID NO: 2414246 - RNA, 19 nt, Homo sapiens
  misc_RNA (1)...(19): siRNA sense strand
cgagagaugcagccaugaa

SEQ ID NO: 2414247 - RNA, 19 nt, Homo sapiens
  misc_RNA (1)...(19): siRNA sense strand
uaucuuacuuagcagacaa

SEQ ID NO: 2414248 - RNA, 19 nt, Homo sapiens
  misc_RNA (1)...(19): siRNA sense strand
ugugacacgcucagaagua

SEQ ID NO: 2414249 - RNA, 19 nt, Homo sapiens
  misc_RNA (1)...(19): siRNA sense strand
cguuugucuaauucagaaa

SEQ ID NO: 2414250 - RNA, 19 nt, Homo sapiens
  misc_RNA (1)...(19): siRNA sense strand
agaaaucagcauucguuau

SEQ ID NO: 2414251 - RNA, 19 nt, Homo sapiens
  misc_RNA (1)...(19): siRNA sense strand
aggauaucgucaagccaaa

SEQ ID NO: 2414252 - RNA, 19 nt, Homo sapiens
  misc_RNA (1)...(19): siRNA sense strand
cagaagucaucaugggcau

SEQ ID NO: 2414253 - RNA, 19 nt, Homo sapiens
  misc_RNA (1)...(19): siRNA sense strand
cacaaacagaacagcgaaa

SEQ ID NO: 2414254 - RNA, 19 nt, Homo sapiens
  misc_RNA (1)...(19): siRNA sense strand
aaggagaagcagagcugua

SEQ ID NO: 2414255 - RNA, 19 nt, Homo sapiens
  misc_RNA (1)...(19): siRNA sense strand
cggccaaugaacugaucaa

SEQ ID NO: 2414256 - RNA, 19 nt, Homo sapiens
  misc_RNA (1)...(19): siRNA sense strand
gaacuuugaccgagccgua

SEQ ID NO: 2414257 - RNA, 19 nt, Homo sapiens
  misc_RNA (1)...(19): siRNA sense strand
gcuccgaguucaaggccga

SEQ ID NO: 2414258 - RNA, 19 nt, Homo sapiens
  misc_RNA (1)...(19): siRNA sense strand
ccaccaucgagaagcacaa

SEQ ID NO: 2414259 - RNA, 19 nt, Homo sapiens
  misc_RNA (1)...(19): siRNA sense strand
ggaaggaugcggagagguc

SEQ ID NO: 2414260 - RNA, 19 nt, Homo sapiens
  misc_RNA (1)...(19): siRNA sense strand
gcacaaacagaacagcgaa

SEQ ID NO: 2414261 - RNA, 19 nt, Homo sapiens
  misc_RNA (1)...(19): siRNA sense strand
acgggagagcugaguggua

SEQ ID NO: 2414262 - RNA, 19 nt, Homo sapiens
  misc_RNA (1)...(19): siRNA sense strand
cagcgacgugggugaggaa

SEQ ID NO: 2414263 - RNA, 19 nt, Homo sapiens
  misc_RNA (1)...(19): siRNA sense strand
ccauucggaaaguggagaa

SEQ ID NO: 2414264 - RNA, 19 nt, Homo sapiens
  misc_RNA (1)...(19): siRNA sense strand
agacgcggacagaggaaga

SEQ ID NO: 2414265 - RNA, 19 nt, Homo sapiens
  misc_RNA (1)...(19): siRNA sense strand
gcagacgcggacagaggaa

SEQ ID NO: 2414266 - RNA, 19 nt, Homo sapiens
  misc_RNA (1)...(19): siRNA sense strand
ccaucgagaagcacaaaca

SEQ ID NO: 2414267 - RNA, 19 nt, Homo sapiens
  misc_RNA (1)...(19): siRNA sense strand
ccagacgugacaaggagaa

SEQ ID NO: 2414268 - RNA, 19 nt, Homo sapiens
  misc_RNA (1)...(19): siRNA sense strand
cccagaaugcugagagaau

SEQ ID NO: 2414269 - RNA, 19 nt, Homo sapiens
  misc_RNA (1)...(19): siRNA sense strand
uggcagaagaacugaauca

SEQ ID NO: 2414270 - RNA, 19 nt, Homo sapiens
  misc_RNA (1)...(19): siRNA sense strand
uggcaauuuccaaggcaua

SEQ ID NO: 2414271 - RNA, 19 nt, Homo sapiens
  misc_RNA (1)...(19): siRNA sense strand
ggacagaugcaguggcgca

SEQ ID NO: 2414272 - RNA, 19 nt, Homo sapiens
  misc_RNA (1)...(19): siRNA sense strand
cagaaugcugagagaauca

SEQ ID NO: 2414273 - RNA, 19 nt, Homo sapiens
  misc_RNA (1)...(19): siRNA sense strand
uggaaaugucccuggcaga

SEQ ID NO: 2414274 - RNA, 19 nt, Homo sapiens
  misc_RNA (1)...(19): siRNA sense strand
agcagaaguuggaacaaaa

SEQ ID NO: 2414275 - RNA, 19 nt, Homo sapiens
  misc_RNA (1)...(19): siRNA sense strand
agaagcagaaguuggaaca

SEQ ID NO: 2414276 - RNA, 19 nt, Homo sapiens
  misc_RNA (1)...(19): siRNA sense strand
aguucaauguacuggagau

SEQ ID NO: 2414277 - RNA, 19 nt, Homo sapiens
  misc_RNA (1)...(19): siRNA sense strand
acugaaucauggacgccaa

SEQ ID NO: 2414278 - RNA, 19 nt, Homo sapiens
  misc_RNA (1)...(19): siRNA sense strand
uagcagaaaugauggagcu

SEQ ID NO: 2414279 - RNA, 19 nt, Homo sapiens
  misc_RNA (1)...(19): siRNA sense strand
gaagacagcuguaugcagu

SEQ ID NO: 2414280 - RNA, 19 nt, Homo sapiens
  misc_RNA (1)...(19): siRNA sense strand
gggaaaaccaagagcaccu

SEQ ID NO: 2414281 - RNA, 19 nt, Homo sapiens
  misc_RNA (1)...(19): siRNA sense strand
cgaacuaccuguugcgcaa

SEQ ID NO: 2414282 - RNA, 19 nt, Homo sapiens
  misc_RNA (1)...(19): siRNA sense strand
agguggacauuaugggcua

SEQ ID NO: 2414283 - RNA, 19 nt, Homo sapiens
  misc_RNA (1)...(19): siRNA sense strand
agacaaaggagcagaucca

SEQ ID NO: 2414284 - RNA, 19 nt, Homo sapiens
  misc_RNA (1)...(19): siRNA sense strand
aggaggaguuuguuggcua

SEQ ID NO: 2414285 - RNA, 19 nt, Homo sapiens
  misc_RNA (1)...(19): siRNA sense strand
aagaagaagaugacaugaa

SEQ ID NO: 2414286 - RNA, 19 nt, Homo sapiens
  misc_RNA (1)...(19): siRNA sense strand
auccaagagcugagacaaa

SEQ ID NO: 2414287 - RNA, 19 nt, Homo sapiens
  misc_RNA (1)...(19): siRNA sense strand
agaaauguguggaagcaga

SEQ ID NO: 2414288 - RNA, 19 nt, Homo sapiens
  misc_RNA (1)...(19): siRNA sense strand
gggacuggacccugaacaa

SEQ ID NO: 2414289 - RNA, 19 nt, Homo sapiens
  misc_RNA (1)...(19): siRNA sense strand
acaauaucccugagaguga

SEQ ID NO: 2414290 - RNA, 19 nt, Homo sapiens
  misc_RNA (1)...(19): siRNA sense strand
ccaucgaauaugaggugua

SEQ ID NO: 2414291 - RNA, 19 nt, Homo sapiens
  misc_RNA (1)...(19): siRNA sense strand
uggaagaagaagaugacau

SEQ ID NO: 2414292 - RNA, 19 nt, Homo sapiens
  misc_RNA (1)...(19): siRNA sense strand
gaaacuaguuccugccaca

SEQ ID NO: 2414293 - RNA, 19 nt, Homo sapiens
  misc_RNA (1)...(19): siRNA sense strand
cacuauguguccaaggaaa

SEQ ID NO: 2414294 - RNA, 19 nt, Homo sapiens
  misc_RNA (1)...(19): siRNA sense strand
acacgauagcucagaaaga

SEQ ID NO: 2414295 - RNA, 19 nt, Homo sapiens
  misc_RNA (1)...(19): siRNA sense strand
ggccaugucucgaggcaca

SEQ ID NO: 2414296 - RNA, 19 nt, Homo sapiens
  misc_RNA (1)...(19): siRNA sense strand
aaugaaugggcgugaguau

SEQ ID NO: 2414297 - RNA, 19 nt, Homo sapiens
  misc_RNA (1)...(19): siRNA sense strand
acaaacugguagaagugaa

SEQ ID NO: 2414298 - RNA, 19 nt, Homo sapiens
  misc_RNA (1)...(19): siRNA sense strand
cagacaagaaggacaugaa

SEQ ID NO: 2414299 - RNA, 19 nt, Homo sapiens
  misc_RNA (1)...(19): siRNA sense strand
agacaauaucccugagagu

SEQ ID NO: 2414300 - RNA, 19 nt, Homo sapiens
  misc_RNA (1)...(19): siRNA sense strand
ccaccagacaagaaggaca

SEQ ID NO: 2414301 - RNA, 19 nt, Homo sapiens
  misc_RNA (1)...(19): siRNA sense strand
gguagaagugaauggaguu

SEQ ID NO: 2414302 - RNA, 19 nt, Homo sapiens
  misc_RNA (1)...(19): siRNA sense strand
gcagagaugugaauggagu

SEQ ID NO: 2414303 - RNA, 19 nt, Homo sapiens
  misc_RNA (1)...(19): siRNA sense strand
gugaggaagcaaugaggau

SEQ ID NO: 2414304 - RNA, 19 nt, Homo sapiens
  misc_RNA (1)...(19): siRNA sense strand
ugguagaagugaauggagu

SEQ ID NO: 2414305 - RNA, 19 nt, Homo sapiens
  misc_RNA (1)...(19): siRNA sense strand
accuagagccucaggauau

SEQ ID NO: 2414306 - RNA, 19 nt, Homo sapiens
  misc_RNA (1)...(19): siRNA sense strand
guguggaagcagaugaaga

SEQ ID NO: 2414307 - RNA, 19 nt, Homo sapiens
  misc_RNA (1)...(19): siRNA sense strand
ccaaggaaacauuugaaaa

SEQ ID NO: 2414308 - RNA, 19 nt, Homo sapiens
  misc_RNA (1)...(19): siRNA sense strand
aagaggaagcaacgggaau

SEQ ID NO: 2414309 - RNA, 19 nt, Homo sapiens
  misc_RNA (1)...(19): siRNA sense strand
cuauggaagaagaagauga

SEQ ID NO: 2414310 - RNA, 19 nt, Homo sapiens
  misc_RNA (1)...(19): siRNA sense strand
aagaagaugacaugaagau

SEQ ID NO: 2414311 - RNA, 19 nt, Homo sapiens
  misc_RNA (1)...(19): siRNA sense strand
aagcagaugaagaaacauu

SEQ ID NO: 2414312 - RNA, 19 nt, Homo sapiens
  misc_RNA (1)...(19): siRNA sense strand
uaugaaacaaucucggaaa

SEQ ID NO: 2414313 - RNA, 19 nt, Homo sapiens
  misc_RNA (1)...(19): siRNA sense strand
caaacugguagaagugaau

SEQ ID NO: 2414314 - RNA, 19 nt, Homo sapiens
  misc_RNA (1)...(19): siRNA sense strand
gaguuucaguugagggacu

SEQ ID NO: 2414315 - RNA, 19 nt, Homo sapiens
  misc_RNA (1)...(19): siRNA sense strand
uggaguauggugaguacaa

SEQ ID NO: 2414316 - RNA, 19 nt, Homo sapiens
  misc_RNA (1)...(19): siRNA sense strand
cauuugaaucugaggaacu

SEQ ID NO: 2414317 - RNA, 19 nt, Homo sapiens
  misc_RNA (1)...(19): siRNA sense strand
agagaaguggguugcuaua

SEQ ID NO: 2414318 - RNA, 19 nt, Homo sapiens
  misc_RNA (1)...(19): siRNA sense strand
cccaugaacugaagcccua

SEQ ID NO: 2414319 - RNA, 19 nt, Homo sapiens
  misc_RNA (1)...(19): siRNA sense strand
augaaacaaucucggaaaa

SEQ ID NO: 2414320 - RNA, 19 nt, Homo sapiens
  misc_RNA (1)...(19): siRNA sense strand
augaagaccuacaagagau

SEQ ID NO: 2414321 - RNA, 19 nt, Homo sapiens
  misc_RNA (1)...(19): siRNA sense strand
ugaugagaaauguguggaa

SEQ ID NO: 2414322 - RNA, 19 nt, Homo sapiens
  misc_RNA (1)...(19): siRNA sense strand
augacugccuccaggaauu

SEQ ID NO: 2414323 - RNA, 19 nt, Homo sapiens
  misc_RNA (1)...(19): siRNA sense strand
agauuguggaccagaauga

SEQ ID NO: 2414324 - RNA, 19 nt, Homo sapiens
  misc_RNA (1)...(19): siRNA sense strand
uuucagaagacaaggagga

SEQ ID NO: 2414325 - RNA, 19 nt, Homo sapiens
  misc_RNA (1)...(19): siRNA sense strand
augagguaguggaguuauu

SEQ ID NO: 2414326 - RNA, 19 nt, Homo sapiens
  misc_RNA (1)...(19): siRNA sense strand
acgauagcucagaaagauu

SEQ ID NO: 2414327 - RNA, 19 nt, Homo sapiens
  misc_RNA (1)...(19): siRNA sense strand
gggacauccuccagauugu

SEQ ID NO: 2414328 - RNA, 19 nt, Homo sapiens
  misc_RNA (1)...(19): siRNA sense strand
gaagaggaagcaacgggaa

SEQ ID NO: 2414329 - RNA, 19 nt, Homo sapiens
  misc_RNA (1)...(19): siRNA sense strand
gauggaaaauuuagcccaa

SEQ ID NO: 2414330 - RNA, 19 nt, Homo sapiens
  misc_RNA (1)...(19): siRNA sense strand
cuacagcagagaugugaau

SEQ ID NO: 2414331 - RNA, 19 nt, Homo sapiens
  misc_RNA (1)...(19): siRNA sense strand
ugacacgauagcucagaaa

SEQ ID NO: 2414332 - RNA, 19 nt, Homo sapiens
  misc_RNA (1)...(19): siRNA sense strand
gguaccagcaacauggauu

SEQ ID NO: 2414333 - RNA, 19 nt, Homo sapiens
  misc_RNA (1)...(19): siRNA sense strand
agaugugaauggagugugu

SEQ ID NO: 2414334 - RNA, 19 nt, Homo sapiens
  misc_RNA (1)...(19): siRNA sense strand
ccuccaggaauuuaaagaa

SEQ ID NO: 2414335 - RNA, 19 nt, Homo sapiens
  misc_RNA (1)...(19): siRNA sense strand
aaaugagcucagaagacaa

SEQ ID NO: 2414336 - RNA, 19 nt, Homo sapiens
  misc_RNA (1)...(19): siRNA sense strand
ucauggaccuagagccuca

SEQ ID NO: 2414337 - RNA, 19 nt, Homo sapiens
  misc_RNA (1)...(19): siRNA sense strand
cuaugagguaguggaguua

SEQ ID NO: 2414338 - RNA, 19 nt, Homo sapiens
  misc_RNA (1)...(19): siRNA sense strand
guaugaaacaaucucggaa

SEQ ID NO: 2414339 - RNA, 19 nt, Homo sapiens
  misc_RNA (1)...(19): siRNA sense strand
cugcaagagcugagucugu

SEQ ID NO: 2414340 - RNA, 19 nt, Homo sapiens
  misc_RNA (1)...(19): siRNA sense strand
cagagguacugucggguga

SEQ ID NO: 2414341 - RNA, 19 nt, Homo sapiens
  misc_RNA (1)...(19): siRNA sense strand
ggaggagacuuccagccaa

SEQ ID NO: 2414342 - RNA, 19 nt, Homo sapiens
  misc_RNA (1)...(19): siRNA sense strand
agaaggugcucaagacgca

SEQ ID NO: 2414343 - RNA, 19 nt, Homo sapiens
  misc_RNA (1)...(19): siRNA sense strand
ugucagaaccaggaggaga

SEQ ID NO: 2414344 - RNA, 19 nt, Homo sapiens
  misc_RNA (1)...(19): siRNA sense strand
agucaagaccagagaacuu

SEQ ID NO: 2414345 - RNA, 19 nt, Homo sapiens
  misc_RNA (1)...(19): siRNA sense strand
cuacauaggaauggagaau

SEQ ID NO: 2414346 - RNA, 19 nt, Homo sapiens
  misc_RNA (1)...(19): siRNA sense strand
gaauaaucuagaagagcuu

SEQ ID NO: 2414347 - RNA, 19 nt, Homo sapiens
  misc_RNA (1)...(19): siRNA sense strand
ccaacaugagaaagagauu

SEQ ID NO: 2414348 - RNA, 19 nt, Homo sapiens
  misc_RNA (1)...(19): siRNA sense strand
auuugaaaccgaagaagaa

SEQ ID NO: 2414349 - RNA, 19 nt, Homo sapiens
  misc_RNA (1)...(19): siRNA sense strand
gagacagaaaggaagacaa

SEQ ID NO: 2414350 - RNA, 19 nt, Homo sapiens
  misc_RNA (1)...(19): siRNA sense strand
cagaggaggagauggccaa

SEQ ID NO: 2414351 - RNA, 19 nt, Homo sapiens
  misc_RNA (1)...(19): siRNA sense strand
cgguauauccguaaugaca

SEQ ID NO: 2414352 - RNA, 19 nt, Homo sapiens
  misc_RNA (1)...(19): siRNA sense strand
aagugaaacuggagcaacu

SEQ ID NO: 2414353 - RNA, 19 nt, Homo sapiens
  misc_RNA (1)...(19): siRNA sense strand
aguuugagacagaaaggaa

SEQ ID NO: 2414354 - RNA, 19 nt, Homo sapiens
  misc_RNA (1)...(19): siRNA sense strand
cuccaaagagauugaagua

SEQ ID NO: 2414355 - RNA, 19 nt, Homo sapiens
  misc_RNA (1)...(19): siRNA sense strand
gugacgaagugcugagcca

SEQ ID NO: 2414356 - RNA, 19 nt, Homo sapiens
  misc_RNA (1)...(19): siRNA sense strand
uggccaaggaggaacacaa

SEQ ID NO: 2414357 - RNA, 19 nt, Homo sapiens
  misc_RNA (1)...(19): siRNA sense strand
gguacaacaaagugaaacu

SEQ ID NO: 2414358 - RNA, 19 nt, Homo sapiens
  misc_RNA (1)...(19): siRNA sense strand
uggccauggagcagaacua

SEQ ID NO: 2414359 - RNA, 19 nt, Homo sapiens
  misc_RNA (1)...(19): siRNA sense strand
ucaucaagucuuuagcuaa

SEQ ID NO: 2414360 - RNA, 19 nt, Homo sapiens
  misc_RNA (1)...(19): siRNA sense strand
uggaaugaucucaaagaca

SEQ ID NO: 2414361 - RNA, 19 nt, Homo sapiens
  misc_RNA (1)...(19): siRNA sense strand
ugcugaaauauguaggaaa

SEQ ID NO: 2414362 - RNA, 19 nt, Homo sapiens
  misc_RNA (1)...(19): siRNA sense strand
gugaagaugagaaccggua

SEQ ID NO: 2414363 - RNA, 19 nt, Homo sapiens
  misc_RNA (1)...(19): siRNA sense strand
auucugaguaugaaagcaa

SEQ ID NO: 2414364 - RNA, 19 nt, Homo sapiens
  misc_RNA (1)...(19): siRNA sense strand
gccaguucuugaaggacaa

SEQ ID NO: 2414365 - RNA, 19 nt, Homo sapiens
  misc_RNA (1)...(19): siRNA sense strand
ccgaagccgaggagcagua

SEQ ID NO: 2414366 - RNA, 19 nt, Homo sapiens
  misc_RNA (1)...(19): siRNA sense strand
agaacagaguagaagaucu

SEQ ID NO: 2414367 - RNA, 19 nt, Homo sapiens
  misc_RNA (1)...(19): siRNA sense strand
auuaacacacaguggagaa

SEQ ID NO: 2414368 - RNA, 19 nt, Homo sapiens
  misc_RNA (1)...(19): siRNA sense strand
guaggaaauuugaaaccga

SEQ ID NO: 2414369 - RNA, 19 nt, Homo sapiens
  misc_RNA (1)...(19): siRNA sense strand
gcaacuuacuccagcccuu

SEQ ID NO: 2414370 - RNA, 19 nt, Homo sapiens
  misc_RNA (1)...(19): siRNA sense strand
ugaauuuagaagagaagca

SEQ ID NO: 2414371 - RNA, 19 nt, Homo sapiens
  misc_RNA (1)...(19): siRNA sense strand
aauuugaaaccgaagaaga

SEQ ID NO: 2414372 - RNA, 19 nt, Homo sapiens
  misc_RNA (1)...(19): siRNA sense strand
ucauaaggacauugagauc

SEQ ID NO: 2414373 - RNA, 19 nt, Homo sapiens
  misc_RNA (1)...(19): siRNA sense strand
ccuggagaacagaguagaa

SEQ ID NO: 2414374 - RNA, 19 nt, Homo sapiens
  misc_RNA (1)...(19): siRNA sense strand
gguauauccguaaugacaa

SEQ ID NO: 2414375 - RNA, 19 nt, Homo sapiens
  misc_RNA (1)...(19): siRNA sense strand
gagaacuguccuucgggaa

SEQ ID NO: 2414376 - RNA, 19 nt, Homo sapiens
  misc_RNA (1)...(19): siRNA sense strand
cuucauaaggacauugaga

SEQ ID NO: 2414377 - RNA, 19 nt, Homo sapiens
  misc_RNA (1)...(19): siRNA sense strand
guuacaacauggagcugga

SEQ ID NO: 2414378 - RNA, 19 nt, Homo sapiens
  misc_RNA (1)...(19): siRNA sense strand
auuuagaagagaagcacuu

SEQ ID NO: 2414379 - RNA, 19 nt, Homo sapiens
  misc_RNA (1)...(19): siRNA sense strand
gugagagugaagaugagaa

SEQ ID NO: 2414380 - RNA, 19 nt, Homo sapiens
  misc_RNA (1)...(19): siRNA sense strand
cuaaggagcaggaggggau

SEQ ID NO: 2414381 - RNA, 19 nt, Homo sapiens
  misc_RNA (1)...(19): siRNA sense strand
agaauaaucuagaagagcu

SEQ ID NO: 2414382 - RNA, 19 nt, Homo sapiens
  misc_RNA (1)...(19): siRNA sense strand
guccauacguauagcccau

SEQ ID NO: 2414383 - RNA, 19 nt, Homo sapiens
  misc_RNA (1)...(19): siRNA sense strand
gugguggacuguaaggaca

SEQ ID NO: 2414384 - RNA, 19 nt, Homo sapiens
  misc_RNA (1)...(19): siRNA sense strand
uguccgaagccgaggagca

SEQ ID NO: 2414385 - RNA, 19 nt, Homo sapiens
  misc_RNA (1)...(19): siRNA sense strand
cuacaggaugccauaacua

SEQ ID NO: 2414386 - RNA, 19 nt, Homo sapiens
  misc_RNA (1)...(19): siRNA sense strand
gcuaaagaccuguccgaag

SEQ ID NO: 2414387 - RNA, 19 nt, Homo sapiens
  misc_RNA (1)...(19): siRNA sense strand
gauacacagccgugagagu

SEQ ID NO: 2414388 - RNA, 19 nt, Homo sapiens
  misc_RNA (1)...(19): siRNA sense strand
acuacauaggaauggagaa

SEQ ID NO: 2414389 - RNA, 19 nt, Homo sapiens
  misc_RNA (1)...(19): siRNA sense strand
gagaacuucauaaggacau

SEQ ID NO: 2414390 - RNA, 19 nt, Homo sapiens
  misc_RNA (1)...(19): siRNA sense strand
gaauuacacugaugccaca

SEQ ID NO: 2414391 - RNA, 19 nt, Homo sapiens
  misc_RNA (1)...(19): siRNA sense strand
agccaguucuugaaggaca

SEQ ID NO: 2414392 - RNA, 19 nt, Homo sapiens
  misc_RNA (1)...(19): siRNA sense strand
caaagugaaacuggagcaa

SEQ ID NO: 2414393 - RNA, 19 nt, Homo sapiens
  misc_RNA (1)...(19): siRNA sense strand
agaccagagaacuucauaa

SEQ ID NO: 2414394 - RNA, 19 nt, Homo sapiens
  misc_RNA (1)...(19): siRNA sense strand
uugaccaacaugagaaaga

SEQ ID NO: 2414395 - RNA, 19 nt, Homo sapiens
  misc_RNA (1)...(19): siRNA sense strand
ggaagauucugaaaggcaa

SEQ ID NO: 2414396 - RNA, 19 nt, Homo sapiens
  misc_RNA (1)...(19): siRNA sense strand
gggccaagcacgaagguca

SEQ ID NO: 2414397 - RNA, 19 nt, Homo sapiens
  misc_RNA (1)...(19): siRNA sense strand
auauguggagcaagagaaa

SEQ ID NO: 2414398 - RNA, 19 nt, Homo sapiens
  misc_RNA (1)...(19): siRNA sense strand
cagcaggguugucagggua

SEQ ID NO: 2414399 - RNA, 19 nt, Homo sapiens
  misc_RNA (1)...(19): siRNA sense strand
ggccaagcacgaaggucaa

SEQ ID NO: 2414400 - RNA, 19 nt, Homo sapiens
  misc_RNA (1)...(19): siRNA sense strand
ucuuugagacugaggauca

SEQ ID NO: 2414401 - RNA, 19 nt, Homo sapiens
  misc_RNA (1)...(19): siRNA sense strand
uugucaggguagagcagaa

SEQ ID NO: 2414402 - RNA, 19 nt, Homo sapiens
  misc_RNA (1)...(19): siRNA sense strand
gugauggaaaccagagaga

SEQ ID NO: 2414403 - RNA, 19 nt, Homo sapiens
  misc_RNA (1)...(19): siRNA sense strand
ggauacagguggcucgcuu

SEQ ID NO: 2414404 - RNA, 19 nt, Homo sapiens
  misc_RNA (1)...(19): siRNA sense strand
cagauaacucauaggaauc

SEQ ID NO: 2414405 - RNA, 19 nt, Homo sapiens
  misc_RNA (1)...(19): siRNA sense strand
cagagagagggaagguaga

SEQ ID NO: 2414406 - RNA, 19 nt, Homo sapiens
  misc_RNA (1)...(19): siRNA sense strand
aggaagauucugaaaggca

SEQ ID NO: 2414407 - RNA, 19 nt, Homo sapiens
  misc_RNA (1)...(19): siRNA sense strand
ggguagagcagaagaccac

SEQ ID NO: 2414408 - RNA, 19 nt, Homo sapiens
  misc_RNA (1)...(19): siRNA sense strand
caccauggcugcagggucu

SEQ ID NO: 2414409 - RNA, 19 nt, Homo sapiens
  misc_RNA (1)...(19): siRNA sense strand
gggauuagguauuugcaug

SEQ ID NO: 2414410 - RNA, 19 nt, Homo sapiens
  misc_RNA (1)...(19): siRNA sense strand
acuuaaggauaguagaauc

SEQ ID NO: 2414411 - RNA, 19 nt, Homo sapiens
  misc_RNA (1)...(19): siRNA sense strand
acaggagagccuuggccaa

SEQ ID NO: 2414412 - RNA, 19 nt, Homo sapiens
  misc_RNA (1)...(19): siRNA sense strand
cauauguggagcaagagaa

SEQ ID NO: 2414413 - RNA, 19 nt, Homo sapiens
  misc_RNA (1)...(19): siRNA sense strand
caaagcucuuauugggaca

SEQ ID NO: 2414414 - RNA, 19 nt, Homo sapiens
  misc_RNA (1)...(19): siRNA sense strand
ccgaagagcaagaggagau

SEQ ID NO: 2414415 - RNA, 19 nt, Homo sapiens
  misc_RNA (1)...(19): siRNA sense strand
caucaagcuagcagagaaa

SEQ ID NO: 2414416 - RNA, 19 nt, Homo sapiens
  misc_RNA (1)...(19): siRNA sense strand
cgaagauuaccgagagcaa

SEQ ID NO: 2414417 - RNA, 19 nt, Homo sapiens
  misc_RNA (1)...(19): siRNA sense strand
cgcagaucguggagaaauu

SEQ ID NO: 2414418 - RNA, 19 nt, Homo sapiens
  misc_RNA (1)...(19): siRNA sense strand
cagccaaggaggaugagaa

SEQ ID NO: 2414419 - RNA, 19 nt, Homo sapiens
  misc_RNA (1)...(19): siRNA sense strand
gaacaaauagugagaccca

SEQ ID NO: 2414420 - RNA, 19 nt, Homo sapiens
  misc_RNA (1)...(19): siRNA sense strand
cugcgcagaucguggagaa

SEQ ID NO: 2414421 - RNA, 19 nt, Homo sapiens
  misc_RNA (1)...(19): siRNA sense strand
agaggaacaacaacagaaa

SEQ ID NO: 2414422 - RNA, 19 nt, Homo sapiens
  misc_RNA (1)...(19): siRNA sense strand
acgaaguauuucugagagu

SEQ ID NO: 2414423 - RNA, 19 nt, Homo sapiens
  misc_RNA (1)...(19): siRNA sense strand
gcaggaagaaagagugcca

SEQ ID NO: 2414424 - RNA, 19 nt, Homo sapiens
  misc_RNA (1)...(19): siRNA sense strand
uggagugggccaugaagaa

SEQ ID NO: 2414425 - RNA, 19 nt, Homo sapiens
  misc_RNA (1)...(19): siRNA sense strand
gagaaaagcaguggggaga

SEQ ID NO: 2414426 - RNA, 19 nt, Homo sapiens
  misc_RNA (1)...(19): siRNA sense strand
gggcagaccaucagcagca

SEQ ID NO: 2414427 - RNA, 19 nt, Homo sapiens
  misc_RNA (1)...(19): siRNA sense strand
caguaggaacccuuguaaa

SEQ ID NO: 2414428 - RNA, 19 nt, Homo sapiens
  misc_RNA (1)...(19): siRNA sense strand
uacaaagagcucaggguuu

SEQ ID NO: 2414429 - RNA, 19 nt, Homo sapiens
  misc_RNA (1)...(19): siRNA sense strand
uaaugauuccgaagagcaa

SEQ ID NO: 2414430 - RNA, 19 nt, Homo sapiens
  misc_RNA (1)...(19): siRNA sense strand
gcaauccagaggacggaaa

SEQ ID NO: 2414431 - RNA, 19 nt, Homo sapiens
  misc_RNA (1)...(19): siRNA sense strand
agaauucauaucagagcua

SEQ ID NO: 2414432 - RNA, 19 nt, Homo sapiens
  misc_RNA (1)...(19): siRNA sense strand
agauggacccacagaccua

SEQ ID NO: 2414433 - RNA, 19 nt, Homo sapiens
  misc_RNA (1)...(19): siRNA sense strand
ccaagaggucauuuccaaa

SEQ ID NO: 2414434 - RNA, 19 nt, Homo sapiens
  misc_RNA (1)...(19): siRNA sense strand
aagauuaccgagagcaaaa

SEQ ID NO: 2414435 - RNA, 19 nt, Homo sapiens
  misc_RNA (1)...(19): siRNA sense strand
cuucuuuccagguguauaa

SEQ ID NO: 2414436 - RNA, 19 nt, Homo sapiens
  misc_RNA (1)...(19): siRNA sense strand
gcagagaaacugaagcugu

SEQ ID NO: 2414437 - RNA, 19 nt, Homo sapiens
  misc_RNA (1)...(19): siRNA sense strand
aggaacagucugggaggaa

SEQ ID NO: 2414438 - RNA, 19 nt, Homo sapiens
  misc_RNA (1)...(19): siRNA sense strand
agaaagacgcaguggagac

SEQ ID NO: 2414439 - RNA, 19 nt, Homo sapiens
  misc_RNA (1)...(19): siRNA sense strand
aaggccagguuaugagaau

SEQ ID NO: 2414440 - RNA, 19 nt, Homo sapiens
  misc_RNA (1)...(19): siRNA sense strand
cgaaccugcucacgggaga

SEQ ID NO: 2414441 - RNA, 19 nt, Homo sapiens
  misc_RNA (1)...(19): siRNA sense strand
ccagcaagauggacccaca

SEQ ID NO: 2414442 - RNA, 19 nt, Homo sapiens
  misc_RNA (1)...(19): siRNA sense strand
agcaaaagguagcaggaga

SEQ ID NO: 2414443 - RNA, 19 nt, Homo sapiens
  misc_RNA (1)...(19): siRNA sense strand
cggaaaucuucgaguacug

SEQ ID NO: 2414444 - RNA, 19 nt, Homo sapiens
  misc_RNA (1)...(19): siRNA sense strand
ggcacaauggagagagguu

SEQ ID NO: 2414445 - RNA, 19 nt, Homo sapiens
  misc_RNA (1)...(19): siRNA sense strand
aggaauaugcuuauggaag

SEQ ID NO: 2414446 - RNA, 19 nt, Homo sapiens
  misc_RNA (1)...(19): siRNA sense strand
gcugcaaaucugagacacu

SEQ ID NO: 2414447 - RNA, 19 nt, Homo sapiens
  misc_RNA (1)...(19): siRNA sense strand
acugcaagaagcuggagaa

SEQ ID NO: 2414448 - RNA, 19 nt, Homo sapiens
  misc_RNA (1)...(19): siRNA sense strand
cgaucgaagcccaccaaga

SEQ ID NO: 2414449 - RNA, 19 nt, Homo sapiens
  misc_RNA (1)...(19): siRNA sense strand
cugcacagcauggagguua

SEQ ID NO: 2414450 - RNA, 19 nt, Homo sapiens
  misc_RNA (1)...(19): siRNA sense strand
cuugauuagggaagaugua

SEQ ID NO: 2414451 - RNA, 19 nt, Homo sapiens
  misc_RNA (1)...(19): siRNA sense strand
gcagcguggcagugacaga

SEQ ID NO: 2414452 - RNA, 19 nt, Homo sapiens
  misc_RNA (1)...(19): siRNA sense strand
ggagaaaagcaguggggag

SEQ ID NO: 2414453 - RNA, 19 nt, Homo sapiens
  misc_RNA (1)...(19): siRNA sense strand
gugcagcugucuugagcca

SEQ ID NO: 2414454 - RNA, 19 nt, Homo sapiens
  misc_RNA (1)...(19): siRNA sense strand
guucagccaaggaggauga

SEQ ID NO: 2414455 - RNA, 19 nt, Homo sapiens
  misc_RNA (1)...(19): siRNA sense strand
gaggaauaugcuuauggaa

SEQ ID NO: 2414456 - RNA, 19 nt, Homo sapiens
  misc_RNA (1)...(19): siRNA sense strand
cugcgaagccauuggugca

SEQ ID NO: 2414457 - RNA, 19 nt, Homo sapiens
  misc_RNA (1)...(19): siRNA sense strand
ggacuuuucuggaugucaa

SEQ ID NO: 2414458 - RNA, 19 nt, Homo sapiens
  misc_RNA (1)...(19): siRNA sense strand
agguaaagcaguuugacuu

SEQ ID NO: 2414459 - RNA, 19 nt, Homo sapiens
  misc_RNA (1)...(19): siRNA sense strand
aaacuaagcaggaagcaga

SEQ ID NO: 2414460 - RNA, 19 nt, Homo sapiens
  misc_RNA (1)...(19): siRNA sense strand
agaaguuuggcaagguaaa

SEQ ID NO: 2414461 - RNA, 19 nt, Homo sapiens
  misc_RNA (1)...(19): siRNA sense strand
cagaaguuuggcaagguaa

SEQ ID NO: 2414462 - RNA, 19 nt, Homo sapiens
  misc_RNA (1)...(19): siRNA sense strand
cggaaaauccugaugcaga

SEQ ID NO: 2414463 - RNA, 19 nt, Homo sapiens
  misc_RNA (1)...(19): siRNA sense strand
ucuagaacagcauggaaau

SEQ ID NO: 2414464 - RNA, 19 nt, Homo sapiens
  misc_RNA (1)...(19): siRNA sense strand
uucuagaacagcauggaaa

SEQ ID NO: 2414465 - RNA, 19 nt, Homo sapiens
  misc_RNA (1)...(19): siRNA sense strand
cauugaagcaaaacugaaa

SEQ ID NO: 2414466 - RNA, 19 nt, Homo sapiens
  misc_RNA (1)...(19): siRNA sense strand
gugucacugcaaagauaaa

SEQ ID NO: 2414467 - RNA, 19 nt, Homo sapiens
  misc_RNA (1)...(19): siRNA sense strand
uaagcaggaagcagagcaa

SEQ ID NO: 2414468 - RNA, 19 nt, Homo sapiens
  misc_RNA (1)...(19): siRNA sense strand
cugcaaagauaaaagccau

SEQ ID NO: 2414469 - RNA, 19 nt, Homo sapiens
  misc_RNA (1)...(19): siRNA sense strand
uggacaaggucgagauaga

SEQ ID NO: 2414470 - RNA, 19 nt, Homo sapiens
  misc_RNA (1)...(19): siRNA sense strand
uggugaaagcuuuggacaa

SEQ ID NO: 2414471 - RNA, 19 nt, Homo sapiens
  misc_RNA (1)...(19): siRNA sense strand
gagcaugguuguuuggaca

SEQ ID NO: 2414472 - RNA, 19 nt, Homo sapiens
  misc_RNA (1)...(19): siRNA sense strand
agguaauugcacagggaau

SEQ ID NO: 2414473 - RNA, 19 nt, Homo sapiens
  misc_RNA (1)...(19): siRNA sense strand
cguuaugccagcuaagaaa

SEQ ID NO: 2414474 - RNA, 19 nt, Homo sapiens
  misc_RNA (1)...(19): siRNA sense strand
aggacaaaguauucaguga

SEQ ID NO: 2414475 - RNA, 19 nt, Homo sapiens
  misc_RNA (1)...(19): siRNA sense strand
ccucauucaaacagcaaua

SEQ ID NO: 2414476 - RNA, 19 nt, Homo sapiens
  misc_RNA (1)...(19): siRNA sense strand
ugacagcaguggaggcaga

SEQ ID NO: 2414477 - RNA, 19 nt, Homo sapiens
  misc_RNA (1)...(19): siRNA sense strand
ccuuuaaucaucagagaga

SEQ ID NO: 2414478 - RNA, 19 nt, Homo sapiens
  misc_RNA (1)...(19): siRNA sense strand
guggauauuucuaggggaa

SEQ ID NO: 2414479 - RNA, 19 nt, Homo sapiens
  misc_RNA (1)...(19): siRNA sense strand
cuuuaauaguucuggcuga

SEQ ID NO: 2414480 - RNA, 19 nt, Homo sapiens
  misc_RNA (1)...(19): siRNA sense strand
gacaaauugaaguggauau

SEQ ID NO: 2414481 - RNA, 19 nt, Homo sapiens
  misc_RNA (1)...(19): siRNA sense strand
cugcuaugcuccagaacuu

SEQ ID NO: 2414482 - RNA, 19 nt, Homo sapiens
  misc_RNA (1)...(19): siRNA sense strand
agauguugguggagaagca

SEQ ID NO: 2414483 - RNA, 19 nt, Homo sapiens
  misc_RNA (1)...(19): siRNA sense strand
auacagaguaccaacuaaa

SEQ ID NO: 2414484 - RNA, 19 nt, Homo sapiens
  misc_RNA (1)...(19): siRNA sense strand
cagaaagaucuauugaaga

SEQ ID NO: 2414485 - RNA, 19 nt, Homo sapiens
  misc_RNA (1)...(19): siRNA sense strand
acuccaauuccuacagaua

SEQ ID NO: 2414486 - RNA, 19 nt, Homo sapiens
  misc_RNA (1)...(19): siRNA sense strand
cauugaacgcugugugaga

SEQ ID NO: 2414487 - RNA, 19 nt, Homo sapiens
  misc_RNA (1)...(19): siRNA sense strand
agagaaggauacagaguac

SEQ ID NO: 2414488 - RNA, 19 nt, Homo sapiens
  misc_RNA (1)...(19): siRNA sense strand
uauucuagaugguggcauu

SEQ ID NO: 2414489 - RNA, 19 nt, Homo sapiens
  misc_RNA (1)...(19): siRNA sense strand
gacuaguggucguggcuga

SEQ ID NO: 2414490 - RNA, 19 nt, Homo sapiens
  misc_RNA (1)...(19): siRNA sense strand
gaucacaugccaaguaaaa

SEQ ID NO: 2414491 - RNA, 19 nt, Homo sapiens
  misc_RNA (1)...(19): siRNA sense strand
aguucuggcugaagagcau

SEQ ID NO: 2414492 - RNA, 19 nt, Homo sapiens
  misc_RNA (1)...(19): siRNA sense strand
acccauuacuugaagauga

SEQ ID NO: 2414493 - RNA, 19 nt, Homo sapiens
  misc_RNA (1)...(19): siRNA sense strand
gggaguugagggagcuauu

SEQ ID NO: 2414494 - RNA, 19 nt, Homo sapiens
  misc_RNA (1)...(19): siRNA sense strand
uagacaaauugaaguggau

SEQ ID NO: 2414495 - RNA, 19 nt, Homo sapiens
  misc_RNA (1)...(19): siRNA sense strand
gaacgcugugugagagaau

SEQ ID NO: 2414496 - RNA, 19 nt, Homo sapiens
  misc_RNA (1)...(19): siRNA sense strand
uugaagaugaccagucuaa

SEQ ID NO: 2414497 - RNA, 19 nt, Homo sapiens
  misc_RNA (1)...(19): siRNA sense strand
accagaaggucaugcaaaa

SEQ ID NO: 2414498 - RNA, 19 nt, Homo sapiens
  misc_RNA (1)...(19): siRNA sense strand
agaaguaucaccacggauu

SEQ ID NO: 2414499 - RNA, 19 nt, Homo sapiens
  misc_RNA (1)...(19): siRNA sense strand
agaugguggcauuaauaaa

SEQ ID NO: 2414500 - RNA, 19 nt, Homo sapiens
  misc_RNA (1)...(19): siRNA sense strand
acaccaaauuccaucaaaa

SEQ ID NO: 2414501 - RNA, 19 nt, Homo sapiens
  misc_RNA (1)...(19): siRNA sense strand
ugcuaaaggcuuauccaua

SEQ ID NO: 2414502 - RNA, 19 nt, Homo sapiens
  misc_RNA (1)...(19): siRNA sense strand
caaaacacccagcaagaaa

SEQ ID NO: 2414503 - RNA, 19 nt, Homo sapiens
  misc_RNA (1)...(19): siRNA sense strand
ugaaagauguugguggaga

SEQ ID NO: 2414504 - RNA, 19 nt, Homo sapiens
  misc_RNA (1)...(19): siRNA sense strand
guguauuaccuuugguguu

SEQ ID NO: 2414505 - RNA, 19 nt, Homo sapiens
  misc_RNA (1)...(19): siRNA sense strand
auugaaagauguuggugga

SEQ ID NO: 2414506 - RNA, 19 nt, Homo sapiens
  misc_RNA (1)...(19): siRNA sense strand
agaagcaagaguugacauu

SEQ ID NO: 2414507 - RNA, 19 nt, Homo sapiens
  misc_RNA (1)...(19): siRNA sense strand
caccagaaggucaugcaaa

SEQ ID NO: 2414508 - RNA, 19 nt, Homo sapiens
  misc_RNA (1)...(19): siRNA sense strand
ggauauuccucgcugucau

SEQ ID NO: 2414509 - RNA, 19 nt, Homo sapiens
  misc_RNA (1)...(19): siRNA sense strand
acaaaguccaguaaaccaa

SEQ ID NO: 2414510 - RNA, 19 nt, Homo sapiens
  misc_RNA (1)...(19): siRNA sense strand
cuuuauucguggucacauu

SEQ ID NO: 2414511 - RNA, 19 nt, Homo sapiens
  misc_RNA (1)...(19): siRNA sense strand
aguacgaugcaauugauaa

SEQ ID NO: 2414512 - RNA, 19 nt, Homo sapiens
  misc_RNA (1)...(19): siRNA sense strand
gugguugacauccggaaua

SEQ ID NO: 2414513 - RNA, 19 nt, Homo sapiens
  misc_RNA (1)...(19): siRNA sense strand
ggacauuauaaaggagcuu

SEQ ID NO: 2414514 - RNA, 19 nt, Homo sapiens
  misc_RNA (1)...(19): siRNA sense strand
uggagaaagagcuugucaa

SEQ ID NO: 2414515 - RNA, 19 nt, Homo sapiens
  misc_RNA (1)...(19): siRNA sense strand
cuggaaagaagcaagaguu

SEQ ID NO: 2414516 - RNA, 19 nt, Homo sapiens
  misc_RNA (1)...(19): siRNA sense strand
auuccuacagauagacaaa

SEQ ID NO: 2414517 - RNA, 19 nt, Homo sapiens
  misc_RNA (1)...(19): siRNA sense strand
agacaaauugaaguggaua

SEQ ID NO: 2414518 - RNA, 19 nt, Homo sapiens
  misc_RNA (1)...(19): siRNA sense strand
cuggaggugacuuggagaa

SEQ ID NO: 2414519 - RNA, 19 nt, Homo sapiens
  misc_RNA (1)...(19): siRNA sense strand
cuccagaacuucaaaggga

SEQ ID NO: 2414520 - RNA, 19 nt, Homo sapiens
  misc_RNA (1)...(19): siRNA sense strand
gaucuauugaagaagugua

SEQ ID NO: 2414521 - RNA, 19 nt, Homo sapiens
  misc_RNA (1)...(19): siRNA sense strand
agaugauaccacugugaca

SEQ ID NO: 2414522 - RNA, 19 nt, Homo sapiens
  misc_RNA (1)...(19): siRNA sense strand
agagagaaggauacagagu

SEQ ID NO: 2414523 - RNA, 19 nt, Homo sapiens
  misc_RNA (1)...(19): siRNA sense strand
ugauguuuguggaagcaau

SEQ ID NO: 2414524 - RNA, 19 nt, Homo sapiens
  misc_RNA (1)...(19): siRNA sense strand
gggaccggcuuuuggcuaa

SEQ ID NO: 2414525 - RNA, 19 nt, Homo sapiens
  misc_RNA (1)...(19): siRNA sense strand
gcguggaguccgcgaagau

SEQ ID NO: 2414526 - RNA, 19 nt, Homo sapiens
  misc_RNA (1)...(19): siRNA sense strand
ucuuccuguuuguggauaa

SEQ ID NO: 2414527 - RNA, 19 nt, Homo sapiens
  misc_RNA (1)...(19): siRNA sense strand
ggauguucaaggaggacca

SEQ ID NO: 2414528 - RNA, 19 nt, Homo sapiens
  misc_RNA (1)...(19): siRNA sense strand
gauucuuauauguggccua

SEQ ID NO: 2414529 - RNA, 19 nt, Homo sapiens
  misc_RNA (1)...(19): siRNA sense strand
aagacaaacugaaggguga

SEQ ID NO: 2414530 - RNA, 19 nt, Homo sapiens
  misc_RNA (1)...(19): siRNA sense strand
gguuauacuucuugggcca

SEQ ID NO: 2414531 - RNA, 19 nt, Homo sapiens
  misc_RNA (1)...(19): siRNA sense strand
gaacauagcuggugucccu

SEQ ID NO: 2414532 - RNA, 19 nt, Homo sapiens
  misc_RNA (1)...(19): siRNA sense strand
ccgauuuaacagaaaguau

SEQ ID NO: 2414533 - RNA, 19 nt, Homo sapiens
  misc_RNA (1)...(19): siRNA sense strand
gaacuggaucggugggcau

SEQ ID NO: 2414534 - RNA, 19 nt, Homo sapiens
  misc_RNA (1)...(19): siRNA sense strand
gauccugagcaauggaaaa

SEQ ID NO: 2414535 - RNA, 19 nt, Homo sapiens
  misc_RNA (1)...(19): siRNA sense strand
cugugaagagugagcuuau

SEQ ID NO: 2414536 - RNA, 19 nt, Homo sapiens
  misc_RNA (1)...(19): siRNA sense strand
uauuaaaaggcuugaguga

SEQ ID NO: 2414537 - RNA, 19 nt, Homo sapiens
  misc_RNA (1)...(19): siRNA sense strand
ccaccauaauuaagggccu

SEQ ID NO: 2414538 - RNA, 19 nt, Homo sapiens
  misc_RNA (1)...(19): siRNA sense strand
ccgaagaagaagcagcauu

SEQ ID NO: 2414539 - RNA, 19 nt, Homo sapiens
  misc_RNA (1)...(19): siRNA sense strand
gcauugaggccauggagga

SEQ ID NO: 2414540 - RNA, 19 nt, Homo sapiens
  misc_RNA (1)...(19): siRNA sense strand
gaggaaagugacagaccau

SEQ ID NO: 2414541 - RNA, 19 nt, Homo sapiens
  misc_RNA (1)...(19): siRNA sense strand
gaauacgaugggagcacaa

SEQ ID NO: 2414542 - RNA, 19 nt, Homo sapiens
  misc_RNA (1)...(19): siRNA sense strand
ccuacuauagaaauggaaa

SEQ ID NO: 2414543 - RNA, 19 nt, Homo sapiens
  misc_RNA (1)...(19): siRNA sense strand
ucugagaauccuaggagau

SEQ ID NO: 2414544 - RNA, 19 nt, Homo sapiens
  misc_RNA (1)...(19): siRNA sense strand
ugugaagacuguagcagga

SEQ ID NO: 2414545 - RNA, 19 nt, Homo sapiens
  misc_RNA (1)...(19): siRNA sense strand
ggaggaaagugacagacca

SEQ ID NO: 2414546 - RNA, 19 nt, Homo sapiens
  misc_RNA (1)...(19): siRNA sense strand
aggccauggaggaaaguga

SEQ ID NO: 2414547 - RNA, 19 nt, Homo sapiens
  misc_RNA (1)...(19): siRNA sense strand
gucacaggugggaaagaaa

SEQ ID NO: 2414548 - RNA, 19 nt, Homo sapiens
  misc_RNA (1)...(19): siRNA sense strand
gaagcagcauugaggccau

SEQ ID NO: 2414549 - RNA, 19 nt, Homo sapiens
  misc_RNA (1)...(19): siRNA sense strand
ucccaagauaucugagaau

SEQ ID NO: 2414550 - RNA, 19 nt, Homo sapiens
  misc_RNA (1)...(19): siRNA sense strand
uguagcaggaagcgaggaa

SEQ ID NO: 2414551 - RNA, 19 nt, Homo sapiens
  misc_RNA (1)...(19): siRNA sense strand
ggacaaugaccaugccaga

SEQ ID NO: 2414552 - RNA, 19 nt, Homo sapiens
  misc_RNA (1)...(19): siRNA sense strand
cggaggaacugguggugca

SEQ ID NO: 2414553 - RNA, 19 nt, Homo sapiens
  misc_RNA (1)...(19): siRNA sense strand
cacagaaggugcaccggaa

SEQ ID NO: 2414554 - RNA, 19 nt, Homo sapiens
  misc_RNA (1)...(19): siRNA sense strand
aaaugaagcuggaugccca

SEQ ID NO: 2414555 - RNA, 19 nt, Homo sapiens
  misc_RNA (1)...(19): siRNA sense strand
cagaaggugcaccggaaaa

SEQ ID NO: 2414556 - RNA, 19 nt, Homo sapiens
  misc_RNA (1)...(19): siRNA sense strand
acagaaggugcaccggaaa

SEQ ID NO: 2414557 - RNA, 19 nt, Homo sapiens
  misc_RNA (1)...(19): siRNA sense strand
uggaaaugaacgagagcca

SEQ ID NO: 2414558 - RNA, 19 nt, Homo sapiens
  misc_RNA (1)...(19): siRNA sense strand
agggaggaacggagggaga

SEQ ID NO: 2414559 - RNA, 19 nt, Homo sapiens
  misc_RNA (1)...(19): siRNA sense strand
gaaaugaacgagagccaca

SEQ ID NO: 2414560 - RNA, 19 nt, Homo sapiens
  misc_RNA (1)...(19): siRNA sense strand
gagccugcuuugagcggaa

SEQ ID NO: 2414561 - RNA, 19 nt, Homo sapiens
  misc_RNA (1)...(19): siRNA sense strand
aggaaggcagggaggaaaa

SEQ ID NO: 2414562 - RNA, 19 nt, Homo sapiens
  misc_RNA (1)...(19): siRNA sense strand
aggaacggagggagagaca

SEQ ID NO: 2414563 - RNA, 19 nt, Homo sapiens
  misc_RNA (1)...(19): siRNA sense strand
ucuucuacguggaaaugaa

SEQ ID NO: 2414564 - RNA, 19 nt, Homo sapiens
  misc_RNA (1)...(19): siRNA sense strand
ggagggagagacagagcga

SEQ ID NO: 2414565 - RNA, 19 nt, Homo sapiens
  misc_RNA (1)...(19): siRNA sense strand
uuucagaaucgaagggcca

SEQ ID NO: 2414566 - RNA, 19 nt, Homo sapiens
  misc_RNA (1)...(19): siRNA sense strand
ggaggaacggagggagaga

SEQ ID NO: 2414567 - RNA, 19 nt, Homo sapiens
  misc_RNA (1)...(19): siRNA sense strand
ccagauuugguuucagaau

SEQ ID NO: 2414568 - RNA, 19 nt, Homo sapiens
  misc_RNA (1)...(19): siRNA sense strand
cugcuagaccagagggaga

SEQ ID NO: 2414569 - RNA, 19 nt, Homo sapiens
  misc_RNA (1)...(19): siRNA sense strand
uggacaagaggaagcuaaa

SEQ ID NO: 2414570 - RNA, 19 nt, Homo sapiens
  misc_RNA (1)...(19): siRNA sense strand
cauucacagguuugggaaa

SEQ ID NO: 2414571 - RNA, 19 nt, Homo sapiens
  misc_RNA (1)...(19): siRNA sense strand
cuggacaagaggaagcuaa

SEQ ID NO: 2414572 - RNA, 19 nt, Homo sapiens
  misc_RNA (1)...(19): siRNA sense strand
aagcagauucaaagaagca

SEQ ID NO: 2414573 - RNA, 19 nt, Homo sapiens
  misc_RNA (1)...(19): siRNA sense strand
uggugaagagagagccaaa

SEQ ID NO: 2414574 - RNA, 19 nt, Homo sapiens
  misc_RNA (1)...(19): siRNA sense strand
gcaucaaaaccaagcaaau

SEQ ID NO: 2414575 - RNA, 19 nt, Homo sapiens
  misc_RNA (1)...(19): siRNA sense strand
gcacagaccucauggugac

SEQ ID NO: 2414576 - RNA, 19 nt, Homo sapiens
  misc_RNA (1)...(19): siRNA sense strand
cggugauggguuugacauu

SEQ ID NO: 2414577 - RNA, 19 nt, Homo sapiens
  misc_RNA (1)...(19): siRNA sense strand
ugugcauccuucugggcaa

SEQ ID NO: 2414578 - RNA, 19 nt, Homo sapiens
  misc_RNA (1)...(19): siRNA sense strand
auguuacggugauggguuu

SEQ ID NO: 2414579 - RNA, 19 nt, Homo sapiens
  misc_RNA (1)...(19): siRNA sense strand
ccgagaacgaggagaacaa

SEQ ID NO: 2414580 - RNA, 19 nt, Homo sapiens
  misc_RNA (1)...(19): siRNA sense strand
uggaugaguuccugggcua

SEQ ID NO: 2414581 - RNA, 19 nt, Homo sapiens
  misc_RNA (1)...(19): siRNA sense strand
ccauggagauguuugggaa

SEQ ID NO: 2414582 - RNA, 19 nt, Homo sapiens
  misc_RNA (1)...(19): siRNA sense strand
uggccgagaacgaggagaa

SEQ ID NO: 2414583 - RNA, 19 nt, Homo sapiens
  misc_RNA (1)...(19): siRNA sense strand
ggaauguggugucgggcga

SEQ ID NO: 2414584 - RNA, 19 nt, Homo sapiens
  misc_RNA (1)...(19): siRNA sense strand
uggaagaugaggaggagga

SEQ ID NO: 2414585 - RNA, 19 nt, Homo sapiens
  misc_RNA (1)...(19): siRNA sense strand
acauggaagaugaggagga

SEQ ID NO: 2414586 - RNA, 19 nt, Homo sapiens
  misc_RNA (1)...(19): siRNA sense strand
acgaggagaacaagggcuu

SEQ ID NO: 2414587 - RNA, 19 nt, Homo sapiens
  misc_RNA (1)...(19): siRNA sense strand
uguccaugcugcugcggua

SEQ ID NO: 2414588 - RNA, 19 nt, Homo sapiens
  misc_RNA (1)...(19): siRNA sense strand
gggcauccugcguguggaa

SEQ ID NO: 2414589 - RNA, 19 nt, Homo sapiens
  misc_RNA (1)...(19): siRNA sense strand
gcaaccuggacauggaaga

SEQ ID NO: 2414590 - RNA, 19 nt, Homo sapiens
  misc_RNA (1)...(19): siRNA sense strand
ggacauggaagaugaggag

SEQ ID NO: 2414591 - RNA, 19 nt, Homo sapiens
  misc_RNA (1)...(19): siRNA sense strand
gggagcaagaagaagacaa

SEQ ID NO: 2414592 - RNA, 19 nt, Homo sapiens
  misc_RNA (1)...(19): siRNA sense strand
gggcagagaagaaagcaga

SEQ ID NO: 2414593 - RNA, 19 nt, Homo sapiens
  misc_RNA (1)...(19): siRNA sense strand
ccaugaugccagaggagau

SEQ ID NO: 2414594 - RNA, 19 nt, Homo sapiens
  misc_RNA (1)...(19): siRNA sense strand
cggagagacuggggagaaa

SEQ ID NO: 2414595 - RNA, 19 nt, Homo sapiens
  misc_RNA (1)...(19): siRNA sense strand
gaggagacggcuuggaaaa

SEQ ID NO: 2414596 - RNA, 19 nt, Homo sapiens
  misc_RNA (1)...(19): siRNA sense strand
gggagaaaucagcuggaca

SEQ ID NO: 2414597 - RNA, 19 nt, Homo sapiens
  misc_RNA (1)...(19): siRNA sense strand
cagaggagauugagcugga

SEQ ID NO: 2414598 - RNA, 19 nt, Homo sapiens
  misc_RNA (1)...(19): siRNA sense strand
gagacuuccugguggacga

SEQ ID NO: 2414599 - RNA, 19 nt, Homo sapiens
  misc_RNA (1)...(19): siRNA sense strand
augcggaggucgagcgguu

SEQ ID NO: 2414600 - RNA, 19 nt, Homo sapiens
  misc_RNA (1)...(19): siRNA sense strand
aguuaaaaccucuagacaa

SEQ ID NO: 2414601 - RNA, 19 nt, Homo sapiens
  misc_RNA (1)...(19): siRNA sense strand
aagacaaggaaauggcuga

SEQ ID NO: 2414602 - RNA, 19 nt, Homo sapiens
  misc_RNA (1)...(19): siRNA sense strand
agagagacuuccuggugga

SEQ ID NO: 2414603 - RNA, 19 nt, Homo sapiens
  misc_RNA (1)...(19): siRNA sense strand
caggaggugaagagagcaa

SEQ ID NO: 2414604 - RNA, 19 nt, Homo sapiens
  misc_RNA (1)...(19): siRNA sense strand
aggcgaaggcggaugccaa

SEQ ID NO: 2414605 - RNA, 19 nt, Homo sapiens
  misc_RNA (1)...(19): siRNA sense strand
gucaauggcaggaggcgaa

SEQ ID NO: 2414606 - RNA, 19 nt, Homo sapiens
  misc_RNA (1)...(19): siRNA sense strand
gagcaaagcagaagccaug

SEQ ID NO: 2414607 - RNA, 19 nt, Homo sapiens
  misc_RNA (1)...(19): siRNA sense strand
gugaagagagcaaagcaga

SEQ ID NO: 2414608 - RNA, 19 nt, Homo sapiens
  misc_RNA (1)...(19): siRNA sense strand
gcucagaagugcacaggag

SEQ ID NO: 2414609 - RNA, 19 nt, Homo sapiens
  misc_RNA (1)...(19): siRNA sense strand
cguguguuugcuaggaaua

SEQ ID NO: 2414610 - RNA, 19 nt, Homo sapiens
  misc_RNA (1)...(19): siRNA sense strand
cuaacuauuugguuggcuu

SEQ ID NO: 2414611 - RNA, 19 nt, Homo sapiens
  misc_RNA (1)...(19): siRNA sense strand
ucaggagacaagugcacua

SEQ ID NO: 2414612 - RNA, 19 nt, Homo sapiens
  misc_RNA (1)...(19): siRNA sense strand
aguuuggacuacaggagaa

SEQ ID NO: 2414613 - RNA, 19 nt, Homo sapiens
  misc_RNA (1)...(19): siRNA sense strand
acgcacagcccgugguuca

SEQ ID NO: 2414614 - RNA, 19 nt, Homo sapiens
  misc_RNA (1)...(19): siRNA sense strand
ugauuagccuggugccgua

SEQ ID NO: 2414615 - RNA, 19 nt, Homo sapiens
  misc_RNA (1)...(19): siRNA sense strand
uccaguaguucgaggacca

SEQ ID NO: 2414616 - RNA, 19 nt, Homo sapiens
  misc_RNA (1)...(19): siRNA sense strand
ccacaagcaucaugacaaa

SEQ ID NO: 2414617 - RNA, 19 nt, Homo sapiens
  misc_RNA (1)...(19): siRNA sense strand
ugucagugcuccagaguuu

SEQ ID NO: 2414618 - RNA, 19 nt, Homo sapiens
  misc_RNA (1)...(19): siRNA sense strand
ccauugaugcagaagacaa

SEQ ID NO: 2414619 - RNA, 19 nt, Homo sapiens
  misc_RNA (1)...(19): siRNA sense strand
agacauugcuucaagacca

SEQ ID NO: 2414620 - RNA, 19 nt, Homo sapiens
  misc_RNA (1)...(19): siRNA sense strand
gacaacagcuguauggcau

SEQ ID NO: 2414621 - RNA, 19 nt, Homo sapiens
  misc_RNA (1)...(19): siRNA sense strand
gggacagaaaacugauaaa

SEQ ID NO: 2414622 - RNA, 19 nt, Homo sapiens
  misc_RNA (1)...(19): siRNA sense strand
agggacaacagaagcaauu

SEQ ID NO: 2414623 - RNA, 19 nt, Homo sapiens
  misc_RNA (1)...(19): siRNA sense strand
auggaauuggagaguauua

SEQ ID NO: 2414624 - RNA, 19 nt, Homo sapiens
  misc_RNA (1)...(19): siRNA sense strand
ggcagugcuugcagggaca

SEQ ID NO: 2414625 - RNA, 19 nt, Homo sapiens
  misc_RNA (1)...(19): siRNA sense strand
cggaauggacucagcaaug

SEQ ID NO: 2414626 - RNA, 19 nt, Homo sapiens
  misc_RNA (1)...(19): siRNA sense strand
gauuauaacaguaugguga

SEQ ID NO: 2414627 - RNA, 19 nt, Homo sapiens
  misc_RNA (1)...(19): siRNA sense strand
acuuggagccacauggaaa

SEQ ID NO: 2414628 - RNA, 19 nt, Homo sapiens
  misc_RNA (1)...(19): siRNA sense strand
augaaggauugaagagguu

SEQ ID NO: 2414629 - RNA, 19 nt, Homo sapiens
  misc_RNA (1)...(19): siRNA sense strand
caguauggugauugaugaa

SEQ ID NO: 2414630 - RNA, 19 nt, Homo sapiens
  misc_RNA (1)...(19): siRNA sense strand
ccacuuuggaagaugaaga

SEQ ID NO: 2414631 - RNA, 19 nt, Homo sapiens
  misc_RNA (1)...(19): siRNA sense strand
aagugaaauuugcugggaa

SEQ ID NO: 2414632 - RNA, 19 nt, Homo sapiens
  misc_RNA (1)...(19): siRNA sense strand
ugugaaaagaugcaggaaa

SEQ ID NO: 2414633 - RNA, 19 nt, Homo sapiens
  misc_RNA (1)...(19): siRNA sense strand
uguagaagaaagagauguu

SEQ ID NO: 2414634 - RNA, 19 nt, Homo sapiens
  misc_RNA (1)...(19): siRNA sense strand
uguuuaugagggaggcuua

SEQ ID NO: 2414635 - RNA, 19 nt, Homo sapiens
  misc_RNA (1)...(19): siRNA sense strand
cuuuggaagaugaagaaaa

SEQ ID NO: 2414636 - RNA, 19 nt, Homo sapiens
  misc_RNA (1)...(19): siRNA sense strand
cugcagaacaauuugacuu

SEQ ID NO: 2414637 - RNA, 19 nt, Homo sapiens
  misc_RNA (1)...(19): siRNA sense strand
caggaucacuugugggaac

SEQ ID NO: 2414638 - RNA, 19 nt, Homo sapiens
  misc_RNA (1)...(19): siRNA sense strand
ugguuguggaucagguuua

SEQ ID NO: 2414639 - RNA, 19 nt, Homo sapiens
  misc_RNA (1)...(19): siRNA sense strand
agggaggguccaaagaaau

SEQ ID NO: 2414640 - RNA, 19 nt, Homo sapiens
  misc_RNA (1)...(19): siRNA sense strand
gaugaaggauugaagaggu

SEQ ID NO: 2414641 - RNA, 19 nt, Homo sapiens
  misc_RNA (1)...(19): siRNA sense strand
aaaggagaagagagggaca

SEQ ID NO: 2414642 - RNA, 19 nt, Homo sapiens
  misc_RNA (1)...(19): siRNA sense strand
ccaucuggaaaaugaauua

SEQ ID NO: 2414643 - RNA, 19 nt, Homo sapiens
  misc_RNA (1)...(19): siRNA sense strand
aguuuguagaagaaagaga

SEQ ID NO: 2414644 - RNA, 19 nt, Homo sapiens
  misc_RNA (1)...(19): siRNA sense strand
cguccacaccggcgagaaa

SEQ ID NO: 2414645 - RNA, 19 nt, Homo sapiens
  misc_RNA (1)...(19): siRNA sense strand
aaaggaaagacaaagggaa

SEQ ID NO: 2414646 - RNA, 19 nt, Homo sapiens
  misc_RNA (1)...(19): siRNA sense strand
aaggaaagacaaagggaag

SEQ ID NO: 2414647 - RNA, 19 nt, Homo sapiens
  misc_RNA (1)...(19): siRNA sense strand
agaagucagccguggccaa

SEQ ID NO: 2414648 - RNA, 19 nt, Homo sapiens
  misc_RNA (1)...(19): siRNA sense strand
acgugaugcgggagaccua

SEQ ID NO: 2414649 - RNA, 19 nt, Homo sapiens
  misc_RNA (1)...(19): siRNA sense strand
cgucauggcugcuacgugu

SEQ ID NO: 2414650 - RNA, 19 nt, Homo sapiens
  misc_RNA (1)...(19): siRNA sense strand
uggugaaggccuugggauu

SEQ ID NO: 2414651 - RNA, 19 nt, Homo sapiens
  misc_RNA (1)...(19): siRNA sense strand
uguuggacucacagggaaa

SEQ ID NO: 2414652 - RNA, 19 nt, Homo sapiens
  misc_RNA (1)...(19): siRNA sense strand
ggugaaagcugcaguggcu

SEQ ID NO: 2414653 - RNA, 19 nt, Homo sapiens
  misc_RNA (1)...(19): siRNA sense strand
augaaaaggcugcagauaa

SEQ ID NO: 2414654 - RNA, 19 nt, Homo sapiens
  misc_RNA (1)...(19): siRNA sense strand
ugucauuggugaaggccuu

SEQ ID NO: 2414655 - RNA, 19 nt, Homo sapiens
  misc_RNA (1)...(19): siRNA sense strand
aggugaagcccucggccaa

SEQ ID NO: 2414656 - RNA, 19 nt, Homo sapiens
  misc_RNA (1)...(19): siRNA sense strand
cagaagaauucaugguccu

SEQ ID NO: 2414657 - RNA, 19 nt, Homo sapiens
  misc_RNA (1)...(19): siRNA sense strand
uggugaacgccuuagcuaa

SEQ ID NO: 2414658 - RNA, 19 nt, Homo sapiens
  misc_RNA (1)...(19): siRNA sense strand
cacaggagcugaaggacca

SEQ ID NO: 2414659 - RNA, 19 nt, Homo sapiens
  misc_RNA (1)...(19): siRNA sense strand
uggacaugguggcuggauu

SEQ ID NO: 2414660 - RNA, 19 nt, Homo sapiens
  misc_RNA (1)...(19): siRNA sense strand
aguaugaggagcugagcaa

SEQ ID NO: 2414661 - RNA, 19 nt, Homo sapiens
  misc_RNA (1)...(19): siRNA sense strand
agaacaaggagcuggcaga

SEQ ID NO: 2414662 - RNA, 19 nt, Homo sapiens
  misc_RNA (1)...(19): siRNA sense strand
gcggcuggagacagagaaa

SEQ ID NO: 2414663 - RNA, 19 nt, Homo sapiens
  misc_RNA (1)...(19): siRNA sense strand
cagacggagcagagcgaga

SEQ ID NO: 2414664 - RNA, 19 nt, Homo sapiens
  misc_RNA (1)...(19): siRNA sense strand
aggacgaggaccugcaaau

SEQ ID NO: 2414665 - RNA, 19 nt, Homo sapiens
  misc_RNA (1)...(19): siRNA sense strand
gcgcagauggagaagacca

SEQ ID NO: 2414666 - RNA, 19 nt, Homo sapiens
  misc_RNA (1)...(19): siRNA sense strand
agcacgaggcugaggugaa

SEQ ID NO: 2414667 - RNA, 19 nt, Homo sapiens
  misc_RNA (1)...(19): siRNA sense strand
ggaacauugagaagcuaga

SEQ ID NO: 2414668 - RNA, 19 nt, Homo sapiens
  misc_RNA (1)...(19): siRNA sense strand
agacagagaaacugggccu

SEQ ID NO: 2414669 - RNA, 19 nt, Homo sapiens
  misc_RNA (1)...(19): siRNA sense strand
acaagaagcugcgggcaca

SEQ ID NO: 2414670 - RNA, 19 nt, Homo sapiens
  misc_RNA (1)...(19): siRNA sense strand
ggcuggagacagagaaacu

SEQ ID NO: 2414671 - RNA, 19 nt, Homo sapiens
  misc_RNA (1)...(19): siRNA sense strand
auggcaagcugaagaagca

SEQ ID NO: 2414672 - RNA, 19 nt, Homo sapiens
  misc_RNA (1)...(19): siRNA sense strand
uugcaaacaaugugggaaa

SEQ ID NO: 2414673 - RNA, 19 nt, Homo sapiens
  misc_RNA (1)...(19): siRNA sense strand
aacucauacuggagagaaa

SEQ ID NO: 2414674 - RNA, 19 nt, Homo sapiens
  misc_RNA (1)...(19): siRNA sense strand
auguaaggaauguggcaaa

SEQ ID NO: 2414675 - RNA, 19 nt, Homo sapiens
  misc_RNA (1)...(19): siRNA sense strand
gaaacaaaucagaagacca

SEQ ID NO: 2414676 - RNA, 19 nt, Homo sapiens
  misc_RNA (1)...(19): siRNA sense strand
aggaauguccagagaaguu

SEQ ID NO: 2414677 - RNA, 19 nt, Homo sapiens
  misc_RNA (1)...(19): siRNA sense strand
cccuaugaauguaaggaau

SEQ ID NO: 2414678 - RNA, 19 nt, Homo sapiens
  misc_RNA (1)...(19): siRNA sense strand
cccuaugaauguaagaaau

SEQ ID NO: 2414679 - RNA, 19 nt, Homo sapiens
  misc_RNA (1)...(19): siRNA sense strand
agagaugugaugcaagaaa

SEQ ID NO: 2414680 - RNA, 19 nt, Homo sapiens
  misc_RNA (1)...(19): siRNA sense strand
aauuaaagaaggcagucaa

SEQ ID NO: 2414681 - RNA, 19 nt, Homo sapiens
  misc_RNA (1)...(19): siRNA sense strand
acuauuugagugugaggaa

SEQ ID NO: 2414682 - RNA, 19 nt, Homo sapiens
  misc_RNA (1)...(19): siRNA sense strand
aggcagucaauauggagaa

SEQ ID NO: 2414683 - RNA, 19 nt, Homo sapiens
  misc_RNA (1)...(19): siRNA sense strand
cagucaugugguagagaga

SEQ ID NO: 2414684 - RNA, 19 nt, Homo sapiens
  misc_RNA (1)...(19): siRNA sense strand
acccuaugcauguaagaaa

SEQ ID NO: 2414685 - RNA, 19 nt, Homo sapiens
  misc_RNA (1)...(19): siRNA sense strand
ugaaagaacucauacugga

SEQ ID NO: 2414686 - RNA, 19 nt, Homo sapiens
  misc_RNA (1)...(19): siRNA sense strand
cccuaugcauguaagaaau

SEQ ID NO: 2414687 - RNA, 19 nt, Homo sapiens
  misc_RNA (1)...(19): siRNA sense strand
cccuaugaauguaaacaau

SEQ ID NO: 2414688 - RNA, 19 nt, Homo sapiens
  misc_RNA (1)...(19): siRNA sense strand
acaaaucagaagaccagaa

SEQ ID NO: 2414689 - RNA, 19 nt, Homo sapiens
  misc_RNA (1)...(19): siRNA sense strand
ucaccaguguugacagaca

SEQ ID NO: 2414690 - RNA, 19 nt, Homo sapiens
  misc_RNA (1)...(19): siRNA sense strand
aaguuaucuucgugaacau

SEQ ID NO: 2414691 - RNA, 19 nt, Homo sapiens
  misc_RNA (1)...(19): siRNA sense strand
augcaguguguguggaaaa

SEQ ID NO: 2414692 - RNA, 19 nt, Homo sapiens
  misc_RNA (1)...(19): siRNA sense strand
ccuucgaaagcaugaaaga

SEQ ID NO: 2414693 - RNA, 19 nt, Homo sapiens
  misc_RNA (1)...(19): siRNA sense strand
gguaacacacacuaguaau

SEQ ID NO: 2414694 - RNA, 19 nt, Homo sapiens
  misc_RNA (1)...(19): siRNA sense strand
aagaacgcauacuggagaa

SEQ ID NO: 2414695 - RNA, 19 nt, Homo sapiens
  misc_RNA (1)...(19): siRNA sense strand
ugaaauuaaagaaggcagu

SEQ ID NO: 2414696 - RNA, 19 nt, Homo sapiens
  misc_RNA (1)...(19): siRNA sense strand
gagugaaaccuuauggaug

SEQ ID NO: 2414697 - RNA, 19 nt, Homo sapiens
  misc_RNA (1)...(19): siRNA sense strand
acccuaugaauguaagaaa

SEQ ID NO: 2414698 - RNA, 19 nt, Homo sapiens
  misc_RNA (1)...(19): siRNA sense strand
gucaugugguagagagacu

SEQ ID NO: 2414699 - RNA, 19 nt, Homo sapiens
  misc_RNA (1)...(19): siRNA sense strand
gggaauacaugaaagaacg

SEQ ID NO: 2414700 - RNA, 19 nt, Homo sapiens
  misc_RNA (1)...(19): siRNA sense strand
gcccuaugaauguaaacaa

SEQ ID NO: 2414701 - RNA, 19 nt, Homo sapiens
  misc_RNA (1)...(19): siRNA sense strand
ccuaugugagcaugaaaga

SEQ ID NO: 2414702 - RNA, 19 nt, Homo sapiens
  misc_RNA (1)...(19): siRNA sense strand
gggcuacaaaggaggacaa

SEQ ID NO: 2414703 - RNA, 19 nt, Homo sapiens
  misc_RNA (1)...(19): siRNA sense strand
cugucgaaugggugggaaa

SEQ ID NO: 2414704 - RNA, 19 nt, Homo sapiens
  misc_RNA (1)...(19): siRNA sense strand
gagcuugggcugaaggaga

SEQ ID NO: 2414705 - RNA, 19 nt, Homo sapiens
  misc_RNA (1)...(19): siRNA sense strand
ccugaaaucaacagaggau

SEQ ID NO: 2414706 - RNA, 19 nt, Homo sapiens
  misc_RNA (1)...(19): siRNA sense strand
acuacgaacaggugaacau

SEQ ID NO: 2414707 - RNA, 19 nt, Homo sapiens
  misc_RNA (1)...(19): siRNA sense strand
ggaaaugagcuugggcuga

SEQ ID NO: 2414708 - RNA, 19 nt, Homo sapiens
  misc_RNA (1)...(19): siRNA sense strand
acaugauggaguuguacaa

SEQ ID NO: 2414709 - RNA, 19 nt, Homo sapiens
  misc_RNA (1)...(19): siRNA sense strand
uaaacuacgaacaggugaa

SEQ ID NO: 2414710 - RNA, 19 nt, Homo sapiens
  misc_RNA (1)...(19): siRNA sense strand
gggcaaccaaaggaggaaa

SEQ ID NO: 2414711 - RNA, 19 nt, Homo sapiens
  misc_RNA (1)...(19): siRNA sense strand
ucuggagauuaaaggauga

SEQ ID NO: 2414712 - RNA, 19 nt, Homo sapiens
  misc_RNA (1)...(19): siRNA sense strand
ccgucgacaugauggaguu

SEQ ID NO: 2414713 - RNA, 19 nt, Homo sapiens
  misc_RNA (1)...(19): siRNA sense strand
ggcaaccaaaggaggaaau

SEQ ID NO: 2414714 - RNA, 19 nt, Homo sapiens
  misc_RNA (1)...(19): siRNA sense strand
gccacuaggcagagggaau

SEQ ID NO: 2414715 - RNA, 19 nt, Homo sapiens
  misc_RNA (1)...(19): siRNA sense strand
cugucgaaugggugggaaa

SEQ ID NO: 2414716 - RNA, 19 nt, Homo sapiens
  misc_RNA (1)...(19): siRNA sense strand
gagcuugggcugaaggaga

SEQ ID NO: 2414717 - RNA, 19 nt, Homo sapiens
  misc_RNA (1)...(19): siRNA sense strand
ccugaaaucaacagaggau

SEQ ID NO: 2414718 - RNA, 19 nt, Homo sapiens
  misc_RNA (1)...(19): siRNA sense strand
acuacgaacaggugaacau

SEQ ID NO: 2414719 - RNA, 19 nt, Homo sapiens
  misc_RNA (1)...(19): siRNA sense strand
ggaaaugagcuugggcuga

SEQ ID NO: 2414720 - RNA, 19 nt, Homo sapiens
  misc_RNA (1)...(19): siRNA sense strand
acaugauggaguuguacaa

SEQ ID NO: 2414721 - RNA, 19 nt, Homo sapiens
  misc_RNA (1)...(19): siRNA sense strand
uaaacuacgaacaggugaa

SEQ ID NO: 2414722 - RNA, 19 nt, Homo sapiens
  misc_RNA (1)...(19): siRNA sense strand
gggcaaccaaaggaggaaa

SEQ ID NO: 2414723 - RNA, 19 nt, Homo sapiens
  misc_RNA (1)...(19): siRNA sense strand
ucuggagauuaaaggauga

SEQ ID NO: 2414724 - RNA, 19 nt, Homo sapiens
  misc_RNA (1)...(19): siRNA sense strand
ccgucgacaugauggaguu

SEQ ID NO: 2414725 - RNA, 19 nt, Homo sapiens
  misc_RNA (1)...(19): siRNA sense strand
ggcaaccaaaggaggaaau

SEQ ID NO: 2414726 - RNA, 19 nt, Homo sapiens
  misc_RNA (1)...(19): siRNA sense strand
gcccagugcaagagggaua

SEQ ID NO: 2414727 - RNA, 19 nt, Homo sapiens
  misc_RNA (1)...(19): siRNA sense strand
cauugaaagacuugcuaaa

SEQ ID NO: 2414728 - RNA, 19 nt, Homo sapiens
  misc_RNA (1)...(19): siRNA sense strand
acaaaugcaaguaggacaa

SEQ ID NO: 2414729 - RNA, 19 nt, Homo sapiens
  misc_RNA (1)...(19): siRNA sense strand
agcgagaacgugugagaaa

SEQ ID NO: 2414730 - RNA, 19 nt, Homo sapiens
  misc_RNA (1)...(19): siRNA sense strand
uuuccaaacccgagagauu

SEQ ID NO: 2414731 - RNA, 19 nt, Homo sapiens
  misc_RNA (1)...(19): siRNA sense strand
ggaauuaacacaagaguuc

SEQ ID NO: 2414732 - RNA, 19 nt, Homo sapiens
  misc_RNA (1)...(19): siRNA sense strand
gggacaaguuaacaggaga

SEQ ID NO: 2414733 - RNA, 19 nt, Homo sapiens
  misc_RNA (1)...(19): siRNA sense strand
caaacuaggcagagagaag

SEQ ID NO: 2414734 - RNA, 19 nt, Homo sapiens
  misc_RNA (1)...(19): siRNA sense strand
ggaaauaguaacuucguca

SEQ ID NO: 2414735 - RNA, 19 nt, Homo sapiens
  misc_RNA (1)...(19): siRNA sense strand
gaaccgugacuguggaauu

SEQ ID NO: 2414736 - RNA, 19 nt, Homo sapiens
  misc_RNA (1)...(19): siRNA sense strand
guaaugaagucaauggguu

SEQ ID NO: 2414737 - RNA, 19 nt, Homo sapiens
  misc_RNA (1)...(19): siRNA sense strand
gucagcaaucagagggaaa

SEQ ID NO: 2414738 - RNA, 19 nt, Homo sapiens
  misc_RNA (1)...(19): siRNA sense strand
cguuaugccacauggaaga

SEQ ID NO: 2414739 - RNA, 19 nt, Homo sapiens
  misc_RNA (1)...(19): siRNA sense strand
cuacgaguguauagcgaga

SEQ ID NO: 2414740 - RNA, 19 nt, Homo sapiens
  misc_RNA (1)...(19): siRNA sense strand
aagucaauggguuggguua

SEQ ID NO: 2414741 - RNA, 19 nt, Homo sapiens
  misc_RNA (1)...(19): siRNA sense strand
uguugaggaucuuaguaaa

SEQ ID NO: 2414742 - RNA, 19 nt, Homo sapiens
  misc_RNA (1)...(19): siRNA sense strand
ccaggagggacaagccaaa

SEQ ID NO: 2414743 - RNA, 19 nt, Homo sapiens
  misc_RNA (1)...(19): siRNA sense strand
aggaaugaccaacaacaaa

SEQ ID NO: 2414744 - RNA, 19 nt, Homo sapiens
  misc_RNA (1)...(19): siRNA sense strand
cuguugaggaucuuaguaa

SEQ ID NO: 2414745 - RNA, 19 nt, Homo sapiens
  misc_RNA (1)...(19): siRNA sense strand
gauaaagagcucugugacu

SEQ ID NO: 2414746 - RNA, 19 nt, Homo sapiens
  misc_RNA (1)...(19): siRNA sense strand
gaguuugacaggaggaguu

SEQ ID NO: 2414747 - RNA, 19 nt, Homo sapiens
  misc_RNA (1)...(19): siRNA sense strand
aagaaggauggguggaaca

SEQ ID NO: 2414748 - RNA, 19 nt, Homo sapiens
  misc_RNA (1)...(19): siRNA sense strand
ccagacuacuguugaggau

SEQ ID NO: 2414749 - RNA, 19 nt, Homo sapiens
  misc_RNA (1)...(19): siRNA sense strand
ugaaauucguuaugccaca

SEQ ID NO: 2414750 - RNA, 19 nt, Homo sapiens
  misc_RNA (1)...(19): siRNA sense strand
ugcuugacaaugugagaaa

SEQ ID NO: 2414751 - RNA, 19 nt, Homo sapiens
  misc_RNA (1)...(19): siRNA sense strand
ccacaguagcuuacaaacu

SEQ ID NO: 2414752 - RNA, 19 nt, Homo sapiens
  misc_RNA (1)...(19): siRNA sense strand
ccacuguaaucugggacaa

SEQ ID NO: 2414753 - RNA, 19 nt, Homo sapiens
  misc_RNA (1)...(19): siRNA sense strand
ggaaugggauaaagagcuc

SEQ ID NO: 2414754 - RNA, 19 nt, Homo sapiens
  misc_RNA (1)...(19): siRNA sense strand
caacaaaguucuuaugcag

SEQ ID NO: 2414755 - RNA, 19 nt, Homo sapiens
  misc_RNA (1)...(19): siRNA sense strand
gccugaaacaacugcacua

SEQ ID NO: 2414756 - RNA, 19 nt, Homo sapiens
  misc_RNA (1)...(19): siRNA sense strand
guguauagcgagaacgugu

SEQ ID NO: 2414757 - RNA, 19 nt, Homo sapiens
  misc_RNA (1)...(19): siRNA sense strand
caaguuaacaggagagccu

SEQ ID NO: 2414758 - RNA, 19 nt, Homo sapiens
  misc_RNA (1)...(19): siRNA sense strand
cgagaacgugugagaaacu

SEQ ID NO: 2414759 - RNA, 19 nt, Homo sapiens
  misc_RNA (1)...(19): siRNA sense strand
guugaggaucuuaguaaaa

SEQ ID NO: 2414760 - RNA, 19 nt, Homo sapiens
  misc_RNA (1)...(19): siRNA sense strand
gugugagaaacuugacgaa

SEQ ID NO: 2414761 - RNA, 19 nt, Homo sapiens
  misc_RNA (1)...(19): siRNA sense strand
gggucguaaauguguguuu

SEQ ID NO: 2414762 - RNA, 19 nt, Homo sapiens
  misc_RNA (1)...(19): siRNA sense strand
cagagagaagccagcauau

SEQ ID NO: 2414763 - RNA, 19 nt, Homo sapiens
  misc_RNA (1)...(19): siRNA sense strand
ugcuaaagaaguaggaacu

SEQ ID NO: 2414764 - RNA, 19 nt, Homo sapiens
  misc_RNA (1)...(19): siRNA sense strand
gauuugaaccacagaucca

SEQ ID NO: 2414765 - RNA, 19 nt, Homo sapiens
  misc_RNA (1)...(19): siRNA sense strand
acaaaguggaauuaacaca

SEQ ID NO: 2414766 - RNA, 19 nt, Homo sapiens
  misc_RNA (1)...(19): siRNA sense strand
cuuacaaacuaggcagaga

SEQ ID NO: 2414767 - RNA, 19 nt, Homo sapiens
  misc_RNA (1)...(19): siRNA sense strand
uaacacaagaguucccaaa

SEQ ID NO: 2414768 - RNA, 19 nt, Homo sapiens
  misc_RNA (1)...(19): siRNA sense strand
aguuaauggaggcgugcau

SEQ ID NO: 2414769 - RNA, 19 nt, Homo sapiens
  misc_RNA (1)...(19): siRNA sense strand
aacaaaugcaaguaggaca

SEQ ID NO: 2414770 - RNA, 19 nt, Homo sapiens
  misc_RNA (1)...(19): siRNA sense strand
auucguuggcuaagagaca

SEQ ID NO: 2414771 - RNA, 19 nt, Homo sapiens
  misc_RNA (1)...(19): siRNA sense strand
uuauagagaccucaggaga

SEQ ID NO: 2414772 - RNA, 19 nt, Homo sapiens
  misc_RNA (1)...(19): siRNA sense strand
gauggaacgauuugaacca

SEQ ID NO: 2414773 - RNA, 19 nt, Homo sapiens
  misc_RNA (1)...(19): siRNA sense strand
auagugaguagcaugguaa

SEQ ID NO: 2414774 - RNA, 19 nt, Homo sapiens
  misc_RNA (1)...(19): siRNA sense strand
ccagaaagguggaagagga

SEQ ID NO: 2414775 - RNA, 19 nt, Homo sapiens
  misc_RNA (1)...(19): siRNA sense strand
agguggaagaggaugaaua

SEQ ID NO: 2414776 - RNA, 19 nt, Homo sapiens
  misc_RNA (1)...(19): siRNA sense strand
cagaaagguggaagaggau

SEQ ID NO: 2414777 - RNA, 19 nt, Homo sapiens
  misc_RNA (1)...(19): siRNA sense strand
ggauuuggaaugacgggaa

SEQ ID NO: 2414778 - RNA, 19 nt, Homo sapiens
  misc_RNA (1)...(19): siRNA sense strand
cucagaaacaccacagaaa

SEQ ID NO: 2414779 - RNA, 19 nt, Homo sapiens
  misc_RNA (1)...(19): siRNA sense strand
ugaguagaagaaugggaua

SEQ ID NO: 2414780 - RNA, 19 nt, Homo sapiens
  misc_RNA (1)...(19): siRNA sense strand
ugcuaagagaguaugauaa

SEQ ID NO: 2414781 - RNA, 19 nt, Homo sapiens
  misc_RNA (1)...(19): siRNA sense strand
uggcuaucccaaagaagaa

SEQ ID NO: 2414782 - RNA, 19 nt, Homo sapiens
  misc_RNA (1)...(19): siRNA sense strand
ccguuuacuggcaggaauu

SEQ ID NO: 2414783 - RNA, 19 nt, Homo sapiens
  misc_RNA (1)...(19): siRNA sense strand
caaguugcuaagagaguau

SEQ ID NO: 2414784 - RNA, 19 nt, Homo sapiens
  misc_RNA (1)...(19): siRNA sense strand
cgaugaucacuuuaaacaa

SEQ ID NO: 2414785 - RNA, 19 nt, Homo sapiens
  misc_RNA (1)...(19): siRNA sense strand
ccaucaaugcugagugcca

SEQ ID NO: 2414786 - RNA, 19 nt, Homo sapiens
  misc_RNA (1)...(19): siRNA sense strand
gggcguauucacauagaca

SEQ ID NO: 2414787 - RNA, 19 nt, Homo sapiens
  misc_RNA (1)...(19): siRNA sense strand
cugcuaugaagaauguaaa

SEQ ID NO: 2414788 - RNA, 19 nt, Homo sapiens
  misc_RNA (1)...(19): siRNA sense strand
augagugucuggauggcaa

SEQ ID NO: 2414789 - RNA, 19 nt, Homo sapiens
  misc_RNA (1)...(19): siRNA sense strand
gcagaggcucacuggauca

SEQ ID NO: 2414790 - RNA, 19 nt, Homo sapiens
  misc_RNA (1)...(19): siRNA sense strand
acauagacaucuuggagcu

SEQ ID NO: 2414791 - RNA, 19 nt, Homo sapiens
  misc_RNA (1)...(19): siRNA sense strand
uggaauaccaaauugacau

SEQ ID NO: 2414792 - RNA, 19 nt, Homo sapiens
  misc_RNA (1)...(19): siRNA sense strand
ccguaauugacguugacau

SEQ ID NO: 2414793 - RNA, 19 nt, Homo sapiens
  misc_RNA (1)...(19): siRNA sense strand
cagcuauggcuaucccaaa

SEQ ID NO: 2414794 - RNA, 19 nt, Homo sapiens
  misc_RNA (1)...(19): siRNA sense strand
aggaaagggcguauucaca

SEQ ID NO: 2414795 - RNA, 19 nt, Homo sapiens
  misc_RNA (1)...(19): siRNA sense strand
cuucagaguacgagaacaa

SEQ ID NO: 2414796 - RNA, 19 nt, Homo sapiens
  misc_RNA (1)...(19): siRNA sense strand
aggccaagcugucgaguua

SEQ ID NO: 2414797 - RNA, 19 nt, Homo sapiens
  misc_RNA (1)...(19): siRNA sense strand
ggucaaggaugauggcauu

SEQ ID NO: 2414798 - RNA, 19 nt, Homo sapiens
  misc_RNA (1)...(19): siRNA sense strand
ucaacaagacugugagcua

SEQ ID NO: 2414799 - RNA, 19 nt, Homo sapiens
  misc_RNA (1)...(19): siRNA sense strand
gcuccaaggacaagccaaa

SEQ ID NO: 2414800 - RNA, 19 nt, Homo sapiens
  misc_RNA (1)...(19): siRNA sense strand
cagaaagaauagagaguag

SEQ ID NO: 2414801 - RNA, 19 nt, Homo sapiens
  misc_RNA (1)...(19): siRNA sense strand
gcaacaagcaguaagguga

SEQ ID NO: 2414802 - RNA, 19 nt, Homo sapiens
  misc_RNA (1)...(19): siRNA sense strand
caguaggguuggugcaaau

SEQ ID NO: 2414803 - RNA, 19 nt, Homo sapiens
  misc_RNA (1)...(19): siRNA sense strand
cagaauagcuccagaggcu

SEQ ID NO: 2414804 - RNA, 19 nt, Homo sapiens
  misc_RNA (1)...(19): siRNA sense strand
agggcgacuuagugggaaa

SEQ ID NO: 2414805 - RNA, 19 nt, Homo sapiens
  misc_RNA (1)...(19): siRNA sense strand
acuugaaagaggaggauuu

SEQ ID NO: 2414806 - RNA, 19 nt, Homo sapiens
  misc_RNA (1)...(19): siRNA sense strand
cagacuugcucuuggagua

SEQ ID NO: 2414807 - RNA, 19 nt, Homo sapiens
  misc_RNA (1)...(19): siRNA sense strand
aggagauacucuaaaggua

SEQ ID NO: 2414808 - RNA, 19 nt, Homo sapiens
  misc_RNA (1)...(19): siRNA sense strand
caaaggaauucguggucuu

SEQ ID NO: 2414809 - RNA, 19 nt, Homo sapiens
  misc_RNA (1)...(19): siRNA sense strand
acagagacacggugguuua

SEQ ID NO: 2414810 - RNA, 19 nt, Homo sapiens
  misc_RNA (1)...(19): siRNA sense strand
cuacaaacacagaacgaga

SEQ ID NO: 2414811 - RNA, 19 nt, Homo sapiens
  misc_RNA (1)...(19): siRNA sense strand
uggaaauccuggagaaauc

SEQ ID NO: 2414812 - RNA, 19 nt, Homo sapiens
  misc_RNA (1)...(19): siRNA sense strand
agaauagagaguagcggaa

SEQ ID NO: 2414813 - RNA, 19 nt, Homo sapiens
  misc_RNA (1)...(19): siRNA sense strand
cagaauggguacaugauca

SEQ ID NO: 2414814 - RNA, 19 nt, Homo sapiens
  misc_RNA (1)...(19): siRNA sense strand
aaacacagaacgagaccaa

SEQ ID NO: 2414815 - RNA, 19 nt, Homo sapiens
  misc_RNA (1)...(19): siRNA sense strand
gggcgagcgcaauaggaua

SEQ ID NO: 2414816 - RNA, 19 nt, Homo sapiens
  misc_RNA (1)...(19): siRNA sense strand
ucagagagugcuuggcaaa

SEQ ID NO: 2414817 - RNA, 19 nt, Homo sapiens
  misc_RNA (1)...(19): siRNA sense strand
gccaaugggacguggaaca

SEQ ID NO: 2414818 - RNA, 19 nt, Homo sapiens
  misc_RNA (1)...(19): siRNA sense strand
ugucaaaggaaaugaagga

SEQ ID NO: 2414819 - RNA, 19 nt, Homo sapiens
  misc_RNA (1)...(19): siRNA sense strand
cuguauggcaaauggcuua

SEQ ID NO: 2414820 - RNA, 19 nt, Homo sapiens
  misc_RNA (1)...(19): siRNA sense strand
cuauaggauccgugaugaa

SEQ ID NO: 2414821 - RNA, 19 nt, Homo sapiens
  misc_RNA (1)...(19): siRNA sense strand
aaaguaaaggagugagaga

SEQ ID NO: 2414822 - RNA, 19 nt, Homo sapiens
  misc_RNA (1)...(19): siRNA sense strand
auucaacauaggagacaaa

SEQ ID NO: 2414823 - RNA, 19 nt, Homo sapiens
  misc_RNA (1)...(19): siRNA sense strand
ccaccgacgcaaaggauuu

SEQ ID NO: 2414824 - RNA, 19 nt, Homo sapiens
  misc_RNA (1)...(19): siRNA sense strand
ccaggauauuauaaggauu

SEQ ID NO: 2414825 - RNA, 19 nt, Homo sapiens
  misc_RNA (1)...(19): siRNA sense strand
gauuggggcugaugggaaa

SEQ ID NO: 2414826 - RNA, 19 nt, Homo sapiens
  misc_RNA (1)...(19): siRNA sense strand
agaaaugcuuacugaggau

SEQ ID NO: 2414827 - RNA, 19 nt, Homo sapiens
  misc_RNA (1)...(19): siRNA sense strand
ugucaguagugauggcauu

SEQ ID NO: 2414828 - RNA, 19 nt, Homo sapiens
  misc_RNA (1)...(19): siRNA sense strand
aauuauaaguuguggggau

SEQ ID NO: 2414829 - RNA, 19 nt, Homo sapiens
  misc_RNA (1)...(19): siRNA sense strand
gagcugaaguugacaggca

SEQ ID NO: 2414830 - RNA, 19 nt, Homo sapiens
  misc_RNA (1)...(19): siRNA sense strand
ggaaauauaaugaauggga

SEQ ID NO: 2414831 - RNA, 19 nt, Homo sapiens
  misc_RNA (1)...(19): siRNA sense strand
gaaugauuuggcagaauua

SEQ ID NO: 2414832 - RNA, 19 nt, Homo sapiens
  misc_RNA (1)...(19): siRNA sense strand
ugggaaucauacugaacaa

SEQ ID NO: 2414833 - RNA, 19 nt, Homo sapiens
  misc_RNA (1)...(19): siRNA sense strand
ccugaaugaugucgugaau

SEQ ID NO: 2414834 - RNA, 19 nt, Homo sapiens
  misc_RNA (1)...(19): siRNA sense strand
gcaaaggauuuaacgcuca

SEQ ID NO: 2414835 - RNA, 19 nt, Homo sapiens
  misc_RNA (1)...(19): siRNA sense strand
ggcuagaguucaacaccaa

SEQ ID NO: 2414836 - RNA, 19 nt, Homo sapiens
  misc_RNA (1)...(19): siRNA sense strand
gcuaucagcuccaaggaca

SEQ ID NO: 2414837 - RNA, 19 nt, Homo sapiens
  misc_RNA (1)...(19): siRNA sense strand
cagaauuauuugauggaac

SEQ ID NO: 2414838 - RNA, 19 nt, Homo sapiens
  misc_RNA (1)...(19): siRNA sense strand
caacaagcaguaaggugaa

SEQ ID NO: 2414839 - RNA, 19 nt, Homo sapiens
  misc_RNA (1)...(19): siRNA sense strand
cugcauggaacgagauuca

SEQ ID NO: 2414840 - RNA, 19 nt, Homo sapiens
  misc_RNA (1)...(19): siRNA sense strand
ggauaugccugcaagacca

SEQ ID NO: 2414841 - RNA, 19 nt, Homo sapiens
  misc_RNA (1)...(19): siRNA sense strand
ggacaaggucaucaagcuu

SEQ ID NO: 2414842 - RNA, 19 nt, Homo sapiens
  misc_RNA (1)...(19): siRNA sense strand
accaaauuauccagaggaa

SEQ ID NO: 2414843 - RNA, 19 nt, Homo sapiens
  misc_RNA (1)...(19): siRNA sense strand
cggucaaggaugauggcau

SEQ ID NO: 2414844 - RNA, 19 nt, Homo sapiens
  misc_RNA (1)...(19): siRNA sense strand
gcauacugcaagacgggaa

SEQ ID NO: 2414845 - RNA, 19 nt, Homo sapiens
  misc_RNA (1)...(19): siRNA sense strand
uuuaacauggagugggaua

SEQ ID NO: 2414846 - RNA, 19 nt, Homo sapiens
  misc_RNA (1)...(19): siRNA sense strand
ggagcaagugucaaaggaa

SEQ ID NO: 2414847 - RNA, 19 nt, Homo sapiens
  misc_RNA (1)...(19): siRNA sense strand
ggagaucgguacaugguga

SEQ ID NO: 2414848 - RNA, 19 nt, Homo sapiens
  misc_RNA (1)...(19): siRNA sense strand
gcaaauggcuuaugggacc

SEQ ID NO: 2414849 - RNA, 19 nt, Homo sapiens
  misc_RNA (1)...(19): siRNA sense strand
cgagcaaaccugucugcaa

SEQ ID NO: 2414850 - RNA, 19 nt, Homo sapiens
  misc_RNA (1)...(19): siRNA sense strand
acaagaaggaggaggccca

SEQ ID NO: 2414851 - RNA, 19 nt, Homo sapiens
  misc_RNA (1)...(19): siRNA sense strand
aauuuaagcuagaaaggca

SEQ ID NO: 2414852 - RNA, 19 nt, Homo sapiens
  misc_RNA (1)...(19): siRNA sense strand
ggaugauagcauuggcuca

SEQ ID NO: 2414853 - RNA, 19 nt, Homo sapiens
  misc_RNA (1)...(19): siRNA sense strand
gauuucagacagaggucaa

SEQ ID NO: 2414854 - RNA, 19 nt, Homo sapiens
  misc_RNA (1)...(19): siRNA sense strand
cuuuaaacccagaucaaga

SEQ ID NO: 2414855 - RNA, 19 nt, Homo sapiens
  misc_RNA (1)...(19): siRNA sense strand
acacagaacgagaccaaaa

SEQ ID NO: 2414856 - RNA, 19 nt, Homo sapiens
  misc_RNA (1)...(19): siRNA sense strand
uugaaguggaugagggaaa

SEQ ID NO: 2414857 - RNA, 19 nt, Homo sapiens
  misc_RNA (1)...(19): siRNA sense strand
agcuaaagaaagugggaga

SEQ ID NO: 2414858 - RNA, 19 nt, Homo sapiens
  misc_RNA (1)...(19): siRNA sense strand
ccuacguggugucgggcua

SEQ ID NO: 2414859 - RNA, 19 nt, Homo sapiens
  misc_RNA (1)...(19): siRNA sense strand
guggaguacaagaagcuaa

SEQ ID NO: 2414860 - RNA, 19 nt, Homo sapiens
  misc_RNA (1)...(19): siRNA sense strand
gugacuacaagaaggauau

SEQ ID NO: 2414861 - RNA, 19 nt, Homo sapiens
  misc_RNA (1)...(19): siRNA sense strand
ggcccaaacccgagaucau

SEQ ID NO: 2414862 - RNA, 19 nt, Homo sapiens
  misc_RNA (1)...(19): siRNA sense strand
uggaguacaagaagcuaaa

SEQ ID NO: 2414863 - RNA, 19 nt, Homo sapiens
  misc_RNA (1)...(19): siRNA sense strand
augacggcguggagaggaa

SEQ ID NO: 2414864 - RNA, 19 nt, Homo sapiens
  misc_RNA (1)...(19): siRNA sense strand
ccaucaugcucaaguggau

SEQ ID NO: 2414865 - RNA, 19 nt, Homo sapiens
  misc_RNA (1)...(19): siRNA sense strand
ccagagaccuccuacgaca

SEQ ID NO: 2414866 - RNA, 19 nt, Homo sapiens
  misc_RNA (1)...(19): siRNA sense strand
gggagagcgaguucagcaa

SEQ ID NO: 2414867 - RNA, 19 nt, Homo sapiens
  misc_RNA (1)...(19): siRNA sense strand
aagcauaaccccaaggcua

SEQ ID NO: 2414868 - RNA, 19 nt, Homo sapiens
  misc_RNA (1)...(19): siRNA sense strand
agugacuacaagaaggaua

SEQ ID NO: 2414869 - RNA, 19 nt, Homo sapiens
  misc_RNA (1)...(19): siRNA sense strand
gcuuguaugaaguggagau

SEQ ID NO: 2414870 - RNA, 19 nt, Homo sapiens
  misc_RNA (1)...(19): siRNA sense strand
auacaacagaccuggguuu

SEQ ID NO: 2414871 - RNA, 19 nt, Homo sapiens
  misc_RNA (1)...(19): siRNA sense strand
aguacaagaagcuaaagaa

SEQ ID NO: 2414872 - RNA, 19 nt, Homo sapiens
  misc_RNA (1)...(19): siRNA sense strand
ccaagugaguggaggagac

SEQ ID NO: 2414873 - RNA, 19 nt, Homo sapiens
  misc_RNA (1)...(19): siRNA sense strand
gugaaacaccgcaagguca

SEQ ID NO: 2414874 - RNA, 19 nt, Homo sapiens
  misc_RNA (1)...(19): siRNA sense strand
gggccuggucuaagcaaaa

SEQ ID NO: 2414875 - RNA, 19 nt, Homo sapiens
  misc_RNA (1)...(19): siRNA sense strand
ccgagaucauggccagcaa

SEQ ID NO: 2414876 - RNA, 19 nt, Homo sapiens
  misc_RNA (1)...(19): siRNA sense strand
aggacgagggcauguacaa

SEQ ID NO: 2414877 - RNA, 19 nt, Homo sapiens
  misc_RNA (1)...(19): siRNA sense strand
acaagaaggauauggugga

SEQ ID NO: 2414878 - RNA, 19 nt, Homo sapiens
  misc_RNA (1)...(19): siRNA sense strand
gaguacaagaagcuaaaga

SEQ ID NO: 2414879 - RNA, 19 nt, Homo sapiens
  misc_RNA (1)...(19): siRNA sense strand
cuucagcagcagagugaca

SEQ ID NO: 2414880 - RNA, 19 nt, Homo sapiens
  misc_RNA (1)...(19): siRNA sense strand
gauugaaguggaugaggga

SEQ ID NO: 2414881 - RNA, 19 nt, Homo sapiens
  misc_RNA (1)...(19): siRNA sense strand
ggaaugaggccugagguca

SEQ ID NO: 2414882 - RNA, 19 nt, Homo sapiens
  misc_RNA (1)...(19): siRNA sense strand
ugaauggaaaggagcugaa

SEQ ID NO: 2414883 - RNA, 19 nt, Homo sapiens
  misc_RNA (1)...(19): siRNA sense strand
ccuacaacccagugaccca

SEQ ID NO: 2414884 - RNA, 19 nt, Homo sapiens
  misc_RNA (1)...(19): siRNA sense strand
cggaugaugcucugggugu

SEQ ID NO: 2414885 - RNA, 19 nt, Homo sapiens
  misc_RNA (1)...(19): siRNA sense strand
ucuacaauguccagguguu

SEQ ID NO: 2414886 - RNA, 19 nt, Homo sapiens
  misc_RNA (1)...(19): siRNA sense strand
ggaaaggagcugaauggcu

SEQ ID NO: 2414887 - RNA, 19 nt, Homo sapiens
  misc_RNA (1)...(19): siRNA sense strand
gggccagagugccaagcuu

SEQ ID NO: 2414888 - RNA, 19 nt, Homo sapiens
  misc_RNA (1)...(19): siRNA sense strand
agacagacucauaugaacu

SEQ ID NO: 2414889 - RNA, 19 nt, Homo sapiens
  misc_RNA (1)...(19): siRNA sense strand
uguacaucccagcaaguaa

SEQ ID NO: 2414890 - RNA, 19 nt, Homo sapiens
  misc_RNA (1)...(19): siRNA sense strand
cuacggacuuuguggcuga

SEQ ID NO: 2414891 - RNA, 19 nt, Homo sapiens
  misc_RNA (1)...(19): siRNA sense strand
agaugauucaguugaggaa

SEQ ID NO: 2414892 - RNA, 19 nt, Homo sapiens
  misc_RNA (1)...(19): siRNA sense strand
caggaaaugcacuggagga

SEQ ID NO: 2414893 - RNA, 19 nt, Homo sapiens
  misc_RNA (1)...(19): siRNA sense strand
gagcuggaccugagccuga

SEQ ID NO: 2414894 - RNA, 19 nt, Homo sapiens
  misc_RNA (1)...(19): siRNA sense strand
uugggauggaccugaauaa

SEQ ID NO: 2414895 - RNA, 19 nt, Homo sapiens
  misc_RNA (1)...(19): siRNA sense strand
aggaaaugcacuggaggau

SEQ ID NO: 2414896 - RNA, 19 nt, Homo sapiens
  misc_RNA (1)...(19): siRNA sense strand
cuacggacuuuguggcuga

SEQ ID NO: 2414897 - RNA, 19 nt, Homo sapiens
  misc_RNA (1)...(19): siRNA sense strand
agaugauucaguugaggaa

SEQ ID NO: 2414898 - RNA, 19 nt, Homo sapiens
  misc_RNA (1)...(19): siRNA sense strand
caggaaaugcacuggagga

SEQ ID NO: 2414899 - RNA, 19 nt, Homo sapiens
  misc_RNA (1)...(19): siRNA sense strand
gagcuggaccugagccuga

SEQ ID NO: 2414900 - RNA, 19 nt, Homo sapiens
  misc_RNA (1)...(19): siRNA sense strand
uugggauggaccugaauaa

SEQ ID NO: 2414901 - RNA, 19 nt, Homo sapiens
  misc_RNA (1)...(19): siRNA sense strand
aggaaaugcacuggaggau

SEQ ID NO: 2414902 - RNA, 19 nt, Homo sapiens
  misc_RNA (1)...(19): siRNA sense strand
acgcuggggucuagagaua

SEQ ID NO: 2414903 - RNA, 19 nt, Homo sapiens
  misc_RNA (1)...(19): siRNA sense strand
uggaaaaguacauggagua

SEQ ID NO: 2414904 - RNA, 19 nt, Homo sapiens
  misc_RNA (1)...(19): siRNA sense strand
ggaaaaucuacgagcaaga

SEQ ID NO: 2414905 - RNA, 19 nt, Homo sapiens
  misc_RNA (1)...(19): siRNA sense strand
gaaaagaccccauuggcua

SEQ ID NO: 2414906 - RNA, 19 nt, Homo sapiens
  misc_RNA (1)...(19): siRNA sense strand
caggaaaaucuacgagcaa

SEQ ID NO: 2414907 - RNA, 19 nt, Homo sapiens
  misc_RNA (1)...(19): siRNA sense strand
agguauugccucugcgaca

SEQ ID NO: 2414908 - RNA, 19 nt, Homo sapiens
  misc_RNA (1)...(19): siRNA sense strand
gagaagaacccgagcugcu

SEQ ID NO: 2414909 - RNA, 19 nt, Homo sapiens
  misc_RNA (1)...(19): siRNA sense strand
agcaagagggucuggaaaa

SEQ ID NO: 2414910 - RNA, 19 nt, Homo sapiens
  misc_RNA (1)...(19): siRNA sense strand
cgacaauguuugauggagc

SEQ ID NO: 2414911 - RNA, 19 nt, Homo sapiens
  misc_RNA (1)...(19): siRNA sense strand
acaagaagguauugccucu

SEQ ID NO: 2414912 - RNA, 19 nt, Homo sapiens
  misc_RNA (1)...(19): siRNA sense strand
cuacaguauaucaaugcua

SEQ ID NO: 2414913 - RNA, 19 nt, Homo sapiens
  misc_RNA (1)...(19): siRNA sense strand
cggcuuauaaacagcguca

SEQ ID NO: 2414914 - RNA, 19 nt, Homo sapiens
  misc_RNA (1)...(19): siRNA sense strand
ucuacgagcaagagggucu

SEQ ID NO: 2414915 - RNA, 19 nt, Homo sapiens
  misc_RNA (1)...(19): siRNA sense strand
gcgucaaucacuacggcuu

SEQ ID NO: 2414916 - RNA, 19 nt, Homo sapiens
  misc_RNA (1)...(19): siRNA sense strand
aggagaaggccaaggagau

SEQ ID NO: 2414917 - RNA, 19 nt, Homo sapiens
  misc_RNA (1)...(19): siRNA sense strand
cggagcaagcugugggaga

SEQ ID NO: 2414918 - RNA, 19 nt, Homo sapiens
  misc_RNA (1)...(19): siRNA sense strand
gaggagaaggccaaggaga

SEQ ID NO: 2414919 - RNA, 19 nt, Homo sapiens
  misc_RNA (1)...(19): siRNA sense strand
cggauagagaagagcgagu

SEQ ID NO: 2414920 - RNA, 19 nt, Homo sapiens
  misc_RNA (1)...(19): siRNA sense strand
acgagaugcgcgaggacau

SEQ ID NO: 2414921 - RNA, 19 nt, Homo sapiens
  misc_RNA (1)...(19): siRNA sense strand
cgaagauggcagagaugcu

SEQ ID NO: 2414922 - RNA, 19 nt, Homo sapiens
  misc_RNA (1)...(19): siRNA sense strand
gagcagaagccuccggaca

SEQ ID NO: 2414923 - RNA, 19 nt, Homo sapiens
  misc_RNA (1)...(19): siRNA sense strand
gguugauguuccagaccau

SEQ ID NO: 2414924 - RNA, 19 nt, Homo sapiens
  misc_RNA (1)...(19): siRNA sense strand
ugaucuugcuggugggacu

SEQ ID NO: 2414925 - RNA, 19 nt, Homo sapiens
  misc_RNA (1)...(19): siRNA sense strand
aagcagagacuccagggaa

SEQ ID NO: 2414926 - RNA, 19 nt, Homo sapiens
  misc_RNA (1)...(19): siRNA sense strand
agaucaugcugcuggucau

SEQ ID NO: 2414927 - RNA, 19 nt, Homo sapiens
  misc_RNA (1)...(19): siRNA sense strand
agacaggcugcgaguucua

SEQ ID NO: 2414928 - RNA, 19 nt, Homo sapiens
  misc_RNA (1)...(19): siRNA sense strand
ccaaguacaggguggccau

SEQ ID NO: 2414929 - RNA, 19 nt, Homo sapiens
  misc_RNA (1)...(19): siRNA sense strand
cagcggaacuccuggcuuu

SEQ ID NO: 2414930 - RNA, 19 nt, Homo sapiens
  misc_RNA (1)...(19): siRNA sense strand
ccaacaacauggccaagau

SEQ ID NO: 2414931 - RNA, 19 nt, Homo sapiens
  misc_RNA (1)...(19): siRNA sense strand
aggugaacaucgaccgcau

SEQ ID NO: 2414932 - RNA, 19 nt, Homo sapiens
  misc_RNA (1)...(19): siRNA sense strand
cggagaaaugagauacaaa

SEQ ID NO: 2414933 - RNA, 19 nt, Homo sapiens
  misc_RNA (1)...(19): siRNA sense strand
gaacagagcuaaaccgguu

SEQ ID NO: 2414934 - RNA, 19 nt, Homo sapiens
  misc_RNA (1)...(19): siRNA sense strand
acugaacacaggaggguaa

SEQ ID NO: 2414935 - RNA, 19 nt, Homo sapiens
  misc_RNA (1)...(19): siRNA sense strand
agagcaagaaagagccaaa

SEQ ID NO: 2414936 - RNA, 19 nt, Homo sapiens
  misc_RNA (1)...(19): siRNA sense strand
ccguggaagaccagagaga

SEQ ID NO: 2414937 - RNA, 19 nt, Homo sapiens
  misc_RNA (1)...(19): siRNA sense strand
aggcagaagaaaacagaaa

SEQ ID NO: 2414938 - RNA, 19 nt, Homo sapiens
  misc_RNA (1)...(19): siRNA sense strand
cucuaaaggcagaagaaaa

SEQ ID NO: 2414939 - RNA, 19 nt, Homo sapiens
  misc_RNA (1)...(19): siRNA sense strand
gcagaagaaaacagaaaau

SEQ ID NO: 2414940 - RNA, 19 nt, Homo sapiens
  misc_RNA (1)...(19): siRNA sense strand
agaugaaggaugaacaaca

SEQ ID NO: 2414941 - RNA, 19 nt, Homo sapiens
  misc_RNA (1)...(19): siRNA sense strand
gaaucaagaaggaagcuga

SEQ ID NO: 2414942 - RNA, 19 nt, Homo sapiens
  misc_RNA (1)...(19): siRNA sense strand
agaagcauuuagagagcau

SEQ ID NO: 2414943 - RNA, 19 nt, Homo sapiens
  misc_RNA (1)...(19): siRNA sense strand
cgagcaaucuggaggcugu

SEQ ID NO: 2414944 - RNA, 19 nt, Homo sapiens
  misc_RNA (1)...(19): siRNA sense strand
aaggcaauucagagagaga

SEQ ID NO: 2414945 - RNA, 19 nt, Homo sapiens
  misc_RNA (1)...(19): siRNA sense strand
agucagacagaaacaacaa

SEQ ID NO: 2414946 - RNA, 19 nt, Homo sapiens
  misc_RNA (1)...(19): siRNA sense strand
ggcuguuggaauaugaaua

SEQ ID NO: 2414947 - RNA, 19 nt, Homo sapiens
  misc_RNA (1)...(19): siRNA sense strand
agaaaaccuuagaagagaa

SEQ ID NO: 2414948 - RNA, 19 nt, Homo sapiens
  misc_RNA (1)...(19): siRNA sense strand
guaagaaucaagaaggaag

SEQ ID NO: 2414949 - RNA, 19 nt, Homo sapiens
  misc_RNA (1)...(19): siRNA sense strand
cugaagaagcugaacucca

SEQ ID NO: 2414950 - RNA, 19 nt, Homo sapiens
  misc_RNA (1)...(19): siRNA sense strand
caacaucaaaagagugaau

SEQ ID NO: 2414951 - RNA, 19 nt, Homo sapiens
  misc_RNA (1)...(19): siRNA sense strand
aaucaagaaggaagcugaa

SEQ ID NO: 2414952 - RNA, 19 nt, Homo sapiens
  misc_RNA (1)...(19): siRNA sense strand
agagugaauuacuggaacu

SEQ ID NO: 2414953 - RNA, 19 nt, Homo sapiens
  misc_RNA (1)...(19): siRNA sense strand
aaggagcagaacagagcua

SEQ ID NO: 2414954 - RNA, 19 nt, Homo sapiens
  misc_RNA (1)...(19): siRNA sense strand
auuuagagagcaucagcaa

SEQ ID NO: 2414955 - RNA, 19 nt, Homo sapiens
  misc_RNA (1)...(19): siRNA sense strand
ccaaaauccaccagacuga

SEQ ID NO: 2414956 - RNA, 19 nt, Homo sapiens
  misc_RNA (1)...(19): siRNA sense strand
aggagagagcggugaguga

SEQ ID NO: 2414957 - RNA, 19 nt, Homo sapiens
  misc_RNA (1)...(19): siRNA sense strand
gagagugggaugaccggaa

SEQ ID NO: 2414958 - RNA, 19 nt, Homo sapiens
  misc_RNA (1)...(19): siRNA sense strand
caccauaugaagaccgcaa

SEQ ID NO: 2414959 - RNA, 19 nt, Homo sapiens
  misc_RNA (1)...(19): siRNA sense strand
ccaucagccccgaggacua

SEQ ID NO: 2414960 - RNA, 19 nt, Homo sapiens
  misc_RNA (1)...(19): siRNA sense strand
gcuccuggugacugggauu

SEQ ID NO: 2414961 - RNA, 19 nt, Homo sapiens
  misc_RNA (1)...(19): siRNA sense strand
aaaccaaagccgucaucau

SEQ ID NO: 2414962 - RNA, 19 nt, Homo sapiens
  misc_RNA (1)...(19): siRNA sense strand
auggaaaagcugagggaaa

SEQ ID NO: 2414963 - RNA, 19 nt, Homo sapiens
  misc_RNA (1)...(19): siRNA sense strand
gcaugaaggaagagggucu

SEQ ID NO: 2414964 - RNA, 19 nt, Homo sapiens
  misc_RNA (1)...(19): siRNA sense strand
aggagcaggaggugaacaa

SEQ ID NO: 2414965 - RNA, 19 nt, Homo sapiens
  misc_RNA (1)...(19): siRNA sense strand
ccaacaagguggagacgcu

SEQ ID NO: 2414966 - RNA, 19 nt, Homo sapiens
  misc_RNA (1)...(19): siRNA sense strand
aggaggaggaggagcugaa

SEQ ID NO: 2414967 - RNA, 19 nt, Homo sapiens
  misc_RNA (1)...(19): siRNA sense strand
ugaaggaggaggaggagga

SEQ ID NO: 2414968 - RNA, 19 nt, Homo sapiens
  misc_RNA (1)...(19): siRNA sense strand
gggacgaguacuuggcuga

SEQ ID NO: 2414969 - RNA, 19 nt, Homo sapiens
  misc_RNA (1)...(19): siRNA sense strand
ucacugagcucgcuggaca

SEQ ID NO: 2414970 - RNA, 19 nt, Homo sapiens
  misc_RNA (1)...(19): siRNA sense strand
cgcugaaggaggaggagga

SEQ ID NO: 2414971 - RNA, 19 nt, Homo sapiens
  misc_RNA (1)...(19): siRNA sense strand
cuggcugagcugagggaga

SEQ ID NO: 2414972 - RNA, 19 nt, Homo sapiens
  misc_RNA (1)...(19): siRNA sense strand
ucaaggagcuggacccuga

SEQ ID NO: 2414973 - RNA, 19 nt, Homo sapiens
  misc_RNA (1)...(19): siRNA sense strand
gaggaggagcugaagagga

SEQ ID NO: 2414974 - RNA, 19 nt, Homo sapiens
  misc_RNA (1)...(19): siRNA sense strand
caaggaaaggacagagucu

SEQ ID NO: 2414975 - RNA, 19 nt, Homo sapiens
  misc_RNA (1)...(19): siRNA sense strand
ggaacacacucaagagcag

SEQ ID NO: 2414976 - RNA, 19 nt, Homo sapiens
  misc_RNA (1)...(19): siRNA sense strand
gggcaugaaggaagagggu

SEQ ID NO: 2414977 - RNA, 19 nt, Homo sapiens
  misc_RNA (1)...(19): siRNA sense strand
cggaagugcaguguggaaa

SEQ ID NO: 2414978 - RNA, 19 nt, Homo sapiens
  misc_RNA (1)...(19): siRNA sense strand
cgguccagguugaacaaga

SEQ ID NO: 2414979 - RNA, 19 nt, Homo sapiens
  misc_RNA (1)...(19): siRNA sense strand
acggaagugcaguguggaa

SEQ ID NO: 2414980 - RNA, 19 nt, Homo sapiens
  misc_RNA (1)...(19): siRNA sense strand
aguugaaggacgagacauu

SEQ ID NO: 2414981 - RNA, 19 nt, Homo sapiens
  misc_RNA (1)...(19): siRNA sense strand
agaaggacguggugggaag

SEQ ID NO: 2414982 - RNA, 19 nt, Homo sapiens
  misc_RNA (1)...(19): siRNA sense strand
agauaauggagacaucaaa

SEQ ID NO: 2414983 - RNA, 19 nt, Homo sapiens
  misc_RNA (1)...(19): siRNA sense strand
cguggugggaagagcaaga

SEQ ID NO: 2414984 - RNA, 19 nt, Homo sapiens
  misc_RNA (1)...(19): siRNA sense strand
uuuuaaaguugaaggacga

SEQ ID NO: 2414985 - RNA, 19 nt, Homo sapiens
  misc_RNA (1)...(19): siRNA sense strand
aagauaauggagacaucaa

SEQ ID NO: 2414986 - RNA, 19 nt, Homo sapiens
  misc_RNA (1)...(19): siRNA sense strand
cagaguaaucaaaguucau

SEQ ID NO: 2414987 - RNA, 19 nt, Homo sapiens
  misc_RNA (1)...(19): siRNA sense strand
ccaccagacuugugugcga

SEQ ID NO: 2414988 - RNA, 19 nt, Homo sapiens
  misc_RNA (1)...(19): siRNA sense strand
ucagcaaagaaguagcuaa

SEQ ID NO: 2414989 - RNA, 19 nt, Homo sapiens
  misc_RNA (1)...(19): siRNA sense strand
cuguuaacaaagauagaca

SEQ ID NO: 2414990 - RNA, 19 nt, Homo sapiens
  misc_RNA (1)...(19): siRNA sense strand
cugaagacgcuggagacaa

SEQ ID NO: 2414991 - RNA, 19 nt, Homo sapiens
  misc_RNA (1)...(19): siRNA sense strand
uggaaaugucaguggaggu

SEQ ID NO: 2414992 - RNA, 19 nt, Homo sapiens
  misc_RNA (1)...(19): siRNA sense strand
cucacuugucaaugaaaua

SEQ ID NO: 2414993 - RNA, 19 nt, Homo sapiens
  misc_RNA (1)...(19): siRNA sense strand
cugucaagucgguggcaga

SEQ ID NO: 2414994 - RNA, 19 nt, Homo sapiens
  misc_RNA (1)...(19): siRNA sense strand
ggccgagagccuugcguau

SEQ ID NO: 2414995 - RNA, 19 nt, Homo sapiens
  misc_RNA (1)...(19): siRNA sense strand
gcaugaucuucgagggcaa

SEQ ID NO: 2414996 - RNA, 19 nt, Homo sapiens
  misc_RNA (1)...(19): siRNA sense strand
uggagaacaaaguggguaa

SEQ ID NO: 2414997 - RNA, 19 nt, Homo sapiens
  misc_RNA (1)...(19): siRNA sense strand
caaaagaagagaagggaga

SEQ ID NO: 2414998 - RNA, 19 nt, Homo sapiens
  misc_RNA (1)...(19): siRNA sense strand
cgucaugaacuuugguaau

SEQ ID NO: 2414999 - RNA, 19 nt, Homo sapiens
  misc_RNA (1)...(19): siRNA sense strand
cagaagacucggaagguga

SEQ ID NO: 2415000 - RNA, 19 nt, Homo sapiens
  misc_RNA (1)...(19): siRNA sense strand
ggauuaugaaagugcagaa

SEQ ID NO: 2415001 - RNA, 19 nt, Homo sapiens
  misc_RNA (1)...(19): siRNA sense strand
gugacuggagagaggcaaa

SEQ ID NO: 2415002 - RNA, 19 nt, Homo sapiens
  misc_RNA (1)...(19): siRNA sense strand
cggaaggugaagaagguga

SEQ ID NO: 2415003 - RNA, 19 nt, Homo sapiens
  misc_RNA (1)...(19): siRNA sense strand
aagagaagggagaagaaaa

SEQ ID NO: 2415004 - RNA, 19 nt, Homo sapiens
  misc_RNA (1)...(19): siRNA sense strand
agucggagugugagaguga

SEQ ID NO: 2415005 - RNA, 19 nt, Homo sapiens
  misc_RNA (1)...(19): siRNA sense strand
aagaaaagccugacaccaa

SEQ ID NO: 2415006 - RNA, 19 nt, Homo sapiens
  misc_RNA (1)...(19): siRNA sense strand
ggauggaagaaaugggugu

SEQ ID NO: 2415007 - RNA, 19 nt, Homo sapiens
  misc_RNA (1)...(19): siRNA sense strand
gcgucaugaacuuugguaa

SEQ ID NO: 2415008 - RNA, 19 nt, Homo sapiens
  misc_RNA (1)...(19): siRNA sense strand
cugaggagucggaguguga

SEQ ID NO: 2415009 - RNA, 19 nt, Homo sapiens
  misc_RNA (1)...(19): siRNA sense strand
cgcaagacaccgaggacga

SEQ ID NO: 2415010 - RNA, 19 nt, Homo sapiens
  misc_RNA (1)...(19): siRNA sense strand
ucaguaucauggagggaca

SEQ ID NO: 2415011 - RNA, 19 nt, Homo sapiens
  misc_RNA (1)...(19): siRNA sense strand
ccgguggauucuaguacaa

SEQ ID NO: 2415012 - RNA, 19 nt, Homo sapiens
  misc_RNA (1)...(19): siRNA sense strand
gugaauacagugaagagga

SEQ ID NO: 2415013 - RNA, 19 nt, Homo sapiens
  misc_RNA (1)...(19): siRNA sense strand
cagcauacauaccucggaa

SEQ ID NO: 2415014 - RNA, 19 nt, Homo sapiens
  misc_RNA (1)...(19): siRNA sense strand
acaccgaggacgaggaauc

SEQ ID NO: 2415015 - RNA, 19 nt, Homo sapiens
  misc_RNA (1)...(19): siRNA sense strand
aguuuaaccggauggaaga

SEQ ID NO: 2415016 - RNA, 19 nt, Homo sapiens
  misc_RNA (1)...(19): siRNA sense strand
aauacagugaagaggaaaa

SEQ ID NO: 2415017 - RNA, 19 nt, Homo sapiens
  misc_RNA (1)...(19): siRNA sense strand
cagucaagcuugcagagga

SEQ ID NO: 2415018 - RNA, 19 nt, Homo sapiens
  misc_RNA (1)...(19): siRNA sense strand
aggugaagaaggugaauac

SEQ ID NO: 2415019 - RNA, 19 nt, Homo sapiens
  misc_RNA (1)...(19): siRNA sense strand
ccaaggggcgucagcgaaa

SEQ ID NO: 2415020 - RNA, 19 nt, Homo sapiens
  misc_RNA (1)...(19): siRNA sense strand
uggugagacuguuaagcau

SEQ ID NO: 2415021 - RNA, 19 nt, Homo sapiens
  misc_RNA (1)...(19): siRNA sense strand
gaauacagugaagaggaaa

SEQ ID NO: 2415022 - RNA, 19 nt, Homo sapiens
  misc_RNA (1)...(19): siRNA sense strand
cuguuaagcaugagauuag

SEQ ID NO: 2415023 - RNA, 19 nt, Homo sapiens
  misc_RNA (1)...(19): siRNA sense strand
agacucggaaggugaagaa

SEQ ID NO: 2415024 - RNA, 19 nt, Homo sapiens
  misc_RNA (1)...(19): siRNA sense strand
aaacucaggaggaggaagu

SEQ ID NO: 2415025 - RNA, 19 nt, Homo sapiens
  misc_RNA (1)...(19): siRNA sense strand
agcagcaggugcagccaaa

SEQ ID NO: 2415026 - RNA, 19 nt, Homo sapiens
  misc_RNA (1)...(19): siRNA sense strand
agucaaaugaagauggaaa

SEQ ID NO: 2415027 - RNA, 19 nt, Homo sapiens
  misc_RNA (1)...(19): siRNA sense strand
gcaaaggaugagaggagaa

SEQ ID NO: 2415028 - RNA, 19 nt, Homo sapiens
  misc_RNA (1)...(19): siRNA sense strand
ucaaaagauuggaaggaaa

SEQ ID NO: 2415029 - RNA, 19 nt, Homo sapiens
  misc_RNA (1)...(19): siRNA sense strand
cugcauuguugauggcaaa

SEQ ID NO: 2415030 - RNA, 19 nt, Homo sapiens
  misc_RNA (1)...(19): siRNA sense strand
ggauuuaaccucaagggaa

SEQ ID NO: 2415031 - RNA, 19 nt, Homo sapiens
  misc_RNA (1)...(19): siRNA sense strand
gggcaaaggaugagaggag

SEQ ID NO: 2415032 - RNA, 19 nt, Homo sapiens
  misc_RNA (1)...(19): siRNA sense strand
gagucgggaccgugagaua

SEQ ID NO: 2415033 - RNA, 19 nt, Homo sapiens
  misc_RNA (1)...(19): siRNA sense strand
cagaagaagcuugaggaaa

SEQ ID NO: 2415034 - RNA, 19 nt, Homo sapiens
  misc_RNA (1)...(19): siRNA sense strand
aagaauggaaucagagaau

SEQ ID NO: 2415035 - RNA, 19 nt, Homo sapiens
  misc_RNA (1)...(19): siRNA sense strand
caaaagauuggaaggaaaa

SEQ ID NO: 2415036 - RNA, 19 nt, Homo sapiens
  misc_RNA (1)...(19): siRNA sense strand
uggagaaauuaaagguaca

SEQ ID NO: 2415037 - RNA, 19 nt, Homo sapiens
  misc_RNA (1)...(19): siRNA sense strand
acuaaauaccagugaacuu

SEQ ID NO: 2415038 - RNA, 19 nt, Homo sapiens
  misc_RNA (1)...(19): siRNA sense strand
acaaauuaaccaaaggcua

SEQ ID NO: 2415039 - RNA, 19 nt, Homo sapiens
  misc_RNA (1)...(19): siRNA sense strand
cgggaaagucaaaugaaga

SEQ ID NO: 2415040 - RNA, 19 nt, Homo sapiens
  misc_RNA (1)...(19): siRNA sense strand
ggagaggaugaaauggaaa

SEQ ID NO: 2415041 - RNA, 19 nt, Homo sapiens
  misc_RNA (1)...(19): siRNA sense strand
uggaaauguaugaugacua

SEQ ID NO: 2415042 - RNA, 19 nt, Homo sapiens
  misc_RNA (1)...(19): siRNA sense strand
gggaaagucaaaugaagau

SEQ ID NO: 2415043 - RNA, 19 nt, Homo sapiens
  misc_RNA (1)...(19): siRNA sense strand
gagaggaugaaauggaaau

SEQ ID NO: 2415044 - RNA, 19 nt, Homo sapiens
  misc_RNA (1)...(19): siRNA sense strand
augaaaugaucaauggaga

SEQ ID NO: 2415045 - RNA, 19 nt, Homo sapiens
  misc_RNA (1)...(19): siRNA sense strand
agaaacaacggcagcaaau

SEQ ID NO: 2415046 - RNA, 19 nt, Homo sapiens
  misc_RNA (1)...(19): siRNA sense strand
acaugguguugacgggaaa

SEQ ID NO: 2415047 - RNA, 19 nt, Homo sapiens
  misc_RNA (1)...(19): siRNA sense strand
augcaaugacccaggauuu

SEQ ID NO: 2415048 - RNA, 19 nt, Homo sapiens
  misc_RNA (1)...(19): siRNA sense strand
acagaagaagcuugaggaa

SEQ ID NO: 2415049 - RNA, 19 nt, Homo sapiens
  misc_RNA (1)...(19): siRNA sense strand
ggaagaugcgagagcagau

SEQ ID NO: 2415050 - RNA, 19 nt, Homo sapiens
  misc_RNA (1)...(19): siRNA sense strand
auacaaaccccgaccgaaa

SEQ ID NO: 2415051 - RNA, 19 nt, Homo sapiens
  misc_RNA (1)...(19): siRNA sense strand
cuggaaaugaaaugaucaa

SEQ ID NO: 2415052 - RNA, 19 nt, Homo sapiens
  misc_RNA (1)...(19): siRNA sense strand
ccugagagccuggcagaaa

SEQ ID NO: 2415053 - RNA, 19 nt, Homo sapiens
  misc_RNA (1)...(19): siRNA sense strand
gccagaagaugcagaggga

SEQ ID NO: 2415054 - RNA, 19 nt, Homo sapiens
  misc_RNA (1)...(19): siRNA sense strand
gggaaaaggaagagggcag

SEQ ID NO: 2415055 - RNA, 19 nt, Homo sapiens
  misc_RNA (1)...(19): siRNA sense strand
ccucaagggaaaaggaaga

SEQ ID NO: 2415056 - RNA, 19 nt, Homo sapiens
  misc_RNA (1)...(19): siRNA sense strand
ccagugaacuucuuggaga

SEQ ID NO: 2415057 - RNA, 19 nt, Homo sapiens
  misc_RNA (1)...(19): siRNA sense strand
agauccagguucaggguca

SEQ ID NO: 2415058 - RNA, 19 nt, Homo sapiens
  misc_RNA (1)...(19): siRNA sense strand
agacuauagcagugaaaau

SEQ ID NO: 2415059 - RNA, 19 nt, Homo sapiens
  misc_RNA (1)...(19): siRNA sense strand
ggcuaaagggccuaaguga

SEQ ID NO: 2415060 - RNA, 19 nt, Homo sapiens
  misc_RNA (1)...(19): siRNA sense strand
ugaucaauggagaggauga

SEQ ID NO: 2415061 - RNA, 19 nt, Homo sapiens
  misc_RNA (1)...(19): siRNA sense strand
cauacaaaccaggugauaa

SEQ ID NO: 2415062 - RNA, 19 nt, Homo sapiens
  misc_RNA (1)...(19): siRNA sense strand
agacaggagaugaggcagu

SEQ ID NO: 2415063 - RNA, 19 nt, Homo sapiens
  misc_RNA (1)...(19): siRNA sense strand
ugucaguaccauucaacaa

SEQ ID NO: 2415064 - RNA, 19 nt, Homo sapiens
  misc_RNA (1)...(19): siRNA sense strand
aguuaaggaugaagcagca

SEQ ID NO: 2415065 - RNA, 19 nt, Homo sapiens
  misc_RNA (1)...(19): siRNA sense strand
ggagacaggagaugaggca

SEQ ID NO: 2415066 - RNA, 19 nt, Homo sapiens
  misc_RNA (1)...(19): siRNA sense strand
gucaaaugaagauggaaaa

SEQ ID NO: 2415067 - RNA, 19 nt, Homo sapiens
  misc_RNA (1)...(19): siRNA sense strand
acacacugaaacagaagaa

SEQ ID NO: 2415068 - RNA, 19 nt, Homo sapiens
  misc_RNA (1)...(19): siRNA sense strand
auacaaaccaggugauaac

SEQ ID NO: 2415069 - RNA, 19 nt, Homo sapiens
  misc_RNA (1)...(19): siRNA sense strand
gggagcaacagcagcaaca

SEQ ID NO: 2415070 - RNA, 19 nt, Homo sapiens
  misc_RNA (1)...(19): siRNA sense strand
gcauucaugguuugggcaa

SEQ ID NO: 2415071 - RNA, 19 nt, Homo sapiens
  misc_RNA (1)...(19): siRNA sense strand
aagaacgcgcuuugagaau

SEQ ID NO: 2415072 - RNA, 19 nt, Homo sapiens
  misc_RNA (1)...(19): siRNA sense strand
aguuaacgggaaagucaaa

SEQ ID NO: 2415073 - RNA, 19 nt, Homo sapiens
  misc_RNA (1)...(19): siRNA sense strand
aaugaucaauggagaggau

SEQ ID NO: 2415074 - RNA, 19 nt, Homo sapiens
  misc_RNA (1)...(19): siRNA sense strand
ccugcauuguugauggcaa

SEQ ID NO: 2415075 - RNA, 19 nt, Homo sapiens
  misc_RNA (1)...(19): siRNA sense strand
ggugcuaucacuauggcaa

SEQ ID NO: 2415076 - RNA, 19 nt, Homo sapiens
  misc_RNA (1)...(19): siRNA sense strand
cccuauauuccuuccgaaa

SEQ ID NO: 2415077 - RNA, 19 nt, Homo sapiens
  misc_RNA (1)...(19): siRNA sense strand
cggaagccuagcuggaaau

SEQ ID NO: 2415078 - RNA, 19 nt, Homo sapiens
  misc_RNA (1)...(19): siRNA sense strand
gaucaauggagaggaugaa

SEQ ID NO: 2415079 - RNA, 19 nt, Homo sapiens
  misc_RNA (1)...(19): siRNA sense strand
ucaauggagaggaugaaau

SEQ ID NO: 2415080 - RNA, 19 nt, Homo sapiens
  misc_RNA (1)...(19): siRNA sense strand
ccacacauuaagcgaccaa

SEQ ID NO: 2415081 - RNA, 19 nt, Homo sapiens
  misc_RNA (1)...(19): siRNA sense strand
guaugaugacuaugaagau

SEQ ID NO: 2415082 - RNA, 19 nt, Homo sapiens
  misc_RNA (1)...(19): siRNA sense strand
acaaacagauugagcagcu

SEQ ID NO: 2415083 - RNA, 19 nt, Homo sapiens
  misc_RNA (1)...(19): siRNA sense strand
cugcaggaaugaaaaggaa

SEQ ID NO: 2415084 - RNA, 19 nt, Homo sapiens
  misc_RNA (1)...(19): siRNA sense strand
agaaagaguuccagaggga

SEQ ID NO: 2415085 - RNA, 19 nt, Homo sapiens
  misc_RNA (1)...(19): siRNA sense strand
aggcugaaccugagggcaa

SEQ ID NO: 2415086 - RNA, 19 nt, Homo sapiens
  misc_RNA (1)...(19): siRNA sense strand
aggaggaggaggaggacaa

SEQ ID NO: 2415087 - RNA, 19 nt, Homo sapiens
  misc_RNA (1)...(19): siRNA sense strand
gaaacaaacgugaugccaa

SEQ ID NO: 2415088 - RNA, 19 nt, Homo sapiens
  misc_RNA (1)...(19): siRNA sense strand
agagggaggaagaggaaga

SEQ ID NO: 2415089 - RNA, 19 nt, Homo sapiens
  misc_RNA (1)...(19): siRNA sense strand
aggaagaggaagacaagau

SEQ ID NO: 2415090 - RNA, 19 nt, Homo sapiens
  misc_RNA (1)...(19): siRNA sense strand
aggagaaccugguggagca

SEQ ID NO: 2415091 - RNA, 19 nt, Homo sapiens
  misc_RNA (1)...(19): siRNA sense strand
aggaggacaaggaggaaga

SEQ ID NO: 2415092 - RNA, 19 nt, Homo sapiens
  misc_RNA (1)...(19): siRNA sense strand
gaacaaaugccucaagcca

SEQ ID NO: 2415093 - RNA, 19 nt, Homo sapiens
  misc_RNA (1)...(19): siRNA sense strand
ccuuugaggaggaggagga

SEQ ID NO: 2415094 - RNA, 19 nt, Homo sapiens
  misc_RNA (1)...(19): siRNA sense strand
ggaagaggcuccagcugca

SEQ ID NO: 2415095 - RNA, 19 nt, Homo sapiens
  misc_RNA (1)...(19): siRNA sense strand
ggacaaggaggaagaggcu

SEQ ID NO: 2415096 - RNA, 19 nt, Homo sapiens
  misc_RNA (1)...(19): siRNA sense strand
agguaaaguccuccugcaa

SEQ ID NO: 2415097 - RNA, 19 nt, Homo sapiens
  misc_RNA (1)...(19): siRNA sense strand
uguuggaagccaugaucaa

SEQ ID NO: 2415098 - RNA, 19 nt, Homo sapiens
  misc_RNA (1)...(19): siRNA sense strand
ccaugaucaagaagaaaga

SEQ ID NO: 2415099 - RNA, 19 nt, Homo sapiens
  misc_RNA (1)...(19): siRNA sense strand
gagaauaaccguuuggccu

SEQ ID NO: 2415100 - RNA, 19 nt, Homo sapiens
  misc_RNA (1)...(19): siRNA sense strand
acagcaggcagguggagaa

SEQ ID NO: 2415101 - RNA, 19 nt, Homo sapiens
  misc_RNA (1)...(19): siRNA sense strand
aguggagccuagaguggaa

SEQ ID NO: 2415102 - RNA, 19 nt, Homo sapiens
  misc_RNA (1)...(19): siRNA sense strand
uugaaguggcugagaagga

SEQ ID NO: 2415103 - RNA, 19 nt, Homo sapiens
  misc_RNA (1)...(19): siRNA sense strand
aggaggaggacaaggagga

SEQ ID NO: 2415104 - RNA, 19 nt, Homo sapiens
  misc_RNA (1)...(19): siRNA sense strand
aggaggacauccauggaga

SEQ ID NO: 2415105 - RNA, 19 nt, Homo sapiens
  misc_RNA (1)...(19): siRNA sense strand
gguucaagcucauccacga

SEQ ID NO: 2415106 - RNA, 19 nt, Homo sapiens
  misc_RNA (1)...(19): siRNA sense strand
acaagauguuggaagccau

SEQ ID NO: 2415107 - RNA, 19 nt, Homo sapiens
  misc_RNA (1)...(19): siRNA sense strand
aaacaaacgugaugccaag

SEQ ID NO: 2415108 - RNA, 19 nt, Homo sapiens
  misc_RNA (1)...(19): siRNA sense strand
agaauaaccguuuggccuu

SEQ ID NO: 2415109 - RNA, 19 nt, Homo sapiens
  misc_RNA (1)...(19): siRNA sense strand
agccuagaguggaacaaau

SEQ ID NO: 2415110 - RNA, 19 nt, Homo sapiens
  misc_RNA (1)...(19): siRNA sense strand
guugaaacugcuaggaaac

SEQ ID NO: 2415111 - RNA, 19 nt, Homo sapiens
  misc_RNA (1)...(19): siRNA sense strand
caguggaaccagaagaugu

SEQ ID NO: 2415112 - RNA, 19 nt, Homo sapiens
  misc_RNA (1)...(19): siRNA sense strand
aaccagaagauguggcuca

SEQ ID NO: 2415113 - RNA, 19 nt, Homo sapiens
  misc_RNA (1)...(19): siRNA sense strand
uugaggaggaggaggagga

SEQ ID NO: 2415114 - RNA, 19 nt, Homo sapiens
  misc_RNA (1)...(19): siRNA sense strand
ggcgagaguccgagcucau

SEQ ID NO: 2415115 - RNA, 19 nt, Homo sapiens
  misc_RNA (1)...(19): siRNA sense strand
gcaaagacccucaggccau

SEQ ID NO: 2415116 - RNA, 19 nt, Homo sapiens
  misc_RNA (1)...(19): siRNA sense strand
guacacagccucauggaga

SEQ ID NO: 2415117 - RNA, 19 nt, Homo sapiens
  misc_RNA (1)...(19): siRNA sense strand
agcuauucuuccagacaaa

SEQ ID NO: 2415118 - RNA, 19 nt, Homo sapiens
  misc_RNA (1)...(19): siRNA sense strand
cggaguucagugaggagaa

SEQ ID NO: 2415119 - RNA, 19 nt, Homo sapiens
  misc_RNA (1)...(19): siRNA sense strand
ugaccauccaguuggcaaa

SEQ ID NO: 2415120 - RNA, 19 nt, Homo sapiens
  misc_RNA (1)...(19): siRNA sense strand
cccgagaagccacgaggaa

SEQ ID NO: 2415121 - RNA, 19 nt, Homo sapiens
  misc_RNA (1)...(19): siRNA sense strand
aggacuggccaaagacaga

SEQ ID NO: 2415122 - RNA, 19 nt, Homo sapiens
  misc_RNA (1)...(19): siRNA sense strand
agguaaacauugacuucca

SEQ ID NO: 2415123 - RNA, 19 nt, Homo sapiens
  misc_RNA (1)...(19): siRNA sense strand
uugaccaagcccaaggaaa

SEQ ID NO: 2415124 - RNA, 19 nt, Homo sapiens
  misc_RNA (1)...(19): siRNA sense strand
gcacagaaauggaagcuca

SEQ ID NO: 2415125 - RNA, 19 nt, Homo sapiens
  misc_RNA (1)...(19): siRNA sense strand
ccacaagggaacaggguga

SEQ ID NO: 2415126 - RNA, 19 nt, Homo sapiens
  misc_RNA (1)...(19): siRNA sense strand
gauuuagauuucagggcaa

SEQ ID NO: 2415127 - RNA, 19 nt, Homo sapiens
  misc_RNA (1)...(19): siRNA sense strand
gugacaaccuaguggccaa

SEQ ID NO: 2415128 - RNA, 19 nt, Homo sapiens
  misc_RNA (1)...(19): siRNA sense strand
agaauaaggcagagcacau

SEQ ID NO: 2415129 - RNA, 19 nt, Homo sapiens
  misc_RNA (1)...(19): siRNA sense strand
gaaugaauuagaagaggaa

SEQ ID NO: 2415130 - RNA, 19 nt, Homo sapiens
  misc_RNA (1)...(19): siRNA sense strand
ugaaauagugagagcugaa

SEQ ID NO: 2415131 - RNA, 19 nt, Homo sapiens
  misc_RNA (1)...(19): siRNA sense strand
cagcaguaauacaaggcaa

SEQ ID NO: 2415132 - RNA, 19 nt, Homo sapiens
  misc_RNA (1)...(19): siRNA sense strand
ccucagugcaagaagcaua

SEQ ID NO: 2415133 - RNA, 19 nt, Homo sapiens
  misc_RNA (1)...(19): siRNA sense strand
ucgaagacguaauggccaa

SEQ ID NO: 2415134 - RNA, 19 nt, Homo sapiens
  misc_RNA (1)...(19): siRNA sense strand
ccaaacuggaagaggaaaa

SEQ ID NO: 2415135 - RNA, 19 nt, Homo sapiens
  misc_RNA (1)...(19): siRNA sense strand
ucaaagaggagauagacaa

SEQ ID NO: 2415136 - RNA, 19 nt, Homo sapiens
  misc_RNA (1)...(19): siRNA sense strand
agacaaaagaagcuggaaa

SEQ ID NO: 2415137 - RNA, 19 nt, Homo sapiens
  misc_RNA (1)...(19): siRNA sense strand
agauagacaagaugaggaa

SEQ ID NO: 2415138 - RNA, 19 nt, Homo sapiens
  misc_RNA (1)...(19): siRNA sense strand
cgaaugaauuagaagagga

SEQ ID NO: 2415139 - RNA, 19 nt, Homo sapiens
  misc_RNA (1)...(19): siRNA sense strand
gugcagaagcccaagucaa

SEQ ID NO: 2415140 - RNA, 19 nt, Homo sapiens
  misc_RNA (1)...(19): siRNA sense strand
ggccaaacuggaagaggaa

SEQ ID NO: 2415141 - RNA, 19 nt, Homo sapiens
  misc_RNA (1)...(19): siRNA sense strand
ggaaaaugauugagcaacu

SEQ ID NO: 2415142 - RNA, 19 nt, Homo sapiens
  misc_RNA (1)...(19): siRNA sense strand
ggauggaggagaagagagu

SEQ ID NO: 2415143 - RNA, 19 nt, Homo sapiens
  misc_RNA (1)...(19): siRNA sense strand
gagccagaaaggagagaca

SEQ ID NO: 2415144 - RNA, 19 nt, Homo sapiens
  misc_RNA (1)...(19): siRNA sense strand
gagcagagcuagaccagca

SEQ ID NO: 2415145 - RNA, 19 nt, Homo sapiens
  misc_RNA (1)...(19): siRNA sense strand
gggugaucaaugaggagaa

SEQ ID NO: 2415146 - RNA, 19 nt, Homo sapiens
  misc_RNA (1)...(19): siRNA sense strand
caagaagaaaggagagagu

SEQ ID NO: 2415147 - RNA, 19 nt, Homo sapiens
  misc_RNA (1)...(19): siRNA sense strand
guaacaagaagaaaggaga

SEQ ID NO: 2415148 - RNA, 19 nt, Homo sapiens
  misc_RNA (1)...(19): siRNA sense strand
gcaagcagcucucaggcaa

SEQ ID NO: 2415149 - RNA, 19 nt, Homo sapiens
  misc_RNA (1)...(19): siRNA sense strand
gaggaaaaugauugagcaa

SEQ ID NO: 2415150 - RNA, 19 nt, Homo sapiens
  misc_RNA (1)...(19): siRNA sense strand
ccaaacaacuagcucggaa

SEQ ID NO: 2415151 - RNA, 19 nt, Homo sapiens
  misc_RNA (1)...(19): siRNA sense strand
acgaguugacagaggaaau

SEQ ID NO: 2415152 - RNA, 19 nt, Homo sapiens
  misc_RNA (1)...(19): siRNA sense strand
ggucagugggucagagcuu

SEQ ID NO: 2415153 - RNA, 19 nt, Homo sapiens
  misc_RNA (1)...(19): siRNA sense strand
ccacggaagacaaaagaua

SEQ ID NO: 2415154 - RNA, 19 nt, Homo sapiens
  misc_RNA (1)...(19): siRNA sense strand
cgcucaaacaccaggcaua

SEQ ID NO: 2415155 - RNA, 19 nt, Homo sapiens
  misc_RNA (1)...(19): siRNA sense strand
cgugggacuuuaugaggaa

SEQ ID NO: 2415156 - RNA, 19 nt, Homo sapiens
  misc_RNA (1)...(19): siRNA sense strand
ggguguuucaagaguuaaa

SEQ ID NO: 2415157 - RNA, 19 nt, Homo sapiens
  misc_RNA (1)...(19): siRNA sense strand
cguaauggccaaacuggaa

SEQ ID NO: 2415158 - RNA, 19 nt, Homo sapiens
  misc_RNA (1)...(19): siRNA sense strand
gggcaaugcuaacgaccca

SEQ ID NO: 2415159 - RNA, 19 nt, Homo sapiens
  misc_RNA (1)...(19): siRNA sense strand
gcuaaugaguggugguccu

SEQ ID NO: 2415160 - RNA, 19 nt, Homo sapiens
  misc_RNA (1)...(19): siRNA sense strand
gcugagaaacgaagaagca

SEQ ID NO: 2415161 - RNA, 19 nt, Homo sapiens
  misc_RNA (1)...(19): siRNA sense strand
aggcauagcuccucagaac

SEQ ID NO: 2415162 - RNA, 19 nt, Homo sapiens
  misc_RNA (1)...(19): siRNA sense strand
acgaagaagcacagaaaug

SEQ ID NO: 2415163 - RNA, 19 nt, Homo sapiens
  misc_RNA (1)...(19): siRNA sense strand
gacuuuaugaggaagaaua

SEQ ID NO: 2415164 - RNA, 19 nt, Homo sapiens
  misc_RNA (1)...(19): siRNA sense strand
ggcaaauagaaaucaacaa

SEQ ID NO: 2415165 - RNA, 19 nt, Homo sapiens
  misc_RNA (1)...(19): siRNA sense strand
uggccaaacuggaagagga

SEQ ID NO: 2415166 - RNA, 19 nt, Homo sapiens
  misc_RNA (1)...(19): siRNA sense strand
auagacaagaugaggaaaa

SEQ ID NO: 2415167 - RNA, 19 nt, Homo sapiens
  misc_RNA (1)...(19): siRNA sense strand
aauaccagcucauggaaau

SEQ ID NO: 2415168 - RNA, 19 nt, Homo sapiens
  misc_RNA (1)...(19): siRNA sense strand
gagcaauaucauaauguca

SEQ ID NO: 2415169 - RNA, 19 nt, Homo sapiens
  misc_RNA (1)...(19): siRNA sense strand
acagugaaguggaugucua

SEQ ID NO: 2415170 - RNA, 19 nt, Homo sapiens
  misc_RNA (1)...(19): siRNA sense strand
ccagagagacuaugaagca

SEQ ID NO: 2415171 - RNA, 19 nt, Homo sapiens
  misc_RNA (1)...(19): siRNA sense strand
ggaagugacagcaaaccaa

SEQ ID NO: 2415172 - RNA, 19 nt, Homo sapiens
  misc_RNA (1)...(19): siRNA sense strand
acgaaggaaaguugugaau

SEQ ID NO: 2415173 - RNA, 19 nt, Homo sapiens
  misc_RNA (1)...(19): siRNA sense strand
caguaauacaaggcaaaua

SEQ ID NO: 2415174 - RNA, 19 nt, Homo sapiens
  misc_RNA (1)...(19): siRNA sense strand
gacaaaagaagcuggaaau

SEQ ID NO: 2415175 - RNA, 19 nt, Homo sapiens
  misc_RNA (1)...(19): siRNA sense strand
ccagacagaccuagugaca

SEQ ID NO: 2415176 - RNA, 19 nt, Homo sapiens
  misc_RNA (1)...(19): siRNA sense strand
ccauagaauaccagcucau

SEQ ID NO: 2415177 - RNA, 19 nt, Homo sapiens
  misc_RNA (1)...(19): siRNA sense strand
cagaguucaagaagcaaua

SEQ ID NO: 2415178 - RNA, 19 nt, Homo sapiens
  misc_RNA (1)...(19): siRNA sense strand
agcaguaauacaaggcaaa

SEQ ID NO: 2415179 - RNA, 19 nt, Homo sapiens
  misc_RNA (1)...(19): siRNA sense strand
ggaccaguuuaaagacuca

SEQ ID NO: 2415180 - RNA, 19 nt, Homo sapiens
  misc_RNA (1)...(19): siRNA sense strand
uuucaaaagcagugaguca

SEQ ID NO: 2415181 - RNA, 19 nt, Homo sapiens
  misc_RNA (1)...(19): siRNA sense strand
cuacauaguacaucagcuu

SEQ ID NO: 2415182 - RNA, 19 nt, Homo sapiens
  misc_RNA (1)...(19): siRNA sense strand
gacaaauggcugcaggauu

SEQ ID NO: 2415183 - RNA, 19 nt, Homo sapiens
  misc_RNA (1)...(19): siRNA sense strand
guucagaugacgaagcaga

SEQ ID NO: 2415184 - RNA, 19 nt, Homo sapiens
  misc_RNA (1)...(19): siRNA sense strand
ccagaagcucgaagacgua

SEQ ID NO: 2415185 - RNA, 19 nt, Homo sapiens
  misc_RNA (1)...(19): siRNA sense strand
gcacgaguugacagaggaa

SEQ ID NO: 2415186 - RNA, 19 nt, Homo sapiens
  misc_RNA (1)...(19): siRNA sense strand
gaauaccagcucauggaaa

SEQ ID NO: 2415187 - RNA, 19 nt, Homo sapiens
  misc_RNA (1)...(19): siRNA sense strand
cugaaugcagcaacaguaa

SEQ ID NO: 2415188 - RNA, 19 nt, Homo sapiens
  misc_RNA (1)...(19): siRNA sense strand
aggcaaagucauagaggag

SEQ ID NO: 2415189 - RNA, 19 nt, Homo sapiens
  misc_RNA (1)...(19): siRNA sense strand
augaauuagaagaggaacu

SEQ ID NO: 2415190 - RNA, 19 nt, Homo sapiens
  misc_RNA (1)...(19): siRNA sense strand
ccgagaacgaggaggagau

SEQ ID NO: 2415191 - RNA, 19 nt, Homo sapiens
  misc_RNA (1)...(19): siRNA sense strand
agaacgaggaggagaucau

SEQ ID NO: 2415192 - RNA, 19 nt, Homo sapiens
  misc_RNA (1)...(19): siRNA sense strand
aggaggagaucauccgcaa

SEQ ID NO: 2415193 - RNA, 19 nt, Homo sapiens
  misc_RNA (1)...(19): siRNA sense strand
ggacgacacuaaaggcacu

SEQ ID NO: 2415194 - RNA, 19 nt, Homo sapiens
  misc_RNA (1)...(19): siRNA sense strand
ccgacauggagguggagga

SEQ ID NO: 2415195 - RNA, 19 nt, Homo sapiens
  misc_RNA (1)...(19): siRNA sense strand
cagcgaagccuuuaccgua

SEQ ID NO: 2415196 - RNA, 19 nt, Homo sapiens
  misc_RNA (1)...(19): siRNA sense strand
agaccaagcucggggaaga

SEQ ID NO: 2415197 - RNA, 19 nt, Homo sapiens
  misc_RNA (1)...(19): siRNA sense strand
ccacaguccccgagaacga

SEQ ID NO: 2415198 - RNA, 19 nt, Homo sapiens
  misc_RNA (1)...(19): siRNA sense strand
ucugaauagccaagagaaa

SEQ ID NO: 2415199 - RNA, 19 nt, Homo sapiens
  misc_RNA (1)...(19): siRNA sense strand
ggucauagcuggugggagg

SEQ ID NO: 2415200 - RNA, 19 nt, Homo sapiens
  misc_RNA (1)...(19): siRNA sense strand
ggaaagcagccaauggaga

SEQ ID NO: 2415201 - RNA, 19 nt, Homo sapiens
  misc_RNA (1)...(19): siRNA sense strand
uagagaaaggaaaggaaaa

SEQ ID NO: 2415202 - RNA, 19 nt, Homo sapiens
  misc_RNA (1)...(19): siRNA sense strand
gggaagaaggccccagaaa

SEQ ID NO: 2415203 - RNA, 19 nt, Homo sapiens
  misc_RNA (1)...(19): siRNA sense strand
gggaggaaaagaaggaaga

SEQ ID NO: 2415204 - RNA, 19 nt, Homo sapiens
  misc_RNA (1)...(19): siRNA sense strand
agggaaacccagaaaacaa

SEQ ID NO: 2415205 - RNA, 19 nt, Homo sapiens
  misc_RNA (1)...(19): siRNA sense strand
uguagagaaaggaaaggaa

SEQ ID NO: 2415206 - RNA, 19 nt, Homo sapiens
  misc_RNA (1)...(19): siRNA sense strand
gccaagagaaagagguacu

SEQ ID NO: 2415207 - RNA, 19 nt, Homo sapiens
  misc_RNA (1)...(19): siRNA sense strand
caucaaggaauaugggugu

SEQ ID NO: 2415208 - RNA, 19 nt, Homo sapiens
  misc_RNA (1)...(19): siRNA sense strand
aaaagaaggaagagaggga

SEQ ID NO: 2415209 - RNA, 19 nt, Homo sapiens
  misc_RNA (1)...(19): siRNA sense strand
aggugcucaucaaggaaua

SEQ ID NO: 2415210 - RNA, 19 nt, Homo sapiens
  misc_RNA (1)...(19): siRNA sense strand
aguucuacuucgaucgcaa

SEQ ID NO: 2415211 - RNA, 19 nt, Homo sapiens
  misc_RNA (1)...(19): siRNA sense strand
guaccagagucucggggaa

SEQ ID NO: 2415212 - RNA, 19 nt, Homo sapiens
  misc_RNA (1)...(19): siRNA sense strand
acgaagaauuguggcccaa

SEQ ID NO: 2415213 - RNA, 19 nt, Homo sapiens
  misc_RNA (1)...(19): siRNA sense strand
gcuuggaaguggaagagcu

SEQ ID NO: 2415214 - RNA, 19 nt, Homo sapiens
  misc_RNA (1)...(19): siRNA sense strand
acagcuuggaaguggaaga

SEQ ID NO: 2415215 - RNA, 19 nt, Homo sapiens
  misc_RNA (1)...(19): siRNA sense strand
ggaaagaggaggcugggaa

SEQ ID NO: 2415216 - RNA, 19 nt, Homo sapiens
  misc_RNA (1)...(19): siRNA sense strand
uggaagagauccuggccaa

SEQ ID NO: 2415217 - RNA, 19 nt, Homo sapiens
  misc_RNA (1)...(19): siRNA sense strand
augaagagguaguggagga

SEQ ID NO: 2415218 - RNA, 19 nt, Homo sapiens
  misc_RNA (1)...(19): siRNA sense strand
gggaauuugggaagagaga

SEQ ID NO: 2415219 - RNA, 19 nt, Homo sapiens
  misc_RNA (1)...(19): siRNA sense strand
auguuaaugugaagagcaa

SEQ ID NO: 2415220 - RNA, 19 nt, Homo sapiens
  misc_RNA (1)...(19): siRNA sense strand
gugucuacucucagggaaa

SEQ ID NO: 2415221 - RNA, 19 nt, Homo sapiens
  misc_RNA (1)...(19): siRNA sense strand
agagaaauccucaggguca

SEQ ID NO: 2415222 - RNA, 19 nt, Homo sapiens
  misc_RNA (1)...(19): siRNA sense strand
aggaggaggccaaggguga

SEQ ID NO: 2415223 - RNA, 19 nt, Homo sapiens
  misc_RNA (1)...(19): siRNA sense strand
augcagaacuccaggacca

SEQ ID NO: 2415224 - RNA, 19 nt, Homo sapiens
  misc_RNA (1)...(19): siRNA sense strand
gagagcuggcugagagcaa

SEQ ID NO: 2415225 - RNA, 19 nt, Homo sapiens
  misc_RNA (1)...(19): siRNA sense strand
gaguucagaaagagggauu

SEQ ID NO: 2415226 - RNA, 19 nt, Homo sapiens
  misc_RNA (1)...(19): siRNA sense strand
cgggaagagcacagcaaga

SEQ ID NO: 2415227 - RNA, 19 nt, Homo sapiens
  misc_RNA (1)...(19): siRNA sense strand
gagagcaagucgagccaga

SEQ ID NO: 2415228 - RNA, 19 nt, Homo sapiens
  misc_RNA (1)...(19): siRNA sense strand
agcaacaggaugaggaauu

SEQ ID NO: 2415229 - RNA, 19 nt, Homo sapiens
  misc_RNA (1)...(19): siRNA sense strand
gggaguuucagaagagaga

SEQ ID NO: 2415230 - RNA, 19 nt, Homo sapiens
  misc_RNA (1)...(19): siRNA sense strand
ccgaggaagcccagcaaca

SEQ ID NO: 2415231 - RNA, 19 nt, Homo sapiens
  misc_RNA (1)...(19): siRNA sense strand
uggaauggagacaggagaa

SEQ ID NO: 2415232 - RNA, 19 nt, Homo sapiens
  misc_RNA (1)...(19): siRNA sense strand
aggaauucggaaagagaga

SEQ ID NO: 2415233 - RNA, 19 nt, Homo sapiens
  misc_RNA (1)...(19): siRNA sense strand
ggagagagggacuggacca

SEQ ID NO: 2415234 - RNA, 19 nt, Homo sapiens
  misc_RNA (1)...(19): siRNA sense strand
ugggaagagcgcuuggaua

SEQ ID NO: 2415235 - RNA, 19 nt, Homo sapiens
  misc_RNA (1)...(19): siRNA sense strand
cugcggagccacaggaaca

SEQ ID NO: 2415236 - RNA, 19 nt, Homo sapiens
  misc_RNA (1)...(19): siRNA sense strand
gcuccaagugggucaggaa

SEQ ID NO: 2415237 - RNA, 19 nt, Homo sapiens
  misc_RNA (1)...(19): siRNA sense strand
cugaagaagaagaaggucu

SEQ ID NO: 2415238 - RNA, 19 nt, Homo sapiens
  misc_RNA (1)...(19): siRNA sense strand
aggacugggaguucagaaa

SEQ ID NO: 2415239 - RNA, 19 nt, Homo sapiens
  misc_RNA (1)...(19): siRNA sense strand
ggacagaagcuuuggaacg

SEQ ID NO: 2415240 - RNA, 19 nt, Homo sapiens
  misc_RNA (1)...(19): siRNA sense strand
cagccaggccagagagagu

SEQ ID NO: 2415241 - RNA, 19 nt, Homo sapiens
  misc_RNA (1)...(19): siRNA sense strand
aggaacaggaguuugggaa

SEQ ID NO: 2415242 - RNA, 19 nt, Homo sapiens
  misc_RNA (1)...(19): siRNA sense strand
aggaccggguaguuggaaa

SEQ ID NO: 2415243 - RNA, 19 nt, Homo sapiens
  misc_RNA (1)...(19): siRNA sense strand
gcguggaguuggacaggca

SEQ ID NO: 2415244 - RNA, 19 nt, Homo sapiens
  misc_RNA (1)...(19): siRNA sense strand
aggaugaggaauuugagaa

SEQ ID NO: 2415245 - RNA, 19 nt, Homo sapiens
  misc_RNA (1)...(19): siRNA sense strand
aggcugggucggugaguuu

SEQ ID NO: 2415246 - RNA, 19 nt, Homo sapiens
  misc_RNA (1)...(19): siRNA sense strand
gaagggagcaccagggagu

SEQ ID NO: 2415247 - RNA, 19 nt, Homo sapiens
  misc_RNA (1)...(19): siRNA sense strand
ccggguaguuggaaagcca

SEQ ID NO: 2415248 - RNA, 19 nt, Homo sapiens
  misc_RNA (1)...(19): siRNA sense strand
gggacugggaauuugggaa

SEQ ID NO: 2415249 - RNA, 19 nt, Homo sapiens
  misc_RNA (1)...(19): siRNA sense strand
aggaauuugagaagaagau

SEQ ID NO: 2415250 - RNA, 19 nt, Homo sapiens
  misc_RNA (1)...(19): siRNA sense strand
ccagucaggaccaggagaa

SEQ ID NO: 2415251 - RNA, 19 nt, Homo sapiens
  misc_RNA (1)...(19): siRNA sense strand
aggaccaggaauucggaaa

SEQ ID NO: 2415252 - RNA, 19 nt, Homo sapiens
  misc_RNA (1)...(19): siRNA sense strand
cggccaggagagagaggau

SEQ ID NO: 2415253 - RNA, 19 nt, Homo sapiens
  misc_RNA (1)...(19): siRNA sense strand
cagaagacguggauggcac

SEQ ID NO: 2415254 - RNA, 19 nt, Homo sapiens
  misc_RNA (1)...(19): siRNA sense strand
gaguuugggaagagcgcuu

SEQ ID NO: 2415255 - RNA, 19 nt, Homo sapiens
  misc_RNA (1)...(19): siRNA sense strand
agugaguggugcuggcuuu

SEQ ID NO: 2415256 - RNA, 19 nt, Homo sapiens
  misc_RNA (1)...(19): siRNA sense strand
ccagcaacaggaugaggaa

SEQ ID NO: 2415257 - RNA, 19 nt, Homo sapiens
  misc_RNA (1)...(19): siRNA sense strand
cagcagacucggaugcaca

SEQ ID NO: 2415258 - RNA, 19 nt, Homo sapiens
  misc_RNA (1)...(19): siRNA sense strand
ggaugaggaauuugagaag

SEQ ID NO: 2415259 - RNA, 19 nt, Homo sapiens
  misc_RNA (1)...(19): siRNA sense strand
caucauuggcaacgacaga

SEQ ID NO: 2415260 - RNA, 19 nt, Homo sapiens
  misc_RNA (1)...(19): siRNA sense strand
uuuggaaaguggagggucu

SEQ ID NO: 2415261 - RNA, 19 nt, Homo sapiens
  misc_RNA (1)...(19): siRNA sense strand
gggagauggaggaggagcu

SEQ ID NO: 2415262 - RNA, 19 nt, Homo sapiens
  misc_RNA (1)...(19): siRNA sense strand
agcaggcagaggagagaua

SEQ ID NO: 2415263 - RNA, 19 nt, Homo sapiens
  misc_RNA (1)...(19): siRNA sense strand
cugaccggcuguuuggaaa

SEQ ID NO: 2415264 - RNA, 19 nt, Homo sapiens
  misc_RNA (1)...(19): siRNA sense strand
caguaaagucuccagcaga

SEQ ID NO: 2415265 - RNA, 19 nt, Homo sapiens
  misc_RNA (1)...(19): siRNA sense strand
cugaaacugaagaagaaga

SEQ ID NO: 2415266 - RNA, 19 nt, Homo sapiens
  misc_RNA (1)...(19): siRNA sense strand
gcagagugaauuugggauc

SEQ ID NO: 2415267 - RNA, 19 nt, Homo sapiens
  misc_RNA (1)...(19): siRNA sense strand
gaggaauuugagaagaaga

SEQ ID NO: 2415268 - RNA, 19 nt, Homo sapiens
  misc_RNA (1)...(19): siRNA sense strand
cagaagcuuuggaacgaga

SEQ ID NO: 2415269 - RNA, 19 nt, Homo sapiens
  misc_RNA (1)...(19): siRNA sense strand
ggauaagggacuacagcag

SEQ ID NO: 2415270 - RNA, 19 nt, Homo sapiens
  misc_RNA (1)...(19): siRNA sense strand
aagauggggagaugggaaa

SEQ ID NO: 2415271 - RNA, 19 nt, Homo sapiens
  misc_RNA (1)...(19): siRNA sense strand
gcaucggccaggaggagau

SEQ ID NO: 2415272 - RNA, 19 nt, Homo sapiens
  misc_RNA (1)...(19): siRNA sense strand
aggcagauguucaggacug

SEQ ID NO: 2415273 - RNA, 19 nt, Homo sapiens
  misc_RNA (1)...(19): siRNA sense strand
ggaacaggaguuugggaag

SEQ ID NO: 2415274 - RNA, 19 nt, Homo sapiens
  misc_RNA (1)...(19): siRNA sense strand
cgacagagugaguggugcu

SEQ ID NO: 2415275 - RNA, 19 nt, Homo sapiens
  misc_RNA (1)...(19): siRNA sense strand
cccagaauguggagcucuu

SEQ ID NO: 2415276 - RNA, 19 nt, Homo sapiens
  misc_RNA (1)...(19): siRNA sense strand
cagaaggaucgucgcccaa

SEQ ID NO: 2415277 - RNA, 19 nt, Homo sapiens
  misc_RNA (1)...(19): siRNA sense strand
aagaggaggcugggaaaga

SEQ ID NO: 2415278 - RNA, 19 nt, Homo sapiens
  misc_RNA (1)...(19): siRNA sense strand
ucagaagagagauguguca

SEQ ID NO: 2415279 - RNA, 19 nt, Homo sapiens
  misc_RNA (1)...(19): siRNA sense strand
gagggcaucaggagagaca

SEQ ID NO: 2415280 - RNA, 19 nt, Homo sapiens
  misc_RNA (1)...(19): siRNA sense strand
agacagaagacguggaugg

SEQ ID NO: 2415281 - RNA, 19 nt, Homo sapiens
  misc_RNA (1)...(19): siRNA sense strand
agaaagagguucagcgcuu

SEQ ID NO: 2415282 - RNA, 19 nt, Homo sapiens
  misc_RNA (1)...(19): siRNA sense strand
gguuacaggaagugcgaga

SEQ ID NO: 2415283 - RNA, 19 nt, Homo sapiens
  misc_RNA (1)...(19): siRNA sense strand
gggccuuggcacaggagaa

SEQ ID NO: 2415284 - RNA, 19 nt, Homo sapiens
  misc_RNA (1)...(19): siRNA sense strand
aggaagugcgagagagcau

SEQ ID NO: 2415285 - RNA, 19 nt, Homo sapiens
  misc_RNA (1)...(19): siRNA sense strand
aggaugagguggagcagga

SEQ ID NO: 2415286 - RNA, 19 nt, Homo sapiens
  misc_RNA (1)...(19): siRNA sense strand
ugucagagcacuugaggga

SEQ ID NO: 2415287 - RNA, 19 nt, Homo sapiens
  misc_RNA (1)...(19): siRNA sense strand
cagaaggcguggcuggcaa

SEQ ID NO: 2415288 - RNA, 19 nt, Homo sapiens
  misc_RNA (1)...(19): siRNA sense strand
gaacagagguuacaggaag

SEQ ID NO: 2415289 - RNA, 19 nt, Homo sapiens
  misc_RNA (1)...(19): siRNA sense strand
aggucauagaggagggaga

SEQ ID NO: 2415290 - RNA, 19 nt, Homo sapiens
  misc_RNA (1)...(19): siRNA sense strand
cggaucugcuggaggacau

SEQ ID NO: 2415291 - RNA, 19 nt, Homo sapiens
  misc_RNA (1)...(19): siRNA sense strand
cgggagagcucuuugagga

SEQ ID NO: 2415292 - RNA, 19 nt, Homo sapiens
  misc_RNA (1)...(19): siRNA sense strand
gagcaagaccugaagcugu

SEQ ID NO: 2415293 - RNA, 19 nt, Homo sapiens
  misc_RNA (1)...(19): siRNA sense strand
ccacagcauuccuggcaca

SEQ ID NO: 2415294 - RNA, 19 nt, Homo sapiens
  misc_RNA (1)...(19): siRNA sense strand
gcuuagauguggagcgcug

SEQ ID NO: 2415295 - RNA, 19 nt, Homo sapiens
  misc_RNA (1)...(19): siRNA sense strand
gcccauuccugaagaggga

SEQ ID NO: 2415296 - RNA, 19 nt, Homo sapiens
  misc_RNA (1)...(19): siRNA sense strand
agaacagagguuacaggaa

SEQ ID NO: 2415297 - RNA, 19 nt, Homo sapiens
  misc_RNA (1)...(19): siRNA sense strand
agguaagcugggagcaaga

SEQ ID NO: 2415298 - RNA, 19 nt, Homo sapiens
  misc_RNA (1)...(19): siRNA sense strand
ccucccugcugguggaaga

SEQ ID NO: 2415299 - RNA, 19 nt, Homo sapiens
  misc_RNA (1)...(19): siRNA sense strand
cuucagaccuggcagcaga

SEQ ID NO: 2415300 - RNA, 19 nt, Homo sapiens
  misc_RNA (1)...(19): siRNA sense strand
gcuaaaccgaagugaccau

SEQ ID NO: 2415301 - RNA, 19 nt, Homo sapiens
  misc_RNA (1)...(19): siRNA sense strand
ccgaagugaccaugggauc

SEQ ID NO: 2415302 - RNA, 19 nt, Homo sapiens
  misc_RNA (1)...(19): siRNA sense strand
cugcuuaacuugguggcua

SEQ ID NO: 2415303 - RNA, 19 nt, Homo sapiens
  misc_RNA (1)...(19): siRNA sense strand
acaucagauccuacagcaa

SEQ ID NO: 2415304 - RNA, 19 nt, Homo sapiens
  misc_RNA (1)...(19): siRNA sense strand
ggaagggaacagagaaccu

SEQ ID NO: 2415305 - RNA, 19 nt, Homo sapiens
  misc_RNA (1)...(19): siRNA sense strand
ccgcagaggucauccugga

SEQ ID NO: 2415306 - RNA, 19 nt, Homo sapiens
  misc_RNA (1)...(19): siRNA sense strand
gcuuucugacuuugaggaa

SEQ ID NO: 2415307 - RNA, 19 nt, Homo sapiens
  misc_RNA (1)...(19): siRNA sense strand
gcgagagcaacguggccaa

SEQ ID NO: 2415308 - RNA, 19 nt, Homo sapiens
  misc_RNA (1)...(19): siRNA sense strand
ucagagcaucggaggcaaa

SEQ ID NO: 2415309 - RNA, 19 nt, Homo sapiens
  misc_RNA (1)...(19): siRNA sense strand
ccaccaacgacaugaucau

SEQ ID NO: 2415310 - RNA, 19 nt, Homo sapiens
  misc_RNA (1)...(19): siRNA sense strand
caucggaggcaaagccaga

SEQ ID NO: 2415311 - RNA, 19 nt, Homo sapiens
  misc_RNA (1)...(19): siRNA sense strand
cccaaaauccugagcaaga

SEQ ID NO: 2415312 - RNA, 19 nt, Homo sapiens
  misc_RNA (1)...(19): siRNA sense strand
gggcaagauccaagccauc

SEQ ID NO: 2415313 - RNA, 19 nt, Homo sapiens
  misc_RNA (1)...(19): siRNA sense strand
uggucaagcccaaugccaa

SEQ ID NO: 2415314 - RNA, 19 nt, Homo sapiens
  misc_RNA (1)...(19): siRNA sense strand
caguggugguucugggcua

SEQ ID NO: 2415315 - RNA, 19 nt, Homo sapiens
  misc_RNA (1)...(19): siRNA sense strand
ucaacaaggcgguggccau

SEQ ID NO: 2415316 - RNA, 19 nt, Homo sapiens
  misc_RNA (1)...(19): siRNA sense strand
augagaaggucaaggaggu

SEQ ID NO: 2415317 - RNA, 19 nt, Homo sapiens
  misc_RNA (1)...(19): siRNA sense strand
agaccaugucccuggccaa

SEQ ID NO: 2415318 - RNA, 19 nt, Homo sapiens
  misc_RNA (1)...(19): siRNA sense strand
caaggaggucauugaggau

SEQ ID NO: 2415319 - RNA, 19 nt, Homo sapiens
  misc_RNA (1)...(19): siRNA sense strand
acagaaugaaauugaggaa

SEQ ID NO: 2415320 - RNA, 19 nt, Homo sapiens
  misc_RNA (1)...(19): siRNA sense strand
aauugaggaaggaggcaaa

SEQ ID NO: 2415321 - RNA, 19 nt, Homo sapiens
  misc_RNA (1)...(19): siRNA sense strand
ccaaaggagacucuggaga

SEQ ID NO: 2415322 - RNA, 19 nt, Homo sapiens
  misc_RNA (1)...(19): siRNA sense strand
cuaccaugcagcaguacaa

SEQ ID NO: 2415323 - RNA, 19 nt, Homo sapiens
  misc_RNA (1)...(19): siRNA sense strand
caccagaugaagagguuga

SEQ ID NO: 2415324 - RNA, 19 nt, Homo sapiens
  misc_RNA (1)...(19): siRNA sense strand
agaaugaaauugaggaagg

SEQ ID NO: 2415325 - RNA, 19 nt, Homo sapiens
  misc_RNA (1)...(19): siRNA sense strand
ucuucuugcucuugguaau

SEQ ID NO: 2415326 - RNA, 19 nt, Homo sapiens
  misc_RNA (1)...(19): siRNA sense strand
agaugaagagguugagaac

SEQ ID NO: 2415327 - RNA, 19 nt, Homo sapiens
  misc_RNA (1)...(19): siRNA sense strand
ugccagggaaagagggaca

SEQ ID NO: 2415328 - RNA, 19 nt, Homo sapiens
  misc_RNA (1)...(19): siRNA sense strand
cugggaggauucagggcuu

SEQ ID NO: 2415329 - RNA, 19 nt, Homo sapiens
  misc_RNA (1)...(19): siRNA sense strand
cacaaaaugccaaggauga

SEQ ID NO: 2415330 - RNA, 19 nt, Homo sapiens
  misc_RNA (1)...(19): siRNA sense strand
ucacaaaagucuugccacu

SEQ ID NO: 2415331 - RNA, 19 nt, Homo sapiens
  misc_RNA (1)...(19): siRNA sense strand
cacuguggugccagggaaa

SEQ ID NO: 2415332 - RNA, 19 nt, Homo sapiens
  misc_RNA (1)...(19): siRNA sense strand
gggagugauucgagugcaa

SEQ ID NO: 2415333 - RNA, 19 nt, Homo sapiens
  misc_RNA (1)...(19): siRNA sense strand
ccaaaugcugaguggguua

SEQ ID NO: 2415334 - RNA, 19 nt, Homo sapiens
  misc_RNA (1)...(19): siRNA sense strand
agggagaauuggaagaaga

SEQ ID NO: 2415335 - RNA, 19 nt, Homo sapiens
  misc_RNA (1)...(19): siRNA sense strand
uuguaaaccaagugaggaa

SEQ ID NO: 2415336 - RNA, 19 nt, Homo sapiens
  misc_RNA (1)...(19): siRNA sense strand
aagcaagauaagaguacaa

SEQ ID NO: 2415337 - RNA, 19 nt, Homo sapiens
  misc_RNA (1)...(19): siRNA sense strand
acuaaaagccagugaugua

SEQ ID NO: 2415338 - RNA, 19 nt, Homo sapiens
  misc_RNA (1)...(19): siRNA sense strand
ucccagaccuugaggaaaa

SEQ ID NO: 2415339 - RNA, 19 nt, Homo sapiens
  misc_RNA (1)...(19): siRNA sense strand
uagaacaagaucagaggaa

SEQ ID NO: 2415340 - RNA, 19 nt, Homo sapiens
  misc_RNA (1)...(19): siRNA sense strand
cagagagaaucaaaagaaa

SEQ ID NO: 2415341 - RNA, 19 nt, Homo sapiens
  misc_RNA (1)...(19): siRNA sense strand
caucuaaccuuguugguga

SEQ ID NO: 2415342 - RNA, 19 nt, Homo sapiens
  misc_RNA (1)...(19): siRNA sense strand
ucuaugauguauuggguau

SEQ ID NO: 2415343 - RNA, 19 nt, Homo sapiens
  misc_RNA (1)...(19): siRNA sense strand
cagugaacagcgagaauuu

SEQ ID NO: 2415344 - RNA, 19 nt, Homo sapiens
  misc_RNA (1)...(19): siRNA sense strand
ggaaagugucaaacagcau

SEQ ID NO: 2415345 - RNA, 19 nt, Homo sapiens
  misc_RNA (1)...(19): siRNA sense strand
agaaaauccagaagagcaa

SEQ ID NO: 2415346 - RNA, 19 nt, Homo sapiens
  misc_RNA (1)...(19): siRNA sense strand
aggaagagaugacgaggca

SEQ ID NO: 2415347 - RNA, 19 nt, Homo sapiens
  misc_RNA (1)...(19): siRNA sense strand
agauauggccaguacacua

SEQ ID NO: 2415348 - RNA, 19 nt, Homo sapiens
  misc_RNA (1)...(19): siRNA sense strand
uguaauggcagcugggaca

SEQ ID NO: 2415349 - RNA, 19 nt, Homo sapiens
  misc_RNA (1)...(19): siRNA sense strand
guuauaaagucaaagccau

SEQ ID NO: 2415350 - RNA, 19 nt, Homo sapiens
  misc_RNA (1)...(19): siRNA sense strand
ccaugaagaaauugcugaa

SEQ ID NO: 2415351 - RNA, 19 nt, Homo sapiens
  misc_RNA (1)...(19): siRNA sense strand
gcacucaaucagaaagaga

SEQ ID NO: 2415352 - RNA, 19 nt, Homo sapiens
  misc_RNA (1)...(19): siRNA sense strand
ccaagaagaucaagaggug

SEQ ID NO: 2415353 - RNA, 19 nt, Homo sapiens
  misc_RNA (1)...(19): siRNA sense strand
ucgcagucacuuagaacaa

SEQ ID NO: 2415354 - RNA, 19 nt, Homo sapiens
  misc_RNA (1)...(19): siRNA sense strand
cgaauugaagagagagguu

SEQ ID NO: 2415355 - RNA, 19 nt, Homo sapiens
  misc_RNA (1)...(19): siRNA sense strand
agaggaaaguaccaggaau

SEQ ID NO: 2415356 - RNA, 19 nt, Homo sapiens
  misc_RNA (1)...(19): siRNA sense strand
caaagagccugaugaggga

SEQ ID NO: 2415357 - RNA, 19 nt, Homo sapiens
  misc_RNA (1)...(19): siRNA sense strand
acaggaaagcauuguguuu

SEQ ID NO: 2415358 - RNA, 19 nt, Homo sapiens
  misc_RNA (1)...(19): siRNA sense strand
gguuauaaagucaaagcca

SEQ ID NO: 2415359 - RNA, 19 nt, Homo sapiens
  misc_RNA (1)...(19): siRNA sense strand
auaaaagagccaugaagaa

SEQ ID NO: 2415360 - RNA, 19 nt, Homo sapiens
  misc_RNA (1)...(19): siRNA sense strand
uggaggaaauauuggggaa

SEQ ID NO: 2415361 - RNA, 19 nt, Homo sapiens
  misc_RNA (1)...(19): siRNA sense strand
caucaaaguuauggagaag

SEQ ID NO: 2415362 - RNA, 19 nt, Homo sapiens
  misc_RNA (1)...(19): siRNA sense strand
ccagaagagcaaaggcgau

SEQ ID NO: 2415363 - RNA, 19 nt, Homo sapiens
  misc_RNA (1)...(19): siRNA sense strand
ccaaaagacaaaacgggua

SEQ ID NO: 2415364 - RNA, 19 nt, Homo sapiens
  misc_RNA (1)...(19): siRNA sense strand
gggaaagugucaaacagca

SEQ ID NO: 2415365 - RNA, 19 nt, Homo sapiens
  misc_RNA (1)...(19): siRNA sense strand
cggagagucugcuggagau

SEQ ID NO: 2415366 - RNA, 19 nt, Homo sapiens
  misc_RNA (1)...(19): siRNA sense strand
cgaucaauuucccaggauu

SEQ ID NO: 2415367 - RNA, 19 nt, Homo sapiens
  misc_RNA (1)...(19): siRNA sense strand
gaaaauggcuuaugaccga

SEQ ID NO: 2415368 - RNA, 19 nt, Homo sapiens
  misc_RNA (1)...(19): siRNA sense strand
uggaagaagaguggcuuaa

SEQ ID NO: 2415369 - RNA, 19 nt, Homo sapiens
  misc_RNA (1)...(19): siRNA sense strand
gcaagauaagaguacaaau

SEQ ID NO: 2415370 - RNA, 19 nt, Homo sapiens
  misc_RNA (1)...(19): siRNA sense strand
gagagaaucaaaagaaaca

SEQ ID NO: 2415371 - RNA, 19 nt, Homo sapiens
  misc_RNA (1)...(19): siRNA sense strand
caucaagaaaucuagugaa

SEQ ID NO: 2415372 - RNA, 19 nt, Homo sapiens
  misc_RNA (1)...(19): siRNA sense strand
ggaagcaaaacacggaaaa

SEQ ID NO: 2415373 - RNA, 19 nt, Homo sapiens
  misc_RNA (1)...(19): siRNA sense strand
ggaugaacuaucuauggaa

SEQ ID NO: 2415374 - RNA, 19 nt, Homo sapiens
  misc_RNA (1)...(19): siRNA sense strand
gggacuuuuaauugggaaa

SEQ ID NO: 2415375 - RNA, 19 nt, Homo sapiens
  misc_RNA (1)...(19): siRNA sense strand
gagaaaauccagaagagca

SEQ ID NO: 2415376 - RNA, 19 nt, Homo sapiens
  misc_RNA (1)...(19): siRNA sense strand
acaaauaccaaggaagaga

SEQ ID NO: 2415377 - RNA, 19 nt, Homo sapiens
  misc_RNA (1)...(19): siRNA sense strand
ccuuguuggugaagagaag

SEQ ID NO: 2415378 - RNA, 19 nt, Homo sapiens
  misc_RNA (1)...(19): siRNA sense strand
gaaaguaccaggaaugcga

SEQ ID NO: 2415379 - RNA, 19 nt, Homo sapiens
  misc_RNA (1)...(19): siRNA sense strand
uggacaauucccaaguuua

SEQ ID NO: 2415380 - RNA, 19 nt, Homo sapiens
  misc_RNA (1)...(19): siRNA sense strand
uuggaagaagaguggcuua

SEQ ID NO: 2415381 - RNA, 19 nt, Homo sapiens
  misc_RNA (1)...(19): siRNA sense strand
aagaggugguuguugucaa

SEQ ID NO: 2415382 - RNA, 19 nt, Homo sapiens
  misc_RNA (1)...(19): siRNA sense strand
aagaagaguggcuuaaaga

SEQ ID NO: 2415383 - RNA, 19 nt, Homo sapiens
  misc_RNA (1)...(19): siRNA sense strand
caggacaugaagaaaguuu

SEQ ID NO: 2415384 - RNA, 19 nt, Homo sapiens
  misc_RNA (1)...(19): siRNA sense strand
augaagaaaguuugccauu

SEQ ID NO: 2415385 - RNA, 19 nt, Homo sapiens
  misc_RNA (1)...(19): siRNA sense strand
caaccaagaagcagcaacu

SEQ ID NO: 2415386 - RNA, 19 nt, Homo sapiens
  misc_RNA (1)...(19): siRNA sense strand
gcgagaauuuguaauggca

SEQ ID NO: 2415387 - RNA, 19 nt, Homo sapiens
  misc_RNA (1)...(19): siRNA sense strand
cagaaggccucuuacggau

SEQ ID NO: 2415388 - RNA, 19 nt, Homo sapiens
  misc_RNA (1)...(19): siRNA sense strand
auguaaagaauguggcaaa

SEQ ID NO: 2415389 - RNA, 19 nt, Homo sapiens
  misc_RNA (1)...(19): siRNA sense strand
ccuuauucgacaugagaua

SEQ ID NO: 2415390 - RNA, 19 nt, Homo sapiens
  misc_RNA (1)...(19): siRNA sense strand
ccuacaaaugugaugaaua

SEQ ID NO: 2415391 - RNA, 19 nt, Homo sapiens
  misc_RNA (1)...(19): siRNA sense strand
auaugaagaauguggcaaa

SEQ ID NO: 2415392 - RNA, 19 nt, Homo sapiens
  misc_RNA (1)...(19): siRNA sense strand
augugauguuagagaacua

SEQ ID NO: 2415393 - RNA, 19 nt, Homo sapiens
  misc_RNA (1)...(19): siRNA sense strand
augugaagaauguggcaaa

SEQ ID NO: 2415394 - RNA, 19 nt, Homo sapiens
  misc_RNA (1)...(19): siRNA sense strand
augugaagaauguggcaaa

SEQ ID NO: 2415395 - RNA, 19 nt, Homo sapiens
  misc_RNA (1)...(19): siRNA sense strand
ccuguaauaugaagagaca

SEQ ID NO: 2415396 - RNA, 19 nt, Homo sapiens
  misc_RNA (1)...(19): siRNA sense strand
augugaagaguguggcaaa

SEQ ID NO: 2415397 - RNA, 19 nt, Homo sapiens
  misc_RNA (1)...(19): siRNA sense strand
augugaagaguguggcaaa

SEQ ID NO: 2415398 - RNA, 19 nt, Homo sapiens
  misc_RNA (1)...(19): siRNA sense strand
augugaagaguguggcaaa

SEQ ID NO: 2415399 - RNA, 19 nt, Homo sapiens
  misc_RNA (1)...(19): siRNA sense strand
augugaagaguguggcaaa

SEQ ID NO: 2415400 - RNA, 19 nt, Homo sapiens
  misc_RNA (1)...(19): siRNA sense strand
augugaagaguguggcaaa

SEQ ID NO: 2415401 - RNA, 19 nt, Homo sapiens
  misc_RNA (1)...(19): siRNA sense strand
acugaggagauaugauaaa

SEQ ID NO: 2415402 - RNA, 19 nt, Homo sapiens
  misc_RNA (1)...(19): siRNA sense strand
gggaugugacuguagaauu

SEQ ID NO: 2415403 - RNA, 19 nt, Homo sapiens
  misc_RNA (1)...(19): siRNA sense strand
ugauaacuacccagagcaa

SEQ ID NO: 2415404 - RNA, 19 nt, Homo sapiens
  misc_RNA (1)...(19): siRNA sense strand
guaauucauacuagagaga

SEQ ID NO: 2415405 - RNA, 19 nt, Homo sapiens
  misc_RNA (1)...(19): siRNA sense strand
cuucauaccuuauucgaca

SEQ ID NO: 2415406 - RNA, 19 nt, Homo sapiens
  misc_RNA (1)...(19): siRNA sense strand
ccuucucaacauaggauaa

SEQ ID NO: 2415407 - RNA, 19 nt, Homo sapiens
  misc_RNA (1)...(19): siRNA sense strand
gacaugagaugguagccaa

SEQ ID NO: 2415408 - RNA, 19 nt, Homo sapiens
  misc_RNA (1)...(19): siRNA sense strand
auaacuacccagagcaaaa

SEQ ID NO: 2415409 - RNA, 19 nt, Homo sapiens
  misc_RNA (1)...(19): siRNA sense strand
ggagagaaccccaacaaau

SEQ ID NO: 2415410 - RNA, 19 nt, Homo sapiens
  misc_RNA (1)...(19): siRNA sense strand
aagucauacugaggagaua

SEQ ID NO: 2415411 - RNA, 19 nt, Homo sapiens
  misc_RNA (1)...(19): siRNA sense strand
agaauucauacuagagaga

SEQ ID NO: 2415412 - RNA, 19 nt, Homo sapiens
  misc_RNA (1)...(19): siRNA sense strand
augugaagaguguggaaaa

SEQ ID NO: 2415413 - RNA, 19 nt, Homo sapiens
  misc_RNA (1)...(19): siRNA sense strand
agagagaaacccuacaaau

SEQ ID NO: 2415414 - RNA, 19 nt, Homo sapiens
  misc_RNA (1)...(19): siRNA sense strand
augugaagaguguggaaaa

SEQ ID NO: 2415415 - RNA, 19 nt, Homo sapiens
  misc_RNA (1)...(19): siRNA sense strand
guggaugaguguaaggugu

SEQ ID NO: 2415416 - RNA, 19 nt, Homo sapiens
  misc_RNA (1)...(19): siRNA sense strand
aauucaugcuggagagaac

SEQ ID NO: 2415417 - RNA, 19 nt, Homo sapiens
  misc_RNA (1)...(19): siRNA sense strand
ccaacaaauaugaagaaug

SEQ ID NO: 2415418 - RNA, 19 nt, Homo sapiens
  misc_RNA (1)...(19): siRNA sense strand
acaugagaugguagccaaa

SEQ ID NO: 2415419 - RNA, 19 nt, Homo sapiens
  misc_RNA (1)...(19): siRNA sense strand
ggauaauucauacuggaga

SEQ ID NO: 2415420 - RNA, 19 nt, Homo sapiens
  misc_RNA (1)...(19): siRNA sense strand
auuaagaaagggcuguaaa

SEQ ID NO: 2415421 - RNA, 19 nt, Homo sapiens
  misc_RNA (1)...(19): siRNA sense strand
aauucauacuagagagaag

SEQ ID NO: 2415422 - RNA, 19 nt, Homo sapiens
  misc_RNA (1)...(19): siRNA sense strand
auacuagagagaaggccua

SEQ ID NO: 2415423 - RNA, 19 nt, Homo sapiens
  misc_RNA (1)...(19): siRNA sense strand
agagagaaggccuacaaau

SEQ ID NO: 2415424 - RNA, 19 nt, Homo sapiens
  misc_RNA (1)...(19): siRNA sense strand
uguaauaugaagagacaug

SEQ ID NO: 2415425 - RNA, 19 nt, Homo sapiens
  misc_RNA (1)...(19): siRNA sense strand
aaccaaugucugauaacua

SEQ ID NO: 2415426 - RNA, 19 nt, Homo sapiens
  misc_RNA (1)...(19): siRNA sense strand
uuaccguacauaagagaau

SEQ ID NO: 2415427 - RNA, 19 nt, Homo sapiens
  misc_RNA (1)...(19): siRNA sense strand
gcuuguaaccauuccucaa

SEQ ID NO: 2415428 - RNA, 19 nt, Homo sapiens
  misc_RNA (1)...(19): siRNA sense strand
cuaaagagaaacccuacaa

SEQ ID NO: 2415429 - RNA, 19 nt, Homo sapiens
  misc_RNA (1)...(19): siRNA sense strand
augaaagaggacugaaauu

SEQ ID NO: 2415430 - RNA, 19 nt, Homo sapiens
  misc_RNA (1)...(19): siRNA sense strand
gcuugaaguuucugggaag

SEQ ID NO: 2415431 - RNA, 19 nt, Homo sapiens
  misc_RNA (1)...(19): siRNA sense strand
ccagaagauuauaggggau

SEQ ID NO: 2415432 - RNA, 19 nt, Homo sapiens
  misc_RNA (1)...(19): siRNA sense strand
gagccuugaaagaguguau

SEQ ID NO: 2415433 - RNA, 19 nt, Homo sapiens
  misc_RNA (1)...(19): siRNA sense strand
cgucucaugguguaagaaa

SEQ ID NO: 2415434 - RNA, 19 nt, Homo sapiens
  misc_RNA (1)...(19): siRNA sense strand
cagcaaaacuguugggcuc

SEQ ID NO: 2415435 - RNA, 19 nt, Homo sapiens
  misc_RNA (1)...(19): siRNA sense strand
cagagauauucgagaggcu

SEQ ID NO: 2415436 - RNA, 19 nt, Homo sapiens
  misc_RNA (1)...(19): siRNA sense strand
ccaucagagucgagguuuc

SEQ ID NO: 2415437 - RNA, 19 nt, Homo sapiens
  misc_RNA (1)...(19): siRNA sense strand
gaucacaccuucaggcacu

SEQ ID NO: 2415438 - RNA, 19 nt, Homo sapiens
  misc_RNA (1)...(19): siRNA sense strand
uugaaagaguguauagucu

SEQ ID NO: 2415439 - RNA, 19 nt, Homo sapiens
  misc_RNA (1)...(19): siRNA sense strand
agaaauaagugccugcagu

SEQ ID NO: 2415440 - RNA, 19 nt, Homo sapiens
  misc_RNA (1)...(19): siRNA sense strand
ggauuacuucagugaccaa

SEQ ID NO: 2415441 - RNA, 19 nt, Homo sapiens
  misc_RNA (1)...(19): siRNA sense strand
aaucuuggcucuuuggaga

SEQ ID NO: 2415442 - RNA, 19 nt, Homo sapiens
  misc_RNA (1)...(19): siRNA sense strand
gucucaugguguaagaaau

SEQ ID NO: 2415443 - RNA, 19 nt, Homo sapiens
  misc_RNA (1)...(19): siRNA sense strand
aggcgaagaaguuggcaaa

SEQ ID NO: 2415444 - RNA, 19 nt, Homo sapiens
  misc_RNA (1)...(19): siRNA sense strand
ucgcggaggaggagagcaa

SEQ ID NO: 2415445 - RNA, 19 nt, Homo sapiens
  misc_RNA (1)...(19): siRNA sense strand
cugcaaaggaggccaggaa

SEQ ID NO: 2415446 - RNA, 19 nt, Homo sapiens
  misc_RNA (1)...(19): siRNA sense strand
ugauuaaauacuugggaga

SEQ ID NO: 2415447 - RNA, 19 nt, Homo sapiens
  misc_RNA (1)...(19): siRNA sense strand
uggcaaagcagcaggagga

SEQ ID NO: 2415448 - RNA, 19 nt, Homo sapiens
  misc_RNA (1)...(19): siRNA sense strand
gguuugaacagcaggcgaa

SEQ ID NO: 2415449 - RNA, 19 nt, Homo sapiens
  misc_RNA (1)...(19): siRNA sense strand
cagaggaggaagaggcuga

SEQ ID NO: 2415450 - RNA, 19 nt, Homo sapiens
  misc_RNA (1)...(19): siRNA sense strand
ccgagacccgagugagaaa

SEQ ID NO: 2415451 - RNA, 19 nt, Homo sapiens
  misc_RNA (1)...(19): siRNA sense strand
auuaaauacuugggagaga

SEQ ID NO: 2415452 - RNA, 19 nt, Homo sapiens
  misc_RNA (1)...(19): siRNA sense strand
augaaaagaacuuggagaa

SEQ ID NO: 2415453 - RNA, 19 nt, Homo sapiens
  misc_RNA (1)...(19): siRNA sense strand
ggauggagacgauugggaa

SEQ ID NO: 2415454 - RNA, 19 nt, Homo sapiens
  misc_RNA (1)...(19): siRNA sense strand
gcguggacaguguggacaa

SEQ ID NO: 2415455 - RNA, 19 nt, Homo sapiens
  misc_RNA (1)...(19): siRNA sense strand
acagcgaggaggaggaaga

SEQ ID NO: 2415456 - RNA, 19 nt, Homo sapiens
  misc_RNA (1)...(19): siRNA sense strand
aagaggaccuggauggaga

SEQ ID NO: 2415457 - RNA, 19 nt, Homo sapiens
  misc_RNA (1)...(19): siRNA sense strand
cggaaaguggagaugauga

SEQ ID NO: 2415458 - RNA, 19 nt, Homo sapiens
  misc_RNA (1)...(19): siRNA sense strand
augaugaaaccauggaauu

SEQ ID NO: 2415459 - RNA, 19 nt, Homo sapiens
  misc_RNA (1)...(19): siRNA sense strand
gcgaggaggaggaagagga

SEQ ID NO: 2415460 - RNA, 19 nt, Homo sapiens
  misc_RNA (1)...(19): siRNA sense strand
ugaaaagaacuuggagaaa

SEQ ID NO: 2415461 - RNA, 19 nt, Homo sapiens
  misc_RNA (1)...(19): siRNA sense strand
agaauuggaaugugaggau

SEQ ID NO: 2415462 - RNA, 19 nt, Homo sapiens
  misc_RNA (1)...(19): siRNA sense strand
ugaugaagaauguggcuca

SEQ ID NO: 2415463 - RNA, 19 nt, Homo sapiens
  misc_RNA (1)...(19): siRNA sense strand
ggugcaacgagaaagggaa

SEQ ID NO: 2415464 - RNA, 19 nt, Homo sapiens
  misc_RNA (1)...(19): siRNA sense strand
caaagcagcaggaggagga

SEQ ID NO: 2415465 - RNA, 19 nt, Homo sapiens
  misc_RNA (1)...(19): siRNA sense strand
aggaagaggcugaggaagg

SEQ ID NO: 2415466 - RNA, 19 nt, Homo sapiens
  misc_RNA (1)...(19): siRNA sense strand
agaaaguugguguuggcaa

SEQ ID NO: 2415467 - RNA, 19 nt, Homo sapiens
  misc_RNA (1)...(19): siRNA sense strand
uggagaugaugaaugaaaa

SEQ ID NO: 2415468 - RNA, 19 nt, Homo sapiens
  misc_RNA (1)...(19): siRNA sense strand
gaaaguugguguuggcaag

SEQ ID NO: 2415469 - RNA, 19 nt, Homo sapiens
  misc_RNA (1)...(19): siRNA sense strand
ugucaagagcuguggcagu

SEQ ID NO: 2415470 - RNA, 19 nt, Homo sapiens
  misc_RNA (1)...(19): siRNA sense strand
uuucagauauuaagggacu

SEQ ID NO: 2415471 - RNA, 19 nt, Homo sapiens
  misc_RNA (1)...(19): siRNA sense strand
agauauuaagggacugauu

SEQ ID NO: 2415472 - RNA, 19 nt, Homo sapiens
  misc_RNA (1)...(19): siRNA sense strand
aggaugcagaggaggaaga

SEQ ID NO: 2415473 - RNA, 19 nt, Homo sapiens
  misc_RNA (1)...(19): siRNA sense strand
gggagagaaaguugguguu

SEQ ID NO: 2415474 - RNA, 19 nt, Homo sapiens
  misc_RNA (1)...(19): siRNA sense strand
cagaagcuguacaggcaca

SEQ ID NO: 2415475 - RNA, 19 nt, Homo sapiens
  misc_RNA (1)...(19): siRNA sense strand
caggcgaagaaguuggcaa

SEQ ID NO: 2415476 - RNA, 19 nt, Homo sapiens
  misc_RNA (1)...(19): siRNA sense strand
ggaaugaagaacaaugcca

SEQ ID NO: 2415477 - RNA, 19 nt, Homo sapiens
  misc_RNA (1)...(19): siRNA sense strand
uggacgaugugguggagca

SEQ ID NO: 2415478 - RNA, 19 nt, Homo sapiens
  misc_RNA (1)...(19): siRNA sense strand
gggauggacuggcagcaca

SEQ ID NO: 2415479 - RNA, 19 nt, Homo sapiens
  misc_RNA (1)...(19): siRNA sense strand
cuuucaacgccuacgagaa

SEQ ID NO: 2415480 - RNA, 19 nt, Homo sapiens
  misc_RNA (1)...(19): siRNA sense strand
acgaugugguggagcagga

SEQ ID NO: 2415481 - RNA, 19 nt, Homo sapiens
  misc_RNA (1)...(19): siRNA sense strand
ggcacauaugaaugacaaa

SEQ ID NO: 2415482 - RNA, 19 nt, Homo sapiens
  misc_RNA (1)...(19): siRNA sense strand
uggaauaugaugaugaaac

SEQ ID NO: 2415483 - RNA, 19 nt, Homo sapiens
  misc_RNA (1)...(19): siRNA sense strand
cugaagacaggaaugaaga

SEQ ID NO: 2415484 - RNA, 19 nt, Homo sapiens
  misc_RNA (1)...(19): siRNA sense strand
aggaggaggaagaggaccu

SEQ ID NO: 2415485 - RNA, 19 nt, Homo sapiens
  misc_RNA (1)...(19): siRNA sense strand
aagauuugcuuguggugca

SEQ ID NO: 2415486 - RNA, 19 nt, Homo sapiens
  misc_RNA (1)...(19): siRNA sense strand
gcaccaaccaggauggcua

SEQ ID NO: 2415487 - RNA, 19 nt, Homo sapiens
  misc_RNA (1)...(19): siRNA sense strand
gggaacugucagagaagau

SEQ ID NO: 2415488 - RNA, 19 nt, Homo sapiens
  misc_RNA (1)...(19): siRNA sense strand
ucaaggagcuggagcagga

SEQ ID NO: 2415489 - RNA, 19 nt, Homo sapiens
  misc_RNA (1)...(19): siRNA sense strand
aaaucaggcagguggaaaa

SEQ ID NO: 2415490 - RNA, 19 nt, Homo sapiens
  misc_RNA (1)...(19): siRNA sense strand
ggaugaagccucaagcgau

SEQ ID NO: 2415491 - RNA, 19 nt, Homo sapiens
  misc_RNA (1)...(19): siRNA sense strand
agcccaggguccagaggaa

SEQ ID NO: 2415492 - RNA, 19 nt, Homo sapiens
  misc_RNA (1)...(19): siRNA sense strand
ggauuucggaugaggagga

SEQ ID NO: 2415493 - RNA, 19 nt, Homo sapiens
  misc_RNA (1)...(19): siRNA sense strand
gaugaagccucaagcgaug

SEQ ID NO: 2415494 - RNA, 19 nt, Homo sapiens
  misc_RNA (1)...(19): siRNA sense strand
ugauagaaacauugaagcu

SEQ ID NO: 2415495 - RNA, 19 nt, Homo sapiens
  misc_RNA (1)...(19): siRNA sense strand
gcaccaugucggaggccaa

SEQ ID NO: 2415496 - RNA, 19 nt, Homo sapiens
  misc_RNA (1)...(19): siRNA sense strand
gcgaaugaaccgaggucga

SEQ ID NO: 2415497 - RNA, 19 nt, Homo sapiens
  misc_RNA (1)...(19): siRNA sense strand
gcaauguggucaugcggca

SEQ ID NO: 2415498 - RNA, 19 nt, Homo sapiens
  misc_RNA (1)...(19): siRNA sense strand
gccacguggaugaugaaua

SEQ ID NO: 2415499 - RNA, 19 nt, Homo sapiens
  misc_RNA (1)...(19): siRNA sense strand
gggucaucaccuucgcaaa

SEQ ID NO: 2415500 - RNA, 19 nt, Homo sapiens
  misc_RNA (1)...(19): siRNA sense strand
agacagaaggaaaugguga

SEQ ID NO: 2415501 - RNA, 19 nt, Homo sapiens
  misc_RNA (1)...(19): siRNA sense strand
cguggagacagaaggaaau

SEQ ID NO: 2415502 - RNA, 19 nt, Homo sapiens
  misc_RNA (1)...(19): siRNA sense strand
ugacuauggauuaaggaau

SEQ ID NO: 2415503 - RNA, 19 nt, Homo sapiens
  misc_RNA (1)...(19): siRNA sense strand
auguaaaugcccugacgaa

SEQ ID NO: 2415504 - RNA, 19 nt, Homo sapiens
  misc_RNA (1)...(19): siRNA sense strand
auaaagagguauuuggaag

SEQ ID NO: 2415505 - RNA, 19 nt, Homo sapiens
  misc_RNA (1)...(19): siRNA sense strand
cuaaccaaggagaaguaaa

SEQ ID NO: 2415506 - RNA, 19 nt, Homo sapiens
  misc_RNA (1)...(19): siRNA sense strand
agaaggaaauggugaggac

SEQ ID NO: 2415507 - RNA, 19 nt, Homo sapiens
  misc_RNA (1)...(19): siRNA sense strand
cuacaggacaacagugcau

SEQ ID NO: 2415508 - RNA, 19 nt, Homo sapiens
  misc_RNA (1)...(19): siRNA sense strand
uggauuaaggaaugacuau

SEQ ID NO: 2415509 - RNA, 19 nt, Homo sapiens
  misc_RNA (1)...(19): siRNA sense strand
ggauuuugcaugacaggaa

SEQ ID NO: 2415510 - RNA, 19 nt, Homo sapiens
  misc_RNA (1)...(19): siRNA sense strand
ucacaugaaucugggccaa

SEQ ID NO: 2415511 - RNA, 19 nt, Homo sapiens
  misc_RNA (1)...(19): siRNA sense strand
ggauguugggaaaagguua

SEQ ID NO: 2415512 - RNA, 19 nt, Homo sapiens
  misc_RNA (1)...(19): siRNA sense strand
cagcuacuggagauggaaa

SEQ ID NO: 2415513 - RNA, 19 nt, Homo sapiens
  misc_RNA (1)...(19): siRNA sense strand
guuagaugugacuggauuu

SEQ ID NO: 2415514 - RNA, 19 nt, Homo sapiens
  misc_RNA (1)...(19): siRNA sense strand
gugacuauggauuaaggaa

SEQ ID NO: 2415515 - RNA, 19 nt, Homo sapiens
  misc_RNA (1)...(19): siRNA sense strand
agaucaaggcucugaacaa

SEQ ID NO: 2415516 - RNA, 19 nt, Homo sapiens
  misc_RNA (1)...(19): siRNA sense strand
agguggaacugcaggccaa

SEQ ID NO: 2415517 - RNA, 19 nt, Homo sapiens
  misc_RNA (1)...(19): siRNA sense strand
agaucgagaacgugaagaa

SEQ ID NO: 2415518 - RNA, 19 nt, Homo sapiens
  misc_RNA (1)...(19): siRNA sense strand
agagguaugaggaggaaau

SEQ ID NO: 2415519 - RNA, 19 nt, Homo sapiens
  misc_RNA (1)...(19): siRNA sense strand
agaguaaggccgaggcuga

SEQ ID NO: 2415520 - RNA, 19 nt, Homo sapiens
  misc_RNA (1)...(19): siRNA sense strand
gcaagcuacuggagagcga

SEQ ID NO: 2415521 - RNA, 19 nt, Homo sapiens
  misc_RNA (1)...(19): siRNA sense strand
ugaacaacugcaagaacaa

SEQ ID NO: 2415522 - RNA, 19 nt, Homo sapiens
  misc_RNA (1)...(19): siRNA sense strand
agaacaaccuggagcccau

SEQ ID NO: 2415523 - RNA, 19 nt, Homo sapiens
  misc_RNA (1)...(19): siRNA sense strand
ccaauaagguggaacugca

SEQ ID NO: 2415524 - RNA, 19 nt, Homo sapiens
  misc_RNA (1)...(19): siRNA sense strand
acaaagacacccuagggaa

SEQ ID NO: 2415525 - RNA, 19 nt, Homo sapiens
  misc_RNA (1)...(19): siRNA sense strand
gugcaggaugucaggagaa

SEQ ID NO: 2415526 - RNA, 19 nt, Homo sapiens
  misc_RNA (1)...(19): siRNA sense strand
aggacuacaagaagaggua

SEQ ID NO: 2415527 - RNA, 19 nt, Homo sapiens
  misc_RNA (1)...(19): siRNA sense strand
agaagagguaugaggagga

SEQ ID NO: 2415528 - RNA, 19 nt, Homo sapiens
  misc_RNA (1)...(19): siRNA sense strand
gcgaguaccaggagcucau

SEQ ID NO: 2415529 - RNA, 19 nt, Homo sapiens
  misc_RNA (1)...(19): siRNA sense strand
ggaagcagcuggagacgcu

SEQ ID NO: 2415530 - RNA, 19 nt, Homo sapiens
  misc_RNA (1)...(19): siRNA sense strand
gcggacagcagcagagaac

SEQ ID NO: 2415531 - RNA, 19 nt, Homo sapiens
  misc_RNA (1)...(19): siRNA sense strand
accuagaccuggacagcau

SEQ ID NO: 2415532 - RNA, 19 nt, Homo sapiens
  misc_RNA (1)...(19): siRNA sense strand
ggaaugggcuccuggguga

SEQ ID NO: 2415533 - RNA, 19 nt, Homo sapiens
  misc_RNA (1)...(19): siRNA sense strand
agggguaucuagaggagaa

SEQ ID NO: 2415534 - RNA, 19 nt, Homo sapiens
  misc_RNA (1)...(19): siRNA sense strand
caucaaugggcucugggua

SEQ ID NO: 2415535 - RNA, 19 nt, Homo sapiens
  misc_RNA (1)...(19): siRNA sense strand
ucuccauguuccugccuaa

SEQ ID NO: 2415536 - RNA, 19 nt, Homo sapiens
  misc_RNA (1)...(19): siRNA sense strand
gagcaagaacgaaaggaga

SEQ ID NO: 2415537 - RNA, 19 nt, Homo sapiens
  misc_RNA (1)...(19): siRNA sense strand
agcaagaacgaaaggagaa

SEQ ID NO: 2415538 - RNA, 19 nt, Homo sapiens
  misc_RNA (1)...(19): siRNA sense strand
acggaagaaacgcgagcaa

SEQ ID NO: 2415539 - RNA, 19 nt, Homo sapiens
  misc_RNA (1)...(19): siRNA sense strand
aagaacgaaaggagaagaa

SEQ ID NO: 2415540 - RNA, 19 nt, Homo sapiens
  misc_RNA (1)...(19): siRNA sense strand
caaaggaagagcaacggaa

SEQ ID NO: 2415541 - RNA, 19 nt, Homo sapiens
  misc_RNA (1)...(19): siRNA sense strand
gaccaagacuccagccaga

SEQ ID NO: 2415542 - RNA, 19 nt, Homo sapiens
  misc_RNA (1)...(19): siRNA sense strand
aggaagagcaacggaagaa

SEQ ID NO: 2415543 - RNA, 19 nt, Homo sapiens
  misc_RNA (1)...(19): siRNA sense strand
agaagaaagcaaagguuuu

SEQ ID NO: 2415544 - RNA, 19 nt, Homo sapiens
  misc_RNA (1)...(19): siRNA sense strand
cacacaaaggaaagcuaaa

SEQ ID NO: 2415545 - RNA, 19 nt, Homo sapiens
  misc_RNA (1)...(19): siRNA sense strand
guguuugaucuuaaagcaa

SEQ ID NO: 2415546 - RNA, 19 nt, Homo sapiens
  misc_RNA (1)...(19): siRNA sense strand
gauaaugagcauaagcguu

SEQ ID NO: 2415547 - RNA, 19 nt, Homo sapiens
  misc_RNA (1)...(19): siRNA sense strand
acacacaaauuaaagacca

SEQ ID NO: 2415548 - RNA, 19 nt, Homo sapiens
  misc_RNA (1)...(19): siRNA sense strand
agacaaaggaagagcaacg

SEQ ID NO: 2415549 - RNA, 19 nt, Homo sapiens
  misc_RNA (1)...(19): siRNA sense strand
cacacaaauuaaagaccau

SEQ ID NO: 2415550 - RNA, 19 nt, Homo sapiens
  misc_RNA (1)...(19): siRNA sense strand
aaggaagagcaacggaaga

SEQ ID NO: 2415551 - RNA, 19 nt, Homo sapiens
  misc_RNA (1)...(19): siRNA sense strand
aggaagaagcugagagaca

SEQ ID NO: 2415552 - RNA, 19 nt, Homo sapiens
  misc_RNA (1)...(19): siRNA sense strand
gagcaagaacgaaaggaga

SEQ ID NO: 2415553 - RNA, 19 nt, Homo sapiens
  misc_RNA (1)...(19): siRNA sense strand
agcaagaacgaaaggagaa

SEQ ID NO: 2415554 - RNA, 19 nt, Homo sapiens
  misc_RNA (1)...(19): siRNA sense strand
acggaagaaacgcgagcaa

SEQ ID NO: 2415555 - RNA, 19 nt, Homo sapiens
  misc_RNA (1)...(19): siRNA sense strand
aagaacgaaaggagaagaa

SEQ ID NO: 2415556 - RNA, 19 nt, Homo sapiens
  misc_RNA (1)...(19): siRNA sense strand
caaaggaagagcaacggaa

SEQ ID NO: 2415557 - RNA, 19 nt, Homo sapiens
  misc_RNA (1)...(19): siRNA sense strand
gaccaagacuccagccaga

SEQ ID NO: 2415558 - RNA, 19 nt, Homo sapiens
  misc_RNA (1)...(19): siRNA sense strand
aggaagagcaacggaagaa

SEQ ID NO: 2415559 - RNA, 19 nt, Homo sapiens
  misc_RNA (1)...(19): siRNA sense strand
agaagaaagcaaagguuuu

SEQ ID NO: 2415560 - RNA, 19 nt, Homo sapiens
  misc_RNA (1)...(19): siRNA sense strand
cacacaaaggaaagcuaaa

SEQ ID NO: 2415561 - RNA, 19 nt, Homo sapiens
  misc_RNA (1)...(19): siRNA sense strand
guguuugaucuuaaagcaa

SEQ ID NO: 2415562 - RNA, 19 nt, Homo sapiens
  misc_RNA (1)...(19): siRNA sense strand
gauaaugagcauaagcguu

SEQ ID NO: 2415563 - RNA, 19 nt, Homo sapiens
  misc_RNA (1)...(19): siRNA sense strand
agccaggaucucagagcua

SEQ ID NO: 2415564 - RNA, 19 nt, Homo sapiens
  misc_RNA (1)...(19): siRNA sense strand
cuacauuaaacaugaggca

SEQ ID NO: 2415565 - RNA, 19 nt, Homo sapiens
  misc_RNA (1)...(19): siRNA sense strand
acacacaaauuaaagacca

SEQ ID NO: 2415566 - RNA, 19 nt, Homo sapiens
  misc_RNA (1)...(19): siRNA sense strand
agacaaaggaagagcaacg

SEQ ID NO: 2415567 - RNA, 19 nt, Homo sapiens
  misc_RNA (1)...(19): siRNA sense strand
caagaaaaggaaaugagaa

SEQ ID NO: 2415568 - RNA, 19 nt, Homo sapiens
  misc_RNA (1)...(19): siRNA sense strand
acauuaaacaugaggcaag

SEQ ID NO: 2415569 - RNA, 19 nt, Homo sapiens
  misc_RNA (1)...(19): siRNA sense strand
aaucaggaugaaagucaaa

SEQ ID NO: 2415570 - RNA, 19 nt, Homo sapiens
  misc_RNA (1)...(19): siRNA sense strand
cacacaaauuaaagaccau

SEQ ID NO: 2415571 - RNA, 19 nt, Homo sapiens
  misc_RNA (1)...(19): siRNA sense strand
aaggaagagcaacggaaga

SEQ ID NO: 2415572 - RNA, 19 nt, Homo sapiens
  misc_RNA (1)...(19): siRNA sense strand
ggaaaugagaaucaggaug

SEQ ID NO: 2415573 - RNA, 19 nt, Homo sapiens
  misc_RNA (1)...(19): siRNA sense strand
uugugaugagacugagaua

SEQ ID NO: 2415574 - RNA, 19 nt, Homo sapiens
  misc_RNA (1)...(19): siRNA sense strand
ccaugaaugaacugaagca

SEQ ID NO: 2415575 - RNA, 19 nt, Homo sapiens
  misc_RNA (1)...(19): siRNA sense strand
gcaaccaggaagaagcuga

SEQ ID NO: 2415576 - RNA, 19 nt, Homo sapiens
  misc_RNA (1)...(19): siRNA sense strand
augaaaagcaggaaagcca

SEQ ID NO: 2415577 - RNA, 19 nt, Homo sapiens
  misc_RNA (1)...(19): siRNA sense strand
agaacuuagccaagagucu

SEQ ID NO: 2415578 - RNA, 19 nt, Homo sapiens
  misc_RNA (1)...(19): siRNA sense strand
aggagaaguuuaagggcau

SEQ ID NO: 2415579 - RNA, 19 nt, Homo sapiens
  misc_RNA (1)...(19): siRNA sense strand
gugagaucuucaagggcaa

SEQ ID NO: 2415580 - RNA, 19 nt, Homo sapiens
  misc_RNA (1)...(19): siRNA sense strand
acauaaagcaaaagggaga

SEQ ID NO: 2415581 - RNA, 19 nt, Homo sapiens
  misc_RNA (1)...(19): siRNA sense strand
gaggagaaguuuaagggca

SEQ ID NO: 2415582 - RNA, 19 nt, Homo sapiens
  misc_RNA (1)...(19): siRNA sense strand
ccaucaacgacaagaguga

SEQ ID NO: 2415583 - RNA, 19 nt, Homo sapiens
  misc_RNA (1)...(19): siRNA sense strand
gugaucugguggaggagaa

SEQ ID NO: 2415584 - RNA, 19 nt, Homo sapiens
  misc_RNA (1)...(19): siRNA sense strand
aauacgaggcagagggcau

SEQ ID NO: 2415585 - RNA, 19 nt, Homo sapiens
  misc_RNA (1)...(19): siRNA sense strand
aggaugaaguggaggaccu

SEQ ID NO: 2415586 - RNA, 19 nt, Homo sapiens
  misc_RNA (1)...(19): siRNA sense strand
aggaggaauacgaggcaga

SEQ ID NO: 2415587 - RNA, 19 nt, Homo sapiens
  misc_RNA (1)...(19): siRNA sense strand
cugccaacgaggacagcaa

SEQ ID NO: 2415588 - RNA, 19 nt, Homo sapiens
  misc_RNA (1)...(19): siRNA sense strand
aagaacaugguguggaaau

SEQ ID NO: 2415589 - RNA, 19 nt, Homo sapiens
  misc_RNA (1)...(19): siRNA sense strand
gugcggacauaaagcaaaa

SEQ ID NO: 2415590 - RNA, 19 nt, Homo sapiens
  misc_RNA (1)...(19): siRNA sense strand
aucaauuacugcaacgaaa

SEQ ID NO: 2415591 - RNA, 19 nt, Homo sapiens
  misc_RNA (1)...(19): siRNA sense strand
cuggagaagcuggaggaua

SEQ ID NO: 2415592 - RNA, 19 nt, Homo sapiens
  misc_RNA (1)...(19): siRNA sense strand
ccaaagucaagcagaggau

SEQ ID NO: 2415593 - RNA, 19 nt, Homo sapiens
  misc_RNA (1)...(19): siRNA sense strand
ugguggaggagaaguuuaa

SEQ ID NO: 2415594 - RNA, 19 nt, Homo sapiens
  misc_RNA (1)...(19): siRNA sense strand
cagaaauuccuccggguga

SEQ ID NO: 2415595 - RNA, 19 nt, Homo sapiens
  misc_RNA (1)...(19): siRNA sense strand
ccaccgagaaccagcucaa

SEQ ID NO: 2415596 - RNA, 19 nt, Homo sapiens
  misc_RNA (1)...(19): siRNA sense strand
gugaagggccagugugcca

SEQ ID NO: 2415597 - RNA, 19 nt, Homo sapiens
  misc_RNA (1)...(19): siRNA sense strand
uucaagggcaagaaggaua

SEQ ID NO: 2415598 - RNA, 19 nt, Homo sapiens
  misc_RNA (1)...(19): siRNA sense strand
ugauugagacgcugaccaa

SEQ ID NO: 2415599 - RNA, 19 nt, Homo sapiens
  misc_RNA (1)...(19): siRNA sense strand
cgacaagagugacuggaag

SEQ ID NO: 2415600 - RNA, 19 nt, Homo sapiens
  misc_RNA (1)...(19): siRNA sense strand
gggaccaggcugugaugau

SEQ ID NO: 2415601 - RNA, 19 nt, Homo sapiens
  misc_RNA (1)...(19): siRNA sense strand
cuacaagccagaagaguac

SEQ ID NO: 2415602 - RNA, 19 nt, Homo sapiens
  misc_RNA (1)...(19): siRNA sense strand
acaggaagaucaucgccaa

SEQ ID NO: 2415603 - RNA, 19 nt, Homo sapiens
  misc_RNA (1)...(19): siRNA sense strand
ccgaggaugaaguggagga

SEQ ID NO: 2415604 - RNA, 19 nt, Homo sapiens
  misc_RNA (1)...(19): siRNA sense strand
uuaccuggcucgucgggaa

SEQ ID NO: 2415605 - RNA, 19 nt, Homo sapiens
  misc_RNA (1)...(19): siRNA sense strand
cagucgugguggcguggaa

SEQ ID NO: 2415606 - RNA, 19 nt, Homo sapiens
  misc_RNA (1)...(19): siRNA sense strand
gggaguugugcauaaagaa

SEQ ID NO: 2415607 - RNA, 19 nt, Homo sapiens
  misc_RNA (1)...(19): siRNA sense strand
ggacauaaagcaaaaggga

SEQ ID NO: 2415608 - RNA, 19 nt, Homo sapiens
  misc_RNA (1)...(19): siRNA sense strand
auguggugcugcagaguga

SEQ ID NO: 2415609 - RNA, 19 nt, Homo sapiens
  misc_RNA (1)...(19): siRNA sense strand
cugcaaagguacaagucac

SEQ ID NO: 2415610 - RNA, 19 nt, Homo sapiens
  misc_RNA (1)...(19): siRNA sense strand
gcauaaagaacauggugug

SEQ ID NO: 2415611 - RNA, 19 nt, Homo sapiens
  misc_RNA (1)...(19): siRNA sense strand
acgacaagagugacuggaa

SEQ ID NO: 2415612 - RNA, 19 nt, Homo sapiens
  misc_RNA (1)...(19): siRNA sense strand
ugcuggaggccuuuggaaa

SEQ ID NO: 2415613 - RNA, 19 nt, Homo sapiens
  misc_RNA (1)...(19): siRNA sense strand
gaagaguacaagaugggca

SEQ ID NO: 2415614 - RNA, 19 nt, Homo sapiens
  misc_RNA (1)...(19): siRNA sense strand
acgccaaccugaccggaau

SEQ ID NO: 2415615 - RNA, 19 nt, Homo sapiens
  misc_RNA (1)...(19): siRNA sense strand
ggcaaaacaaggaggaaaa

SEQ ID NO: 2415616 - RNA, 19 nt, Homo sapiens
  misc_RNA (1)...(19): siRNA sense strand
ccgacgaggaaguggaauu

SEQ ID NO: 2415617 - RNA, 19 nt, Homo sapiens
  misc_RNA (1)...(19): siRNA sense strand
cugugauauuuguggaaaa

SEQ ID NO: 2415618 - RNA, 19 nt, Homo sapiens
  misc_RNA (1)...(19): siRNA sense strand
ccgaggaagccaaggaguu

SEQ ID NO: 2415619 - RNA, 19 nt, Homo sapiens
  misc_RNA (1)...(19): siRNA sense strand
augcaaauuuauuggcuga

SEQ ID NO: 2415620 - RNA, 19 nt, Homo sapiens
  misc_RNA (1)...(19): siRNA sense strand
aguugaugauggagaagau

SEQ ID NO: 2415621 - RNA, 19 nt, Homo sapiens
  misc_RNA (1)...(19): siRNA sense strand
uggaauaagacauggaucu

SEQ ID NO: 2415622 - RNA, 19 nt, Homo sapiens
  misc_RNA (1)...(19): siRNA sense strand
gcuaucaacuucugcgaca

SEQ ID NO: 2415623 - RNA, 19 nt, Homo sapiens
  misc_RNA (1)...(19): siRNA sense strand
ccagggaauucaagagacu

SEQ ID NO: 2415624 - RNA, 19 nt, Homo sapiens
  misc_RNA (1)...(19): siRNA sense strand
aggaagaaccagauuuaga

SEQ ID NO: 2415625 - RNA, 19 nt, Homo sapiens
  misc_RNA (1)...(19): siRNA sense strand
ggaaaggaaccgucggacu

SEQ ID NO: 2415626 - RNA, 19 nt, Homo sapiens
  misc_RNA (1)...(19): siRNA sense strand
acagagaaagaaagguauu

SEQ ID NO: 2415627 - RNA, 19 nt, Homo sapiens
  misc_RNA (1)...(19): siRNA sense strand
ucgaagagaacauguaaaa

SEQ ID NO: 2415628 - RNA, 19 nt, Homo sapiens
  misc_RNA (1)...(19): siRNA sense strand
ggcaagaagguguagauca

SEQ ID NO: 2415629 - RNA, 19 nt, Homo sapiens
  misc_RNA (1)...(19): siRNA sense strand
uguucaaacuugccgaaau

SEQ ID NO: 2415630 - RNA, 19 nt, Homo sapiens
  misc_RNA (1)...(19): siRNA sense strand
gauaggaaugugaaugcaa

SEQ ID NO: 2415631 - RNA, 19 nt, Homo sapiens
  misc_RNA (1)...(19): siRNA sense strand
uagucaagauggaggugau

SEQ ID NO: 2415632 - RNA, 19 nt, Homo sapiens
  misc_RNA (1)...(19): siRNA sense strand
guguagacugugcagauaa

SEQ ID NO: 2415633 - RNA, 19 nt, Homo sapiens
  misc_RNA (1)...(19): siRNA sense strand
aggagaaugaaguaggaga

SEQ ID NO: 2415634 - RNA, 19 nt, Homo sapiens
  misc_RNA (1)...(19): siRNA sense strand
uaggagaagcugaugaaga

SEQ ID NO: 2415635 - RNA, 19 nt, Homo sapiens
  misc_RNA (1)...(19): siRNA sense strand
auggagaagaucagaauga

SEQ ID NO: 2415636 - RNA, 19 nt, Homo sapiens
  misc_RNA (1)...(19): siRNA sense strand
ggccagauggugauaggaa

SEQ ID NO: 2415637 - RNA, 19 nt, Homo sapiens
  misc_RNA (1)...(19): siRNA sense strand
gccagauggugauaggaau

SEQ ID NO: 2415638 - RNA, 19 nt, Homo sapiens
  misc_RNA (1)...(19): siRNA sense strand
gaaugaaguaggagaagcu

SEQ ID NO: 2415639 - RNA, 19 nt, Homo sapiens
  misc_RNA (1)...(19): siRNA sense strand
gacuuuaauaggaggccaa

SEQ ID NO: 2415640 - RNA, 19 nt, Homo sapiens
  misc_RNA (1)...(19): siRNA sense strand
aauucaagagacuggcaaa

SEQ ID NO: 2415641 - RNA, 19 nt, Homo sapiens
  misc_RNA (1)...(19): siRNA sense strand
acuguuuacucgaagagaa

SEQ ID NO: 2415642 - RNA, 19 nt, Homo sapiens
  misc_RNA (1)...(19): siRNA sense strand
ccacuuagauauugcugca

SEQ ID NO: 2415643 - RNA, 19 nt, Homo sapiens
  misc_RNA (1)...(19): siRNA sense strand
cugaaauggcugaaaauga

SEQ ID NO: 2415644 - RNA, 19 nt, Homo sapiens
  misc_RNA (1)...(19): siRNA sense strand
uggcaaaacaaggaggaaa

SEQ ID NO: 2415645 - RNA, 19 nt, Homo sapiens
  misc_RNA (1)...(19): siRNA sense strand
gcauugugguaagcggaaa

SEQ ID NO: 2415646 - RNA, 19 nt, Homo sapiens
  misc_RNA (1)...(19): siRNA sense strand
caucucuaaucaugaacaa

SEQ ID NO: 2415647 - RNA, 19 nt, Homo sapiens
  misc_RNA (1)...(19): siRNA sense strand
aguaggagaagcugaugaa

SEQ ID NO: 2415648 - RNA, 19 nt, Homo sapiens
  misc_RNA (1)...(19): siRNA sense strand
aaucugaaggucaaacaaa

SEQ ID NO: 2415649 - RNA, 19 nt, Homo sapiens
  misc_RNA (1)...(19): siRNA sense strand
cugggaaaauggugaauca

SEQ ID NO: 2415650 - RNA, 19 nt, Homo sapiens
  misc_RNA (1)...(19): siRNA sense strand
cugcgcuauuccaaggaua

SEQ ID NO: 2415651 - RNA, 19 nt, Homo sapiens
  misc_RNA (1)...(19): siRNA sense strand
agaaauaccaucagaggag

SEQ ID NO: 2415652 - RNA, 19 nt, Homo sapiens
  misc_RNA (1)...(19): siRNA sense strand
aggagaaguuuguaugucu

SEQ ID NO: 2415653 - RNA, 19 nt, Homo sapiens
  misc_RNA (1)...(19): siRNA sense strand
guaaugucgacgagggcca

SEQ ID NO: 2415654 - RNA, 19 nt, Homo sapiens
  misc_RNA (1)...(19): siRNA sense strand
agccaaauacagacgaaca

SEQ ID NO: 2415655 - RNA, 19 nt, Homo sapiens
  misc_RNA (1)...(19): siRNA sense strand
cauuaaaucagaagcucca

SEQ ID NO: 2415656 - RNA, 19 nt, Homo sapiens
  misc_RNA (1)...(19): siRNA sense strand
ugaaguaggagaagcugau

SEQ ID NO: 2415657 - RNA, 19 nt, Homo sapiens
  misc_RNA (1)...(19): siRNA sense strand
ccaaaagaccccugcagau

SEQ ID NO: 2415658 - RNA, 19 nt, Homo sapiens
  misc_RNA (1)...(19): siRNA sense strand
ccauugaaguuaugaccgu

SEQ ID NO: 2415659 - RNA, 19 nt, Homo sapiens
  misc_RNA (1)...(19): siRNA sense strand
aaguggaauuggagggccu

SEQ ID NO: 2415660 - RNA, 19 nt, Homo sapiens
  misc_RNA (1)...(19): siRNA sense strand
acaagaaaccugggaaaau

SEQ ID NO: 2415661 - RNA, 19 nt, Homo sapiens
  misc_RNA (1)...(19): siRNA sense strand
guagccaaauacagacgaa

SEQ ID NO: 2415662 - RNA, 19 nt, Homo sapiens
  misc_RNA (1)...(19): siRNA sense strand
ccauacuggaacagcgaua

SEQ ID NO: 2415663 - RNA, 19 nt, Homo sapiens
  misc_RNA (1)...(19): siRNA sense strand
gaccauaaccugagccaga

SEQ ID NO: 2415664 - RNA, 19 nt, Homo sapiens
  misc_RNA (1)...(19): siRNA sense strand
guggauuaccagaagacuu

SEQ ID NO: 2415665 - RNA, 19 nt, Homo sapiens
  misc_RNA (1)...(19): siRNA sense strand
ggggcaagaccaagaccaa

SEQ ID NO: 2415666 - RNA, 19 nt, Homo sapiens
  misc_RNA (1)...(19): siRNA sense strand
cugcucacugcguggauua

SEQ ID NO: 2415667 - RNA, 19 nt, Homo sapiens
  misc_RNA (1)...(19): siRNA sense strand
gagccaaacaugagagaca

SEQ ID NO: 2415668 - RNA, 19 nt, Homo sapiens
  misc_RNA (1)...(19): siRNA sense strand
agaaauaacaggagagauc

SEQ ID NO: 2415669 - RNA, 19 nt, Homo sapiens
  misc_RNA (1)...(19): siRNA sense strand
gagucgaauuauugagauu

SEQ ID NO: 2415670 - RNA, 19 nt, Homo sapiens
  misc_RNA (1)...(19): siRNA sense strand
uggaacaguaagagguaaa

SEQ ID NO: 2415671 - RNA, 19 nt, Homo sapiens
  misc_RNA (1)...(19): siRNA sense strand
ggacaaaagaagacaaaga

SEQ ID NO: 2415672 - RNA, 19 nt, Homo sapiens
  misc_RNA (1)...(19): siRNA sense strand
guucagagugguauggaaa

SEQ ID NO: 2415673 - RNA, 19 nt, Homo sapiens
  misc_RNA (1)...(19): siRNA sense strand
ccugaaagugaaacagaaa

SEQ ID NO: 2415674 - RNA, 19 nt, Homo sapiens
  misc_RNA (1)...(19): siRNA sense strand
gugaagaucaagaagacaa

SEQ ID NO: 2415675 - RNA, 19 nt, Homo sapiens
  misc_RNA (1)...(19): siRNA sense strand
gaaaagaggaagcgaagaa

SEQ ID NO: 2415676 - RNA, 19 nt, Homo sapiens
  misc_RNA (1)...(19): siRNA sense strand
gaguagaaucagauaucaa

SEQ ID NO: 2415677 - RNA, 19 nt, Homo sapiens
  misc_RNA (1)...(19): siRNA sense strand
acuugaauccgaugggaaa

SEQ ID NO: 2415678 - RNA, 19 nt, Homo sapiens
  misc_RNA (1)...(19): siRNA sense strand
cagcaggagccaaggaaaa

SEQ ID NO: 2415679 - RNA, 19 nt, Homo sapiens
  misc_RNA (1)...(19): siRNA sense strand
gcacagagauggaccacca

SEQ ID NO: 2415680 - RNA, 19 nt, Homo sapiens
  misc_RNA (1)...(19): siRNA sense strand
uguaagaaauauacggcau

SEQ ID NO: 2415681 - RNA, 19 nt, Homo sapiens
  misc_RNA (1)...(19): siRNA sense strand
aggaagagaaagaggagca

SEQ ID NO: 2415682 - RNA, 19 nt, Homo sapiens
  misc_RNA (1)...(19): siRNA sense strand
uauagagaauggagaucaa

SEQ ID NO: 2415683 - RNA, 19 nt, Homo sapiens
  misc_RNA (1)...(19): siRNA sense strand
caacagaagcugaucgcau

SEQ ID NO: 2415684 - RNA, 19 nt, Homo sapiens
  misc_RNA (1)...(19): siRNA sense strand
cgacaauauauaagggaac

SEQ ID NO: 2415685 - RNA, 19 nt, Homo sapiens
  misc_RNA (1)...(19): siRNA sense strand
ccaauugauaaaugggcaa

SEQ ID NO: 2415686 - RNA, 19 nt, Homo sapiens
  misc_RNA (1)...(19): siRNA sense strand
agucaauaggcgaagguuu

SEQ ID NO: 2415687 - RNA, 19 nt, Homo sapiens
  misc_RNA (1)...(19): siRNA sense strand
gaucaagaagacaaggaau

SEQ ID NO: 2415688 - RNA, 19 nt, Homo sapiens
  misc_RNA (1)...(19): siRNA sense strand
aguaagagguaaagcaaug

SEQ ID NO: 2415689 - RNA, 19 nt, Homo sapiens
  misc_RNA (1)...(19): siRNA sense strand
aauagaaauugcucgacaa

SEQ ID NO: 2415690 - RNA, 19 nt, Homo sapiens
  misc_RNA (1)...(19): siRNA sense strand
guuggaaguguguggacaa

SEQ ID NO: 2415691 - RNA, 19 nt, Homo sapiens
  misc_RNA (1)...(19): siRNA sense strand
acaagguauugauggauau

SEQ ID NO: 2415692 - RNA, 19 nt, Homo sapiens
  misc_RNA (1)...(19): siRNA sense strand
ccucaggagaacaaacuua

SEQ ID NO: 2415693 - RNA, 19 nt, Homo sapiens
  misc_RNA (1)...(19): siRNA sense strand
ucgacaauauauaagggaa

SEQ ID NO: 2415694 - RNA, 19 nt, Homo sapiens
  misc_RNA (1)...(19): siRNA sense strand
cugacaagguauugaugga

SEQ ID NO: 2415695 - RNA, 19 nt, Homo sapiens
  misc_RNA (1)...(19): siRNA sense strand
uagcagaggaacuggcauu

SEQ ID NO: 2415696 - RNA, 19 nt, Homo sapiens
  misc_RNA (1)...(19): siRNA sense strand
aagagaaagaggagcagau

SEQ ID NO: 2415697 - RNA, 19 nt, Homo sapiens
  misc_RNA (1)...(19): siRNA sense strand
ggaaaguagcagaaauaac

SEQ ID NO: 2415698 - RNA, 19 nt, Homo sapiens
  misc_RNA (1)...(19): siRNA sense strand
ugaugaugcucuucaguau

SEQ ID NO: 2415699 - RNA, 19 nt, Homo sapiens
  misc_RNA (1)...(19): siRNA sense strand
gcgaaagguacaaauuaau

SEQ ID NO: 2415700 - RNA, 19 nt, Homo sapiens
  misc_RNA (1)...(19): siRNA sense strand
ggguugaauccaucacuaa

SEQ ID NO: 2415701 - RNA, 19 nt, Homo sapiens
  misc_RNA (1)...(19): siRNA sense strand
uguacagccaucagaauua

SEQ ID NO: 2415702 - RNA, 19 nt, Homo sapiens
  misc_RNA (1)...(19): siRNA sense strand
aguagaaaugacagaugaa

SEQ ID NO: 2415703 - RNA, 19 nt, Homo sapiens
  misc_RNA (1)...(19): siRNA sense strand
caucagaauuaguuggaag

SEQ ID NO: 2415704 - RNA, 19 nt, Homo sapiens
  misc_RNA (1)...(19): siRNA sense strand
aaccaaaggcacugaugaa

SEQ ID NO: 2415705 - RNA, 19 nt, Homo sapiens
  misc_RNA (1)...(19): siRNA sense strand
guaagaaauauacggcauu

SEQ ID NO: 2415706 - RNA, 19 nt, Homo sapiens
  misc_RNA (1)...(19): siRNA sense strand
cagcuaaugauguagaaaa

SEQ ID NO: 2415707 - RNA, 19 nt, Homo sapiens
  misc_RNA (1)...(19): siRNA sense strand
ugaagcaguuagaagaaaa

SEQ ID NO: 2415708 - RNA, 19 nt, Homo sapiens
  misc_RNA (1)...(19): siRNA sense strand
cuuaauguucagaguggua

SEQ ID NO: 2415709 - RNA, 19 nt, Homo sapiens
  misc_RNA (1)...(19): siRNA sense strand
caaacaugagagacacaua

SEQ ID NO: 2415710 - RNA, 19 nt, Homo sapiens
  misc_RNA (1)...(19): siRNA sense strand
gagaaagaggagcagauga

SEQ ID NO: 2415711 - RNA, 19 nt, Homo sapiens
  misc_RNA (1)...(19): siRNA sense strand
gcacuuuauuugcagucaa

SEQ ID NO: 2415712 - RNA, 19 nt, Homo sapiens
  misc_RNA (1)...(19): siRNA sense strand
aagcaggaacuguuauuaa

SEQ ID NO: 2415713 - RNA, 19 nt, Homo sapiens
  misc_RNA (1)...(19): siRNA sense strand
cugaaaaugauucgacaua

SEQ ID NO: 2415714 - RNA, 19 nt, Homo sapiens
  misc_RNA (1)...(19): siRNA sense strand
gcagcaggagccaaggaaa

SEQ ID NO: 2415715 - RNA, 19 nt, Homo sapiens
  misc_RNA (1)...(19): siRNA sense strand
ccacgaagacgaccagaau

SEQ ID NO: 2415716 - RNA, 19 nt, Homo sapiens
  misc_RNA (1)...(19): siRNA sense strand
uuuuaaagcugguugggaa

SEQ ID NO: 2415717 - RNA, 19 nt, Homo sapiens
  misc_RNA (1)...(19): siRNA sense strand
gaaucguaugcucgagaua

SEQ ID NO: 2415718 - RNA, 19 nt, Homo sapiens
  misc_RNA (1)...(19): siRNA sense strand
aagagaacaugcagcccaa

SEQ ID NO: 2415719 - RNA, 19 nt, Homo sapiens
  misc_RNA (1)...(19): siRNA sense strand
uagcagaaauaacaggaga

SEQ ID NO: 2415720 - RNA, 19 nt, Homo sapiens
  misc_RNA (1)...(19): siRNA sense strand
gcuuaaugauuugcuguaa

SEQ ID NO: 2415721 - RNA, 19 nt, Homo sapiens
  misc_RNA (1)...(19): siRNA sense strand
augauaaagaugacaccaa

SEQ ID NO: 2415722 - RNA, 19 nt, Homo sapiens
  misc_RNA (1)...(19): siRNA sense strand
aagaugacaccaaugaaua

SEQ ID NO: 2415723 - RNA, 19 nt, Homo sapiens
  misc_RNA (1)...(19): siRNA sense strand
ccaagucagcugaagagaa

SEQ ID NO: 2415724 - RNA, 19 nt, Homo sapiens
  misc_RNA (1)...(19): siRNA sense strand
acaguaagagguaaagcaa

SEQ ID NO: 2415725 - RNA, 19 nt, Homo sapiens
  misc_RNA (1)...(19): siRNA sense strand
agaccacacauuugagcaa

SEQ ID NO: 2415726 - RNA, 19 nt, Homo sapiens
  misc_RNA (1)...(19): siRNA sense strand
cuacaaaagaggaggacua

SEQ ID NO: 2415727 - RNA, 19 nt, Homo sapiens
  misc_RNA (1)...(19): siRNA sense strand
cagagagggaagacaguuu

SEQ ID NO: 2415728 - RNA, 19 nt, Homo sapiens
  misc_RNA (1)...(19): siRNA sense strand
ccuauaaaauggaauggaa

SEQ ID NO: 2415729 - RNA, 19 nt, Homo sapiens
  misc_RNA (1)...(19): siRNA sense strand
ccauaauauccgagugauc

SEQ ID NO: 2415730 - RNA, 19 nt, Homo sapiens
  misc_RNA (1)...(19): siRNA sense strand
auuaauagguuccggacca

SEQ ID NO: 2415731 - RNA, 19 nt, Homo sapiens
  misc_RNA (1)...(19): siRNA sense strand
ugaugaaauucgagaacuc

SEQ ID NO: 2415732 - RNA, 19 nt, Homo sapiens
  misc_RNA (1)...(19): siRNA sense strand
acuucuuuguugugggaau

SEQ ID NO: 2415733 - RNA, 19 nt, Homo sapiens
  misc_RNA (1)...(19): siRNA sense strand
cgagaaagcauuaggaagg

SEQ ID NO: 2415734 - RNA, 19 nt, Homo sapiens
  misc_RNA (1)...(19): siRNA sense strand
caucauugccuauggagga

SEQ ID NO: 2415735 - RNA, 19 nt, Homo sapiens
  misc_RNA (1)...(19): siRNA sense strand
aauacgaagcuuccagaaa

SEQ ID NO: 2415736 - RNA, 19 nt, Homo sapiens
  misc_RNA (1)...(19): siRNA sense strand
gguagggacacuuuggaau

SEQ ID NO: 2415737 - RNA, 19 nt, Homo sapiens
  misc_RNA (1)...(19): siRNA sense strand
gcgagaaagcauuaggaag

SEQ ID NO: 2415738 - RNA, 19 nt, Homo sapiens
  misc_RNA (1)...(19): siRNA sense strand
cagaaauccuacacgacca

SEQ ID NO: 2415739 - RNA, 19 nt, Homo sapiens
  misc_RNA (1)...(19): siRNA sense strand
agagacaagccaaggagau

SEQ ID NO: 2415740 - RNA, 19 nt, Homo sapiens
  misc_RNA (1)...(19): siRNA sense strand
aauggaagaaugagguaga

SEQ ID NO: 2415741 - RNA, 19 nt, Homo sapiens
  misc_RNA (1)...(19): siRNA sense strand
ucuuauaaugguuggacuu

SEQ ID NO: 2415742 - RNA, 19 nt, Homo sapiens
  misc_RNA (1)...(19): siRNA sense strand
ccaucaaguacuucaugaa

SEQ ID NO: 2415743 - RNA, 19 nt, Homo sapiens
  misc_RNA (1)...(19): siRNA sense strand
acuucuacuaggugggauu

SEQ ID NO: 2415744 - RNA, 19 nt, Homo sapiens
  misc_RNA (1)...(19): siRNA sense strand
uggcaauagcagcgacuca

SEQ ID NO: 2415745 - RNA, 19 nt, Homo sapiens
  misc_RNA (1)...(19): siRNA sense strand
caauagugccugagagcug

SEQ ID NO: 2415746 - RNA, 19 nt, Homo sapiens
  misc_RNA (1)...(19): siRNA sense strand
ugugcaaugacuaugaaua

SEQ ID NO: 2415747 - RNA, 19 nt, Homo sapiens
  misc_RNA (1)...(19): siRNA sense strand
aaauggaauggaagaauga

SEQ ID NO: 2415748 - RNA, 19 nt, Homo sapiens
  misc_RNA (1)...(19): siRNA sense strand
ggaaccuggaagccggaaa

SEQ ID NO: 2415749 - RNA, 19 nt, Homo sapiens
  misc_RNA (1)...(19): siRNA sense strand
ucucaggcaucauggcaau

SEQ ID NO: 2415750 - RNA, 19 nt, Homo sapiens
  misc_RNA (1)...(19): siRNA sense strand
ccgacacaagugagagaca

SEQ ID NO: 2415751 - RNA, 19 nt, Homo sapiens
  misc_RNA (1)...(19): siRNA sense strand
aggaaggacagcagcuuga

SEQ ID NO: 2415752 - RNA, 19 nt, Homo sapiens
  misc_RNA (1)...(19): siRNA sense strand
acuucaaccucccgauauu

SEQ ID NO: 2415753 - RNA, 19 nt, Homo sapiens
  misc_RNA (1)...(19): siRNA sense strand
gaaagcauuaggaaggaca

SEQ ID NO: 2415754 - RNA, 19 nt, Homo sapiens
  misc_RNA (1)...(19): siRNA sense strand
cagcuugaaucgagaacac

SEQ ID NO: 2415755 - RNA, 19 nt, Homo sapiens
  misc_RNA (1)...(19): siRNA sense strand
ccagaaaagcuacaaaaga

SEQ ID NO: 2415756 - RNA, 19 nt, Homo sapiens
  misc_RNA (1)...(19): siRNA sense strand
gcaaucacugcuugugcaa

SEQ ID NO: 2415757 - RNA, 19 nt, Homo sapiens
  misc_RNA (1)...(19): siRNA sense strand
acaagcugucagugaagaa

SEQ ID NO: 2415758 - RNA, 19 nt, Homo sapiens
  misc_RNA (1)...(19): siRNA sense strand
gaagacuggaauugaagau

SEQ ID NO: 2415759 - RNA, 19 nt, Homo sapiens
  misc_RNA (1)...(19): siRNA sense strand
guugauucuggccgagaua

SEQ ID NO: 2415760 - RNA, 19 nt, Homo sapiens
  misc_RNA (1)...(19): siRNA sense strand
ucucuaagauuguggugca

SEQ ID NO: 2415761 - RNA, 19 nt, Homo sapiens
  misc_RNA (1)...(19): siRNA sense strand
ccaaaucuccaaagggaac

SEQ ID NO: 2415762 - RNA, 19 nt, Homo sapiens
  misc_RNA (1)...(19): siRNA sense strand
cggugauugcaaauaacua

SEQ ID NO: 2415763 - RNA, 19 nt, Homo sapiens
  misc_RNA (1)...(19): siRNA sense strand
uguuacuuuaggagagaaa

SEQ ID NO: 2415764 - RNA, 19 nt, Homo sapiens
  misc_RNA (1)...(19): siRNA sense strand
ccucaaaugaaucagguga

SEQ ID NO: 2415765 - RNA, 19 nt, Homo sapiens
  misc_RNA (1)...(19): siRNA sense strand
cagaaauauacuagagcac

SEQ ID NO: 2415766 - RNA, 19 nt, Homo sapiens
  misc_RNA (1)...(19): siRNA sense strand
cagcaaaguggaagaacac

SEQ ID NO: 2415767 - RNA, 19 nt, Homo sapiens
  misc_RNA (1)...(19): siRNA sense strand
ccagaaauauacuagagca

SEQ ID NO: 2415768 - RNA, 19 nt, Homo sapiens
  misc_RNA (1)...(19): siRNA sense strand
aaguggaagaacacagcaa

SEQ ID NO: 2415769 - RNA, 19 nt, Homo sapiens
  misc_RNA (1)...(19): siRNA sense strand
ccccaguaguaaagugaaa

SEQ ID NO: 2415770 - RNA, 19 nt, Homo sapiens
  misc_RNA (1)...(19): siRNA sense strand
caucaagagugcagccgua

SEQ ID NO: 2415771 - RNA, 19 nt, Homo sapiens
  misc_RNA (1)...(19): siRNA sense strand
ccaaaggugucaagagggu

SEQ ID NO: 2415772 - RNA, 19 nt, Homo sapiens
  misc_RNA (1)...(19): siRNA sense strand
ccuucuuccuggagagugu

SEQ ID NO: 2415773 - RNA, 19 nt, Homo sapiens
  misc_RNA (1)...(19): siRNA sense strand
uagcagagcgggagagggu

SEQ ID NO: 2415774 - RNA, 19 nt, Homo sapiens
  misc_RNA (1)...(19): siRNA sense strand
ucaugaaacacuugggcua

SEQ ID NO: 2415775 - RNA, 19 nt, Homo sapiens
  misc_RNA (1)...(19): siRNA sense strand
ggcaagaacgugagggcuu

SEQ ID NO: 2415776 - RNA, 19 nt, Homo sapiens
  misc_RNA (1)...(19): siRNA sense strand
ccuaugagcagcugggaca

SEQ ID NO: 2415777 - RNA, 19 nt, Homo sapiens
  misc_RNA (1)...(19): siRNA sense strand
cuucggaugcugugggcua

SEQ ID NO: 2415778 - RNA, 19 nt, Homo sapiens
  misc_RNA (1)...(19): siRNA sense strand
acugguucuugaagggaaa

SEQ ID NO: 2415779 - RNA, 19 nt, Homo sapiens
  misc_RNA (1)...(19): siRNA sense strand
gagugaagcucucguggga

SEQ ID NO: 2415780 - RNA, 19 nt, Homo sapiens
  misc_RNA (1)...(19): siRNA sense strand
cagcugggacagagggcau

SEQ ID NO: 2415781 - RNA, 19 nt, Homo sapiens
  misc_RNA (1)...(19): siRNA sense strand
gcuacaggcaagaacguga

SEQ ID NO: 2415782 - RNA, 19 nt, Homo sapiens
  misc_RNA (1)...(19): siRNA sense strand
gugaagcucucgugggacu

SEQ ID NO: 2415783 - RNA, 19 nt, Homo sapiens
  misc_RNA (1)...(19): siRNA sense strand
auguaugggcucacagcaa

SEQ ID NO: 2415784 - RNA, 19 nt, Homo sapiens
  misc_RNA (1)...(19): siRNA sense strand
gcuuuggaguccugggagu

SEQ ID NO: 2415785 - RNA, 19 nt, Homo sapiens
  misc_RNA (1)...(19): siRNA sense strand
ucauggauuucgaggggaa

SEQ ID NO: 2415786 - RNA, 19 nt, Homo sapiens
  misc_RNA (1)...(19): siRNA sense strand
cugcaggauccaaagauga

SEQ ID NO: 2415787 - RNA, 19 nt, Homo sapiens
  misc_RNA (1)...(19): siRNA sense strand
cugcacauguacagccaga

SEQ ID NO: 2415788 - RNA, 19 nt, Homo sapiens
  misc_RNA (1)...(19): siRNA sense strand
gauaaaugacaaagagcga

SEQ ID NO: 2415789 - RNA, 19 nt, Homo sapiens
  misc_RNA (1)...(19): siRNA sense strand
ccggaucauggaagagaaa

SEQ ID NO: 2415790 - RNA, 19 nt, Homo sapiens
  misc_RNA (1)...(19): siRNA sense strand
ugacaaagagcgaguggca

SEQ ID NO: 2415791 - RNA, 19 nt, Homo sapiens
  misc_RNA (1)...(19): siRNA sense strand
ccucauugcucuuuggcga

SEQ ID NO: 2415792 - RNA, 19 nt, Homo sapiens
  misc_RNA (1)...(19): siRNA sense strand
gaguaaaacuucagcgaug

SEQ ID NO: 2415793 - RNA, 19 nt, Homo sapiens
  misc_RNA (1)...(19): siRNA sense strand
cggaaaguuguguggaagu

SEQ ID NO: 2415794 - RNA, 19 nt, Homo sapiens
  misc_RNA (1)...(19): siRNA sense strand
cuuuagaagaacuggaagu

SEQ ID NO: 2415795 - RNA, 19 nt, Homo sapiens
  misc_RNA (1)...(19): siRNA sense strand
aggagauaaaugaagaaga

SEQ ID NO: 2415796 - RNA, 19 nt, Homo sapiens
  misc_RNA (1)...(19): siRNA sense strand
cauggaagagaaagcgcua

SEQ ID NO: 2415797 - RNA, 19 nt, Homo sapiens
  misc_RNA (1)...(19): siRNA sense strand
uggaagagaaagcgcuaga

SEQ ID NO: 2415798 - RNA, 19 nt, Homo sapiens
  misc_RNA (1)...(19): siRNA sense strand
uagaagaacuggaaguggu

SEQ ID NO: 2415799 - RNA, 19 nt, Homo sapiens
  misc_RNA (1)...(19): siRNA sense strand
cuggaaguggucucggaaa

SEQ ID NO: 2415800 - RNA, 19 nt, Homo sapiens
  misc_RNA (1)...(19): siRNA sense strand
acucaacagaagaagacau

SEQ ID NO: 2415801 - RNA, 19 nt, Homo sapiens
  misc_RNA (1)...(19): siRNA sense strand
gcgaaaugcagcaggugaa

SEQ ID NO: 2415802 - RNA, 19 nt, Homo sapiens
  misc_RNA (1)...(19): siRNA sense strand
ugguagagauagugcagaa

SEQ ID NO: 2415803 - RNA, 19 nt, Homo sapiens
  misc_RNA (1)...(19): siRNA sense strand
agauaaagaugaauggcau

SEQ ID NO: 2415804 - RNA, 19 nt, Homo sapiens
  misc_RNA (1)...(19): siRNA sense strand
guauauuucaggaggaauu

SEQ ID NO: 2415805 - RNA, 19 nt, Homo sapiens
  misc_RNA (1)...(19): siRNA sense strand
uguugaaguuggacggauu

SEQ ID NO: 2415806 - RNA, 19 nt, Homo sapiens
  misc_RNA (1)...(19): siRNA sense strand
cuuaaaacauccaggucaa

SEQ ID NO: 2415807 - RNA, 19 nt, Homo sapiens
  misc_RNA (1)...(19): siRNA sense strand
auacauaucucucguggaa

SEQ ID NO: 2415808 - RNA, 19 nt, Homo sapiens
  misc_RNA (1)...(19): siRNA sense strand
gcauuaaacuucauggugu

SEQ ID NO: 2415809 - RNA, 19 nt, Homo sapiens
  misc_RNA (1)...(19): siRNA sense strand
agugauuacuucaaggcua

SEQ ID NO: 2415810 - RNA, 19 nt, Homo sapiens
  misc_RNA (1)...(19): siRNA sense strand
cagaaauaugauccagaua

SEQ ID NO: 2415811 - RNA, 19 nt, Homo sapiens
  misc_RNA (1)...(19): siRNA sense strand
acauaucucucguggaaga

SEQ ID NO: 2415812 - RNA, 19 nt, Homo sapiens
  misc_RNA (1)...(19): siRNA sense strand
uggaagaggaagaccaaca

SEQ ID NO: 2415813 - RNA, 19 nt, Homo sapiens
  misc_RNA (1)...(19): siRNA sense strand
aggaauuacucaugauacu

SEQ ID NO: 2415814 - RNA, 19 nt, Homo sapiens
  misc_RNA (1)...(19): siRNA sense strand
uguuaagagggcagaguga

SEQ ID NO: 2415815 - RNA, 19 nt, Homo sapiens
  misc_RNA (1)...(19): siRNA sense strand
agguggaaugaaagaacaa

SEQ ID NO: 2415816 - RNA, 19 nt, Homo sapiens
  misc_RNA (1)...(19): siRNA sense strand
gcauguguacagugggaga

SEQ ID NO: 2415817 - RNA, 19 nt, Homo sapiens
  misc_RNA (1)...(19): siRNA sense strand
gaacaagauuuaaugugca

SEQ ID NO: 2415818 - RNA, 19 nt, Homo sapiens
  misc_RNA (1)...(19): siRNA sense strand
cguggaagaggaagaccaa

SEQ ID NO: 2415819 - RNA, 19 nt, Homo sapiens
  misc_RNA (1)...(19): siRNA sense strand
ucguuguaugguagagaua

SEQ ID NO: 2415820 - RNA, 19 nt, Homo sapiens
  misc_RNA (1)...(19): siRNA sense strand
cuguaaaguguuucucaua

SEQ ID NO: 2415821 - RNA, 19 nt, Homo sapiens
  misc_RNA (1)...(19): siRNA sense strand
caaucuaaccgaaguggau

SEQ ID NO: 2415822 - RNA, 19 nt, Homo sapiens
  misc_RNA (1)...(19): siRNA sense strand
aguaauagccuuaagcacu

SEQ ID NO: 2415823 - RNA, 19 nt, Homo sapiens
  misc_RNA (1)...(19): siRNA sense strand
guaugcaguuggugggcga

SEQ ID NO: 2415824 - RNA, 19 nt, Homo sapiens
  misc_RNA (1)...(19): siRNA sense strand
aggaagaccaacacaugaa

SEQ ID NO: 2415825 - RNA, 19 nt, Homo sapiens
  misc_RNA (1)...(19): siRNA sense strand
cauuuauacugcaaagcuu

SEQ ID NO: 2415826 - RNA, 19 nt, Homo sapiens
  misc_RNA (1)...(19): siRNA sense strand
ccuucgugcuuuccaguaa

SEQ ID NO: 2415827 - RNA, 19 nt, Homo sapiens
  misc_RNA (1)...(19): siRNA sense strand
guuguaugguagagauagu

SEQ ID NO: 2415828 - RNA, 19 nt, Homo sapiens
  misc_RNA (1)...(19): siRNA sense strand
ugauccagauaaagaugaa

SEQ ID NO: 2415829 - RNA, 19 nt, Homo sapiens
  misc_RNA (1)...(19): siRNA sense strand
guggaaugaaagaacaaga

SEQ ID NO: 2415830 - RNA, 19 nt, Homo sapiens
  misc_RNA (1)...(19): siRNA sense strand
aggaauugcgcauguauga

SEQ ID NO: 2415831 - RNA, 19 nt, Homo sapiens
  misc_RNA (1)...(19): siRNA sense strand
cagauaaagaugaauggca

SEQ ID NO: 2415832 - RNA, 19 nt, Homo sapiens
  misc_RNA (1)...(19): siRNA sense strand
gauguauauuucaggagga

SEQ ID NO: 2415833 - RNA, 19 nt, Homo sapiens
  misc_RNA (1)...(19): siRNA sense strand
gguagagauagugcagaaa

SEQ ID NO: 2415834 - RNA, 19 nt, Homo sapiens
  misc_RNA (1)...(19): siRNA sense strand
ccaguuaugcagucagaca

SEQ ID NO: 2415835 - RNA, 19 nt, Homo sapiens
  misc_RNA (1)...(19): siRNA sense strand
cgguggauuucaugagaac

SEQ ID NO: 2415836 - RNA, 19 nt, Homo sapiens
  misc_RNA (1)...(19): siRNA sense strand
auggaggagugauguauau

SEQ ID NO: 2415837 - RNA, 19 nt, Homo sapiens
  misc_RNA (1)...(19): siRNA sense strand
auguauauuucaggaggaa

SEQ ID NO: 2415838 - RNA, 19 nt, Homo sapiens
  misc_RNA (1)...(19): siRNA sense strand
aagaccaacacaugaaauu

SEQ ID NO: 2415839 - RNA, 19 nt, Homo sapiens
  misc_RNA (1)...(19): siRNA sense strand
ugguuggcggacagaguaa

SEQ ID NO: 2415840 - RNA, 19 nt, Homo sapiens
  misc_RNA (1)...(19): siRNA sense strand
ugacccugauacugacaaa

SEQ ID NO: 2415841 - RNA, 19 nt, Homo sapiens
  misc_RNA (1)...(19): siRNA sense strand
gcugguugucaguaaggaa

SEQ ID NO: 2415842 - RNA, 19 nt, Homo sapiens
  misc_RNA (1)...(19): siRNA sense strand
ucaguaaggaauugcgcau

SEQ ID NO: 2415843 - RNA, 19 nt, Homo sapiens
  misc_RNA (1)...(19): siRNA sense strand
ucacagguggaaugaaaga

SEQ ID NO: 2415844 - RNA, 19 nt, Homo sapiens
  misc_RNA (1)...(19): siRNA sense strand
uuucaugagaacugacaau

SEQ ID NO: 2415845 - RNA, 19 nt, Homo sapiens
  misc_RNA (1)...(19): siRNA sense strand
cgaaauucaacauggccaa

SEQ ID NO: 2415846 - RNA, 19 nt, Homo sapiens
  misc_RNA (1)...(19): siRNA sense strand
gcauuaucccagagaacga

SEQ ID NO: 2415847 - RNA, 19 nt, Homo sapiens
  misc_RNA (1)...(19): siRNA sense strand
ccaaugggaccgaggacga

SEQ ID NO: 2415848 - RNA, 19 nt, Homo sapiens
  misc_RNA (1)...(19): siRNA sense strand
gugaaagucuacaaggagu

SEQ ID NO: 2415849 - RNA, 19 nt, Homo sapiens
  misc_RNA (1)...(19): siRNA sense strand
ucccagagaacgaagaaau

SEQ ID NO: 2415850 - RNA, 19 nt, Homo sapiens
  misc_RNA (1)...(19): siRNA sense strand
cugcauuaucccagagaac

SEQ ID NO: 2415851 - RNA, 19 nt, Homo sapiens
  misc_RNA (1)...(19): siRNA sense strand
acacuguccacgaggccaa

SEQ ID NO: 2415852 - RNA, 19 nt, Homo sapiens
  misc_RNA (1)...(19): siRNA sense strand
ugaaagucuacaaggaguu

SEQ ID NO: 2415853 - RNA, 19 nt, Homo sapiens
  misc_RNA (1)...(19): siRNA sense strand
gcgaaauucaacauggcca

SEQ ID NO: 2415854 - RNA, 19 nt, Homo sapiens
  misc_RNA (1)...(19): siRNA sense strand
ggucaucacuucaggcauc

SEQ ID NO: 2415855 - RNA, 19 nt, Homo sapiens
  misc_RNA (1)...(19): siRNA sense strand
auuuauagcuccagccugu

SEQ ID NO: 2415856 - RNA, 19 nt, Homo sapiens
  misc_RNA (1)...(19): siRNA sense strand
ggcugaagaucuuggcaga

SEQ ID NO: 2415857 - RNA, 19 nt, Homo sapiens
  misc_RNA (1)...(19): siRNA sense strand
cuacaaauaugucgggaug

SEQ ID NO: 2415858 - RNA, 19 nt, Homo sapiens
  misc_RNA (1)...(19): siRNA sense strand
ccaucgaccugguggccuu

SEQ ID NO: 2415859 - RNA, 19 nt, Homo sapiens
  misc_RNA (1)...(19): siRNA sense strand
gcuacaaauaugucgggau

SEQ ID NO: 2415860 - RNA, 19 nt, Homo sapiens
  misc_RNA (1)...(19): siRNA sense strand
ccuucuugggcuacaaaua

SEQ ID NO: 2415861 - RNA, 19 nt, Homo sapiens
  misc_RNA (1)...(19): siRNA sense strand
aggagcugguggauaagaa

SEQ ID NO: 2415862 - RNA, 19 nt, Homo sapiens
  misc_RNA (1)...(19): siRNA sense strand
auaagaacaucgaccgcuu

SEQ ID NO: 2415863 - RNA, 19 nt, Homo sapiens
  misc_RNA (1)...(19): siRNA sense strand
agaugaggagcaagagaaa

SEQ ID NO: 2415864 - RNA, 19 nt, Homo sapiens
  misc_RNA (1)...(19): siRNA sense strand
aggacaacucagagaggaa

SEQ ID NO: 2415865 - RNA, 19 nt, Homo sapiens
  misc_RNA (1)...(19): siRNA sense strand
augaggagcaagagaaaga

SEQ ID NO: 2415866 - RNA, 19 nt, Homo sapiens
  misc_RNA (1)...(19): siRNA sense strand
acucagagaggaagcggaa

SEQ ID NO: 2415867 - RNA, 19 nt, Homo sapiens
  misc_RNA (1)...(19): siRNA sense strand
ucuggaagagagagagaau

SEQ ID NO: 2415868 - RNA, 19 nt, Homo sapiens
  misc_RNA (1)...(19): siRNA sense strand
aggagcaagagaaagauaa

SEQ ID NO: 2415869 - RNA, 19 nt, Homo sapiens
  misc_RNA (1)...(19): siRNA sense strand
gggaagacaugcuggagac

SEQ ID NO: 2415870 - RNA, 19 nt, Homo sapiens
  misc_RNA (1)...(19): siRNA sense strand
cuggaaggccugagggaag

SEQ ID NO: 2415871 - RNA, 19 nt, Homo sapiens
  misc_RNA (1)...(19): siRNA sense strand
gcaacugccaagagaaaau

SEQ ID NO: 2415872 - RNA, 19 nt, Homo sapiens
  misc_RNA (1)...(19): siRNA sense strand
aggccuugauccugacaau

SEQ ID NO: 2415873 - RNA, 19 nt, Homo sapiens
  misc_RNA (1)...(19): siRNA sense strand
gagaaaaucagguggugga

SEQ ID NO: 2415874 - RNA, 19 nt, Homo sapiens
  misc_RNA (1)...(19): siRNA sense strand
agagagagaaugcgggugu

SEQ ID NO: 2415875 - RNA, 19 nt, Homo sapiens
  misc_RNA (1)...(19): siRNA sense strand
agacuggaagggugggaca

SEQ ID NO: 2415876 - RNA, 19 nt, Homo sapiens
  misc_RNA (1)...(19): siRNA sense strand
ccagaugaggagcaagaga

SEQ ID NO: 2415877 - RNA, 19 nt, Homo sapiens
  misc_RNA (1)...(19): siRNA sense strand
gguuagggcugggugccaa

SEQ ID NO: 2415878 - RNA, 19 nt, Homo sapiens
  misc_RNA (1)...(19): siRNA sense strand
gaaggagcucauugcggaa

SEQ ID NO: 2415879 - RNA, 19 nt, Homo sapiens
  misc_RNA (1)...(19): siRNA sense strand
ggaaaccuggcgagggcau

SEQ ID NO: 2415880 - RNA, 19 nt, Homo sapiens
  misc_RNA (1)...(19): siRNA sense strand
ggugacuguuagugaguac

SEQ ID NO: 2415881 - RNA, 19 nt, Homo sapiens
  misc_RNA (1)...(19): siRNA sense strand
ucuacauccagcaggacaa

SEQ ID NO: 2415882 - RNA, 19 nt, Homo sapiens
  misc_RNA (1)...(19): siRNA sense strand
cugcaaaccugaaggccuu

SEQ ID NO: 2415883 - RNA, 19 nt, Homo sapiens
  misc_RNA (1)...(19): siRNA sense strand
gcgaggugucagugcaaca

SEQ ID NO: 2415884 - RNA, 19 nt, Homo sapiens
  misc_RNA (1)...(19): siRNA sense strand
ugcaugagcuagaggagca

SEQ ID NO: 2415885 - RNA, 19 nt, Homo sapiens
  misc_RNA (1)...(19): siRNA sense strand
aggugaagucagagcgucu

SEQ ID NO: 2415886 - RNA, 19 nt, Homo sapiens
  misc_RNA (1)...(19): siRNA sense strand
gcggcgaaccccauggaaa

SEQ ID NO: 2415887 - RNA, 19 nt, Homo sapiens
  misc_RNA (1)...(19): siRNA sense strand
cccaguauguagagggcau

SEQ ID NO: 2415888 - RNA, 19 nt, Homo sapiens
  misc_RNA (1)...(19): siRNA sense strand
cgucgggacaaguggguga

SEQ ID NO: 2415889 - RNA, 19 nt, Homo sapiens
  misc_RNA (1)...(19): siRNA sense strand
gagcacaagcugaagugga

SEQ ID NO: 2415890 - RNA, 19 nt, Homo sapiens
  misc_RNA (1)...(19): siRNA sense strand
gcgagauagauguggcgga

SEQ ID NO: 2415891 - RNA, 19 nt, Homo sapiens
  misc_RNA (1)...(19): siRNA sense strand
cuucaaggucacagacgau

SEQ ID NO: 2415892 - RNA, 19 nt, Homo sapiens
  misc_RNA (1)...(19): siRNA sense strand
ccuccugguggaugagaau

SEQ ID NO: 2415893 - RNA, 19 nt, Homo sapiens
  misc_RNA (1)...(19): siRNA sense strand
agauagauguggcggagcu

SEQ ID NO: 2415894 - RNA, 19 nt, Homo sapiens
  misc_RNA (1)...(19): siRNA sense strand
gcucagcagagacggaaaa

SEQ ID NO: 2415895 - RNA, 19 nt, Homo sapiens
  misc_RNA (1)...(19): siRNA sense strand
ugaagaaagcagugggcca

SEQ ID NO: 2415896 - RNA, 19 nt, Homo sapiens
  misc_RNA (1)...(19): siRNA sense strand
gcccagaagaagcggaaaa

SEQ ID NO: 2415897 - RNA, 19 nt, Homo sapiens
  misc_RNA (1)...(19): siRNA sense strand
aguccauugauaagaguua

SEQ ID NO: 2415898 - RNA, 19 nt, Homo sapiens
  misc_RNA (1)...(19): siRNA sense strand
gugaaaccaucgcgggaca

SEQ ID NO: 2415899 - RNA, 19 nt, Homo sapiens
  misc_RNA (1)...(19): siRNA sense strand
cucacaaagcccagaagaa

SEQ ID NO: 2415900 - RNA, 19 nt, Homo sapiens
  misc_RNA (1)...(19): siRNA sense strand
ccgaguggcucuuuggcau

SEQ ID NO: 2415901 - RNA, 19 nt, Homo sapiens
  misc_RNA (1)...(19): siRNA sense strand
ggcaggaggaggagaagca

SEQ ID NO: 2415902 - RNA, 19 nt, Homo sapiens
  misc_RNA (1)...(19): siRNA sense strand
cagcuuggcaggaggagga

SEQ ID NO: 2415903 - RNA, 19 nt, Homo sapiens
  misc_RNA (1)...(19): siRNA sense strand
ggaauguggugcaguccga

SEQ ID NO: 2415904 - RNA, 19 nt, Homo sapiens
  misc_RNA (1)...(19): siRNA sense strand
gggugaagugaaugagauc

SEQ ID NO: 2415905 - RNA, 19 nt, Homo sapiens
  misc_RNA (1)...(19): siRNA sense strand
aggcucacauccugaagaa

SEQ ID NO: 2415906 - RNA, 19 nt, Homo sapiens
  misc_RNA (1)...(19): siRNA sense strand
uugcagauggccuggacua

SEQ ID NO: 2415907 - RNA, 19 nt, Homo sapiens
  misc_RNA (1)...(19): siRNA sense strand
ugucauugaggaugugcaa

SEQ ID NO: 2415908 - RNA, 19 nt, Homo sapiens
  misc_RNA (1)...(19): siRNA sense strand
ugagaaacccagagcuacu

SEQ ID NO: 2415909 - RNA, 19 nt, Homo sapiens
  misc_RNA (1)...(19): siRNA sense strand
gggugcaccaaguggccaa

SEQ ID NO: 2415910 - RNA, 19 nt, Homo sapiens
  misc_RNA (1)...(19): siRNA sense strand
cagaugaggaagagaagac

SEQ ID NO: 2415911 - RNA, 19 nt, Homo sapiens
  misc_RNA (1)...(19): siRNA sense strand
gcaacaggaauguggugca

SEQ ID NO: 2415912 - RNA, 19 nt, Homo sapiens
  misc_RNA (1)...(19): siRNA sense strand
cuuggcaggaggaggagaa

SEQ ID NO: 2415913 - RNA, 19 nt, Homo sapiens
  misc_RNA (1)...(19): siRNA sense strand
gagcugucggcuagaguca

SEQ ID NO: 2415914 - RNA, 19 nt, Homo sapiens
  misc_RNA (1)...(19): siRNA sense strand
cggcuagagucauggagcu

SEQ ID NO: 2415915 - RNA, 19 nt, Homo sapiens
  misc_RNA (1)...(19): siRNA sense strand
ugaagaaagcagugggcca

SEQ ID NO: 2415916 - RNA, 19 nt, Homo sapiens
  misc_RNA (1)...(19): siRNA sense strand
gcccagaagaagcggaaaa

SEQ ID NO: 2415917 - RNA, 19 nt, Homo sapiens
  misc_RNA (1)...(19): siRNA sense strand
aguccauugauaagaguua

SEQ ID NO: 2415918 - RNA, 19 nt, Homo sapiens
  misc_RNA (1)...(19): siRNA sense strand
gugaaaccaucgcgggaca

SEQ ID NO: 2415919 - RNA, 19 nt, Homo sapiens
  misc_RNA (1)...(19): siRNA sense strand
agcaaaugaaggaauguaa

SEQ ID NO: 2415920 - RNA, 19 nt, Homo sapiens
  misc_RNA (1)...(19): siRNA sense strand
cucacaaagcccagaagaa

SEQ ID NO: 2415921 - RNA, 19 nt, Homo sapiens
  misc_RNA (1)...(19): siRNA sense strand
ccgaguggcucuuuggcau

SEQ ID NO: 2415922 - RNA, 19 nt, Homo sapiens
  misc_RNA (1)...(19): siRNA sense strand
ggcaggaggaggagaagca

SEQ ID NO: 2415923 - RNA, 19 nt, Homo sapiens
  misc_RNA (1)...(19): siRNA sense strand
cagcuuggcaggaggagga

SEQ ID NO: 2415924 - RNA, 19 nt, Homo sapiens
  misc_RNA (1)...(19): siRNA sense strand
ggaauguggugcaguccga

SEQ ID NO: 2415925 - RNA, 19 nt, Homo sapiens
  misc_RNA (1)...(19): siRNA sense strand
gggugaagugaaugagauc

SEQ ID NO: 2415926 - RNA, 19 nt, Homo sapiens
  misc_RNA (1)...(19): siRNA sense strand
aggcucacauccugaagaa

SEQ ID NO: 2415927 - RNA, 19 nt, Homo sapiens
  misc_RNA (1)...(19): siRNA sense strand
uugcagauggccuggacua

SEQ ID NO: 2415928 - RNA, 19 nt, Homo sapiens
  misc_RNA (1)...(19): siRNA sense strand
ugucauugaggaugugcaa

SEQ ID NO: 2415929 - RNA, 19 nt, Homo sapiens
  misc_RNA (1)...(19): siRNA sense strand
ugagaaacccagagcuacu

SEQ ID NO: 2415930 - RNA, 19 nt, Homo sapiens
  misc_RNA (1)...(19): siRNA sense strand
gggugcaccaaguggccaa

SEQ ID NO: 2415931 - RNA, 19 nt, Homo sapiens
  misc_RNA (1)...(19): siRNA sense strand
cagaugaggaagagaagac

SEQ ID NO: 2415932 - RNA, 19 nt, Homo sapiens
  misc_RNA (1)...(19): siRNA sense strand
gcaacaggaauguggugca

SEQ ID NO: 2415933 - RNA, 19 nt, Homo sapiens
  misc_RNA (1)...(19): siRNA sense strand
cuuggcaggaggaggagaa

SEQ ID NO: 2415934 - RNA, 19 nt, Homo sapiens
  misc_RNA (1)...(19): siRNA sense strand
agguugucaucaagcaaau

SEQ ID NO: 2415935 - RNA, 19 nt, Homo sapiens
  misc_RNA (1)...(19): siRNA sense strand
gagcugucggcuagaguca

SEQ ID NO: 2415936 - RNA, 19 nt, Homo sapiens
  misc_RNA (1)...(19): siRNA sense strand
cggcuagagucauggagcu

SEQ ID NO: 2415937 - RNA, 19 nt, Homo sapiens
  misc_RNA (1)...(19): siRNA sense strand
auucaacguucaagaguua

SEQ ID NO: 2415938 - RNA, 19 nt, Homo sapiens
  misc_RNA (1)...(19): siRNA sense strand
ccgaaugaaagaacgguau

SEQ ID NO: 2415939 - RNA, 19 nt, Homo sapiens
  misc_RNA (1)...(19): siRNA sense strand
gaagaaacauucauggugu

SEQ ID NO: 2415940 - RNA, 19 nt, Homo sapiens
  misc_RNA (1)...(19): siRNA sense strand
cguucaagaguuagcaaga

SEQ ID NO: 2415941 - RNA, 19 nt, Homo sapiens
  misc_RNA (1)...(19): siRNA sense strand
agucauggcacuugaaaau

SEQ ID NO: 2415942 - RNA, 19 nt, Homo sapiens
  misc_RNA (1)...(19): siRNA sense strand
ccugggaaaugaagcccua

SEQ ID NO: 2415943 - RNA, 19 nt, Homo sapiens
  misc_RNA (1)...(19): siRNA sense strand
gaguuagcaagaagaaaca

SEQ ID NO: 2415944 - RNA, 19 nt, Homo sapiens
  misc_RNA (1)...(19): siRNA sense strand
caagaguuagcaagaagaa

SEQ ID NO: 2415945 - RNA, 19 nt, Homo sapiens
  misc_RNA (1)...(19): siRNA sense strand
guucaagaguuagcaagaa

SEQ ID NO: 2415946 - RNA, 19 nt, Homo sapiens
  misc_RNA (1)...(19): siRNA sense strand
cuuccaacaaugccagaua

SEQ ID NO: 2415947 - RNA, 19 nt, Homo sapiens
  misc_RNA (1)...(19): siRNA sense strand
cugugaaaguggaaagaga

SEQ ID NO: 2415948 - RNA, 19 nt, Homo sapiens
  misc_RNA (1)...(19): siRNA sense strand
gcuaaugacuccuugggaa

SEQ ID NO: 2415949 - RNA, 19 nt, Homo sapiens
  misc_RNA (1)...(19): siRNA sense strand
agagacaauauuugggaaa

SEQ ID NO: 2415950 - RNA, 19 nt, Homo sapiens
  misc_RNA (1)...(19): siRNA sense strand
acgaggaagaugucagaua

SEQ ID NO: 2415951 - RNA, 19 nt, Homo sapiens
  misc_RNA (1)...(19): siRNA sense strand
cuuuauaugccauggaaau

SEQ ID NO: 2415952 - RNA, 19 nt, Homo sapiens
  misc_RNA (1)...(19): siRNA sense strand
caacgaaggaagaggccau

SEQ ID NO: 2415953 - RNA, 19 nt, Homo sapiens
  misc_RNA (1)...(19): siRNA sense strand
aagagaagaaagagcagaa

SEQ ID NO: 2415954 - RNA, 19 nt, Homo sapiens
  misc_RNA (1)...(19): siRNA sense strand
aagaacaggaagagaugaa

SEQ ID NO: 2415955 - RNA, 19 nt, Homo sapiens
  misc_RNA (1)...(19): siRNA sense strand
ggaaagagaagaaagagca

SEQ ID NO: 2415956 - RNA, 19 nt, Homo sapiens
  misc_RNA (1)...(19): siRNA sense strand
aguuuaugaugaugggcaa

SEQ ID NO: 2415957 - RNA, 19 nt, Homo sapiens
  misc_RNA (1)...(19): siRNA sense strand
gaacaaaauaggaaagcuu

SEQ ID NO: 2415958 - RNA, 19 nt, Homo sapiens
  misc_RNA (1)...(19): siRNA sense strand
gcggaaaagaacaggaaga

SEQ ID NO: 2415959 - RNA, 19 nt, Homo sapiens
  misc_RNA (1)...(19): siRNA sense strand
gacaagccucagagagaaa

SEQ ID NO: 2415960 - RNA, 19 nt, Homo sapiens
  misc_RNA (1)...(19): siRNA sense strand
aggaggaggaugaaggaga

SEQ ID NO: 2415961 - RNA, 19 nt, Homo sapiens
  misc_RNA (1)...(19): siRNA sense strand
aguggaaagagaagaaaga

SEQ ID NO: 2415962 - RNA, 19 nt, Homo sapiens
  misc_RNA (1)...(19): siRNA sense strand
ugaaaauagaggaagacaa

SEQ ID NO: 2415963 - RNA, 19 nt, Homo sapiens
  misc_RNA (1)...(19): siRNA sense strand
gggaagaaucgaaugucau

SEQ ID NO: 2415964 - RNA, 19 nt, Homo sapiens
  misc_RNA (1)...(19): siRNA sense strand
augaggaggaggaggauga

SEQ ID NO: 2415965 - RNA, 19 nt, Homo sapiens
  misc_RNA (1)...(19): siRNA sense strand
caauggucuuucagaggaa

SEQ ID NO: 2415966 - RNA, 19 nt, Homo sapiens
  misc_RNA (1)...(19): siRNA sense strand
ggacaaagaugcacccucu

SEQ ID NO: 2415967 - RNA, 19 nt, Homo sapiens
  misc_RNA (1)...(19): siRNA sense strand
gucaggaggacgaggaaga

SEQ ID NO: 2415968 - RNA, 19 nt, Homo sapiens
  misc_RNA (1)...(19): siRNA sense strand
cugaaagagcaagaagaaa

SEQ ID NO: 2415969 - RNA, 19 nt, Homo sapiens
  misc_RNA (1)...(19): siRNA sense strand
agggaagacuccaggccau

SEQ ID NO: 2415970 - RNA, 19 nt, Homo sapiens
  misc_RNA (1)...(19): siRNA sense strand
aagacaaacuaaagcacca

SEQ ID NO: 2415971 - RNA, 19 nt, Homo sapiens
  misc_RNA (1)...(19): siRNA sense strand
gcuuuauaugccauggaaa

SEQ ID NO: 2415972 - RNA, 19 nt, Homo sapiens
  misc_RNA (1)...(19): siRNA sense strand
caauaugggcaauggucuu

SEQ ID NO: 2415973 - RNA, 19 nt, Homo sapiens
  misc_RNA (1)...(19): siRNA sense strand
uggacuggguauuggugua

SEQ ID NO: 2415974 - RNA, 19 nt, Homo sapiens
  misc_RNA (1)...(19): siRNA sense strand
aaauagaggaagacaaacu

SEQ ID NO: 2415975 - RNA, 19 nt, Homo sapiens
  misc_RNA (1)...(19): siRNA sense strand
ugugaaaguggaaagagaa

SEQ ID NO: 2415976 - RNA, 19 nt, Homo sapiens
  misc_RNA (1)...(19): siRNA sense strand
aaacuaauggacuggguau

SEQ ID NO: 2415977 - RNA, 19 nt, Homo sapiens
  misc_RNA (1)...(19): siRNA sense strand
aagacagugaagaagauaa

SEQ ID NO: 2415978 - RNA, 19 nt, Homo sapiens
  misc_RNA (1)...(19): siRNA sense strand
gagagacaauauuugggaa

SEQ ID NO: 2415979 - RNA, 19 nt, Homo sapiens
  misc_RNA (1)...(19): siRNA sense strand
gauggaaucagcagcggaa

SEQ ID NO: 2415980 - RNA, 19 nt, Homo sapiens
  misc_RNA (1)...(19): siRNA sense strand
agguuaaggaaggagauaa

SEQ ID NO: 2415981 - RNA, 19 nt, Homo sapiens
  misc_RNA (1)...(19): siRNA sense strand
acagugaagaagauaagaa

SEQ ID NO: 2415982 - RNA, 19 nt, Homo sapiens
  misc_RNA (1)...(19): siRNA sense strand
ggaggaugaaggagaagca

SEQ ID NO: 2415983 - RNA, 19 nt, Homo sapiens
  misc_RNA (1)...(19): siRNA sense strand
agucaauugaggacaucua

SEQ ID NO: 2415984 - RNA, 19 nt, Homo sapiens
  misc_RNA (1)...(19): siRNA sense strand
cagcuuuaaggaugagaau

SEQ ID NO: 2415985 - RNA, 19 nt, Homo sapiens
  misc_RNA (1)...(19): siRNA sense strand
uggaaucagcagcggaaaa

SEQ ID NO: 2415986 - RNA, 19 nt, Homo sapiens
  misc_RNA (1)...(19): siRNA sense strand
uagaggaagacaaacuaaa

SEQ ID NO: 2415987 - RNA, 19 nt, Homo sapiens
  misc_RNA (1)...(19): siRNA sense strand
gucugaaaauagaggaaga

SEQ ID NO: 2415988 - RNA, 19 nt, Homo sapiens
  misc_RNA (1)...(19): siRNA sense strand
aagagucaauugaggacau

SEQ ID NO: 2415989 - RNA, 19 nt, Homo sapiens
  misc_RNA (1)...(19): siRNA sense strand
augaugaggaggaggagga

SEQ ID NO: 2415990 - RNA, 19 nt, Homo sapiens
  misc_RNA (1)...(19): siRNA sense strand
gacuugaagacuggagaaa

SEQ ID NO: 2415991 - RNA, 19 nt, Homo sapiens
  misc_RNA (1)...(19): siRNA sense strand
cagaagagucaauugagga

SEQ ID NO: 2415992 - RNA, 19 nt, Homo sapiens
  misc_RNA (1)...(19): siRNA sense strand
ccacuugucaggaggacga

SEQ ID NO: 2415993 - RNA, 19 nt, Homo sapiens
  misc_RNA (1)...(19): siRNA sense strand
aggaagaggccauuuuaaa

SEQ ID NO: 2415994 - RNA, 19 nt, Homo sapiens
  misc_RNA (1)...(19): siRNA sense strand
ccaucaugcgcguggagaa

SEQ ID NO: 2415995 - RNA, 19 nt, Homo sapiens
  misc_RNA (1)...(19): siRNA sense strand
gcagcaacuuccuggccaa

SEQ ID NO: 2415996 - RNA, 19 nt, Homo sapiens
  misc_RNA (1)...(19): siRNA sense strand
cgucgcuguuugagcacaa

SEQ ID NO: 2415997 - RNA, 19 nt, Homo sapiens
  misc_RNA (1)...(19): siRNA sense strand
ucgagaacgcggagaagga

SEQ ID NO: 2415998 - RNA, 19 nt, Homo sapiens
  misc_RNA (1)...(19): siRNA sense strand
acgcagaagcagaacgagu

SEQ ID NO: 2415999 - RNA, 19 nt, Homo sapiens
  misc_RNA (1)...(19): siRNA sense strand
gagaagagcccggagcaga

SEQ ID NO: 2416000 - RNA, 19 nt, Homo sapiens
  misc_RNA (1)...(19): siRNA sense strand
aggaagacggccacggaca

SEQ ID NO: 2416001 - RNA, 19 nt, Homo sapiens
  misc_RNA (1)...(19): siRNA sense strand
ccaagaacuucgcagagga

SEQ ID NO: 2416002 - RNA, 19 nt, Homo sapiens
  misc_RNA (1)...(19): siRNA sense strand
ucaucgagaacgcggagaa

SEQ ID NO: 2416003 - RNA, 19 nt, Homo sapiens
  misc_RNA (1)...(19): siRNA sense strand
agaacgcggagaaggagaa

SEQ ID NO: 2416004 - RNA, 19 nt, Homo sapiens
  misc_RNA (1)...(19): siRNA sense strand
agaacagcaaggcggagaa

SEQ ID NO: 2416005 - RNA, 19 nt, Homo sapiens
  misc_RNA (1)...(19): siRNA sense strand
gagaacgcggagaaggaga

SEQ ID NO: 2416006 - RNA, 19 nt, Homo sapiens
  misc_RNA (1)...(19): siRNA sense strand
cgcaagaagaugaagugga

SEQ ID NO: 2416007 - RNA, 19 nt, Homo sapiens
  misc_RNA (1)...(19): siRNA sense strand
cugaacaagaauuggcaga

SEQ ID NO: 2416008 - RNA, 19 nt, Homo sapiens
  misc_RNA (1)...(19): siRNA sense strand
caccaaaacgggagacaaa

SEQ ID NO: 2416009 - RNA, 19 nt, Homo sapiens
  misc_RNA (1)...(19): siRNA sense strand
aggagaaaggagacccaaa

SEQ ID NO: 2416010 - RNA, 19 nt, Homo sapiens
  misc_RNA (1)...(19): siRNA sense strand
uggaauuagucacagaaaa

SEQ ID NO: 2416011 - RNA, 19 nt, Homo sapiens
  misc_RNA (1)...(19): siRNA sense strand
cagaaaauccagugcacau

SEQ ID NO: 2416012 - RNA, 19 nt, Homo sapiens
  misc_RNA (1)...(19): siRNA sense strand
cuucacaggagaaaggaga

SEQ ID NO: 2416013 - RNA, 19 nt, Homo sapiens
  misc_RNA (1)...(19): siRNA sense strand
gggccauacauuugccgaa

SEQ ID NO: 2416014 - RNA, 19 nt, Homo sapiens
  misc_RNA (1)...(19): siRNA sense strand
ugggagagaccgaugcgaa

SEQ ID NO: 2416015 - RNA, 19 nt, Homo sapiens
  misc_RNA (1)...(19): siRNA sense strand
cuggaauuagucacagaaa

SEQ ID NO: 2416016 - RNA, 19 nt, Homo sapiens
  misc_RNA (1)...(19): siRNA sense strand
cagccaugaaggaggggaa

SEQ ID NO: 2416017 - RNA, 19 nt, Homo sapiens
  misc_RNA (1)...(19): siRNA sense strand
uguuugaagccgugggaac

SEQ ID NO: 2416018 - RNA, 19 nt, Homo sapiens
  misc_RNA (1)...(19): siRNA sense strand
gggagagaccgaugcgaac

SEQ ID NO: 2416019 - RNA, 19 nt, Homo sapiens
  misc_RNA (1)...(19): siRNA sense strand
aggggaaucaagagaaaau

SEQ ID NO: 2416020 - RNA, 19 nt, Homo sapiens
  misc_RNA (1)...(19): siRNA sense strand
gcuuggaggaagaggaaga

SEQ ID NO: 2416021 - RNA, 19 nt, Homo sapiens
  misc_RNA (1)...(19): siRNA sense strand
aggaagaggaagaggagga

SEQ ID NO: 2416022 - RNA, 19 nt, Homo sapiens
  misc_RNA (1)...(19): siRNA sense strand
caucuaaaccccaggacaa

SEQ ID NO: 2416023 - RNA, 19 nt, Homo sapiens
  misc_RNA (1)...(19): siRNA sense strand
gguacuuugaugaggaaga

SEQ ID NO: 2416024 - RNA, 19 nt, Homo sapiens
  misc_RNA (1)...(19): siRNA sense strand
cuugacagagcaugagaaa

SEQ ID NO: 2416025 - RNA, 19 nt, Homo sapiens
  misc_RNA (1)...(19): siRNA sense strand
aggccugcuuggaggaaga

SEQ ID NO: 2416026 - RNA, 19 nt, Homo sapiens
  misc_RNA (1)...(19): siRNA sense strand
aggaagaggaggaggacag

SEQ ID NO: 2416027 - RNA, 19 nt, Homo sapiens
  misc_RNA (1)...(19): siRNA sense strand
ggacaaaguggaagcagcu

SEQ ID NO: 2416028 - RNA, 19 nt, Homo sapiens
  misc_RNA (1)...(19): siRNA sense strand
aggacagugacgaggaaga

SEQ ID NO: 2416029 - RNA, 19 nt, Homo sapiens
  misc_RNA (1)...(19): siRNA sense strand
aagaggaagaggaggagga

SEQ ID NO: 2416030 - RNA, 19 nt, Homo sapiens
  misc_RNA (1)...(19): siRNA sense strand
aggaagaaccugaggaugc

SEQ ID NO: 2416031 - RNA, 19 nt, Homo sapiens
  misc_RNA (1)...(19): siRNA sense strand
ccgacuugacagagcauga

SEQ ID NO: 2416032 - RNA, 19 nt, Homo sapiens
  misc_RNA (1)...(19): siRNA sense strand
cugcuuggaggaagaggaa

SEQ ID NO: 2416033 - RNA, 19 nt, Homo sapiens
  misc_RNA (1)...(19): siRNA sense strand
acgagaagccacugguguu

SEQ ID NO: 2416034 - RNA, 19 nt, Homo sapiens
  misc_RNA (1)...(19): siRNA sense strand
gugaugagcagaugcgguu

SEQ ID NO: 2416035 - RNA, 19 nt, Homo sapiens
  misc_RNA (1)...(19): siRNA sense strand
acgaggagcgggagcuaca

SEQ ID NO: 2416036 - RNA, 19 nt, Homo sapiens
  misc_RNA (1)...(19): siRNA sense strand
acagcacaguagacgacaa

SEQ ID NO: 2416037 - RNA, 19 nt, Homo sapiens
  misc_RNA (1)...(19): siRNA sense strand
caaugaaacuugaugugaa

SEQ ID NO: 2416038 - RNA, 19 nt, Homo sapiens
  misc_RNA (1)...(19): siRNA sense strand
gacuaaauacguugaacaa

SEQ ID NO: 2416039 - RNA, 19 nt, Homo sapiens
  misc_RNA (1)...(19): siRNA sense strand
cgcaauacgcucaguuaua

SEQ ID NO: 2416040 - RNA, 19 nt, Homo sapiens
  misc_RNA (1)...(19): siRNA sense strand
cuaaauacguugaacaagu

SEQ ID NO: 2416041 - RNA, 19 nt, Homo sapiens
  misc_RNA (1)...(19): siRNA sense strand
cgacuaaauacguugaaca

SEQ ID NO: 2416042 - RNA, 19 nt, Homo sapiens
  misc_RNA (1)...(19): siRNA sense strand
ccaucaacauuguggcugu

SEQ ID NO: 2416043 - RNA, 19 nt, Homo sapiens
  misc_RNA (1)...(19): siRNA sense strand
cauuguggcugucaagaau

SEQ ID NO: 2416044 - RNA, 19 nt, Homo sapiens
  misc_RNA (1)...(19): siRNA sense strand
ccucuuugcagacgacuaa

SEQ ID NO: 2416045 - RNA, 19 nt, Homo sapiens
  misc_RNA (1)...(19): siRNA sense strand
caagugugccucaaugaaa

SEQ ID NO: 2416046 - RNA, 19 nt, Homo sapiens
  misc_RNA (1)...(19): siRNA sense strand
uguagaaccucuuugcaga

SEQ ID NO: 2416047 - RNA, 19 nt, Homo sapiens
  misc_RNA (1)...(19): siRNA sense strand
caaugaaacuugaugugaa

SEQ ID NO: 2416048 - RNA, 19 nt, Homo sapiens
  misc_RNA (1)...(19): siRNA sense strand
gacuaaauacguugaacaa

SEQ ID NO: 2416049 - RNA, 19 nt, Homo sapiens
  misc_RNA (1)...(19): siRNA sense strand
cgcaauacgcucaguuaua

SEQ ID NO: 2416050 - RNA, 19 nt, Homo sapiens
  misc_RNA (1)...(19): siRNA sense strand
cuaaauacguugaacaagu

SEQ ID NO: 2416051 - RNA, 19 nt, Homo sapiens
  misc_RNA (1)...(19): siRNA sense strand
cgacuaaauacguugaaca

SEQ ID NO: 2416052 - RNA, 19 nt, Homo sapiens
  misc_RNA (1)...(19): siRNA sense strand
ccaucaacauuguggcugu

SEQ ID NO: 2416053 - RNA, 19 nt, Homo sapiens
  misc_RNA (1)...(19): siRNA sense strand
cauuguggcugucaagaau

SEQ ID NO: 2416054 - RNA, 19 nt, Homo sapiens
  misc_RNA (1)...(19): siRNA sense strand
ccucuuugcagacgacuaa

SEQ ID NO: 2416055 - RNA, 19 nt, Homo sapiens
  misc_RNA (1)...(19): siRNA sense strand
caagugugccucaaugaaa

SEQ ID NO: 2416056 - RNA, 19 nt, Homo sapiens
  misc_RNA (1)...(19): siRNA sense strand
uguagaaccucuuugcaga

SEQ ID NO: 2416057 - RNA, 19 nt, Homo sapiens
  misc_RNA (1)...(19): siRNA sense strand
caaugaaacuugaugugaa

SEQ ID NO: 2416058 - RNA, 19 nt, Homo sapiens
  misc_RNA (1)...(19): siRNA sense strand
gacuaaauacguugaacaa

SEQ ID NO: 2416059 - RNA, 19 nt, Homo sapiens
  misc_RNA (1)...(19): siRNA sense strand
cgcaauacgcucaguuaua

SEQ ID NO: 2416060 - RNA, 19 nt, Homo sapiens
  misc_RNA (1)...(19): siRNA sense strand
cuaaauacguugaacaagu

SEQ ID NO: 2416061 - RNA, 19 nt, Homo sapiens
  misc_RNA (1)...(19): siRNA sense strand
cgacuaaauacguugaaca

SEQ ID NO: 2416062 - RNA, 19 nt, Homo sapiens
  misc_RNA (1)...(19): siRNA sense strand
ccaucaacauuguggcugu

SEQ ID NO: 2416063 - RNA, 19 nt, Homo sapiens
  misc_RNA (1)...(19): siRNA sense strand
cauuguggcugucaagaau

SEQ ID NO: 2416064 - RNA, 19 nt, Homo sapiens
  misc_RNA (1)...(19): siRNA sense strand
ccucuuugcagacgacuaa

SEQ ID NO: 2416065 - RNA, 19 nt, Homo sapiens
  misc_RNA (1)...(19): siRNA sense strand
caagugugccucaaugaaa

SEQ ID NO: 2416066 - RNA, 19 nt, Homo sapiens
  misc_RNA (1)...(19): siRNA sense strand
uguagaaccucuuugcaga

SEQ ID NO: 2416067 - RNA, 19 nt, Homo sapiens
  misc_RNA (1)...(19): siRNA sense strand
ggaagaagguggagacccu

SEQ ID NO: 2416068 - RNA, 19 nt, Homo sapiens
  misc_RNA (1)...(19): siRNA sense strand
cauuuacaucugagaacaa

SEQ ID NO: 2416069 - RNA, 19 nt, Homo sapiens
  misc_RNA (1)...(19): siRNA sense strand
gccuaaagacgguggaaac

SEQ ID NO: 2416070 - RNA, 19 nt, Homo sapiens
  misc_RNA (1)...(19): siRNA sense strand
cgucguaagaagaaggagu

SEQ ID NO: 2416071 - RNA, 19 nt, Homo sapiens
  misc_RNA (1)...(19): siRNA sense strand
agguggagacccuggagaa

SEQ ID NO: 2416072 - RNA, 19 nt, Homo sapiens
  misc_RNA (1)...(19): siRNA sense strand
aagagaguccggaggaaaa

SEQ ID NO: 2416073 - RNA, 19 nt, Homo sapiens
  misc_RNA (1)...(19): siRNA sense strand
agaacaaugaacuguggaa

SEQ ID NO: 2416074 - RNA, 19 nt, Homo sapiens
  misc_RNA (1)...(19): siRNA sense strand
aacaaugaacuguggaaga

SEQ ID NO: 2416075 - RNA, 19 nt, Homo sapiens
  misc_RNA (1)...(19): siRNA sense strand
ggccuaaagacgguggaaa

SEQ ID NO: 2416076 - RNA, 19 nt, Homo sapiens
  misc_RNA (1)...(19): siRNA sense strand
gaggagaagcggacccuga

SEQ ID NO: 2416077 - RNA, 19 nt, Homo sapiens
  misc_RNA (1)...(19): siRNA sense strand
aggaaaaucaagaacaaga

SEQ ID NO: 2416078 - RNA, 19 nt, Homo sapiens
  misc_RNA (1)...(19): siRNA sense strand
ggguguuaauccagaucaa

SEQ ID NO: 2416079 - RNA, 19 nt, Homo sapiens
  misc_RNA (1)...(19): siRNA sense strand
ggacaaggauguugcucga

SEQ ID NO: 2416080 - RNA, 19 nt, Homo sapiens
  misc_RNA (1)...(19): siRNA sense strand
uuaacaucaaggagagaaa

SEQ ID NO: 2416081 - RNA, 19 nt, Homo sapiens
  misc_RNA (1)...(19): siRNA sense strand
ugcuauaacaggagagcuu

SEQ ID NO: 2416082 - RNA, 19 nt, Homo sapiens
  misc_RNA (1)...(19): siRNA sense strand
agauuaugggaguggaaga

SEQ ID NO: 2416083 - RNA, 19 nt, Homo sapiens
  misc_RNA (1)...(19): siRNA sense strand
aaauugaacuggaccgaca

SEQ ID NO: 2416084 - RNA, 19 nt, Homo sapiens
  misc_RNA (1)...(19): siRNA sense strand
ccaguuaacaucaaggaga

SEQ ID NO: 2416085 - RNA, 19 nt, Homo sapiens
  misc_RNA (1)...(19): siRNA sense strand
cagaaggagcagcaggaga

SEQ ID NO: 2416086 - RNA, 19 nt, Homo sapiens
  misc_RNA (1)...(19): siRNA sense strand
aggagagaaaucaggaaga

SEQ ID NO: 2416087 - RNA, 19 nt, Homo sapiens
  misc_RNA (1)...(19): siRNA sense strand
aaguggagaagaucagaaa

SEQ ID NO: 2416088 - RNA, 19 nt, Homo sapiens
  misc_RNA (1)...(19): siRNA sense strand
ucaggaagauuaugggagu

SEQ ID NO: 2416089 - RNA, 19 nt, Homo sapiens
  misc_RNA (1)...(19): siRNA sense strand
ugggaguggaagaagaaga

SEQ ID NO: 2416090 - RNA, 19 nt, Homo sapiens
  misc_RNA (1)...(19): siRNA sense strand
augaugaugaugaugacaa

SEQ ID NO: 2416091 - RNA, 19 nt, Homo sapiens
  misc_RNA (1)...(19): siRNA sense strand
gugcagaaacugguggaga

SEQ ID NO: 2416092 - RNA, 19 nt, Homo sapiens
  misc_RNA (1)...(19): siRNA sense strand
ucucaggauuggaggguga

SEQ ID NO: 2416093 - RNA, 19 nt, Homo sapiens
  misc_RNA (1)...(19): siRNA sense strand
gugguggaaaggagagaaa

SEQ ID NO: 2416094 - RNA, 19 nt, Homo sapiens
  misc_RNA (1)...(19): siRNA sense strand
aaggagauggagaaagaaa

SEQ ID NO: 2416095 - RNA, 19 nt, Homo sapiens
  misc_RNA (1)...(19): siRNA sense strand
augaggaggaggaggaaga

SEQ ID NO: 2416096 - RNA, 19 nt, Homo sapiens
  misc_RNA (1)...(19): siRNA sense strand
ccauaaaagaacugcagaa

SEQ ID NO: 2416097 - RNA, 19 nt, Homo sapiens
  misc_RNA (1)...(19): siRNA sense strand
agucggaaacggauagaau

SEQ ID NO: 2416098 - RNA, 19 nt, Homo sapiens
  misc_RNA (1)...(19): siRNA sense strand
aagaggaggaggaaggaga

SEQ ID NO: 2416099 - RNA, 19 nt, Homo sapiens
  misc_RNA (1)...(19): siRNA sense strand
aggaggaggaagaggagga

SEQ ID NO: 2416100 - RNA, 19 nt, Homo sapiens
  misc_RNA (1)...(19): siRNA sense strand
aggaggaagaggaggagga

SEQ ID NO: 2416101 - RNA, 19 nt, Homo sapiens
  misc_RNA (1)...(19): siRNA sense strand
gguagaugcaagaguacga

SEQ ID NO: 2416102 - RNA, 19 nt, Homo sapiens
  misc_RNA (1)...(19): siRNA sense strand
ccaaaagaucagauggaca

SEQ ID NO: 2416103 - RNA, 19 nt, Homo sapiens
  misc_RNA (1)...(19): siRNA sense strand
caagaugucaagagagcga

SEQ ID NO: 2416104 - RNA, 19 nt, Homo sapiens
  misc_RNA (1)...(19): siRNA sense strand
aagaugaggaggaggagga

SEQ ID NO: 2416105 - RNA, 19 nt, Homo sapiens
  misc_RNA (1)...(19): siRNA sense strand
augaagaugaggaggagga

SEQ ID NO: 2416106 - RNA, 19 nt, Homo sapiens
  misc_RNA (1)...(19): siRNA sense strand
aggaggaaggagauggaga

SEQ ID NO: 2416107 - RNA, 19 nt, Homo sapiens
  misc_RNA (1)...(19): siRNA sense strand
ggucaacacuauuuccgaa

SEQ ID NO: 2416108 - RNA, 19 nt, Homo sapiens
  misc_RNA (1)...(19): siRNA sense strand
gggagaucgaugagcagau

SEQ ID NO: 2416109 - RNA, 19 nt, Homo sapiens
  misc_RNA (1)...(19): siRNA sense strand
aggaagaagagaaugcuga

SEQ ID NO: 2416110 - RNA, 19 nt, Homo sapiens
  misc_RNA (1)...(19): siRNA sense strand
ggucaauugagaaagcaga

SEQ ID NO: 2416111 - RNA, 19 nt, Homo sapiens
  misc_RNA (1)...(19): siRNA sense strand
gguaacaaguagugugcug

SEQ ID NO: 2416112 - RNA, 19 nt, Homo sapiens
  misc_RNA (1)...(19): siRNA sense strand
cauaaaagaacugcagaaa

SEQ ID NO: 2416113 - RNA, 19 nt, Homo sapiens
  misc_RNA (1)...(19): siRNA sense strand
uugagaaagcagaaauaca

SEQ ID NO: 2416114 - RNA, 19 nt, Homo sapiens
  misc_RNA (1)...(19): siRNA sense strand
ugggaaagcagcaccgaga

SEQ ID NO: 2416115 - RNA, 19 nt, Homo sapiens
  misc_RNA (1)...(19): siRNA sense strand
aggaagaggaggaggaagg

SEQ ID NO: 2416116 - RNA, 19 nt, Homo sapiens
  misc_RNA (1)...(19): siRNA sense strand
ucuccgacgcacagggcaa

SEQ ID NO: 2416117 - RNA, 19 nt, Homo sapiens
  misc_RNA (1)...(19): siRNA sense strand
auuaugaagaugaggagga

SEQ ID NO: 2416118 - RNA, 19 nt, Homo sapiens
  misc_RNA (1)...(19): siRNA sense strand
aggagauggagaaagaaaa

SEQ ID NO: 2416119 - RNA, 19 nt, Homo sapiens
  misc_RNA (1)...(19): siRNA sense strand
cagacgaccaagaugucaa

SEQ ID NO: 2416120 - RNA, 19 nt, Homo sapiens
  misc_RNA (1)...(19): siRNA sense strand
acgaaagguugaugcucca

SEQ ID NO: 2416121 - RNA, 19 nt, Homo sapiens
  misc_RNA (1)...(19): siRNA sense strand
cugaaaggcgcgaaggaag

SEQ ID NO: 2416122 - RNA, 19 nt, Homo sapiens
  misc_RNA (1)...(19): siRNA sense strand
aggaggaggaggaagagga

SEQ ID NO: 2416123 - RNA, 19 nt, Homo sapiens
  misc_RNA (1)...(19): siRNA sense strand
caguaagccuucaggacuc

SEQ ID NO: 2416124 - RNA, 19 nt, Homo sapiens
  misc_RNA (1)...(19): siRNA sense strand
ccauaguugccgaagagga

SEQ ID NO: 2416125 - RNA, 19 nt, Homo sapiens
  misc_RNA (1)...(19): siRNA sense strand
ucugagcaccagucggaaa

SEQ ID NO: 2416126 - RNA, 19 nt, Homo sapiens
  misc_RNA (1)...(19): siRNA sense strand
agggagagagagagggaaa

SEQ ID NO: 2416127 - RNA, 19 nt, Homo sapiens
  misc_RNA (1)...(19): siRNA sense strand
cgggagagggagagagaga

SEQ ID NO: 2416128 - RNA, 19 nt, Homo sapiens
  misc_RNA (1)...(19): siRNA sense strand
ccgaaggcuuguuggacau

SEQ ID NO: 2416129 - RNA, 19 nt, Homo sapiens
  misc_RNA (1)...(19): siRNA sense strand
agagagaccaggagaggga

SEQ ID NO: 2416130 - RNA, 19 nt, Homo sapiens
  misc_RNA (1)...(19): siRNA sense strand
ccgaaaaguuaggaagcua

SEQ ID NO: 2416131 - RNA, 19 nt, Homo sapiens
  misc_RNA (1)...(19): siRNA sense strand
agcaaaggcuacagcgguu

SEQ ID NO: 2416132 - RNA, 19 nt, Homo sapiens
  misc_RNA (1)...(19): siRNA sense strand
ccgaagagagaccaggaga

SEQ ID NO: 2416133 - RNA, 19 nt, Homo sapiens
  misc_RNA (1)...(19): siRNA sense strand
aggcaggcgcuguaccaaa

SEQ ID NO: 2416134 - RNA, 19 nt, Homo sapiens
  misc_RNA (1)...(19): siRNA sense strand
uggaauauuaccagucaga

SEQ ID NO: 2416135 - RNA, 19 nt, Homo sapiens
  misc_RNA (1)...(19): siRNA sense strand
uggaaugccacaaaugcaa

SEQ ID NO: 2416136 - RNA, 19 nt, Homo sapiens
  misc_RNA (1)...(19): siRNA sense strand
ggaaagagacccggaccga

SEQ ID NO: 2416137 - RNA, 19 nt, Homo sapiens
  misc_RNA (1)...(19): siRNA sense strand
guaccaaagcaaaggcuac

SEQ ID NO: 2416138 - RNA, 19 nt, Homo sapiens
  misc_RNA (1)...(19): siRNA sense strand
ggaacaaggagaagagcca

SEQ ID NO: 2416139 - RNA, 19 nt, Homo sapiens
  misc_RNA (1)...(19): siRNA sense strand
aauucauacaggagagaaa

SEQ ID NO: 2416140 - RNA, 19 nt, Homo sapiens
  misc_RNA (1)...(19): siRNA sense strand
gagaauacauacuggggaa

SEQ ID NO: 2416141 - RNA, 19 nt, Homo sapiens
  misc_RNA (1)...(19): siRNA sense strand
augugaugcuggagaacua

SEQ ID NO: 2416142 - RNA, 19 nt, Homo sapiens
  misc_RNA (1)...(19): siRNA sense strand
ccguaugaguguaccgaau

SEQ ID NO: 2416143 - RNA, 19 nt, Homo sapiens
  misc_RNA (1)...(19): siRNA sense strand
cuaugaauguagagagugu

SEQ ID NO: 2416144 - RNA, 19 nt, Homo sapiens
  misc_RNA (1)...(19): siRNA sense strand
ccuuaugaauguacugaau

SEQ ID NO: 2416145 - RNA, 19 nt, Homo sapiens
  misc_RNA (1)...(19): siRNA sense strand
gaauucacacagugguaaa

SEQ ID NO: 2416146 - RNA, 19 nt, Homo sapiens
  misc_RNA (1)...(19): siRNA sense strand
cccuaugaauguagugaau

SEQ ID NO: 2416147 - RNA, 19 nt, Homo sapiens
  misc_RNA (1)...(19): siRNA sense strand
auguagugaaugcgggaaa

SEQ ID NO: 2416148 - RNA, 19 nt, Homo sapiens
  misc_RNA (1)...(19): siRNA sense strand
acucauuacacaucaguua

SEQ ID NO: 2416149 - RNA, 19 nt, Homo sapiens
  misc_RNA (1)...(19): siRNA sense strand
auguagugaauguggcaaa

SEQ ID NO: 2416150 - RNA, 19 nt, Homo sapiens
  misc_RNA (1)...(19): siRNA sense strand
ggaaaaucaucuagccaga

SEQ ID NO: 2416151 - RNA, 19 nt, Homo sapiens
  misc_RNA (1)...(19): siRNA sense strand
aggauguggcuguggauuu

SEQ ID NO: 2416152 - RNA, 19 nt, Homo sapiens
  misc_RNA (1)...(19): siRNA sense strand
ccuuaugauuguucugaau

SEQ ID NO: 2416153 - RNA, 19 nt, Homo sapiens
  misc_RNA (1)...(19): siRNA sense strand
guguaccgaaugugggaaa

SEQ ID NO: 2416154 - RNA, 19 nt, Homo sapiens
  misc_RNA (1)...(19): siRNA sense strand
auguacugaaugugggaaa

SEQ ID NO: 2416155 - RNA, 19 nt, Homo sapiens
  misc_RNA (1)...(19): siRNA sense strand
cagaugaauaucaggcaga

SEQ ID NO: 2416156 - RNA, 19 nt, Homo sapiens
  misc_RNA (1)...(19): siRNA sense strand
uaacuguacaccagagaau

SEQ ID NO: 2416157 - RNA, 19 nt, Homo sapiens
  misc_RNA (1)...(19): siRNA sense strand
gaaaggagucacaagggau

SEQ ID NO: 2416158 - RNA, 19 nt, Homo sapiens
  misc_RNA (1)...(19): siRNA sense strand
cccuaugaauguagagagu

SEQ ID NO: 2416159 - RNA, 19 nt, Homo sapiens
  misc_RNA (1)...(19): siRNA sense strand
ccacagagcucauacugga

SEQ ID NO: 2416160 - RNA, 19 nt, Homo sapiens
  misc_RNA (1)...(19): siRNA sense strand
ucaagagugcauagaaaca

SEQ ID NO: 2416161 - RNA, 19 nt, Homo sapiens
  misc_RNA (1)...(19): siRNA sense strand
gagaagagccauggaucau

SEQ ID NO: 2416162 - RNA, 19 nt, Homo sapiens
  misc_RNA (1)...(19): siRNA sense strand
ucauuggacaucagagaau

SEQ ID NO: 2416163 - RNA, 19 nt, Homo sapiens
  misc_RNA (1)...(19): siRNA sense strand
aggcaucagggcauaaaua

SEQ ID NO: 2416164 - RNA, 19 nt, Homo sapiens
  misc_RNA (1)...(19): siRNA sense strand
gcggaaaagccuucaguga

SEQ ID NO: 2416165 - RNA, 19 nt, Homo sapiens
  misc_RNA (1)...(19): siRNA sense strand
cagaagucacagcugauua

SEQ ID NO: 2416166 - RNA, 19 nt, Homo sapiens
  misc_RNA (1)...(19): siRNA sense strand
cauggaucauaaagggaga

SEQ ID NO: 2416167 - RNA, 19 nt, Homo sapiens
  misc_RNA (1)...(19): siRNA sense strand
cgaguuguuauaagagcaa

SEQ ID NO: 2416168 - RNA, 19 nt, Homo sapiens
  misc_RNA (1)...(19): siRNA sense strand
ccucauuauacaucagaga

SEQ ID NO: 2416169 - RNA, 19 nt, Homo sapiens
  misc_RNA (1)...(19): siRNA sense strand
ccaucauaagauacugaaa

SEQ ID NO: 2416170 - RNA, 19 nt, Homo sapiens
  misc_RNA (1)...(19): siRNA sense strand
gggagacaagacaggaaga

SEQ ID NO: 2416171 - RNA, 19 nt, Homo sapiens
  misc_RNA (1)...(19): siRNA sense strand
ccuuauuauacaucagaga

SEQ ID NO: 2416172 - RNA, 19 nt, Homo sapiens
  misc_RNA (1)...(19): siRNA sense strand
auggucagcugcagagauu

SEQ ID NO: 2416173 - RNA, 19 nt, Homo sapiens
  misc_RNA (1)...(19): siRNA sense strand
gaauguagagaguguggga

SEQ ID NO: 2416174 - RNA, 19 nt, Homo sapiens
  misc_RNA (1)...(19): siRNA sense strand
gaggauucauacuggggaa

SEQ ID NO: 2416175 - RNA, 19 nt, Homo sapiens
  misc_RNA (1)...(19): siRNA sense strand
acacagugguaaaaucaua

SEQ ID NO: 2416176 - RNA, 19 nt, Homo sapiens
  misc_RNA (1)...(19): siRNA sense strand
agucacaucucauuggaca

SEQ ID NO: 2416177 - RNA, 19 nt, Homo sapiens
  misc_RNA (1)...(19): siRNA sense strand
auaagauacugaaaggagu

SEQ ID NO: 2416178 - RNA, 19 nt, Homo sapiens
  misc_RNA (1)...(19): siRNA sense strand
gcaggaagacagaacucau

SEQ ID NO: 2416179 - RNA, 19 nt, Homo sapiens
  misc_RNA (1)...(19): siRNA sense strand
auacaucagagaacacaua

SEQ ID NO: 2416180 - RNA, 19 nt, Homo sapiens
  misc_RNA (1)...(19): siRNA sense strand
ugaaaggagucacaaggga

SEQ ID NO: 2416181 - RNA, 19 nt, Homo sapiens
  misc_RNA (1)...(19): siRNA sense strand
gggcauaaauauaauccac

SEQ ID NO: 2416182 - RNA, 19 nt, Homo sapiens
  misc_RNA (1)...(19): siRNA sense strand
gcucauggcguuugcccua

SEQ ID NO: 2416183 - RNA, 19 nt, Homo sapiens
  misc_RNA (1)...(19): siRNA sense strand
cagaaauggaugaaaauga

SEQ ID NO: 2416184 - RNA, 19 nt, Homo sapiens
  misc_RNA (1)...(19): siRNA sense strand
uggagaaggaagauggcga

SEQ ID NO: 2416185 - RNA, 19 nt, Homo sapiens
  misc_RNA (1)...(19): siRNA sense strand
uggugaaauuuggccgaaa

SEQ ID NO: 2416186 - RNA, 19 nt, Homo sapiens
  misc_RNA (1)...(19): siRNA sense strand
ggccaguugcaguguggaa

SEQ ID NO: 2416187 - RNA, 19 nt, Homo sapiens
  misc_RNA (1)...(19): siRNA sense strand
ccaaagcaguucuccgaca

SEQ ID NO: 2416188 - RNA, 19 nt, Homo sapiens
  misc_RNA (1)...(19): siRNA sense strand
caacauuauuagaagggaa

SEQ ID NO: 2416189 - RNA, 19 nt, Homo sapiens
  misc_RNA (1)...(19): siRNA sense strand
cugccaaggaccagaauua

SEQ ID NO: 2416190 - RNA, 19 nt, Homo sapiens
  misc_RNA (1)...(19): siRNA sense strand
gaauuuacauacugggcaa

SEQ ID NO: 2416191 - RNA, 19 nt, Homo sapiens
  misc_RNA (1)...(19): siRNA sense strand
acuuagaacuugaugaaga

SEQ ID NO: 2416192 - RNA, 19 nt, Homo sapiens
  misc_RNA (1)...(19): siRNA sense strand
auugaggccuggagagaaa

SEQ ID NO: 2416193 - RNA, 19 nt, Homo sapiens
  misc_RNA (1)...(19): siRNA sense strand
ggaagauugcaauggcaua

SEQ ID NO: 2416194 - RNA, 19 nt, Homo sapiens
  misc_RNA (1)...(19): siRNA sense strand
gauauuugguccuggaaaa

SEQ ID NO: 2416195 - RNA, 19 nt, Homo sapiens
  misc_RNA (1)...(19): siRNA sense strand
acaaauacaucgaccaaaa

SEQ ID NO: 2416196 - RNA, 19 nt, Homo sapiens
  misc_RNA (1)...(19): siRNA sense strand
gggaaaaucucuugaaacu

SEQ ID NO: 2416197 - RNA, 19 nt, Homo sapiens
  misc_RNA (1)...(19): siRNA sense strand
ucaaacagccagaggauca

SEQ ID NO: 2416198 - RNA, 19 nt, Homo sapiens
  misc_RNA (1)...(19): siRNA sense strand
aaagcaaagugaagcaaau

SEQ ID NO: 2416199 - RNA, 19 nt, Homo sapiens
  misc_RNA (1)...(19): siRNA sense strand
caaagagaagacagugaaa

SEQ ID NO: 2416200 - RNA, 19 nt, Homo sapiens
  misc_RNA (1)...(19): siRNA sense strand
auuccaauacagugagaua

SEQ ID NO: 2416201 - RNA, 19 nt, Homo sapiens
  misc_RNA (1)...(19): siRNA sense strand
ugagauaggaacuaguaua

SEQ ID NO: 2416202 - RNA, 19 nt, Homo sapiens
  misc_RNA (1)...(19): siRNA sense strand
gaucaaacagccagaggau

SEQ ID NO: 2416203 - RNA, 19 nt, Homo sapiens
  misc_RNA (1)...(19): siRNA sense strand
agauaugguguuugggauu

SEQ ID NO: 2416204 - RNA, 19 nt, Homo sapiens
  misc_RNA (1)...(19): siRNA sense strand
cagcaauugaggacaacaa

SEQ ID NO: 2416205 - RNA, 19 nt, Homo sapiens
  misc_RNA (1)...(19): siRNA sense strand
ggaaagugcaagaagagga

SEQ ID NO: 2416206 - RNA, 19 nt, Homo sapiens
  misc_RNA (1)...(19): siRNA sense strand
cauugaaacauuugcagaa

SEQ ID NO: 2416207 - RNA, 19 nt, Homo sapiens
  misc_RNA (1)...(19): siRNA sense strand
ccuaaagaagcuuaaacaa

SEQ ID NO: 2416208 - RNA, 19 nt, Homo sapiens
  misc_RNA (1)...(19): siRNA sense strand
ggaucgagaagcagcacua

SEQ ID NO: 2416209 - RNA, 19 nt, Homo sapiens
  misc_RNA (1)...(19): siRNA sense strand
ucgccuggcuugugaagaa

SEQ ID NO: 2416210 - RNA, 19 nt, Homo sapiens
  misc_RNA (1)...(19): siRNA sense strand
aagcaaaugcggacaccaa

SEQ ID NO: 2416211 - RNA, 19 nt, Homo sapiens
  misc_RNA (1)...(19): siRNA sense strand
gagauauagaaaugcacaa

SEQ ID NO: 2416212 - RNA, 19 nt, Homo sapiens
  misc_RNA (1)...(19): siRNA sense strand
ccucauguacagagcaauu

SEQ ID NO: 2416213 - RNA, 19 nt, Homo sapiens
  misc_RNA (1)...(19): siRNA sense strand
agaacuugaugaagaccua

SEQ ID NO: 2416214 - RNA, 19 nt, Homo sapiens
  misc_RNA (1)...(19): siRNA sense strand
uggaguaguuauugcuaau

SEQ ID NO: 2416215 - RNA, 19 nt, Homo sapiens
  misc_RNA (1)...(19): siRNA sense strand
uagccauaauuguggagaa

SEQ ID NO: 2416216 - RNA, 19 nt, Homo sapiens
  misc_RNA (1)...(19): siRNA sense strand
gggaaaccccagaggaaau

SEQ ID NO: 2416217 - RNA, 19 nt, Homo sapiens
  misc_RNA (1)...(19): siRNA sense strand
ugacacaaagccagggaau

SEQ ID NO: 2416218 - RNA, 19 nt, Homo sapiens
  misc_RNA (1)...(19): siRNA sense strand
uagaaaugcacaaagagaa

SEQ ID NO: 2416219 - RNA, 19 nt, Homo sapiens
  misc_RNA (1)...(19): siRNA sense strand
uccaauacagugagauaua

SEQ ID NO: 2416220 - RNA, 19 nt, Homo sapiens
  misc_RNA (1)...(19): siRNA sense strand
ucaugagcauugagcuuaa

SEQ ID NO: 2416221 - RNA, 19 nt, Homo sapiens
  misc_RNA (1)...(19): siRNA sense strand
cgaucagagaagaugggaa

SEQ ID NO: 2416222 - RNA, 19 nt, Homo sapiens
  misc_RNA (1)...(19): siRNA sense strand
gcuacagguguuugaaauu

SEQ ID NO: 2416223 - RNA, 19 nt, Homo sapiens
  misc_RNA (1)...(19): siRNA sense strand
cucuaaaugcugugggaca

SEQ ID NO: 2416224 - RNA, 19 nt, Homo sapiens
  misc_RNA (1)...(19): siRNA sense strand
acucaagaucauuccaaua

SEQ ID NO: 2416225 - RNA, 19 nt, Homo sapiens
  misc_RNA (1)...(19): siRNA sense strand
aagcagagaugaaaaggaa

SEQ ID NO: 2416226 - RNA, 19 nt, Homo sapiens
  misc_RNA (1)...(19): siRNA sense strand
aagaagaggaacucagaga

SEQ ID NO: 2416227 - RNA, 19 nt, Homo sapiens
  misc_RNA (1)...(19): siRNA sense strand
ccugcuggcuucuggcaaa

SEQ ID NO: 2416228 - RNA, 19 nt, Homo sapiens
  misc_RNA (1)...(19): siRNA sense strand
gaucagagaagaugggaag

SEQ ID NO: 2416229 - RNA, 19 nt, Homo sapiens
  misc_RNA (1)...(19): siRNA sense strand
gcuacgaaauggagaggcu

SEQ ID NO: 2416230 - RNA, 19 nt, Homo sapiens
  misc_RNA (1)...(19): siRNA sense strand
gcuugcagcuggaggaacu

SEQ ID NO: 2416231 - RNA, 19 nt, Homo sapiens
  misc_RNA (1)...(19): siRNA sense strand
gcaacuacuacaaaggaga

SEQ ID NO: 2416232 - RNA, 19 nt, Homo sapiens
  misc_RNA (1)...(19): siRNA sense strand
gaguaguucggcugauuaa

SEQ ID NO: 2416233 - RNA, 19 nt, Homo sapiens
  misc_RNA (1)...(19): siRNA sense strand
aaggauggguggacguaau

SEQ ID NO: 2416234 - RNA, 19 nt, Homo sapiens
  misc_RNA (1)...(19): siRNA sense strand
gaugagucucugucggaua

SEQ ID NO: 2416235 - RNA, 19 nt, Homo sapiens
  misc_RNA (1)...(19): siRNA sense strand
aggagcaagcagagaugaa

SEQ ID NO: 2416236 - RNA, 19 nt, Homo sapiens
  misc_RNA (1)...(19): siRNA sense strand
cauuagaagacuuugugua

SEQ ID NO: 2416237 - RNA, 19 nt, Homo sapiens
  misc_RNA (1)...(19): siRNA sense strand
ggguggacguaauggacca

SEQ ID NO: 2416238 - RNA, 19 nt, Homo sapiens
  misc_RNA (1)...(19): siRNA sense strand
gaugaaaaggaaagugcaa

SEQ ID NO: 2416239 - RNA, 19 nt, Homo sapiens
  misc_RNA (1)...(19): siRNA sense strand
ugaggaaaguuguucgaga

SEQ ID NO: 2416240 - RNA, 19 nt, Homo sapiens
  misc_RNA (1)...(19): siRNA sense strand
cagaagaaaccgauacgau

SEQ ID NO: 2416241 - RNA, 19 nt, Homo sapiens
  misc_RNA (1)...(19): siRNA sense strand
uggaaaacauguaacgcua

SEQ ID NO: 2416242 - RNA, 19 nt, Homo sapiens
  misc_RNA (1)...(19): siRNA sense strand
ggagaauauuaacaggcau

SEQ ID NO: 2416243 - RNA, 19 nt, Homo sapiens
  misc_RNA (1)...(19): siRNA sense strand
uagaggaggagguggccaa

SEQ ID NO: 2416244 - RNA, 19 nt, Homo sapiens
  misc_RNA (1)...(19): siRNA sense strand
agaaaucagaguacaguuu

SEQ ID NO: 2416245 - RNA, 19 nt, Homo sapiens
  misc_RNA (1)...(19): siRNA sense strand
guggaguaauggacauauu

SEQ ID NO: 2416246 - RNA, 19 nt, Homo sapiens
  misc_RNA (1)...(19): siRNA sense strand
cagcagucgugcaguauca

SEQ ID NO: 2416247 - RNA, 19 nt, Homo sapiens
  misc_RNA (1)...(19): siRNA sense strand
gggagaauauuaacaggca

SEQ ID NO: 2416248 - RNA, 19 nt, Homo sapiens
  misc_RNA (1)...(19): siRNA sense strand
agccauaauuguggagaau

SEQ ID NO: 2416249 - RNA, 19 nt, Homo sapiens
  misc_RNA (1)...(19): siRNA sense strand
cgguuuggaggaaggacaa

SEQ ID NO: 2416250 - RNA, 19 nt, Homo sapiens
  misc_RNA (1)...(19): siRNA sense strand
caaugaccuucgagcacua

SEQ ID NO: 2416251 - RNA, 19 nt, Homo sapiens
  misc_RNA (1)...(19): siRNA sense strand
cagcaugcaaccugagaca

SEQ ID NO: 2416252 - RNA, 19 nt, Homo sapiens
  misc_RNA (1)...(19): siRNA sense strand
ugcaggaaguggugggaau

SEQ ID NO: 2416253 - RNA, 19 nt, Homo sapiens
  misc_RNA (1)...(19): siRNA sense strand
aggaaguacaggaagaaga

SEQ ID NO: 2416254 - RNA, 19 nt, Homo sapiens
  misc_RNA (1)...(19): siRNA sense strand
agaaucaccucaauggcaa

SEQ ID NO: 2416255 - RNA, 19 nt, Homo sapiens
  misc_RNA (1)...(19): siRNA sense strand
acgaaguccgggaggauga

SEQ ID NO: 2416256 - RNA, 19 nt, Homo sapiens
  misc_RNA (1)...(19): siRNA sense strand
gcuucgaacgguacccaaa

SEQ ID NO: 2416257 - RNA, 19 nt, Homo sapiens
  misc_RNA (1)...(19): siRNA sense strand
agauaaagcgggugaugac

SEQ ID NO: 2416258 - RNA, 19 nt, Homo sapiens
  misc_RNA (1)...(19): siRNA sense strand
cauuggaagaggcagauau

SEQ ID NO: 2416259 - RNA, 19 nt, Homo sapiens
  misc_RNA (1)...(19): siRNA sense strand
cucccagcauccagauaaa

SEQ ID NO: 2416260 - RNA, 19 nt, Homo sapiens
  misc_RNA (1)...(19): siRNA sense strand
cagugaaauaucagagcaa

SEQ ID NO: 2416261 - RNA, 19 nt, Homo sapiens
  misc_RNA (1)...(19): siRNA sense strand
ccaacgaagaacuggaaga

SEQ ID NO: 2416262 - RNA, 19 nt, Homo sapiens
  misc_RNA (1)...(19): siRNA sense strand
gagauugagacgaggcaca

SEQ ID NO: 2416263 - RNA, 19 nt, Homo sapiens
  misc_RNA (1)...(19): siRNA sense strand
ucguagagagccagggaga

SEQ ID NO: 2416264 - RNA, 19 nt, Homo sapiens
  misc_RNA (1)...(19): siRNA sense strand
uggaacauucuguggacua

SEQ ID NO: 2416265 - RNA, 19 nt, Homo sapiens
  misc_RNA (1)...(19): siRNA sense strand
auugaaagcgaucgagcaa

SEQ ID NO: 2416266 - RNA, 19 nt, Homo sapiens
  misc_RNA (1)...(19): siRNA sense strand
ccaaacaggagcuggagga

SEQ ID NO: 2416267 - RNA, 19 nt, Homo sapiens
  misc_RNA (1)...(19): siRNA sense strand
gagagaugauugaccgcau

SEQ ID NO: 2416268 - RNA, 19 nt, Homo sapiens
  misc_RNA (1)...(19): siRNA sense strand
gguccaaauugaaagcgau

SEQ ID NO: 2416269 - RNA, 19 nt, Homo sapiens
  misc_RNA (1)...(19): siRNA sense strand
augaagaggagguggucca

SEQ ID NO: 2416270 - RNA, 19 nt, Homo sapiens
  misc_RNA (1)...(19): siRNA sense strand
ucgaguacaacguggaaca

SEQ ID NO: 2416271 - RNA, 19 nt, Homo sapiens
  misc_RNA (1)...(19): siRNA sense strand
ccaaauugaaagcgaucga

SEQ ID NO: 2416272 - RNA, 19 nt, Homo sapiens
  misc_RNA (1)...(19): siRNA sense strand
agaccaaacaggagcugga

SEQ ID NO: 2416273 - RNA, 19 nt, Homo sapiens
  misc_RNA (1)...(19): siRNA sense strand
gaauauaacgcgacccagu

SEQ ID NO: 2416274 - RNA, 19 nt, Homo sapiens
  misc_RNA (1)...(19): siRNA sense strand
uugagaaacugucggagga

SEQ ID NO: 2416275 - RNA, 19 nt, Homo sapiens
  misc_RNA (1)...(19): siRNA sense strand
agaaacugucggaggaugu

SEQ ID NO: 2416276 - RNA, 19 nt, Homo sapiens
  misc_RNA (1)...(19): siRNA sense strand
aggauguggagcaggugaa

SEQ ID NO: 2416277 - RNA, 19 nt, Homo sapiens
  misc_RNA (1)...(19): siRNA sense strand
cugcggagugcgaaagaca

SEQ ID NO: 2416278 - RNA, 19 nt, Homo sapiens
  misc_RNA (1)...(19): siRNA sense strand
cggaggauguggagcaggu

SEQ ID NO: 2416279 - RNA, 19 nt, Homo sapiens
  misc_RNA (1)...(19): siRNA sense strand
gcgcugaaugagauugaga

SEQ ID NO: 2416280 - RNA, 19 nt, Homo sapiens
  misc_RNA (1)...(19): siRNA sense strand
cgguccaaauugaaagcga

SEQ ID NO: 2416281 - RNA, 19 nt, Homo sapiens
  misc_RNA (1)...(19): siRNA sense strand
ccgaauauaacgcgaccca

SEQ ID NO: 2416282 - RNA, 19 nt, Homo sapiens
  misc_RNA (1)...(19): siRNA sense strand
cggaaguucguggagguaa

SEQ ID NO: 2416283 - RNA, 19 nt, Homo sapiens
  misc_RNA (1)...(19): siRNA sense strand
agagcugcggagugcgaaa

SEQ ID NO: 2416284 - RNA, 19 nt, Homo sapiens
  misc_RNA (1)...(19): siRNA sense strand
gagaaugacacgauagcca

SEQ ID NO: 2416285 - RNA, 19 nt, Homo sapiens
  misc_RNA (1)...(19): siRNA sense strand
acguguaccaugagaauga

SEQ ID NO: 2416286 - RNA, 19 nt, Homo sapiens
  misc_RNA (1)...(19): siRNA sense strand
ucauuguagggaagauaua

SEQ ID NO: 2416287 - RNA, 19 nt, Homo sapiens
  misc_RNA (1)...(19): siRNA sense strand
ccaacaagcggcuggagca

SEQ ID NO: 2416288 - RNA, 19 nt, Homo sapiens
  misc_RNA (1)...(19): siRNA sense strand
uagccaaguacgagaucau

SEQ ID NO: 2416289 - RNA, 19 nt, Homo sapiens
  misc_RNA (1)...(19): siRNA sense strand
agagcguggagguggaaau

SEQ ID NO: 2416290 - RNA, 19 nt, Homo sapiens
  misc_RNA (1)...(19): siRNA sense strand
ccaccaugcgggacaucaa

SEQ ID NO: 2416291 - RNA, 19 nt, Homo sapiens
  misc_RNA (1)...(19): siRNA sense strand
aggacgggaagaaggagaa

SEQ ID NO: 2416292 - RNA, 19 nt, Homo sapiens
  misc_RNA (1)...(19): siRNA sense strand
acuuccugcuggugagaau

SEQ ID NO: 2416293 - RNA, 19 nt, Homo sapiens
  misc_RNA (1)...(19): siRNA sense strand
ugucauuguagggaagaua

SEQ ID NO: 2416294 - RNA, 19 nt, Homo sapiens
  misc_RNA (1)...(19): siRNA sense strand
gggacaucaacaagaaguu

SEQ ID NO: 2416295 - RNA, 19 nt, Homo sapiens
  misc_RNA (1)...(19): siRNA sense strand
acaagacggaggacgggaa

SEQ ID NO: 2416296 - RNA, 19 nt, Homo sapiens
  misc_RNA (1)...(19): siRNA sense strand
gaggacgggaagaaggaga

SEQ ID NO: 2416297 - RNA, 19 nt, Homo sapiens
  misc_RNA (1)...(19): siRNA sense strand
aagaugucauuguagggaa

SEQ ID NO: 2416298 - RNA, 19 nt, Homo sapiens
  misc_RNA (1)...(19): siRNA sense strand
gggcagaaugugaagcuac

SEQ ID NO: 2416299 - RNA, 19 nt, Homo sapiens
  misc_RNA (1)...(19): siRNA sense strand
aagcgagaaacgacgggua

SEQ ID NO: 2416300 - RNA, 19 nt, Homo sapiens
  misc_RNA (1)...(19): siRNA sense strand
cggaggacgggaagaagga

SEQ ID NO: 2416301 - RNA, 19 nt, Homo sapiens
  misc_RNA (1)...(19): siRNA sense strand
gggugaagacggagcagca

SEQ ID NO: 2416302 - RNA, 19 nt, Homo sapiens
  misc_RNA (1)...(19): siRNA sense strand
gcuggaugcccaaggucaa

SEQ ID NO: 2416303 - RNA, 19 nt, Homo sapiens
  misc_RNA (1)...(19): siRNA sense strand
cgcaagagcuggaugccca

SEQ ID NO: 2416304 - RNA, 19 nt, Homo sapiens
  misc_RNA (1)...(19): siRNA sense strand
ucaaggugcucaaggcuga

SEQ ID NO: 2416305 - RNA, 19 nt, Homo sapiens
  misc_RNA (1)...(19): siRNA sense strand
cagugguggucaagggcca

SEQ ID NO: 2416306 - RNA, 19 nt, Homo sapiens
  misc_RNA (1)...(19): siRNA sense strand
acgugucagugguggucaa

SEQ ID NO: 2416307 - RNA, 19 nt, Homo sapiens
  misc_RNA (1)...(19): siRNA sense strand
augaggaggacgaggagga

SEQ ID NO: 2416308 - RNA, 19 nt, Homo sapiens
  misc_RNA (1)...(19): siRNA sense strand
aggaggacgaggaggagga

SEQ ID NO: 2416309 - RNA, 19 nt, Homo sapiens
  misc_RNA (1)...(19): siRNA sense strand
ccaacuucaaggagagcga

SEQ ID NO: 2416310 - RNA, 19 nt, Homo sapiens
  misc_RNA (1)...(19): siRNA sense strand
agggcauggaugagcagua

SEQ ID NO: 2416311 - RNA, 19 nt, Homo sapiens
  misc_RNA (1)...(19): siRNA sense strand
acaaugaggaggacgagga

SEQ ID NO: 2416312 - RNA, 19 nt, Homo sapiens
  misc_RNA (1)...(19): siRNA sense strand
caaagaggagcgagaauca

SEQ ID NO: 2416313 - RNA, 19 nt, Homo sapiens
  misc_RNA (1)...(19): siRNA sense strand
ccucuaaggcgcaagguga

SEQ ID NO: 2416314 - RNA, 19 nt, Homo sapiens
  misc_RNA (1)...(19): siRNA sense strand
cuaucuaauuggagaccuu

SEQ ID NO: 2416315 - RNA, 19 nt, Homo sapiens
  misc_RNA (1)...(19): siRNA sense strand
aaguggaagaacaggagaa

SEQ ID NO: 2416316 - RNA, 19 nt, Homo sapiens
  misc_RNA (1)...(19): siRNA sense strand
ucagcaaagaggagcgaga

SEQ ID NO: 2416317 - RNA, 19 nt, Homo sapiens
  misc_RNA (1)...(19): siRNA sense strand
aagcagaccuuuaacccua

SEQ ID NO: 2416318 - RNA, 19 nt, Homo sapiens
  misc_RNA (1)...(19): siRNA sense strand
gaaccaagccugacccuga

SEQ ID NO: 2416319 - RNA, 19 nt, Homo sapiens
  misc_RNA (1)...(19): siRNA sense strand
agcuguugccuuugggaaa

SEQ ID NO: 2416320 - RNA, 19 nt, Homo sapiens
  misc_RNA (1)...(19): siRNA sense strand
agcaaagaggagcgagaau

SEQ ID NO: 2416321 - RNA, 19 nt, Homo sapiens
  misc_RNA (1)...(19): siRNA sense strand
ggcaggucaaccagggaaa

SEQ ID NO: 2416322 - RNA, 19 nt, Homo sapiens
  misc_RNA (1)...(19): siRNA sense strand
ugggaaaggacuaucuaau

SEQ ID NO: 2416323 - RNA, 19 nt, Homo sapiens
  misc_RNA (1)...(19): siRNA sense strand
aggacuaucuaauuggaga

SEQ ID NO: 2416324 - RNA, 19 nt, Homo sapiens
  misc_RNA (1)...(19): siRNA sense strand
gcagauggcaggagcucca

SEQ ID NO: 2416325 - RNA, 19 nt, Homo sapiens
  misc_RNA (1)...(19): siRNA sense strand
acccugaaguggaagaaca

SEQ ID NO: 2416326 - RNA, 19 nt, Homo sapiens
  misc_RNA (1)...(19): siRNA sense strand
gcccagaagcagauccaga

SEQ ID NO: 2416327 - RNA, 19 nt, Homo sapiens
  misc_RNA (1)...(19): siRNA sense strand
caaagaggagcgagaauca

SEQ ID NO: 2416328 - RNA, 19 nt, Homo sapiens
  misc_RNA (1)...(19): siRNA sense strand
cuaucuaauuggagaccuu

SEQ ID NO: 2416329 - RNA, 19 nt, Homo sapiens
  misc_RNA (1)...(19): siRNA sense strand
aaguggaagaacaggagaa

SEQ ID NO: 2416330 - RNA, 19 nt, Homo sapiens
  misc_RNA (1)...(19): siRNA sense strand
ucagcaaagaggagcgaga

SEQ ID NO: 2416331 - RNA, 19 nt, Homo sapiens
  misc_RNA (1)...(19): siRNA sense strand
aagcagaccuuuaacccua

SEQ ID NO: 2416332 - RNA, 19 nt, Homo sapiens
  misc_RNA (1)...(19): siRNA sense strand
gaaccaagccugacccuga

SEQ ID NO: 2416333 - RNA, 19 nt, Homo sapiens
  misc_RNA (1)...(19): siRNA sense strand
agcuguugccuuugggaaa

SEQ ID NO: 2416334 - RNA, 19 nt, Homo sapiens
  misc_RNA (1)...(19): siRNA sense strand
agcaaagaggagcgagaau

SEQ ID NO: 2416335 - RNA, 19 nt, Homo sapiens
  misc_RNA (1)...(19): siRNA sense strand
ggcaggucaaccagggaaa

SEQ ID NO: 2416336 - RNA, 19 nt, Homo sapiens
  misc_RNA (1)...(19): siRNA sense strand
ugggaaaggacuaucuaau

SEQ ID NO: 2416337 - RNA, 19 nt, Homo sapiens
  misc_RNA (1)...(19): siRNA sense strand
aggacuaucuaauuggaga

SEQ ID NO: 2416338 - RNA, 19 nt, Homo sapiens
  misc_RNA (1)...(19): siRNA sense strand
gcagauggcaggagcucca

SEQ ID NO: 2416339 - RNA, 19 nt, Homo sapiens
  misc_RNA (1)...(19): siRNA sense strand
acccugaaguggaagaaca

SEQ ID NO: 2416340 - RNA, 19 nt, Homo sapiens
  misc_RNA (1)...(19): siRNA sense strand
gcccagaagcagauccaga

SEQ ID NO: 2416341 - RNA, 19 nt, Homo sapiens
  misc_RNA (1)...(19): siRNA sense strand
guguaaugaaugugagaaa

SEQ ID NO: 2416342 - RNA, 19 nt, Homo sapiens
  misc_RNA (1)...(19): siRNA sense strand
gggaaguggccgugcagaa

SEQ ID NO: 2416343 - RNA, 19 nt, Homo sapiens
  misc_RNA (1)...(19): siRNA sense strand
gagaaauccuucaggcaga

SEQ ID NO: 2416344 - RNA, 19 nt, Homo sapiens
  misc_RNA (1)...(19): siRNA sense strand
ggaaauaccuuuauccaga

SEQ ID NO: 2416345 - RNA, 19 nt, Homo sapiens
  misc_RNA (1)...(19): siRNA sense strand
ccaucaaucaauaaggaaa

SEQ ID NO: 2416346 - RNA, 19 nt, Homo sapiens
  misc_RNA (1)...(19): siRNA sense strand
guguaagacauguggaaaa

SEQ ID NO: 2416347 - RNA, 19 nt, Homo sapiens
  misc_RNA (1)...(19): siRNA sense strand
agccaaaggaugugaaaga

SEQ ID NO: 2416348 - RNA, 19 nt, Homo sapiens
  misc_RNA (1)...(19): siRNA sense strand
ggucauaccuuguuaggca

SEQ ID NO: 2416349 - RNA, 19 nt, Homo sapiens
  misc_RNA (1)...(19): siRNA sense strand
cauccaaauuuguaggaca

SEQ ID NO: 2416350 - RNA, 19 nt, Homo sapiens
  misc_RNA (1)...(19): siRNA sense strand
ggaaaugccuacaagcaga

SEQ ID NO: 2416351 - RNA, 19 nt, Homo sapiens
  misc_RNA (1)...(19): siRNA sense strand
accuauagauguagugaau

SEQ ID NO: 2416352 - RNA, 19 nt, Homo sapiens
  misc_RNA (1)...(19): siRNA sense strand
agccaugguuggaggaaga

SEQ ID NO: 2416353 - RNA, 19 nt, Homo sapiens
  misc_RNA (1)...(19): siRNA sense strand
ccaaaggaugugaaagaga

SEQ ID NO: 2416354 - RNA, 19 nt, Homo sapiens
  misc_RNA (1)...(19): siRNA sense strand
gguuggaggaagaggaagu

SEQ ID NO: 2416355 - RNA, 19 nt, Homo sapiens
  misc_RNA (1)...(19): siRNA sense strand
acagaaaauuaguuggcaa

SEQ ID NO: 2416356 - RNA, 19 nt, Homo sapiens
  misc_RNA (1)...(19): siRNA sense strand
uggcaauaauccauccaaa

SEQ ID NO: 2416357 - RNA, 19 nt, Homo sapiens
  misc_RNA (1)...(19): siRNA sense strand
aauacacacgggagagaaa

SEQ ID NO: 2416358 - RNA, 19 nt, Homo sapiens
  misc_RNA (1)...(19): siRNA sense strand
uugugaaacaccagagaau

SEQ ID NO: 2416359 - RNA, 19 nt, Homo sapiens
  misc_RNA (1)...(19): siRNA sense strand
agucaaaccuucauagcca

SEQ ID NO: 2416360 - RNA, 19 nt, Homo sapiens
  misc_RNA (1)...(19): siRNA sense strand
cgaugauaauggauacaga

SEQ ID NO: 2416361 - RNA, 19 nt, Homo sapiens
  misc_RNA (1)...(19): siRNA sense strand
caguguaagacauguggaa

SEQ ID NO: 2416362 - RNA, 19 nt, Homo sapiens
  misc_RNA (1)...(19): siRNA sense strand
ccuucauagccaucagaaa

SEQ ID NO: 2416363 - RNA, 19 nt, Homo sapiens
  misc_RNA (1)...(19): siRNA sense strand
ccgaugugaucuugagguu

SEQ ID NO: 2416364 - RNA, 19 nt, Homo sapiens
  misc_RNA (1)...(19): siRNA sense strand
agaaauccuaucaguguaa

SEQ ID NO: 2416365 - RNA, 19 nt, Homo sapiens
  misc_RNA (1)...(19): siRNA sense strand
cuucauagccaucagaaaa

SEQ ID NO: 2416366 - RNA, 19 nt, Homo sapiens
  misc_RNA (1)...(19): siRNA sense strand
agagaaacuuguacaggga

SEQ ID NO: 2416367 - RNA, 19 nt, Homo sapiens
  misc_RNA (1)...(19): siRNA sense strand
gggagaaguggaagcuuga

SEQ ID NO: 2416368 - RNA, 19 nt, Homo sapiens
  misc_RNA (1)...(19): siRNA sense strand
gugaaacaccagagaauac

SEQ ID NO: 2416369 - RNA, 19 nt, Homo sapiens
  misc_RNA (1)...(19): siRNA sense strand
agagaauacacacgggaga

SEQ ID NO: 2416370 - RNA, 19 nt, Homo sapiens
  misc_RNA (1)...(19): siRNA sense strand
ggcaauaauccauccaaau

SEQ ID NO: 2416371 - RNA, 19 nt, Homo sapiens
  misc_RNA (1)...(19): siRNA sense strand
ccaccaaacccgaugugau

SEQ ID NO: 2416372 - RNA, 19 nt, Homo sapiens
  misc_RNA (1)...(19): siRNA sense strand
cagaaaauuaguuggcaau

SEQ ID NO: 2416373 - RNA, 19 nt, Homo sapiens
  misc_RNA (1)...(19): siRNA sense strand
aggcagaacucaacccuca

SEQ ID NO: 2416374 - RNA, 19 nt, Homo sapiens
  misc_RNA (1)...(19): siRNA sense strand
gugugaucuauguggaaau

SEQ ID NO: 2416375 - RNA, 19 nt, Homo sapiens
  misc_RNA (1)...(19): siRNA sense strand
ugagguuggaacaaggaaa

SEQ ID NO: 2416376 - RNA, 19 nt, Homo sapiens
  misc_RNA (1)...(19): siRNA sense strand
augugagaacuguggaaau

SEQ ID NO: 2416377 - RNA, 19 nt, Homo sapiens
  misc_RNA (1)...(19): siRNA sense strand
ggggaaaagcccuaugaau

SEQ ID NO: 2416378 - RNA, 19 nt, Homo sapiens
  misc_RNA (1)...(19): siRNA sense strand
auguaacagauguggaaaa

SEQ ID NO: 2416379 - RNA, 19 nt, Homo sapiens
  misc_RNA (1)...(19): siRNA sense strand
auguagugaauguggaaaa

SEQ ID NO: 2416380 - RNA, 19 nt, Homo sapiens
  misc_RNA (1)...(19): siRNA sense strand
gcauaugugagaaggccuu

SEQ ID NO: 2416381 - RNA, 19 nt, Homo sapiens
  misc_RNA (1)...(19): siRNA sense strand
gggagagaaacccuauaaa

SEQ ID NO: 2416382 - RNA, 19 nt, Homo sapiens
  misc_RNA (1)...(19): siRNA sense strand
aagaggaagugcugggaag

SEQ ID NO: 2416383 - RNA, 19 nt, Homo sapiens
  misc_RNA (1)...(19): siRNA sense strand
agauguagugaauguggaa

SEQ ID NO: 2416384 - RNA, 19 nt, Homo sapiens
  misc_RNA (1)...(19): siRNA sense strand
gccuacaagcagaagucaa

SEQ ID NO: 2416385 - RNA, 19 nt, Homo sapiens
  misc_RNA (1)...(19): siRNA sense strand
ggaacaaggaaaggagcca

SEQ ID NO: 2416386 - RNA, 19 nt, Homo sapiens
  misc_RNA (1)...(19): siRNA sense strand
augucauagcuguggaaga

SEQ ID NO: 2416387 - RNA, 19 nt, Homo sapiens
  misc_RNA (1)...(19): siRNA sense strand
gagugugaucuauguggaa

SEQ ID NO: 2416388 - RNA, 19 nt, Homo sapiens
  misc_RNA (1)...(19): siRNA sense strand
auaccuuuauccagaagaa

SEQ ID NO: 2416389 - RNA, 19 nt, Homo sapiens
  misc_RNA (1)...(19): siRNA sense strand
caauguacggacuguggaa

SEQ ID NO: 2416390 - RNA, 19 nt, Homo sapiens
  misc_RNA (1)...(19): siRNA sense strand
gagaagucccaucaaucaa

SEQ ID NO: 2416391 - RNA, 19 nt, Homo sapiens
  misc_RNA (1)...(19): siRNA sense strand
caucaaucaauaaggaaac

SEQ ID NO: 2416392 - RNA, 19 nt, Homo sapiens
  misc_RNA (1)...(19): siRNA sense strand
caguguaaugaaugugaga

SEQ ID NO: 2416393 - RNA, 19 nt, Homo sapiens
  misc_RNA (1)...(19): siRNA sense strand
cuucaauuggagagggaga

SEQ ID NO: 2416394 - RNA, 19 nt, Homo sapiens
  misc_RNA (1)...(19): siRNA sense strand
aaauggagcacgaaggaga

SEQ ID NO: 2416395 - RNA, 19 nt, Homo sapiens
  misc_RNA (1)...(19): siRNA sense strand
gcaggaaggaagcucgcaa

SEQ ID NO: 2416396 - RNA, 19 nt, Homo sapiens
  misc_RNA (1)...(19): siRNA sense strand
caaccagagucgagaggug

SEQ ID NO: 2416397 - RNA, 19 nt, Homo sapiens
  misc_RNA (1)...(19): siRNA sense strand
agacauaguuuccugagca

SEQ ID NO: 2416398 - RNA, 19 nt, Homo sapiens
  misc_RNA (1)...(19): siRNA sense strand
ucagagacgcgcagaggga

SEQ ID NO: 2416399 - RNA, 19 nt, Homo sapiens
  misc_RNA (1)...(19): siRNA sense strand
gugaagaucugcaggaagg

SEQ ID NO: 2416400 - RNA, 19 nt, Homo sapiens
  misc_RNA (1)...(19): siRNA sense strand
agaccauugaugaggaaua

SEQ ID NO: 2416401 - RNA, 19 nt, Homo sapiens
  misc_RNA (1)...(19): siRNA sense strand
acauugaagaggaggaaaa

SEQ ID NO: 2416402 - RNA, 19 nt, Homo sapiens
  misc_RNA (1)...(19): siRNA sense strand
agaugauagacuugcaaua

SEQ ID NO: 2416403 - RNA, 19 nt, Homo sapiens
  misc_RNA (1)...(19): siRNA sense strand
gggccaugcugcugcucaa

SEQ ID NO: 2416404 - RNA, 19 nt, Homo sapiens
  misc_RNA (1)...(19): siRNA sense strand
aaggauggauggagguaca

SEQ ID NO: 2416405 - RNA, 19 nt, Homo sapiens
  misc_RNA (1)...(19): siRNA sense strand
ucugaugaagggagauaua

SEQ ID NO: 2416406 - RNA, 19 nt, Homo sapiens
  misc_RNA (1)...(19): siRNA sense strand
ggagguacauguugggacu

SEQ ID NO: 2416407 - RNA, 19 nt, Homo sapiens
  misc_RNA (1)...(19): siRNA sense strand
gcuuacaauuucugcccua

SEQ ID NO: 2416408 - RNA, 19 nt, Homo sapiens
  misc_RNA (1)...(19): siRNA sense strand
gaagauauauuuugggcuu

SEQ ID NO: 2416409 - RNA, 19 nt, Homo sapiens
  misc_RNA (1)...(19): siRNA sense strand
aauuguggguuguggccua

SEQ ID NO: 2416410 - RNA, 19 nt, Homo sapiens
  misc_RNA (1)...(19): siRNA sense strand
ugacagugccaguguacau

SEQ ID NO: 2416411 - RNA, 19 nt, Homo sapiens
  misc_RNA (1)...(19): siRNA sense strand
ugaugaagggagauauauu

SEQ ID NO: 2416412 - RNA, 19 nt, Homo sapiens
  misc_RNA (1)...(19): siRNA sense strand
ggguaaagggaaguaacua

SEQ ID NO: 2416413 - RNA, 19 nt, Homo sapiens
  misc_RNA (1)...(19): siRNA sense strand
caacauugaagaggaggaa

SEQ ID NO: 2416414 - RNA, 19 nt, Homo sapiens
  misc_RNA (1)...(19): siRNA sense strand
ucgauggcuuauucagaaa

SEQ ID NO: 2416415 - RNA, 19 nt, Homo sapiens
  misc_RNA (1)...(19): siRNA sense strand
gagcuuuaauuguggguug

SEQ ID NO: 2416416 - RNA, 19 nt, Homo sapiens
  misc_RNA (1)...(19): siRNA sense strand
ccaacaacaaggagacacu

SEQ ID NO: 2416417 - RNA, 19 nt, Homo sapiens
  misc_RNA (1)...(19): siRNA sense strand
agauucugaugaagggaga

SEQ ID NO: 2416418 - RNA, 19 nt, Homo sapiens
  misc_RNA (1)...(19): siRNA sense strand
acucagaaggcccguagaa

SEQ ID NO: 2416419 - RNA, 19 nt, Homo sapiens
  misc_RNA (1)...(19): siRNA sense strand
ggaccugugaucugcagaa

SEQ ID NO: 2416420 - RNA, 19 nt, Homo sapiens
  misc_RNA (1)...(19): siRNA sense strand
cagaacgccacuugcacaa

SEQ ID NO: 2416421 - RNA, 19 nt, Homo sapiens
  misc_RNA (1)...(19): siRNA sense strand
gggcaggugugaaaaugaa

SEQ ID NO: 2416422 - RNA, 19 nt, Homo sapiens
  misc_RNA (1)...(19): siRNA sense strand
ugggcaagaaguacaggaa

SEQ ID NO: 2416423 - RNA, 19 nt, Homo sapiens
  misc_RNA (1)...(19): siRNA sense strand
cuaucaucuuucugacaau

SEQ ID NO: 2416424 - RNA, 19 nt, Homo sapiens
  misc_RNA (1)...(19): siRNA sense strand
cagaaagagcagaagucaa

SEQ ID NO: 2416425 - RNA, 19 nt, Homo sapiens
  misc_RNA (1)...(19): siRNA sense strand
ugaaagaaguuccaggaga

SEQ ID NO: 2416426 - RNA, 19 nt, Homo sapiens
  misc_RNA (1)...(19): siRNA sense strand
cauaaaagggcaucagaaa

SEQ ID NO: 2416427 - RNA, 19 nt, Homo sapiens
  misc_RNA (1)...(19): siRNA sense strand
gcauacaguuggaccgaga

SEQ ID NO: 2416428 - RNA, 19 nt, Homo sapiens
  misc_RNA (1)...(19): siRNA sense strand
aguaagguuucaagaccaa

SEQ ID NO: 2416429 - RNA, 19 nt, Homo sapiens
  misc_RNA (1)...(19): siRNA sense strand
gaaacuaauucucagugaa

SEQ ID NO: 2416430 - RNA, 19 nt, Homo sapiens
  misc_RNA (1)...(19): siRNA sense strand
uagcauaacuacagagccu

SEQ ID NO: 2416431 - RNA, 19 nt, Homo sapiens
  misc_RNA (1)...(19): siRNA sense strand
ugaaacugcaccagaggaa

SEQ ID NO: 2416432 - RNA, 19 nt, Homo sapiens
  misc_RNA (1)...(19): siRNA sense strand
agaacauggaacagaauga

SEQ ID NO: 2416433 - RNA, 19 nt, Homo sapiens
  misc_RNA (1)...(19): siRNA sense strand
cugcagauguggagguuac

SEQ ID NO: 2416434 - RNA, 19 nt, Homo sapiens
  misc_RNA (1)...(19): siRNA sense strand
agaacugagccuuggaaca

SEQ ID NO: 2416435 - RNA, 19 nt, Homo sapiens
  misc_RNA (1)...(19): siRNA sense strand
augaacagaaagagcagaa

SEQ ID NO: 2416436 - RNA, 19 nt, Homo sapiens
  misc_RNA (1)...(19): siRNA sense strand
caguaagguuucaagacca

SEQ ID NO: 2416437 - RNA, 19 nt, Homo sapiens
  misc_RNA (1)...(19): siRNA sense strand
gagcagaagucaagugagc

SEQ ID NO: 2416438 - RNA, 19 nt, Homo sapiens
  misc_RNA (1)...(19): siRNA sense strand
ucuacagcccugaggacua

SEQ ID NO: 2416439 - RNA, 19 nt, Homo sapiens
  misc_RNA (1)...(19): siRNA sense strand
ccaccuacaaaguuagaau

SEQ ID NO: 2416440 - RNA, 19 nt, Homo sapiens
  misc_RNA (1)...(19): siRNA sense strand
cagaaggagcguucaugaa

SEQ ID NO: 2416441 - RNA, 19 nt, Homo sapiens
  misc_RNA (1)...(19): siRNA sense strand
uugaauguagaaugggaua

SEQ ID NO: 2416442 - RNA, 19 nt, Homo sapiens
  misc_RNA (1)...(19): siRNA sense strand
acuuaauucucaaucgcaa

SEQ ID NO: 2416443 - RNA, 19 nt, Homo sapiens
  misc_RNA (1)...(19): siRNA sense strand
gggugaucagcuugaaauu

SEQ ID NO: 2416444 - RNA, 19 nt, Homo sapiens
  misc_RNA (1)...(19): siRNA sense strand
cgcccaagaaccugaagaa

SEQ ID NO: 2416445 - RNA, 19 nt, Homo sapiens
  misc_RNA (1)...(19): siRNA sense strand
cagacaagggucaggcuca

SEQ ID NO: 2416446 - RNA, 19 nt, Homo sapiens
  misc_RNA (1)...(19): siRNA sense strand
agaaacagacuuugccaga

SEQ ID NO: 2416447 - RNA, 19 nt, Homo sapiens
  misc_RNA (1)...(19): siRNA sense strand
cuacaaaguuagaaucuuc

SEQ ID NO: 2416448 - RNA, 19 nt, Homo sapiens
  misc_RNA (1)...(19): siRNA sense strand
ugaugaagcuucucagcga

SEQ ID NO: 2416449 - RNA, 19 nt, Homo sapiens
  misc_RNA (1)...(19): siRNA sense strand
gauuauuugaguauggaca

SEQ ID NO: 2416450 - RNA, 19 nt, Homo sapiens
  misc_RNA (1)...(19): siRNA sense strand
auaaaagggcaucagaaaa

SEQ ID NO: 2416451 - RNA, 19 nt, Homo sapiens
  misc_RNA (1)...(19): siRNA sense strand
acugaaucaugaagugaca

SEQ ID NO: 2416452 - RNA, 19 nt, Homo sapiens
  misc_RNA (1)...(19): siRNA sense strand
auacaguuggaccgagaaa

SEQ ID NO: 2416453 - RNA, 19 nt, Homo sapiens
  misc_RNA (1)...(19): siRNA sense strand
gcccaagaaccugaagaaa

SEQ ID NO: 2416454 - RNA, 19 nt, Homo sapiens
  misc_RNA (1)...(19): siRNA sense strand
uauccaaaccucagcguca

SEQ ID NO: 2416455 - RNA, 19 nt, Homo sapiens
  misc_RNA (1)...(19): siRNA sense strand
gcaucaacuugucaggcuu

SEQ ID NO: 2416456 - RNA, 19 nt, Homo sapiens
  misc_RNA (1)...(19): siRNA sense strand
ugccagagcccgacaccua

SEQ ID NO: 2416457 - RNA, 19 nt, Homo sapiens
  misc_RNA (1)...(19): siRNA sense strand
guuucaagaccaaccaaau

SEQ ID NO: 2416458 - RNA, 19 nt, Homo sapiens
  misc_RNA (1)...(19): siRNA sense strand
cauuauaauuugcccaagu

SEQ ID NO: 2416459 - RNA, 19 nt, Homo sapiens
  misc_RNA (1)...(19): siRNA sense strand
aaacugcaccagaggaaca

SEQ ID NO: 2416460 - RNA, 19 nt, Homo sapiens
  misc_RNA (1)...(19): siRNA sense strand
gugcaagggagcugugcca

SEQ ID NO: 2416461 - RNA, 19 nt, Homo sapiens
  misc_RNA (1)...(19): siRNA sense strand
cccaagaaccugaagaaag

SEQ ID NO: 2416462 - RNA, 19 nt, Homo sapiens
  misc_RNA (1)...(19): siRNA sense strand
uauggagagucuagcucaa

SEQ ID NO: 2416463 - RNA, 19 nt, Homo sapiens
  misc_RNA (1)...(19): siRNA sense strand
auucauuggugcagucuga

SEQ ID NO: 2416464 - RNA, 19 nt, Homo sapiens
  misc_RNA (1)...(19): siRNA sense strand
gccaagugccugugccaga

SEQ ID NO: 2416465 - RNA, 19 nt, Homo sapiens
  misc_RNA (1)...(19): siRNA sense strand
aagaagcaucuguagggaa

SEQ ID NO: 2416466 - RNA, 19 nt, Homo sapiens
  misc_RNA (1)...(19): siRNA sense strand
cugcacaucaggacuuaaa

SEQ ID NO: 2416467 - RNA, 19 nt, Homo sapiens
  misc_RNA (1)...(19): siRNA sense strand
ugaagaaagaucuagcuga

SEQ ID NO: 2416468 - RNA, 19 nt, Homo sapiens
  misc_RNA (1)...(19): siRNA sense strand
agaacccacuacagagauu

SEQ ID NO: 2416469 - RNA, 19 nt, Homo sapiens
  misc_RNA (1)...(19): siRNA sense strand
auaccuugauggaaaugua

SEQ ID NO: 2416470 - RNA, 19 nt, Homo sapiens
  misc_RNA (1)...(19): siRNA sense strand
acugaauuaccuaaggauu

SEQ ID NO: 2416471 - RNA, 19 nt, Homo sapiens
  misc_RNA (1)...(19): siRNA sense strand
acauggaacagaaugaaca

SEQ ID NO: 2416472 - RNA, 19 nt, Homo sapiens
  misc_RNA (1)...(19): siRNA sense strand
cgugaaaaugcuacaguua

SEQ ID NO: 2416473 - RNA, 19 nt, Homo sapiens
  misc_RNA (1)...(19): siRNA sense strand
agguacaauaaauggcuua

SEQ ID NO: 2416474 - RNA, 19 nt, Homo sapiens
  misc_RNA (1)...(19): siRNA sense strand
aagagauggagaaaguaaa

SEQ ID NO: 2416475 - RNA, 19 nt, Homo sapiens
  misc_RNA (1)...(19): siRNA sense strand
uggcagagacgcugggacu

SEQ ID NO: 2416476 - RNA, 19 nt, Homo sapiens
  misc_RNA (1)...(19): siRNA sense strand
ggagaaaguaaaacgugaa

SEQ ID NO: 2416477 - RNA, 19 nt, Homo sapiens
  misc_RNA (1)...(19): siRNA sense strand
uuugugaagaagacaguua

SEQ ID NO: 2416478 - RNA, 19 nt, Homo sapiens
  misc_RNA (1)...(19): siRNA sense strand
gagaaaguaaaacgugaaa

SEQ ID NO: 2416479 - RNA, 19 nt, Homo sapiens
  misc_RNA (1)...(19): siRNA sense strand
agagauggagaaaguaaaa

SEQ ID NO: 2416480 - RNA, 19 nt, Homo sapiens
  misc_RNA (1)...(19): siRNA sense strand
uugggaagccagagagaca

SEQ ID NO: 2416481 - RNA, 19 nt, Homo sapiens
  misc_RNA (1)...(19): siRNA sense strand
caaacgaucugcuugggaa

SEQ ID NO: 2416482 - RNA, 19 nt, Homo sapiens
  misc_RNA (1)...(19): siRNA sense strand
gugccgugguugaggggua

SEQ ID NO: 2416483 - RNA, 19 nt, Homo sapiens
  misc_RNA (1)...(19): siRNA sense strand
gcuugcacacccagggcua

SEQ ID NO: 2416484 - RNA, 19 nt, Homo sapiens
  misc_RNA (1)...(19): siRNA sense strand
ggaugauggcaggguguau

SEQ ID NO: 2416485 - RNA, 19 nt, Homo sapiens
  misc_RNA (1)...(19): siRNA sense strand
gggaagccagagagacaca

SEQ ID NO: 2416486 - RNA, 19 nt, Homo sapiens
  misc_RNA (1)...(19): siRNA sense strand
ccaacuacccagaggacua

SEQ ID NO: 2416487 - RNA, 19 nt, Homo sapiens
  misc_RNA (1)...(19): siRNA sense strand
cggaagagcagcacagaau

SEQ ID NO: 2416488 - RNA, 19 nt, Homo sapiens
  misc_RNA (1)...(19): siRNA sense strand
ccuuugagcuggugggaca

SEQ ID NO: 2416489 - RNA, 19 nt, Homo sapiens
  misc_RNA (1)...(19): siRNA sense strand
gcacaggagaagacccaaa

SEQ ID NO: 2416490 - RNA, 19 nt, Homo sapiens
  misc_RNA (1)...(19): siRNA sense strand
gcauauggccggagggaag

SEQ ID NO: 2416491 - RNA, 19 nt, Homo sapiens
  misc_RNA (1)...(19): siRNA sense strand
gcgcugggcucuauggcaa

SEQ ID NO: 2416492 - RNA, 19 nt, Homo sapiens
  misc_RNA (1)...(19): siRNA sense strand
ggucaaugguaccuggaca

SEQ ID NO: 2416493 - RNA, 19 nt, Homo sapiens
  misc_RNA (1)...(19): siRNA sense strand
gcuauaugauggagucaca

SEQ ID NO: 2416494 - RNA, 19 nt, Homo sapiens
  misc_RNA (1)...(19): siRNA sense strand
ccaacuuuccugugaacua

SEQ ID NO: 2416495 - RNA, 19 nt, Homo sapiens
  misc_RNA (1)...(19): siRNA sense strand
acaacaaaacugugacaua

SEQ ID NO: 2416496 - RNA, 19 nt, Homo sapiens
  misc_RNA (1)...(19): siRNA sense strand
ugucaagggccaaggcuuu

SEQ ID NO: 2416497 - RNA, 19 nt, Homo sapiens
  misc_RNA (1)...(19): siRNA sense strand
gcuacgaaguugagggcac

SEQ ID NO: 2416498 - RNA, 19 nt, Homo sapiens
  misc_RNA (1)...(19): siRNA sense strand
cuacauagaaauccggaau

SEQ ID NO: 2416499 - RNA, 19 nt, Homo sapiens
  misc_RNA (1)...(19): siRNA sense strand
cgucacagagaaugaagaa

SEQ ID NO: 2416500 - RNA, 19 nt, Homo sapiens
  misc_RNA (1)...(19): siRNA sense strand
uggacagcgucaugggaau

SEQ ID NO: 2416501 - RNA, 19 nt, Homo sapiens
  misc_RNA (1)...(19): siRNA sense strand
aguuugggauacagaacaa

SEQ ID NO: 2416502 - RNA, 19 nt, Homo sapiens
  misc_RNA (1)...(19): siRNA sense strand
gggaagaagcagccagcca

SEQ ID NO: 2416503 - RNA, 19 nt, Homo sapiens
  misc_RNA (1)...(19): siRNA sense strand
cgaagucgucacagagaau

SEQ ID NO: 2416504 - RNA, 19 nt, Homo sapiens
  misc_RNA (1)...(19): siRNA sense strand
ggacagaaggcaaucacau

SEQ ID NO: 2416505 - RNA, 19 nt, Homo sapiens
  misc_RNA (1)...(19): siRNA sense strand
gcgaugcaucugugagcaa

SEQ ID NO: 2416506 - RNA, 19 nt, Homo sapiens
  misc_RNA (1)...(19): siRNA sense strand
caguaaauggacagcguca

SEQ ID NO: 2416507 - RNA, 19 nt, Homo sapiens
  misc_RNA (1)...(19): siRNA sense strand
ggauacagccugcggggua

SEQ ID NO: 2416508 - RNA, 19 nt, Homo sapiens
  misc_RNA (1)...(19): siRNA sense strand
cugagugccucgucauaaa

SEQ ID NO: 2416509 - RNA, 19 nt, Homo sapiens
  misc_RNA (1)...(19): siRNA sense strand
auggaaugguguuuggcaa

SEQ ID NO: 2416510 - RNA, 19 nt, Homo sapiens
  misc_RNA (1)...(19): siRNA sense strand
cgaaaggggcaaaagacua

SEQ ID NO: 2416511 - RNA, 19 nt, Homo sapiens
  misc_RNA (1)...(19): siRNA sense strand
gauucaaaaccgaggucaa

SEQ ID NO: 2416512 - RNA, 19 nt, Homo sapiens
  misc_RNA (1)...(19): siRNA sense strand
ucacaugccaaaagaauaa

SEQ ID NO: 2416513 - RNA, 19 nt, Homo sapiens
  misc_RNA (1)...(19): siRNA sense strand
aguaucaggauuugacuua

SEQ ID NO: 2416514 - RNA, 19 nt, Homo sapiens
  misc_RNA (1)...(19): siRNA sense strand
gugugaagaucgagaacag

SEQ ID NO: 2416515 - RNA, 19 nt, Homo sapiens
  misc_RNA (1)...(19): siRNA sense strand
ggaaguauuugauggugca

SEQ ID NO: 2416516 - RNA, 19 nt, Homo sapiens
  misc_RNA (1)...(19): siRNA sense strand
cccaauaccaagucaagaa

SEQ ID NO: 2416517 - RNA, 19 nt, Homo sapiens
  misc_RNA (1)...(19): siRNA sense strand
cggugaugguggucaggau

SEQ ID NO: 2416518 - RNA, 19 nt, Homo sapiens
  misc_RNA (1)...(19): siRNA sense strand
gggaagcccguguggaaca

SEQ ID NO: 2416519 - RNA, 19 nt, Homo sapiens
  misc_RNA (1)...(19): siRNA sense strand
caaauuacccagaacccua

SEQ ID NO: 2416520 - RNA, 19 nt, Homo sapiens
  misc_RNA (1)...(19): siRNA sense strand
auugaaagcagcagcaaca

SEQ ID NO: 2416521 - RNA, 19 nt, Homo sapiens
  misc_RNA (1)...(19): siRNA sense strand
ggggaacaguggaggagau

SEQ ID NO: 2416522 - RNA, 19 nt, Homo sapiens
  misc_RNA (1)...(19): siRNA sense strand
augggaagauucaguggaa

SEQ ID NO: 2416523 - RNA, 19 nt, Homo sapiens
  misc_RNA (1)...(19): siRNA sense strand
ccgaagucgucacagagaa

SEQ ID NO: 2416524 - RNA, 19 nt, Homo sapiens
  misc_RNA (1)...(19): siRNA sense strand
acacaggccuauggagcaa

SEQ ID NO: 2416525 - RNA, 19 nt, Homo sapiens
  misc_RNA (1)...(19): siRNA sense strand
ggaccaucaccgcggaaga

SEQ ID NO: 2416526 - RNA, 19 nt, Homo sapiens
  misc_RNA (1)...(19): siRNA sense strand
ggaaaguggccaugacuac

SEQ ID NO: 2416527 - RNA, 19 nt, Homo sapiens
  misc_RNA (1)...(19): siRNA sense strand
acccagaggacuauggcaa

SEQ ID NO: 2416528 - RNA, 19 nt, Homo sapiens
  misc_RNA (1)...(19): siRNA sense strand
acgacgugguggagguuca

SEQ ID NO: 2416529 - RNA, 19 nt, Homo sapiens
  misc_RNA (1)...(19): siRNA sense strand
cauuaaguucagcgccaaa

SEQ ID NO: 2416530 - RNA, 19 nt, Homo sapiens
  misc_RNA (1)...(19): siRNA sense strand
gcuucuuccuggagggcca

SEQ ID NO: 2416531 - RNA, 19 nt, Homo sapiens
  misc_RNA (1)...(19): siRNA sense strand
cggcugcaccauugggcua

SEQ ID NO: 2416532 - RNA, 19 nt, Homo sapiens
  misc_RNA (1)...(19): siRNA sense strand
ccucggaguaccauaacaa

SEQ ID NO: 2416533 - RNA, 19 nt, Homo sapiens
  misc_RNA (1)...(19): siRNA sense strand
uguaugaaagugagcgaca

SEQ ID NO: 2416534 - RNA, 19 nt, Homo sapiens
  misc_RNA (1)...(19): siRNA sense strand
ccauucaguaugacaacaa

SEQ ID NO: 2416535 - RNA, 19 nt, Homo sapiens
  misc_RNA (1)...(19): siRNA sense strand
augggaagcccguguggaa

SEQ ID NO: 2416536 - RNA, 19 nt, Homo sapiens
  misc_RNA (1)...(19): siRNA sense strand
agauccaaguugucaguuu

SEQ ID NO: 2416537 - RNA, 19 nt, Homo sapiens
  misc_RNA (1)...(19): siRNA sense strand
gcggaagagcagcacagaa

SEQ ID NO: 2416538 - RNA, 19 nt, Homo sapiens
  misc_RNA (1)...(19): siRNA sense strand
acauugacguggagccuca

SEQ ID NO: 2416539 - RNA, 19 nt, Homo sapiens
  misc_RNA (1)...(19): siRNA sense strand
auucaaggcuccaguggga

SEQ ID NO: 2416540 - RNA, 19 nt, Homo sapiens
  misc_RNA (1)...(19): siRNA sense strand
cagcugaaagccagggcau

SEQ ID NO: 2416541 - RNA, 19 nt, Homo sapiens
  misc_RNA (1)...(19): siRNA sense strand
gggaguuucucaggaacaa

SEQ ID NO: 2416542 - RNA, 19 nt, Homo sapiens
  misc_RNA (1)...(19): siRNA sense strand
ccuacaaucggaagggcuu

SEQ ID NO: 2416543 - RNA, 19 nt, Homo sapiens
  misc_RNA (1)...(19): siRNA sense strand
ugggagcaguggugcggua

SEQ ID NO: 2416544 - RNA, 19 nt, Homo sapiens
  misc_RNA (1)...(19): siRNA sense strand
ccgcgauccuggugccuuu

SEQ ID NO: 2416545 - RNA, 19 nt, Homo sapiens
  misc_RNA (1)...(19): siRNA sense strand
uugaacugcaccuggauua

SEQ ID NO: 2416546 - RNA, 19 nt, Homo sapiens
  misc_RNA (1)...(19): siRNA sense strand
uuacugugcccaaggacua

SEQ ID NO: 2416547 - RNA, 19 nt, Homo sapiens
  misc_RNA (1)...(19): siRNA sense strand
ggagugaucucuuguggga

SEQ ID NO: 2416548 - RNA, 19 nt, Homo sapiens
  misc_RNA (1)...(19): siRNA sense strand
ccuaugaauaccaggggaa

SEQ ID NO: 2416549 - RNA, 19 nt, Homo sapiens
  misc_RNA (1)...(19): siRNA sense strand
ucaccugcaacgagggcua

SEQ ID NO: 2416550 - RNA, 19 nt, Homo sapiens
  misc_RNA (1)...(19): siRNA sense strand
aguauuugauggugcagau

SEQ ID NO: 2416551 - RNA, 19 nt, Homo sapiens
  misc_RNA (1)...(19): siRNA sense strand
guucaaagccaccacccaa

SEQ ID NO: 2416552 - RNA, 19 nt, Homo sapiens
  misc_RNA (1)...(19): siRNA sense strand
cagcaucagaggaggacau

SEQ ID NO: 2416553 - RNA, 19 nt, Homo sapiens
  misc_RNA (1)...(19): siRNA sense strand
ggagggaucugcagaggga

SEQ ID NO: 2416554 - RNA, 19 nt, Homo sapiens
  misc_RNA (1)...(19): siRNA sense strand
cuucaauggacaaauggaa

SEQ ID NO: 2416555 - RNA, 19 nt, Homo sapiens
  misc_RNA (1)...(19): siRNA sense strand
caaugagagcaguggagca

SEQ ID NO: 2416556 - RNA, 19 nt, Homo sapiens
  misc_RNA (1)...(19): siRNA sense strand
caucaguccaaguggcaca

SEQ ID NO: 2416557 - RNA, 19 nt, Homo sapiens
  misc_RNA (1)...(19): siRNA sense strand
aggaggacccugugagcaa

SEQ ID NO: 2416558 - RNA, 19 nt, Homo sapiens
  misc_RNA (1)...(19): siRNA sense strand
guggcaaagcagaaacaaa

SEQ ID NO: 2416559 - RNA, 19 nt, Homo sapiens
  misc_RNA (1)...(19): siRNA sense strand
agguggaggugcugggcau

SEQ ID NO: 2416560 - RNA, 19 nt, Homo sapiens
  misc_RNA (1)...(19): siRNA sense strand
agaagcaucuggagcgaca

SEQ ID NO: 2416561 - RNA, 19 nt, Homo sapiens
  misc_RNA (1)...(19): siRNA sense strand
gcuccuggguccuugggaa

SEQ ID NO: 2416562 - RNA, 19 nt, Homo sapiens
  misc_RNA (1)...(19): siRNA sense strand
aaacaaagcucccugggca

SEQ ID NO: 2416563 - RNA, 19 nt, Homo sapiens
  misc_RNA (1)...(19): siRNA sense strand
gaucuuguauugucgggaa

SEQ ID NO: 2416564 - RNA, 19 nt, Homo sapiens
  misc_RNA (1)...(19): siRNA sense strand
aggagacauuggaggcaca

SEQ ID NO: 2416565 - RNA, 19 nt, Homo sapiens
  misc_RNA (1)...(19): siRNA sense strand
ccauggagguggaggugcu

SEQ ID NO: 2416566 - RNA, 19 nt, Homo sapiens
  misc_RNA (1)...(19): siRNA sense strand
ugagaaagguggauccugu

SEQ ID NO: 2416567 - RNA, 19 nt, Homo sapiens
  misc_RNA (1)...(19): siRNA sense strand
aaggaggagcccagguauu

SEQ ID NO: 2416568 - RNA, 19 nt, Homo sapiens
  misc_RNA (1)...(19): siRNA sense strand
ugcuggaaguagaaagaca

SEQ ID NO: 2416569 - RNA, 19 nt, Homo sapiens
  misc_RNA (1)...(19): siRNA sense strand
gggaaaagcagaagcuauc

SEQ ID NO: 2416570 - RNA, 19 nt, Homo sapiens
  misc_RNA (1)...(19): siRNA sense strand
auacagugucaccgaggaa

SEQ ID NO: 2416571 - RNA, 19 nt, Homo sapiens
  misc_RNA (1)...(19): siRNA sense strand
cucugugucuauagguaaa

SEQ ID NO: 2416572 - RNA, 19 nt, Homo sapiens
  misc_RNA (1)...(19): siRNA sense strand
ccaggcaguuagaccgcaa

SEQ ID NO: 2416573 - RNA, 19 nt, Homo sapiens
  misc_RNA (1)...(19): siRNA sense strand
ccgugaaaacugagcccaa

SEQ ID NO: 2416574 - RNA, 19 nt, Homo sapiens
  misc_RNA (1)...(19): siRNA sense strand
aauccucagaugacagaaa

SEQ ID NO: 2416575 - RNA, 19 nt, Homo sapiens
  misc_RNA (1)...(19): siRNA sense strand
gcuggaaguagaaagacau

SEQ ID NO: 2416576 - RNA, 19 nt, Homo sapiens
  misc_RNA (1)...(19): siRNA sense strand
gcugggacgagaagggcau

SEQ ID NO: 2416577 - RNA, 19 nt, Homo sapiens
  misc_RNA (1)...(19): siRNA sense strand
acucugugucuauagguaa

SEQ ID NO: 2416578 - RNA, 19 nt, Homo sapiens
  misc_RNA (1)...(19): siRNA sense strand
aacaaagcucccugggcaa

SEQ ID NO: 2416579 - RNA, 19 nt, Homo sapiens
  misc_RNA (1)...(19): siRNA sense strand
aggcaaagauuauggacaa

SEQ ID NO: 2416580 - RNA, 19 nt, Homo sapiens
  misc_RNA (1)...(19): siRNA sense strand
gguaauaauagcagaagaa

SEQ ID NO: 2416581 - RNA, 19 nt, Homo sapiens
  misc_RNA (1)...(19): siRNA sense strand
gcaaguuaccagagagaau

SEQ ID NO: 2416582 - RNA, 19 nt, Homo sapiens
  misc_RNA (1)...(19): siRNA sense strand
uggaagaacaaguggaaau

SEQ ID NO: 2416583 - RNA, 19 nt, Homo sapiens
  misc_RNA (1)...(19): siRNA sense strand
ggaucaagcaccagaauau

SEQ ID NO: 2416584 - RNA, 19 nt, Homo sapiens
  misc_RNA (1)...(19): siRNA sense strand
aagcaauggucaugaagua

SEQ ID NO: 2416585 - RNA, 19 nt, Homo sapiens
  misc_RNA (1)...(19): siRNA sense strand
gcaaacugcacauggguaa

SEQ ID NO: 2416586 - RNA, 19 nt, Homo sapiens
  misc_RNA (1)...(19): siRNA sense strand
uggaagaccuggauggaau

SEQ ID NO: 2416587 - RNA, 19 nt, Homo sapiens
  misc_RNA (1)...(19): siRNA sense strand
acccaaaccucuugugaaa

SEQ ID NO: 2416588 - RNA, 19 nt, Homo sapiens
  misc_RNA (1)...(19): siRNA sense strand
cuuaauggcacuauagaaa

SEQ ID NO: 2416589 - RNA, 19 nt, Homo sapiens
  misc_RNA (1)...(19): siRNA sense strand
gggaaagacaacagcaaca

SEQ ID NO: 2416590 - RNA, 19 nt, Homo sapiens
  misc_RNA (1)...(19): siRNA sense strand
caauaacagcuaagggauu

SEQ ID NO: 2416591 - RNA, 19 nt, Homo sapiens
  misc_RNA (1)...(19): siRNA sense strand
ccaaauggacaaugggaca

SEQ ID NO: 2416592 - RNA, 19 nt, Homo sapiens
  misc_RNA (1)...(19): siRNA sense strand
aggauuuauucaaggcaaa

SEQ ID NO: 2416593 - RNA, 19 nt, Homo sapiens
  misc_RNA (1)...(19): siRNA sense strand
cagaauaugucaagcagau

SEQ ID NO: 2416594 - RNA, 19 nt, Homo sapiens
  misc_RNA (1)...(19): siRNA sense strand
cggauaagauauauagcuu

SEQ ID NO: 2416595 - RNA, 19 nt, Homo sapiens
  misc_RNA (1)...(19): siRNA sense strand
ggguaauaauagcagaaga

SEQ ID NO: 2416596 - RNA, 19 nt, Homo sapiens
  misc_RNA (1)...(19): siRNA sense strand
auauaugguuggagaugua

SEQ ID NO: 2416597 - RNA, 19 nt, Homo sapiens
  misc_RNA (1)...(19): siRNA sense strand
cagaagaacgaaauagaau

SEQ ID NO: 2416598 - RNA, 19 nt, Homo sapiens
  misc_RNA (1)...(19): siRNA sense strand
cuggauauccugacaguua

SEQ ID NO: 2416599 - RNA, 19 nt, Homo sapiens
  misc_RNA (1)...(19): siRNA sense strand
aguuagugcucauggauuu

SEQ ID NO: 2416600 - RNA, 19 nt, Homo sapiens
  misc_RNA (1)...(19): siRNA sense strand
ggucaagucauuggagaaa

SEQ ID NO: 2416601 - RNA, 19 nt, Homo sapiens
  misc_RNA (1)...(19): siRNA sense strand
gcucuagacaggaaagcaa

SEQ ID NO: 2416602 - RNA, 19 nt, Homo sapiens
  misc_RNA (1)...(19): siRNA sense strand
gaguagcucuuguggaaau

SEQ ID NO: 2416603 - RNA, 19 nt, Homo sapiens
  misc_RNA (1)...(19): siRNA sense strand
ccuugaaccuugugaagau

SEQ ID NO: 2416604 - RNA, 19 nt, Homo sapiens
  misc_RNA (1)...(19): siRNA sense strand
ggauuauaaauuaggguca

SEQ ID NO: 2416605 - RNA, 19 nt, Homo sapiens
  misc_RNA (1)...(19): siRNA sense strand
aauaauagcagaagaacga

SEQ ID NO: 2416606 - RNA, 19 nt, Homo sapiens
  misc_RNA (1)...(19): siRNA sense strand
ggaaauuaguggaucucuu

SEQ ID NO: 2416607 - RNA, 19 nt, Homo sapiens
  misc_RNA (1)...(19): siRNA sense strand
cagccaauggacugagaua

SEQ ID NO: 2416608 - RNA, 19 nt, Homo sapiens
  misc_RNA (1)...(19): siRNA sense strand
caacgaauaaugaaggaau

SEQ ID NO: 2416609 - RNA, 19 nt, Homo sapiens
  misc_RNA (1)...(19): siRNA sense strand
caaggagaggaaagaauaa

SEQ ID NO: 2416610 - RNA, 19 nt, Homo sapiens
  misc_RNA (1)...(19): siRNA sense strand
uagaagaagaauacgacua

SEQ ID NO: 2416611 - RNA, 19 nt, Homo sapiens
  misc_RNA (1)...(19): siRNA sense strand
cuuaaaugagggagguauu

SEQ ID NO: 2416612 - RNA, 19 nt, Homo sapiens
  misc_RNA (1)...(19): siRNA sense strand
ugagguagauccuggaaau

SEQ ID NO: 2416613 - RNA, 19 nt, Homo sapiens
  misc_RNA (1)...(19): siRNA sense strand
cuggauacccugagccuua

SEQ ID NO: 2416614 - RNA, 19 nt, Homo sapiens
  misc_RNA (1)...(19): siRNA sense strand
uugaauggcuccagaauca

SEQ ID NO: 2416615 - RNA, 19 nt, Homo sapiens
  misc_RNA (1)...(19): siRNA sense strand
cagaaaaugggaagagaau

SEQ ID NO: 2416616 - RNA, 19 nt, Homo sapiens
  misc_RNA (1)...(19): siRNA sense strand
ggauaugucaacaggauca

SEQ ID NO: 2416617 - RNA, 19 nt, Homo sapiens
  misc_RNA (1)...(19): siRNA sense strand
ggaggaacaaugagaggau

SEQ ID NO: 2416618 - RNA, 19 nt, Homo sapiens
  misc_RNA (1)...(19): siRNA sense strand
auacaagaucagugaccaa

SEQ ID NO: 2416619 - RNA, 19 nt, Homo sapiens
  misc_RNA (1)...(19): siRNA sense strand
ugaagaaaaugaaggaaga

SEQ ID NO: 2416620 - RNA, 19 nt, Homo sapiens
  misc_RNA (1)...(19): siRNA sense strand
caaagucaguggaagggaa

SEQ ID NO: 2416621 - RNA, 19 nt, Homo sapiens
  misc_RNA (1)...(19): siRNA sense strand
uagagaaggcgauggauuu

SEQ ID NO: 2416622 - RNA, 19 nt, Homo sapiens
  misc_RNA (1)...(19): siRNA sense strand
ggaaggaacaucagagauc

SEQ ID NO: 2416623 - RNA, 19 nt, Homo sapiens
  misc_RNA (1)...(19): siRNA sense strand
caucuagaauacaaagcaa

SEQ ID NO: 2416624 - RNA, 19 nt, Homo sapiens
  misc_RNA (1)...(19): siRNA sense strand
agacacaguuguauaucaa

SEQ ID NO: 2416625 - RNA, 19 nt, Homo sapiens
  misc_RNA (1)...(19): siRNA sense strand
cuucuuagcagguggaaca

SEQ ID NO: 2416626 - RNA, 19 nt, Homo sapiens
  misc_RNA (1)...(19): siRNA sense strand
auuccugcauggagggaua

SEQ ID NO: 2416627 - RNA, 19 nt, Homo sapiens
  misc_RNA (1)...(19): siRNA sense strand
ugagauauggagaugauua

SEQ ID NO: 2416628 - RNA, 19 nt, Homo sapiens
  misc_RNA (1)...(19): siRNA sense strand
acgaagaauugcagaguag

SEQ ID NO: 2416629 - RNA, 19 nt, Homo sapiens
  misc_RNA (1)...(19): siRNA sense strand
ccauaugguuaucuggaau

SEQ ID NO: 2416630 - RNA, 19 nt, Homo sapiens
  misc_RNA (1)...(19): siRNA sense strand
gggcgaaguuggagauccu

SEQ ID NO: 2416631 - RNA, 19 nt, Homo sapiens
  misc_RNA (1)...(19): siRNA sense strand
cauuguuugucaagagaau

SEQ ID NO: 2416632 - RNA, 19 nt, Homo sapiens
  misc_RNA (1)...(19): siRNA sense strand
uguuaaagauggugacucu

SEQ ID NO: 2416633 - RNA, 19 nt, Homo sapiens
  misc_RNA (1)...(19): siRNA sense strand
cagcaaguuaccagagaga

SEQ ID NO: 2416634 - RNA, 19 nt, Homo sapiens
  misc_RNA (1)...(19): siRNA sense strand
ccaauuuauggaagaacaa

SEQ ID NO: 2416635 - RNA, 19 nt, Homo sapiens
  misc_RNA (1)...(19): siRNA sense strand
ugaagaugcuuguggagga

SEQ ID NO: 2416636 - RNA, 19 nt, Homo sapiens
  misc_RNA (1)...(19): siRNA sense strand
cagacuugauagugagcau

SEQ ID NO: 2416637 - RNA, 19 nt, Homo sapiens
  misc_RNA (1)...(19): siRNA sense strand
ccaguuuggguuugaauua

SEQ ID NO: 2416638 - RNA, 19 nt, Homo sapiens
  misc_RNA (1)...(19): siRNA sense strand
ugauguaacccauggaaaa

SEQ ID NO: 2416639 - RNA, 19 nt, Homo sapiens
  misc_RNA (1)...(19): siRNA sense strand
aggagauguucuuaagauu

SEQ ID NO: 2416640 - RNA, 19 nt, Homo sapiens
  misc_RNA (1)...(19): siRNA sense strand
cugugaagauccuggcauu

SEQ ID NO: 2416641 - RNA, 19 nt, Homo sapiens
  misc_RNA (1)...(19): siRNA sense strand
cugaauuguguguggaaga

SEQ ID NO: 2416642 - RNA, 19 nt, Homo sapiens
  misc_RNA (1)...(19): siRNA sense strand
gucauuugcucuagaagaa

SEQ ID NO: 2416643 - RNA, 19 nt, Homo sapiens
  misc_RNA (1)...(19): siRNA sense strand
guuagagggccuaguggaa

SEQ ID NO: 2416644 - RNA, 19 nt, Homo sapiens
  misc_RNA (1)...(19): siRNA sense strand
aggagaaucaucaggaaga

SEQ ID NO: 2416645 - RNA, 19 nt, Homo sapiens
  misc_RNA (1)...(19): siRNA sense strand
gugcacagccaauggaaca

SEQ ID NO: 2416646 - RNA, 19 nt, Homo sapiens
  misc_RNA (1)...(19): siRNA sense strand
aggcaaagauuauggacaa

SEQ ID NO: 2416647 - RNA, 19 nt, Homo sapiens
  misc_RNA (1)...(19): siRNA sense strand
gguaauaauagcagaagaa

SEQ ID NO: 2416648 - RNA, 19 nt, Homo sapiens
  misc_RNA (1)...(19): siRNA sense strand
gcaaguuaccagagagaau

SEQ ID NO: 2416649 - RNA, 19 nt, Homo sapiens
  misc_RNA (1)...(19): siRNA sense strand
uggaagaacaaguggaaau

SEQ ID NO: 2416650 - RNA, 19 nt, Homo sapiens
  misc_RNA (1)...(19): siRNA sense strand
ggaucaagcaccagaauau

SEQ ID NO: 2416651 - RNA, 19 nt, Homo sapiens
  misc_RNA (1)...(19): siRNA sense strand
aagcaauggucaugaagua

SEQ ID NO: 2416652 - RNA, 19 nt, Homo sapiens
  misc_RNA (1)...(19): siRNA sense strand
gcaaacugcacauggguaa

SEQ ID NO: 2416653 - RNA, 19 nt, Homo sapiens
  misc_RNA (1)...(19): siRNA sense strand
uggaagaccuggauggaau

SEQ ID NO: 2416654 - RNA, 19 nt, Homo sapiens
  misc_RNA (1)...(19): siRNA sense strand
acccaaaccucuugugaaa

SEQ ID NO: 2416655 - RNA, 19 nt, Homo sapiens
  misc_RNA (1)...(19): siRNA sense strand
cuuaauggcacuauagaaa

SEQ ID NO: 2416656 - RNA, 19 nt, Homo sapiens
  misc_RNA (1)...(19): siRNA sense strand
gggaaagacaacagcaaca

SEQ ID NO: 2416657 - RNA, 19 nt, Homo sapiens
  misc_RNA (1)...(19): siRNA sense strand
caauaacagcuaagggauu

SEQ ID NO: 2416658 - RNA, 19 nt, Homo sapiens
  misc_RNA (1)...(19): siRNA sense strand
ccaaauggacaaugggaca

SEQ ID NO: 2416659 - RNA, 19 nt, Homo sapiens
  misc_RNA (1)...(19): siRNA sense strand
aggauuuauucaaggcaaa

SEQ ID NO: 2416660 - RNA, 19 nt, Homo sapiens
  misc_RNA (1)...(19): siRNA sense strand
cagaauaugucaagcagau

SEQ ID NO: 2416661 - RNA, 19 nt, Homo sapiens
  misc_RNA (1)...(19): siRNA sense strand
cggauaagauauauagcuu

SEQ ID NO: 2416662 - RNA, 19 nt, Homo sapiens
  misc_RNA (1)...(19): siRNA sense strand
ggguaauaauagcagaaga

SEQ ID NO: 2416663 - RNA, 19 nt, Homo sapiens
  misc_RNA (1)...(19): siRNA sense strand
auauaugguuggagaugua

SEQ ID NO: 2416664 - RNA, 19 nt, Homo sapiens
  misc_RNA (1)...(19): siRNA sense strand
cagaagaacgaaauagaau

SEQ ID NO: 2416665 - RNA, 19 nt, Homo sapiens
  misc_RNA (1)...(19): siRNA sense strand
cuggauauccugacaguua

SEQ ID NO: 2416666 - RNA, 19 nt, Homo sapiens
  misc_RNA (1)...(19): siRNA sense strand
aguuagugcucauggauuu

SEQ ID NO: 2416667 - RNA, 19 nt, Homo sapiens
  misc_RNA (1)...(19): siRNA sense strand
ggucaagucauuggagaaa

SEQ ID NO: 2416668 - RNA, 19 nt, Homo sapiens
  misc_RNA (1)...(19): siRNA sense strand
gcucuagacaggaaagcaa

SEQ ID NO: 2416669 - RNA, 19 nt, Homo sapiens
  misc_RNA (1)...(19): siRNA sense strand
gaguagcucuuguggaaau

SEQ ID NO: 2416670 - RNA, 19 nt, Homo sapiens
  misc_RNA (1)...(19): siRNA sense strand
ccuugaaccuugugaagau

SEQ ID NO: 2416671 - RNA, 19 nt, Homo sapiens
  misc_RNA (1)...(19): siRNA sense strand
ggauuauaaauuaggguca

SEQ ID NO: 2416672 - RNA, 19 nt, Homo sapiens
  misc_RNA (1)...(19): siRNA sense strand
aauaauagcagaagaacga

SEQ ID NO: 2416673 - RNA, 19 nt, Homo sapiens
  misc_RNA (1)...(19): siRNA sense strand
ggaaauuaguggaucucuu

SEQ ID NO: 2416674 - RNA, 19 nt, Homo sapiens
  misc_RNA (1)...(19): siRNA sense strand
cagccaauggacugagaua

SEQ ID NO: 2416675 - RNA, 19 nt, Homo sapiens
  misc_RNA (1)...(19): siRNA sense strand
caacgaauaaugaaggaau

SEQ ID NO: 2416676 - RNA, 19 nt, Homo sapiens
  misc_RNA (1)...(19): siRNA sense strand
caaggagaggaaagaauaa

SEQ ID NO: 2416677 - RNA, 19 nt, Homo sapiens
  misc_RNA (1)...(19): siRNA sense strand
uagaagaagaauacgacua

SEQ ID NO: 2416678 - RNA, 19 nt, Homo sapiens
  misc_RNA (1)...(19): siRNA sense strand
cuuaaaugagggagguauu

SEQ ID NO: 2416679 - RNA, 19 nt, Homo sapiens
  misc_RNA (1)...(19): siRNA sense strand
ugagguagauccuggaaau

SEQ ID NO: 2416680 - RNA, 19 nt, Homo sapiens
  misc_RNA (1)...(19): siRNA sense strand
cuggauacccugagccuua

SEQ ID NO: 2416681 - RNA, 19 nt, Homo sapiens
  misc_RNA (1)...(19): siRNA sense strand
uugaauggcuccagaauca

SEQ ID NO: 2416682 - RNA, 19 nt, Homo sapiens
  misc_RNA (1)...(19): siRNA sense strand
cagaaaaugggaagagaau

SEQ ID NO: 2416683 - RNA, 19 nt, Homo sapiens
  misc_RNA (1)...(19): siRNA sense strand
ggauaugucaacaggauca

SEQ ID NO: 2416684 - RNA, 19 nt, Homo sapiens
  misc_RNA (1)...(19): siRNA sense strand
ggaggaacaaugagaggau

SEQ ID NO: 2416685 - RNA, 19 nt, Homo sapiens
  misc_RNA (1)...(19): siRNA sense strand
auacaagaucagugaccaa

SEQ ID NO: 2416686 - RNA, 19 nt, Homo sapiens
  misc_RNA (1)...(19): siRNA sense strand
ugaagaaaaugaaggaaga

SEQ ID NO: 2416687 - RNA, 19 nt, Homo sapiens
  misc_RNA (1)...(19): siRNA sense strand
caaagucaguggaagggaa

SEQ ID NO: 2416688 - RNA, 19 nt, Homo sapiens
  misc_RNA (1)...(19): siRNA sense strand
uagagaaggcgauggauuu

SEQ ID NO: 2416689 - RNA, 19 nt, Homo sapiens
  misc_RNA (1)...(19): siRNA sense strand
ggaaggaacaucagagauc

SEQ ID NO: 2416690 - RNA, 19 nt, Homo sapiens
  misc_RNA (1)...(19): siRNA sense strand
caucuagaauacaaagcaa

SEQ ID NO: 2416691 - RNA, 19 nt, Homo sapiens
  misc_RNA (1)...(19): siRNA sense strand
agacacaguuguauaucaa

SEQ ID NO: 2416692 - RNA, 19 nt, Homo sapiens
  misc_RNA (1)...(19): siRNA sense strand
cuucuuagcagguggaaca

SEQ ID NO: 2416693 - RNA, 19 nt, Homo sapiens
  misc_RNA (1)...(19): siRNA sense strand
auuccugcauggagggaua

SEQ ID NO: 2416694 - RNA, 19 nt, Homo sapiens
  misc_RNA (1)...(19): siRNA sense strand
ugagauauggagaugauua

SEQ ID NO: 2416695 - RNA, 19 nt, Homo sapiens
  misc_RNA (1)...(19): siRNA sense strand
acgaagaauugcagaguag

SEQ ID NO: 2416696 - RNA, 19 nt, Homo sapiens
  misc_RNA (1)...(19): siRNA sense strand
ccauaugguuaucuggaau

SEQ ID NO: 2416697 - RNA, 19 nt, Homo sapiens
  misc_RNA (1)...(19): siRNA sense strand
gggcgaaguuggagauccu

SEQ ID NO: 2416698 - RNA, 19 nt, Homo sapiens
  misc_RNA (1)...(19): siRNA sense strand
cauuguuugucaagagaau

SEQ ID NO: 2416699 - RNA, 19 nt, Homo sapiens
  misc_RNA (1)...(19): siRNA sense strand
uguuaaagauggugacucu

SEQ ID NO: 2416700 - RNA, 19 nt, Homo sapiens
  misc_RNA (1)...(19): siRNA sense strand
cagcaaguuaccagagaga

SEQ ID NO: 2416701 - RNA, 19 nt, Homo sapiens
  misc_RNA (1)...(19): siRNA sense strand
ccaauuuauggaagaacaa

SEQ ID NO: 2416702 - RNA, 19 nt, Homo sapiens
  misc_RNA (1)...(19): siRNA sense strand
ugaagaugcuuguggagga

SEQ ID NO: 2416703 - RNA, 19 nt, Homo sapiens
  misc_RNA (1)...(19): siRNA sense strand
cagacuugauagugagcau

SEQ ID NO: 2416704 - RNA, 19 nt, Homo sapiens
  misc_RNA (1)...(19): siRNA sense strand
ccaguuuggguuugaauua

SEQ ID NO: 2416705 - RNA, 19 nt, Homo sapiens
  misc_RNA (1)...(19): siRNA sense strand
ugauguaacccauggaaaa

SEQ ID NO: 2416706 - RNA, 19 nt, Homo sapiens
  misc_RNA (1)...(19): siRNA sense strand
aggagauguucuuaagauu

SEQ ID NO: 2416707 - RNA, 19 nt, Homo sapiens
  misc_RNA (1)...(19): siRNA sense strand
cugugaagauccuggcauu

SEQ ID NO: 2416708 - RNA, 19 nt, Homo sapiens
  misc_RNA (1)...(19): siRNA sense strand
cugaauuguguguggaaga

SEQ ID NO: 2416709 - RNA, 19 nt, Homo sapiens
  misc_RNA (1)...(19): siRNA sense strand
gucauuugcucuagaagaa

SEQ ID NO: 2416710 - RNA, 19 nt, Homo sapiens
  misc_RNA (1)...(19): siRNA sense strand
guuagagggccuaguggaa

SEQ ID NO: 2416711 - RNA, 19 nt, Homo sapiens
  misc_RNA (1)...(19): siRNA sense strand
aggagaaucaucaggaaga

SEQ ID NO: 2416712 - RNA, 19 nt, Homo sapiens
  misc_RNA (1)...(19): siRNA sense strand
gugcacagccaauggaaca

SEQ ID NO: 2416713 - RNA, 19 nt, Homo sapiens
  misc_RNA (1)...(19): siRNA sense strand
aggcaaagauuauggacaa

SEQ ID NO: 2416714 - RNA, 19 nt, Homo sapiens
  misc_RNA (1)...(19): siRNA sense strand
gguaauaauagcagaagaa

SEQ ID NO: 2416715 - RNA, 19 nt, Homo sapiens
  misc_RNA (1)...(19): siRNA sense strand
gcaaguuaccagagagaau

SEQ ID NO: 2416716 - RNA, 19 nt, Homo sapiens
  misc_RNA (1)...(19): siRNA sense strand
uggaagaacaaguggaaau

SEQ ID NO: 2416717 - RNA, 19 nt, Homo sapiens
  misc_RNA (1)...(19): siRNA sense strand
ggaucaagcaccagaauau

SEQ ID NO: 2416718 - RNA, 19 nt, Homo sapiens
  misc_RNA (1)...(19): siRNA sense strand
aagcaauggucaugaagua

SEQ ID NO: 2416719 - RNA, 19 nt, Homo sapiens
  misc_RNA (1)...(19): siRNA sense strand
gcaaacugcacauggguaa

SEQ ID NO: 2416720 - RNA, 19 nt, Homo sapiens
  misc_RNA (1)...(19): siRNA sense strand
uggaagaccuggauggaau

SEQ ID NO: 2416721 - RNA, 19 nt, Homo sapiens
  misc_RNA (1)...(19): siRNA sense strand
acccaaaccucuugugaaa

SEQ ID NO: 2416722 - RNA, 19 nt, Homo sapiens
  misc_RNA (1)...(19): siRNA sense strand
cuuaauggcacuauagaaa

SEQ ID NO: 2416723 - RNA, 19 nt, Homo sapiens
  misc_RNA (1)...(19): siRNA sense strand
gggaaagacaacagcaaca

SEQ ID NO: 2416724 - RNA, 19 nt, Homo sapiens
  misc_RNA (1)...(19): siRNA sense strand
caauaacagcuaagggauu

SEQ ID NO: 2416725 - RNA, 19 nt, Homo sapiens
  misc_RNA (1)...(19): siRNA sense strand
ccaaauggacaaugggaca

SEQ ID NO: 2416726 - RNA, 19 nt, Homo sapiens
  misc_RNA (1)...(19): siRNA sense strand
aggauuuauucaaggcaaa

SEQ ID NO: 2416727 - RNA, 19 nt, Homo sapiens
  misc_RNA (1)...(19): siRNA sense strand
cagaauaugucaagcagau

SEQ ID NO: 2416728 - RNA, 19 nt, Homo sapiens
  misc_RNA (1)...(19): siRNA sense strand
cggauaagauauauagcuu

SEQ ID NO: 2416729 - RNA, 19 nt, Homo sapiens
  misc_RNA (1)...(19): siRNA sense strand
ggguaauaauagcagaaga

SEQ ID NO: 2416730 - RNA, 19 nt, Homo sapiens
  misc_RNA (1)...(19): siRNA sense strand
auauaugguuggagaugua

SEQ ID NO: 2416731 - RNA, 19 nt, Homo sapiens
  misc_RNA (1)...(19): siRNA sense strand
cagaagaacgaaauagaau

SEQ ID NO: 2416732 - RNA, 19 nt, Homo sapiens
  misc_RNA (1)...(19): siRNA sense strand
cuggauauccugacaguua

SEQ ID NO: 2416733 - RNA, 19 nt, Homo sapiens
  misc_RNA (1)...(19): siRNA sense strand
aguuagugcucauggauuu

SEQ ID NO: 2416734 - RNA, 19 nt, Homo sapiens
  misc_RNA (1)...(19): siRNA sense strand
ggucaagucauuggagaaa

SEQ ID NO: 2416735 - RNA, 19 nt, Homo sapiens
  misc_RNA (1)...(19): siRNA sense strand
gcucuagacaggaaagcaa

SEQ ID NO: 2416736 - RNA, 19 nt, Homo sapiens
  misc_RNA (1)...(19): siRNA sense strand
gaguagcucuuguggaaau

SEQ ID NO: 2416737 - RNA, 19 nt, Homo sapiens
  misc_RNA (1)...(19): siRNA sense strand
ccuugaaccuugugaagau

SEQ ID NO: 2416738 - RNA, 19 nt, Homo sapiens
  misc_RNA (1)...(19): siRNA sense strand
ggauuauaaauuaggguca

SEQ ID NO: 2416739 - RNA, 19 nt, Homo sapiens
  misc_RNA (1)...(19): siRNA sense strand
aauaauagcagaagaacga

SEQ ID NO: 2416740 - RNA, 19 nt, Homo sapiens
  misc_RNA (1)...(19): siRNA sense strand
ggaaauuaguggaucucuu

SEQ ID NO: 2416741 - RNA, 19 nt, Homo sapiens
  misc_RNA (1)...(19): siRNA sense strand
cagccaauggacugagaua

SEQ ID NO: 2416742 - RNA, 19 nt, Homo sapiens
  misc_RNA (1)...(19): siRNA sense strand
caacgaauaaugaaggaau

SEQ ID NO: 2416743 - RNA, 19 nt, Homo sapiens
  misc_RNA (1)...(19): siRNA sense strand
caaggagaggaaagaauaa

SEQ ID NO: 2416744 - RNA, 19 nt, Homo sapiens
  misc_RNA (1)...(19): siRNA sense strand
uagaagaagaauacgacua

SEQ ID NO: 2416745 - RNA, 19 nt, Homo sapiens
  misc_RNA (1)...(19): siRNA sense strand
cuuaaaugagggagguauu

SEQ ID NO: 2416746 - RNA, 19 nt, Homo sapiens
  misc_RNA (1)...(19): siRNA sense strand
ugagguagauccuggaaau

SEQ ID NO: 2416747 - RNA, 19 nt, Homo sapiens
  misc_RNA (1)...(19): siRNA sense strand
cuggauacccugagccuua

SEQ ID NO: 2416748 - RNA, 19 nt, Homo sapiens
  misc_RNA (1)...(19): siRNA sense strand
uugaauggcuccagaauca

SEQ ID NO: 2416749 - RNA, 19 nt, Homo sapiens
  misc_RNA (1)...(19): siRNA sense strand
cagaaaaugggaagagaau

SEQ ID NO: 2416750 - RNA, 19 nt, Homo sapiens
  misc_RNA (1)...(19): siRNA sense strand
ggauaugucaacaggauca

SEQ ID NO: 2416751 - RNA, 19 nt, Homo sapiens
  misc_RNA (1)...(19): siRNA sense strand
ggaggaacaaugagaggau

SEQ ID NO: 2416752 - RNA, 19 nt, Homo sapiens
  misc_RNA (1)...(19): siRNA sense strand
auacaagaucagugaccaa

SEQ ID NO: 2416753 - RNA, 19 nt, Homo sapiens
  misc_RNA (1)...(19): siRNA sense strand
ugaagaaaaugaaggaaga

SEQ ID NO: 2416754 - RNA, 19 nt, Homo sapiens
  misc_RNA (1)...(19): siRNA sense strand
caaagucaguggaagggaa

SEQ ID NO: 2416755 - RNA, 19 nt, Homo sapiens
  misc_RNA (1)...(19): siRNA sense strand
uagagaaggcgauggauuu

SEQ ID NO: 2416756 - RNA, 19 nt, Homo sapiens
  misc_RNA (1)...(19): siRNA sense strand
ggaaggaacaucagagauc

SEQ ID NO: 2416757 - RNA, 19 nt, Homo sapiens
  misc_RNA (1)...(19): siRNA sense strand
caucuagaauacaaagcaa

SEQ ID NO: 2416758 - RNA, 19 nt, Homo sapiens
  misc_RNA (1)...(19): siRNA sense strand
agacacaguuguauaucaa

SEQ ID NO: 2416759 - RNA, 19 nt, Homo sapiens
  misc_RNA (1)...(19): siRNA sense strand
cuucuuagcagguggaaca

SEQ ID NO: 2416760 - RNA, 19 nt, Homo sapiens
  misc_RNA (1)...(19): siRNA sense strand
auuccugcauggagggaua

SEQ ID NO: 2416761 - RNA, 19 nt, Homo sapiens
  misc_RNA (1)...(19): siRNA sense strand
ugagauauggagaugauua

SEQ ID NO: 2416762 - RNA, 19 nt, Homo sapiens
  misc_RNA (1)...(19): siRNA sense strand
acgaagaauugcagaguag

SEQ ID NO: 2416763 - RNA, 19 nt, Homo sapiens
  misc_RNA (1)...(19): siRNA sense strand
ccauaugguuaucuggaau

SEQ ID NO: 2416764 - RNA, 19 nt, Homo sapiens
  misc_RNA (1)...(19): siRNA sense strand
gggcgaaguuggagauccu

SEQ ID NO: 2416765 - RNA, 19 nt, Homo sapiens
  misc_RNA (1)...(19): siRNA sense strand
cauuguuugucaagagaau

SEQ ID NO: 2416766 - RNA, 19 nt, Homo sapiens
  misc_RNA (1)...(19): siRNA sense strand
uguuaaagauggugacucu

SEQ ID NO: 2416767 - RNA, 19 nt, Homo sapiens
  misc_RNA (1)...(19): siRNA sense strand
cagcaaguuaccagagaga

SEQ ID NO: 2416768 - RNA, 19 nt, Homo sapiens
  misc_RNA (1)...(19): siRNA sense strand
ccaauuuauggaagaacaa

SEQ ID NO: 2416769 - RNA, 19 nt, Homo sapiens
  misc_RNA (1)...(19): siRNA sense strand
ugaagaugcuuguggagga

SEQ ID NO: 2416770 - RNA, 19 nt, Homo sapiens
  misc_RNA (1)...(19): siRNA sense strand
cagacuugauagugagcau

SEQ ID NO: 2416771 - RNA, 19 nt, Homo sapiens
  misc_RNA (1)...(19): siRNA sense strand
ccaguuuggguuugaauua

SEQ ID NO: 2416772 - RNA, 19 nt, Homo sapiens
  misc_RNA (1)...(19): siRNA sense strand
ugauguaacccauggaaaa

SEQ ID NO: 2416773 - RNA, 19 nt, Homo sapiens
  misc_RNA (1)...(19): siRNA sense strand
aggagauguucuuaagauu

SEQ ID NO: 2416774 - RNA, 19 nt, Homo sapiens
  misc_RNA (1)...(19): siRNA sense strand
cugugaagauccuggcauu

SEQ ID NO: 2416775 - RNA, 19 nt, Homo sapiens
  misc_RNA (1)...(19): siRNA sense strand
cugaauuguguguggaaga

SEQ ID NO: 2416776 - RNA, 19 nt, Homo sapiens
  misc_RNA (1)...(19): siRNA sense strand
gucauuugcucuagaagaa

SEQ ID NO: 2416777 - RNA, 19 nt, Homo sapiens
  misc_RNA (1)...(19): siRNA sense strand
guuagagggccuaguggaa

SEQ ID NO: 2416778 - RNA, 19 nt, Homo sapiens
  misc_RNA (1)...(19): siRNA sense strand
aggagaaucaucaggaaga

SEQ ID NO: 2416779 - RNA, 19 nt, Homo sapiens
  misc_RNA (1)...(19): siRNA sense strand
gugcacagccaauggaaca

SEQ ID NO: 2416780 - RNA, 19 nt, Homo sapiens
  misc_RNA (1)...(19): siRNA sense strand
aggaggaggaagaggagaa

SEQ ID NO: 2416781 - RNA, 19 nt, Homo sapiens
  misc_RNA (1)...(19): siRNA sense strand
gagaagaggaggcaggaga

SEQ ID NO: 2416782 - RNA, 19 nt, Homo sapiens
  misc_RNA (1)...(19): siRNA sense strand
aggcaggagaggaggaaga

SEQ ID NO: 2416783 - RNA, 19 nt, Homo sapiens
  misc_RNA (1)...(19): siRNA sense strand
ggaaggaggagaaggagga

SEQ ID NO: 2416784 - RNA, 19 nt, Homo sapiens
  misc_RNA (1)...(19): siRNA sense strand
aggaagaagaggagcagga

SEQ ID NO: 2416785 - RNA, 19 nt, Homo sapiens
  misc_RNA (1)...(19): siRNA sense strand
agauagagccggaggccca

SEQ ID NO: 2416786 - RNA, 19 nt, Homo sapiens
  misc_RNA (1)...(19): siRNA sense strand
gguuaagagccgaguccau

SEQ ID NO: 2416787 - RNA, 19 nt, Homo sapiens
  misc_RNA (1)...(19): siRNA sense strand
aagaagaggagcaggacca

SEQ ID NO: 2416788 - RNA, 19 nt, Homo sapiens
  misc_RNA (1)...(19): siRNA sense strand
gaaggaaguggaagcggaa

SEQ ID NO: 2416789 - RNA, 19 nt, Homo sapiens
  misc_RNA (1)...(19): siRNA sense strand
ccugauacugcgaggcaau

SEQ ID NO: 2416790 - RNA, 19 nt, Homo sapiens
  misc_RNA (1)...(19): siRNA sense strand
aggaggaagaggagaagga

SEQ ID NO: 2416791 - RNA, 19 nt, Homo sapiens
  misc_RNA (1)...(19): siRNA sense strand
ccacagaggaggaggucac

SEQ ID NO: 2416792 - RNA, 19 nt, Homo sapiens
  misc_RNA (1)...(19): siRNA sense strand
aggaggaagaagaggagca

SEQ ID NO: 2416793 - RNA, 19 nt, Homo sapiens
  misc_RNA (1)...(19): siRNA sense strand
gagaggaggaagaagagga

SEQ ID NO: 2416794 - RNA, 19 nt, Homo sapiens
  misc_RNA (1)...(19): siRNA sense strand
agccacaggaggaggaaga

SEQ ID NO: 2416795 - RNA, 19 nt, Homo sapiens
  misc_RNA (1)...(19): siRNA sense strand
agaaggaaguggaagcgga

SEQ ID NO: 2416796 - RNA, 19 nt, Homo sapiens
  misc_RNA (1)...(19): siRNA sense strand
gcaggaucugaguggcaua

SEQ ID NO: 2416797 - RNA, 19 nt, Homo sapiens
  misc_RNA (1)...(19): siRNA sense strand
gagcaggaccagaaggaag

SEQ ID NO: 2416798 - RNA, 19 nt, Homo sapiens
  misc_RNA (1)...(19): siRNA sense strand
agaugguggaacagggaga

SEQ ID NO: 2416799 - RNA, 19 nt, Homo sapiens
  misc_RNA (1)...(19): siRNA sense strand
caugguaguuggagccuca

SEQ ID NO: 2416800 - RNA, 19 nt, Homo sapiens
  misc_RNA (1)...(19): siRNA sense strand
aagaggagaaggaggggaa

SEQ ID NO: 2416801 - RNA, 19 nt, Homo sapiens
  misc_RNA (1)...(19): siRNA sense strand
cagcugagauagagccgga

SEQ ID NO: 2416802 - RNA, 19 nt, Homo sapiens
  misc_RNA (1)...(19): siRNA sense strand
gccaugaguucaagccaga

SEQ ID NO: 2416803 - RNA, 19 nt, Homo sapiens
  misc_RNA (1)...(19): siRNA sense strand
ccacacugcaacagcugaa

SEQ ID NO: 2416804 - RNA, 19 nt, Homo sapiens
  misc_RNA (1)...(19): siRNA sense strand
gggagcggaaacagggaga

SEQ ID NO: 2416805 - RNA, 19 nt, Homo sapiens
  misc_RNA (1)...(19): siRNA sense strand
aggaaguggaagcggaacu

SEQ ID NO: 2416806 - RNA, 19 nt, Homo sapiens
  misc_RNA (1)...(19): siRNA sense strand
acaaccugcuggaaggaca

SEQ ID NO: 2416807 - RNA, 19 nt, Homo sapiens
  misc_RNA (1)...(19): siRNA sense strand
cagaggaggucagggcaga

SEQ ID NO: 2416808 - RNA, 19 nt, Homo sapiens
  misc_RNA (1)...(19): siRNA sense strand
caggaugggauuagacagu

SEQ ID NO: 2416809 - RNA, 19 nt, Homo sapiens
  misc_RNA (1)...(19): siRNA sense strand
uugcaauagugguggacaa

SEQ ID NO: 2416810 - RNA, 19 nt, Homo sapiens
  misc_RNA (1)...(19): siRNA sense strand
gcuaguuggaagagauuaa

SEQ ID NO: 2416811 - RNA, 19 nt, Homo sapiens
  misc_RNA (1)...(19): siRNA sense strand
ggaacaaauagcagcauau

SEQ ID NO: 2416812 - RNA, 19 nt, Homo sapiens
  misc_RNA (1)...(19): siRNA sense strand
uggagaagccucugagcaa

SEQ ID NO: 2416813 - RNA, 19 nt, Homo sapiens
  misc_RNA (1)...(19): siRNA sense strand
agagauuaacggaggaauu

SEQ ID NO: 2416814 - RNA, 19 nt, Homo sapiens
  misc_RNA (1)...(19): siRNA sense strand
guuagaagaacaagaucaa

SEQ ID NO: 2416815 - RNA, 19 nt, Homo sapiens
  misc_RNA (1)...(19): siRNA sense strand
aguucaucauccagagaaa

SEQ ID NO: 2416816 - RNA, 19 nt, Homo sapiens
  misc_RNA (1)...(19): siRNA sense strand
aagaaagugaagaggaaaa

SEQ ID NO: 2416817 - RNA, 19 nt, Homo sapiens
  misc_RNA (1)...(19): siRNA sense strand
ggaaauaaagacagaugca

SEQ ID NO: 2416818 - RNA, 19 nt, Homo sapiens
  misc_RNA (1)...(19): siRNA sense strand
agccaaggauuuagaucaa

SEQ ID NO: 2416819 - RNA, 19 nt, Homo sapiens
  misc_RNA (1)...(19): siRNA sense strand
cagaaaagacagaaaauga

SEQ ID NO: 2416820 - RNA, 19 nt, Homo sapiens
  misc_RNA (1)...(19): siRNA sense strand
cggugucugcugagagaaa

SEQ ID NO: 2416821 - RNA, 19 nt, Homo sapiens
  misc_RNA (1)...(19): siRNA sense strand
aggagaaccugaugaagau

SEQ ID NO: 2416822 - RNA, 19 nt, Homo sapiens
  misc_RNA (1)...(19): siRNA sense strand
cguuagaagaacaagauca

SEQ ID NO: 2416823 - RNA, 19 nt, Homo sapiens
  misc_RNA (1)...(19): siRNA sense strand
aaauaaagacagaugcaca

SEQ ID NO: 2416824 - RNA, 19 nt, Homo sapiens
  misc_RNA (1)...(19): siRNA sense strand
ugauggaagaugaagaaau

SEQ ID NO: 2416825 - RNA, 19 nt, Homo sapiens
  misc_RNA (1)...(19): siRNA sense strand
auuacagguugguagaaua

SEQ ID NO: 2416826 - RNA, 19 nt, Homo sapiens
  misc_RNA (1)...(19): siRNA sense strand
ucgaggaagccaaggauuu

SEQ ID NO: 2416827 - RNA, 19 nt, Homo sapiens
  misc_RNA (1)...(19): siRNA sense strand
cuuaauggaaggaggagau

SEQ ID NO: 2416828 - RNA, 19 nt, Homo sapiens
  misc_RNA (1)...(19): siRNA sense strand
caguaagacagcagauuca

SEQ ID NO: 2416829 - RNA, 19 nt, Homo sapiens
  misc_RNA (1)...(19): siRNA sense strand
ggaaaauacuugauggaag

SEQ ID NO: 2416830 - RNA, 19 nt, Homo sapiens
  misc_RNA (1)...(19): siRNA sense strand
gaagaaagugaagaggaaa

SEQ ID NO: 2416831 - RNA, 19 nt, Homo sapiens
  misc_RNA (1)...(19): siRNA sense strand
aagcaguaggacagcguua

SEQ ID NO: 2416832 - RNA, 19 nt, Homo sapiens
  misc_RNA (1)...(19): siRNA sense strand
gcaaauaaagugggcaaaa

SEQ ID NO: 2416833 - RNA, 19 nt, Homo sapiens
  misc_RNA (1)...(19): siRNA sense strand
caucaguacuggacagcca

SEQ ID NO: 2416834 - RNA, 19 nt, Homo sapiens
  misc_RNA (1)...(19): siRNA sense strand
aaggagaaccugaugaaga

SEQ ID NO: 2416835 - RNA, 19 nt, Homo sapiens
  misc_RNA (1)...(19): siRNA sense strand
uugcaagcuaugaggaauu

SEQ ID NO: 2416836 - RNA, 19 nt, Homo sapiens
  misc_RNA (1)...(19): siRNA sense strand
uggcauggaacaaaguuaa

SEQ ID NO: 2416837 - RNA, 19 nt, Homo sapiens
  misc_RNA (1)...(19): siRNA sense strand
cauuaguuucaaagaggaa

SEQ ID NO: 2416838 - RNA, 19 nt, Homo sapiens
  misc_RNA (1)...(19): siRNA sense strand
ugucauucauucugaucua

SEQ ID NO: 2416839 - RNA, 19 nt, Homo sapiens
  misc_RNA (1)...(19): siRNA sense strand
ggaagagauuaacggagga

SEQ ID NO: 2416840 - RNA, 19 nt, Homo sapiens
  misc_RNA (1)...(19): siRNA sense strand
gcacaaaguguuuaguacu

SEQ ID NO: 2416841 - RNA, 19 nt, Homo sapiens
  misc_RNA (1)...(19): siRNA sense strand
ugauaacgcuagugcgagu

SEQ ID NO: 2416842 - RNA, 19 nt, Homo sapiens
  misc_RNA (1)...(19): siRNA sense strand
gcugcuaguuggaagagau

SEQ ID NO: 2416843 - RNA, 19 nt, Homo sapiens
  misc_RNA (1)...(19): siRNA sense strand
acucagguuauucgggaaa

SEQ ID NO: 2416844 - RNA, 19 nt, Homo sapiens
  misc_RNA (1)...(19): siRNA sense strand
cagaaauugagaagugcau

SEQ ID NO: 2416845 - RNA, 19 nt, Homo sapiens
  misc_RNA (1)...(19): siRNA sense strand
ccaagaagcaguaggacag

SEQ ID NO: 2416846 - RNA, 19 nt, Homo sapiens
  misc_RNA (1)...(19): siRNA sense strand
augccagacuuuugaauua

SEQ ID NO: 2416847 - RNA, 19 nt, Homo sapiens
  misc_RNA (1)...(19): siRNA sense strand
ucuagauugcuguggaaau

SEQ ID NO: 2416848 - RNA, 19 nt, Homo sapiens
  misc_RNA (1)...(19): siRNA sense strand
acuuaaagaaggccuuaua

SEQ ID NO: 2416849 - RNA, 19 nt, Homo sapiens
  misc_RNA (1)...(19): siRNA sense strand
cuugauggaagaugaagaa

SEQ ID NO: 2416850 - RNA, 19 nt, Homo sapiens
  misc_RNA (1)...(19): siRNA sense strand
caggacaccguuagaagaa

SEQ ID NO: 2416851 - RNA, 19 nt, Homo sapiens
  misc_RNA (1)...(19): siRNA sense strand
cagagaugcagaaagaaaa

SEQ ID NO: 2416852 - RNA, 19 nt, Homo sapiens
  misc_RNA (1)...(19): siRNA sense strand
ccauuaacuuugcaaggau

SEQ ID NO: 2416853 - RNA, 19 nt, Homo sapiens
  misc_RNA (1)...(19): siRNA sense strand
ucuuaagagugaagcucau

SEQ ID NO: 2416854 - RNA, 19 nt, Homo sapiens
  misc_RNA (1)...(19): siRNA sense strand
guuggaaagaugagccaga

SEQ ID NO: 2416855 - RNA, 19 nt, Homo sapiens
  misc_RNA (1)...(19): siRNA sense strand
agcucaagguucugcacaa

SEQ ID NO: 2416856 - RNA, 19 nt, Homo sapiens
  misc_RNA (1)...(19): siRNA sense strand
aauaaagacagaugcacau

SEQ ID NO: 2416857 - RNA, 19 nt, Homo sapiens
  misc_RNA (1)...(19): siRNA sense strand
aagaugaagaaauggacau

SEQ ID NO: 2416858 - RNA, 19 nt, Homo sapiens
  misc_RNA (1)...(19): siRNA sense strand
cugaagaaagugaagagga

SEQ ID NO: 2416859 - RNA, 19 nt, Homo sapiens
  misc_RNA (1)...(19): siRNA sense strand
uugauagaugggaagguaa

SEQ ID NO: 2416860 - RNA, 19 nt, Homo sapiens
  misc_RNA (1)...(19): siRNA sense strand
ccaguuaaucacagagacu

SEQ ID NO: 2416861 - RNA, 19 nt, Homo sapiens
  misc_RNA (1)...(19): siRNA sense strand
uguauuuggagcagaguga

SEQ ID NO: 2416862 - RNA, 19 nt, Homo sapiens
  misc_RNA (1)...(19): siRNA sense strand
agaucauaauggcuggcaa

SEQ ID NO: 2416863 - RNA, 19 nt, Homo sapiens
  misc_RNA (1)...(19): siRNA sense strand
caacaggcaaccaaggaga

SEQ ID NO: 2416864 - RNA, 19 nt, Homo sapiens
  misc_RNA (1)...(19): siRNA sense strand
ggauauucaauuuggacaa

SEQ ID NO: 2416865 - RNA, 19 nt, Homo sapiens
  misc_RNA (1)...(19): siRNA sense strand
aaccagaauaaguggauaa

SEQ ID NO: 2416866 - RNA, 19 nt, Homo sapiens
  misc_RNA (1)...(19): siRNA sense strand
uggaauaccaccagagcau

SEQ ID NO: 2416867 - RNA, 19 nt, Homo sapiens
  misc_RNA (1)...(19): siRNA sense strand
caauaucagaacaggcuaa

SEQ ID NO: 2416868 - RNA, 19 nt, Homo sapiens
  misc_RNA (1)...(19): siRNA sense strand
aagaagaacaaauggacuu

SEQ ID NO: 2416869 - RNA, 19 nt, Homo sapiens
  misc_RNA (1)...(19): siRNA sense strand
uguaagcagagaaggcaaa

SEQ ID NO: 2416870 - RNA, 19 nt, Homo sapiens
  misc_RNA (1)...(19): siRNA sense strand
uggagaaggcagugaucga

SEQ ID NO: 2416871 - RNA, 19 nt, Homo sapiens
  misc_RNA (1)...(19): siRNA sense strand
aggaggugcugaagagcga

SEQ ID NO: 2416872 - RNA, 19 nt, Homo sapiens
  misc_RNA (1)...(19): siRNA sense strand
uugcugaggaacagaaauu

SEQ ID NO: 2416873 - RNA, 19 nt, Homo sapiens
  misc_RNA (1)...(19): siRNA sense strand
gggcagagauagcacccau

SEQ ID NO: 2416874 - RNA, 19 nt, Homo sapiens
  misc_RNA (1)...(19): siRNA sense strand
aggaauaccucuaugcagu

SEQ ID NO: 2416875 - RNA, 19 nt, Homo sapiens
  misc_RNA (1)...(19): siRNA sense strand
uuggauaucagguggagua

SEQ ID NO: 2416876 - RNA, 19 nt, Homo sapiens
  misc_RNA (1)...(19): siRNA sense strand
gguacuggauguaagcaga

SEQ ID NO: 2416877 - RNA, 19 nt, Homo sapiens
  misc_RNA (1)...(19): siRNA sense strand
uguccaagcaagugagacu

SEQ ID NO: 2416878 - RNA, 19 nt, Homo sapiens
  misc_RNA (1)...(19): siRNA sense strand
guggagcugaugagguuaa

SEQ ID NO: 2416879 - RNA, 19 nt, Homo sapiens
  misc_RNA (1)...(19): siRNA sense strand
ugauggucuucuuuggaua

SEQ ID NO: 2416880 - RNA, 19 nt, Homo sapiens
  misc_RNA (1)...(19): siRNA sense strand
cgauauugccccaagaaga

SEQ ID NO: 2416881 - RNA, 19 nt, Homo sapiens
  misc_RNA (1)...(19): siRNA sense strand
ucugcaaggucaaggaacu

SEQ ID NO: 2416882 - RNA, 19 nt, Homo sapiens
  misc_RNA (1)...(19): siRNA sense strand
uggcagacucgcaggacca

SEQ ID NO: 2416883 - RNA, 19 nt, Homo sapiens
  misc_RNA (1)...(19): siRNA sense strand
aauaaguggauaagccgua

SEQ ID NO: 2416884 - RNA, 19 nt, Homo sapiens
  misc_RNA (1)...(19): siRNA sense strand
ccacgauuccagucagaca

SEQ ID NO: 2416885 - RNA, 19 nt, Homo sapiens
  misc_RNA (1)...(19): siRNA sense strand
aagaaaugcugacaggcca

SEQ ID NO: 2416886 - RNA, 19 nt, Homo sapiens
  misc_RNA (1)...(19): siRNA sense strand
caagcaagugagacugcaa

SEQ ID NO: 2416887 - RNA, 19 nt, Homo sapiens
  misc_RNA (1)...(19): siRNA sense strand
gagaaggcaaagaagaagu

SEQ ID NO: 2416888 - RNA, 19 nt, Homo sapiens
  misc_RNA (1)...(19): siRNA sense strand
aaggcaaagaagaaguauu

SEQ ID NO: 2416889 - RNA, 19 nt, Homo sapiens
  misc_RNA (1)...(19): siRNA sense strand
gcugugaggugguuggaac

SEQ ID NO: 2416890 - RNA, 19 nt, Homo sapiens
  misc_RNA (1)...(19): siRNA sense strand
ucuuggaggcaaugaccua

SEQ ID NO: 2416891 - RNA, 19 nt, Homo sapiens
  misc_RNA (1)...(19): siRNA sense strand
aggcaaugaccuagacuac

SEQ ID NO: 2416892 - RNA, 19 nt, Homo sapiens
  misc_RNA (1)...(19): siRNA sense strand
auguaagcagagaaggcaa

SEQ ID NO: 2416893 - RNA, 19 nt, Homo sapiens
  misc_RNA (1)...(19): siRNA sense strand
ggucaaggaacuucgguac

SEQ ID NO: 2416894 - RNA, 19 nt, Homo sapiens
  misc_RNA (1)...(19): siRNA sense strand
agguaagaguucugggcau

SEQ ID NO: 2416895 - RNA, 19 nt, Homo sapiens
  misc_RNA (1)...(19): siRNA sense strand
ugggagaaacagaaguaaa

SEQ ID NO: 2416896 - RNA, 19 nt, Homo sapiens
  misc_RNA (1)...(19): siRNA sense strand
gcuaagaaucaaggagcaa

SEQ ID NO: 2416897 - RNA, 19 nt, Homo sapiens
  misc_RNA (1)...(19): siRNA sense strand
ggcucuaagaaaugugaaa

SEQ ID NO: 2416898 - RNA, 19 nt, Homo sapiens
  misc_RNA (1)...(19): siRNA sense strand
cuaagaaaugugaaaccaa

SEQ ID NO: 2416899 - RNA, 19 nt, Homo sapiens
  misc_RNA (1)...(19): siRNA sense strand
ugugguuguucguggcaaa

SEQ ID NO: 2416900 - RNA, 19 nt, Homo sapiens
  misc_RNA (1)...(19): siRNA sense strand
ucaugaaaaccgugacaaa

SEQ ID NO: 2416901 - RNA, 19 nt, Homo sapiens
  misc_RNA (1)...(19): siRNA sense strand
ccucgagauuggcagcaaa

SEQ ID NO: 2416902 - RNA, 19 nt, Homo sapiens
  misc_RNA (1)...(19): siRNA sense strand
aaucaaggagcaaaggcaa

SEQ ID NO: 2416903 - RNA, 19 nt, Homo sapiens
  misc_RNA (1)...(19): siRNA sense strand
guuaaaugaagguaagagu

SEQ ID NO: 2416904 - RNA, 19 nt, Homo sapiens
  misc_RNA (1)...(19): siRNA sense strand
cgcuaagaaucaaggagca

SEQ ID NO: 2416905 - RNA, 19 nt, Homo sapiens
  misc_RNA (1)...(19): siRNA sense strand
cggaacaacagcaagggau

SEQ ID NO: 2416906 - RNA, 19 nt, Homo sapiens
  misc_RNA (1)...(19): siRNA sense strand
aucaaggagcaaaggcaaa

SEQ ID NO: 2416907 - RNA, 19 nt, Homo sapiens
  misc_RNA (1)...(19): siRNA sense strand
gaaucaaggagcaaaggca

SEQ ID NO: 2416908 - RNA, 19 nt, Homo sapiens
  misc_RNA (1)...(19): siRNA sense strand
agucaguacaagucaucua

SEQ ID NO: 2416909 - RNA, 19 nt, Homo sapiens
  misc_RNA (1)...(19): siRNA sense strand
ggccuagguuggaucggaa

SEQ ID NO: 2416910 - RNA, 19 nt, Homo sapiens
  misc_RNA (1)...(19): siRNA sense strand
aggcagaacaacggaaaca

SEQ ID NO: 2416911 - RNA, 19 nt, Homo sapiens
  misc_RNA (1)...(19): siRNA sense strand
cugcuacccaagagaagaa

SEQ ID NO: 2416912 - RNA, 19 nt, Homo sapiens
  misc_RNA (1)...(19): siRNA sense strand
acacugguuugaugggaga

SEQ ID NO: 2416913 - RNA, 19 nt, Homo sapiens
  misc_RNA (1)...(19): siRNA sense strand
gguaagaguucugggcauc

SEQ ID NO: 2416914 - RNA, 19 nt, Homo sapiens
  misc_RNA (1)...(19): siRNA sense strand
aggucaaggaauuugucaa

SEQ ID NO: 2416915 - RNA, 19 nt, Homo sapiens
  misc_RNA (1)...(19): siRNA sense strand
agauaacaucacugaagau

SEQ ID NO: 2416916 - RNA, 19 nt, Homo sapiens
  misc_RNA (1)...(19): siRNA sense strand
caaaaguaggucaaggaau

SEQ ID NO: 2416917 - RNA, 19 nt, Homo sapiens
  misc_RNA (1)...(19): siRNA sense strand
gcuccugugccucgagauu

SEQ ID NO: 2416918 - RNA, 19 nt, Homo sapiens
  misc_RNA (1)...(19): siRNA sense strand
uggaggaggaugaacuuau

SEQ ID NO: 2416919 - RNA, 19 nt, Homo sapiens
  misc_RNA (1)...(19): siRNA sense strand
cuacauugugucagugaau

SEQ ID NO: 2416920 - RNA, 19 nt, Homo sapiens
  misc_RNA (1)...(19): siRNA sense strand
ccaaguaugcggagcucga

SEQ ID NO: 2416921 - RNA, 19 nt, Homo sapiens
  misc_RNA (1)...(19): siRNA sense strand
augcggagcucgaccguga

SEQ ID NO: 2416922 - RNA, 19 nt, Homo sapiens
  misc_RNA (1)...(19): siRNA sense strand
augucaaggccgaguacuu

SEQ ID NO: 2416923 - RNA, 19 nt, Homo sapiens
  misc_RNA (1)...(19): siRNA sense strand
agcugaaggcugcgggaga

SEQ ID NO: 2416924 - RNA, 19 nt, Homo sapiens
  misc_RNA (1)...(19): siRNA sense strand
ugaaggaggagcuggagga

SEQ ID NO: 2416925 - RNA, 19 nt, Homo sapiens
  misc_RNA (1)...(19): siRNA sense strand
ggacaaggaccgcacggaa

SEQ ID NO: 2416926 - RNA, 19 nt, Homo sapiens
  misc_RNA (1)...(19): siRNA sense strand
cuggcuaccucguggacaa

SEQ ID NO: 2416927 - RNA, 19 nt, Homo sapiens
  misc_RNA (1)...(19): siRNA sense strand
gugagucggaggaggacaa

SEQ ID NO: 2416928 - RNA, 19 nt, Homo sapiens
  misc_RNA (1)...(19): siRNA sense strand
gaguuuaaccagugccaga

SEQ ID NO: 2416929 - RNA, 19 nt, Homo sapiens
  misc_RNA (1)...(19): siRNA sense strand
cacgagaacugaaggcaga

SEQ ID NO: 2416930 - RNA, 19 nt, Homo sapiens
  misc_RNA (1)...(19): siRNA sense strand
cgagagaauggcauggaga

SEQ ID NO: 2416931 - RNA, 19 nt, Homo sapiens
  misc_RNA (1)...(19): siRNA sense strand
uggcaaugugggcgaguuu

SEQ ID NO: 2416932 - RNA, 19 nt, Homo sapiens
  misc_RNA (1)...(19): siRNA sense strand
accaagaacucgggagaca

SEQ ID NO: 2416933 - RNA, 19 nt, Homo sapiens
  misc_RNA (1)...(19): siRNA sense strand
ucaccaagaacucgggaga

SEQ ID NO: 2416934 - RNA, 19 nt, Homo sapiens
  misc_RNA (1)...(19): siRNA sense strand
aguucacgguggaggugua

SEQ ID NO: 2416935 - RNA, 19 nt, Homo sapiens
  misc_RNA (1)...(19): siRNA sense strand
ccggcauggaugagagcau

SEQ ID NO: 2416936 - RNA, 19 nt, Homo sapiens
  misc_RNA (1)...(19): siRNA sense strand
uggcauaccucacacgaga

SEQ ID NO: 2416937 - RNA, 19 nt, Homo sapiens
  misc_RNA (1)...(19): siRNA sense strand
cccucaaggccaugaucaa

SEQ ID NO: 2416938 - RNA, 19 nt, Homo sapiens
  misc_RNA (1)...(19): siRNA sense strand
ugagcauguaccagagcua

SEQ ID NO: 2416939 - RNA, 19 nt, Homo sapiens
  misc_RNA (1)...(19): siRNA sense strand
acgagaacccggaguggga

SEQ ID NO: 2416940 - RNA, 19 nt, Homo sapiens
  misc_RNA (1)...(19): siRNA sense strand
ggccaacgugggugaucaa

SEQ ID NO: 2416941 - RNA, 19 nt, Homo sapiens
  misc_RNA (1)...(19): siRNA sense strand
ccugugagucggaggagga

SEQ ID NO: 2416942 - RNA, 19 nt, Homo sapiens
  misc_RNA (1)...(19): siRNA sense strand
cgcuguacgccgagaacuu

SEQ ID NO: 2416943 - RNA, 19 nt, Homo sapiens
  misc_RNA (1)...(19): siRNA sense strand
gugaccaugaagaguuuaa

SEQ ID NO: 2416944 - RNA, 19 nt, Homo sapiens
  misc_RNA (1)...(19): siRNA sense strand
acuacuaucccaugagcau

SEQ ID NO: 2416945 - RNA, 19 nt, Homo sapiens
  misc_RNA (1)...(19): siRNA sense strand
aagaagaagcggugggagg

SEQ ID NO: 2416946 - RNA, 19 nt, Homo sapiens
  misc_RNA (1)...(19): siRNA sense strand
ggagaagccaucagggaga

SEQ ID NO: 2416947 - RNA, 19 nt, Homo sapiens
  misc_RNA (1)...(19): siRNA sense strand
gaugaagaagagugggaga

SEQ ID NO: 2416948 - RNA, 19 nt, Homo sapiens
  misc_RNA (1)...(19): siRNA sense strand
auacaggguccuagggaga

SEQ ID NO: 2416949 - RNA, 19 nt, Homo sapiens
  misc_RNA (1)...(19): siRNA sense strand
gugaugaagaauaaggaga

SEQ ID NO: 2416950 - RNA, 19 nt, Homo sapiens
  misc_RNA (1)...(19): siRNA sense strand
agagcaggucacugagaua

SEQ ID NO: 2416951 - RNA, 19 nt, Homo sapiens
  misc_RNA (1)...(19): siRNA sense strand
gagaugaagaagaguggga

SEQ ID NO: 2416952 - RNA, 19 nt, Homo sapiens
  misc_RNA (1)...(19): siRNA sense strand
guucaggagggaagacaau

SEQ ID NO: 2416953 - RNA, 19 nt, Homo sapiens
  misc_RNA (1)...(19): siRNA sense strand
ccacguaucccaaggcuga

SEQ ID NO: 2416954 - RNA, 19 nt, Homo sapiens
  misc_RNA (1)...(19): siRNA sense strand
aagaauaaggagaagccau

SEQ ID NO: 2416955 - RNA, 19 nt, Homo sapiens
  misc_RNA (1)...(19): siRNA sense strand
gaaaguaugugguacagga

SEQ ID NO: 2416956 - RNA, 19 nt, Homo sapiens
  misc_RNA (1)...(19): siRNA sense strand
cgaagauuggagagaaagu

SEQ ID NO: 2416957 - RNA, 19 nt, Homo sapiens
  misc_RNA (1)...(19): siRNA sense strand
uagacaggcaagagcagaa

SEQ ID NO: 2416958 - RNA, 19 nt, Homo sapiens
  misc_RNA (1)...(19): siRNA sense strand
ggagggaagacaaugccaa

SEQ ID NO: 2416959 - RNA, 19 nt, Homo sapiens
  misc_RNA (1)...(19): siRNA sense strand
ccgagagccuggaugcaga

SEQ ID NO: 2416960 - RNA, 19 nt, Homo sapiens
  misc_RNA (1)...(19): siRNA sense strand
augaagaagagugggagaa

SEQ ID NO: 2416961 - RNA, 19 nt, Homo sapiens
  misc_RNA (1)...(19): siRNA sense strand
ggagaauguucaggaggga

SEQ ID NO: 2416962 - RNA, 19 nt, Homo sapiens
  misc_RNA (1)...(19): siRNA sense strand
gcaggagaggaguugggaa

SEQ ID NO: 2416963 - RNA, 19 nt, Homo sapiens
  misc_RNA (1)...(19): siRNA sense strand
cggcuguuaggcagugaaa

SEQ ID NO: 2416964 - RNA, 19 nt, Homo sapiens
  misc_RNA (1)...(19): siRNA sense strand
gguacaggaaacugaaagu

SEQ ID NO: 2416965 - RNA, 19 nt, Homo sapiens
  misc_RNA (1)...(19): siRNA sense strand
gaguguagugagguggaaa

SEQ ID NO: 2416966 - RNA, 19 nt, Homo sapiens
  misc_RNA (1)...(19): siRNA sense strand
aguguagugagguggaaau

SEQ ID NO: 2416967 - RNA, 19 nt, Homo sapiens
  misc_RNA (1)...(19): siRNA sense strand
aguaugugguacaggaaac

SEQ ID NO: 2416968 - RNA, 19 nt, Homo sapiens
  misc_RNA (1)...(19): siRNA sense strand
caguuuagguuucugcaga

SEQ ID NO: 2416969 - RNA, 19 nt, Homo sapiens
  misc_RNA (1)...(19): siRNA sense strand
ccacuuuccugcugcgcuu

SEQ ID NO: 2416970 - RNA, 19 nt, Homo sapiens
  misc_RNA (1)...(19): siRNA sense strand
aagaagagugggagaacac

SEQ ID NO: 2416971 - RNA, 19 nt, Homo sapiens
  misc_RNA (1)...(19): siRNA sense strand
ggcaagugucugaggugga

SEQ ID NO: 2416972 - RNA, 19 nt, Homo sapiens
  misc_RNA (1)...(19): siRNA sense strand
caugaaaccuacagcggca

SEQ ID NO: 2416973 - RNA, 19 nt, Homo sapiens
  misc_RNA (1)...(19): siRNA sense strand
ccacaaugaccguaaccca

SEQ ID NO: 2416974 - RNA, 19 nt, Homo sapiens
  misc_RNA (1)...(19): siRNA sense strand
ccuuaaagucuacacccaa

SEQ ID NO: 2416975 - RNA, 19 nt, Homo sapiens
  misc_RNA (1)...(19): siRNA sense strand
ucuuuacauuggaugcaaa

SEQ ID NO: 2416976 - RNA, 19 nt, Homo sapiens
  misc_RNA (1)...(19): siRNA sense strand
uggaagaaauuauccgaca

SEQ ID NO: 2416977 - RNA, 19 nt, Homo sapiens
  misc_RNA (1)...(19): siRNA sense strand
cagugaggagugucggaaa

SEQ ID NO: 2416978 - RNA, 19 nt, Homo sapiens
  misc_RNA (1)...(19): siRNA sense strand
ggauguggucaacgggcua

SEQ ID NO: 2416979 - RNA, 19 nt, Homo sapiens
  misc_RNA (1)...(19): siRNA sense strand
uccagcaacuugagggcaa

SEQ ID NO: 2416980 - RNA, 19 nt, Homo sapiens
  misc_RNA (1)...(19): siRNA sense strand
gcauauaauggaaagcgau

SEQ ID NO: 2416981 - RNA, 19 nt, Homo sapiens
  misc_RNA (1)...(19): siRNA sense strand
caauugagaucgacccaca

SEQ ID NO: 2416982 - RNA, 19 nt, Homo sapiens
  misc_RNA (1)...(19): siRNA sense strand
uggagaaggacgagacucu

SEQ ID NO: 2416983 - RNA, 19 nt, Homo sapiens
  misc_RNA (1)...(19): siRNA sense strand
caaugcucagggagggaua

SEQ ID NO: 2416984 - RNA, 19 nt, Homo sapiens
  misc_RNA (1)...(19): siRNA sense strand
augacaucgugcuggagaa

SEQ ID NO: 2416985 - RNA, 19 nt, Homo sapiens
  misc_RNA (1)...(19): siRNA sense strand
cuggauaauagcaagauca

SEQ ID NO: 2416986 - RNA, 19 nt, Homo sapiens
  misc_RNA (1)...(19): siRNA sense strand
agaaauuauccgacagaug

SEQ ID NO: 2416987 - RNA, 19 nt, Homo sapiens
  misc_RNA (1)...(19): siRNA sense strand
gguuugcauauaauggaaa

SEQ ID NO: 2416988 - RNA, 19 nt, Homo sapiens
  misc_RNA (1)...(19): siRNA sense strand
ggaaagagcucacagcgcu

SEQ ID NO: 2416989 - RNA, 19 nt, Homo sapiens
  misc_RNA (1)...(19): siRNA sense strand
aggaaaagaaagagaguua

SEQ ID NO: 2416990 - RNA, 19 nt, Homo sapiens
  misc_RNA (1)...(19): siRNA sense strand
ucaaagaagaggaggaaaa

SEQ ID NO: 2416991 - RNA, 19 nt, Homo sapiens
  misc_RNA (1)...(19): siRNA sense strand
gagcaagccuucagagcga

SEQ ID NO: 2416992 - RNA, 19 nt, Homo sapiens
  misc_RNA (1)...(19): siRNA sense strand
uggaauaugccaaggaaaa

SEQ ID NO: 2416993 - RNA, 19 nt, Homo sapiens
  misc_RNA (1)...(19): siRNA sense strand
gggaaguggaaccggauau

SEQ ID NO: 2416994 - RNA, 19 nt, Homo sapiens
  misc_RNA (1)...(19): siRNA sense strand
guaagaaugauaauggcaa

SEQ ID NO: 2416995 - RNA, 19 nt, Homo sapiens
  misc_RNA (1)...(19): siRNA sense strand
guggaauaugccaaggaaa

SEQ ID NO: 2416996 - RNA, 19 nt, Homo sapiens
  misc_RNA (1)...(19): siRNA sense strand
uuggaaggcuacagagaca

SEQ ID NO: 2416997 - RNA, 19 nt, Homo sapiens
  misc_RNA (1)...(19): siRNA sense strand
augaugagaugcaggccaa

SEQ ID NO: 2416998 - RNA, 19 nt, Homo sapiens
  misc_RNA (1)...(19): siRNA sense strand
cccaaaaggaaaagaaaga

SEQ ID NO: 2416999 - RNA, 19 nt, Homo sapiens
  misc_RNA (1)...(19): siRNA sense strand
auuacuauuuggaaggcua

SEQ ID NO: 2417000 - RNA, 19 nt, Homo sapiens
  misc_RNA (1)...(19): siRNA sense strand
aguuauggaagcauugaaa

SEQ ID NO: 2417001 - RNA, 19 nt, Homo sapiens
  misc_RNA (1)...(19): siRNA sense strand
ggagauuacuauuuggaag

SEQ ID NO: 2417002 - RNA, 19 nt, Homo sapiens
  misc_RNA (1)...(19): siRNA sense strand
ugguaauugccuccagaua

SEQ ID NO: 2417003 - RNA, 19 nt, Homo sapiens
  misc_RNA (1)...(19): siRNA sense strand
caaaaggaaaagaaagaga

SEQ ID NO: 2417004 - RNA, 19 nt, Homo sapiens
  misc_RNA (1)...(19): siRNA sense strand
agagaguuaaacagagaau

SEQ ID NO: 2417005 - RNA, 19 nt, Homo sapiens
  misc_RNA (1)...(19): siRNA sense strand
aaauggaagaggauaucaa

SEQ ID NO: 2417006 - RNA, 19 nt, Homo sapiens
  misc_RNA (1)...(19): siRNA sense strand
auaucaaagaagaggagga

SEQ ID NO: 2417007 - RNA, 19 nt, Homo sapiens
  misc_RNA (1)...(19): siRNA sense strand
cugaaagaguggagcaagc

SEQ ID NO: 2417008 - RNA, 19 nt, Homo sapiens
  misc_RNA (1)...(19): siRNA sense strand
guacugaaagaguggagca

SEQ ID NO: 2417009 - RNA, 19 nt, Homo sapiens
  misc_RNA (1)...(19): siRNA sense strand
acagugaagaggaugaaaa

SEQ ID NO: 2417010 - RNA, 19 nt, Homo sapiens
  misc_RNA (1)...(19): siRNA sense strand
ucuagacagugaagaggau

SEQ ID NO: 2417011 - RNA, 19 nt, Homo sapiens
  misc_RNA (1)...(19): siRNA sense strand
gauugaucguggagauuac

SEQ ID NO: 2417012 - RNA, 19 nt, Homo sapiens
  misc_RNA (1)...(19): siRNA sense strand
ugacacucaaggaggcaua

SEQ ID NO: 2417013 - RNA, 19 nt, Homo sapiens
  misc_RNA (1)...(19): siRNA sense strand
ggccacaggugaagcgacu

SEQ ID NO: 2417014 - RNA, 19 nt, Homo sapiens
  misc_RNA (1)...(19): siRNA sense strand
gcuacaaggaucuggaccu

SEQ ID NO: 2417015 - RNA, 19 nt, Homo sapiens
  misc_RNA (1)...(19): siRNA sense strand
cguuaauggaugagaacaa

SEQ ID NO: 2417016 - RNA, 19 nt, Homo sapiens
  misc_RNA (1)...(19): siRNA sense strand
uggaaaaggaagaugaaaa

SEQ ID NO: 2417017 - RNA, 19 nt, Homo sapiens
  misc_RNA (1)...(19): siRNA sense strand
caagagaagaagagaaaau

SEQ ID NO: 2417018 - RNA, 19 nt, Homo sapiens
  misc_RNA (1)...(19): siRNA sense strand
cugagaaggagaagcggaa

SEQ ID NO: 2417019 - RNA, 19 nt, Homo sapiens
  misc_RNA (1)...(19): siRNA sense strand
augcaaagagccagaaaga

SEQ ID NO: 2417020 - RNA, 19 nt, Homo sapiens
  misc_RNA (1)...(19): siRNA sense strand
aggaaggccuggaacgaau

SEQ ID NO: 2417021 - RNA, 19 nt, Homo sapiens
  misc_RNA (1)...(19): siRNA sense strand
ccuaacagugcaauggaua

SEQ ID NO: 2417022 - RNA, 19 nt, Homo sapiens
  misc_RNA (1)...(19): siRNA sense strand
cuaacagugcaauggauaa

SEQ ID NO: 2417023 - RNA, 19 nt, Homo sapiens
  misc_RNA (1)...(19): siRNA sense strand
cugcagagagacauugaaa

SEQ ID NO: 2417024 - RNA, 19 nt, Homo sapiens
  misc_RNA (1)...(19): siRNA sense strand
aucuucagguggagggaaa

SEQ ID NO: 2417025 - RNA, 19 nt, Homo sapiens
  misc_RNA (1)...(19): siRNA sense strand
cugaaaaguuggaaaagga

SEQ ID NO: 2417026 - RNA, 19 nt, Homo sapiens
  misc_RNA (1)...(19): siRNA sense strand
ccuaaauguacaagagaag

SEQ ID NO: 2417027 - RNA, 19 nt, Homo sapiens
  misc_RNA (1)...(19): siRNA sense strand
caacacagcuacaaaggca

SEQ ID NO: 2417028 - RNA, 19 nt, Homo sapiens
  misc_RNA (1)...(19): siRNA sense strand
gggaaaacacacuagagaa

SEQ ID NO: 2417029 - RNA, 19 nt, Homo sapiens
  misc_RNA (1)...(19): siRNA sense strand
ugugauuauacacgagaaa

SEQ ID NO: 2417030 - RNA, 19 nt, Homo sapiens
  misc_RNA (1)...(19): siRNA sense strand
guuagcagaacuugagcaa

SEQ ID NO: 2417031 - RNA, 19 nt, Homo sapiens
  misc_RNA (1)...(19): siRNA sense strand
caaugaaguugaaaagaca

SEQ ID NO: 2417032 - RNA, 19 nt, Homo sapiens
  misc_RNA (1)...(19): siRNA sense strand
gaugaguugaauuuggaaa

SEQ ID NO: 2417033 - RNA, 19 nt, Homo sapiens
  misc_RNA (1)...(19): siRNA sense strand
auggauaaagagagacgaa

SEQ ID NO: 2417034 - RNA, 19 nt, Homo sapiens
  misc_RNA (1)...(19): siRNA sense strand
ccaagaaacaugaagcacu

SEQ ID NO: 2417035 - RNA, 19 nt, Homo sapiens
  misc_RNA (1)...(19): siRNA sense strand
cugacaaaaucaacugaaa

SEQ ID NO: 2417036 - RNA, 19 nt, Homo sapiens
  misc_RNA (1)...(19): siRNA sense strand
uguagaaagcuccaagcaa

SEQ ID NO: 2417037 - RNA, 19 nt, Homo sapiens
  misc_RNA (1)...(19): siRNA sense strand
uccuaaauguacaagagaa

SEQ ID NO: 2417038 - RNA, 19 nt, Homo sapiens
  misc_RNA (1)...(19): siRNA sense strand
gggaaaaggagcauacuca

SEQ ID NO: 2417039 - RNA, 19 nt, Homo sapiens
  misc_RNA (1)...(19): siRNA sense strand
gcggaagcuccucaauaaa

SEQ ID NO: 2417040 - RNA, 19 nt, Homo sapiens
  misc_RNA (1)...(19): siRNA sense strand
ggaaaacacacuagagaac

SEQ ID NO: 2417041 - RNA, 19 nt, Homo sapiens
  misc_RNA (1)...(19): siRNA sense strand
cagccauccuuguaguaau

SEQ ID NO: 2417042 - RNA, 19 nt, Homo sapiens
  misc_RNA (1)...(19): siRNA sense strand
gguuauucuaccagacuga

SEQ ID NO: 2417043 - RNA, 19 nt, Homo sapiens
  misc_RNA (1)...(19): siRNA sense strand
ggccaaacccugaccacau

SEQ ID NO: 2417044 - RNA, 19 nt, Homo sapiens
  misc_RNA (1)...(19): siRNA sense strand
caucaauguuagcagaacu

SEQ ID NO: 2417045 - RNA, 19 nt, Homo sapiens
  misc_RNA (1)...(19): siRNA sense strand
aauuaaggccaagaagaaa

SEQ ID NO: 2417046 - RNA, 19 nt, Homo sapiens
  misc_RNA (1)...(19): siRNA sense strand
auuaaggccaagaagaaau

SEQ ID NO: 2417047 - RNA, 19 nt, Homo sapiens
  misc_RNA (1)...(19): siRNA sense strand
cuagagaacugcuaccaga

SEQ ID NO: 2417048 - RNA, 19 nt, Homo sapiens
  misc_RNA (1)...(19): siRNA sense strand
gagcaaagaccucaaccca

SEQ ID NO: 2417049 - RNA, 19 nt, Homo sapiens
  misc_RNA (1)...(19): siRNA sense strand
acuuaaaccaguacagcca

SEQ ID NO: 2417050 - RNA, 19 nt, Homo sapiens
  misc_RNA (1)...(19): siRNA sense strand
agacaaggaaggccuggaa

SEQ ID NO: 2417051 - RNA, 19 nt, Homo sapiens
  misc_RNA (1)...(19): siRNA sense strand
aaucuaugacugagaagga

SEQ ID NO: 2417052 - RNA, 19 nt, Homo sapiens
  misc_RNA (1)...(19): siRNA sense strand
acuuugaagaagauccuaa

SEQ ID NO: 2417053 - RNA, 19 nt, Homo sapiens
  misc_RNA (1)...(19): siRNA sense strand
agaagaaggauggugguuu

SEQ ID NO: 2417054 - RNA, 19 nt, Homo sapiens
  misc_RNA (1)...(19): siRNA sense strand
gcaagauugacauugaaaa

SEQ ID NO: 2417055 - RNA, 19 nt, Homo sapiens
  misc_RNA (1)...(19): siRNA sense strand
gagacugcagagagacauu

SEQ ID NO: 2417056 - RNA, 19 nt, Homo sapiens
  misc_RNA (1)...(19): siRNA sense strand
agagaaaaucacuugacaa

SEQ ID NO: 2417057 - RNA, 19 nt, Homo sapiens
  misc_RNA (1)...(19): siRNA sense strand
ugacaaauucugagagcaa

SEQ ID NO: 2417058 - RNA, 19 nt, Homo sapiens
  misc_RNA (1)...(19): siRNA sense strand
ccaccaagcaagagaggaa

SEQ ID NO: 2417059 - RNA, 19 nt, Homo sapiens
  misc_RNA (1)...(19): siRNA sense strand
ggaaacagucagagagaca

SEQ ID NO: 2417060 - RNA, 19 nt, Homo sapiens
  misc_RNA (1)...(19): siRNA sense strand
agaaagaggaagugaaaca

SEQ ID NO: 2417061 - RNA, 19 nt, Homo sapiens
  misc_RNA (1)...(19): siRNA sense strand
aggcagagcaagaagcaaa

SEQ ID NO: 2417062 - RNA, 19 nt, Homo sapiens
  misc_RNA (1)...(19): siRNA sense strand
ccaaagaaggcaacacaaa

SEQ ID NO: 2417063 - RNA, 19 nt, Homo sapiens
  misc_RNA (1)...(19): siRNA sense strand
cagcgaaggcggugaaaga

SEQ ID NO: 2417064 - RNA, 19 nt, Homo sapiens
  misc_RNA (1)...(19): siRNA sense strand
ggagaaggcaugcaaguua

SEQ ID NO: 2417065 - RNA, 19 nt, Homo sapiens
  misc_RNA (1)...(19): siRNA sense strand
cugcacaagaggaaagaaa

SEQ ID NO: 2417066 - RNA, 19 nt, Homo sapiens
  misc_RNA (1)...(19): siRNA sense strand
ugagaaugagcgugggaaa

SEQ ID NO: 2417067 - RNA, 19 nt, Homo sapiens
  misc_RNA (1)...(19): siRNA sense strand
ggaaaggacuuauggagca

SEQ ID NO: 2417068 - RNA, 19 nt, Homo sapiens
  misc_RNA (1)...(19): siRNA sense strand
gagagaaaguacaacagaa

SEQ ID NO: 2417069 - RNA, 19 nt, Homo sapiens
  misc_RNA (1)...(19): siRNA sense strand
ggaauuugccagugacaau

SEQ ID NO: 2417070 - RNA, 19 nt, Homo sapiens
  misc_RNA (1)...(19): siRNA sense strand
gauuauaacucuagaggcu

SEQ ID NO: 2417071 - RNA, 19 nt, Homo sapiens
  misc_RNA (1)...(19): siRNA sense strand
ccaagaaagaggaagugaa

SEQ ID NO: 2417072 - RNA, 19 nt, Homo sapiens
  misc_RNA (1)...(19): siRNA sense strand
gccuaugggaccagaaaua

SEQ ID NO: 2417073 - RNA, 19 nt, Homo sapiens
  misc_RNA (1)...(19): siRNA sense strand
gcuaaaggguacaagggau

SEQ ID NO: 2417074 - RNA, 19 nt, Homo sapiens
  misc_RNA (1)...(19): siRNA sense strand
guaugaagcaggaggcaga

SEQ ID NO: 2417075 - RNA, 19 nt, Homo sapiens
  misc_RNA (1)...(19): siRNA sense strand
cuaaaggguacaagggauu

SEQ ID NO: 2417076 - RNA, 19 nt, Homo sapiens
  misc_RNA (1)...(19): siRNA sense strand
gagaaguaccugagaucau

SEQ ID NO: 2417077 - RNA, 19 nt, Homo sapiens
  misc_RNA (1)...(19): siRNA sense strand
gagaaggcaugcaaguuaa

SEQ ID NO: 2417078 - RNA, 19 nt, Homo sapiens
  misc_RNA (1)...(19): siRNA sense strand
ggaaccauucugagugaaa

SEQ ID NO: 2417079 - RNA, 19 nt, Homo sapiens
  misc_RNA (1)...(19): siRNA sense strand
uuggagaauuugugaagua

SEQ ID NO: 2417080 - RNA, 19 nt, Homo sapiens
  misc_RNA (1)...(19): siRNA sense strand
acacaaauugcaagggaga

SEQ ID NO: 2417081 - RNA, 19 nt, Homo sapiens
  misc_RNA (1)...(19): siRNA sense strand
ggagaccaguugauaaaua

SEQ ID NO: 2417082 - RNA, 19 nt, Homo sapiens
  misc_RNA (1)...(19): siRNA sense strand
ggcugaaacuggaagaaaa

SEQ ID NO: 2417083 - RNA, 19 nt, Homo sapiens
  misc_RNA (1)...(19): siRNA sense strand
aucccaaaguacagaaaua

SEQ ID NO: 2417084 - RNA, 19 nt, Homo sapiens
  misc_RNA (1)...(19): siRNA sense strand
agaacgugaguuagagaaa

SEQ ID NO: 2417085 - RNA, 19 nt, Homo sapiens
  misc_RNA (1)...(19): siRNA sense strand
gggaugggaaagaaauaaa

SEQ ID NO: 2417086 - RNA, 19 nt, Homo sapiens
  misc_RNA (1)...(19): siRNA sense strand
uaagagagacagagaugaa

SEQ ID NO: 2417087 - RNA, 19 nt, Homo sapiens
  misc_RNA (1)...(19): siRNA sense strand
ggaacuggcagaaggucaa

SEQ ID NO: 2417088 - RNA, 19 nt, Homo sapiens
  misc_RNA (1)...(19): siRNA sense strand
uggaauggguugugggucu

SEQ ID NO: 2417089 - RNA, 19 nt, Homo sapiens
  misc_RNA (1)...(19): siRNA sense strand
ugggagaccaguugauaaa

SEQ ID NO: 2417090 - RNA, 19 nt, Homo sapiens
  misc_RNA (1)...(19): siRNA sense strand
gcacaagaggaaagaaacu

SEQ ID NO: 2417091 - RNA, 19 nt, Homo sapiens
  misc_RNA (1)...(19): siRNA sense strand
cugagggaguaaagaagaa

SEQ ID NO: 2417092 - RNA, 19 nt, Homo sapiens
  misc_RNA (1)...(19): siRNA sense strand
aucagaagcuggucagaaa

SEQ ID NO: 2417093 - RNA, 19 nt, Homo sapiens
  misc_RNA (1)...(19): siRNA sense strand
agaauauagaccuggaaau

SEQ ID NO: 2417094 - RNA, 19 nt, Homo sapiens
  misc_RNA (1)...(19): siRNA sense strand
gcgaaggcggugaaagaau

SEQ ID NO: 2417095 - RNA, 19 nt, Homo sapiens
  misc_RNA (1)...(19): siRNA sense strand
ccaagaagccgaaugccaa

SEQ ID NO: 2417096 - RNA, 19 nt, Homo sapiens
  misc_RNA (1)...(19): siRNA sense strand
cagcgaagaccuuggcauu

SEQ ID NO: 2417097 - RNA, 19 nt, Homo sapiens
  misc_RNA (1)...(19): siRNA sense strand
gcuaacugacguuggcaua

SEQ ID NO: 2417098 - RNA, 19 nt, Homo sapiens
  misc_RNA (1)...(19): siRNA sense strand
ugaacuuugcccagagaua

SEQ ID NO: 2417099 - RNA, 19 nt, Homo sapiens
  misc_RNA (1)...(19): siRNA sense strand
caacauggaugaaucagua

SEQ ID NO: 2417100 - RNA, 19 nt, Homo sapiens
  misc_RNA (1)...(19): siRNA sense strand
caagagggguucaaggaaa

SEQ ID NO: 2417101 - RNA, 19 nt, Homo sapiens
  misc_RNA (1)...(19): siRNA sense strand
ccagcaagcucuagggaag

SEQ ID NO: 2417102 - RNA, 19 nt, Homo sapiens
  misc_RNA (1)...(19): siRNA sense strand
gugaagacucugacaguga

SEQ ID NO: 2417103 - RNA, 19 nt, Homo sapiens
  misc_RNA (1)...(19): siRNA sense strand
gcucuugucuggugaguca

SEQ ID NO: 2417104 - RNA, 19 nt, Homo sapiens
  misc_RNA (1)...(19): siRNA sense strand
cagggaugggaaagaaaua

SEQ ID NO: 2417105 - RNA, 19 nt, Homo sapiens
  misc_RNA (1)...(19): siRNA sense strand
caggaaacagucagagaga

SEQ ID NO: 2417106 - RNA, 19 nt, Homo sapiens
  misc_RNA (1)...(19): siRNA sense strand
uuggaagagucuaaagaau

SEQ ID NO: 2417107 - RNA, 19 nt, Homo sapiens
  misc_RNA (1)...(19): siRNA sense strand
gucaagaccaggaggaaaa

SEQ ID NO: 2417108 - RNA, 19 nt, Homo sapiens
  misc_RNA (1)...(19): siRNA sense strand
ugaugagauaagugugaua

SEQ ID NO: 2417109 - RNA, 19 nt, Homo sapiens
  misc_RNA (1)...(19): siRNA sense strand
aggaaaugucacagacuuu

SEQ ID NO: 2417110 - RNA, 19 nt, Homo sapiens
  misc_RNA (1)...(19): siRNA sense strand
cagaaauacauuagcuuca

SEQ ID NO: 2417111 - RNA, 19 nt, Homo sapiens
  misc_RNA (1)...(19): siRNA sense strand
ucaagaacagcuacggaaa

SEQ ID NO: 2417112 - RNA, 19 nt, Homo sapiens
  misc_RNA (1)...(19): siRNA sense strand
gaaaggacuuauggagcaa

SEQ ID NO: 2417113 - RNA, 19 nt, Homo sapiens
  misc_RNA (1)...(19): siRNA sense strand
gguacaaguucaggaaaca

SEQ ID NO: 2417114 - RNA, 19 nt, Homo sapiens
  misc_RNA (1)...(19): siRNA sense strand
ggcauuuauuucaggagaa

SEQ ID NO: 2417115 - RNA, 19 nt, Homo sapiens
  misc_RNA (1)...(19): siRNA sense strand
aagagaaacaagacccaaa

SEQ ID NO: 2417116 - RNA, 19 nt, Homo sapiens
  misc_RNA (1)...(19): siRNA sense strand
aaugccaaccugagagaaa

SEQ ID NO: 2417117 - RNA, 19 nt, Homo sapiens
  misc_RNA (1)...(19): siRNA sense strand
agucaagaccaggaggaaa

SEQ ID NO: 2417118 - RNA, 19 nt, Homo sapiens
  misc_RNA (1)...(19): siRNA sense strand
ggcagaaggucaaaacaaa

SEQ ID NO: 2417119 - RNA, 19 nt, Homo sapiens
  misc_RNA (1)...(19): siRNA sense strand
gcacaacuccacaggccaa

SEQ ID NO: 2417120 - RNA, 19 nt, Homo sapiens
  misc_RNA (1)...(19): siRNA sense strand
acacagaagagaaacaaga

SEQ ID NO: 2417121 - RNA, 19 nt, Homo sapiens
  misc_RNA (1)...(19): siRNA sense strand
ucuacuaucugcuggacaa

SEQ ID NO: 2417122 - RNA, 19 nt, Homo sapiens
  misc_RNA (1)...(19): siRNA sense strand
ggucagaaauguugcaccu

SEQ ID NO: 2417123 - RNA, 19 nt, Homo sapiens
  misc_RNA (1)...(19): siRNA sense strand
ugacagaacaggggagaua

SEQ ID NO: 2417124 - RNA, 19 nt, Homo sapiens
  misc_RNA (1)...(19): siRNA sense strand
agccgggaaugaagggaaa

SEQ ID NO: 2417125 - RNA, 19 nt, Homo sapiens
  misc_RNA (1)...(19): siRNA sense strand
gcugaagauuauaacucua

SEQ ID NO: 2417126 - RNA, 19 nt, Homo sapiens
  misc_RNA (1)...(19): siRNA sense strand
aggaggagcugauuggaga

SEQ ID NO: 2417127 - RNA, 19 nt, Homo sapiens
  misc_RNA (1)...(19): siRNA sense strand
ugguggagaagaugagaaa

SEQ ID NO: 2417128 - RNA, 19 nt, Homo sapiens
  misc_RNA (1)...(19): siRNA sense strand
augagaaaguauauggaga

SEQ ID NO: 2417129 - RNA, 19 nt, Homo sapiens
  misc_RNA (1)...(19): siRNA sense strand
ggaucugaagcuagaggaa

SEQ ID NO: 2417130 - RNA, 19 nt, Homo sapiens
  misc_RNA (1)...(19): siRNA sense strand
aucugaagcuagaggaauu

SEQ ID NO: 2417131 - RNA, 19 nt, Homo sapiens
  misc_RNA (1)...(19): siRNA sense strand
ccgucaggcagaagaagaa

SEQ ID NO: 2417132 - RNA, 19 nt, Homo sapiens
  misc_RNA (1)...(19): siRNA sense strand
cuuacgaacccuuggaaca

SEQ ID NO: 2417133 - RNA, 19 nt, Homo sapiens
  misc_RNA (1)...(19): siRNA sense strand
agugaugauuacagaggau

SEQ ID NO: 2417134 - RNA, 19 nt, Homo sapiens
  misc_RNA (1)...(19): siRNA sense strand
gcaucaacgaggagaucca

SEQ ID NO: 2417135 - RNA, 19 nt, Homo sapiens
  misc_RNA (1)...(19): siRNA sense strand
agaagaagaaugugcccau

SEQ ID NO: 2417136 - RNA, 19 nt, Homo sapiens
  misc_RNA (1)...(19): siRNA sense strand
gaacauaaugauaaagcac

SEQ ID NO: 2417137 - RNA, 19 nt, Homo sapiens
  misc_RNA (1)...(19): siRNA sense strand
ccaacaaagcccuggggau

SEQ ID NO: 2417138 - RNA, 19 nt, Homo sapiens
  misc_RNA (1)...(19): siRNA sense strand
acgcagagcagcugaucca

SEQ ID NO: 2417139 - RNA, 19 nt, Homo sapiens
  misc_RNA (1)...(19): siRNA sense strand
gacacuacggacagagaau

SEQ ID NO: 2417140 - RNA, 19 nt, Homo sapiens
  misc_RNA (1)...(19): siRNA sense strand
ggacagagaaugagcaucg

SEQ ID NO: 2417141 - RNA, 19 nt, Homo sapiens
  misc_RNA (1)...(19): siRNA sense strand
uugaauacugugaggcuaa

SEQ ID NO: 2417142 - RNA, 19 nt, Homo sapiens
  misc_RNA (1)...(19): siRNA sense strand
aaccaauaacaaaggauca

SEQ ID NO: 2417143 - RNA, 19 nt, Homo sapiens
  misc_RNA (1)...(19): siRNA sense strand
guauauuaugugaggcaaa

SEQ ID NO: 2417144 - RNA, 19 nt, Homo sapiens
  misc_RNA (1)...(19): siRNA sense strand
ggaugaacaugcuggcaga

SEQ ID NO: 2417145 - RNA, 19 nt, Homo sapiens
  misc_RNA (1)...(19): siRNA sense strand
cugguagaccugugguuaa

SEQ ID NO: 2417146 - RNA, 19 nt, Homo sapiens
  misc_RNA (1)...(19): siRNA sense strand
aaugcaaaucucaaggaaa

SEQ ID NO: 2417147 - RNA, 19 nt, Homo sapiens
  misc_RNA (1)...(19): siRNA sense strand
ugauauuagcacuguggua

SEQ ID NO: 2417148 - RNA, 19 nt, Homo sapiens
  misc_RNA (1)...(19): siRNA sense strand
cagcaaguucugaggagca

SEQ ID NO: 2417149 - RNA, 19 nt, Homo sapiens
  misc_RNA (1)...(19): siRNA sense strand
auauuagcacugugguaua

SEQ ID NO: 2417150 - RNA, 19 nt, Homo sapiens
  misc_RNA (1)...(19): siRNA sense strand
ugguauauuaugugaggca

SEQ ID NO: 2417151 - RNA, 19 nt, Homo sapiens
  misc_RNA (1)...(19): siRNA sense strand
agaucuuccuccugaaaca

SEQ ID NO: 2417152 - RNA, 19 nt, Homo sapiens
  misc_RNA (1)...(19): siRNA sense strand
acaucuauucccaaugaaa

SEQ ID NO: 2417153 - RNA, 19 nt, Homo sapiens
  misc_RNA (1)...(19): siRNA sense strand
ugaucucauaugugguaua

SEQ ID NO: 2417154 - RNA, 19 nt, Homo sapiens
  misc_RNA (1)...(19): siRNA sense strand
augaagaaccacagggcga

SEQ ID NO: 2417155 - RNA, 19 nt, Homo sapiens
  misc_RNA (1)...(19): siRNA sense strand
gggaauauccucucgggca

SEQ ID NO: 2417156 - RNA, 19 nt, Homo sapiens
  misc_RNA (1)...(19): siRNA sense strand
acgaccacgagauggaaua

SEQ ID NO: 2417157 - RNA, 19 nt, Homo sapiens
  misc_RNA (1)...(19): siRNA sense strand
gcacugcaauugcgggcau

SEQ ID NO: 2417158 - RNA, 19 nt, Homo sapiens
  misc_RNA (1)...(19): siRNA sense strand
gggaaugucuggagcgcuu

SEQ ID NO: 2417159 - RNA, 19 nt, Homo sapiens
  misc_RNA (1)...(19): siRNA sense strand
gaaacaagcuaacggacga

SEQ ID NO: 2417160 - RNA, 19 nt, Homo sapiens
  misc_RNA (1)...(19): siRNA sense strand
ucaaggagaucaaaggcua

SEQ ID NO: 2417161 - RNA, 19 nt, Homo sapiens
  misc_RNA (1)...(19): siRNA sense strand
ggaacaacaaggagcacca

SEQ ID NO: 2417162 - RNA, 19 nt, Homo sapiens
  misc_RNA (1)...(19): siRNA sense strand
gugccaugaucaacagcaa

SEQ ID NO: 2417163 - RNA, 19 nt, Homo sapiens
  misc_RNA (1)...(19): siRNA sense strand
aggaguauaucaugcgaga

SEQ ID NO: 2417164 - RNA, 19 nt, Homo sapiens
  misc_RNA (1)...(19): siRNA sense strand
ggaacuggggcgaggacua

SEQ ID NO: 2417165 - RNA, 19 nt, Homo sapiens
  misc_RNA (1)...(19): siRNA sense strand
ccuacagcaauuacagaaa

SEQ ID NO: 2417166 - RNA, 19 nt, Homo sapiens
  misc_RNA (1)...(19): siRNA sense strand
guauaucaugcgagauuau

SEQ ID NO: 2417167 - RNA, 19 nt, Homo sapiens
  misc_RNA (1)...(19): siRNA sense strand
auacguacuaugaccgaaa

SEQ ID NO: 2417168 - RNA, 19 nt, Homo sapiens
  misc_RNA (1)...(19): siRNA sense strand
gaagagacagggaggucca

SEQ ID NO: 2417169 - RNA, 19 nt, Homo sapiens
  misc_RNA (1)...(19): siRNA sense strand
cgauggugcuggaaggaag

SEQ ID NO: 2417170 - RNA, 19 nt, Homo sapiens
  misc_RNA (1)...(19): siRNA sense strand
aucaaaggcuacaaggaca

SEQ ID NO: 2417171 - RNA, 19 nt, Homo sapiens
  misc_RNA (1)...(19): siRNA sense strand
cgcggagguugaagagaca

SEQ ID NO: 2417172 - RNA, 19 nt, Homo sapiens
  misc_RNA (1)...(19): siRNA sense strand
aucaaugggcagauagcaa

SEQ ID NO: 2417173 - RNA, 19 nt, Homo sapiens
  misc_RNA (1)...(19): siRNA sense strand
ucaaaggcuacaaggacau

SEQ ID NO: 2417174 - RNA, 19 nt, Homo sapiens
  misc_RNA (1)...(19): siRNA sense strand
ccucuggaguggaagggca

SEQ ID NO: 2417175 - RNA, 19 nt, Homo sapiens
  misc_RNA (1)...(19): siRNA sense strand
uuguguaugccgaggugaa

SEQ ID NO: 2417176 - RNA, 19 nt, Homo sapiens
  misc_RNA (1)...(19): siRNA sense strand
gggauguccaccuggccua

SEQ ID NO: 2417177 - RNA, 19 nt, Homo sapiens
  misc_RNA (1)...(19): siRNA sense strand
gcacuaagauggugggguc

SEQ ID NO: 2417178 - RNA, 19 nt, Homo sapiens
  misc_RNA (1)...(19): siRNA sense strand
guuuacaagggucaugaaa

SEQ ID NO: 2417179 - RNA, 19 nt, Homo sapiens
  misc_RNA (1)...(19): siRNA sense strand
augaaguaccggaggaauu

SEQ ID NO: 2417180 - RNA, 19 nt, Homo sapiens
  misc_RNA (1)...(19): siRNA sense strand
gaucaggaggaguggaaaa

SEQ ID NO: 2417181 - RNA, 19 nt, Homo sapiens
  misc_RNA (1)...(19): siRNA sense strand
agauggaugaagagggcua

SEQ ID NO: 2417182 - RNA, 19 nt, Homo sapiens
  misc_RNA (1)...(19): siRNA sense strand
ugucuaaagccaagggcau

SEQ ID NO: 2417183 - RNA, 19 nt, Homo sapiens
  misc_RNA (1)...(19): siRNA sense strand
caccuaacacagaaggaaa

SEQ ID NO: 2417184 - RNA, 19 nt, Homo sapiens
  misc_RNA (1)...(19): siRNA sense strand
aaaaggagaaggagggcaa

SEQ ID NO: 2417185 - RNA, 19 nt, Homo sapiens
  misc_RNA (1)...(19): siRNA sense strand
gggagguggugaaggccuu

SEQ ID NO: 2417186 - RNA, 19 nt, Homo sapiens
  misc_RNA (1)...(19): siRNA sense strand
cuggcaagauugaacggaa

SEQ ID NO: 2417187 - RNA, 19 nt, Homo sapiens
  misc_RNA (1)...(19): siRNA sense strand
cagagagaugggagaccua

SEQ ID NO: 2417188 - RNA, 19 nt, Homo sapiens
  misc_RNA (1)...(19): siRNA sense strand
gcuucagagagaugggaga

SEQ ID NO: 2417189 - RNA, 19 nt, Homo sapiens
  misc_RNA (1)...(19): siRNA sense strand
aggaucaggaggaguggaa

SEQ ID NO: 2417190 - RNA, 19 nt, Homo sapiens
  misc_RNA (1)...(19): siRNA sense strand
gggaggucguguugcccaa

SEQ ID NO: 2417191 - RNA, 19 nt, Homo sapiens
  misc_RNA (1)...(19): siRNA sense strand
aacuaugggcagucggaaa

SEQ ID NO: 2417192 - RNA, 19 nt, Homo sapiens
  misc_RNA (1)...(19): siRNA sense strand
auggaaugacuaugaagua

SEQ ID NO: 2417193 - RNA, 19 nt, Homo sapiens
  misc_RNA (1)...(19): siRNA sense strand
guguuaagucaaagaccuu

SEQ ID NO: 2417194 - RNA, 19 nt, Homo sapiens
  misc_RNA (1)...(19): siRNA sense strand
cuacaguugucuaaagcca

SEQ ID NO: 2417195 - RNA, 19 nt, Homo sapiens
  misc_RNA (1)...(19): siRNA sense strand
aggaaauuacggagccuga

SEQ ID NO: 2417196 - RNA, 19 nt, Homo sapiens
  misc_RNA (1)...(19): siRNA sense strand
ggugaauggccaaggggau

SEQ ID NO: 2417197 - RNA, 19 nt, Homo sapiens
  misc_RNA (1)...(19): siRNA sense strand
gggaugaaguaaaguggag

SEQ ID NO: 2417198 - RNA, 19 nt, Homo sapiens
  misc_RNA (1)...(19): siRNA sense strand
agacauucucuaucgacua

SEQ ID NO: 2417199 - RNA, 19 nt, Homo sapiens
  misc_RNA (1)...(19): siRNA sense strand
gccaaggggaugaaguaaa

SEQ ID NO: 2417200 - RNA, 19 nt, Homo sapiens
  misc_RNA (1)...(19): siRNA sense strand
uguugaaggccaaagacau

SEQ ID NO: 2417201 - RNA, 19 nt, Homo sapiens
  misc_RNA (1)...(19): siRNA sense strand
cauacaaguacccaaggaa

SEQ ID NO: 2417202 - RNA, 19 nt, Homo sapiens
  misc_RNA (1)...(19): siRNA sense strand
ccuacaacagggagaccau

SEQ ID NO: 2417203 - RNA, 19 nt, Homo sapiens
  misc_RNA (1)...(19): siRNA sense strand
cgugaaggguggcuggacu

SEQ ID NO: 2417204 - RNA, 19 nt, Homo sapiens
  misc_RNA (1)...(19): siRNA sense strand
ccauuuggacccugguaga

SEQ ID NO: 2417205 - RNA, 19 nt, Homo sapiens
  misc_RNA (1)...(19): siRNA sense strand
gugaaggguggcuggacuu

SEQ ID NO: 2417206 - RNA, 19 nt, Homo sapiens
  misc_RNA (1)...(19): siRNA sense strand
agauugaacggaaggaacu

SEQ ID NO: 2417207 - RNA, 19 nt, Homo sapiens
  misc_RNA (1)...(19): siRNA sense strand
aggucaucauacagacauu

SEQ ID NO: 2417208 - RNA, 19 nt, Homo sapiens
  misc_RNA (1)...(19): siRNA sense strand
ggggaaagcccuugagaau

SEQ ID NO: 2417209 - RNA, 19 nt, Homo sapiens
  misc_RNA (1)...(19): siRNA sense strand
auggauugguagagaagaa

SEQ ID NO: 2417210 - RNA, 19 nt, Homo sapiens
  misc_RNA (1)...(19): siRNA sense strand
gggugacgaauuugagaaa

SEQ ID NO: 2417211 - RNA, 19 nt, Homo sapiens
  misc_RNA (1)...(19): siRNA sense strand
agaaagugaaggaguggaa

SEQ ID NO: 2417212 - RNA, 19 nt, Homo sapiens
  misc_RNA (1)...(19): siRNA sense strand
gugaaggaguggaagcaga

SEQ ID NO: 2417213 - RNA, 19 nt, Homo sapiens
  misc_RNA (1)...(19): siRNA sense strand
cgauaaggaaacagugaca

SEQ ID NO: 2417214 - RNA, 19 nt, Homo sapiens
  misc_RNA (1)...(19): siRNA sense strand
agaugaauccuuaaagcaa

SEQ ID NO: 2417215 - RNA, 19 nt, Homo sapiens
  misc_RNA (1)...(19): siRNA sense strand
auuuaagaauggagggagu

SEQ ID NO: 2417216 - RNA, 19 nt, Homo sapiens
  misc_RNA (1)...(19): siRNA sense strand
cacuaauggaggaggguga

SEQ ID NO: 2417217 - RNA, 19 nt, Homo sapiens
  misc_RNA (1)...(19): siRNA sense strand
acaagggaaccguggacaa

SEQ ID NO: 2417218 - RNA, 19 nt, Homo sapiens
  misc_RNA (1)...(19): siRNA sense strand
caaaggaacaagaagggau

SEQ ID NO: 2417219 - RNA, 19 nt, Homo sapiens
  misc_RNA (1)...(19): siRNA sense strand
gauuaaaacagcagcaaca

SEQ ID NO: 2417220 - RNA, 19 nt, Homo sapiens
  misc_RNA (1)...(19): siRNA sense strand
ggucaguagagcauccaaa

SEQ ID NO: 2417221 - RNA, 19 nt, Homo sapiens
  misc_RNA (1)...(19): siRNA sense strand
gugccaggcuucaaggaga

SEQ ID NO: 2417222 - RNA, 19 nt, Homo sapiens
  misc_RNA (1)...(19): siRNA sense strand
aggaguggaagcagaacaa

SEQ ID NO: 2417223 - RNA, 19 nt, Homo sapiens
  misc_RNA (1)...(19): siRNA sense strand
gaguggaagcagaacaaga

SEQ ID NO: 2417224 - RNA, 19 nt, Homo sapiens
  misc_RNA (1)...(19): siRNA sense strand
uaugauaaaccuuggcaau

SEQ ID NO: 2417225 - RNA, 19 nt, Homo sapiens
  misc_RNA (1)...(19): siRNA sense strand
auaaggaaacagugacauu

SEQ ID NO: 2417226 - RNA, 19 nt, Homo sapiens
  misc_RNA (1)...(19): siRNA sense strand
ccaaaguggaacuggagga

SEQ ID NO: 2417227 - RNA, 19 nt, Homo sapiens
  misc_RNA (1)...(19): siRNA sense strand
aaaggaacaagaagggauu

SEQ ID NO: 2417228 - RNA, 19 nt, Homo sapiens
  misc_RNA (1)...(19): siRNA sense strand
acacagaaagugaaggagu

SEQ ID NO: 2417229 - RNA, 19 nt, Homo sapiens
  misc_RNA (1)...(19): siRNA sense strand
aagaugaugcaauggaauu

SEQ ID NO: 2417230 - RNA, 19 nt, Homo sapiens
  misc_RNA (1)...(19): siRNA sense strand
aagaauggagggaguaaca

SEQ ID NO: 2417231 - RNA, 19 nt, Homo sapiens
  misc_RNA (1)...(19): siRNA sense strand
ccaaugggaaagugaagau

SEQ ID NO: 2417232 - RNA, 19 nt, Homo sapiens
  misc_RNA (1)...(19): siRNA sense strand
uggaggagggugacgaauu

SEQ ID NO: 2417233 - RNA, 19 nt, Homo sapiens
  misc_RNA (1)...(19): siRNA sense strand
agaugaacucgauaaggaa

SEQ ID NO: 2417234 - RNA, 19 nt, Homo sapiens
  misc_RNA (1)...(19): siRNA sense strand
cagaagagucacuaccaau

SEQ ID NO: 2417235 - RNA, 19 nt, Homo sapiens
  misc_RNA (1)...(19): siRNA sense strand
gagccuaagaacaaaggau

SEQ ID NO: 2417236 - RNA, 19 nt, Homo sapiens
  misc_RNA (1)...(19): siRNA sense strand
ccuuaaagcaauugcaggu

SEQ ID NO: 2417237 - RNA, 19 nt, Homo sapiens
  misc_RNA (1)...(19): siRNA sense strand
ggcaauuaaaugcaaagaa

SEQ ID NO: 2417238 - RNA, 19 nt, Homo sapiens
  misc_RNA (1)...(19): siRNA sense strand
cuggaggacuaaaccacaa

SEQ ID NO: 2417239 - RNA, 19 nt, Homo sapiens
  misc_RNA (1)...(19): siRNA sense strand
uugccaagugacacagaaa

SEQ ID NO: 2417240 - RNA, 19 nt, Homo sapiens
  misc_RNA (1)...(19): siRNA sense strand
acuccauucuccagaugaa

SEQ ID NO: 2417241 - RNA, 19 nt, Homo sapiens
  misc_RNA (1)...(19): siRNA sense strand
gccaaggucaguagagcau

SEQ ID NO: 2417242 - RNA, 19 nt, Homo sapiens
  misc_RNA (1)...(19): siRNA sense strand
aagugaagauaguggcucu

SEQ ID NO: 2417243 - RNA, 19 nt, Homo sapiens
  misc_RNA (1)...(19): siRNA sense strand
uuaagaauggagggaguaa

SEQ ID NO: 2417244 - RNA, 19 nt, Homo sapiens
  misc_RNA (1)...(19): siRNA sense strand
aguaggacacucacugaaa

SEQ ID NO: 2417245 - RNA, 19 nt, Homo sapiens
  misc_RNA (1)...(19): siRNA sense strand
aaggagacaaccuggaaga

SEQ ID NO: 2417246 - RNA, 19 nt, Homo sapiens
  misc_RNA (1)...(19): siRNA sense strand
uggagaauggauugguaga

SEQ ID NO: 2417247 - RNA, 19 nt, Homo sapiens
  misc_RNA (1)...(19): siRNA sense strand
gagaagaaaaugaugcuga

SEQ ID NO: 2417248 - RNA, 19 nt, Homo sapiens
  misc_RNA (1)...(19): siRNA sense strand
gugacgaauuugagaaagc

SEQ ID NO: 2417249 - RNA, 19 nt, Homo sapiens
  misc_RNA (1)...(19): siRNA sense strand
uggaagaagaugaauccuu

SEQ ID NO: 2417250 - RNA, 19 nt, Homo sapiens
  misc_RNA (1)...(19): siRNA sense strand
caggaagcuuaaagaugga

SEQ ID NO: 2417251 - RNA, 19 nt, Homo sapiens
  misc_RNA (1)...(19): siRNA sense strand
aagaagcacuaauggagga

SEQ ID NO: 2417252 - RNA, 19 nt, Homo sapiens
  misc_RNA (1)...(19): siRNA sense strand
acuacauggaagaagauga

SEQ ID NO: 2417253 - RNA, 19 nt, Homo sapiens
  misc_RNA (1)...(19): siRNA sense strand
ugugauuggagaauggauu

SEQ ID NO: 2417254 - RNA, 19 nt, Homo sapiens
  misc_RNA (1)...(19): siRNA sense strand
augggaaagugaagauagu

SEQ ID NO: 2417255 - RNA, 19 nt, Homo sapiens
  misc_RNA (1)...(19): siRNA sense strand
agccuaagaacaaaggauu

SEQ ID NO: 2417256 - RNA, 19 nt, Homo sapiens
  misc_RNA (1)...(19): siRNA sense strand
ccuucugggagcaaauuua

SEQ ID NO: 2417257 - RNA, 19 nt, Homo sapiens
  misc_RNA (1)...(19): siRNA sense strand
gcagaaagaugcuaggaug

SEQ ID NO: 2417258 - RNA, 19 nt, Homo sapiens
  misc_RNA (1)...(19): siRNA sense strand
cagaaagaugcuaggaugu

SEQ ID NO: 2417259 - RNA, 19 nt, Homo sapiens
  misc_RNA (1)...(19): siRNA sense strand
ggaaugagcuggagaaggc

SEQ ID NO: 2417260 - RNA, 19 nt, Homo sapiens
  misc_RNA (1)...(19): siRNA sense strand
uggcauucgcccaggaguu

SEQ ID NO: 2417261 - RNA, 19 nt, Homo sapiens
  misc_RNA (1)...(19): siRNA sense strand
ucccuuugcuagagcggua

SEQ ID NO: 2417262 - RNA, 19 nt, Homo sapiens
  misc_RNA (1)...(19): siRNA sense strand
gcgacaacuucgagggcua

SEQ ID NO: 2417263 - RNA, 19 nt, Homo sapiens
  misc_RNA (1)...(19): siRNA sense strand
gugaaggucaagugugcaa

SEQ ID NO: 2417264 - RNA, 19 nt, Homo sapiens
  misc_RNA (1)...(19): siRNA sense strand
ccaaguugcugaagccaca

SEQ ID NO: 2417265 - RNA, 19 nt, Homo sapiens
  misc_RNA (1)...(19): siRNA sense strand
acagaaaaugcaagaguuu

SEQ ID NO: 2417266 - RNA, 19 nt, Homo sapiens
  misc_RNA (1)...(19): siRNA sense strand
cccauuggaucgaaggaga

SEQ ID NO: 2417267 - RNA, 19 nt, Homo sapiens
  misc_RNA (1)...(19): siRNA sense strand
auaacagaggccuggacaa

SEQ ID NO: 2417268 - RNA, 19 nt, Homo sapiens
  misc_RNA (1)...(19): siRNA sense strand
uuggaucgaaggagacaaa

SEQ ID NO: 2417269 - RNA, 19 nt, Homo sapiens
  misc_RNA (1)...(19): siRNA sense strand
gaaaagaagaacagaggcu

SEQ ID NO: 2417270 - RNA, 19 nt, Homo sapiens
  misc_RNA (1)...(19): siRNA sense strand
ggaucgaaggagacaaacu

SEQ ID NO: 2417271 - RNA, 19 nt, Homo sapiens
  misc_RNA (1)...(19): siRNA sense strand
ccuguauccagaagggaga

SEQ ID NO: 2417272 - RNA, 19 nt, Homo sapiens
  misc_RNA (1)...(19): siRNA sense strand
cauaacaggauaagggaga

SEQ ID NO: 2417273 - RNA, 19 nt, Homo sapiens
  misc_RNA (1)...(19): siRNA sense strand
agggagaucuugaaggcau

SEQ ID NO: 2417274 - RNA, 19 nt, Homo sapiens
  misc_RNA (1)...(19): siRNA sense strand
aaguaaacuguguaggauu

SEQ ID NO: 2417275 - RNA, 19 nt, Homo sapiens
  misc_RNA (1)...(19): siRNA sense strand
uggaauuagauauaggaga

SEQ ID NO: 2417276 - RNA, 19 nt, Homo sapiens
  misc_RNA (1)...(19): siRNA sense strand
agauagaaggggagggguu

SEQ ID NO: 2417277 - RNA, 19 nt, Homo sapiens
  misc_RNA (1)...(19): siRNA sense strand
cucgaaaguugcaagguga

SEQ ID NO: 2417278 - RNA, 19 nt, Homo sapiens
  misc_RNA (1)...(19): siRNA sense strand
uggccauaguggagucuga

SEQ ID NO: 2417279 - RNA, 19 nt, Homo sapiens
  misc_RNA (1)...(19): siRNA sense strand
ucuugaaggcaucucgaaa

SEQ ID NO: 2417280 - RNA, 19 nt, Homo sapiens
  misc_RNA (1)...(19): siRNA sense strand
cuguguaggauuaccagaa

SEQ ID NO: 2417281 - RNA, 19 nt, Homo sapiens
  misc_RNA (1)...(19): siRNA sense strand
aagaaaaggcugaaggaau

SEQ ID NO: 2417282 - RNA, 19 nt, Homo sapiens
  misc_RNA (1)...(19): siRNA sense strand
cuggaaacauguaaaggca

SEQ ID NO: 2417283 - RNA, 19 nt, Homo sapiens
  misc_RNA (1)...(19): siRNA sense strand
ugagcauggcagugggaca

SEQ ID NO: 2417284 - RNA, 19 nt, Homo sapiens
  misc_RNA (1)...(19): siRNA sense strand
ccagaagugaguucggcaa

SEQ ID NO: 2417285 - RNA, 19 nt, Homo sapiens
  misc_RNA (1)...(19): siRNA sense strand
aaagagaaggccacggaga

SEQ ID NO: 2417286 - RNA, 19 nt, Homo sapiens
  misc_RNA (1)...(19): siRNA sense strand
agagaaggccacggagaau

SEQ ID NO: 2417287 - RNA, 19 nt, Homo sapiens
  misc_RNA (1)...(19): siRNA sense strand
gcaaagagaaggccacgga

SEQ ID NO: 2417288 - RNA, 19 nt, Homo sapiens
  misc_RNA (1)...(19): siRNA sense strand
aauugcaaguacugggaaa

SEQ ID NO: 2417289 - RNA, 19 nt, Homo sapiens
  misc_RNA (1)...(19): siRNA sense strand
ggcuacaucuagaaggcaa

SEQ ID NO: 2417290 - RNA, 19 nt, Homo sapiens
  misc_RNA (1)...(19): siRNA sense strand
ggggagaaccaguuggaga

SEQ ID NO: 2417291 - RNA, 19 nt, Homo sapiens
  misc_RNA (1)...(19): siRNA sense strand
acaucuagaaggcaacaaa

SEQ ID NO: 2417292 - RNA, 19 nt, Homo sapiens
  misc_RNA (1)...(19): siRNA sense strand
gcaacaagcuggccagggu

SEQ ID NO: 2417293 - RNA, 19 nt, Homo sapiens
  misc_RNA (1)...(19): siRNA sense strand
gggacaugcgggauggcuu

SEQ ID NO: 2417294 - RNA, 19 nt, Homo sapiens
  misc_RNA (1)...(19): siRNA sense strand
gggcagccaaacugggaca

SEQ ID NO: 2417295 - RNA, 19 nt, Homo sapiens
  misc_RNA (1)...(19): siRNA sense strand
gcuucgacaucuccggcaa

SEQ ID NO: 2417296 - RNA, 19 nt, Homo sapiens
  misc_RNA (1)...(19): siRNA sense strand
cugaagccgugaagggcca

SEQ ID NO: 2417297 - RNA, 19 nt, Homo sapiens
  misc_RNA (1)...(19): siRNA sense strand
uuucaaacuuggagacaaa

SEQ ID NO: 2417298 - RNA, 19 nt, Homo sapiens
  misc_RNA (1)...(19): siRNA sense strand
uggcuaaagagaagaaaua

SEQ ID NO: 2417299 - RNA, 19 nt, Homo sapiens
  misc_RNA (1)...(19): siRNA sense strand
caaugaaacuugugaggga

SEQ ID NO: 2417300 - RNA, 19 nt, Homo sapiens
  misc_RNA (1)...(19): siRNA sense strand
agcaaggaauucagagaaa

SEQ ID NO: 2417301 - RNA, 19 nt, Homo sapiens
  misc_RNA (1)...(19): siRNA sense strand
uggcagagcuagugggagu

SEQ ID NO: 2417302 - RNA, 19 nt, Homo sapiens
  misc_RNA (1)...(19): siRNA sense strand
gagcuaaaucuuugggaga

SEQ ID NO: 2417303 - RNA, 19 nt, Homo sapiens
  misc_RNA (1)...(19): siRNA sense strand
ucacaggaucucagaguaa

SEQ ID NO: 2417304 - RNA, 19 nt, Homo sapiens
  misc_RNA (1)...(19): siRNA sense strand
agaaauggguucaaagaca

SEQ ID NO: 2417305 - RNA, 19 nt, Homo sapiens
  misc_RNA (1)...(19): siRNA sense strand
gaaacaaagcagugauuca

SEQ ID NO: 2417306 - RNA, 19 nt, Homo sapiens
  misc_RNA (1)...(19): siRNA sense strand
cgauuuaaguccagggagu

SEQ ID NO: 2417307 - RNA, 19 nt, Homo sapiens
  misc_RNA (1)...(19): siRNA sense strand
gaacaaaagcauucugaaa

SEQ ID NO: 2417308 - RNA, 19 nt, Homo sapiens
  misc_RNA (1)...(19): siRNA sense strand
ccaaauagagagaugaaaa

SEQ ID NO: 2417309 - RNA, 19 nt, Homo sapiens
  misc_RNA (1)...(19): siRNA sense strand
ggaagaugauugagccaga

SEQ ID NO: 2417310 - RNA, 19 nt, Homo sapiens
  misc_RNA (1)...(19): siRNA sense strand
caaaacaagugcagggaau

SEQ ID NO: 2417311 - RNA, 19 nt, Homo sapiens
  misc_RNA (1)...(19): siRNA sense strand
cagaaugugccaagagauu

SEQ ID NO: 2417312 - RNA, 19 nt, Homo sapiens
  misc_RNA (1)...(19): siRNA sense strand
acgagaaggagaagaagua

SEQ ID NO: 2417313 - RNA, 19 nt, Homo sapiens
  misc_RNA (1)...(19): siRNA sense strand
ugugaaagucagaaacaua

SEQ ID NO: 2417314 - RNA, 19 nt, Homo sapiens
  misc_RNA (1)...(19): siRNA sense strand
acacaguaggcgagaguau

SEQ ID NO: 2417315 - RNA, 19 nt, Homo sapiens
  misc_RNA (1)...(19): siRNA sense strand
aggcaguggaugaggaaga

SEQ ID NO: 2417316 - RNA, 19 nt, Homo sapiens
  misc_RNA (1)...(19): siRNA sense strand
ugaucaagauggaggagau

SEQ ID NO: 2417317 - RNA, 19 nt, Homo sapiens
  misc_RNA (1)...(19): siRNA sense strand
aaaccaaggcagcaagaaa

SEQ ID NO: 2417318 - RNA, 19 nt, Homo sapiens
  misc_RNA (1)...(19): siRNA sense strand
uuguaagaacucugagaaa

SEQ ID NO: 2417319 - RNA, 19 nt, Homo sapiens
  misc_RNA (1)...(19): siRNA sense strand
cuaaagcgaucuagggaca

SEQ ID NO: 2417320 - RNA, 19 nt, Homo sapiens
  misc_RNA (1)...(19): siRNA sense strand
agguuuaacugaaagggaa

SEQ ID NO: 2417321 - RNA, 19 nt, Homo sapiens
  misc_RNA (1)...(19): siRNA sense strand
cagaugggcauuaaagaaa

SEQ ID NO: 2417322 - RNA, 19 nt, Homo sapiens
  misc_RNA (1)...(19): siRNA sense strand
cggaagaaagcuuuguuua

SEQ ID NO: 2417323 - RNA, 19 nt, Homo sapiens
  misc_RNA (1)...(19): siRNA sense strand
ugaaaagggcagaggagua

SEQ ID NO: 2417324 - RNA, 19 nt, Homo sapiens
  misc_RNA (1)...(19): siRNA sense strand
guuucaggaaguaggaaua

SEQ ID NO: 2417325 - RNA, 19 nt, Homo sapiens
  misc_RNA (1)...(19): siRNA sense strand
gugauggaacagaaggaaa

SEQ ID NO: 2417326 - RNA, 19 nt, Homo sapiens
  misc_RNA (1)...(19): siRNA sense strand
agaggaagcaguugaagaa

SEQ ID NO: 2417327 - RNA, 19 nt, Homo sapiens
  misc_RNA (1)...(19): siRNA sense strand
gcagaagagcuuaguccaa

SEQ ID NO: 2417328 - RNA, 19 nt, Homo sapiens
  misc_RNA (1)...(19): siRNA sense strand
cugcaaaggauuuuagaua

SEQ ID NO: 2417329 - RNA, 19 nt, Homo sapiens
  misc_RNA (1)...(19): siRNA sense strand
aguccgaaguaaaggaaca

SEQ ID NO: 2417330 - RNA, 19 nt, Homo sapiens
  misc_RNA (1)...(19): siRNA sense strand
uggaggagaucaagaugaa

SEQ ID NO: 2417331 - RNA, 19 nt, Homo sapiens
  misc_RNA (1)...(19): siRNA sense strand
gagcaaauauuguggaggu

SEQ ID NO: 2417332 - RNA, 19 nt, Homo sapiens
  misc_RNA (1)...(19): siRNA sense strand
ccucguaaagaaaguaaua

SEQ ID NO: 2417333 - RNA, 19 nt, Homo sapiens
  misc_RNA (1)...(19): siRNA sense strand
gcuagaacuaaauggaauu

SEQ ID NO: 2417334 - RNA, 19 nt, Homo sapiens
  misc_RNA (1)...(19): siRNA sense strand
gggcuuuguuuuagagaau

SEQ ID NO: 2417335 - RNA, 19 nt, Homo sapiens
  misc_RNA (1)...(19): siRNA sense strand
cagaaaagguuuaacugaa

SEQ ID NO: 2417336 - RNA, 19 nt, Homo sapiens
  misc_RNA (1)...(19): siRNA sense strand
ugugauacccagugaagua

SEQ ID NO: 2417337 - RNA, 19 nt, Homo sapiens
  misc_RNA (1)...(19): siRNA sense strand
ggauacucagucagagaaa

SEQ ID NO: 2417338 - RNA, 19 nt, Homo sapiens
  misc_RNA (1)...(19): siRNA sense strand
ccuuaagacuguagguacu

SEQ ID NO: 2417339 - RNA, 19 nt, Homo sapiens
  misc_RNA (1)...(19): siRNA sense strand
acgaauaaccuuuacagaa

SEQ ID NO: 2417340 - RNA, 19 nt, Homo sapiens
  misc_RNA (1)...(19): siRNA sense strand
gggugaaggauuggugaaa

SEQ ID NO: 2417341 - RNA, 19 nt, Homo sapiens
  misc_RNA (1)...(19): siRNA sense strand
aagacgagaaggagaagaa

SEQ ID NO: 2417342 - RNA, 19 nt, Homo sapiens
  misc_RNA (1)...(19): siRNA sense strand
gauaauaguugguggagug

SEQ ID NO: 2417343 - RNA, 19 nt, Homo sapiens
  misc_RNA (1)...(19): siRNA sense strand
gggcagaggaguagcuguu

SEQ ID NO: 2417344 - RNA, 19 nt, Homo sapiens
  misc_RNA (1)...(19): siRNA sense strand
aggaguagcuguugaggca

SEQ ID NO: 2417345 - RNA, 19 nt, Homo sapiens
  misc_RNA (1)...(19): siRNA sense strand
ccuguaaacccuuggaaaa

SEQ ID NO: 2417346 - RNA, 19 nt, Homo sapiens
  misc_RNA (1)...(19): siRNA sense strand
cuaaagcaguucuggaaaa

SEQ ID NO: 2417347 - RNA, 19 nt, Homo sapiens
  misc_RNA (1)...(19): siRNA sense strand
caccaaauauagugcaaga

SEQ ID NO: 2417348 - RNA, 19 nt, Homo sapiens
  misc_RNA (1)...(19): siRNA sense strand
ugugaaaggauaaagcuua

SEQ ID NO: 2417349 - RNA, 19 nt, Homo sapiens
  misc_RNA (1)...(19): siRNA sense strand
ucaagauggaggagaucaa

SEQ ID NO: 2417350 - RNA, 19 nt, Homo sapiens
  misc_RNA (1)...(19): siRNA sense strand
caacaacccuuaucguaaa

SEQ ID NO: 2417351 - RNA, 19 nt, Homo sapiens
  misc_RNA (1)...(19): siRNA sense strand
ggggagagcuaaaggacuu

SEQ ID NO: 2417352 - RNA, 19 nt, Homo sapiens
  misc_RNA (1)...(19): siRNA sense strand
ugguugaagcuuuggacaa

SEQ ID NO: 2417353 - RNA, 19 nt, Homo sapiens
  misc_RNA (1)...(19): siRNA sense strand
cauaauugauguagcaagu

SEQ ID NO: 2417354 - RNA, 19 nt, Homo sapiens
  misc_RNA (1)...(19): siRNA sense strand
ugauguagcaagugaccaa

SEQ ID NO: 2417355 - RNA, 19 nt, Homo sapiens
  misc_RNA (1)...(19): siRNA sense strand
gcugacauuuccagggauu

SEQ ID NO: 2417356 - RNA, 19 nt, Homo sapiens
  misc_RNA (1)...(19): siRNA sense strand
cacaauaguccaaggauca

SEQ ID NO: 2417357 - RNA, 19 nt, Homo sapiens
  misc_RNA (1)...(19): siRNA sense strand
caguaauucuggaacaaaa

SEQ ID NO: 2417358 - RNA, 19 nt, Homo sapiens
  misc_RNA (1)...(19): siRNA sense strand
cagcaugauacgagcuauu

SEQ ID NO: 2417359 - RNA, 19 nt, Homo sapiens
  misc_RNA (1)...(19): siRNA sense strand
gguugaagcuuuggacaau

SEQ ID NO: 2417360 - RNA, 19 nt, Homo sapiens
  misc_RNA (1)...(19): siRNA sense strand
ugacaauggacgcaagcua

SEQ ID NO: 2417361 - RNA, 19 nt, Homo sapiens
  misc_RNA (1)...(19): siRNA sense strand
gcagcagaguggaagauga

SEQ ID NO: 2417362 - RNA, 19 nt, Homo sapiens
  misc_RNA (1)...(19): siRNA sense strand
gaaugggaaucaagaacau

SEQ ID NO: 2417363 - RNA, 19 nt, Homo sapiens
  misc_RNA (1)...(19): siRNA sense strand
cauuaaagguugugaugac

SEQ ID NO: 2417364 - RNA, 19 nt, Homo sapiens
  misc_RNA (1)...(19): siRNA sense strand
agaaugugaaagucagaaa

SEQ ID NO: 2417365 - RNA, 19 nt, Homo sapiens
  misc_RNA (1)...(19): siRNA sense strand
aagccaagcuggaugcaau

SEQ ID NO: 2417366 - RNA, 19 nt, Homo sapiens
  misc_RNA (1)...(19): siRNA sense strand
gcacacugcuacaggacga

SEQ ID NO: 2417367 - RNA, 19 nt, Homo sapiens
  misc_RNA (1)...(19): siRNA sense strand
aaacaggauugucacgaaa

SEQ ID NO: 2417368 - RNA, 19 nt, Homo sapiens
  misc_RNA (1)...(19): siRNA sense strand
uuucaaacuuggagacaaa

SEQ ID NO: 2417369 - RNA, 19 nt, Homo sapiens
  misc_RNA (1)...(19): siRNA sense strand
uggcuaaagagaagaaaua

SEQ ID NO: 2417370 - RNA, 19 nt, Homo sapiens
  misc_RNA (1)...(19): siRNA sense strand
caaugaaacuugugaggga

SEQ ID NO: 2417371 - RNA, 19 nt, Homo sapiens
  misc_RNA (1)...(19): siRNA sense strand
agcaaggaauucagagaaa

SEQ ID NO: 2417372 - RNA, 19 nt, Homo sapiens
  misc_RNA (1)...(19): siRNA sense strand
uggcagagcuagugggagu

SEQ ID NO: 2417373 - RNA, 19 nt, Homo sapiens
  misc_RNA (1)...(19): siRNA sense strand
gagcuaaaucuuugggaga

SEQ ID NO: 2417374 - RNA, 19 nt, Homo sapiens
  misc_RNA (1)...(19): siRNA sense strand
ucacaggaucucagaguaa

SEQ ID NO: 2417375 - RNA, 19 nt, Homo sapiens
  misc_RNA (1)...(19): siRNA sense strand
agaaauggguucaaagaca

SEQ ID NO: 2417376 - RNA, 19 nt, Homo sapiens
  misc_RNA (1)...(19): siRNA sense strand
gaaacaaagcagugauuca

SEQ ID NO: 2417377 - RNA, 19 nt, Homo sapiens
  misc_RNA (1)...(19): siRNA sense strand
cgauuuaaguccagggagu

SEQ ID NO: 2417378 - RNA, 19 nt, Homo sapiens
  misc_RNA (1)...(19): siRNA sense strand
gaacaaaagcauucugaaa

SEQ ID NO: 2417379 - RNA, 19 nt, Homo sapiens
  misc_RNA (1)...(19): siRNA sense strand
ccaaauagagagaugaaaa

SEQ ID NO: 2417380 - RNA, 19 nt, Homo sapiens
  misc_RNA (1)...(19): siRNA sense strand
ggaagaugauugagccaga

SEQ ID NO: 2417381 - RNA, 19 nt, Homo sapiens
  misc_RNA (1)...(19): siRNA sense strand
caaaacaagugcagggaau

SEQ ID NO: 2417382 - RNA, 19 nt, Homo sapiens
  misc_RNA (1)...(19): siRNA sense strand
cagaaugugccaagagauu

SEQ ID NO: 2417383 - RNA, 19 nt, Homo sapiens
  misc_RNA (1)...(19): siRNA sense strand
acgagaaggagaagaagua

SEQ ID NO: 2417384 - RNA, 19 nt, Homo sapiens
  misc_RNA (1)...(19): siRNA sense strand
ugugaaagucagaaacaua

SEQ ID NO: 2417385 - RNA, 19 nt, Homo sapiens
  misc_RNA (1)...(19): siRNA sense strand
acacaguaggcgagaguau

SEQ ID NO: 2417386 - RNA, 19 nt, Homo sapiens
  misc_RNA (1)...(19): siRNA sense strand
aggcaguggaugaggaaga

SEQ ID NO: 2417387 - RNA, 19 nt, Homo sapiens
  misc_RNA (1)...(19): siRNA sense strand
ugaucaagauggaggagau

SEQ ID NO: 2417388 - RNA, 19 nt, Homo sapiens
  misc_RNA (1)...(19): siRNA sense strand
aaaccaaggcagcaagaaa

SEQ ID NO: 2417389 - RNA, 19 nt, Homo sapiens
  misc_RNA (1)...(19): siRNA sense strand
uuguaagaacucugagaaa

SEQ ID NO: 2417390 - RNA, 19 nt, Homo sapiens
  misc_RNA (1)...(19): siRNA sense strand
cuaaagcgaucuagggaca

SEQ ID NO: 2417391 - RNA, 19 nt, Homo sapiens
  misc_RNA (1)...(19): siRNA sense strand
agguuuaacugaaagggaa

SEQ ID NO: 2417392 - RNA, 19 nt, Homo sapiens
  misc_RNA (1)...(19): siRNA sense strand
cagaugggcauuaaagaaa

SEQ ID NO: 2417393 - RNA, 19 nt, Homo sapiens
  misc_RNA (1)...(19): siRNA sense strand
cggaagaaagcuuuguuua

SEQ ID NO: 2417394 - RNA, 19 nt, Homo sapiens
  misc_RNA (1)...(19): siRNA sense strand
ugaaaagggcagaggagua

SEQ ID NO: 2417395 - RNA, 19 nt, Homo sapiens
  misc_RNA (1)...(19): siRNA sense strand
guuucaggaaguaggaaua

SEQ ID NO: 2417396 - RNA, 19 nt, Homo sapiens
  misc_RNA (1)...(19): siRNA sense strand
gugauggaacagaaggaaa

SEQ ID NO: 2417397 - RNA, 19 nt, Homo sapiens
  misc_RNA (1)...(19): siRNA sense strand
agaggaagcaguugaagaa

SEQ ID NO: 2417398 - RNA, 19 nt, Homo sapiens
  misc_RNA (1)...(19): siRNA sense strand
gcagaagagcuuaguccaa

SEQ ID NO: 2417399 - RNA, 19 nt, Homo sapiens
  misc_RNA (1)...(19): siRNA sense strand
cugcaaaggauuuuagaua

SEQ ID NO: 2417400 - RNA, 19 nt, Homo sapiens
  misc_RNA (1)...(19): siRNA sense strand
aguccgaaguaaaggaaca

SEQ ID NO: 2417401 - RNA, 19 nt, Homo sapiens
  misc_RNA (1)...(19): siRNA sense strand
uggaggagaucaagaugaa

SEQ ID NO: 2417402 - RNA, 19 nt, Homo sapiens
  misc_RNA (1)...(19): siRNA sense strand
gagcaaauauuguggaggu

SEQ ID NO: 2417403 - RNA, 19 nt, Homo sapiens
  misc_RNA (1)...(19): siRNA sense strand
ccucguaaagaaaguaaua

SEQ ID NO: 2417404 - RNA, 19 nt, Homo sapiens
  misc_RNA (1)...(19): siRNA sense strand
gcuagaacuaaauggaauu

SEQ ID NO: 2417405 - RNA, 19 nt, Homo sapiens
  misc_RNA (1)...(19): siRNA sense strand
gggcuuuguuuuagagaau

SEQ ID NO: 2417406 - RNA, 19 nt, Homo sapiens
  misc_RNA (1)...(19): siRNA sense strand
cagaaaagguuuaacugaa

SEQ ID NO: 2417407 - RNA, 19 nt, Homo sapiens
  misc_RNA (1)...(19): siRNA sense strand
ugugauacccagugaagua

SEQ ID NO: 2417408 - RNA, 19 nt, Homo sapiens
  misc_RNA (1)...(19): siRNA sense strand
ggauacucagucagagaaa

SEQ ID NO: 2417409 - RNA, 19 nt, Homo sapiens
  misc_RNA (1)...(19): siRNA sense strand
ccuuaagacuguagguacu

SEQ ID NO: 2417410 - RNA, 19 nt, Homo sapiens
  misc_RNA (1)...(19): siRNA sense strand
acgaauaaccuuuacagaa

SEQ ID NO: 2417411 - RNA, 19 nt, Homo sapiens
  misc_RNA (1)...(19): siRNA sense strand
gggugaaggauuggugaaa

SEQ ID NO: 2417412 - RNA, 19 nt, Homo sapiens
  misc_RNA (1)...(19): siRNA sense strand
aagacgagaaggagaagaa

SEQ ID NO: 2417413 - RNA, 19 nt, Homo sapiens
  misc_RNA (1)...(19): siRNA sense strand
gauaauaguugguggagug

SEQ ID NO: 2417414 - RNA, 19 nt, Homo sapiens
  misc_RNA (1)...(19): siRNA sense strand
gggcagaggaguagcuguu

SEQ ID NO: 2417415 - RNA, 19 nt, Homo sapiens
  misc_RNA (1)...(19): siRNA sense strand
aggaguagcuguugaggca

SEQ ID NO: 2417416 - RNA, 19 nt, Homo sapiens
  misc_RNA (1)...(19): siRNA sense strand
ccuguaaacccuuggaaaa

SEQ ID NO: 2417417 - RNA, 19 nt, Homo sapiens
  misc_RNA (1)...(19): siRNA sense strand
cuaaagcaguucuggaaaa

SEQ ID NO: 2417418 - RNA, 19 nt, Homo sapiens
  misc_RNA (1)...(19): siRNA sense strand
caccaaauauagugcaaga

SEQ ID NO: 2417419 - RNA, 19 nt, Homo sapiens
  misc_RNA (1)...(19): siRNA sense strand
ugugaaaggauaaagcuua

SEQ ID NO: 2417420 - RNA, 19 nt, Homo sapiens
  misc_RNA (1)...(19): siRNA sense strand
ucaagauggaggagaucaa

SEQ ID NO: 2417421 - RNA, 19 nt, Homo sapiens
  misc_RNA (1)...(19): siRNA sense strand
caacaacccuuaucguaaa

SEQ ID NO: 2417422 - RNA, 19 nt, Homo sapiens
  misc_RNA (1)...(19): siRNA sense strand
ggggagagcuaaaggacuu

SEQ ID NO: 2417423 - RNA, 19 nt, Homo sapiens
  misc_RNA (1)...(19): siRNA sense strand
ugguugaagcuuuggacaa

SEQ ID NO: 2417424 - RNA, 19 nt, Homo sapiens
  misc_RNA (1)...(19): siRNA sense strand
cauaauugauguagcaagu

SEQ ID NO: 2417425 - RNA, 19 nt, Homo sapiens
  misc_RNA (1)...(19): siRNA sense strand
ugauguagcaagugaccaa

SEQ ID NO: 2417426 - RNA, 19 nt, Homo sapiens
  misc_RNA (1)...(19): siRNA sense strand
gcugacauuuccagggauu

SEQ ID NO: 2417427 - RNA, 19 nt, Homo sapiens
  misc_RNA (1)...(19): siRNA sense strand
cacaauaguccaaggauca

SEQ ID NO: 2417428 - RNA, 19 nt, Homo sapiens
  misc_RNA (1)...(19): siRNA sense strand
caguaauucuggaacaaaa

SEQ ID NO: 2417429 - RNA, 19 nt, Homo sapiens
  misc_RNA (1)...(19): siRNA sense strand
cagcaugauacgagcuauu

SEQ ID NO: 2417430 - RNA, 19 nt, Homo sapiens
  misc_RNA (1)...(19): siRNA sense strand
gguugaagcuuuggacaau

SEQ ID NO: 2417431 - RNA, 19 nt, Homo sapiens
  misc_RNA (1)...(19): siRNA sense strand
ugacaauggacgcaagcua

SEQ ID NO: 2417432 - RNA, 19 nt, Homo sapiens
  misc_RNA (1)...(19): siRNA sense strand
gcagcagaguggaagauga

SEQ ID NO: 2417433 - RNA, 19 nt, Homo sapiens
  misc_RNA (1)...(19): siRNA sense strand
gaaugggaaucaagaacau

SEQ ID NO: 2417434 - RNA, 19 nt, Homo sapiens
  misc_RNA (1)...(19): siRNA sense strand
cauuaaagguugugaugac

SEQ ID NO: 2417435 - RNA, 19 nt, Homo sapiens
  misc_RNA (1)...(19): siRNA sense strand
agaaugugaaagucagaaa

SEQ ID NO: 2417436 - RNA, 19 nt, Homo sapiens
  misc_RNA (1)...(19): siRNA sense strand
aagccaagcuggaugcaau

SEQ ID NO: 2417437 - RNA, 19 nt, Homo sapiens
  misc_RNA (1)...(19): siRNA sense strand
gcacacugcuacaggacga

SEQ ID NO: 2417438 - RNA, 19 nt, Homo sapiens
  misc_RNA (1)...(19): siRNA sense strand
aaacaggauugucacgaaa

SEQ ID NO: 2417439 - RNA, 19 nt, Homo sapiens
  misc_RNA (1)...(19): siRNA sense strand
ggaaguaggaauaaaagua

SEQ ID NO: 2417440 - RNA, 19 nt, Homo sapiens
  misc_RNA (1)...(19): siRNA sense strand
ccgaauuacagaagacgaa

SEQ ID NO: 2417441 - RNA, 19 nt, Homo sapiens
  misc_RNA (1)...(19): siRNA sense strand
gaugagaaccaaagccaga

SEQ ID NO: 2417442 - RNA, 19 nt, Homo sapiens
  misc_RNA (1)...(19): siRNA sense strand
aggacagugcaguggacaa

SEQ ID NO: 2417443 - RNA, 19 nt, Homo sapiens
  misc_RNA (1)...(19): siRNA sense strand
aguggauauuccuggcuaa

SEQ ID NO: 2417444 - RNA, 19 nt, Homo sapiens
  misc_RNA (1)...(19): siRNA sense strand
aagauaaauccucggccaa

SEQ ID NO: 2417445 - RNA, 19 nt, Homo sapiens
  misc_RNA (1)...(19): siRNA sense strand
aaccaaagccagagaucca

SEQ ID NO: 2417446 - RNA, 19 nt, Homo sapiens
  misc_RNA (1)...(19): siRNA sense strand
gaguauggaacgaggcauc

SEQ ID NO: 2417447 - RNA, 19 nt, Homo sapiens
  misc_RNA (1)...(19): siRNA sense strand
gucaacauguggaacgcaa

SEQ ID NO: 2417448 - RNA, 19 nt, Homo sapiens
  misc_RNA (1)...(19): siRNA sense strand
aaagauaaauccucggcca

SEQ ID NO: 2417449 - RNA, 19 nt, Homo sapiens
  misc_RNA (1)...(19): siRNA sense strand
gggccgaauuacagaagac

SEQ ID NO: 2417450 - RNA, 19 nt, Homo sapiens
  misc_RNA (1)...(19): siRNA sense strand
cagaaucaggagcggcaau

SEQ ID NO: 2417451 - RNA, 19 nt, Homo sapiens
  misc_RNA (1)...(19): siRNA sense strand
caacuggaugagaaccaaa

SEQ ID NO: 2417452 - RNA, 19 nt, Homo sapiens
  misc_RNA (1)...(19): siRNA sense strand
aagaaauacuagaggcaga

SEQ ID NO: 2417453 - RNA, 19 nt, Homo sapiens
  misc_RNA (1)...(19): siRNA sense strand
gaacaaacauugagagcag

SEQ ID NO: 2417454 - RNA, 19 nt, Homo sapiens
  misc_RNA (1)...(19): siRNA sense strand
gaacaaacauugagagcag

SEQ ID NO: 2417455 - RNA, 19 nt, Homo sapiens
  misc_RNA (1)...(19): siRNA sense strand
gaacaaacauugagagcag

SEQ ID NO: 2417456 - RNA, 19 nt, Homo sapiens
  misc_RNA (1)...(19): siRNA sense strand
gggaagaauuaggaagaau

SEQ ID NO: 2417457 - RNA, 19 nt, Homo sapiens
  misc_RNA (1)...(19): siRNA sense strand
gaacaaacauggagagcag

SEQ ID NO: 2417458 - RNA, 19 nt, Homo sapiens
  misc_RNA (1)...(19): siRNA sense strand
cugaaagcuugguggaaaa

SEQ ID NO: 2417459 - RNA, 19 nt, Homo sapiens
  misc_RNA (1)...(19): siRNA sense strand
cugaaagcuugguggaaaa

SEQ ID NO: 2417460 - RNA, 19 nt, Homo sapiens
  misc_RNA (1)...(19): siRNA sense strand
aagaggaagaugaagaaua

SEQ ID NO: 2417461 - RNA, 19 nt, Homo sapiens
  misc_RNA (1)...(19): siRNA sense strand
ccuuagaauugauggacau

SEQ ID NO: 2417462 - RNA, 19 nt, Homo sapiens
  misc_RNA (1)...(19): siRNA sense strand
ccuuagaauugauggacau

SEQ ID NO: 2417463 - RNA, 19 nt, Homo sapiens
  misc_RNA (1)...(19): siRNA sense strand
auggagagcagaugagaua

SEQ ID NO: 2417464 - RNA, 19 nt, Homo sapiens
  misc_RNA (1)...(19): siRNA sense strand
ugaacaacguacaggaaaa

SEQ ID NO: 2417465 - RNA, 19 nt, Homo sapiens
  misc_RNA (1)...(19): siRNA sense strand
auugagagcagaugagaua

SEQ ID NO: 2417466 - RNA, 19 nt, Homo sapiens
  misc_RNA (1)...(19): siRNA sense strand
ugucaauggccaugaggaa

SEQ ID NO: 2417467 - RNA, 19 nt, Homo sapiens
  misc_RNA (1)...(19): siRNA sense strand
gagaaagcagaaacagaaa

SEQ ID NO: 2417468 - RNA, 19 nt, Homo sapiens
  misc_RNA (1)...(19): siRNA sense strand
caucagagauaguuggcau

SEQ ID NO: 2417469 - RNA, 19 nt, Homo sapiens
  misc_RNA (1)...(19): siRNA sense strand
uggaguaacugcagaacau

SEQ ID NO: 2417470 - RNA, 19 nt, Homo sapiens
  misc_RNA (1)...(19): siRNA sense strand
auaagaaagcugacaacaa

SEQ ID NO: 2417471 - RNA, 19 nt, Homo sapiens
  misc_RNA (1)...(19): siRNA sense strand
agauauauguggaguaacu

SEQ ID NO: 2417472 - RNA, 19 nt, Homo sapiens
  misc_RNA (1)...(19): siRNA sense strand
aauccaaacaagaggaaga

SEQ ID NO: 2417473 - RNA, 19 nt, Homo sapiens
  misc_RNA (1)...(19): siRNA sense strand
ccaaacaagaggaagauga

SEQ ID NO: 2417474 - RNA, 19 nt, Homo sapiens
  misc_RNA (1)...(19): siRNA sense strand
ccuuggaauugaagaauga

SEQ ID NO: 2417475 - RNA, 19 nt, Homo sapiens
  misc_RNA (1)...(19): siRNA sense strand
ccuuggaauugaagaauga

SEQ ID NO: 2417476 - RNA, 19 nt, Homo sapiens
  misc_RNA (1)...(19): siRNA sense strand
gcagcauaggaaagaguua

SEQ ID NO: 2417477 - RNA, 19 nt, Homo sapiens
  misc_RNA (1)...(19): siRNA sense strand
ggaauugaagaaugaacaa

SEQ ID NO: 2417478 - RNA, 19 nt, Homo sapiens
  misc_RNA (1)...(19): siRNA sense strand
ggaauugaagaaugaacaa

SEQ ID NO: 2417479 - RNA, 19 nt, Homo sapiens
  misc_RNA (1)...(19): siRNA sense strand
cuuuaaaccaagaagaaga

SEQ ID NO: 2417480 - RNA, 19 nt, Homo sapiens
  misc_RNA (1)...(19): siRNA sense strand
caaagaaauacuagaggca

SEQ ID NO: 2417481 - RNA, 19 nt, Homo sapiens
  misc_RNA (1)...(19): siRNA sense strand
ucguagauguguauggcaa

SEQ ID NO: 2417482 - RNA, 19 nt, Homo sapiens
  misc_RNA (1)...(19): siRNA sense strand
ucauggaucaucagagaua

SEQ ID NO: 2417483 - RNA, 19 nt, Homo sapiens
  misc_RNA (1)...(19): siRNA sense strand
caaacaagaggaagaugaa

SEQ ID NO: 2417484 - RNA, 19 nt, Homo sapiens
  misc_RNA (1)...(19): siRNA sense strand
ccaucagaauccaaacaaa

SEQ ID NO: 2417485 - RNA, 19 nt, Homo sapiens
  misc_RNA (1)...(19): siRNA sense strand
ccaucagaauccaaacaaa

SEQ ID NO: 2417486 - RNA, 19 nt, Homo sapiens
  misc_RNA (1)...(19): siRNA sense strand
aggaaauugccaugcuaaa

SEQ ID NO: 2417487 - RNA, 19 nt, Homo sapiens
  misc_RNA (1)...(19): siRNA sense strand
aggaacaucugcaggaaca

SEQ ID NO: 2417488 - RNA, 19 nt, Homo sapiens
  misc_RNA (1)...(19): siRNA sense strand
agaagaaacaccuagggaa

SEQ ID NO: 2417489 - RNA, 19 nt, Homo sapiens
  misc_RNA (1)...(19): siRNA sense strand
aguuagaagugaaacaaca

SEQ ID NO: 2417490 - RNA, 19 nt, Homo sapiens
  misc_RNA (1)...(19): siRNA sense strand
gcucaaaggaaauccaaaa

SEQ ID NO: 2417491 - RNA, 19 nt, Homo sapiens
  misc_RNA (1)...(19): siRNA sense strand
agagaaagcagaaacagaa

SEQ ID NO: 2417492 - RNA, 19 nt, Homo sapiens
  misc_RNA (1)...(19): siRNA sense strand
cgaaaagaagugagcaaau

SEQ ID NO: 2417493 - RNA, 19 nt, Homo sapiens
  misc_RNA (1)...(19): siRNA sense strand
gaucaaauugugacaucaa

SEQ ID NO: 2417494 - RNA, 19 nt, Homo sapiens
  misc_RNA (1)...(19): siRNA sense strand
acaaagaggaagaagacca

SEQ ID NO: 2417495 - RNA, 19 nt, Homo sapiens
  misc_RNA (1)...(19): siRNA sense strand
aaaggaagaccuaggaaga

SEQ ID NO: 2417496 - RNA, 19 nt, Homo sapiens
  misc_RNA (1)...(19): siRNA sense strand
aaaggaagaccuaggaaga

SEQ ID NO: 2417497 - RNA, 19 nt, Homo sapiens
  misc_RNA (1)...(19): siRNA sense strand
ucgaagagcagcauaggaa

SEQ ID NO: 2417498 - RNA, 19 nt, Homo sapiens
  misc_RNA (1)...(19): siRNA sense strand
aggaagaucgcaugggaga

SEQ ID NO: 2417499 - RNA, 19 nt, Homo sapiens
  misc_RNA (1)...(19): siRNA sense strand
aggaagaucgcaugggaga

SEQ ID NO: 2417500 - RNA, 19 nt, Homo sapiens
  misc_RNA (1)...(19): siRNA sense strand
cgaacagucagcagaagaa

SEQ ID NO: 2417501 - RNA, 19 nt, Homo sapiens
  misc_RNA (1)...(19): siRNA sense strand
acaaagagaccaacgugaa

SEQ ID NO: 2417502 - RNA, 19 nt, Homo sapiens
  misc_RNA (1)...(19): siRNA sense strand
caagaagaagagaagagaa

SEQ ID NO: 2417503 - RNA, 19 nt, Homo sapiens
  misc_RNA (1)...(19): siRNA sense strand
aggcagaaauugaaucaca

SEQ ID NO: 2417504 - RNA, 19 nt, Homo sapiens
  misc_RNA (1)...(19): siRNA sense strand
cgaacaagauaaugugaac

SEQ ID NO: 2417505 - RNA, 19 nt, Homo sapiens
  misc_RNA (1)...(19): siRNA sense strand
aaucacaguuagagaacca

SEQ ID NO: 2417506 - RNA, 19 nt, Homo sapiens
  misc_RNA (1)...(19): siRNA sense strand
agaaacugucagaagcaaa

SEQ ID NO: 2417507 - RNA, 19 nt, Homo sapiens
  misc_RNA (1)...(19): siRNA sense strand
ccuaaaacugaaagaggaa

SEQ ID NO: 2417508 - RNA, 19 nt, Homo sapiens
  misc_RNA (1)...(19): siRNA sense strand
gaguaacugcagaacauua

SEQ ID NO: 2417509 - RNA, 19 nt, Homo sapiens
  misc_RNA (1)...(19): siRNA sense strand
gaauugaaggacaugcaaa

SEQ ID NO: 2417510 - RNA, 19 nt, Homo sapiens
  misc_RNA (1)...(19): siRNA sense strand
aagaagaagagaagagaag

SEQ ID NO: 2417511 - RNA, 19 nt, Homo sapiens
  misc_RNA (1)...(19): siRNA sense strand
uguacaagaccaugaucaa

SEQ ID NO: 2417512 - RNA, 19 nt, Homo sapiens
  misc_RNA (1)...(19): siRNA sense strand
caucagaauccaaacaaga

SEQ ID NO: 2417513 - RNA, 19 nt, Homo sapiens
  misc_RNA (1)...(19): siRNA sense strand
cgaagagcagcauaggaaa

SEQ ID NO: 2417514 - RNA, 19 nt, Homo sapiens
  misc_RNA (1)...(19): siRNA sense strand
uucugaagcucaaaggaaa

SEQ ID NO: 2417515 - RNA, 19 nt, Homo sapiens
  misc_RNA (1)...(19): siRNA sense strand
caucaggaggcuugugcaa

SEQ ID NO: 2417516 - RNA, 19 nt, Homo sapiens
  misc_RNA (1)...(19): siRNA sense strand
ggaugggagaccugagcaa

SEQ ID NO: 2417517 - RNA, 19 nt, Homo sapiens
  misc_RNA (1)...(19): siRNA sense strand
ggcaaaguguucaggcgaa

SEQ ID NO: 2417518 - RNA, 19 nt, Homo sapiens
  misc_RNA (1)...(19): siRNA sense strand
augucaggagugugggaaa

SEQ ID NO: 2417519 - RNA, 19 nt, Homo sapiens
  misc_RNA (1)...(19): siRNA sense strand
augcagacaucaagcccua

SEQ ID NO: 2417520 - RNA, 19 nt, Homo sapiens
  misc_RNA (1)...(19): siRNA sense strand
cggcaaaguguucaggcga

SEQ ID NO: 2417521 - RNA, 19 nt, Homo sapiens
  misc_RNA (1)...(19): siRNA sense strand
cgguacagaccaugcacau

SEQ ID NO: 2417522 - RNA, 19 nt, Homo sapiens
  misc_RNA (1)...(19): siRNA sense strand
aggaaagauucaaaggaaa

SEQ ID NO: 2417523 - RNA, 19 nt, Homo sapiens
  misc_RNA (1)...(19): siRNA sense strand
uguaaaagccagagaagaa

SEQ ID NO: 2417524 - RNA, 19 nt, Homo sapiens
  misc_RNA (1)...(19): siRNA sense strand
agaaauaggucuucagcga

SEQ ID NO: 2417525 - RNA, 19 nt, Homo sapiens
  misc_RNA (1)...(19): siRNA sense strand
gcgccuugauaaagagaga

SEQ ID NO: 2417526 - RNA, 19 nt, Homo sapiens
  misc_RNA (1)...(19): siRNA sense strand
agauuguggugaagggaga

SEQ ID NO: 2417527 - RNA, 19 nt, Homo sapiens
  misc_RNA (1)...(19): siRNA sense strand
ucucaauggugaagcguca

SEQ ID NO: 2417528 - RNA, 19 nt, Homo sapiens
  misc_RNA (1)...(19): siRNA sense strand
aagaagaaacggaaggcuu

SEQ ID NO: 2417529 - RNA, 19 nt, Homo sapiens
  misc_RNA (1)...(19): siRNA sense strand
agaugugacccgagauauu

SEQ ID NO: 2417530 - RNA, 19 nt, Homo sapiens
  misc_RNA (1)...(19): siRNA sense strand
gguuagaagaccugaucga

SEQ ID NO: 2417531 - RNA, 19 nt, Homo sapiens
  misc_RNA (1)...(19): siRNA sense strand
agaugaaguuuuagcagaa

SEQ ID NO: 2417532 - RNA, 19 nt, Homo sapiens
  misc_RNA (1)...(19): siRNA sense strand
acaaagcacaggaaagaau

SEQ ID NO: 2417533 - RNA, 19 nt, Homo sapiens
  misc_RNA (1)...(19): siRNA sense strand
guauggaggacacgaacaa

SEQ ID NO: 2417534 - RNA, 19 nt, Homo sapiens
  misc_RNA (1)...(19): siRNA sense strand
cgaacaacuaucuuacaaa

SEQ ID NO: 2417535 - RNA, 19 nt, Homo sapiens
  misc_RNA (1)...(19): siRNA sense strand
gugugugcgccuugauaaa

SEQ ID NO: 2417536 - RNA, 19 nt, Homo sapiens
  misc_RNA (1)...(19): siRNA sense strand
ccaaaucagaagaaaggau

SEQ ID NO: 2417537 - RNA, 19 nt, Homo sapiens
  misc_RNA (1)...(19): siRNA sense strand
uggacagguacaugguaaa

SEQ ID NO: 2417538 - RNA, 19 nt, Homo sapiens
  misc_RNA (1)...(19): siRNA sense strand
caguauuagaacucagcua

SEQ ID NO: 2417539 - RNA, 19 nt, Homo sapiens
  misc_RNA (1)...(19): siRNA sense strand
aagcuaugucaguggaaaa

SEQ ID NO: 2417540 - RNA, 19 nt, Homo sapiens
  misc_RNA (1)...(19): siRNA sense strand
uuggacagguacaugguaa

SEQ ID NO: 2417541 - RNA, 19 nt, Homo sapiens
  misc_RNA (1)...(19): siRNA sense strand
cggcaaguauagacagaag

SEQ ID NO: 2417542 - RNA, 19 nt, Homo sapiens
  misc_RNA (1)...(19): siRNA sense strand
gggucacaaagaagggauu

SEQ ID NO: 2417543 - RNA, 19 nt, Homo sapiens
  misc_RNA (1)...(19): siRNA sense strand
gcccuuaaacagaggaguu

SEQ ID NO: 2417544 - RNA, 19 nt, Homo sapiens
  misc_RNA (1)...(19): siRNA sense strand
agucaaacgagcugcagau

SEQ ID NO: 2417545 - RNA, 19 nt, Homo sapiens
  misc_RNA (1)...(19): siRNA sense strand
gccuugauaaagagagauu

SEQ ID NO: 2417546 - RNA, 19 nt, Homo sapiens
  misc_RNA (1)...(19): siRNA sense strand
aggaaaagaagaaacggaa

SEQ ID NO: 2417547 - RNA, 19 nt, Homo sapiens
  misc_RNA (1)...(19): siRNA sense strand
cgaucaggaaagauucaaa

SEQ ID NO: 2417548 - RNA, 19 nt, Homo sapiens
  misc_RNA (1)...(19): siRNA sense strand
cgucaacaucggcaaguau

SEQ ID NO: 2417549 - RNA, 19 nt, Homo sapiens
  misc_RNA (1)...(19): siRNA sense strand
ggucuuugucugaagcuau

SEQ ID NO: 2417550 - RNA, 19 nt, Homo sapiens
  misc_RNA (1)...(19): siRNA sense strand
aggccaacccagagaguac

SEQ ID NO: 2417551 - RNA, 19 nt, Homo sapiens
  misc_RNA (1)...(19): siRNA sense strand
aagcaaagaaaccacgaau

SEQ ID NO: 2417552 - RNA, 19 nt, Homo sapiens
  misc_RNA (1)...(19): siRNA sense strand
cuuauagaguaguagacca

SEQ ID NO: 2417553 - RNA, 19 nt, Homo sapiens
  misc_RNA (1)...(19): siRNA sense strand
ugaugaaguucgucuggau

SEQ ID NO: 2417554 - RNA, 19 nt, Homo sapiens
  misc_RNA (1)...(19): siRNA sense strand
agggagacgaagugaucuu

SEQ ID NO: 2417555 - RNA, 19 nt, Homo sapiens
  misc_RNA (1)...(19): siRNA sense strand
cuuacaaagcacaggaaag

SEQ ID NO: 2417556 - RNA, 19 nt, Homo sapiens
  misc_RNA (1)...(19): siRNA sense strand
cagaugaaaagaagaaaca

SEQ ID NO: 2417557 - RNA, 19 nt, Homo sapiens
  misc_RNA (1)...(19): siRNA sense strand
gauccaaauguucagaaau

SEQ ID NO: 2417558 - RNA, 19 nt, Homo sapiens
  misc_RNA (1)...(19): siRNA sense strand
aagcgcucccuuagaaaua

SEQ ID NO: 2417559 - RNA, 19 nt, Homo sapiens
  misc_RNA (1)...(19): siRNA sense strand
gaagaaaagaccagaugca

SEQ ID NO: 2417560 - RNA, 19 nt, Homo sapiens
  misc_RNA (1)...(19): siRNA sense strand
agaaaugggauguaacagu

SEQ ID NO: 2417561 - RNA, 19 nt, Homo sapiens
  misc_RNA (1)...(19): siRNA sense strand
ggacuggaaaggaaggcca

SEQ ID NO: 2417562 - RNA, 19 nt, Homo sapiens
  misc_RNA (1)...(19): siRNA sense strand
cgacgugcagcuacugaaa

SEQ ID NO: 2417563 - RNA, 19 nt, Homo sapiens
  misc_RNA (1)...(19): siRNA sense strand
uuggauaucucaaugguga

SEQ ID NO: 2417564 - RNA, 19 nt, Homo sapiens
  misc_RNA (1)...(19): siRNA sense strand
agagagagaguauggagga

SEQ ID NO: 2417565 - RNA, 19 nt, Homo sapiens
  misc_RNA (1)...(19): siRNA sense strand
aauugaggaugaagagugu

SEQ ID NO: 2417566 - RNA, 19 nt, Homo sapiens
  misc_RNA (1)...(19): siRNA sense strand
aaaccaagguggagcccua

SEQ ID NO: 2417567 - RNA, 19 nt, Homo sapiens
  misc_RNA (1)...(19): siRNA sense strand
ggagagcggcugagagaga

SEQ ID NO: 2417568 - RNA, 19 nt, Homo sapiens
  misc_RNA (1)...(19): siRNA sense strand
ugagagagagcaagaagaa

SEQ ID NO: 2417569 - RNA, 19 nt, Homo sapiens
  misc_RNA (1)...(19): siRNA sense strand
gcaagagggaggaggagga

SEQ ID NO: 2417570 - RNA, 19 nt, Homo sapiens
  misc_RNA (1)...(19): siRNA sense strand
gugaaauacuggcccgaga

SEQ ID NO: 2417571 - RNA, 19 nt, Homo sapiens
  misc_RNA (1)...(19): siRNA sense strand
cggcugagagagagcaaga

SEQ ID NO: 2417572 - RNA, 19 nt, Homo sapiens
  misc_RNA (1)...(19): siRNA sense strand
ugaccaagguggaggagcu

SEQ ID NO: 2417573 - RNA, 19 nt, Homo sapiens
  misc_RNA (1)...(19): siRNA sense strand
acgugaaauacgacgacua

SEQ ID NO: 2417574 - RNA, 19 nt, Homo sapiens
  misc_RNA (1)...(19): siRNA sense strand
gaucagaaacucaccaaca

SEQ ID NO: 2417575 - RNA, 19 nt, Homo sapiens
  misc_RNA (1)...(19): siRNA sense strand
caacaagaggaccgcggaa

SEQ ID NO: 2417576 - RNA, 19 nt, Homo sapiens
  misc_RNA (1)...(19): siRNA sense strand
cgggcaagggcaaguggaa

SEQ ID NO: 2417577 - RNA, 19 nt, Homo sapiens
  misc_RNA (1)...(19): siRNA sense strand
ggacagauccuuucgggca

SEQ ID NO: 2417578 - RNA, 19 nt, Homo sapiens
  misc_RNA (1)...(19): siRNA sense strand
aggugguacuggcgggaga

SEQ ID NO: 2417579 - RNA, 19 nt, Homo sapiens
  misc_RNA (1)...(19): siRNA sense strand
agagcaagaagaaggcgaa

SEQ ID NO: 2417580 - RNA, 19 nt, Homo sapiens
  misc_RNA (1)...(19): siRNA sense strand
acaagaggaccgcggaaca

SEQ ID NO: 2417581 - RNA, 19 nt, Homo sapiens
  misc_RNA (1)...(19): siRNA sense strand
ugaguaaaguggaggagac

SEQ ID NO: 2417582 - RNA, 19 nt, Homo sapiens
  misc_RNA (1)...(19): siRNA sense strand
ggccagagugagucagaca

SEQ ID NO: 2417583 - RNA, 19 nt, Homo sapiens
  misc_RNA (1)...(19): siRNA sense strand
uggccaaccgagagcgaga

SEQ ID NO: 2417584 - RNA, 19 nt, Homo sapiens
  misc_RNA (1)...(19): siRNA sense strand
cugcagaggcuguucuaca

SEQ ID NO: 2417585 - RNA, 19 nt, Homo sapiens
  misc_RNA (1)...(19): siRNA sense strand
agagggaggaggaggagca

SEQ ID NO: 2417586 - RNA, 19 nt, Homo sapiens
  misc_RNA (1)...(19): siRNA sense strand
gagcaacgacggagcguac

SEQ ID NO: 2417587 - RNA, 19 nt, Homo sapiens
  misc_RNA (1)...(19): siRNA sense strand
ggaaugagguccuggcguc

SEQ ID NO: 2417588 - RNA, 19 nt, Homo sapiens
  misc_RNA (1)...(19): siRNA sense strand
gcaaacagauggaggacgg

SEQ ID NO: 2417589 - RNA, 19 nt, Homo sapiens
  misc_RNA (1)...(19): siRNA sense strand
cgagagaaggagaacagca

SEQ ID NO: 2417590 - RNA, 19 nt, Homo sapiens
  misc_RNA (1)...(19): siRNA sense strand
gaugaggacaugugggaug

SEQ ID NO: 2417591 - RNA, 19 nt, Homo sapiens
  misc_RNA (1)...(19): siRNA sense strand
cugagagagagcaagaaga

SEQ ID NO: 2417592 - RNA, 19 nt, Homo sapiens
  misc_RNA (1)...(19): siRNA sense strand
gagaacagcaagagggagg

SEQ ID NO: 2417593 - RNA, 19 nt, Homo sapiens
  misc_RNA (1)...(19): siRNA sense strand
cggaauuggggcuguacaa

SEQ ID NO: 2417594 - RNA, 19 nt, Homo sapiens
  misc_RNA (1)...(19): siRNA sense strand
uagugguggucgagaucuu

SEQ ID NO: 2417595 - RNA, 19 nt, Homo sapiens
  misc_RNA (1)...(19): siRNA sense strand
guacagaagccgaggacgu

SEQ ID NO: 2417596 - RNA, 19 nt, Homo sapiens
  misc_RNA (1)...(19): siRNA sense strand
ccuuugacucuguggacaa

SEQ ID NO: 2417597 - RNA, 19 nt, Homo sapiens
  misc_RNA (1)...(19): siRNA sense strand
gcuuaguguauucggacaa

SEQ ID NO: 2417598 - RNA, 19 nt, Homo sapiens
  misc_RNA (1)...(19): siRNA sense strand
gagcggagcaugucggaga

SEQ ID NO: 2417599 - RNA, 19 nt, Homo sapiens
  misc_RNA (1)...(19): siRNA sense strand
ggugcaacaaggaccgaaa

SEQ ID NO: 2417600 - RNA, 19 nt, Homo sapiens
  misc_RNA (1)...(19): siRNA sense strand
gguacuggcaagaagguga

SEQ ID NO: 2417601 - RNA, 19 nt, Homo sapiens
  misc_RNA (1)...(19): siRNA sense strand
ggcccaaggagaagcagaa

SEQ ID NO: 2417602 - RNA, 19 nt, Homo sapiens
  misc_RNA (1)...(19): siRNA sense strand
cgaaagaaguccagcucag

SEQ ID NO: 2417603 - RNA, 19 nt, Homo sapiens
  misc_RNA (1)...(19): siRNA sense strand
ccuucaugaucuucagcaa

SEQ ID NO: 2417604 - RNA, 19 nt, Homo sapiens
  misc_RNA (1)...(19): siRNA sense strand
ugaaaugggcacugggucu

SEQ ID NO: 2417605 - RNA, 19 nt, Homo sapiens
  misc_RNA (1)...(19): siRNA sense strand
gcaggagggcacaaggaga

SEQ ID NO: 2417606 - RNA, 19 nt, Homo sapiens
  misc_RNA (1)...(19): siRNA sense strand
cgcaagaagaggaagaacu

SEQ ID NO: 2417607 - RNA, 19 nt, Homo sapiens
  misc_RNA (1)...(19): siRNA sense strand
aggagaagcagaaguacca

SEQ ID NO: 2417608 - RNA, 19 nt, Homo sapiens
  misc_RNA (1)...(19): siRNA sense strand
gggugucagcuuaguguau

SEQ ID NO: 2417609 - RNA, 19 nt, Homo sapiens
  misc_RNA (1)...(19): siRNA sense strand
cgagugaugaggagcgcau

SEQ ID NO: 2417610 - RNA, 19 nt, Homo sapiens
  misc_RNA (1)...(19): siRNA sense strand
gggugguggaaucugguaa

SEQ ID NO: 2417611 - RNA, 19 nt, Homo sapiens
  misc_RNA (1)...(19): siRNA sense strand
ucagcaagauccugggcga

SEQ ID NO: 2417612 - RNA, 19 nt, Homo sapiens
  misc_RNA (1)...(19): siRNA sense strand
cuacaggaacugacgcaga

SEQ ID NO: 2417613 - RNA, 19 nt, Homo sapiens
  misc_RNA (1)...(19): siRNA sense strand
agucugagcuugaggggca

SEQ ID NO: 2417614 - RNA, 19 nt, Homo sapiens
  misc_RNA (1)...(19): siRNA sense strand
cggcggagaaguagacagu

SEQ ID NO: 2417615 - RNA, 19 nt, Homo sapiens
  misc_RNA (1)...(19): siRNA sense strand
ccagauuggaaguggugca

SEQ ID NO: 2417616 - RNA, 19 nt, Homo sapiens
  misc_RNA (1)...(19): siRNA sense strand
gaacugacgcagauggugu

SEQ ID NO: 2417617 - RNA, 19 nt, Homo sapiens
  misc_RNA (1)...(19): siRNA sense strand
ccggcuggacagugagaca

SEQ ID NO: 2417618 - RNA, 19 nt, Homo sapiens
  misc_RNA (1)...(19): siRNA sense strand
gagaagucauugagggaga

SEQ ID NO: 2417619 - RNA, 19 nt, Homo sapiens
  misc_RNA (1)...(19): siRNA sense strand
agacugaaauagaaggcaa

SEQ ID NO: 2417620 - RNA, 19 nt, Homo sapiens
  misc_RNA (1)...(19): siRNA sense strand
gcggaauugcacaaggaaa

SEQ ID NO: 2417621 - RNA, 19 nt, Homo sapiens
  misc_RNA (1)...(19): siRNA sense strand
gcaagaaauacaaacgcua

SEQ ID NO: 2417622 - RNA, 19 nt, Homo sapiens
  misc_RNA (1)...(19): siRNA sense strand
gagccuagcuacagagcca

SEQ ID NO: 2417623 - RNA, 19 nt, Homo sapiens
  misc_RNA (1)...(19): siRNA sense strand
aggaugaagaggagacgaa

SEQ ID NO: 2417624 - RNA, 19 nt, Homo sapiens
  misc_RNA (1)...(19): siRNA sense strand
uggaaauuaauguggagaa

SEQ ID NO: 2417625 - RNA, 19 nt, Homo sapiens
  misc_RNA (1)...(19): siRNA sense strand
aaauagaaggcaagcgaca

SEQ ID NO: 2417626 - RNA, 19 nt, Homo sapiens
  misc_RNA (1)...(19): siRNA sense strand
ccaucagaaaggagucaaa

SEQ ID NO: 2417627 - RNA, 19 nt, Homo sapiens
  misc_RNA (1)...(19): siRNA sense strand
agucaaagucuaugaugau

SEQ ID NO: 2417628 - RNA, 19 nt, Homo sapiens
  misc_RNA (1)...(19): siRNA sense strand
gggagaagacagugacgga

SEQ ID NO: 2417629 - RNA, 19 nt, Homo sapiens
  misc_RNA (1)...(19): siRNA sense strand
gguacauaagucuaggaaa

SEQ ID NO: 2417630 - RNA, 19 nt, Homo sapiens
  misc_RNA (1)...(19): siRNA sense strand
cggaauugcacaaggaaag

SEQ ID NO: 2417631 - RNA, 19 nt, Homo sapiens
  misc_RNA (1)...(19): siRNA sense strand
gauaucugccaaagagcaa

SEQ ID NO: 2417632 - RNA, 19 nt, Homo sapiens
  misc_RNA (1)...(19): siRNA sense strand
cuguguacgccauggaaau

SEQ ID NO: 2417633 - RNA, 19 nt, Homo sapiens
  misc_RNA (1)...(19): siRNA sense strand
gaugaagaggagacgaaaa

SEQ ID NO: 2417634 - RNA, 19 nt, Homo sapiens
  misc_RNA (1)...(19): siRNA sense strand
gcuagaaagugaagagucc

SEQ ID NO: 2417635 - RNA, 19 nt, Homo sapiens
  misc_RNA (1)...(19): siRNA sense strand
ugaaauagaaggcaagcga

SEQ ID NO: 2417636 - RNA, 19 nt, Homo sapiens
  misc_RNA (1)...(19): siRNA sense strand
cggauggagaugcaguaaa

SEQ ID NO: 2417637 - RNA, 19 nt, Homo sapiens
  misc_RNA (1)...(19): siRNA sense strand
accaaaauaucgaggauga

SEQ ID NO: 2417638 - RNA, 19 nt, Homo sapiens
  misc_RNA (1)...(19): siRNA sense strand
aauacaaacgcuagaaagu

SEQ ID NO: 2417639 - RNA, 19 nt, Homo sapiens
  misc_RNA (1)...(19): siRNA sense strand
caaacaaacaggagagacc

SEQ ID NO: 2417640 - RNA, 19 nt, Homo sapiens
  misc_RNA (1)...(19): siRNA sense strand
aaaucauccuagagaaacu

SEQ ID NO: 2417641 - RNA, 19 nt, Homo sapiens
  misc_RNA (1)...(19): siRNA sense strand
ccaaaguaguguaugaggu

SEQ ID NO: 2417642 - RNA, 19 nt, Homo sapiens
  misc_RNA (1)...(19): siRNA sense strand
uugaugaagaugaugagaa

SEQ ID NO: 2417643 - RNA, 19 nt, Homo sapiens
  misc_RNA (1)...(19): siRNA sense strand
uaauguggagaaagacaaa

SEQ ID NO: 2417644 - RNA, 19 nt, Homo sapiens
  misc_RNA (1)...(19): siRNA sense strand
uagaaaauggagugcacaa

SEQ ID NO: 2417645 - RNA, 19 nt, Homo sapiens
  misc_RNA (1)...(19): siRNA sense strand
ccagguacccaaaagaaaa

SEQ ID NO: 2417646 - RNA, 19 nt, Homo sapiens
  misc_RNA (1)...(19): siRNA sense strand
aggauguagaagagcuuau

SEQ ID NO: 2417647 - RNA, 19 nt, Homo sapiens
  misc_RNA (1)...(19): siRNA sense strand
gacaacagcuugacgagca

SEQ ID NO: 2417648 - RNA, 19 nt, Homo sapiens
  misc_RNA (1)...(19): siRNA sense strand
gcuguguacgccauggaaa

SEQ ID NO: 2417649 - RNA, 19 nt, Homo sapiens
  misc_RNA (1)...(19): siRNA sense strand
acaaucaagcuuaggagga

SEQ ID NO: 2417650 - RNA, 19 nt, Homo sapiens
  misc_RNA (1)...(19): siRNA sense strand
agcaaaucauccuagagaa

SEQ ID NO: 2417651 - RNA, 19 nt, Homo sapiens
  misc_RNA (1)...(19): siRNA sense strand
aggacuuucagaaggguuu

SEQ ID NO: 2417652 - RNA, 19 nt, Homo sapiens
  misc_RNA (1)...(19): siRNA sense strand
caguacggauggagaugca

SEQ ID NO: 2417653 - RNA, 19 nt, Homo sapiens
  misc_RNA (1)...(19): siRNA sense strand
gcacaaggaaaggcugcaa

SEQ ID NO: 2417654 - RNA, 19 nt, Homo sapiens
  misc_RNA (1)...(19): siRNA sense strand
aggaauuagugauggaaga

SEQ ID NO: 2417655 - RNA, 19 nt, Homo sapiens
  misc_RNA (1)...(19): siRNA sense strand
ggacaauauuauagcagga

SEQ ID NO: 2417656 - RNA, 19 nt, Homo sapiens
  misc_RNA (1)...(19): siRNA sense strand
gcuuuauuguaaugaggaa

SEQ ID NO: 2417657 - RNA, 19 nt, Homo sapiens
  misc_RNA (1)...(19): siRNA sense strand
aggaaaugaggaagaucua

SEQ ID NO: 2417658 - RNA, 19 nt, Homo sapiens
  misc_RNA (1)...(19): siRNA sense strand
guauggaaggauuggaauu

SEQ ID NO: 2417659 - RNA, 19 nt, Homo sapiens
  misc_RNA (1)...(19): siRNA sense strand
aaucaggaaaugaggaaga

SEQ ID NO: 2417660 - RNA, 19 nt, Homo sapiens
  misc_RNA (1)...(19): siRNA sense strand
ugauuuacuaguuggcaua

SEQ ID NO: 2417661 - RNA, 19 nt, Homo sapiens
  misc_RNA (1)...(19): siRNA sense strand
gacucaacucccagaauaa

SEQ ID NO: 2417662 - RNA, 19 nt, Homo sapiens
  misc_RNA (1)...(19): siRNA sense strand
cggcaacagcagugucaau

SEQ ID NO: 2417663 - RNA, 19 nt, Homo sapiens
  misc_RNA (1)...(19): siRNA sense strand
augaaugagaaaugggaca

SEQ ID NO: 2417664 - RNA, 19 nt, Homo sapiens
  misc_RNA (1)...(19): siRNA sense strand
ccuaaaagcuaaaagccau

SEQ ID NO: 2417665 - RNA, 19 nt, Homo sapiens
  misc_RNA (1)...(19): siRNA sense strand
gagcaaagccuauggaagc

SEQ ID NO: 2417666 - RNA, 19 nt, Homo sapiens
  misc_RNA (1)...(19): siRNA sense strand
augagaaaugggacacaaa

SEQ ID NO: 2417667 - RNA, 19 nt, Homo sapiens
  misc_RNA (1)...(19): siRNA sense strand
acacaaacucuucagaaaa

SEQ ID NO: 2417668 - RNA, 19 nt, Homo sapiens
  misc_RNA (1)...(19): siRNA sense strand
gugauuuacuaguuggcau

SEQ ID NO: 2417669 - RNA, 19 nt, Homo sapiens
  misc_RNA (1)...(19): siRNA sense strand
guuacaugugcaagaagaa

SEQ ID NO: 2417670 - RNA, 19 nt, Homo sapiens
  misc_RNA (1)...(19): siRNA sense strand
gcaggaagaaccaggagca

SEQ ID NO: 2417671 - RNA, 19 nt, Homo sapiens
  misc_RNA (1)...(19): siRNA sense strand
ccacugugcuguuugccaa

SEQ ID NO: 2417672 - RNA, 19 nt, Homo sapiens
  misc_RNA (1)...(19): siRNA sense strand
acuacuaacagcagugaga

SEQ ID NO: 2417673 - RNA, 19 nt, Homo sapiens
  misc_RNA (1)...(19): siRNA sense strand
gugcaagaucaguggauug

SEQ ID NO: 2417674 - RNA, 19 nt, Homo sapiens
  misc_RNA (1)...(19): siRNA sense strand
uauuauagcaggauggcca

SEQ ID NO: 2417675 - RNA, 19 nt, Homo sapiens
  misc_RNA (1)...(19): siRNA sense strand
gggaauaucugucgcagcu

SEQ ID NO: 2417676 - RNA, 19 nt, Homo sapiens
  misc_RNA (1)...(19): siRNA sense strand
ucaaaacccucauggggaa

SEQ ID NO: 2417677 - RNA, 19 nt, Homo sapiens
  misc_RNA (1)...(19): siRNA sense strand
gagaaaugggacacaaacu

SEQ ID NO: 2417678 - RNA, 19 nt, Homo sapiens
  misc_RNA (1)...(19): siRNA sense strand
caggaaaugaggaagaucu

SEQ ID NO: 2417679 - RNA, 19 nt, Homo sapiens
  misc_RNA (1)...(19): siRNA sense strand
ccucacacaggcaggaaga

SEQ ID NO: 2417680 - RNA, 19 nt, Homo sapiens
  misc_RNA (1)...(19): siRNA sense strand
uuggaaacacgaugugcaa

SEQ ID NO: 2417681 - RNA, 19 nt, Homo sapiens
  misc_RNA (1)...(19): siRNA sense strand
uguuacaugugcaagaaga

SEQ ID NO: 2417682 - RNA, 19 nt, Homo sapiens
  misc_RNA (1)...(19): siRNA sense strand
ggaacaaacauaugcacac

SEQ ID NO: 2417683 - RNA, 19 nt, Homo sapiens
  misc_RNA (1)...(19): siRNA sense strand
ccuauaacacugcuggaca

SEQ ID NO: 2417684 - RNA, 19 nt, Homo sapiens
  misc_RNA (1)...(19): siRNA sense strand
uacuaacagcagugagauu

SEQ ID NO: 2417685 - RNA, 19 nt, Homo sapiens
  misc_RNA (1)...(19): siRNA sense strand
aggaauuagugauggaaga

SEQ ID NO: 2417686 - RNA, 19 nt, Homo sapiens
  misc_RNA (1)...(19): siRNA sense strand
ggacaauauuauagcagga

SEQ ID NO: 2417687 - RNA, 19 nt, Homo sapiens
  misc_RNA (1)...(19): siRNA sense strand
gcuuuauuguaaugaggaa

SEQ ID NO: 2417688 - RNA, 19 nt, Homo sapiens
  misc_RNA (1)...(19): siRNA sense strand
aggaaaugaggaagaucua

SEQ ID NO: 2417689 - RNA, 19 nt, Homo sapiens
  misc_RNA (1)...(19): siRNA sense strand
guauggaaggauuggaauu

SEQ ID NO: 2417690 - RNA, 19 nt, Homo sapiens
  misc_RNA (1)...(19): siRNA sense strand
aaucaggaaaugaggaaga

SEQ ID NO: 2417691 - RNA, 19 nt, Homo sapiens
  misc_RNA (1)...(19): siRNA sense strand
ugauuuacuaguuggcaua

SEQ ID NO: 2417692 - RNA, 19 nt, Homo sapiens
  misc_RNA (1)...(19): siRNA sense strand
gacucaacucccagaauaa

SEQ ID NO: 2417693 - RNA, 19 nt, Homo sapiens
  misc_RNA (1)...(19): siRNA sense strand
cggcaacagcagugucaau

SEQ ID NO: 2417694 - RNA, 19 nt, Homo sapiens
  misc_RNA (1)...(19): siRNA sense strand
ccuaaaagcuaaaagccau

SEQ ID NO: 2417695 - RNA, 19 nt, Homo sapiens
  misc_RNA (1)...(19): siRNA sense strand
gagcaaagccuauggaagc

SEQ ID NO: 2417696 - RNA, 19 nt, Homo sapiens
  misc_RNA (1)...(19): siRNA sense strand
augagaaaugggacacaaa

SEQ ID NO: 2417697 - RNA, 19 nt, Homo sapiens
  misc_RNA (1)...(19): siRNA sense strand
acacaaacucuucagaaaa

SEQ ID NO: 2417698 - RNA, 19 nt, Homo sapiens
  misc_RNA (1)...(19): siRNA sense strand
gugauuuacuaguuggcau

SEQ ID NO: 2417699 - RNA, 19 nt, Homo sapiens
  misc_RNA (1)...(19): siRNA sense strand
guuacaugugcaagaagaa

SEQ ID NO: 2417700 - RNA, 19 nt, Homo sapiens
  misc_RNA (1)...(19): siRNA sense strand
gcaggaagaaccaggagca

SEQ ID NO: 2417701 - RNA, 19 nt, Homo sapiens
  misc_RNA (1)...(19): siRNA sense strand
ccacugugcuguuugccaa

SEQ ID NO: 2417702 - RNA, 19 nt, Homo sapiens
  misc_RNA (1)...(19): siRNA sense strand
acuacuaacagcagugaga

SEQ ID NO: 2417703 - RNA, 19 nt, Homo sapiens
  misc_RNA (1)...(19): siRNA sense strand
gugcaagaucaguggauug

SEQ ID NO: 2417704 - RNA, 19 nt, Homo sapiens
  misc_RNA (1)...(19): siRNA sense strand
uauuauagcaggauggcca

SEQ ID NO: 2417705 - RNA, 19 nt, Homo sapiens
  misc_RNA (1)...(19): siRNA sense strand
gggaauaucugucgcagcu

SEQ ID NO: 2417706 - RNA, 19 nt, Homo sapiens
  misc_RNA (1)...(19): siRNA sense strand
ucaaaacccucauggggaa

SEQ ID NO: 2417707 - RNA, 19 nt, Homo sapiens
  misc_RNA (1)...(19): siRNA sense strand
gagaaaugggacacaaacu

SEQ ID NO: 2417708 - RNA, 19 nt, Homo sapiens
  misc_RNA (1)...(19): siRNA sense strand
caggaaaugaggaagaucu

SEQ ID NO: 2417709 - RNA, 19 nt, Homo sapiens
  misc_RNA (1)...(19): siRNA sense strand
ccucacacaggcaggaaga

SEQ ID NO: 2417710 - RNA, 19 nt, Homo sapiens
  misc_RNA (1)...(19): siRNA sense strand
uuggaaacacgaugugcaa

SEQ ID NO: 2417711 - RNA, 19 nt, Homo sapiens
  misc_RNA (1)...(19): siRNA sense strand
uguuacaugugcaagaaga

SEQ ID NO: 2417712 - RNA, 19 nt, Homo sapiens
  misc_RNA (1)...(19): siRNA sense strand
ggaacaaacauaugcacac

SEQ ID NO: 2417713 - RNA, 19 nt, Homo sapiens
  misc_RNA (1)...(19): siRNA sense strand
ccuauaacacugcuggaca

SEQ ID NO: 2417714 - RNA, 19 nt, Homo sapiens
  misc_RNA (1)...(19): siRNA sense strand
uacuaacagcagugagauu

SEQ ID NO: 2417715 - RNA, 19 nt, Homo sapiens
  misc_RNA (1)...(19): siRNA sense strand
ggaauaaaccagaugccuu

SEQ ID NO: 2417716 - RNA, 19 nt, Homo sapiens
  misc_RNA (1)...(19): siRNA sense strand
cagugaaguuuuaggaaga

SEQ ID NO: 2417717 - RNA, 19 nt, Homo sapiens
  misc_RNA (1)...(19): siRNA sense strand
cuaccuuauuugagacaau

SEQ ID NO: 2417718 - RNA, 19 nt, Homo sapiens
  misc_RNA (1)...(19): siRNA sense strand
agaaaagggaagaagggaa

SEQ ID NO: 2417719 - RNA, 19 nt, Homo sapiens
  misc_RNA (1)...(19): siRNA sense strand
uggaugaauaugaagacaa

SEQ ID NO: 2417720 - RNA, 19 nt, Homo sapiens
  misc_RNA (1)...(19): siRNA sense strand
gauaugaagaagugggauc

SEQ ID NO: 2417721 - RNA, 19 nt, Homo sapiens
  misc_RNA (1)...(19): siRNA sense strand
ucaucaugcaacagguuaa

SEQ ID NO: 2417722 - RNA, 19 nt, Homo sapiens
  misc_RNA (1)...(19): siRNA sense strand
ccuucuaggucuuccaaaa

SEQ ID NO: 2417723 - RNA, 19 nt, Homo sapiens
  misc_RNA (1)...(19): siRNA sense strand
cuguguggcaacugugaua

SEQ ID NO: 2417724 - RNA, 19 nt, Homo sapiens
  misc_RNA (1)...(19): siRNA sense strand
acuuucauggagaggguaa

SEQ ID NO: 2417725 - RNA, 19 nt, Homo sapiens
  misc_RNA (1)...(19): siRNA sense strand
cguaauugcaacagcccuu

SEQ ID NO: 2417726 - RNA, 19 nt, Homo sapiens
  misc_RNA (1)...(19): siRNA sense strand
uguggagauuugaugggaa

SEQ ID NO: 2417727 - RNA, 19 nt, Homo sapiens
  misc_RNA (1)...(19): siRNA sense strand
gugccacaaaggagccaaa

SEQ ID NO: 2417728 - RNA, 19 nt, Homo sapiens
  misc_RNA (1)...(19): siRNA sense strand
ugaaaggcacaguggagga

SEQ ID NO: 2417729 - RNA, 19 nt, Homo sapiens
  misc_RNA (1)...(19): siRNA sense strand
ccuacauaccuguuguuau

SEQ ID NO: 2417730 - RNA, 19 nt, Homo sapiens
  misc_RNA (1)...(19): siRNA sense strand
ggagaaagugggaaguaua

SEQ ID NO: 2417731 - RNA, 19 nt, Homo sapiens
  misc_RNA (1)...(19): siRNA sense strand
gaaaggaaaucaaaccaaa

SEQ ID NO: 2417732 - RNA, 19 nt, Homo sapiens
  misc_RNA (1)...(19): siRNA sense strand
guggaaauuuggagugaca

SEQ ID NO: 2417733 - RNA, 19 nt, Homo sapiens
  misc_RNA (1)...(19): siRNA sense strand
gguuaagaaaggaaaucaa

SEQ ID NO: 2417734 - RNA, 19 nt, Homo sapiens
  misc_RNA (1)...(19): siRNA sense strand
gcagcgaauuggagaaagu

SEQ ID NO: 2417735 - RNA, 19 nt, Homo sapiens
  misc_RNA (1)...(19): siRNA sense strand
gaaccagcauggaguguuu

SEQ ID NO: 2417736 - RNA, 19 nt, Homo sapiens
  misc_RNA (1)...(19): siRNA sense strand
gggucuuagugaggagaaa

SEQ ID NO: 2417737 - RNA, 19 nt, Homo sapiens
  misc_RNA (1)...(19): siRNA sense strand
gagaaagugggaaguauau

SEQ ID NO: 2417738 - RNA, 19 nt, Homo sapiens
  misc_RNA (1)...(19): siRNA sense strand
gaaaaguggaagcagaaua

SEQ ID NO: 2417739 - RNA, 19 nt, Homo sapiens
  misc_RNA (1)...(19): siRNA sense strand
auagauauggaguggaaau

SEQ ID NO: 2417740 - RNA, 19 nt, Homo sapiens
  misc_RNA (1)...(19): siRNA sense strand
uaaaguuggugguuaagaa

SEQ ID NO: 2417741 - RNA, 19 nt, Homo sapiens
  misc_RNA (1)...(19): siRNA sense strand
uggagaaagugggaaguau

SEQ ID NO: 2417742 - RNA, 19 nt, Homo sapiens
  misc_RNA (1)...(19): siRNA sense strand
ggagcagcgaauuggagaa

SEQ ID NO: 2417743 - RNA, 19 nt, Homo sapiens
  misc_RNA (1)...(19): siRNA sense strand
gagcagcgaauuggagaaa

SEQ ID NO: 2417744 - RNA, 19 nt, Homo sapiens
  misc_RNA (1)...(19): siRNA sense strand
cugaaaaguggaagcagaa

SEQ ID NO: 2417745 - RNA, 19 nt, Homo sapiens
  misc_RNA (1)...(19): siRNA sense strand
agaaaggaaaucaaaccaa

SEQ ID NO: 2417746 - RNA, 19 nt, Homo sapiens
  misc_RNA (1)...(19): siRNA sense strand
gaguggaaauuuggaguga

SEQ ID NO: 2417747 - RNA, 19 nt, Homo sapiens
  misc_RNA (1)...(19): siRNA sense strand
gaaagugggaaguauauuu

SEQ ID NO: 2417748 - RNA, 19 nt, Homo sapiens
  misc_RNA (1)...(19): siRNA sense strand
gcuuugaagaagagucuca

SEQ ID NO: 2417749 - RNA, 19 nt, Homo sapiens
  misc_RNA (1)...(19): siRNA sense strand
cgagauggagcgagucaga

SEQ ID NO: 2417750 - RNA, 19 nt, Homo sapiens
  misc_RNA (1)...(19): siRNA sense strand
ggugguuaagaaaggaaau

SEQ ID NO: 2417751 - RNA, 19 nt, Homo sapiens
  misc_RNA (1)...(19): siRNA sense strand
ggaaauuuggagugacauc

SEQ ID NO: 2417752 - RNA, 19 nt, Homo sapiens
  misc_RNA (1)...(19): siRNA sense strand
aagaagagucucacagcca

SEQ ID NO: 2417753 - RNA, 19 nt, Homo sapiens
  misc_RNA (1)...(19): siRNA sense strand
gugaggagaaagccacuua

SEQ ID NO: 2417754 - RNA, 19 nt, Homo sapiens
  misc_RNA (1)...(19): siRNA sense strand
acaucugggagcagcgaau

SEQ ID NO: 2417755 - RNA, 19 nt, Homo sapiens
  misc_RNA (1)...(19): siRNA sense strand
ccagaagcucacagggaaa

SEQ ID NO: 2417756 - RNA, 19 nt, Homo sapiens
  misc_RNA (1)...(19): siRNA sense strand
agaugaaagcacugaaaca

SEQ ID NO: 2417757 - RNA, 19 nt, Homo sapiens
  misc_RNA (1)...(19): siRNA sense strand
agggaaagacggaagugaa

SEQ ID NO: 2417758 - RNA, 19 nt, Homo sapiens
  misc_RNA (1)...(19): siRNA sense strand
aaccuaaagaagaggcaaa

SEQ ID NO: 2417759 - RNA, 19 nt, Homo sapiens
  misc_RNA (1)...(19): siRNA sense strand
uuucaaacguucagcccaa

SEQ ID NO: 2417760 - RNA, 19 nt, Homo sapiens
  misc_RNA (1)...(19): siRNA sense strand
cagcagagcaggaagagca

SEQ ID NO: 2417761 - RNA, 19 nt, Homo sapiens
  misc_RNA (1)...(19): siRNA sense strand
agacaaaaugugaagaaca

SEQ ID NO: 2417762 - RNA, 19 nt, Homo sapiens
  misc_RNA (1)...(19): siRNA sense strand
cugaugaagaugaggaaac

SEQ ID NO: 2417763 - RNA, 19 nt, Homo sapiens
  misc_RNA (1)...(19): siRNA sense strand
aaacaagguuauaucgcuu

SEQ ID NO: 2417764 - RNA, 19 nt, Homo sapiens
  misc_RNA (1)...(19): siRNA sense strand
cacugaaacauuugagaca

SEQ ID NO: 2417765 - RNA, 19 nt, Homo sapiens
  misc_RNA (1)...(19): siRNA sense strand
cgguguaaccauuuaugaa

SEQ ID NO: 2417766 - RNA, 19 nt, Homo sapiens
  misc_RNA (1)...(19): siRNA sense strand
ggaagaaggagcugcugga

SEQ ID NO: 2417767 - RNA, 19 nt, Homo sapiens
  misc_RNA (1)...(19): siRNA sense strand
aaacaguggugguggagac

SEQ ID NO: 2417768 - RNA, 19 nt, Homo sapiens
  misc_RNA (1)...(19): siRNA sense strand
augaaagcacugaaacauu

SEQ ID NO: 2417769 - RNA, 19 nt, Homo sapiens
  misc_RNA (1)...(19): siRNA sense strand
gacaaacagugguggugga

SEQ ID NO: 2417770 - RNA, 19 nt, Homo sapiens
  misc_RNA (1)...(19): siRNA sense strand
ggacaacagaugaaagcac

SEQ ID NO: 2417771 - RNA, 19 nt, Homo sapiens
  misc_RNA (1)...(19): siRNA sense strand
ggugcacaggucagacaaa

SEQ ID NO: 2417772 - RNA, 19 nt, Homo sapiens
  misc_RNA (1)...(19): siRNA sense strand
aagaaggagcugcuggaga

SEQ ID NO: 2417773 - RNA, 19 nt, Homo sapiens
  misc_RNA (1)...(19): siRNA sense strand
aggagcugcuggagagacu

SEQ ID NO: 2417774 - RNA, 19 nt, Homo sapiens
  misc_RNA (1)...(19): siRNA sense strand
gagaggaggaggagggcaa

SEQ ID NO: 2417775 - RNA, 19 nt, Homo sapiens
  misc_RNA (1)...(19): siRNA sense strand
aggaggagggcaaagagaa

SEQ ID NO: 2417776 - RNA, 19 nt, Homo sapiens
  misc_RNA (1)...(19): siRNA sense strand
ucaacaucgccaaggccaa

SEQ ID NO: 2417777 - RNA, 19 nt, Homo sapiens
  misc_RNA (1)...(19): siRNA sense strand
ccaucaaagacaucgacaa

SEQ ID NO: 2417778 - RNA, 19 nt, Homo sapiens
  misc_RNA (1)...(19): siRNA sense strand
cugacgugguggagaagau

SEQ ID NO: 2417779 - RNA, 19 nt, Homo sapiens
  misc_RNA (1)...(19): siRNA sense strand
acaucaucgucaaggucaa

SEQ ID NO: 2417780 - RNA, 19 nt, Homo sapiens
  misc_RNA (1)...(19): siRNA sense strand
gggaguuugugguggccau

SEQ ID NO: 2417781 - RNA, 19 nt, Homo sapiens
  misc_RNA (1)...(19): siRNA sense strand
ccaucaagauccaucccaa

SEQ ID NO: 2417782 - RNA, 19 nt, Homo sapiens
  misc_RNA (1)...(19): siRNA sense strand
agaucaaagacuggaagaa

SEQ ID NO: 2417783 - RNA, 19 nt, Homo sapiens
  misc_RNA (1)...(19): siRNA sense strand
uggugaaccuggauggcga

SEQ ID NO: 2417784 - RNA, 19 nt, Homo sapiens
  misc_RNA (1)...(19): siRNA sense strand
cuguguuguugcuggguca

SEQ ID NO: 2417785 - RNA, 19 nt, Homo sapiens
  misc_RNA (1)...(19): siRNA sense strand
ccuacagaacacagugaca

SEQ ID NO: 2417786 - RNA, 19 nt, Homo sapiens
  misc_RNA (1)...(19): siRNA sense strand
guggaugagcugaaggcca

SEQ ID NO: 2417787 - RNA, 19 nt, Homo sapiens
  misc_RNA (1)...(19): siRNA sense strand
guggaauuuaugugcaaga

SEQ ID NO: 2417788 - RNA, 19 nt, Homo sapiens
  misc_RNA (1)...(19): siRNA sense strand
gggacuccgacauggacua

SEQ ID NO: 2417789 - RNA, 19 nt, Homo sapiens
  misc_RNA (1)...(19): siRNA sense strand
agaggucagcaguggaauu

SEQ ID NO: 2417790 - RNA, 19 nt, Homo sapiens
  misc_RNA (1)...(19): siRNA sense strand
gagaagagccagagggaag

SEQ ID NO: 2417791 - RNA, 19 nt, Homo sapiens
  misc_RNA (1)...(19): siRNA sense strand
gggagaaggagaagagcca

SEQ ID NO: 2417792 - RNA, 19 nt, Homo sapiens
  misc_RNA (1)...(19): siRNA sense strand
uggaaaagaacuugaagaa

SEQ ID NO: 2417793 - RNA, 19 nt, Homo sapiens
  misc_RNA (1)...(19): siRNA sense strand
uggaaagacugcaggccau

SEQ ID NO: 2417794 - RNA, 19 nt, Homo sapiens
  misc_RNA (1)...(19): siRNA sense strand
gagaaggagaagagccaga

SEQ ID NO: 2417795 - RNA, 19 nt, Homo sapiens
  misc_RNA (1)...(19): siRNA sense strand
uggaaauggcagaacgaga

SEQ ID NO: 2417796 - RNA, 19 nt, Homo sapiens
  misc_RNA (1)...(19): siRNA sense strand
ugauugaacaacuggacaa

SEQ ID NO: 2417797 - RNA, 19 nt, Homo sapiens
  misc_RNA (1)...(19): siRNA sense strand
gagagacacuggaggagga

SEQ ID NO: 2417798 - RNA, 19 nt, Homo sapiens
  misc_RNA (1)...(19): siRNA sense strand
agacagugccccagaacaa

SEQ ID NO: 2417799 - RNA, 19 nt, Homo sapiens
  misc_RNA (1)...(19): siRNA sense strand
ggagagcagccuacggcaa

SEQ ID NO: 2417800 - RNA, 19 nt, Homo sapiens
  misc_RNA (1)...(19): siRNA sense strand
aagcagcaggagacaguaa

SEQ ID NO: 2417801 - RNA, 19 nt, Homo sapiens
  misc_RNA (1)...(19): siRNA sense strand
ggaagcagcugcaggaccu

SEQ ID NO: 2417802 - RNA, 19 nt, Homo sapiens
  misc_RNA (1)...(19): siRNA sense strand
augaaggguuagacggcuu

SEQ ID NO: 2417803 - RNA, 19 nt, Homo sapiens
  misc_RNA (1)...(19): siRNA sense strand
agacugcagcaacgggaaa

SEQ ID NO: 2417804 - RNA, 19 nt, Homo sapiens
  misc_RNA (1)...(19): siRNA sense strand
aggagaagagccagaggga

SEQ ID NO: 2417805 - RNA, 19 nt, Homo sapiens
  misc_RNA (1)...(19): siRNA sense strand
gguaugaaagccagcggau

SEQ ID NO: 2417806 - RNA, 19 nt, Homo sapiens
  misc_RNA (1)...(19): siRNA sense strand
agaacgagaggaacggcaa

SEQ ID NO: 2417807 - RNA, 19 nt, Homo sapiens
  misc_RNA (1)...(19): siRNA sense strand
cugaaucgugagcaggaaa

SEQ ID NO: 2417808 - RNA, 19 nt, Homo sapiens
  misc_RNA (1)...(19): siRNA sense strand
ggagaagagccagagggaa

SEQ ID NO: 2417809 - RNA, 19 nt, Homo sapiens
  misc_RNA (1)...(19): siRNA sense strand
gguggaaauggcagaacga

SEQ ID NO: 2417810 - RNA, 19 nt, Homo sapiens
  misc_RNA (1)...(19): siRNA sense strand
agcagguggcugaggacua

SEQ ID NO: 2417811 - RNA, 19 nt, Homo sapiens
  misc_RNA (1)...(19): siRNA sense strand
gagagguggagaugggcuu

SEQ ID NO: 2417812 - RNA, 19 nt, Homo sapiens
  misc_RNA (1)...(19): siRNA sense strand
cuggaaggagagcuggaua

SEQ ID NO: 2417813 - RNA, 19 nt, Homo sapiens
  misc_RNA (1)...(19): siRNA sense strand
ggaaccggcaugaggcuga

SEQ ID NO: 2417814 - RNA, 19 nt, Homo sapiens
  misc_RNA (1)...(19): siRNA sense strand
aaagagagacacuggagga

SEQ ID NO: 2417815 - RNA, 19 nt, Homo sapiens
  misc_RNA (1)...(19): siRNA sense strand
aagcauugugagcgccaua

SEQ ID NO: 2417816 - RNA, 19 nt, Homo sapiens
  misc_RNA (1)...(19): siRNA sense strand
gcucaguucaagguggaaa

SEQ ID NO: 2417817 - RNA, 19 nt, Homo sapiens
  misc_RNA (1)...(19): siRNA sense strand
guggaaagacugcaggcca

SEQ ID NO: 2417818 - RNA, 19 nt, Homo sapiens
  misc_RNA (1)...(19): siRNA sense strand
cugccgaccgcaagaaaga

SEQ ID NO: 2417819 - RNA, 19 nt, Homo sapiens
  misc_RNA (1)...(19): siRNA sense strand
ccuacuaccuggagcccaa

SEQ ID NO: 2417820 - RNA, 19 nt, Homo sapiens
  misc_RNA (1)...(19): siRNA sense strand
uugugaacccuuugggaaa

SEQ ID NO: 2417821 - RNA, 19 nt, Homo sapiens
  misc_RNA (1)...(19): siRNA sense strand
gaaacaaagcccagggaag

SEQ ID NO: 2417822 - RNA, 19 nt, Homo sapiens
  misc_RNA (1)...(19): siRNA sense strand
aaagagaagacguggacga

SEQ ID NO: 2417823 - RNA, 19 nt, Homo sapiens
  misc_RNA (1)...(19): siRNA sense strand
gaacagaugagcagggaug

SEQ ID NO: 2417824 - RNA, 19 nt, Homo sapiens
  misc_RNA (1)...(19): siRNA sense strand
cggacagauugcugacaga

SEQ ID NO: 2417825 - RNA, 19 nt, Homo sapiens
  misc_RNA (1)...(19): siRNA sense strand
ggaaacaaagcccagggaa

SEQ ID NO: 2417826 - RNA, 19 nt, Homo sapiens
  misc_RNA (1)...(19): siRNA sense strand
gagcauuucuggagggagc

SEQ ID NO: 2417827 - RNA, 19 nt, Homo sapiens
  misc_RNA (1)...(19): siRNA sense strand
gcuggagagacaagacgaa

SEQ ID NO: 2417828 - RNA, 19 nt, Homo sapiens
  misc_RNA (1)...(19): siRNA sense strand
aggcagauacccaggaacu

SEQ ID NO: 2417829 - RNA, 19 nt, Homo sapiens
  misc_RNA (1)...(19): siRNA sense strand
uggagguggcggacagauu

SEQ ID NO: 2417830 - RNA, 19 nt, Homo sapiens
  misc_RNA (1)...(19): siRNA sense strand
gaacuaacccagauccuga

SEQ ID NO: 2417831 - RNA, 19 nt, Homo sapiens
  misc_RNA (1)...(19): siRNA sense strand
ucaugagaggccuggacaa

SEQ ID NO: 2417832 - RNA, 19 nt, Homo sapiens
  misc_RNA (1)...(19): siRNA sense strand
guugugaacccuuugggaa

SEQ ID NO: 2417833 - RNA, 19 nt, Homo sapiens
  misc_RNA (1)...(19): siRNA sense strand
aggcggaugaagaggcuga

SEQ ID NO: 2417834 - RNA, 19 nt, Homo sapiens
  misc_RNA (1)...(19): siRNA sense strand
gcgguuuauuggaaagcca

SEQ ID NO: 2417835 - RNA, 19 nt, Homo sapiens
  misc_RNA (1)...(19): siRNA sense strand
ugaccaucgacaagcacaa

SEQ ID NO: 2417836 - RNA, 19 nt, Homo sapiens
  misc_RNA (1)...(19): siRNA sense strand
cuggaaaacccaagggaaa

SEQ ID NO: 2417837 - RNA, 19 nt, Homo sapiens
  misc_RNA (1)...(19): siRNA sense strand
gugaaacaauacugggcua

SEQ ID NO: 2417838 - RNA, 19 nt, Homo sapiens
  misc_RNA (1)...(19): siRNA sense strand
ccaagaagaacuuaagcga

SEQ ID NO: 2417839 - RNA, 19 nt, Homo sapiens
  misc_RNA (1)...(19): siRNA sense strand
aggccagcuugaagggaga

SEQ ID NO: 2417840 - RNA, 19 nt, Homo sapiens
  misc_RNA (1)...(19): siRNA sense strand
aguugugucaagaaggaaa

SEQ ID NO: 2417841 - RNA, 19 nt, Homo sapiens
  misc_RNA (1)...(19): siRNA sense strand
gugucaagaaggaaagcuu

SEQ ID NO: 2417842 - RNA, 19 nt, Homo sapiens
  misc_RNA (1)...(19): siRNA sense strand
gucaagaaggaaagcuuau

SEQ ID NO: 2417843 - RNA, 19 nt, Homo sapiens
  misc_RNA (1)...(19): siRNA sense strand
gaaggaaagcuuaucgguu

SEQ ID NO: 2417844 - RNA, 19 nt, Homo sapiens
  misc_RNA (1)...(19): siRNA sense strand
uugucuaugcuguggagaa

SEQ ID NO: 2417845 - RNA, 19 nt, Homo sapiens
  misc_RNA (1)...(19): siRNA sense strand
aagaagaacuuaagcgagg

SEQ ID NO: 2417846 - RNA, 19 nt, Homo sapiens
  misc_RNA (1)...(19): siRNA sense strand
cggugaacauguacgaucu

SEQ ID NO: 2417847 - RNA, 19 nt, Homo sapiens
  misc_RNA (1)...(19): siRNA sense strand
aagcagaagaucagcaaag

SEQ ID NO: 2417848 - RNA, 19 nt, Homo sapiens
  misc_RNA (1)...(19): siRNA sense strand
aguuugaccuugaagcuca

SEQ ID NO: 2417849 - RNA, 19 nt, Homo sapiens
  misc_RNA (1)...(19): siRNA sense strand
gagcagagaagaaggagga

SEQ ID NO: 2417850 - RNA, 19 nt, Homo sapiens
  misc_RNA (1)...(19): siRNA sense strand
acggcagcauggaggguaa

SEQ ID NO: 2417851 - RNA, 19 nt, Homo sapiens
  misc_RNA (1)...(19): siRNA sense strand
gaaugaggaugaagaggga

SEQ ID NO: 2417852 - RNA, 19 nt, Homo sapiens
  misc_RNA (1)...(19): siRNA sense strand
aagagggagcagagaagaa

SEQ ID NO: 2417853 - RNA, 19 nt, Homo sapiens
  misc_RNA (1)...(19): siRNA sense strand
aaggugaggucaaggccaa

SEQ ID NO: 2417854 - RNA, 19 nt, Homo sapiens
  misc_RNA (1)...(19): siRNA sense strand
gcaccuggauuguggccau

SEQ ID NO: 2417855 - RNA, 19 nt, Homo sapiens
  misc_RNA (1)...(19): siRNA sense strand
caucaauuucagugaggau

SEQ ID NO: 2417856 - RNA, 19 nt, Homo sapiens
  misc_RNA (1)...(19): siRNA sense strand
gagaguaacagcagccaca

SEQ ID NO: 2417857 - RNA, 19 nt, Homo sapiens
  misc_RNA (1)...(19): siRNA sense strand
aggaugacgucgaggcagu

SEQ ID NO: 2417858 - RNA, 19 nt, Homo sapiens
  misc_RNA (1)...(19): siRNA sense strand
caacauagugcuggcgcua

SEQ ID NO: 2417859 - RNA, 19 nt, Homo sapiens
  misc_RNA (1)...(19): siRNA sense strand
agaagaaggaggaguucca

SEQ ID NO: 2417860 - RNA, 19 nt, Homo sapiens
  misc_RNA (1)...(19): siRNA sense strand
cggaacagagggugggacu

SEQ ID NO: 2417861 - RNA, 19 nt, Homo sapiens
  misc_RNA (1)...(19): siRNA sense strand
uggagaaugaggaugaaga

SEQ ID NO: 2417862 - RNA, 19 nt, Homo sapiens
  misc_RNA (1)...(19): siRNA sense strand
agaacagcaugaaggcaga

SEQ ID NO: 2417863 - RNA, 19 nt, Homo sapiens
  misc_RNA (1)...(19): siRNA sense strand
acgucgaggcagugaacau

SEQ ID NO: 2417864 - RNA, 19 nt, Homo sapiens
  misc_RNA (1)...(19): siRNA sense strand
augaagagggagcagagaa

SEQ ID NO: 2417865 - RNA, 19 nt, Homo sapiens
  misc_RNA (1)...(19): siRNA sense strand
agaccauuaagaaggaaau

SEQ ID NO: 2417866 - RNA, 19 nt, Homo sapiens
  misc_RNA (1)...(19): siRNA sense strand
ccauuaagaaggaaaucca

SEQ ID NO: 2417867 - RNA, 19 nt, Homo sapiens
  misc_RNA (1)...(19): siRNA sense strand
gaaagaagauagccaccca

SEQ ID NO: 2417868 - RNA, 19 nt, Homo sapiens
  misc_RNA (1)...(19): siRNA sense strand
agcaugaaggugaggucaa

SEQ ID NO: 2417869 - RNA, 19 nt, Homo sapiens
  misc_RNA (1)...(19): siRNA sense strand
gcuacaugcacaagaccau

SEQ ID NO: 2417870 - RNA, 19 nt, Homo sapiens
  misc_RNA (1)...(19): siRNA sense strand
aguuccaggaugagaguga

SEQ ID NO: 2417871 - RNA, 19 nt, Homo sapiens
  misc_RNA (1)...(19): siRNA sense strand
gcagcauugacuuggguga

SEQ ID NO: 2417872 - RNA, 19 nt, Homo sapiens
  misc_RNA (1)...(19): siRNA sense strand
gcacagaggucaaccagug

SEQ ID NO: 2417873 - RNA, 19 nt, Homo sapiens
  misc_RNA (1)...(19): siRNA sense strand
aagaccauuaagaaggaaa

SEQ ID NO: 2417874 - RNA, 19 nt, Homo sapiens
  misc_RNA (1)...(19): siRNA sense strand
agggcagaauggaagccaa

SEQ ID NO: 2417875 - RNA, 19 nt, Homo sapiens
  misc_RNA (1)...(19): siRNA sense strand
gguaaggaaggcagcacca

SEQ ID NO: 2417876 - RNA, 19 nt, Homo sapiens
  misc_RNA (1)...(19): siRNA sense strand
uggccaagagagagaggaa

SEQ ID NO: 2417877 - RNA, 19 nt, Homo sapiens
  misc_RNA (1)...(19): siRNA sense strand
agagaggaaagcagcuaaa

SEQ ID NO: 2417878 - RNA, 19 nt, Homo sapiens
  misc_RNA (1)...(19): siRNA sense strand
ccucagagaguuauaaaau

SEQ ID NO: 2417879 - RNA, 19 nt, Homo sapiens
  misc_RNA (1)...(19): siRNA sense strand
ggccaagagagagaggaaa

SEQ ID NO: 2417880 - RNA, 19 nt, Homo sapiens
  misc_RNA (1)...(19): siRNA sense strand
agaguggccaagagagaga

SEQ ID NO: 2417881 - RNA, 19 nt, Homo sapiens
  misc_RNA (1)...(19): siRNA sense strand
gaaauuugcuguuggagug

SEQ ID NO: 2417882 - RNA, 19 nt, Homo sapiens
  misc_RNA (1)...(19): siRNA sense strand
uggaaggcuuucagagcau

SEQ ID NO: 2417883 - RNA, 19 nt, Homo sapiens
  misc_RNA (1)...(19): siRNA sense strand
aggaaggaacugacggagu

SEQ ID NO: 2417884 - RNA, 19 nt, Homo sapiens
  misc_RNA (1)...(19): siRNA sense strand
uggaagaagugggugcaga

SEQ ID NO: 2417885 - RNA, 19 nt, Homo sapiens
  misc_RNA (1)...(19): siRNA sense strand
cuacagaaguacaagguga

SEQ ID NO: 2417886 - RNA, 19 nt, Homo sapiens
  misc_RNA (1)...(19): siRNA sense strand
cgguagugcugaauggaca

SEQ ID NO: 2417887 - RNA, 19 nt, Homo sapiens
  misc_RNA (1)...(19): siRNA sense strand
gggaaacuucacaaagaca

SEQ ID NO: 2417888 - RNA, 19 nt, Homo sapiens
  misc_RNA (1)...(19): siRNA sense strand
ggugaagaaugcauaccga

SEQ ID NO: 2417889 - RNA, 19 nt, Homo sapiens
  misc_RNA (1)...(19): siRNA sense strand
ggacaaaggcauuccgagu

SEQ ID NO: 2417890 - RNA, 19 nt, Homo sapiens
  misc_RNA (1)...(19): siRNA sense strand
ggacaagacccucaagcca

SEQ ID NO: 2417891 - RNA, 19 nt, Homo sapiens
  misc_RNA (1)...(19): siRNA sense strand
gaggagguauggaugggua

SEQ ID NO: 2417892 - RNA, 19 nt, Homo sapiens
  misc_RNA (1)...(19): siRNA sense strand
agaaggugacccugaccaa

SEQ ID NO: 2417893 - RNA, 19 nt, Homo sapiens
  misc_RNA (1)...(19): siRNA sense strand
ccaccaaguacguguucga

SEQ ID NO: 2417894 - RNA, 19 nt, Homo sapiens
  misc_RNA (1)...(19): siRNA sense strand
cugaugugcgggugaccaa

SEQ ID NO: 2417895 - RNA, 19 nt, Homo sapiens
  misc_RNA (1)...(19): siRNA sense strand
gccagaaggaagaggcaaa

SEQ ID NO: 2417896 - RNA, 19 nt, Homo sapiens
  misc_RNA (1)...(19): siRNA sense strand
aggaagaggcaaaugacaa

SEQ ID NO: 2417897 - RNA, 19 nt, Homo sapiens
  misc_RNA (1)...(19): siRNA sense strand
uggcaaugaaucagaugaa

SEQ ID NO: 2417898 - RNA, 19 nt, Homo sapiens
  misc_RNA (1)...(19): siRNA sense strand
gagagaaauuagagaaaac

SEQ ID NO: 2417899 - RNA, 19 nt, Homo sapiens
  misc_RNA (1)...(19): siRNA sense strand
aagaugaagcuuauggcua

SEQ ID NO: 2417900 - RNA, 19 nt, Homo sapiens
  misc_RNA (1)...(19): siRNA sense strand
ugggaguguugcaggaaaa

SEQ ID NO: 2417901 - RNA, 19 nt, Homo sapiens
  misc_RNA (1)...(19): siRNA sense strand
cagggaaauggaagccaaa

SEQ ID NO: 2417902 - RNA, 19 nt, Homo sapiens
  misc_RNA (1)...(19): siRNA sense strand
gggaaauggaagccaaaau

SEQ ID NO: 2417903 - RNA, 19 nt, Homo sapiens
  misc_RNA (1)...(19): siRNA sense strand
ucagggaaauggaagccaa

SEQ ID NO: 2417904 - RNA, 19 nt, Homo sapiens
  misc_RNA (1)...(19): siRNA sense strand
ugcaggaagccuuggaauu

SEQ ID NO: 2417905 - RNA, 19 nt, Homo sapiens
  misc_RNA (1)...(19): siRNA sense strand
uggaaagaauggaagaggu

SEQ ID NO: 2417906 - RNA, 19 nt, Homo sapiens
  misc_RNA (1)...(19): siRNA sense strand
gauaaagauaagaugcagu

SEQ ID NO: 2417907 - RNA, 19 nt, Homo sapiens
  misc_RNA (1)...(19): siRNA sense strand
uagagaaaaccuugaaaga

SEQ ID NO: 2417908 - RNA, 19 nt, Homo sapiens
  misc_RNA (1)...(19): siRNA sense strand
ccucuuaucgccaggacuu

SEQ ID NO: 2417909 - RNA, 19 nt, Homo sapiens
  misc_RNA (1)...(19): siRNA sense strand
ccgaaucuucagagagaaa

SEQ ID NO: 2417910 - RNA, 19 nt, Homo sapiens
  misc_RNA (1)...(19): siRNA sense strand
gugaaaaguaacagcgauu

SEQ ID NO: 2417911 - RNA, 19 nt, Homo sapiens
  misc_RNA (1)...(19): siRNA sense strand
aggaagggguggauggcaa

SEQ ID NO: 2417912 - RNA, 19 nt, Homo sapiens
  misc_RNA (1)...(19): siRNA sense strand
ugaaauuagaguuggaaac

SEQ ID NO: 2417913 - RNA, 19 nt, Homo sapiens
  misc_RNA (1)...(19): siRNA sense strand
agcuugagauggagaggau

SEQ ID NO: 2417914 - RNA, 19 nt, Homo sapiens
  misc_RNA (1)...(19): siRNA sense strand
ucagagagaaacacgggua

SEQ ID NO: 2417915 - RNA, 19 nt, Homo sapiens
  misc_RNA (1)...(19): siRNA sense strand
cagagagaaacacggguau

SEQ ID NO: 2417916 - RNA, 19 nt, Homo sapiens
  misc_RNA (1)...(19): siRNA sense strand
gaaucuucagagagaaaca

SEQ ID NO: 2417917 - RNA, 19 nt, Homo sapiens
  misc_RNA (1)...(19): siRNA sense strand
ccaaggaagcagagaucca

SEQ ID NO: 2417918 - RNA, 19 nt, Homo sapiens
  misc_RNA (1)...(19): siRNA sense strand
aggccuagacggagcaaaa

SEQ ID NO: 2417919 - RNA, 19 nt, Homo sapiens
  misc_RNA (1)...(19): siRNA sense strand
aucuagaaagcguggguaa

SEQ ID NO: 2417920 - RNA, 19 nt, Homo sapiens
  misc_RNA (1)...(19): siRNA sense strand
acucggaaaacuaggaaaa

SEQ ID NO: 2417921 - RNA, 19 nt, Homo sapiens
  misc_RNA (1)...(19): siRNA sense strand
ucuagaaagcguggguaaa

SEQ ID NO: 2417922 - RNA, 19 nt, Homo sapiens
  misc_RNA (1)...(19): siRNA sense strand
ggguaaaggagccguccau

SEQ ID NO: 2417923 - RNA, 19 nt, Homo sapiens
  misc_RNA (1)...(19): siRNA sense strand
cggaaaacuaggaaaagau

SEQ ID NO: 2417924 - RNA, 19 nt, Homo sapiens
  misc_RNA (1)...(19): siRNA sense strand
ucgaagaucuagaaagcgu

SEQ ID NO: 2417925 - RNA, 19 nt, Homo sapiens
  misc_RNA (1)...(19): siRNA sense strand
gcaccaaagccaaggaagc

SEQ ID NO: 2417926 - RNA, 19 nt, Homo sapiens
  misc_RNA (1)...(19): siRNA sense strand
cguccuugacucaguacua

SEQ ID NO: 2417927 - RNA, 19 nt, Homo sapiens
  misc_RNA (1)...(19): siRNA sense strand
cagcagcucaaaaggaaaa

SEQ ID NO: 2417928 - RNA, 19 nt, Homo sapiens
  misc_RNA (1)...(19): siRNA sense strand
ggaaaaugcaggugaagac

SEQ ID NO: 2417929 - RNA, 19 nt, Homo sapiens
  misc_RNA (1)...(19): siRNA sense strand
ugggaaacccggagaccaa

SEQ ID NO: 2417930 - RNA, 19 nt, Homo sapiens
  misc_RNA (1)...(19): siRNA sense strand
agagaagaugugugagaau

SEQ ID NO: 2417931 - RNA, 19 nt, Homo sapiens
  misc_RNA (1)...(19): siRNA sense strand
acacagaggaggaggugga

SEQ ID NO: 2417932 - RNA, 19 nt, Homo sapiens
  misc_RNA (1)...(19): siRNA sense strand
acauagaccaaauggaaaa

SEQ ID NO: 2417933 - RNA, 19 nt, Homo sapiens
  misc_RNA (1)...(19): siRNA sense strand
cggcaagcugcaagaguga

SEQ ID NO: 2417934 - RNA, 19 nt, Homo sapiens
  misc_RNA (1)...(19): siRNA sense strand
ggaaaagaaacuuggacuu

SEQ ID NO: 2417935 - RNA, 19 nt, Homo sapiens
  misc_RNA (1)...(19): siRNA sense strand
auacagaaccaguggaaac

SEQ ID NO: 2417936 - RNA, 19 nt, Homo sapiens
  misc_RNA (1)...(19): siRNA sense strand
cagaggaggagguggaagu

SEQ ID NO: 2417937 - RNA, 19 nt, Homo sapiens
  misc_RNA (1)...(19): siRNA sense strand
guccaauacucaucggcaa

SEQ ID NO: 2417938 - RNA, 19 nt, Homo sapiens
  misc_RNA (1)...(19): siRNA sense strand
gcaagcugcaagagugaau

SEQ ID NO: 2417939 - RNA, 19 nt, Homo sapiens
  misc_RNA (1)...(19): siRNA sense strand
gggauuuaugggugaacau

SEQ ID NO: 2417940 - RNA, 19 nt, Homo sapiens
  misc_RNA (1)...(19): siRNA sense strand
ugauaauggcacagcacuu

SEQ ID NO: 2417941 - RNA, 19 nt, Homo sapiens
  misc_RNA (1)...(19): siRNA sense strand
ucccaauguucgaagaaga

SEQ ID NO: 2417942 - RNA, 19 nt, Homo sapiens
  misc_RNA (1)...(19): siRNA sense strand
acacucagaucgaggagga

SEQ ID NO: 2417943 - RNA, 19 nt, Homo sapiens
  misc_RNA (1)...(19): siRNA sense strand
uuucauauacacuggagaa

SEQ ID NO: 2417944 - RNA, 19 nt, Homo sapiens
  misc_RNA (1)...(19): siRNA sense strand
ccugaagagucaaaagaga

SEQ ID NO: 2417945 - RNA, 19 nt, Homo sapiens
  misc_RNA (1)...(19): siRNA sense strand
uggaugaugggcaggacaa

SEQ ID NO: 2417946 - RNA, 19 nt, Homo sapiens
  misc_RNA (1)...(19): siRNA sense strand
gugugagaauacagaacca

SEQ ID NO: 2417947 - RNA, 19 nt, Homo sapiens
  misc_RNA (1)...(19): siRNA sense strand
cccaauguucgaagaagaa

SEQ ID NO: 2417948 - RNA, 19 nt, Homo sapiens
  misc_RNA (1)...(19): siRNA sense strand
ugucuuggucacacagaua

SEQ ID NO: 2417949 - RNA, 19 nt, Homo sapiens
  misc_RNA (1)...(19): siRNA sense strand
cugcaguugguguaguaaa

SEQ ID NO: 2417950 - RNA, 19 nt, Homo sapiens
  misc_RNA (1)...(19): siRNA sense strand
cugaagagucaaaagagaa

SEQ ID NO: 2417951 - RNA, 19 nt, Homo sapiens
  misc_RNA (1)...(19): siRNA sense strand
aaguugaaccaguuggaga

SEQ ID NO: 2417952 - RNA, 19 nt, Homo sapiens
  misc_RNA (1)...(19): siRNA sense strand
gauaauuauaaccugggaa

SEQ ID NO: 2417953 - RNA, 19 nt, Homo sapiens
  misc_RNA (1)...(19): siRNA sense strand
aacauagaccaaauggaaa

SEQ ID NO: 2417954 - RNA, 19 nt, Homo sapiens
  misc_RNA (1)...(19): siRNA sense strand
guguaguaaacuucaaaga

SEQ ID NO: 2417955 - RNA, 19 nt, Homo sapiens
  misc_RNA (1)...(19): siRNA sense strand
acaauaacacucagaucga

SEQ ID NO: 2417956 - RNA, 19 nt, Homo sapiens
  misc_RNA (1)...(19): siRNA sense strand
guagacacgaaccgagcaa

SEQ ID NO: 2417957 - RNA, 19 nt, Homo sapiens
  misc_RNA (1)...(19): siRNA sense strand
agaucgaggaggauacaga

SEQ ID NO: 2417958 - RNA, 19 nt, Homo sapiens
  misc_RNA (1)...(19): siRNA sense strand
acagugcagcugagaagaa

SEQ ID NO: 2417959 - RNA, 19 nt, Homo sapiens
  misc_RNA (1)...(19): siRNA sense strand
ugguagaggugauggugga

SEQ ID NO: 2417960 - RNA, 19 nt, Homo sapiens
  misc_RNA (1)...(19): siRNA sense strand
ccagcaagaagguggagau

SEQ ID NO: 2417961 - RNA, 19 nt, Homo sapiens
  misc_RNA (1)...(19): siRNA sense strand
agaucaaagagcugguaga

SEQ ID NO: 2417962 - RNA, 19 nt, Homo sapiens
  misc_RNA (1)...(19): siRNA sense strand
ucaaagagcugguagaggu

SEQ ID NO: 2417963 - RNA, 19 nt, Homo sapiens
  misc_RNA (1)...(19): siRNA sense strand
aagcuggaccugaggaaca

SEQ ID NO: 2417964 - RNA, 19 nt, Homo sapiens
  misc_RNA (1)...(19): siRNA sense strand
ucucagugaaugcgaggaa

SEQ ID NO: 2417965 - RNA, 19 nt, Homo sapiens
  misc_RNA (1)...(19): siRNA sense strand
guggcuguggcgugggaaa

SEQ ID NO: 2417966 - RNA, 19 nt, Homo sapiens
  misc_RNA (1)...(19): siRNA sense strand
uagaggugaugguggacau

SEQ ID NO: 2417967 - RNA, 19 nt, Homo sapiens
  misc_RNA (1)...(19): siRNA sense strand
gcaauguggccgugcucau

SEQ ID NO: 2417968 - RNA, 19 nt, Homo sapiens
  misc_RNA (1)...(19): siRNA sense strand
uguccauggcccaaggcaa

SEQ ID NO: 2417969 - RNA, 19 nt, Homo sapiens
  misc_RNA (1)...(19): siRNA sense strand
agauaguccaggugauaaa

SEQ ID NO: 2417970 - RNA, 19 nt, Homo sapiens
  misc_RNA (1)...(19): siRNA sense strand
ggaaaugacugaugcucga

SEQ ID NO: 2417971 - RNA, 19 nt, Homo sapiens
  misc_RNA (1)...(19): siRNA sense strand
ccucagugcagauggagaa

SEQ ID NO: 2417972 - RNA, 19 nt, Homo sapiens
  misc_RNA (1)...(19): siRNA sense strand
gggaaaggcugguguggac

SEQ ID NO: 2417973 - RNA, 19 nt, Homo sapiens
  misc_RNA (1)...(19): siRNA sense strand
gcgaaggugaggaagaaaa

SEQ ID NO: 2417974 - RNA, 19 nt, Homo sapiens
  misc_RNA (1)...(19): siRNA sense strand
ucgccauguugaaggacaa

SEQ ID NO: 2417975 - RNA, 19 nt, Homo sapiens
  misc_RNA (1)...(19): siRNA sense strand
gcucauucauuguucgaga

SEQ ID NO: 2417976 - RNA, 19 nt, Homo sapiens
  misc_RNA (1)...(19): siRNA sense strand
gcucugaaggaucgggaga

SEQ ID NO: 2417977 - RNA, 19 nt, Homo sapiens
  misc_RNA (1)...(19): siRNA sense strand
acggugugauuguggacua

SEQ ID NO: 2417978 - RNA, 19 nt, Homo sapiens
  misc_RNA (1)...(19): siRNA sense strand
aggaaauagcagaaaguuc

SEQ ID NO: 2417979 - RNA, 19 nt, Homo sapiens
  misc_RNA (1)...(19): siRNA sense strand
ccagcaaagaugaccguuu

SEQ ID NO: 2417980 - RNA, 19 nt, Homo sapiens
  misc_RNA (1)...(19): siRNA sense strand
ccaaugaacucguccggca

SEQ ID NO: 2417981 - RNA, 19 nt, Homo sapiens
  misc_RNA (1)...(19): siRNA sense strand
cgaagcaaguacaguggga

SEQ ID NO: 2417982 - RNA, 19 nt, Homo sapiens
  misc_RNA (1)...(19): siRNA sense strand
ccaccuguuugcagagcau

SEQ ID NO: 2417983 - RNA, 19 nt, Homo sapiens
  misc_RNA (1)...(19): siRNA sense strand
ccaaaugugcauggggaaa

SEQ ID NO: 2417984 - RNA, 19 nt, Homo sapiens
  misc_RNA (1)...(19): siRNA sense strand
guugaaagggugcucgaau

SEQ ID NO: 2417985 - RNA, 19 nt, Homo sapiens
  misc_RNA (1)...(19): siRNA sense strand
gggaaggaggaucuggaca

SEQ ID NO: 2417986 - RNA, 19 nt, Homo sapiens
  misc_RNA (1)...(19): siRNA sense strand
ugaacaagaaagcuggaga

SEQ ID NO: 2417987 - RNA, 19 nt, Homo sapiens
  misc_RNA (1)...(19): siRNA sense strand
ccacaagagcagccagaac

SEQ ID NO: 2417988 - RNA, 19 nt, Homo sapiens
  misc_RNA (1)...(19): siRNA sense strand
gcugcuuaucccagagaga

SEQ ID NO: 2417989 - RNA, 19 nt, Homo sapiens
  misc_RNA (1)...(19): siRNA sense strand
gagaagugcuacacacgca

SEQ ID NO: 2417990 - RNA, 19 nt, Homo sapiens
  misc_RNA (1)...(19): siRNA sense strand
ucugaaggaucgggagaca

SEQ ID NO: 2417991 - RNA, 19 nt, Homo sapiens
  misc_RNA (1)...(19): siRNA sense strand
gccagauaguccaggugau

SEQ ID NO: 2417992 - RNA, 19 nt, Homo sapiens
  misc_RNA (1)...(19): siRNA sense strand
ccgaagggagugcgguuga

SEQ ID NO: 2417993 - RNA, 19 nt, Homo sapiens
  misc_RNA (1)...(19): siRNA sense strand
ccauauuucgggagccuga

SEQ ID NO: 2417994 - RNA, 19 nt, Homo sapiens
  misc_RNA (1)...(19): siRNA sense strand
acuugaacucuguggagau

SEQ ID NO: 2417995 - RNA, 19 nt, Homo sapiens
  misc_RNA (1)...(19): siRNA sense strand
gugaagauccgcagggcac

SEQ ID NO: 2417996 - RNA, 19 nt, Homo sapiens
  misc_RNA (1)...(19): siRNA sense strand
cuuccaaguucugguacaa

SEQ ID NO: 2417997 - RNA, 19 nt, Homo sapiens
  misc_RNA (1)...(19): siRNA sense strand
ucugcaggaaggaaggaaa

SEQ ID NO: 2417998 - RNA, 19 nt, Homo sapiens
  misc_RNA (1)...(19): siRNA sense strand
caagugaggugggaggaga

SEQ ID NO: 2417999 - RNA, 19 nt, Homo sapiens
  misc_RNA (1)...(19): siRNA sense strand
agaaaguacaacagugaau

SEQ ID NO: 2418000 - RNA, 19 nt, Homo sapiens
  misc_RNA (1)...(19): siRNA sense strand
uggucgggcugguaggaaa

SEQ ID NO: 2418001 - RNA, 19 nt, Homo sapiens
  misc_RNA (1)...(19): siRNA sense strand
agugaauggaaaugaccaa

SEQ ID NO: 2418002 - RNA, 19 nt, Homo sapiens
  misc_RNA (1)...(19): siRNA sense strand
ugagcaucuuggaagggaa

SEQ ID NO: 2418003 - RNA, 19 nt, Homo sapiens
  misc_RNA (1)...(19): siRNA sense strand
uggaaaugaccaagcccuu

SEQ ID NO: 2418004 - RNA, 19 nt, Homo sapiens
  misc_RNA (1)...(19): siRNA sense strand
uuauaaauugccuggugua

SEQ ID NO: 2418005 - RNA, 19 nt, Homo sapiens
  misc_RNA (1)...(19): siRNA sense strand
ggaugaagguggagggcag

SEQ ID NO: 2418006 - RNA, 19 nt, Homo sapiens
  misc_RNA (1)...(19): siRNA sense strand
gauucuguuuggugugaaa

SEQ ID NO: 2418007 - RNA, 19 nt, Homo sapiens
  misc_RNA (1)...(19): siRNA sense strand
gguacagaacugacaccaa

SEQ ID NO: 2418008 - RNA, 19 nt, Homo sapiens
  misc_RNA (1)...(19): siRNA sense strand
caaaauaggcagaaccuga

SEQ ID NO: 2418009 - RNA, 19 nt, Homo sapiens
  misc_RNA (1)...(19): siRNA sense strand
gcucuuaacagcagugcca

SEQ ID NO: 2418010 - RNA, 19 nt, Homo sapiens
  misc_RNA (1)...(19): siRNA sense strand
cauuauacguucgccguua

SEQ ID NO: 2418011 - RNA, 19 nt, Homo sapiens
  misc_RNA (1)...(19): siRNA sense strand
guuuaguggugcugauucu

SEQ ID NO: 2418012 - RNA, 19 nt, Homo sapiens
  misc_RNA (1)...(19): siRNA sense strand
ggauaaaggugaagggcag

SEQ ID NO: 2418013 - RNA, 19 nt, Homo sapiens
  misc_RNA (1)...(19): siRNA sense strand
aggacaagccugaggugga

SEQ ID NO: 2418014 - RNA, 19 nt, Homo sapiens
  misc_RNA (1)...(19): siRNA sense strand
caaaauaggcagaaccuga

SEQ ID NO: 2418015 - RNA, 19 nt, Homo sapiens
  misc_RNA (1)...(19): siRNA sense strand
gguacaaaacugacaccaa

SEQ ID NO: 2418016 - RNA, 19 nt, Homo sapiens
  misc_RNA (1)...(19): siRNA sense strand
uggauaaaggugaagggca

SEQ ID NO: 2418017 - RNA, 19 nt, Homo sapiens
  misc_RNA (1)...(19): siRNA sense strand
cugaguaugcugagcgcca

SEQ ID NO: 2418018 - RNA, 19 nt, Homo sapiens
  misc_RNA (1)...(19): siRNA sense strand
guuuaguggugcugauucu

SEQ ID NO: 2418019 - RNA, 19 nt, Homo sapiens
  misc_RNA (1)...(19): siRNA sense strand
ucucuaaacaguagugcca

SEQ ID NO: 2418020 - RNA, 19 nt, Homo sapiens
  misc_RNA (1)...(19): siRNA sense strand
acaucuacaaagagggaaa

SEQ ID NO: 2418021 - RNA, 19 nt, Homo sapiens
  misc_RNA (1)...(19): siRNA sense strand
ugaagaugggcgaggcaaa

SEQ ID NO: 2418022 - RNA, 19 nt, Homo sapiens
  misc_RNA (1)...(19): siRNA sense strand
gggccaaguaggugaagau

SEQ ID NO: 2418023 - RNA, 19 nt, Homo sapiens
  misc_RNA (1)...(19): siRNA sense strand
caacaaaaguguagacgga

SEQ ID NO: 2418024 - RNA, 19 nt, Homo sapiens
  misc_RNA (1)...(19): siRNA sense strand
gcaacaagaugauggugca

SEQ ID NO: 2418025 - RNA, 19 nt, Homo sapiens
  misc_RNA (1)...(19): siRNA sense strand
cgagauaacuacugccgau

SEQ ID NO: 2418026 - RNA, 19 nt, Homo sapiens
  misc_RNA (1)...(19): siRNA sense strand
aguuugauguggagcgaga

SEQ ID NO: 2418027 - RNA, 19 nt, Homo sapiens
  misc_RNA (1)...(19): siRNA sense strand
ucaugauguucaagaccaa

SEQ ID NO: 2418028 - RNA, 19 nt, Homo sapiens
  misc_RNA (1)...(19): siRNA sense strand
ggaucaguauuguggagga

SEQ ID NO: 2418029 - RNA, 19 nt, Homo sapiens
  misc_RNA (1)...(19): siRNA sense strand
uguucaagaccaagaauca

SEQ ID NO: 2418030 - RNA, 19 nt, Homo sapiens
  misc_RNA (1)...(19): siRNA sense strand
agaugauggugcagaugau

SEQ ID NO: 2418031 - RNA, 19 nt, Homo sapiens
  misc_RNA (1)...(19): siRNA sense strand
cauucuuacuggagagucu

SEQ ID NO: 2418032 - RNA, 19 nt, Homo sapiens
  misc_RNA (1)...(19): siRNA sense strand
agcaaauguacuuggaaaa

SEQ ID NO: 2418033 - RNA, 19 nt, Homo sapiens
  misc_RNA (1)...(19): siRNA sense strand
gccaauugugucugagaga

SEQ ID NO: 2418034 - RNA, 19 nt, Homo sapiens
  misc_RNA (1)...(19): siRNA sense strand
ccuccaaauagcaaaugua

SEQ ID NO: 2418035 - RNA, 19 nt, Homo sapiens
  misc_RNA (1)...(19): siRNA sense strand
auucauagaccucgagagu

SEQ ID NO: 2418036 - RNA, 19 nt, Homo sapiens
  misc_RNA (1)...(19): siRNA sense strand
gcugcugaaccaaacgaaa

SEQ ID NO: 2418037 - RNA, 19 nt, Homo sapiens
  misc_RNA (1)...(19): siRNA sense strand
auuauguggcuguguuuaa

SEQ ID NO: 2418038 - RNA, 19 nt, Homo sapiens
  misc_RNA (1)...(19): siRNA sense strand
gggauuacccugcaggagu

SEQ ID NO: 2418039 - RNA, 19 nt, Homo sapiens
  misc_RNA (1)...(19): siRNA sense strand
agacucagcuggaggccau

SEQ ID NO: 2418040 - RNA, 19 nt, Homo sapiens
  misc_RNA (1)...(19): siRNA sense strand
ccgaauaagauuagaagcu

SEQ ID NO: 2418041 - RNA, 19 nt, Homo sapiens
  misc_RNA (1)...(19): siRNA sense strand
aggaagacuuagaaaggga

SEQ ID NO: 2418042 - RNA, 19 nt, Homo sapiens
  misc_RNA (1)...(19): siRNA sense strand
guacuacagaugugggaga

SEQ ID NO: 2418043 - RNA, 19 nt, Homo sapiens
  misc_RNA (1)...(19): siRNA sense strand
aguuaaaggaagacuuaga

SEQ ID NO: 2418044 - RNA, 19 nt, Homo sapiens
  misc_RNA (1)...(19): siRNA sense strand
acuuauuggaacugaaaca

SEQ ID NO: 2418045 - RNA, 19 nt, Homo sapiens
  misc_RNA (1)...(19): siRNA sense strand
agacuuagaaagggaacaa

SEQ ID NO: 2418046 - RNA, 19 nt, Homo sapiens
  misc_RNA (1)...(19): siRNA sense strand
augaacagcaacagauaau

SEQ ID NO: 2418047 - RNA, 19 nt, Homo sapiens
  misc_RNA (1)...(19): siRNA sense strand
cugcaugaaauguuagaga

SEQ ID NO: 2418048 - RNA, 19 nt, Homo sapiens
  misc_RNA (1)...(19): siRNA sense strand
uguggaaagauauggaaga

SEQ ID NO: 2418049 - RNA, 19 nt, Homo sapiens
  misc_RNA (1)...(19): siRNA sense strand
gccugauagaaguguuaaa

SEQ ID NO: 2418050 - RNA, 19 nt, Homo sapiens
  misc_RNA (1)...(19): siRNA sense strand
cugccugauagaaguguua

SEQ ID NO: 2418051 - RNA, 19 nt, Homo sapiens
  misc_RNA (1)...(19): siRNA sense strand
gcgaguuucuagaagacca

SEQ ID NO: 2418052 - RNA, 19 nt, Homo sapiens
  misc_RNA (1)...(19): siRNA sense strand
gggagauguuacaaauacu

SEQ ID NO: 2418053 - RNA, 19 nt, Homo sapiens
  misc_RNA (1)...(19): siRNA sense strand
gaacucagucaauggcaga

SEQ ID NO: 2418054 - RNA, 19 nt, Homo sapiens
  misc_RNA (1)...(19): siRNA sense strand
auggaauugccuugagaca

SEQ ID NO: 2418055 - RNA, 19 nt, Homo sapiens
  misc_RNA (1)...(19): siRNA sense strand
uggaaagauauggaagaau

SEQ ID NO: 2418056 - RNA, 19 nt, Homo sapiens
  misc_RNA (1)...(19): siRNA sense strand
aaggagucaaagaaugaaa

SEQ ID NO: 2418057 - RNA, 19 nt, Homo sapiens
  misc_RNA (1)...(19): siRNA sense strand
agcaagcagcugagggaaa

SEQ ID NO: 2418058 - RNA, 19 nt, Homo sapiens
  misc_RNA (1)...(19): siRNA sense strand
aggcaaguuaauaaagcaa

SEQ ID NO: 2418059 - RNA, 19 nt, Homo sapiens
  misc_RNA (1)...(19): siRNA sense strand
cagcuguaguggauagcau

SEQ ID NO: 2418060 - RNA, 19 nt, Homo sapiens
  misc_RNA (1)...(19): siRNA sense strand
uaauaaagcaagcagcuga

SEQ ID NO: 2418061 - RNA, 19 nt, Homo sapiens
  misc_RNA (1)...(19): siRNA sense strand
gcacauuagaacagggcag

SEQ ID NO: 2418062 - RNA, 19 nt, Homo sapiens
  misc_RNA (1)...(19): siRNA sense strand
gggaaaaccaagacccaga

SEQ ID NO: 2418063 - RNA, 19 nt, Homo sapiens
  misc_RNA (1)...(19): siRNA sense strand
uggauagcauaaagcccaa

SEQ ID NO: 2418064 - RNA, 19 nt, Homo sapiens
  misc_RNA (1)...(19): siRNA sense strand
cagccugauugaagggaac

SEQ ID NO: 2418065 - RNA, 19 nt, Homo sapiens
  misc_RNA (1)...(19): siRNA sense strand
guucaauuccaaagccuga

SEQ ID NO: 2418066 - RNA, 19 nt, Homo sapiens
  misc_RNA (1)...(19): siRNA sense strand
aggauauccaagagggaga

SEQ ID NO: 2418067 - RNA, 19 nt, Homo sapiens
  misc_RNA (1)...(19): siRNA sense strand
gguucuuguugcuggaaaa

SEQ ID NO: 2418068 - RNA, 19 nt, Homo sapiens
  misc_RNA (1)...(19): siRNA sense strand
augcaucggaggagaagaa

SEQ ID NO: 2418069 - RNA, 19 nt, Homo sapiens
  misc_RNA (1)...(19): siRNA sense strand
uggaaaauguagugucaca

SEQ ID NO: 2418070 - RNA, 19 nt, Homo sapiens
  misc_RNA (1)...(19): siRNA sense strand
guggaagacaccaacggaa

SEQ ID NO: 2418071 - RNA, 19 nt, Homo sapiens
  misc_RNA (1)...(19): siRNA sense strand
acaaguacuauggaagaaa

SEQ ID NO: 2418072 - RNA, 19 nt, Homo sapiens
  misc_RNA (1)...(19): siRNA sense strand
gcaggauauccaagaggga

SEQ ID NO: 2418073 - RNA, 19 nt, Homo sapiens
  misc_RNA (1)...(19): siRNA sense strand
ucugcaaagacaaguacua

SEQ ID NO: 2418074 - RNA, 19 nt, Homo sapiens
  misc_RNA (1)...(19): siRNA sense strand
agguugagaggaagagcuu

SEQ ID NO: 2418075 - RNA, 19 nt, Homo sapiens
  misc_RNA (1)...(19): siRNA sense strand
auggagaagcagugaaaga

SEQ ID NO: 2418076 - RNA, 19 nt, Homo sapiens
  misc_RNA (1)...(19): siRNA sense strand
gugaaagauacaugcaaaa

SEQ ID NO: 2418077 - RNA, 19 nt, Homo sapiens
  misc_RNA (1)...(19): siRNA sense strand
gcaaagauggagaagcagu

SEQ ID NO: 2418078 - RNA, 19 nt, Homo sapiens
  misc_RNA (1)...(19): siRNA sense strand
aaguaagcagcaagaaaga

SEQ ID NO: 2418079 - RNA, 19 nt, Homo sapiens
  misc_RNA (1)...(19): siRNA sense strand
ggagaaagagaaaggcaga

SEQ ID NO: 2418080 - RNA, 19 nt, Homo sapiens
  misc_RNA (1)...(19): siRNA sense strand
gguuuaugggagauagaua

SEQ ID NO: 2418081 - RNA, 19 nt, Homo sapiens
  misc_RNA (1)...(19): siRNA sense strand
cugaagaggacaaaaguaa

SEQ ID NO: 2418082 - RNA, 19 nt, Homo sapiens
  misc_RNA (1)...(19): siRNA sense strand
ggaauaugcugaaaggcca

SEQ ID NO: 2418083 - RNA, 19 nt, Homo sapiens
  misc_RNA (1)...(19): siRNA sense strand
aaugaagguuuaugggaga

SEQ ID NO: 2418084 - RNA, 19 nt, Homo sapiens
  misc_RNA (1)...(19): siRNA sense strand
aagaagaaggagaugauca

SEQ ID NO: 2418085 - RNA, 19 nt, Homo sapiens
  misc_RNA (1)...(19): siRNA sense strand
gagaugaucaagaagguga

SEQ ID NO: 2418086 - RNA, 19 nt, Homo sapiens
  misc_RNA (1)...(19): siRNA sense strand
aagaagcagcagaucgaaa

SEQ ID NO: 2418087 - RNA, 19 nt, Homo sapiens
  misc_RNA (1)...(19): siRNA sense strand
ggugaaaagaagagaaaag

SEQ ID NO: 2418088 - RNA, 19 nt, Homo sapiens
  misc_RNA (1)...(19): siRNA sense strand
gaauaugcugaaaggccaa

SEQ ID NO: 2418089 - RNA, 19 nt, Homo sapiens
  misc_RNA (1)...(19): siRNA sense strand
ugacuaaagcaguugacau

SEQ ID NO: 2418090 - RNA, 19 nt, Homo sapiens
  misc_RNA (1)...(19): siRNA sense strand
ugauggagcuguaaagcca

SEQ ID NO: 2418091 - RNA, 19 nt, Homo sapiens
  misc_RNA (1)...(19): siRNA sense strand
accaagaggcagacccaaa

SEQ ID NO: 2418092 - RNA, 19 nt, Homo sapiens
  misc_RNA (1)...(19): siRNA sense strand
agaaggaugaagagggcca

SEQ ID NO: 2418093 - RNA, 19 nt, Homo sapiens
  misc_RNA (1)...(19): siRNA sense strand
aggcaggaguagugacaac

SEQ ID NO: 2418094 - RNA, 19 nt, Homo sapiens
  misc_RNA (1)...(19): siRNA sense strand
caucauuacugaagaggac

SEQ ID NO: 2418095 - RNA, 19 nt, Homo sapiens
  misc_RNA (1)...(19): siRNA sense strand
ugauguugaaguugaagaa

SEQ ID NO: 2418096 - RNA, 19 nt, Homo sapiens
  misc_RNA (1)...(19): siRNA sense strand
gagaaagagaaaggcagaa

SEQ ID NO: 2418097 - RNA, 19 nt, Homo sapiens
  misc_RNA (1)...(19): siRNA sense strand
augaagagggccagaagga

SEQ ID NO: 2418098 - RNA, 19 nt, Homo sapiens
  misc_RNA (1)...(19): siRNA sense strand
gaggacaaaaguaagaaaa

SEQ ID NO: 2418099 - RNA, 19 nt, Homo sapiens
  misc_RNA (1)...(19): siRNA sense strand
ccaagaaaagagccggaua

SEQ ID NO: 2418100 - RNA, 19 nt, Homo sapiens
  misc_RNA (1)...(19): siRNA sense strand
aagaaggagaugaucaaga

SEQ ID NO: 2418101 - RNA, 19 nt, Homo sapiens
  misc_RNA (1)...(19): siRNA sense strand
aaggugaaaagaagagaaa

SEQ ID NO: 2418102 - RNA, 19 nt, Homo sapiens
  misc_RNA (1)...(19): siRNA sense strand
gggccagaaggaagaagau

SEQ ID NO: 2418103 - RNA, 19 nt, Homo sapiens
  misc_RNA (1)...(19): siRNA sense strand
gaagagggccagaaggaag

SEQ ID NO: 2418104 - RNA, 19 nt, Homo sapiens
  misc_RNA (1)...(19): siRNA sense strand
cgccaagaugaaagguuau

SEQ ID NO: 2418105 - RNA, 19 nt, Homo sapiens
  misc_RNA (1)...(19): siRNA sense strand
aggacgaccugcagcuaca

SEQ ID NO: 2418106 - RNA, 19 nt, Homo sapiens
  misc_RNA (1)...(19): siRNA sense strand
ucauuacugaagaggacaa

SEQ ID NO: 2418107 - RNA, 19 nt, Homo sapiens
  misc_RNA (1)...(19): siRNA sense strand
ggagaaagagaaaggcaga

SEQ ID NO: 2418108 - RNA, 19 nt, Homo sapiens
  misc_RNA (1)...(19): siRNA sense strand
gguuuaugggagauagaua

SEQ ID NO: 2418109 - RNA, 19 nt, Homo sapiens
  misc_RNA (1)...(19): siRNA sense strand
cugaagaggacaaaaguaa

SEQ ID NO: 2418110 - RNA, 19 nt, Homo sapiens
  misc_RNA (1)...(19): siRNA sense strand
ggaauaugcugaaaggcca

SEQ ID NO: 2418111 - RNA, 19 nt, Homo sapiens
  misc_RNA (1)...(19): siRNA sense strand
aaugaagguuuaugggaga

SEQ ID NO: 2418112 - RNA, 19 nt, Homo sapiens
  misc_RNA (1)...(19): siRNA sense strand
aagaagaaggagaugauca

SEQ ID NO: 2418113 - RNA, 19 nt, Homo sapiens
  misc_RNA (1)...(19): siRNA sense strand
gagaugaucaagaagguga

SEQ ID NO: 2418114 - RNA, 19 nt, Homo sapiens
  misc_RNA (1)...(19): siRNA sense strand
aagaagcagcagaucgaaa

SEQ ID NO: 2418115 - RNA, 19 nt, Homo sapiens
  misc_RNA (1)...(19): siRNA sense strand
ggugaaaagaagagaaaag

SEQ ID NO: 2418116 - RNA, 19 nt, Homo sapiens
  misc_RNA (1)...(19): siRNA sense strand
gaauaugcugaaaggccaa

SEQ ID NO: 2418117 - RNA, 19 nt, Homo sapiens
  misc_RNA (1)...(19): siRNA sense strand
ugacuaaagcaguugacau

SEQ ID NO: 2418118 - RNA, 19 nt, Homo sapiens
  misc_RNA (1)...(19): siRNA sense strand
ugauggagcuguaaagcca

SEQ ID NO: 2418119 - RNA, 19 nt, Homo sapiens
  misc_RNA (1)...(19): siRNA sense strand
accaagaggcagacccaaa

SEQ ID NO: 2418120 - RNA, 19 nt, Homo sapiens
  misc_RNA (1)...(19): siRNA sense strand
agaaggaugaagagggcca

SEQ ID NO: 2418121 - RNA, 19 nt, Homo sapiens
  misc_RNA (1)...(19): siRNA sense strand
aggcaggaguagugacaac

SEQ ID NO: 2418122 - RNA, 19 nt, Homo sapiens
  misc_RNA (1)...(19): siRNA sense strand
caucauuacugaagaggac

SEQ ID NO: 2418123 - RNA, 19 nt, Homo sapiens
  misc_RNA (1)...(19): siRNA sense strand
ugauguugaaguugaagaa

SEQ ID NO: 2418124 - RNA, 19 nt, Homo sapiens
  misc_RNA (1)...(19): siRNA sense strand
gagaaagagaaaggcagaa

SEQ ID NO: 2418125 - RNA, 19 nt, Homo sapiens
  misc_RNA (1)...(19): siRNA sense strand
augaagagggccagaagga

SEQ ID NO: 2418126 - RNA, 19 nt, Homo sapiens
  misc_RNA (1)...(19): siRNA sense strand
gaggacaaaaguaagaaaa

SEQ ID NO: 2418127 - RNA, 19 nt, Homo sapiens
  misc_RNA (1)...(19): siRNA sense strand
ccaagaaaagagccggaua

SEQ ID NO: 2418128 - RNA, 19 nt, Homo sapiens
  misc_RNA (1)...(19): siRNA sense strand
aagaaggagaugaucaaga

SEQ ID NO: 2418129 - RNA, 19 nt, Homo sapiens
  misc_RNA (1)...(19): siRNA sense strand
aaggugaaaagaagagaaa

SEQ ID NO: 2418130 - RNA, 19 nt, Homo sapiens
  misc_RNA (1)...(19): siRNA sense strand
gggccagaaggaagaagau

SEQ ID NO: 2418131 - RNA, 19 nt, Homo sapiens
  misc_RNA (1)...(19): siRNA sense strand
gaagagggccagaaggaag

SEQ ID NO: 2418132 - RNA, 19 nt, Homo sapiens
  misc_RNA (1)...(19): siRNA sense strand
cgccaagaugaaagguuau

SEQ ID NO: 2418133 - RNA, 19 nt, Homo sapiens
  misc_RNA (1)...(19): siRNA sense strand
aggacgaccugcagcuaca

SEQ ID NO: 2418134 - RNA, 19 nt, Homo sapiens
  misc_RNA (1)...(19): siRNA sense strand
ucauuacugaagaggacaa

SEQ ID NO: 2418135 - RNA, 19 nt, Homo sapiens
  misc_RNA (1)...(19): siRNA sense strand
cuucaaggcucaauggcaa

SEQ ID NO: 2418136 - RNA, 19 nt, Homo sapiens
  misc_RNA (1)...(19): siRNA sense strand
uaaagaagggucugggaga

SEQ ID NO: 2418137 - RNA, 19 nt, Homo sapiens
  misc_RNA (1)...(19): siRNA sense strand
aucaagaagggcaggagaa

SEQ ID NO: 2418138 - RNA, 19 nt, Homo sapiens
  misc_RNA (1)...(19): siRNA sense strand
aagaagggucugggagaau

SEQ ID NO: 2418139 - RNA, 19 nt, Homo sapiens
  misc_RNA (1)...(19): siRNA sense strand
caucaagaagggcaggaga

SEQ ID NO: 2418140 - RNA, 19 nt, Homo sapiens
  misc_RNA (1)...(19): siRNA sense strand
aggagaaacaaaaggcauu

SEQ ID NO: 2418141 - RNA, 19 nt, Homo sapiens
  misc_RNA (1)...(19): siRNA sense strand
agaacuuaguauagacucu

SEQ ID NO: 2418142 - RNA, 19 nt, Homo sapiens
  misc_RNA (1)...(19): siRNA sense strand
gcucauuacuuuugggaca

SEQ ID NO: 2418143 - RNA, 19 nt, Homo sapiens
  misc_RNA (1)...(19): siRNA sense strand
acuucauugcagagagaaa

SEQ ID NO: 2418144 - RNA, 19 nt, Homo sapiens
  misc_RNA (1)...(19): siRNA sense strand
ggauguacuccguuaacaa

SEQ ID NO: 2418145 - RNA, 19 nt, Homo sapiens
  misc_RNA (1)...(19): siRNA sense strand
gguucuuguugcagaucua

SEQ ID NO: 2418146 - RNA, 19 nt, Homo sapiens
  misc_RNA (1)...(19): siRNA sense strand
ucacuguggaggagggcua

SEQ ID NO: 2418147 - RNA, 19 nt, Homo sapiens
  misc_RNA (1)...(19): siRNA sense strand
agaaaauaauggaggaaag

SEQ ID NO: 2418148 - RNA, 19 nt, Homo sapiens
  misc_RNA (1)...(19): siRNA sense strand
ugcuagaagagaagggaca

SEQ ID NO: 2418149 - RNA, 19 nt, Homo sapiens
  misc_RNA (1)...(19): siRNA sense strand
cuauaaaacgcuugagguu

SEQ ID NO: 2418150 - RNA, 19 nt, Homo sapiens
  misc_RNA (1)...(19): siRNA sense strand
ggucaagaggauaaaguac

SEQ ID NO: 2418151 - RNA, 19 nt, Homo sapiens
  misc_RNA (1)...(19): siRNA sense strand
cugcaagaggagaagcuuu

SEQ ID NO: 2418152 - RNA, 19 nt, Homo sapiens
  misc_RNA (1)...(19): siRNA sense strand
uguaaaaucugcauggaca

SEQ ID NO: 2418153 - RNA, 19 nt, Homo sapiens
  misc_RNA (1)...(19): siRNA sense strand
aagcuauacgaaugggauu

SEQ ID NO: 2418154 - RNA, 19 nt, Homo sapiens
  misc_RNA (1)...(19): siRNA sense strand
gcuugcaagagcuggauuu

SEQ ID NO: 2418155 - RNA, 19 nt, Homo sapiens
  misc_RNA (1)...(19): siRNA sense strand
auuucaaggacguuaagaa

SEQ ID NO: 2418156 - RNA, 19 nt, Homo sapiens
  misc_RNA (1)...(19): siRNA sense strand
agaagagaagggacaugaa

SEQ ID NO: 2418157 - RNA, 19 nt, Homo sapiens
  misc_RNA (1)...(19): siRNA sense strand
gcacagaggugacucgcua

SEQ ID NO: 2418158 - RNA, 19 nt, Homo sapiens
  misc_RNA (1)...(19): siRNA sense strand
cggaugagcaccugaggca

SEQ ID NO: 2418159 - RNA, 19 nt, Homo sapiens
  misc_RNA (1)...(19): siRNA sense strand
auggaaacagcgagaccaa

SEQ ID NO: 2418160 - RNA, 19 nt, Homo sapiens
  misc_RNA (1)...(19): siRNA sense strand
agacuggcuacguggagua

SEQ ID NO: 2418161 - RNA, 19 nt, Homo sapiens
  misc_RNA (1)...(19): siRNA sense strand
ccacuaaucgggagagccu

SEQ ID NO: 2418162 - RNA, 19 nt, Homo sapiens
  misc_RNA (1)...(19): siRNA sense strand
cccagaagaugaaggugga

SEQ ID NO: 2418163 - RNA, 19 nt, Homo sapiens
  misc_RNA (1)...(19): siRNA sense strand
gcacuuaccaccaugcaga

SEQ ID NO: 2418164 - RNA, 19 nt, Homo sapiens
  misc_RNA (1)...(19): siRNA sense strand
gcgauuaccugcagacccu

SEQ ID NO: 2418165 - RNA, 19 nt, Homo sapiens
  misc_RNA (1)...(19): siRNA sense strand
aggauuacuucaugcgcaa

SEQ ID NO: 2418166 - RNA, 19 nt, Homo sapiens
  misc_RNA (1)...(19): siRNA sense strand
ccugcaucacucagagaaa

SEQ ID NO: 2418167 - RNA, 19 nt, Homo sapiens
  misc_RNA (1)...(19): siRNA sense strand
uggaagagauggaggucac

SEQ ID NO: 2418168 - RNA, 19 nt, Homo sapiens
  misc_RNA (1)...(19): siRNA sense strand
agcuagaugagguggaaga

SEQ ID NO: 2418169 - RNA, 19 nt, Homo sapiens
  misc_RNA (1)...(19): siRNA sense strand
cagagaaaaugcaagguca

SEQ ID NO: 2418170 - RNA, 19 nt, Homo sapiens
  misc_RNA (1)...(19): siRNA sense strand
guuugauacaguuguggaa

SEQ ID NO: 2418171 - RNA, 19 nt, Homo sapiens
  misc_RNA (1)...(19): siRNA sense strand
ggaugaagaugauguggac

SEQ ID NO: 2418172 - RNA, 19 nt, Homo sapiens
  misc_RNA (1)...(19): siRNA sense strand
ugauguggacaguguggaa

SEQ ID NO: 2418173 - RNA, 19 nt, Homo sapiens
  misc_RNA (1)...(19): siRNA sense strand
cuagagagacugaugagga

SEQ ID NO: 2418174 - RNA, 19 nt, Homo sapiens
  misc_RNA (1)...(19): siRNA sense strand
cgcucagacuauuaaggaa

SEQ ID NO: 2418175 - RNA, 19 nt, Homo sapiens
  misc_RNA (1)...(19): siRNA sense strand
gcucagacuauuaaggaag

SEQ ID NO: 2418176 - RNA, 19 nt, Homo sapiens
  misc_RNA (1)...(19): siRNA sense strand
augcugacuuggagcuaga

SEQ ID NO: 2418177 - RNA, 19 nt, Homo sapiens
  misc_RNA (1)...(19): siRNA sense strand
auaacaaguaccagagcaa

SEQ ID NO: 2418178 - RNA, 19 nt, Homo sapiens
  misc_RNA (1)...(19): siRNA sense strand
agagcaacgugguggucaa

SEQ ID NO: 2418179 - RNA, 19 nt, Homo sapiens
  misc_RNA (1)...(19): siRNA sense strand
ucaucaaaggccagaacuu

SEQ ID NO: 2418180 - RNA, 19 nt, Homo sapiens
  misc_RNA (1)...(19): siRNA sense strand
cggccauucaggaggagau

SEQ ID NO: 2418181 - RNA, 19 nt, Homo sapiens
  misc_RNA (1)...(19): siRNA sense strand
gguaugaggaccugcagca

SEQ ID NO: 2418182 - RNA, 19 nt, Homo sapiens
  misc_RNA (1)...(19): siRNA sense strand
ucugguacauggauggcua

SEQ ID NO: 2418183 - RNA, 19 nt, Homo sapiens
  misc_RNA (1)...(19): siRNA sense strand
cgggaggaggugaggaauc

SEQ ID NO: 2418184 - RNA, 19 nt, Homo sapiens
  misc_RNA (1)...(19): siRNA sense strand
cgggccacgugguguacaa

SEQ ID NO: 2418185 - RNA, 19 nt, Homo sapiens
  misc_RNA (1)...(19): siRNA sense strand
ggacagacucucuuccaga

SEQ ID NO: 2418186 - RNA, 19 nt, Homo sapiens
  misc_RNA (1)...(19): siRNA sense strand
aguuggagccuuugggaau

SEQ ID NO: 2418187 - RNA, 19 nt, Homo sapiens
  misc_RNA (1)...(19): siRNA sense strand
ccuuauuugauguggcuuu

SEQ ID NO: 2418188 - RNA, 19 nt, Homo sapiens
  misc_RNA (1)...(19): siRNA sense strand
auggaggaacuuaggaaau

SEQ ID NO: 2418189 - RNA, 19 nt, Homo sapiens
  misc_RNA (1)...(19): siRNA sense strand
uggaaacacuuuaaggacu

SEQ ID NO: 2418190 - RNA, 19 nt, Homo sapiens
  misc_RNA (1)...(19): siRNA sense strand
aggaguuacaucagaccua

SEQ ID NO: 2418191 - RNA, 19 nt, Homo sapiens
  misc_RNA (1)...(19): siRNA sense strand
acaaaggaaaguauggcau

SEQ ID NO: 2418192 - RNA, 19 nt, Homo sapiens
  misc_RNA (1)...(19): siRNA sense strand
cgaggaggcaggagaucca

SEQ ID NO: 2418193 - RNA, 19 nt, Homo sapiens
  misc_RNA (1)...(19): siRNA sense strand
aagaaucacuggaugcuca

SEQ ID NO: 2418194 - RNA, 19 nt, Homo sapiens
  misc_RNA (1)...(19): siRNA sense strand
agugaggaacugagaaaca

SEQ ID NO: 2418195 - RNA, 19 nt, Homo sapiens
  misc_RNA (1)...(19): siRNA sense strand
gugaaaucuacuaccguuu

SEQ ID NO: 2418196 - RNA, 19 nt, Homo sapiens
  misc_RNA (1)...(19): siRNA sense strand
gggaaagaacgaugggcaa

SEQ ID NO: 2418197 - RNA, 19 nt, Homo sapiens
  misc_RNA (1)...(19): siRNA sense strand
accauaaaccaaagcgcaa

SEQ ID NO: 2418198 - RNA, 19 nt, Homo sapiens
  misc_RNA (1)...(19): siRNA sense strand
ccaaagcgcaagugguacu

SEQ ID NO: 2418199 - RNA, 19 nt, Homo sapiens
  misc_RNA (1)...(19): siRNA sense strand
augcagagaaagaggcaaa

SEQ ID NO: 2418200 - RNA, 19 nt, Homo sapiens
  misc_RNA (1)...(19): siRNA sense strand
gaauaaagcuggagagugg

SEQ ID NO: 2418201 - RNA, 19 nt, Homo sapiens
  misc_RNA (1)...(19): siRNA sense strand
guccaguaggagagacaua

SEQ ID NO: 2418202 - RNA, 19 nt, Homo sapiens
  misc_RNA (1)...(19): siRNA sense strand
aggacuaaagcuagcgaau

SEQ ID NO: 2418203 - RNA, 19 nt, Homo sapiens
  misc_RNA (1)...(19): siRNA sense strand
caguaaaggcuuggaggau

SEQ ID NO: 2418204 - RNA, 19 nt, Homo sapiens
  misc_RNA (1)...(19): siRNA sense strand
gcaaagauauccaggucac

SEQ ID NO: 2418205 - RNA, 19 nt, Homo sapiens
  misc_RNA (1)...(19): siRNA sense strand
gaacaaauucagaaagcag

SEQ ID NO: 2418206 - RNA, 19 nt, Homo sapiens
  misc_RNA (1)...(19): siRNA sense strand
aacuggagacagaggcaaa

SEQ ID NO: 2418207 - RNA, 19 nt, Homo sapiens
  misc_RNA (1)...(19): siRNA sense strand
cuuaaguggaagaggauuc

SEQ ID NO: 2418208 - RNA, 19 nt, Homo sapiens
  misc_RNA (1)...(19): siRNA sense strand
gcuugaaagaauugcugau

SEQ ID NO: 2418209 - RNA, 19 nt, Homo sapiens
  misc_RNA (1)...(19): siRNA sense strand
guguaaaaccaguaagugu

SEQ ID NO: 2418210 - RNA, 19 nt, Homo sapiens
  misc_RNA (1)...(19): siRNA sense strand
cccgaaugguagagugugu

SEQ ID NO: 2418211 - RNA, 19 nt, Homo sapiens
  misc_RNA (1)...(19): siRNA sense strand
cagauauaccagugaggau

SEQ ID NO: 2418212 - RNA, 19 nt, Homo sapiens
  misc_RNA (1)...(19): siRNA sense strand
gggccugugaguuaggaaa

SEQ ID NO: 2418213 - RNA, 19 nt, Homo sapiens
  misc_RNA (1)...(19): siRNA sense strand
gugcgaauucagcuggaaa

SEQ ID NO: 2418214 - RNA, 19 nt, Homo sapiens
  misc_RNA (1)...(19): siRNA sense strand
cuggagcagcugagggcua

SEQ ID NO: 2418215 - RNA, 19 nt, Homo sapiens
  misc_RNA (1)...(19): siRNA sense strand
gccaagacuacgaguucaa

SEQ ID NO: 2418216 - RNA, 19 nt, Homo sapiens
  misc_RNA (1)...(19): siRNA sense strand
ggaagugacucuaaagccu

SEQ ID NO: 2418217 - RNA, 19 nt, Homo sapiens
  misc_RNA (1)...(19): siRNA sense strand
cagacugguuggaagacau

SEQ ID NO: 2418218 - RNA, 19 nt, Homo sapiens
  misc_RNA (1)...(19): siRNA sense strand
uggcucagcuggaagguca

SEQ ID NO: 2418219 - RNA, 19 nt, Homo sapiens
  misc_RNA (1)...(19): siRNA sense strand
gcagaggcuuggaaggcca

SEQ ID NO: 2418220 - RNA, 19 nt, Homo sapiens
  misc_RNA (1)...(19): siRNA sense strand
acacaugugaggccagcaa

SEQ ID NO: 2418221 - RNA, 19 nt, Homo sapiens
  misc_RNA (1)...(19): siRNA sense strand
uggcaagagcagagaagag

SEQ ID NO: 2418222 - RNA, 19 nt, Homo sapiens
  misc_RNA (1)...(19): siRNA sense strand
uggaagacauggaggucag

SEQ ID NO: 2418223 - RNA, 19 nt, Homo sapiens
  misc_RNA (1)...(19): siRNA sense strand
cgcugaagcucuugggaca

SEQ ID NO: 2418224 - RNA, 19 nt, Homo sapiens
  misc_RNA (1)...(19): siRNA sense strand
cugcagaacuggaugcuca

SEQ ID NO: 2418225 - RNA, 19 nt, Homo sapiens
  misc_RNA (1)...(19): siRNA sense strand
aggaagacaugguggagcu

SEQ ID NO: 2418226 - RNA, 19 nt, Homo sapiens
  misc_RNA (1)...(19): siRNA sense strand
aguucuuuccugcgaguaa

SEQ ID NO: 2418227 - RNA, 19 nt, Homo sapiens
  misc_RNA (1)...(19): siRNA sense strand
cugaagagaaggagggacc

SEQ ID NO: 2418228 - RNA, 19 nt, Homo sapiens
  misc_RNA (1)...(19): siRNA sense strand
uaacagaaccagggaggga

SEQ ID NO: 2418229 - RNA, 19 nt, Homo sapiens
  misc_RNA (1)...(19): siRNA sense strand
cgcugaagcucuugggaca

SEQ ID NO: 2418230 - RNA, 19 nt, Homo sapiens
  misc_RNA (1)...(19): siRNA sense strand
aguucuuuccugcgaguaa

SEQ ID NO: 2418231 - RNA, 19 nt, Homo sapiens
  misc_RNA (1)...(19): siRNA sense strand
uaacagaaccagggaggga

SEQ ID NO: 2418232 - RNA, 19 nt, Homo sapiens
  misc_RNA (1)...(19): siRNA sense strand
ggauuaaggaugagcacag

SEQ ID NO: 2418233 - RNA, 19 nt, Homo sapiens
  misc_RNA (1)...(19): siRNA sense strand
aguaggauccagagccauu

SEQ ID NO: 2418234 - RNA, 19 nt, Homo sapiens
  misc_RNA (1)...(19): siRNA sense strand
cccaagagcuccacggacu

SEQ ID NO: 2418235 - RNA, 19 nt, Homo sapiens
  misc_RNA (1)...(19): siRNA sense strand
cguugggccaucagaggaa

SEQ ID NO: 2418236 - RNA, 19 nt, Homo sapiens
  misc_RNA (1)...(19): siRNA sense strand
uuuaaaggagggagggagu

SEQ ID NO: 2418237 - RNA, 19 nt, Homo sapiens
  misc_RNA (1)...(19): siRNA sense strand
ugaggauccugcaggccaa

SEQ ID NO: 2418238 - RNA, 19 nt, Homo sapiens
  misc_RNA (1)...(19): siRNA sense strand
agagggaaacacuggucua

SEQ ID NO: 2418239 - RNA, 19 nt, Homo sapiens
  misc_RNA (1)...(19): siRNA sense strand
caucaggaccgaagcggca

SEQ ID NO: 2418240 - RNA, 19 nt, Homo sapiens
  misc_RNA (1)...(19): siRNA sense strand
agcccaagcccaaggacua

SEQ ID NO: 2418241 - RNA, 19 nt, Homo sapiens
  misc_RNA (1)...(19): siRNA sense strand
gcaaagugucagccagcca

SEQ ID NO: 2418242 - RNA, 19 nt, Homo sapiens
  misc_RNA (1)...(19): siRNA sense strand
aggacaaggaugagggcuu

SEQ ID NO: 2418243 - RNA, 19 nt, Homo sapiens
  misc_RNA (1)...(19): siRNA sense strand
agaagaacauggaggagga

SEQ ID NO: 2418244 - RNA, 19 nt, Homo sapiens
  misc_RNA (1)...(19): siRNA sense strand
agaacauggaggaggaaug

SEQ ID NO: 2418245 - RNA, 19 nt, Homo sapiens
  misc_RNA (1)...(19): siRNA sense strand
aagagaagaacauggagga

SEQ ID NO: 2418246 - RNA, 19 nt, Homo sapiens
  misc_RNA (1)...(19): siRNA sense strand
ggagaggugcagaggccaa

SEQ ID NO: 2418247 - RNA, 19 nt, Homo sapiens
  misc_RNA (1)...(19): siRNA sense strand
gagcagaagcacagggagg

SEQ ID NO: 2418248 - RNA, 19 nt, Homo sapiens
  misc_RNA (1)...(19): siRNA sense strand
gugcagaggccaagaccgu

SEQ ID NO: 2418249 - RNA, 19 nt, Homo sapiens
  misc_RNA (1)...(19): siRNA sense strand
ggcagaugcagcuggaaga

SEQ ID NO: 2418250 - RNA, 19 nt, Homo sapiens
  misc_RNA (1)...(19): siRNA sense strand
ccauaaaacuggcugagca

SEQ ID NO: 2418251 - RNA, 19 nt, Homo sapiens
  misc_RNA (1)...(19): siRNA sense strand
ugugagaacccaaagccaa

SEQ ID NO: 2418252 - RNA, 19 nt, Homo sapiens
  misc_RNA (1)...(19): siRNA sense strand
gggagagaucacagggcaa

SEQ ID NO: 2418253 - RNA, 19 nt, Homo sapiens
  misc_RNA (1)...(19): siRNA sense strand
uugcaggaguggaagccaa

SEQ ID NO: 2418254 - RNA, 19 nt, Homo sapiens
  misc_RNA (1)...(19): siRNA sense strand
caugagaaugggagagauc

SEQ ID NO: 2418255 - RNA, 19 nt, Homo sapiens
  misc_RNA (1)...(19): siRNA sense strand
gaguggaagccaaaggguu

SEQ ID NO: 2418256 - RNA, 19 nt, Homo sapiens
  misc_RNA (1)...(19): siRNA sense strand
agccaaaggguuaagcauu

SEQ ID NO: 2418257 - RNA, 19 nt, Homo sapiens
  misc_RNA (1)...(19): siRNA sense strand
aggguuaagcauuagguuu

SEQ ID NO: 2418258 - RNA, 19 nt, Homo sapiens
  misc_RNA (1)...(19): siRNA sense strand
guguaaagaaugugguaaa

SEQ ID NO: 2418259 - RNA, 19 nt, Homo sapiens
  misc_RNA (1)...(19): siRNA sense strand
auguaaagaaugugggaaa

SEQ ID NO: 2418260 - RNA, 19 nt, Homo sapiens
  misc_RNA (1)...(19): siRNA sense strand
auguaaugcaugugggaaa

SEQ ID NO: 2418261 - RNA, 19 nt, Homo sapiens
  misc_RNA (1)...(19): siRNA sense strand
augcaaugaaugugggaaa

SEQ ID NO: 2418262 - RNA, 19 nt, Homo sapiens
  misc_RNA (1)...(19): siRNA sense strand
aaucaaaacagcagagaaa

SEQ ID NO: 2418263 - RNA, 19 nt, Homo sapiens
  misc_RNA (1)...(19): siRNA sense strand
ucauuaagcaacagagauu

SEQ ID NO: 2418264 - RNA, 19 nt, Homo sapiens
  misc_RNA (1)...(19): siRNA sense strand
augugaugcuggagaacua

SEQ ID NO: 2418265 - RNA, 19 nt, Homo sapiens
  misc_RNA (1)...(19): siRNA sense strand
ugcuauagguguaaagaau

SEQ ID NO: 2418266 - RNA, 19 nt, Homo sapiens
  misc_RNA (1)...(19): siRNA sense strand
guguaacgaaugugacaaa

SEQ ID NO: 2418267 - RNA, 19 nt, Homo sapiens
  misc_RNA (1)...(19): siRNA sense strand
cccuauaaguguaacgaau

SEQ ID NO: 2418268 - RNA, 19 nt, Homo sapiens
  misc_RNA (1)...(19): siRNA sense strand
cuggagagaaauuguauaa

SEQ ID NO: 2418269 - RNA, 19 nt, Homo sapiens
  misc_RNA (1)...(19): siRNA sense strand
gcaggaaggcauccaguua

SEQ ID NO: 2418270 - RNA, 19 nt, Homo sapiens
  misc_RNA (1)...(19): siRNA sense strand
gggaaacucuuuagccaga

SEQ ID NO: 2418271 - RNA, 19 nt, Homo sapiens
  misc_RNA (1)...(19): siRNA sense strand
aaugcauacuggagaaaga

SEQ ID NO: 2418272 - RNA, 19 nt, Homo sapiens
  misc_RNA (1)...(19): siRNA sense strand
ggauguaagagcacaccua

SEQ ID NO: 2418273 - RNA, 19 nt, Homo sapiens
  misc_RNA (1)...(19): siRNA sense strand
cgcuauaaaugcaguacau

SEQ ID NO: 2418274 - RNA, 19 nt, Homo sapiens
  misc_RNA (1)...(19): siRNA sense strand
ggaaaagauugaaaaggga

SEQ ID NO: 2418275 - RNA, 19 nt, Homo sapiens
  misc_RNA (1)...(19): siRNA sense strand
cccuauagaugcaaugaau

SEQ ID NO: 2418276 - RNA, 19 nt, Homo sapiens
  misc_RNA (1)...(19): siRNA sense strand
aacucauacaggagagaaa

SEQ ID NO: 2418277 - RNA, 19 nt, Homo sapiens
  misc_RNA (1)...(19): siRNA sense strand
cagagauuugcuaaagaaa

SEQ ID NO: 2418278 - RNA, 19 nt, Homo sapiens
  misc_RNA (1)...(19): siRNA sense strand
gggagagccuucagccaga

SEQ ID NO: 2418279 - RNA, 19 nt, Homo sapiens
  misc_RNA (1)...(19): siRNA sense strand
acuuauuauucaugagcga

SEQ ID NO: 2418280 - RNA, 19 nt, Homo sapiens
  misc_RNA (1)...(19): siRNA sense strand
ggagaaaugcuauaggugu

SEQ ID NO: 2418281 - RNA, 19 nt, Homo sapiens
  misc_RNA (1)...(19): siRNA sense strand
aauccuuacuguagauaga

SEQ ID NO: 2418282 - RNA, 19 nt, Homo sapiens
  misc_RNA (1)...(19): siRNA sense strand
ucaaagaacucauacagga

SEQ ID NO: 2418283 - RNA, 19 nt, Homo sapiens
  misc_RNA (1)...(19): siRNA sense strand
acuuaauagacaccgaaua

SEQ ID NO: 2418284 - RNA, 19 nt, Homo sapiens
  misc_RNA (1)...(19): siRNA sense strand
cagccaaaguucugcucuu

SEQ ID NO: 2418285 - RNA, 19 nt, Homo sapiens
  misc_RNA (1)...(19): siRNA sense strand
gacccauacuguggagaaa

SEQ ID NO: 2418286 - RNA, 19 nt, Homo sapiens
  misc_RNA (1)...(19): siRNA sense strand
auguagugaaugugggaga

SEQ ID NO: 2418287 - RNA, 19 nt, Homo sapiens
  misc_RNA (1)...(19): siRNA sense strand
cuauagguguaaagaaugu

SEQ ID NO: 2418288 - RNA, 19 nt, Homo sapiens
  misc_RNA (1)...(19): siRNA sense strand
uuaaagaaacagcaggaca

SEQ ID NO: 2418289 - RNA, 19 nt, Homo sapiens
  misc_RNA (1)...(19): siRNA sense strand
gcuuaguaaucaccagaga

SEQ ID NO: 2418290 - RNA, 19 nt, Homo sapiens
  misc_RNA (1)...(19): siRNA sense strand
cuauagaugcaaugaaugu

SEQ ID NO: 2418291 - RNA, 19 nt, Homo sapiens
  misc_RNA (1)...(19): siRNA sense strand
uuaguaaucaccagagaau

SEQ ID NO: 2418292 - RNA, 19 nt, Homo sapiens
  misc_RNA (1)...(19): siRNA sense strand
cagauaaggaaaagauuga

SEQ ID NO: 2418293 - RNA, 19 nt, Homo sapiens
  misc_RNA (1)...(19): siRNA sense strand
cgaauucauacuggagaaa

SEQ ID NO: 2418294 - RNA, 19 nt, Homo sapiens
  misc_RNA (1)...(19): siRNA sense strand
uggccaaagugcagcucuu

SEQ ID NO: 2418295 - RNA, 19 nt, Homo sapiens
  misc_RNA (1)...(19): siRNA sense strand
aauuaaagaaacagcagga

SEQ ID NO: 2418296 - RNA, 19 nt, Homo sapiens
  misc_RNA (1)...(19): siRNA sense strand
guuucaagcagaauucaaa

SEQ ID NO: 2418297 - RNA, 19 nt, Homo sapiens
  misc_RNA (1)...(19): siRNA sense strand
gguguaaagaaugugguaa

SEQ ID NO: 2418298 - RNA, 19 nt, Homo sapiens
  misc_RNA (1)...(19): siRNA sense strand
aauccaugcucaagaaaau

SEQ ID NO: 2418299 - RNA, 19 nt, Homo sapiens
  misc_RNA (1)...(19): siRNA sense strand
gggaugaacccuggaacuu

SEQ ID NO: 2418300 - RNA, 19 nt, Homo sapiens
  misc_RNA (1)...(19): siRNA sense strand
cagaaagauccugcauaua

SEQ ID NO: 2418301 - RNA, 19 nt, Homo sapiens
  misc_RNA (1)...(19): siRNA sense strand
aaaugcaguacaugugaaa

SEQ ID NO: 2418302 - RNA, 19 nt, Homo sapiens
  misc_RNA (1)...(19): siRNA sense strand
auguaagagcacaccuaaa

SEQ ID NO: 2418303 - RNA, 19 nt, Homo sapiens
  misc_RNA (1)...(19): siRNA sense strand
agucgaaggucugggcuuu

SEQ ID NO: 2418304 - RNA, 19 nt, Homo sapiens
  misc_RNA (1)...(19): siRNA sense strand
gugggaaacucuuuagcca

SEQ ID NO: 2418305 - RNA, 19 nt, Homo sapiens
  misc_RNA (1)...(19): siRNA sense strand
uuaaaagcuuucagccaaa

SEQ ID NO: 2418306 - RNA, 19 nt, Homo sapiens
  misc_RNA (1)...(19): siRNA sense strand
aggaaggcauccaguuaca

SEQ ID NO: 2418307 - RNA, 19 nt, Homo sapiens
  misc_RNA (1)...(19): siRNA sense strand
caggagcagauaaggaaaa

SEQ ID NO: 2418308 - RNA, 19 nt, Homo sapiens
  misc_RNA (1)...(19): siRNA sense strand
guggaaaagccuucagaca

SEQ ID NO: 2418309 - RNA, 19 nt, Homo sapiens
  misc_RNA (1)...(19): siRNA sense strand
agagaaacuuguaccggga

SEQ ID NO: 2418310 - RNA, 19 nt, Homo sapiens
  misc_RNA (1)...(19): siRNA sense strand
cuauaaguguaacgaaugu

SEQ ID NO: 2418311 - RNA, 19 nt, Homo sapiens
  misc_RNA (1)...(19): siRNA sense strand
aguaaucaccagagaauuc

SEQ ID NO: 2418312 - RNA, 19 nt, Homo sapiens
  misc_RNA (1)...(19): siRNA sense strand
gcauccaguuacagcacuu

SEQ ID NO: 2418313 - RNA, 19 nt, Homo sapiens
  misc_RNA (1)...(19): siRNA sense strand
gcucaucacuuauugcaca

SEQ ID NO: 2418314 - RNA, 19 nt, Homo sapiens
  misc_RNA (1)...(19): siRNA sense strand
uguagauagaagccauaaa

SEQ ID NO: 2418315 - RNA, 19 nt, Homo sapiens
  misc_RNA (1)...(19): siRNA sense strand
gcuccaaaugguaaagaaa

SEQ ID NO: 2418316 - RNA, 19 nt, Homo sapiens
  misc_RNA (1)...(19): siRNA sense strand
ccagauuacagcaggaaau

SEQ ID NO: 2418317 - RNA, 19 nt, Homo sapiens
  misc_RNA (1)...(19): siRNA sense strand
gguacugaacauugguaaa

SEQ ID NO: 2418318 - RNA, 19 nt, Homo sapiens
  misc_RNA (1)...(19): siRNA sense strand
agaucgaagccaacagaaa

SEQ ID NO: 2418319 - RNA, 19 nt, Homo sapiens
  misc_RNA (1)...(19): siRNA sense strand
gaggauuaaagcugaguau

SEQ ID NO: 2418320 - RNA, 19 nt, Homo sapiens
  misc_RNA (1)...(19): siRNA sense strand
guuagacaguccaggaaaa

SEQ ID NO: 2418321 - RNA, 19 nt, Homo sapiens
  misc_RNA (1)...(19): siRNA sense strand
aggaaaugcagcuagaaaa

SEQ ID NO: 2418322 - RNA, 19 nt, Homo sapiens
  misc_RNA (1)...(19): siRNA sense strand
cagaaaauguggggagaca

SEQ ID NO: 2418323 - RNA, 19 nt, Homo sapiens
  misc_RNA (1)...(19): siRNA sense strand
caagaaaaucagagaaugu

SEQ ID NO: 2418324 - RNA, 19 nt, Homo sapiens
  misc_RNA (1)...(19): siRNA sense strand
gacaagaaaaucagagaau

SEQ ID NO: 2418325 - RNA, 19 nt, Homo sapiens
  misc_RNA (1)...(19): siRNA sense strand
ggaccagauuacagcagga

SEQ ID NO: 2418326 - RNA, 19 nt, Homo sapiens
  misc_RNA (1)...(19): siRNA sense strand
ugacaaugauuccuggaga

SEQ ID NO: 2418327 - RNA, 19 nt, Homo sapiens
  misc_RNA (1)...(19): siRNA sense strand
augugaacuucgaguaaca

SEQ ID NO: 2418328 - RNA, 19 nt, Homo sapiens
  misc_RNA (1)...(19): siRNA sense strand
uggcauuccuacuguauuu

SEQ ID NO: 2418329 - RNA, 19 nt, Homo sapiens
  misc_RNA (1)...(19): siRNA sense strand
ccuugaagcaggcugacaa

SEQ ID NO: 2418330 - RNA, 19 nt, Homo sapiens
  misc_RNA (1)...(19): siRNA sense strand
uggcauuccaugugaacuu

SEQ ID NO: 2418331 - RNA, 19 nt, Homo sapiens
  misc_RNA (1)...(19): siRNA sense strand
agauauuuggguuaagcaa

SEQ ID NO: 2418332 - RNA, 19 nt, Homo sapiens
  misc_RNA (1)...(19): siRNA sense strand
aaaaccaccuggaaggaaa

SEQ ID NO: 2418333 - RNA, 19 nt, Homo sapiens
  misc_RNA (1)...(19): siRNA sense strand
aggccagacugaaguggau

SEQ ID NO: 2418334 - RNA, 19 nt, Homo sapiens
  misc_RNA (1)...(19): siRNA sense strand
aaguggauaucaugaguca

SEQ ID NO: 2418335 - RNA, 19 nt, Homo sapiens
  misc_RNA (1)...(19): siRNA sense strand
uggagcaaacugcgagcaa

SEQ ID NO: 2418336 - RNA, 19 nt, Homo sapiens
  misc_RNA (1)...(19): siRNA sense strand
ggucugaggaacagcugau

SEQ ID NO: 2418337 - RNA, 19 nt, Homo sapiens
  misc_RNA (1)...(19): siRNA sense strand
cacaguggucugaggaaca

SEQ ID NO: 2418338 - RNA, 19 nt, Homo sapiens
  misc_RNA (1)...(19): siRNA sense strand
uguuagacaguccaggaaa

SEQ ID NO: 2418339 - RNA, 19 nt, Homo sapiens
  misc_RNA (1)...(19): siRNA sense strand
acacaggcuauauuugaaa

SEQ ID NO: 2418340 - RNA, 19 nt, Homo sapiens
  misc_RNA (1)...(19): siRNA sense strand
gaaagucagugcaggguug

SEQ ID NO: 2418341 - RNA, 19 nt, Homo sapiens
  misc_RNA (1)...(19): siRNA sense strand
cagaaguaaugguuuggga

SEQ ID NO: 2418342 - RNA, 19 nt, Homo sapiens
  misc_RNA (1)...(19): siRNA sense strand
acuuuaaacaggugauaga

SEQ ID NO: 2418343 - RNA, 19 nt, Homo sapiens
  misc_RNA (1)...(19): siRNA sense strand
gcccgagcacugugaguua

SEQ ID NO: 2418344 - RNA, 19 nt, Homo sapiens
  misc_RNA (1)...(19): siRNA sense strand
ccugcaauuuggagcuaau

SEQ ID NO: 2418345 - RNA, 19 nt, Homo sapiens
  misc_RNA (1)...(19): siRNA sense strand
gggaagacguguuguggac

SEQ ID NO: 2418346 - RNA, 19 nt, Homo sapiens
  misc_RNA (1)...(19): siRNA sense strand
ccuucuacucagagggcau

SEQ ID NO: 2418347 - RNA, 19 nt, Homo sapiens
  misc_RNA (1)...(19): siRNA sense strand
ugacaugcaucuuggccau

SEQ ID NO: 2418348 - RNA, 19 nt, Homo sapiens
  misc_RNA (1)...(19): siRNA sense strand
ggaaugaagacuaccacga

SEQ ID NO: 2418349 - RNA, 19 nt, Homo sapiens
  misc_RNA (1)...(19): siRNA sense strand
cgucggaaggccucaacaa

SEQ ID NO: 2418350 - RNA, 19 nt, Homo sapiens
  misc_RNA (1)...(19): siRNA sense strand
cuucuuuggcacagcgauu

SEQ ID NO: 2418351 - RNA, 19 nt, Homo sapiens
  misc_RNA (1)...(19): siRNA sense strand
augaagacuaccacgacua

SEQ ID NO: 2418352 - RNA, 19 nt, Homo sapiens
  misc_RNA (1)...(19): siRNA sense strand
caacauuggcacaggacuc

SEQ ID NO: 2418353 - RNA, 19 nt, Homo sapiens
  misc_RNA (1)...(19): siRNA sense strand
gugaguuagugguggaccu

SEQ ID NO: 2418354 - RNA, 19 nt, Homo sapiens
  misc_RNA (1)...(19): siRNA sense strand
cauuugaaggcauuggaau

SEQ ID NO: 2418355 - RNA, 19 nt, Homo sapiens
  misc_RNA (1)...(19): siRNA sense strand
ccuugauccaccuguuaaa

SEQ ID NO: 2418356 - RNA, 19 nt, Homo sapiens
  misc_RNA (1)...(19): siRNA sense strand
guuaaggagugcuuggcaa

SEQ ID NO: 2418357 - RNA, 19 nt, Homo sapiens
  misc_RNA (1)...(19): siRNA sense strand
ggcugauggugguggugaa

SEQ ID NO: 2418358 - RNA, 19 nt, Homo sapiens
  misc_RNA (1)...(19): siRNA sense strand
ucgcuuugcuuaugggaga

SEQ ID NO: 2418359 - RNA, 19 nt, Homo sapiens
  misc_RNA (1)...(19): siRNA sense strand
uagaugagaacgagcguga

SEQ ID NO: 2418360 - RNA, 19 nt, Homo sapiens
  misc_RNA (1)...(19): siRNA sense strand
uggccaaggagcugggcau

SEQ ID NO: 2418361 - RNA, 19 nt, Homo sapiens
  misc_RNA (1)...(19): siRNA sense strand
gggcaacggaacaggguac

SEQ ID NO: 2418362 - RNA, 19 nt, Homo sapiens
  misc_RNA (1)...(19): siRNA sense strand
cccagaugaugguggacau

SEQ ID NO: 2418363 - RNA, 19 nt, Homo sapiens
  misc_RNA (1)...(19): siRNA sense strand
gguaccugaaggaggaaga

SEQ ID NO: 2418364 - RNA, 19 nt, Homo sapiens
  misc_RNA (1)...(19): siRNA sense strand
gggagcuagaugagaacga

SEQ ID NO: 2418365 - RNA, 19 nt, Homo sapiens
  misc_RNA (1)...(19): siRNA sense strand
augaaaggccaaacguaga

SEQ ID NO: 2418366 - RNA, 19 nt, Homo sapiens
  misc_RNA (1)...(19): siRNA sense strand
acgcugaccuggaggcugu

SEQ ID NO: 2418367 - RNA, 19 nt, Homo sapiens
  misc_RNA (1)...(19): siRNA sense strand
aggcacagacggaguggaa

SEQ ID NO: 2418368 - RNA, 19 nt, Homo sapiens
  misc_RNA (1)...(19): siRNA sense strand
acaacaacuucucaggcaa

SEQ ID NO: 2418369 - RNA, 19 nt, Homo sapiens
  misc_RNA (1)...(19): siRNA sense strand
ccuuuaauuucauggcguu

SEQ ID NO: 2418370 - RNA, 19 nt, Homo sapiens
  misc_RNA (1)...(19): siRNA sense strand
ugggaguauuucagacaaa

SEQ ID NO: 2418371 - RNA, 19 nt, Homo sapiens
  misc_RNA (1)...(19): siRNA sense strand
gauuaaggcucaugccaga

SEQ ID NO: 2418372 - RNA, 19 nt, Homo sapiens
  misc_RNA (1)...(19): siRNA sense strand
cugaagaagagaagaaaau

SEQ ID NO: 2418373 - RNA, 19 nt, Homo sapiens
  misc_RNA (1)...(19): siRNA sense strand
gcugggaugcagauggaaa

SEQ ID NO: 2418374 - RNA, 19 nt, Homo sapiens
  misc_RNA (1)...(19): siRNA sense strand
uaaucaaguaccaggagaa

SEQ ID NO: 2418375 - RNA, 19 nt, Homo sapiens
  misc_RNA (1)...(19): siRNA sense strand
ucaucagggaggagagaga

SEQ ID NO: 2418376 - RNA, 19 nt, Homo sapiens
  misc_RNA (1)...(19): siRNA sense strand
agaaaggagaacuagguau

SEQ ID NO: 2418377 - RNA, 19 nt, Homo sapiens
  misc_RNA (1)...(19): siRNA sense strand
cuuugggacuggagguuau

SEQ ID NO: 2418378 - RNA, 19 nt, Homo sapiens
  misc_RNA (1)...(19): siRNA sense strand
uugaguggaaccagggaua

SEQ ID NO: 2418379 - RNA, 19 nt, Homo sapiens
  misc_RNA (1)...(19): siRNA sense strand
agacaaacauuucaggaac

SEQ ID NO: 2418380 - RNA, 19 nt, Homo sapiens
  misc_RNA (1)...(19): siRNA sense strand
cagggaggagagagaguuu

SEQ ID NO: 2418381 - RNA, 19 nt, Homo sapiens
  misc_RNA (1)...(19): siRNA sense strand
cuucaaguauauugugcau

SEQ ID NO: 2418382 - RNA, 19 nt, Homo sapiens
  misc_RNA (1)...(19): siRNA sense strand
aggagaacaagaaaggaga

SEQ ID NO: 2418383 - RNA, 19 nt, Homo sapiens
  misc_RNA (1)...(19): siRNA sense strand
ucaccauaaaugaagcuaa

SEQ ID NO: 2418384 - RNA, 19 nt, Homo sapiens
  misc_RNA (1)...(19): siRNA sense strand
ucaucaaccagaaaggaau

SEQ ID NO: 2418385 - RNA, 19 nt, Homo sapiens
  misc_RNA (1)...(19): siRNA sense strand
ugaccaggaagcugcuaaa

SEQ ID NO: 2418386 - RNA, 19 nt, Homo sapiens
  misc_RNA (1)...(19): siRNA sense strand
ucauugaauccuuugacaa

SEQ ID NO: 2418387 - RNA, 19 nt, Homo sapiens
  misc_RNA (1)...(19): siRNA sense strand
cgauguagcuuguggcagc

SEQ ID NO: 2418388 - RNA, 19 nt, Homo sapiens
  misc_RNA (1)...(19): siRNA sense strand
cgugucaagcaguggauca

SEQ ID NO: 2418389 - RNA, 19 nt, Homo sapiens
  misc_RNA (1)...(19): siRNA sense strand
cugaaguugucaagucuca

SEQ ID NO: 2418390 - RNA, 19 nt, Homo sapiens
  misc_RNA (1)...(19): siRNA sense strand
acugaagaagagaagaaaa

SEQ ID NO: 2418391 - RNA, 19 nt, Homo sapiens
  misc_RNA (1)...(19): siRNA sense strand
ggaguauuucagacaaaca

SEQ ID NO: 2418392 - RNA, 19 nt, Homo sapiens
  misc_RNA (1)...(19): siRNA sense strand
ggauacaaguagaagaaaa

SEQ ID NO: 2418393 - RNA, 19 nt, Homo sapiens
  misc_RNA (1)...(19): siRNA sense strand
agauagaccucaugggaga

SEQ ID NO: 2418394 - RNA, 19 nt, Homo sapiens
  misc_RNA (1)...(19): siRNA sense strand
ggaaacagcagcagcggaa

SEQ ID NO: 2418395 - RNA, 19 nt, Homo sapiens
  misc_RNA (1)...(19): siRNA sense strand
gugaaaagaaagugggaau

SEQ ID NO: 2418396 - RNA, 19 nt, Homo sapiens
  misc_RNA (1)...(19): siRNA sense strand
ugaugaagcuacagaugaa

SEQ ID NO: 2418397 - RNA, 19 nt, Homo sapiens
  misc_RNA (1)...(19): siRNA sense strand
ggaaauggauacaaguaga

SEQ ID NO: 2418398 - RNA, 19 nt, Homo sapiens
  misc_RNA (1)...(19): siRNA sense strand
cagcagcagcggaaggaaa

SEQ ID NO: 2418399 - RNA, 19 nt, Homo sapiens
  misc_RNA (1)...(19): siRNA sense strand
gaaauuaagagaagaggca

SEQ ID NO: 2418400 - RNA, 19 nt, Homo sapiens
  misc_RNA (1)...(19): siRNA sense strand
ccucauaauccucaauuua

SEQ ID NO: 2418401 - RNA, 19 nt, Homo sapiens
  misc_RNA (1)...(19): siRNA sense strand
ccgccaggcuuuagcauuu

SEQ ID NO: 2418402 - RNA, 19 nt, Homo sapiens
  misc_RNA (1)...(19): siRNA sense strand
cuaaauauggagaguauga

SEQ ID NO: 2418403 - RNA, 19 nt, Homo sapiens
  misc_RNA (1)...(19): siRNA sense strand
aggaaaaguuggcagcuaa

SEQ ID NO: 2418404 - RNA, 19 nt, Homo sapiens
  misc_RNA (1)...(19): siRNA sense strand
auuaaggucucuucagaaa

SEQ ID NO: 2418405 - RNA, 19 nt, Homo sapiens
  misc_RNA (1)...(19): siRNA sense strand
cgggaaauggauacaagua

SEQ ID NO: 2418406 - RNA, 19 nt, Homo sapiens
  misc_RNA (1)...(19): siRNA sense strand
caucacaacaucagauaga

SEQ ID NO: 2418407 - RNA, 19 nt, Homo sapiens
  misc_RNA (1)...(19): siRNA sense strand
gcgauaaggcuccaccaaa

SEQ ID NO: 2418408 - RNA, 19 nt, Homo sapiens
  misc_RNA (1)...(19): siRNA sense strand
agaacacauaccugaaaua

SEQ ID NO: 2418409 - RNA, 19 nt, Homo sapiens
  misc_RNA (1)...(19): siRNA sense strand
gaaagugggaauucaggaa

SEQ ID NO: 2418410 - RNA, 19 nt, Homo sapiens
  misc_RNA (1)...(19): siRNA sense strand
auggauacaaguagaagaa

SEQ ID NO: 2418411 - RNA, 19 nt, Homo sapiens
  misc_RNA (1)...(19): siRNA sense strand
gaaauggauacaaguagaa

SEQ ID NO: 2418412 - RNA, 19 nt, Homo sapiens
  misc_RNA (1)...(19): siRNA sense strand
ucacagaccugauuguuau

SEQ ID NO: 2418413 - RNA, 19 nt, Homo sapiens
  misc_RNA (1)...(19): siRNA sense strand
ucuucagauuucacagaua

SEQ ID NO: 2418414 - RNA, 19 nt, Homo sapiens
  misc_RNA (1)...(19): siRNA sense strand
caguagacccuaaugauga

SEQ ID NO: 2418415 - RNA, 19 nt, Homo sapiens
  misc_RNA (1)...(19): siRNA sense strand
acggaaagccgcugccgaa

SEQ ID NO: 2418416 - RNA, 19 nt, Homo sapiens
  misc_RNA (1)...(19): siRNA sense strand
caccaaagccuguacccaa

SEQ ID NO: 2418417 - RNA, 19 nt, Homo sapiens
  misc_RNA (1)...(19): siRNA sense strand
gaaaagucuaaaacggaaa

SEQ ID NO: 2418418 - RNA, 19 nt, Homo sapiens
  misc_RNA (1)...(19): siRNA sense strand
caguguucgucuucguaaa

SEQ ID NO: 2418419 - RNA, 19 nt, Homo sapiens
  misc_RNA (1)...(19): siRNA sense strand
gggauggggcgacggaaaa

SEQ ID NO: 2418420 - RNA, 19 nt, Homo sapiens
  misc_RNA (1)...(19): siRNA sense strand
cgauaaggcuccaccaaag

SEQ ID NO: 2418421 - RNA, 19 nt, Homo sapiens
  misc_RNA (1)...(19): siRNA sense strand
cagaugaauuugcuucuua

SEQ ID NO: 2418422 - RNA, 19 nt, Homo sapiens
  misc_RNA (1)...(19): siRNA sense strand
ccacagaacacauaccuga

SEQ ID NO: 2418423 - RNA, 19 nt, Homo sapiens
  misc_RNA (1)...(19): siRNA sense strand
cggcagcagcgggaagaaa

SEQ ID NO: 2418424 - RNA, 19 nt, Homo sapiens
  misc_RNA (1)...(19): siRNA sense strand
cagauuucacagauacaua

SEQ ID NO: 2418425 - RNA, 19 nt, Homo sapiens
  misc_RNA (1)...(19): siRNA sense strand
augaagaggucgcuuauga

SEQ ID NO: 2418426 - RNA, 19 nt, Homo sapiens
  misc_RNA (1)...(19): siRNA sense strand
agaaaagucuaaaacggaa

SEQ ID NO: 2418427 - RNA, 19 nt, Homo sapiens
  misc_RNA (1)...(19): siRNA sense strand
caaacagcggcgacacuua

SEQ ID NO: 2418428 - RNA, 19 nt, Homo sapiens
  misc_RNA (1)...(19): siRNA sense strand
aaaguuggcagcuaagaaa

SEQ ID NO: 2418429 - RNA, 19 nt, Homo sapiens
  misc_RNA (1)...(19): siRNA sense strand
augaugaagaggucgcuua

SEQ ID NO: 2418430 - RNA, 19 nt, Homo sapiens
  misc_RNA (1)...(19): siRNA sense strand
cuucuuacuucaacaaaca

SEQ ID NO: 2418431 - RNA, 19 nt, Homo sapiens
  misc_RNA (1)...(19): siRNA sense strand
gaacacauaccugaaauaa

SEQ ID NO: 2418432 - RNA, 19 nt, Homo sapiens
  misc_RNA (1)...(19): siRNA sense strand
ugacaaccagcgaguguau

SEQ ID NO: 2418433 - RNA, 19 nt, Homo sapiens
  misc_RNA (1)...(19): siRNA sense strand
ggcuuuagcauuucggaga

SEQ ID NO: 2418434 - RNA, 19 nt, Homo sapiens
  misc_RNA (1)...(19): siRNA sense strand
aaaccacaguagacccuaa

SEQ ID NO: 2418435 - RNA, 19 nt, Homo sapiens
  misc_RNA (1)...(19): siRNA sense strand
aaacagacuucucccaaga

SEQ ID NO: 2418436 - RNA, 19 nt, Homo sapiens
  misc_RNA (1)...(19): siRNA sense strand
cgggaagaaaagucuaaaa

SEQ ID NO: 2418437 - RNA, 19 nt, Homo sapiens
  misc_RNA (1)...(19): siRNA sense strand
cagaccugauuguuauuaa

SEQ ID NO: 2418438 - RNA, 19 nt, Homo sapiens
  misc_RNA (1)...(19): siRNA sense strand
cagaacacauaccugaaau

SEQ ID NO: 2418439 - RNA, 19 nt, Homo sapiens
  misc_RNA (1)...(19): siRNA sense strand
gauacauauucaggaguga

SEQ ID NO: 2418440 - RNA, 19 nt, Homo sapiens
  misc_RNA (1)...(19): siRNA sense strand
cagaaagagcugaaccaca

SEQ ID NO: 2418441 - RNA, 19 nt, Homo sapiens
  misc_RNA (1)...(19): siRNA sense strand
ucauuguccugguggaaaa

SEQ ID NO: 2418442 - RNA, 19 nt, Homo sapiens
  misc_RNA (1)...(19): siRNA sense strand
accggaaggcugcggauaa

SEQ ID NO: 2418443 - RNA, 19 nt, Homo sapiens
  misc_RNA (1)...(19): siRNA sense strand
gcuacacggagcuggagaa

SEQ ID NO: 2418444 - RNA, 19 nt, Homo sapiens
  misc_RNA (1)...(19): siRNA sense strand
cuaaguacagccuggucaa

SEQ ID NO: 2418445 - RNA, 19 nt, Homo sapiens
  misc_RNA (1)...(19): siRNA sense strand
ccgcgagaugcuccagaaa

SEQ ID NO: 2418446 - RNA, 19 nt, Homo sapiens
  misc_RNA (1)...(19): siRNA sense strand
acagccuggucaagaacaa

SEQ ID NO: 2418447 - RNA, 19 nt, Homo sapiens
  misc_RNA (1)...(19): siRNA sense strand
gaagaaaugucgcagccaa

SEQ ID NO: 2418448 - RNA, 19 nt, Homo sapiens
  misc_RNA (1)...(19): siRNA sense strand
augcaugcuguuugagaaa

SEQ ID NO: 2418449 - RNA, 19 nt, Homo sapiens
  misc_RNA (1)...(19): siRNA sense strand
agaauacagaauuggaaga

SEQ ID NO: 2418450 - RNA, 19 nt, Homo sapiens
  misc_RNA (1)...(19): siRNA sense strand
gcaugcuguuugagaaaau

SEQ ID NO: 2418451 - RNA, 19 nt, Homo sapiens
  misc_RNA (1)...(19): siRNA sense strand
gcagccaagaauacagaau

SEQ ID NO: 2418452 - RNA, 19 nt, Homo sapiens
  misc_RNA (1)...(19): siRNA sense strand
gaauacaggagaagggcaa

SEQ ID NO: 2418453 - RNA, 19 nt, Homo sapiens
  misc_RNA (1)...(19): siRNA sense strand
ccaaaguggugaaggccau

SEQ ID NO: 2418454 - RNA, 19 nt, Homo sapiens
  misc_RNA (1)...(19): siRNA sense strand
aggagaagggcaaggaaga

SEQ ID NO: 2418455 - RNA, 19 nt, Homo sapiens
  misc_RNA (1)...(19): siRNA sense strand
gagacacagugaaaggcua

SEQ ID NO: 2418456 - RNA, 19 nt, Homo sapiens
  misc_RNA (1)...(19): siRNA sense strand
ccaaggagauggucagcca

SEQ ID NO: 2418457 - RNA, 19 nt, Homo sapiens
  misc_RNA (1)...(19): siRNA sense strand
cagcaauguuggaagugga

SEQ ID NO: 2418458 - RNA, 19 nt, Homo sapiens
  misc_RNA (1)...(19): siRNA sense strand
gugaagaccaaaagagaca

SEQ ID NO: 2418459 - RNA, 19 nt, Homo sapiens
  misc_RNA (1)...(19): siRNA sense strand
aagaaaaccccuuggugaa

SEQ ID NO: 2418460 - RNA, 19 nt, Homo sapiens
  misc_RNA (1)...(19): siRNA sense strand
cuuaugaacuuaauggcuu

SEQ ID NO: 2418461 - RNA, 19 nt, Homo sapiens
  misc_RNA (1)...(19): siRNA sense strand
ucgagaugguucaagaaaa

SEQ ID NO: 2418462 - RNA, 19 nt, Homo sapiens
  misc_RNA (1)...(19): siRNA sense strand
ccuguggcucuguggaaua

SEQ ID NO: 2418463 - RNA, 19 nt, Homo sapiens
  misc_RNA (1)...(19): siRNA sense strand
ggauguuucuggaagagga

SEQ ID NO: 2418464 - RNA, 19 nt, Homo sapiens
  misc_RNA (1)...(19): siRNA sense strand
gaagaaaaccccuugguga

SEQ ID NO: 2418465 - RNA, 19 nt, Homo sapiens
  misc_RNA (1)...(19): siRNA sense strand
auggaaggacugaaggaga

SEQ ID NO: 2418466 - RNA, 19 nt, Homo sapiens
  misc_RNA (1)...(19): siRNA sense strand
ggacugaaggagaaguacu

SEQ ID NO: 2418467 - RNA, 19 nt, Homo sapiens
  misc_RNA (1)...(19): siRNA sense strand
ccagaaggaacaagcacca

SEQ ID NO: 2418468 - RNA, 19 nt, Homo sapiens
  misc_RNA (1)...(19): siRNA sense strand
ccaaacucgugcuggaacu

SEQ ID NO: 2418469 - RNA, 19 nt, Homo sapiens
  misc_RNA (1)...(19): siRNA sense strand
ggaacaagcaccaccagca

SEQ ID NO: 2418470 - RNA, 19 nt, Homo sapiens
  misc_RNA (1)...(19): siRNA sense strand
cgagaugguucaagaaaac

SEQ ID NO: 2418471 - RNA, 19 nt, Homo sapiens
  misc_RNA (1)...(19): siRNA sense strand
cgguccuggugaagagcau

SEQ ID NO: 2418472 - RNA, 19 nt, Homo sapiens
  misc_RNA (1)...(19): siRNA sense strand
acgaggaacuagagcgcau

SEQ ID NO: 2418473 - RNA, 19 nt, Homo sapiens
  misc_RNA (1)...(19): siRNA sense strand
cgaagagaucaaugcgcua

SEQ ID NO: 2418474 - RNA, 19 nt, Homo sapiens
  misc_RNA (1)...(19): siRNA sense strand
cuaaaggaggugaaggcuu

SEQ ID NO: 2418475 - RNA, 19 nt, Homo sapiens
  misc_RNA (1)...(19): siRNA sense strand
ccaacaggcuuuauggaga

SEQ ID NO: 2418476 - RNA, 19 nt, Homo sapiens
  misc_RNA (1)...(19): siRNA sense strand
cugaaaagcaacaaacaaa

SEQ ID NO: 2418477 - RNA, 19 nt, Homo sapiens
  misc_RNA (1)...(19): siRNA sense strand
ugucuaaaugcgaaugaaa

SEQ ID NO: 2418478 - RNA, 19 nt, Homo sapiens
  misc_RNA (1)...(19): siRNA sense strand
gagauuaacuucuggguug

SEQ ID NO: 2418479 - RNA, 19 nt, Homo sapiens
  misc_RNA (1)...(19): siRNA sense strand
aggaauacuuagauggugu

SEQ ID NO: 2418480 - RNA, 19 nt, Homo sapiens
  misc_RNA (1)...(19): siRNA sense strand
cuucaaggccaaaugggaa

SEQ ID NO: 2418481 - RNA, 19 nt, Homo sapiens
  misc_RNA (1)...(19): siRNA sense strand
aggccaaaugggaaacaua

SEQ ID NO: 2418482 - RNA, 19 nt, Homo sapiens
  misc_RNA (1)...(19): siRNA sense strand
ggguggaguuuaaugccaa

SEQ ID NO: 2418483 - RNA, 19 nt, Homo sapiens
  misc_RNA (1)...(19): siRNA sense strand
uagaggaggugaaggcaca

SEQ ID NO: 2418484 - RNA, 19 nt, Homo sapiens
  misc_RNA (1)...(19): siRNA sense strand
augucaaucccaagguaaa

SEQ ID NO: 2418485 - RNA, 19 nt, Homo sapiens
  misc_RNA (1)...(19): siRNA sense strand
cuguuuacuucaaggccaa

SEQ ID NO: 2418486 - RNA, 19 nt, Homo sapiens
  misc_RNA (1)...(19): siRNA sense strand
aagauaaccugaagggucu

SEQ ID NO: 2418487 - RNA, 19 nt, Homo sapiens
  misc_RNA (1)...(19): siRNA sense strand
gaaugaaagcaaagaaccu

SEQ ID NO: 2418488 - RNA, 19 nt, Homo sapiens
  misc_RNA (1)...(19): siRNA sense strand
cugauuacacacugaguau

SEQ ID NO: 2418489 - RNA, 19 nt, Homo sapiens
  misc_RNA (1)...(19): siRNA sense strand
ccaaauuagacaggaucaa

SEQ ID NO: 2418490 - RNA, 19 nt, Homo sapiens
  misc_RNA (1)...(19): siRNA sense strand
aggaaaaucaccuaugaaa

SEQ ID NO: 2418491 - RNA, 19 nt, Homo sapiens
  misc_RNA (1)...(19): siRNA sense strand
ucuccaaauuagacaggau

SEQ ID NO: 2418492 - RNA, 19 nt, Homo sapiens
  misc_RNA (1)...(19): siRNA sense strand
uuguggagguggaugaaaa

SEQ ID NO: 2418493 - RNA, 19 nt, Homo sapiens
  misc_RNA (1)...(19): siRNA sense strand
ccuuuguggagguggauga

SEQ ID NO: 2418494 - RNA, 19 nt, Homo sapiens
  misc_RNA (1)...(19): siRNA sense strand
cagaagaaucggugguccu

SEQ ID NO: 2418495 - RNA, 19 nt, Homo sapiens
  misc_RNA (1)...(19): siRNA sense strand
gugugaagaugaugacgca

SEQ ID NO: 2418496 - RNA, 19 nt, Homo sapiens
  misc_RNA (1)...(19): siRNA sense strand
aaugaaaacaagaguguga

SEQ ID NO: 2418497 - RNA, 19 nt, Homo sapiens
  misc_RNA (1)...(19): siRNA sense strand
uggaaaugagguacaccaa

SEQ ID NO: 2418498 - RNA, 19 nt, Homo sapiens
  misc_RNA (1)...(19): siRNA sense strand
acuuagauggugugauuca

SEQ ID NO: 2418499 - RNA, 19 nt, Homo sapiens
  misc_RNA (1)...(19): siRNA sense strand
gcaaagaaccugacccuug

SEQ ID NO: 2418500 - RNA, 19 nt, Homo sapiens
  misc_RNA (1)...(19): siRNA sense strand
cuauuaaugcugagacugu

SEQ ID NO: 2418501 - RNA, 19 nt, Homo sapiens
  misc_RNA (1)...(19): siRNA sense strand
uagaagugacagugcacau

SEQ ID NO: 2418502 - RNA, 19 nt, Homo sapiens
  misc_RNA (1)...(19): siRNA sense strand
ucccaaucugucaggaaua

SEQ ID NO: 2418503 - RNA, 19 nt, Homo sapiens
  misc_RNA (1)...(19): siRNA sense strand
cgcuauuaaugcugagacu

SEQ ID NO: 2418504 - RNA, 19 nt, Homo sapiens
  misc_RNA (1)...(19): siRNA sense strand
agacaugggcauuacggau

SEQ ID NO: 2418505 - RNA, 19 nt, Homo sapiens
  misc_RNA (1)...(19): siRNA sense strand
gucuaaaugcgaaugaaaa

SEQ ID NO: 2418506 - RNA, 19 nt, Homo sapiens
  misc_RNA (1)...(19): siRNA sense strand
ccauauauuucaaaggaca

SEQ ID NO: 2418507 - RNA, 19 nt, Homo sapiens
  misc_RNA (1)...(19): siRNA sense strand
cuguaaugguccuggugaa

SEQ ID NO: 2418508 - RNA, 19 nt, Homo sapiens
  misc_RNA (1)...(19): siRNA sense strand
gggacaaagacgauggcau

SEQ ID NO: 2418509 - RNA, 19 nt, Homo sapiens
  misc_RNA (1)...(19): siRNA sense strand
acagaagaaacgaggaaaa

SEQ ID NO: 2418510 - RNA, 19 nt, Homo sapiens
  misc_RNA (1)...(19): siRNA sense strand
ucuucuaacaugauggaaa

SEQ ID NO: 2418511 - RNA, 19 nt, Homo sapiens
  misc_RNA (1)...(19): siRNA sense strand
gagaaaugguaucaagcca

SEQ ID NO: 2418512 - RNA, 19 nt, Homo sapiens
  misc_RNA (1)...(19): siRNA sense strand
gagcucaguucaaggcgaa

SEQ ID NO: 2418513 - RNA, 19 nt, Homo sapiens
  misc_RNA (1)...(19): siRNA sense strand
auuucaaguaagagagaca

SEQ ID NO: 2418514 - RNA, 19 nt, Homo sapiens
  misc_RNA (1)...(19): siRNA sense strand
caguaacaacauaggagau

SEQ ID NO: 2418515 - RNA, 19 nt, Homo sapiens
  misc_RNA (1)...(19): siRNA sense strand
augcuuggguugaaaauaa

SEQ ID NO: 2418516 - RNA, 19 nt, Homo sapiens
  misc_RNA (1)...(19): siRNA sense strand
gguucaaggacucaccuaa

SEQ ID NO: 2418517 - RNA, 19 nt, Homo sapiens
  misc_RNA (1)...(19): siRNA sense strand
agcuaaauucccuguuaaa

SEQ ID NO: 2418518 - RNA, 19 nt, Homo sapiens
  misc_RNA (1)...(19): siRNA sense strand
aaguaagagagacaguuaa

SEQ ID NO: 2418519 - RNA, 19 nt, Homo sapiens
  misc_RNA (1)...(19): siRNA sense strand
caacaggcucuacgggaca

SEQ ID NO: 2418520 - RNA, 19 nt, Homo sapiens
  misc_RNA (1)...(19): siRNA sense strand
uggaaagagaaguugaagu

SEQ ID NO: 2418521 - RNA, 19 nt, Homo sapiens
  misc_RNA (1)...(19): siRNA sense strand
gaagaaggcaucaggcgau

SEQ ID NO: 2418522 - RNA, 19 nt, Homo sapiens
  misc_RNA (1)...(19): siRNA sense strand
gcgagauccaccugugcaa

SEQ ID NO: 2418523 - RNA, 19 nt, Homo sapiens
  misc_RNA (1)...(19): siRNA sense strand
gcacaaagcccaucaggug

SEQ ID NO: 2418524 - RNA, 19 nt, Homo sapiens
  misc_RNA (1)...(19): siRNA sense strand
ucuacgagcacauggucaa

SEQ ID NO: 2418525 - RNA, 19 nt, Homo sapiens
  misc_RNA (1)...(19): siRNA sense strand
gcgauaagauugucguggu

SEQ ID NO: 2418526 - RNA, 19 nt, Homo sapiens
  misc_RNA (1)...(19): siRNA sense strand
gaagaaggcaucaggcgau

SEQ ID NO: 2418527 - RNA, 19 nt, Homo sapiens
  misc_RNA (1)...(19): siRNA sense strand
gcgagauccaccugugcaa

SEQ ID NO: 2418528 - RNA, 19 nt, Homo sapiens
  misc_RNA (1)...(19): siRNA sense strand
gcacaaagcccaucaggug

SEQ ID NO: 2418529 - RNA, 19 nt, Homo sapiens
  misc_RNA (1)...(19): siRNA sense strand
ucuacgagcacauggucaa

SEQ ID NO: 2418530 - RNA, 19 nt, Homo sapiens
  misc_RNA (1)...(19): siRNA sense strand
gcgauaagauugucguggu

SEQ ID NO: 2418531 - RNA, 19 nt, Homo sapiens
  misc_RNA (1)...(19): siRNA sense strand
ccaacaagucccaggccaa

SEQ ID NO: 2418532 - RNA, 19 nt, Homo sapiens
  misc_RNA (1)...(19): siRNA sense strand
gggccugggagaaggucaa

SEQ ID NO: 2418533 - RNA, 19 nt, Homo sapiens
  misc_RNA (1)...(19): siRNA sense strand
ucgcagaaguccuggucca

SEQ ID NO: 2418534 - RNA, 19 nt, Homo sapiens
  misc_RNA (1)...(19): siRNA sense strand
uccugaaagccgagggaga

SEQ ID NO: 2418535 - RNA, 19 nt, Homo sapiens
  misc_RNA (1)...(19): siRNA sense strand
augaggaggcggugggcuu

SEQ ID NO: 2418536 - RNA, 19 nt, Homo sapiens
  misc_RNA (1)...(19): siRNA sense strand
gaggcaggcuggaacguga

SEQ ID NO: 2418537 - RNA, 19 nt, Homo sapiens
  misc_RNA (1)...(19): siRNA sense strand
gccuguacgaggagaauga

SEQ ID NO: 2418538 - RNA, 19 nt, Homo sapiens
  misc_RNA (1)...(19): siRNA sense strand
aguucuacaucgacgucaa

SEQ ID NO: 2418539 - RNA, 19 nt, Homo sapiens
  misc_RNA (1)...(19): siRNA sense strand
augaugaacuggacgcaca

SEQ ID NO: 2418540 - RNA, 19 nt, Homo sapiens
  misc_RNA (1)...(19): siRNA sense strand
acaucuuucugguggccaa

SEQ ID NO: 2418541 - RNA, 19 nt, Homo sapiens
  misc_RNA (1)...(19): siRNA sense strand
ccaaggaggucaucacgga

SEQ ID NO: 2418542 - RNA, 19 nt, Homo sapiens
  misc_RNA (1)...(19): siRNA sense strand
agucugagguggaggccau

SEQ ID NO: 2418543 - RNA, 19 nt, Homo sapiens
  misc_RNA (1)...(19): siRNA sense strand
ggacaaggcuaauccgaag

SEQ ID NO: 2418544 - RNA, 19 nt, Homo sapiens
  misc_RNA (1)...(19): siRNA sense strand
ugagaaagaaagcugaaaa

SEQ ID NO: 2418545 - RNA, 19 nt, Homo sapiens
  misc_RNA (1)...(19): siRNA sense strand
aggcuaauccgaaggaagu

SEQ ID NO: 2418546 - RNA, 19 nt, Homo sapiens
  misc_RNA (1)...(19): siRNA sense strand
uggagaagcuacagcccga

SEQ ID NO: 2418547 - RNA, 19 nt, Homo sapiens
  misc_RNA (1)...(19): siRNA sense strand
ccugagaaagaaagcugaa

SEQ ID NO: 2418548 - RNA, 19 nt, Homo sapiens
  misc_RNA (1)...(19): siRNA sense strand
cugaacaugcccaagggaa

SEQ ID NO: 2418549 - RNA, 19 nt, Homo sapiens
  misc_RNA (1)...(19): siRNA sense strand
cugaaaaguuccaagcuca

SEQ ID NO: 2418550 - RNA, 19 nt, Homo sapiens
  misc_RNA (1)...(19): siRNA sense strand
acagcauggaccugagcua

SEQ ID NO: 2418551 - RNA, 19 nt, Homo sapiens
  misc_RNA (1)...(19): siRNA sense strand
ugaacaugcccaagggaac

SEQ ID NO: 2418552 - RNA, 19 nt, Homo sapiens
  misc_RNA (1)...(19): siRNA sense strand
aagaaguuccggugggacu

SEQ ID NO: 2418553 - RNA, 19 nt, Homo sapiens
  misc_RNA (1)...(19): siRNA sense strand
cuacaaaagacaaggaaaa

SEQ ID NO: 2418554 - RNA, 19 nt, Homo sapiens
  misc_RNA (1)...(19): siRNA sense strand
aagcauuggaggaggauaa

SEQ ID NO: 2418555 - RNA, 19 nt, Homo sapiens
  misc_RNA (1)...(19): siRNA sense strand
ggaacugagaagaaggaaa

SEQ ID NO: 2418556 - RNA, 19 nt, Homo sapiens
  misc_RNA (1)...(19): siRNA sense strand
ggggaaagugucagagaaa

SEQ ID NO: 2418557 - RNA, 19 nt, Homo sapiens
  misc_RNA (1)...(19): siRNA sense strand
cgaaaaugacagagaguau

SEQ ID NO: 2418558 - RNA, 19 nt, Homo sapiens
  misc_RNA (1)...(19): siRNA sense strand
ccauaaguuuagaugcaaa

SEQ ID NO: 2418559 - RNA, 19 nt, Homo sapiens
  misc_RNA (1)...(19): siRNA sense strand
agauaaacccuuaaagaca

SEQ ID NO: 2418560 - RNA, 19 nt, Homo sapiens
  misc_RNA (1)...(19): siRNA sense strand
ccaagaacgagaaggaaga

SEQ ID NO: 2418561 - RNA, 19 nt, Homo sapiens
  misc_RNA (1)...(19): siRNA sense strand
gagaaaagcaacagugaau

SEQ ID NO: 2418562 - RNA, 19 nt, Homo sapiens
  misc_RNA (1)...(19): siRNA sense strand
gagaagaaauucaaggagu

SEQ ID NO: 2418563 - RNA, 19 nt, Homo sapiens
  misc_RNA (1)...(19): siRNA sense strand
gagaaggaagacaaggaaa

SEQ ID NO: 2418564 - RNA, 19 nt, Homo sapiens
  misc_RNA (1)...(19): siRNA sense strand
cuaaagaaacagaucacaa

SEQ ID NO: 2418565 - RNA, 19 nt, Homo sapiens
  misc_RNA (1)...(19): siRNA sense strand
agaaggaagacaaggaaaa

SEQ ID NO: 2418566 - RNA, 19 nt, Homo sapiens
  misc_RNA (1)...(19): siRNA sense strand
ggugaugugcagagaguga

SEQ ID NO: 2418567 - RNA, 19 nt, Homo sapiens
  misc_RNA (1)...(19): siRNA sense strand
ggaaaagaauaaagagaag

SEQ ID NO: 2418568 - RNA, 19 nt, Homo sapiens
  misc_RNA (1)...(19): siRNA sense strand
aucagaauauuguggguaa

SEQ ID NO: 2418569 - RNA, 19 nt, Homo sapiens
  misc_RNA (1)...(19): siRNA sense strand
agaacgagaaggaagacaa

SEQ ID NO: 2418570 - RNA, 19 nt, Homo sapiens
  misc_RNA (1)...(19): siRNA sense strand
caaaagaaaacgaggcaga

SEQ ID NO: 2418571 - RNA, 19 nt, Homo sapiens
  misc_RNA (1)...(19): siRNA sense strand
gggaaagaggcauguccaa

SEQ ID NO: 2418572 - RNA, 19 nt, Homo sapiens
  misc_RNA (1)...(19): siRNA sense strand
agacauugacuacgaggaa

SEQ ID NO: 2418573 - RNA, 19 nt, Homo sapiens
  misc_RNA (1)...(19): siRNA sense strand
aaugcuaggccuaaagaaa

SEQ ID NO: 2418574 - RNA, 19 nt, Homo sapiens
  misc_RNA (1)...(19): siRNA sense strand
gaaugugaagaaagacaaa

SEQ ID NO: 2418575 - RNA, 19 nt, Homo sapiens
  misc_RNA (1)...(19): siRNA sense strand
ccaccuaacagacgaggaa

SEQ ID NO: 2418576 - RNA, 19 nt, Homo sapiens
  misc_RNA (1)...(19): siRNA sense strand
cgacuguggaaguaacaaa

SEQ ID NO: 2418577 - RNA, 19 nt, Homo sapiens
  misc_RNA (1)...(19): siRNA sense strand
ugggauuacuggaagaaaa

SEQ ID NO: 2418578 - RNA, 19 nt, Homo sapiens
  misc_RNA (1)...(19): siRNA sense strand
aaaaugugcccgagaaaua

SEQ ID NO: 2418579 - RNA, 19 nt, Homo sapiens
  misc_RNA (1)...(19): siRNA sense strand
acauagaagacauugacua

SEQ ID NO: 2418580 - RNA, 19 nt, Homo sapiens
  misc_RNA (1)...(19): siRNA sense strand
cuggagugaugaugaguau

SEQ ID NO: 2418581 - RNA, 19 nt, Homo sapiens
  misc_RNA (1)...(19): siRNA sense strand
gcaugggauuacuggaaga

SEQ ID NO: 2418582 - RNA, 19 nt, Homo sapiens
  misc_RNA (1)...(19): siRNA sense strand
agaaaauacagcugaggaa

SEQ ID NO: 2418583 - RNA, 19 nt, Homo sapiens
  misc_RNA (1)...(19): siRNA sense strand
ggguaaugcuaggccuaaa

SEQ ID NO: 2418584 - RNA, 19 nt, Homo sapiens
  misc_RNA (1)...(19): siRNA sense strand
cggaaaacacugacaaaga

SEQ ID NO: 2418585 - RNA, 19 nt, Homo sapiens
  misc_RNA (1)...(19): siRNA sense strand
gugaaugugaagaaagaca

SEQ ID NO: 2418586 - RNA, 19 nt, Homo sapiens
  misc_RNA (1)...(19): siRNA sense strand
acauuggaacugagaagaa

SEQ ID NO: 2418587 - RNA, 19 nt, Homo sapiens
  misc_RNA (1)...(19): siRNA sense strand
uugacuacgaggaaggaaa

SEQ ID NO: 2418588 - RNA, 19 nt, Homo sapiens
  misc_RNA (1)...(19): siRNA sense strand
gggcuugcaugaagaggau

SEQ ID NO: 2418589 - RNA, 19 nt, Homo sapiens
  misc_RNA (1)...(19): siRNA sense strand
caaaagacaaggaaaagaa

SEQ ID NO: 2418590 - RNA, 19 nt, Homo sapiens
  misc_RNA (1)...(19): siRNA sense strand
ugaaagcauuggaggagga

SEQ ID NO: 2418591 - RNA, 19 nt, Homo sapiens
  misc_RNA (1)...(19): siRNA sense strand
caucagaaugccaagaaga

SEQ ID NO: 2418592 - RNA, 19 nt, Homo sapiens
  misc_RNA (1)...(19): siRNA sense strand
cugucgaccuagaccauaa

SEQ ID NO: 2418593 - RNA, 19 nt, Homo sapiens
  misc_RNA (1)...(19): siRNA sense strand
agaaaaugugcccgagaaa

SEQ ID NO: 2418594 - RNA, 19 nt, Homo sapiens
  misc_RNA (1)...(19): siRNA sense strand
cugcaggcuuggaguugaa

SEQ ID NO: 2418595 - RNA, 19 nt, Homo sapiens
  misc_RNA (1)...(19): siRNA sense strand
uugugagagugaagccaaa

SEQ ID NO: 2418596 - RNA, 19 nt, Homo sapiens
  misc_RNA (1)...(19): siRNA sense strand
ccaagaagaucguggccac

SEQ ID NO: 2418597 - RNA, 19 nt, Homo sapiens
  misc_RNA (1)...(19): siRNA sense strand
cgagaaggaagacaaggaa

SEQ ID NO: 2418598 - RNA, 19 nt, Homo sapiens
  misc_RNA (1)...(19): siRNA sense strand
gugagguccaggaggaaaa

SEQ ID NO: 2418599 - RNA, 19 nt, Homo sapiens
  misc_RNA (1)...(19): siRNA sense strand
uuuacgcccuuuagagaaa

SEQ ID NO: 2418600 - RNA, 19 nt, Homo sapiens
  misc_RNA (1)...(19): siRNA sense strand
gggaaagugucagagaaaa

SEQ ID NO: 2418601 - RNA, 19 nt, Homo sapiens
  misc_RNA (1)...(19): siRNA sense strand
ggaaagugucagagaaaag

SEQ ID NO: 2418602 - RNA, 19 nt, Homo sapiens
  misc_RNA (1)...(19): siRNA sense strand
uggacaccacaaagggaaa

SEQ ID NO: 2418603 - RNA, 19 nt, Homo sapiens
  misc_RNA (1)...(19): siRNA sense strand
gggauuacuggaagaaaau

SEQ ID NO: 2418604 - RNA, 19 nt, Homo sapiens
  misc_RNA (1)...(19): siRNA sense strand
agagagugauugagguucu

SEQ ID NO: 2418605 - RNA, 19 nt, Homo sapiens
  misc_RNA (1)...(19): siRNA sense strand
gagugguucugcugggaca

SEQ ID NO: 2418606 - RNA, 19 nt, Homo sapiens
  misc_RNA (1)...(19): siRNA sense strand
gagggaacccaaaagaaaa

SEQ ID NO: 2418607 - RNA, 19 nt, Homo sapiens
  misc_RNA (1)...(19): siRNA sense strand
agagugaagccaaagaaga

SEQ ID NO: 2418608 - RNA, 19 nt, Homo sapiens
  misc_RNA (1)...(19): siRNA sense strand
aggaggauaauuugaguga

SEQ ID NO: 2418609 - RNA, 19 nt, Homo sapiens
  misc_RNA (1)...(19): siRNA sense strand
cugcaugggauuacuggaa

SEQ ID NO: 2418610 - RNA, 19 nt, Homo sapiens
  misc_RNA (1)...(19): siRNA sense strand
ccgagaaauacaccuguua

SEQ ID NO: 2418611 - RNA, 19 nt, Homo sapiens
  misc_RNA (1)...(19): siRNA sense strand
gcaugaagaggauggaucu

SEQ ID NO: 2418612 - RNA, 19 nt, Homo sapiens
  misc_RNA (1)...(19): siRNA sense strand
gggauagauuaaaggcaaa

SEQ ID NO: 2418613 - RNA, 19 nt, Homo sapiens
  misc_RNA (1)...(19): siRNA sense strand
aggaauuaauagaggauga

SEQ ID NO: 2418614 - RNA, 19 nt, Homo sapiens
  misc_RNA (1)...(19): siRNA sense strand
aggaugacuuugagguaaa

SEQ ID NO: 2418615 - RNA, 19 nt, Homo sapiens
  misc_RNA (1)...(19): siRNA sense strand
ucuaagacaagaagagaaa

SEQ ID NO: 2418616 - RNA, 19 nt, Homo sapiens
  misc_RNA (1)...(19): siRNA sense strand
uguagaagaagaugggaaa

SEQ ID NO: 2418617 - RNA, 19 nt, Homo sapiens
  misc_RNA (1)...(19): siRNA sense strand
agagaagaagaaagagaaa

SEQ ID NO: 2418618 - RNA, 19 nt, Homo sapiens
  misc_RNA (1)...(19): siRNA sense strand
acccaaaggagguguaaua

SEQ ID NO: 2418619 - RNA, 19 nt, Homo sapiens
  misc_RNA (1)...(19): siRNA sense strand
ugggauagauuaaaggcaa

SEQ ID NO: 2418620 - RNA, 19 nt, Homo sapiens
  misc_RNA (1)...(19): siRNA sense strand
gugcagaagagauggucaa

SEQ ID NO: 2418621 - RNA, 19 nt, Homo sapiens
  misc_RNA (1)...(19): siRNA sense strand
ggguaaaggaaauauagaa

SEQ ID NO: 2418622 - RNA, 19 nt, Homo sapiens
  misc_RNA (1)...(19): siRNA sense strand
gagucaauguagaagaaga

SEQ ID NO: 2418623 - RNA, 19 nt, Homo sapiens
  misc_RNA (1)...(19): siRNA sense strand
aaagaaaccaagaaggcua

SEQ ID NO: 2418624 - RNA, 19 nt, Homo sapiens
  misc_RNA (1)...(19): siRNA sense strand
ggaugaaggaagagcaagu

SEQ ID NO: 2418625 - RNA, 19 nt, Homo sapiens
  misc_RNA (1)...(19): siRNA sense strand
aggagaggaugaaggaaga

SEQ ID NO: 2418626 - RNA, 19 nt, Homo sapiens
  misc_RNA (1)...(19): siRNA sense strand
cgauggaagugaagaugau

SEQ ID NO: 2418627 - RNA, 19 nt, Homo sapiens
  misc_RNA (1)...(19): siRNA sense strand
uggugaaaugugugacaaa

SEQ ID NO: 2418628 - RNA, 19 nt, Homo sapiens
  misc_RNA (1)...(19): siRNA sense strand
aagaugaagaggaggauga

SEQ ID NO: 2418629 - RNA, 19 nt, Homo sapiens
  misc_RNA (1)...(19): siRNA sense strand
aggaagagcuuuuggacau

SEQ ID NO: 2418630 - RNA, 19 nt, Homo sapiens
  misc_RNA (1)...(19): siRNA sense strand
ccggcaaagagaacggaaa

SEQ ID NO: 2418631 - RNA, 19 nt, Homo sapiens
  misc_RNA (1)...(19): siRNA sense strand
ucacaaggguucugaaaau

SEQ ID NO: 2418632 - RNA, 19 nt, Homo sapiens
  misc_RNA (1)...(19): siRNA sense strand
ugguagagcuucaggugau

SEQ ID NO: 2418633 - RNA, 19 nt, Homo sapiens
  misc_RNA (1)...(19): siRNA sense strand
gaggaugaaggaagagcaa

SEQ ID NO: 2418634 - RNA, 19 nt, Homo sapiens
  misc_RNA (1)...(19): siRNA sense strand
uugcaaaggacccgagauu

SEQ ID NO: 2418635 - RNA, 19 nt, Homo sapiens
  misc_RNA (1)...(19): siRNA sense strand
uagugaggaugaugauaaa

SEQ ID NO: 2418636 - RNA, 19 nt, Homo sapiens
  misc_RNA (1)...(19): siRNA sense strand
aauuggaaggaaaggauaa

SEQ ID NO: 2418637 - RNA, 19 nt, Homo sapiens
  misc_RNA (1)...(19): siRNA sense strand
augaagaggaggaugaaga

SEQ ID NO: 2418638 - RNA, 19 nt, Homo sapiens
  misc_RNA (1)...(19): siRNA sense strand
augaagaggaggaugaaga

SEQ ID NO: 2418639 - RNA, 19 nt, Homo sapiens
  misc_RNA (1)...(19): siRNA sense strand
agaugaggauagugaggau

SEQ ID NO: 2418640 - RNA, 19 nt, Homo sapiens
  misc_RNA (1)...(19): siRNA sense strand
gcugaagaaguuaaacaaa

SEQ ID NO: 2418641 - RNA, 19 nt, Homo sapiens
  misc_RNA (1)...(19): siRNA sense strand
ccauagcacuacagaggau

SEQ ID NO: 2418642 - RNA, 19 nt, Homo sapiens
  misc_RNA (1)...(19): siRNA sense strand
acggaaagaacaagaacuu

SEQ ID NO: 2418643 - RNA, 19 nt, Homo sapiens
  misc_RNA (1)...(19): siRNA sense strand
gugaaaugugugacaaaga

SEQ ID NO: 2418644 - RNA, 19 nt, Homo sapiens
  misc_RNA (1)...(19): siRNA sense strand
gguuuauaccagaugauau

SEQ ID NO: 2418645 - RNA, 19 nt, Homo sapiens
  misc_RNA (1)...(19): siRNA sense strand
agacugaucaugaaagaau

SEQ ID NO: 2418646 - RNA, 19 nt, Homo sapiens
  misc_RNA (1)...(19): siRNA sense strand
auguagaagaagaugggaa

SEQ ID NO: 2418647 - RNA, 19 nt, Homo sapiens
  misc_RNA (1)...(19): siRNA sense strand
aagagaacggaaagaacaa

SEQ ID NO: 2418648 - RNA, 19 nt, Homo sapiens
  misc_RNA (1)...(19): siRNA sense strand
cugaaauggcuuugcuuau

SEQ ID NO: 2418649 - RNA, 19 nt, Homo sapiens
  misc_RNA (1)...(19): siRNA sense strand
aaagagagugagauugaaa

SEQ ID NO: 2418650 - RNA, 19 nt, Homo sapiens
  misc_RNA (1)...(19): siRNA sense strand
augaugaagaggaggauga

SEQ ID NO: 2418651 - RNA, 19 nt, Homo sapiens
  misc_RNA (1)...(19): siRNA sense strand
ggaugaagaugaagaggag

SEQ ID NO: 2418652 - RNA, 19 nt, Homo sapiens
  misc_RNA (1)...(19): siRNA sense strand
aauuacaaguguugguaga

SEQ ID NO: 2418653 - RNA, 19 nt, Homo sapiens
  misc_RNA (1)...(19): siRNA sense strand
acaaaggacauuagacuca

SEQ ID NO: 2418654 - RNA, 19 nt, Homo sapiens
  misc_RNA (1)...(19): siRNA sense strand
cauaaugacaagagacagu

SEQ ID NO: 2418655 - RNA, 19 nt, Homo sapiens
  misc_RNA (1)...(19): siRNA sense strand
uguaacauggacugggaua

SEQ ID NO: 2418656 - RNA, 19 nt, Homo sapiens
  misc_RNA (1)...(19): siRNA sense strand
aagaggagcuacaagguga

SEQ ID NO: 2418657 - RNA, 19 nt, Homo sapiens
  misc_RNA (1)...(19): siRNA sense strand
uuagagaagaagaaagaga

SEQ ID NO: 2418658 - RNA, 19 nt, Homo sapiens
  misc_RNA (1)...(19): siRNA sense strand
cccauuagccauagcacua

SEQ ID NO: 2418659 - RNA, 19 nt, Homo sapiens
  misc_RNA (1)...(19): siRNA sense strand
gacccgagauuuugggaaa

SEQ ID NO: 2418660 - RNA, 19 nt, Homo sapiens
  misc_RNA (1)...(19): siRNA sense strand
agucaauguagaagaagau

SEQ ID NO: 2418661 - RNA, 19 nt, Homo sapiens
  misc_RNA (1)...(19): siRNA sense strand
ccagaagaagaaauugaaa

SEQ ID NO: 2418662 - RNA, 19 nt, Homo sapiens
  misc_RNA (1)...(19): siRNA sense strand
gacaagaagagaaaugcaa

SEQ ID NO: 2418663 - RNA, 19 nt, Homo sapiens
  misc_RNA (1)...(19): siRNA sense strand
guucugaagaugaagauga

SEQ ID NO: 2418664 - RNA, 19 nt, Homo sapiens
  misc_RNA (1)...(19): siRNA sense strand
agauuuguuuccagaagaa

SEQ ID NO: 2418665 - RNA, 19 nt, Homo sapiens
  misc_RNA (1)...(19): siRNA sense strand
gcuuggagagaauuagaua

SEQ ID NO: 2418666 - RNA, 19 nt, Homo sapiens
  misc_RNA (1)...(19): siRNA sense strand
ggaugaugaagaacaaauu

SEQ ID NO: 2418667 - RNA, 19 nt, Homo sapiens
  misc_RNA (1)...(19): siRNA sense strand
gacaagagauuucgagcca

SEQ ID NO: 2418668 - RNA, 19 nt, Homo sapiens
  misc_RNA (1)...(19): siRNA sense strand
auagugaggaugaugauaa

SEQ ID NO: 2418669 - RNA, 19 nt, Homo sapiens
  misc_RNA (1)...(19): siRNA sense strand
agagcaaguucaaggacca

SEQ ID NO: 2418670 - RNA, 19 nt, Homo sapiens
  misc_RNA (1)...(19): siRNA sense strand
uggagucaauguagaagaa

SEQ ID NO: 2418671 - RNA, 19 nt, Homo sapiens
  misc_RNA (1)...(19): siRNA sense strand
gguaaauguuaacgaugca

SEQ ID NO: 2418672 - RNA, 19 nt, Homo sapiens
  misc_RNA (1)...(19): siRNA sense strand
gggaggaagaagagcugaa

SEQ ID NO: 2418673 - RNA, 19 nt, Homo sapiens
  misc_RNA (1)...(19): siRNA sense strand
accaggaguuggaggacaa

SEQ ID NO: 2418674 - RNA, 19 nt, Homo sapiens
  misc_RNA (1)...(19): siRNA sense strand
cgaucugcccugugagcua

SEQ ID NO: 2418675 - RNA, 19 nt, Homo sapiens
  misc_RNA (1)...(19): siRNA sense strand
ggaugaagcucuuacagga

SEQ ID NO: 2418676 - RNA, 19 nt, Homo sapiens
  misc_RNA (1)...(19): siRNA sense strand
ucuuacaggaggagaauga

SEQ ID NO: 2418677 - RNA, 19 nt, Homo sapiens
  misc_RNA (1)...(19): siRNA sense strand
cagaacagcuacacggcuu

SEQ ID NO: 2418678 - RNA, 19 nt, Homo sapiens
  misc_RNA (1)...(19): siRNA sense strand
gcagaaaggaugaagcucu

SEQ ID NO: 2418679 - RNA, 19 nt, Homo sapiens
  misc_RNA (1)...(19): siRNA sense strand
aagaaggcugagauggaua

SEQ ID NO: 2418680 - RNA, 19 nt, Homo sapiens
  misc_RNA (1)...(19): siRNA sense strand
ccaucaacaagcuggaaga

SEQ ID NO: 2418681 - RNA, 19 nt, Homo sapiens
  misc_RNA (1)...(19): siRNA sense strand
gcuaagaaacccuaccgua

SEQ ID NO: 2418682 - RNA, 19 nt, Homo sapiens
  misc_RNA (1)...(19): siRNA sense strand
ccgaagagagugagcuuuu

SEQ ID NO: 2418683 - RNA, 19 nt, Homo sapiens
  misc_RNA (1)...(19): siRNA sense strand
gggagcugcguuuggaaau

SEQ ID NO: 2418684 - RNA, 19 nt, Homo sapiens
  misc_RNA (1)...(19): siRNA sense strand
aggaagagcgccagagccu

SEQ ID NO: 2418685 - RNA, 19 nt, Homo sapiens
  misc_RNA (1)...(19): siRNA sense strand
ccgcaggguaauagaguuc

SEQ ID NO: 2418686 - RNA, 19 nt, Homo sapiens
  misc_RNA (1)...(19): siRNA sense strand
aggaagaagagcugaaccu

SEQ ID NO: 2418687 - RNA, 19 nt, Homo sapiens
  misc_RNA (1)...(19): siRNA sense strand
ccaacaagcugcuggaugc

SEQ ID NO: 2418688 - RNA, 19 nt, Homo sapiens
  misc_RNA (1)...(19): siRNA sense strand
gggcauuuguggaccguac

SEQ ID NO: 2418689 - RNA, 19 nt, Homo sapiens
  misc_RNA (1)...(19): siRNA sense strand
ggaagacgcuggacuggga

SEQ ID NO: 2418690 - RNA, 19 nt, Homo sapiens
  misc_RNA (1)...(19): siRNA sense strand
cgggagcugcguuuggaaa

SEQ ID NO: 2418691 - RNA, 19 nt, Homo sapiens
  misc_RNA (1)...(19): siRNA sense strand
ccaaaauaaguguggucaa

SEQ ID NO: 2418692 - RNA, 19 nt, Homo sapiens
  misc_RNA (1)...(19): siRNA sense strand
accacaaggucaaggccua

SEQ ID NO: 2418693 - RNA, 19 nt, Homo sapiens
  misc_RNA (1)...(19): siRNA sense strand
gcaggaagacgcagggaag

SEQ ID NO: 2418694 - RNA, 19 nt, Homo sapiens
  misc_RNA (1)...(19): siRNA sense strand
gggaaggaggcaaccaaaa

SEQ ID NO: 2418695 - RNA, 19 nt, Homo sapiens
  misc_RNA (1)...(19): siRNA sense strand
gggccucgaaccagcuaaa

SEQ ID NO: 2418696 - RNA, 19 nt, Homo sapiens
  misc_RNA (1)...(19): siRNA sense strand
uggucaagguggugggcag

SEQ ID NO: 2418697 - RNA, 19 nt, Homo sapiens
  misc_RNA (1)...(19): siRNA sense strand
cggaaggaauacagccgaa

SEQ ID NO: 2418698 - RNA, 19 nt, Homo sapiens
  misc_RNA (1)...(19): siRNA sense strand
cuguaguccuguagagcca

SEQ ID NO: 2418699 - RNA, 19 nt, Homo sapiens
  misc_RNA (1)...(19): siRNA sense strand
gaacaggcccacugagcca

SEQ ID NO: 2418700 - RNA, 19 nt, Homo sapiens
  misc_RNA (1)...(19): siRNA sense strand
ccacacagccucugggaag

SEQ ID NO: 2418701 - RNA, 19 nt, Homo sapiens
  misc_RNA (1)...(19): siRNA sense strand
ggacaauggcuacuccaga

SEQ ID NO: 2418702 - RNA, 19 nt, Homo sapiens
  misc_RNA (1)...(19): siRNA sense strand
ccaugaugaucgcuggcau

SEQ ID NO: 2418703 - RNA, 19 nt, Homo sapiens
  misc_RNA (1)...(19): siRNA sense strand
agaggaagcuacagcgcua

SEQ ID NO: 2418704 - RNA, 19 nt, Homo sapiens
  misc_RNA (1)...(19): siRNA sense strand
cauucuaccugguggccaa

SEQ ID NO: 2418705 - RNA, 19 nt, Homo sapiens
  misc_RNA (1)...(19): siRNA sense strand
cugaucuggaguagagaaa

SEQ ID NO: 2418706 - RNA, 19 nt, Homo sapiens
  misc_RNA (1)...(19): siRNA sense strand
cgccaagaggaguggagua

SEQ ID NO: 2418707 - RNA, 19 nt, Homo sapiens
  misc_RNA (1)...(19): siRNA sense strand
ugguauuaauucugcaaga

SEQ ID NO: 2418708 - RNA, 19 nt, Homo sapiens
  misc_RNA (1)...(19): siRNA sense strand
ggacaaagaaauucagccu

SEQ ID NO: 2418709 - RNA, 19 nt, Homo sapiens
  misc_RNA (1)...(19): siRNA sense strand
acaucgaaauggaggagca

SEQ ID NO: 2418710 - RNA, 19 nt, Homo sapiens
  misc_RNA (1)...(19): siRNA sense strand
cagaagugagucagagcuu

SEQ ID NO: 2418711 - RNA, 19 nt, Homo sapiens
  misc_RNA (1)...(19): siRNA sense strand
gcgagugugcaguguggaa

SEQ ID NO: 2418712 - RNA, 19 nt, Homo sapiens
  misc_RNA (1)...(19): siRNA sense strand
gguuuagacaacaugagaa

SEQ ID NO: 2418713 - RNA, 19 nt, Homo sapiens
  misc_RNA (1)...(19): siRNA sense strand
uuggaguacuacaggaaca

SEQ ID NO: 2418714 - RNA, 19 nt, Homo sapiens
  misc_RNA (1)...(19): siRNA sense strand
caccauucagguagauaaa

SEQ ID NO: 2418715 - RNA, 19 nt, Homo sapiens
  misc_RNA (1)...(19): siRNA sense strand
ccuggaaagcugauguaga

SEQ ID NO: 2418716 - RNA, 19 nt, Homo sapiens
  misc_RNA (1)...(19): siRNA sense strand
gagcaaaagaacuagacau

SEQ ID NO: 2418717 - RNA, 19 nt, Homo sapiens
  misc_RNA (1)...(19): siRNA sense strand
gaauagagaucucaagccu

SEQ ID NO: 2418718 - RNA, 19 nt, Homo sapiens
  misc_RNA (1)...(19): siRNA sense strand
aaacaggaguggacggaug

SEQ ID NO: 2418719 - RNA, 19 nt, Homo sapiens
  misc_RNA (1)...(19): siRNA sense strand
aagaacaaagaguagacua

SEQ ID NO: 2418720 - RNA, 19 nt, Homo sapiens
  misc_RNA (1)...(19): siRNA sense strand
acaaagaaauucagccuag

SEQ ID NO: 2418721 - RNA, 19 nt, Homo sapiens
  misc_RNA (1)...(19): siRNA sense strand
ggugcagauuccauggaga

SEQ ID NO: 2418722 - RNA, 19 nt, Homo sapiens
  misc_RNA (1)...(19): siRNA sense strand
ccaguaucgaagacagcua

SEQ ID NO: 2418723 - RNA, 19 nt, Homo sapiens
  misc_RNA (1)...(19): siRNA sense strand
guggacggaugaaaggcaa

SEQ ID NO: 2418724 - RNA, 19 nt, Homo sapiens
  misc_RNA (1)...(19): siRNA sense strand
agcaaaagaacuagacauu

SEQ ID NO: 2418725 - RNA, 19 nt, Homo sapiens
  misc_RNA (1)...(19): siRNA sense strand
uggaguacacacaguggua

SEQ ID NO: 2418726 - RNA, 19 nt, Homo sapiens
  misc_RNA (1)...(19): siRNA sense strand
gguagcaagaagccagaau

SEQ ID NO: 2418727 - RNA, 19 nt, Homo sapiens
  misc_RNA (1)...(19): siRNA sense strand
gcacaaaacaggaguggac

SEQ ID NO: 2418728 - RNA, 19 nt, Homo sapiens
  misc_RNA (1)...(19): siRNA sense strand
ugccguagccacugaggaa

SEQ ID NO: 2418729 - RNA, 19 nt, Homo sapiens
  misc_RNA (1)...(19): siRNA sense strand
uagagaaaucaaugggcca

SEQ ID NO: 2418730 - RNA, 19 nt, Homo sapiens
  misc_RNA (1)...(19): siRNA sense strand
gcaagaagccagaaugcac

SEQ ID NO: 2418731 - RNA, 19 nt, Homo sapiens
  misc_RNA (1)...(19): siRNA sense strand
cuuaagacaccgagacaag

SEQ ID NO: 2418732 - RNA, 19 nt, Homo sapiens
  misc_RNA (1)...(19): siRNA sense strand
ucggaaggaauuucagaau

SEQ ID NO: 2418733 - RNA, 19 nt, Homo sapiens
  misc_RNA (1)...(19): siRNA sense strand
guuuagacaacaugagaac

SEQ ID NO: 2418734 - RNA, 19 nt, Homo sapiens
  misc_RNA (1)...(19): siRNA sense strand
aagaaagcuacaucgaaau

SEQ ID NO: 2418735 - RNA, 19 nt, Homo sapiens
  misc_RNA (1)...(19): siRNA sense strand
gugauagaccucagcgagu

SEQ ID NO: 2418736 - RNA, 19 nt, Homo sapiens
  misc_RNA (1)...(19): siRNA sense strand
gccaaaacugagcaagaaa

SEQ ID NO: 2418737 - RNA, 19 nt, Homo sapiens
  misc_RNA (1)...(19): siRNA sense strand
ugccaagagaugacccaaa

SEQ ID NO: 2418738 - RNA, 19 nt, Homo sapiens
  misc_RNA (1)...(19): siRNA sense strand
cuguggagcaaaagaacua

SEQ ID NO: 2418739 - RNA, 19 nt, Homo sapiens
  misc_RNA (1)...(19): siRNA sense strand
aagcugauguagaaggcca

SEQ ID NO: 2418740 - RNA, 19 nt, Homo sapiens
  misc_RNA (1)...(19): siRNA sense strand
acgaugaccaugaggacaa

SEQ ID NO: 2418741 - RNA, 19 nt, Homo sapiens
  misc_RNA (1)...(19): siRNA sense strand
cugcagaugaacuggaaaa

SEQ ID NO: 2418742 - RNA, 19 nt, Homo sapiens
  misc_RNA (1)...(19): siRNA sense strand
aggacaaugacaagaugaa

SEQ ID NO: 2418743 - RNA, 19 nt, Homo sapiens
  misc_RNA (1)...(19): siRNA sense strand
gcaugaagaagaacggcau

SEQ ID NO: 2418744 - RNA, 19 nt, Homo sapiens
  misc_RNA (1)...(19): siRNA sense strand
aagaagaacggcauggaga

SEQ ID NO: 2418745 - RNA, 19 nt, Homo sapiens
  misc_RNA (1)...(19): siRNA sense strand
cggcagaugaugacgacga

SEQ ID NO: 2418746 - RNA, 19 nt, Homo sapiens
  misc_RNA (1)...(19): siRNA sense strand
aggaggagauccaggccau

SEQ ID NO: 2418747 - RNA, 19 nt, Homo sapiens
  misc_RNA (1)...(19): siRNA sense strand
acgagaaccuggaccgcau

SEQ ID NO: 2418748 - RNA, 19 nt, Homo sapiens
  misc_RNA (1)...(19): siRNA sense strand
agacaagaaaggcagccaa

SEQ ID NO: 2418749 - RNA, 19 nt, Homo sapiens
  misc_RNA (1)...(19): siRNA sense strand
agaagaacggcauggagau

SEQ ID NO: 2418750 - RNA, 19 nt, Homo sapiens
  misc_RNA (1)...(19): siRNA sense strand
gcauggacccugagcgucu

SEQ ID NO: 2418751 - RNA, 19 nt, Homo sapiens
  misc_RNA (1)...(19): siRNA sense strand
ccaagcagcccaaggagga

SEQ ID NO: 2418752 - RNA, 19 nt, Homo sapiens
  misc_RNA (1)...(19): siRNA sense strand
ugagaguggcagcggcaau

SEQ ID NO: 2418753 - RNA, 19 nt, Homo sapiens
  misc_RNA (1)...(19): siRNA sense strand
gagcgagacaagaaaggca

SEQ ID NO: 2418754 - RNA, 19 nt, Homo sapiens
  misc_RNA (1)...(19): siRNA sense strand
ccagccaggacgagaggau

SEQ ID NO: 2418755 - RNA, 19 nt, Homo sapiens
  misc_RNA (1)...(19): siRNA sense strand
cggagaagcugcagcggau

SEQ ID NO: 2418756 - RNA, 19 nt, Homo sapiens
  misc_RNA (1)...(19): siRNA sense strand
caaucaagcuccugcagca

SEQ ID NO: 2418757 - RNA, 19 nt, Homo sapiens
  misc_RNA (1)...(19): siRNA sense strand
cggugucagcugagagcau

SEQ ID NO: 2418758 - RNA, 19 nt, Homo sapiens
  misc_RNA (1)...(19): siRNA sense strand
ucgucuacguggaggccuu

SEQ ID NO: 2418759 - RNA, 19 nt, Homo sapiens
  misc_RNA (1)...(19): siRNA sense strand
cuggugacguggagggcaa

SEQ ID NO: 2418760 - RNA, 19 nt, Homo sapiens
  misc_RNA (1)...(19): siRNA sense strand
aagaggagcuggagggcga

SEQ ID NO: 2418761 - RNA, 19 nt, Homo sapiens
  misc_RNA (1)...(19): siRNA sense strand
ccauggacgugguggucga

SEQ ID NO: 2418762 - RNA, 19 nt, Homo sapiens
  misc_RNA (1)...(19): siRNA sense strand
gaccauagagugagggaga

SEQ ID NO: 2418763 - RNA, 19 nt, Homo sapiens
  misc_RNA (1)...(19): siRNA sense strand
aggaucuggaagagagaaa

SEQ ID NO: 2418764 - RNA, 19 nt, Homo sapiens
  misc_RNA (1)...(19): siRNA sense strand
ggaucuuauugaaggacau

SEQ ID NO: 2418765 - RNA, 19 nt, Homo sapiens
  misc_RNA (1)...(19): siRNA sense strand
agggagaagcugaugcauu

SEQ ID NO: 2418766 - RNA, 19 nt, Homo sapiens
  misc_RNA (1)...(19): siRNA sense strand
ugaccggaauuaugggaca

SEQ ID NO: 2418767 - RNA, 19 nt, Homo sapiens
  misc_RNA (1)...(19): siRNA sense strand
cagugagaagaaugaguau

SEQ ID NO: 2418768 - RNA, 19 nt, Homo sapiens
  misc_RNA (1)...(19): siRNA sense strand
cuggaagagagaaagaaca

SEQ ID NO: 2418769 - RNA, 19 nt, Homo sapiens
  misc_RNA (1)...(19): siRNA sense strand
caauauuguccuugugaac

SEQ ID NO: 2418770 - RNA, 19 nt, Homo sapiens
  misc_RNA (1)...(19): siRNA sense strand
gagugaauggaugaagaaa

SEQ ID NO: 2418771 - RNA, 19 nt, Homo sapiens
  misc_RNA (1)...(19): siRNA sense strand
agugaagagaggcgagaaa

SEQ ID NO: 2418772 - RNA, 19 nt, Homo sapiens
  misc_RNA (1)...(19): siRNA sense strand
ccauguuggcaaugaggaa

SEQ ID NO: 2418773 - RNA, 19 nt, Homo sapiens
  misc_RNA (1)...(19): siRNA sense strand
gaacauaucaagaccgguu

SEQ ID NO: 2418774 - RNA, 19 nt, Homo sapiens
  misc_RNA (1)...(19): siRNA sense strand
ugguauaugacaaaugcaa

SEQ ID NO: 2418775 - RNA, 19 nt, Homo sapiens
  misc_RNA (1)...(19): siRNA sense strand
aggagacagugcaggacau

SEQ ID NO: 2418776 - RNA, 19 nt, Homo sapiens
  misc_RNA (1)...(19): siRNA sense strand
ggaaggagcaccaggccua

SEQ ID NO: 2418777 - RNA, 19 nt, Homo sapiens
  misc_RNA (1)...(19): siRNA sense strand
agguggaggagaacagaaa

SEQ ID NO: 2418778 - RNA, 19 nt, Homo sapiens
  misc_RNA (1)...(19): siRNA sense strand
guggaggagaacagaaaca

SEQ ID NO: 2418779 - RNA, 19 nt, Homo sapiens
  misc_RNA (1)...(19): siRNA sense strand
ucuuuaagcuguuggccau

SEQ ID NO: 2418780 - RNA, 19 nt, Homo sapiens
  misc_RNA (1)...(19): siRNA sense strand
gcaaacaguuggugguguc

SEQ ID NO: 2418781 - RNA, 19 nt, Homo sapiens
  misc_RNA (1)...(19): siRNA sense strand
gagaguaccggaaggagca

SEQ ID NO: 2418782 - RNA, 19 nt, Homo sapiens
  misc_RNA (1)...(19): siRNA sense strand
gagcaaguaaggaggggaa

SEQ ID NO: 2418783 - RNA, 19 nt, Homo sapiens
  misc_RNA (1)...(19): siRNA sense strand
accaagaagaacagaaaca

SEQ ID NO: 2418784 - RNA, 19 nt, Homo sapiens
  misc_RNA (1)...(19): siRNA sense strand
aagaaauggaagaacguga

SEQ ID NO: 2418785 - RNA, 19 nt, Homo sapiens
  misc_RNA (1)...(19): siRNA sense strand
augaggaagacguggauga

SEQ ID NO: 2418786 - RNA, 19 nt, Homo sapiens
  misc_RNA (1)...(19): siRNA sense strand
gcaaguaaggaggggaaaa

SEQ ID NO: 2418787 - RNA, 19 nt, Homo sapiens
  misc_RNA (1)...(19): siRNA sense strand
acguggaugaugaggaaga

SEQ ID NO: 2418788 - RNA, 19 nt, Homo sapiens
  misc_RNA (1)...(19): siRNA sense strand
ugguuuauuggcaaagaaa

SEQ ID NO: 2418789 - RNA, 19 nt, Homo sapiens
  misc_RNA (1)...(19): siRNA sense strand
cagaaaauaaccaagaaga

SEQ ID NO: 2418790 - RNA, 19 nt, Homo sapiens
  misc_RNA (1)...(19): siRNA sense strand
aggugugguuuauuggcaa

SEQ ID NO: 2418791 - RNA, 19 nt, Homo sapiens
  misc_RNA (1)...(19): siRNA sense strand
aagaaaagcacaaggaaug

SEQ ID NO: 2418792 - RNA, 19 nt, Homo sapiens
  misc_RNA (1)...(19): siRNA sense strand
cugaagaagugcugggaga

SEQ ID NO: 2418793 - RNA, 19 nt, Homo sapiens
  misc_RNA (1)...(19): siRNA sense strand
agauguauugggaaagaaa

SEQ ID NO: 2418794 - RNA, 19 nt, Homo sapiens
  misc_RNA (1)...(19): siRNA sense strand
aauuauaaagccugccaaa

SEQ ID NO: 2418795 - RNA, 19 nt, Homo sapiens
  misc_RNA (1)...(19): siRNA sense strand
gugagauggcagaggagga

SEQ ID NO: 2418796 - RNA, 19 nt, Homo sapiens
  misc_RNA (1)...(19): siRNA sense strand
ugucagaauaacagccaau

SEQ ID NO: 2418797 - RNA, 19 nt, Homo sapiens
  misc_RNA (1)...(19): siRNA sense strand
caacgaaauuauaaagccu

SEQ ID NO: 2418798 - RNA, 19 nt, Homo sapiens
  misc_RNA (1)...(19): siRNA sense strand
augaaaggagagagaaagu

SEQ ID NO: 2418799 - RNA, 19 nt, Homo sapiens
  misc_RNA (1)...(19): siRNA sense strand
cagaauuggaaaagagcau

SEQ ID NO: 2418800 - RNA, 19 nt, Homo sapiens
  misc_RNA (1)...(19): siRNA sense strand
gggaaggagaagaucgcca

SEQ ID NO: 2418801 - RNA, 19 nt, Homo sapiens
  misc_RNA (1)...(19): siRNA sense strand
aaaagaugcaugaggaaga

SEQ ID NO: 2418802 - RNA, 19 nt, Homo sapiens
  misc_RNA (1)...(19): siRNA sense strand
aggaggaacacaggauaaa

SEQ ID NO: 2418803 - RNA, 19 nt, Homo sapiens
  misc_RNA (1)...(19): siRNA sense strand
ccaaaauccagcagauaga

SEQ ID NO: 2418804 - RNA, 19 nt, Homo sapiens
  misc_RNA (1)...(19): siRNA sense strand
aaagugaaacggagcguca

SEQ ID NO: 2418805 - RNA, 19 nt, Homo sapiens
  misc_RNA (1)...(19): siRNA sense strand
ugugcuggaauguaagaaa

SEQ ID NO: 2418806 - RNA, 19 nt, Homo sapiens
  misc_RNA (1)...(19): siRNA sense strand
uaagaaaagugaugcgcga

SEQ ID NO: 2418807 - RNA, 19 nt, Homo sapiens
  misc_RNA (1)...(19): siRNA sense strand
ugaagaagugcugggagaa

SEQ ID NO: 2418808 - RNA, 19 nt, Homo sapiens
  misc_RNA (1)...(19): siRNA sense strand
agauggcagaggaggaaca

SEQ ID NO: 2418809 - RNA, 19 nt, Homo sapiens
  misc_RNA (1)...(19): siRNA sense strand
cagaggaggaacacaggau

SEQ ID NO: 2418810 - RNA, 19 nt, Homo sapiens
  misc_RNA (1)...(19): siRNA sense strand
uggaaauggccgaugggau

SEQ ID NO: 2418811 - RNA, 19 nt, Homo sapiens
  misc_RNA (1)...(19): siRNA sense strand
ggauugaaguggaagaccu

SEQ ID NO: 2418812 - RNA, 19 nt, Homo sapiens
  misc_RNA (1)...(19): siRNA sense strand
acucagagagcgagaagca

SEQ ID NO: 2418813 - RNA, 19 nt, Homo sapiens
  misc_RNA (1)...(19): siRNA sense strand
uuagacaaggugauggaaa

SEQ ID NO: 2418814 - RNA, 19 nt, Homo sapiens
  misc_RNA (1)...(19): siRNA sense strand
ccuuugagauggaagccua

SEQ ID NO: 2418815 - RNA, 19 nt, Homo sapiens
  misc_RNA (1)...(19): siRNA sense strand
ggucuggggaggagagcua

SEQ ID NO: 2418816 - RNA, 19 nt, Homo sapiens
  misc_RNA (1)...(19): siRNA sense strand
gacaagagcccgagagcug

SEQ ID NO: 2418817 - RNA, 19 nt, Homo sapiens
  misc_RNA (1)...(19): siRNA sense strand
gcaacgagaugucgggcgu

SEQ ID NO: 2418818 - RNA, 19 nt, Homo sapiens
  misc_RNA (1)...(19): siRNA sense strand
agggagaguccacggugua

SEQ ID NO: 2418819 - RNA, 19 nt, Homo sapiens
  misc_RNA (1)...(19): siRNA sense strand
ccuauagacccgugggcgu

SEQ ID NO: 2418820 - RNA, 19 nt, Homo sapiens
  misc_RNA (1)...(19): siRNA sense strand
ccaugaaacaacaggacau

SEQ ID NO: 2418821 - RNA, 19 nt, Homo sapiens
  misc_RNA (1)...(19): siRNA sense strand
aagccaaacaagacggaca

SEQ ID NO: 2418822 - RNA, 19 nt, Homo sapiens
  misc_RNA (1)...(19): siRNA sense strand
ccugaaaagccauggacuu

SEQ ID NO: 2418823 - RNA, 19 nt, Homo sapiens
  misc_RNA (1)...(19): siRNA sense strand
acaaguuucaugugugcaa

SEQ ID NO: 2418824 - RNA, 19 nt, Homo sapiens
  misc_RNA (1)...(19): siRNA sense strand
cugcugaaacugagacaga

SEQ ID NO: 2418825 - RNA, 19 nt, Homo sapiens
  misc_RNA (1)...(19): siRNA sense strand
ugguggacgcugaguacaa

SEQ ID NO: 2418826 - RNA, 19 nt, Homo sapiens
  misc_RNA (1)...(19): siRNA sense strand
uugucuacacuaagcaaua

SEQ ID NO: 2418827 - RNA, 19 nt, Homo sapiens
  misc_RNA (1)...(19): siRNA sense strand
ccauggaggcgcagaugca

SEQ ID NO: 2418828 - RNA, 19 nt, Homo sapiens
  misc_RNA (1)...(19): siRNA sense strand
guaaacaggaaaaggggaa

SEQ ID NO: 2418829 - RNA, 19 nt, Homo sapiens
  misc_RNA (1)...(19): siRNA sense strand
uggauugaucucagagcaa

SEQ ID NO: 2418830 - RNA, 19 nt, Homo sapiens
  misc_RNA (1)...(19): siRNA sense strand
cuugcaggaaguaggaaua

SEQ ID NO: 2418831 - RNA, 19 nt, Homo sapiens
  misc_RNA (1)...(19): siRNA sense strand
agauucagcaacagaagaa

SEQ ID NO: 2418832 - RNA, 19 nt, Homo sapiens
  misc_RNA (1)...(19): siRNA sense strand
gcaaauggaaaucucggaa

SEQ ID NO: 2418833 - RNA, 19 nt, Homo sapiens
  misc_RNA (1)...(19): siRNA sense strand
ggagaaaaccaaaaggacu

SEQ ID NO: 2418834 - RNA, 19 nt, Homo sapiens
  misc_RNA (1)...(19): siRNA sense strand
gagaaagucaauugcgcca

SEQ ID NO: 2418835 - RNA, 19 nt, Homo sapiens
  misc_RNA (1)...(19): siRNA sense strand
aggaaguaggaauagaauu

SEQ ID NO: 2418836 - RNA, 19 nt, Homo sapiens
  misc_RNA (1)...(19): siRNA sense strand
gcauggaauugacaggcau

SEQ ID NO: 2418837 - RNA, 19 nt, Homo sapiens
  misc_RNA (1)...(19): siRNA sense strand
cauggaauugacaggcaua

SEQ ID NO: 2418838 - RNA, 19 nt, Homo sapiens
  misc_RNA (1)...(19): siRNA sense strand
ccuugcaggaaguaggaau

SEQ ID NO: 2418839 - RNA, 19 nt, Homo sapiens
  misc_RNA (1)...(19): siRNA sense strand
ggaaugaugggaagcacca

SEQ ID NO: 2418840 - RNA, 19 nt, Homo sapiens
  misc_RNA (1)...(19): siRNA sense strand
gugaagaccaccuggaucu

SEQ ID NO: 2418841 - RNA, 19 nt, Homo sapiens
  misc_RNA (1)...(19): siRNA sense strand
ggggacaaccagaaaguuu

SEQ ID NO: 2418842 - RNA, 19 nt, Homo sapiens
  misc_RNA (1)...(19): siRNA sense strand
acgagaauuuaguggauau

SEQ ID NO: 2418843 - RNA, 19 nt, Homo sapiens
  misc_RNA (1)...(19): siRNA sense strand
gguuaaauguacuacgaga

SEQ ID NO: 2418844 - RNA, 19 nt, Homo sapiens
  misc_RNA (1)...(19): siRNA sense strand
gugcauauucagagacaca

SEQ ID NO: 2418845 - RNA, 19 nt, Homo sapiens
  misc_RNA (1)...(19): siRNA sense strand
guuaaauguacuacgagaa

SEQ ID NO: 2418846 - RNA, 19 nt, Homo sapiens
  misc_RNA (1)...(19): siRNA sense strand
ccaggaugucagagaagua

SEQ ID NO: 2418847 - RNA, 19 nt, Homo sapiens
  misc_RNA (1)...(19): siRNA sense strand
uguccaagcaggaaaggaa

SEQ ID NO: 2418848 - RNA, 19 nt, Homo sapiens
  misc_RNA (1)...(19): siRNA sense strand
cuauuugauugguggccua

SEQ ID NO: 2418849 - RNA, 19 nt, Homo sapiens
  misc_RNA (1)...(19): siRNA sense strand
ccuucuugguauagacaca

SEQ ID NO: 2418850 - RNA, 19 nt, Homo sapiens
  misc_RNA (1)...(19): siRNA sense strand
uuuguugacuggaggagaa

SEQ ID NO: 2418851 - RNA, 19 nt, Homo sapiens
  misc_RNA (1)...(19): siRNA sense strand
aguacgaguucauaguaau

SEQ ID NO: 2418852 - RNA, 19 nt, Homo sapiens
  misc_RNA (1)...(19): siRNA sense strand
ccaacgaguacgaguucau

SEQ ID NO: 2418853 - RNA, 19 nt, Homo sapiens
  misc_RNA (1)...(19): siRNA sense strand
gagcuauagagaagaccuu

SEQ ID NO: 2418854 - RNA, 19 nt, Homo sapiens
  misc_RNA (1)...(19): siRNA sense strand
guccaagcaggaaaggaaa

SEQ ID NO: 2418855 - RNA, 19 nt, Homo sapiens
  misc_RNA (1)...(19): siRNA sense strand
auucagagacacauaguga

SEQ ID NO: 2418856 - RNA, 19 nt, Homo sapiens
  misc_RNA (1)...(19): siRNA sense strand
uauuggaggaacaaacaaa

SEQ ID NO: 2418857 - RNA, 19 nt, Homo sapiens
  misc_RNA (1)...(19): siRNA sense strand
agacuguccaagcaggaaa

SEQ ID NO: 2418858 - RNA, 19 nt, Homo sapiens
  misc_RNA (1)...(19): siRNA sense strand
agagacacauagugaugau

SEQ ID NO: 2418859 - RNA, 19 nt, Homo sapiens
  misc_RNA (1)...(19): siRNA sense strand
augaaaagacagacacauu

SEQ ID NO: 2418860 - RNA, 19 nt, Homo sapiens
  misc_RNA (1)...(19): siRNA sense strand
uauuauuugugcugguaca

SEQ ID NO: 2418861 - RNA, 19 nt, Homo sapiens
  misc_RNA (1)...(19): siRNA sense strand
gaucuuaaucaucuggaca

SEQ ID NO: 2418862 - RNA, 19 nt, Homo sapiens
  misc_RNA (1)...(19): siRNA sense strand
gaacagaaaugugaaguua

SEQ ID NO: 2418863 - RNA, 19 nt, Homo sapiens
  misc_RNA (1)...(19): siRNA sense strand
agaggaaaugacagagaaa

SEQ ID NO: 2418864 - RNA, 19 nt, Homo sapiens
  misc_RNA (1)...(19): siRNA sense strand
caaaggagggcaugugaua

SEQ ID NO: 2418865 - RNA, 19 nt, Homo sapiens
  misc_RNA (1)...(19): siRNA sense strand
aggaauaugaccaggaaga

SEQ ID NO: 2418866 - RNA, 19 nt, Homo sapiens
  misc_RNA (1)...(19): siRNA sense strand
ccugaagauuccuggcuua

SEQ ID NO: 2418867 - RNA, 19 nt, Homo sapiens
  misc_RNA (1)...(19): siRNA sense strand
aguugauguccaugagaaa

SEQ ID NO: 2418868 - RNA, 19 nt, Homo sapiens
  misc_RNA (1)...(19): siRNA sense strand
caauagaaccuuugggaag

SEQ ID NO: 2418869 - RNA, 19 nt, Homo sapiens
  misc_RNA (1)...(19): siRNA sense strand
aggacuaaacagauacaaa

SEQ ID NO: 2418870 - RNA, 19 nt, Homo sapiens
  misc_RNA (1)...(19): siRNA sense strand
auauggagcagaaaggaaa

SEQ ID NO: 2418871 - RNA, 19 nt, Homo sapiens
  misc_RNA (1)...(19): siRNA sense strand
cucaagcagaagagagaua

SEQ ID NO: 2418872 - RNA, 19 nt, Homo sapiens
  misc_RNA (1)...(19): siRNA sense strand
aagaagaagacgaggugga

SEQ ID NO: 2418873 - RNA, 19 nt, Homo sapiens
  misc_RNA (1)...(19): siRNA sense strand
agguagaggaaaugacaga

SEQ ID NO: 2418874 - RNA, 19 nt, Homo sapiens
  misc_RNA (1)...(19): siRNA sense strand
augaugaagaagaaagcaa

SEQ ID NO: 2418875 - RNA, 19 nt, Homo sapiens
  misc_RNA (1)...(19): siRNA sense strand
agagauaaguugaugucca

SEQ ID NO: 2418876 - RNA, 19 nt, Homo sapiens
  misc_RNA (1)...(19): siRNA sense strand
caggaagaagaaaggaaga

SEQ ID NO: 2418877 - RNA, 19 nt, Homo sapiens
  misc_RNA (1)...(19): siRNA sense strand
cuggggagguagaggaaau

SEQ ID NO: 2418878 - RNA, 19 nt, Homo sapiens
  misc_RNA (1)...(19): siRNA sense strand
aaaugacagcagaggagaa

SEQ ID NO: 2418879 - RNA, 19 nt, Homo sapiens
  misc_RNA (1)...(19): siRNA sense strand
aagaaagcaaauugaccua

SEQ ID NO: 2418880 - RNA, 19 nt, Homo sapiens
  misc_RNA (1)...(19): siRNA sense strand
aguacuuggaacagaagaa

SEQ ID NO: 2418881 - RNA, 19 nt, Homo sapiens
  misc_RNA (1)...(19): siRNA sense strand
gaagaagaaaggaagagga

SEQ ID NO: 2418882 - RNA, 19 nt, Homo sapiens
  misc_RNA (1)...(19): siRNA sense strand
agaagaaaggaagaggaaa

SEQ ID NO: 2418883 - RNA, 19 nt, Homo sapiens
  misc_RNA (1)...(19): siRNA sense strand
agaucaauuucaagaagca

SEQ ID NO: 2418884 - RNA, 19 nt, Homo sapiens
  misc_RNA (1)...(19): siRNA sense strand
aguggguaguggagagcau

SEQ ID NO: 2418885 - RNA, 19 nt, Homo sapiens
  misc_RNA (1)...(19): siRNA sense strand
ucuuggacuuuguggaaca

SEQ ID NO: 2418886 - RNA, 19 nt, Homo sapiens
  misc_RNA (1)...(19): siRNA sense strand
cggaagaagaagacgaggu

SEQ ID NO: 2418887 - RNA, 19 nt, Homo sapiens
  misc_RNA (1)...(19): siRNA sense strand
aauauggagcagaaaggaa

SEQ ID NO: 2418888 - RNA, 19 nt, Homo sapiens
  misc_RNA (1)...(19): siRNA sense strand
uugaacacgaagagaugaa

SEQ ID NO: 2418889 - RNA, 19 nt, Homo sapiens
  misc_RNA (1)...(19): siRNA sense strand
uugaaggaccaauagcaaa

SEQ ID NO: 2418890 - RNA, 19 nt, Homo sapiens
  misc_RNA (1)...(19): siRNA sense strand
aaacauuacuaaagaggag

SEQ ID NO: 2418891 - RNA, 19 nt, Homo sapiens
  misc_RNA (1)...(19): siRNA sense strand
gcccagagccggugauuuu

SEQ ID NO: 2418892 - RNA, 19 nt, Homo sapiens
  misc_RNA (1)...(19): siRNA sense strand
ucaagagagaaauggugua

SEQ ID NO: 2418893 - RNA, 19 nt, Homo sapiens
  misc_RNA (1)...(19): siRNA sense strand
ccaaggggauggugaacau

SEQ ID NO: 2418894 - RNA, 19 nt, Homo sapiens
  misc_RNA (1)...(19): siRNA sense strand
gaagaaaaguggaaagguc

SEQ ID NO: 2418895 - RNA, 19 nt, Homo sapiens
  misc_RNA (1)...(19): siRNA sense strand
acuuggaacagaagaacuu

SEQ ID NO: 2418896 - RNA, 19 nt, Homo sapiens
  misc_RNA (1)...(19): siRNA sense strand
ucaauagaaccuuugggaa

SEQ ID NO: 2418897 - RNA, 19 nt, Homo sapiens
  misc_RNA (1)...(19): siRNA sense strand
acagaaaugugaaguuaac

SEQ ID NO: 2418898 - RNA, 19 nt, Homo sapiens
  misc_RNA (1)...(19): siRNA sense strand
guguauuaccugacugcuu

SEQ ID NO: 2418899 - RNA, 19 nt, Homo sapiens
  misc_RNA (1)...(19): siRNA sense strand
gaacacgaagagaugaaaa

SEQ ID NO: 2418900 - RNA, 19 nt, Homo sapiens
  misc_RNA (1)...(19): siRNA sense strand
accaggaagaagaaaggaa

SEQ ID NO: 2418901 - RNA, 19 nt, Homo sapiens
  misc_RNA (1)...(19): siRNA sense strand
ugacagcagaggagaagca

SEQ ID NO: 2418902 - RNA, 19 nt, Homo sapiens
  misc_RNA (1)...(19): siRNA sense strand
augugaaguuaacugcaaa

SEQ ID NO: 2418903 - RNA, 19 nt, Homo sapiens
  misc_RNA (1)...(19): siRNA sense strand
aaugugaaguuaacugcaa

SEQ ID NO: 2418904 - RNA, 19 nt, Homo sapiens
  misc_RNA (1)...(19): siRNA sense strand
agaugaaaauccugaggga

SEQ ID NO: 2418905 - RNA, 19 nt, Homo sapiens
  misc_RNA (1)...(19): siRNA sense strand
caaaagaggaauaugacca

SEQ ID NO: 2418906 - RNA, 19 nt, Homo sapiens
  misc_RNA (1)...(19): siRNA sense strand
ugagaaaggauaugaggac

SEQ ID NO: 2418907 - RNA, 19 nt, Homo sapiens
  misc_RNA (1)...(19): siRNA sense strand
aggaaaugacagagaaacc

SEQ ID NO: 2418908 - RNA, 19 nt, Homo sapiens
  misc_RNA (1)...(19): siRNA sense strand
acagcagaggagaagcaaa

SEQ ID NO: 2418909 - RNA, 19 nt, Homo sapiens
  misc_RNA (1)...(19): siRNA sense strand
uggaaaugucuaagaaagu

SEQ ID NO: 2418910 - RNA, 19 nt, Homo sapiens
  misc_RNA (1)...(19): siRNA sense strand
agaaaaugccagagaucuu

SEQ ID NO: 2418911 - RNA, 19 nt, Homo sapiens
  misc_RNA (1)...(19): siRNA sense strand
acgccagagacuuggaaau

SEQ ID NO: 2418912 - RNA, 19 nt, Homo sapiens
  misc_RNA (1)...(19): siRNA sense strand
cuuggaaaugucuaagaaa

SEQ ID NO: 2418913 - RNA, 19 nt, Homo sapiens
  misc_RNA (1)...(19): siRNA sense strand
cggaggucccagcggaaau

SEQ ID NO: 2418914 - RNA, 19 nt, Homo sapiens
  misc_RNA (1)...(19): siRNA sense strand
ucgcaggagcccuaggauu

SEQ ID NO: 2418915 - RNA, 19 nt, Homo sapiens
  misc_RNA (1)...(19): siRNA sense strand
uaaagaggaucguggccca

SEQ ID NO: 2418916 - RNA, 19 nt, Homo sapiens
  misc_RNA (1)...(19): siRNA sense strand
cagaagacuuguccggagu

SEQ ID NO: 2418917 - RNA, 19 nt, Homo sapiens
  misc_RNA (1)...(19): siRNA sense strand
ccaaggaaggagagcugga

SEQ ID NO: 2418918 - RNA, 19 nt, Homo sapiens
  misc_RNA (1)...(19): siRNA sense strand
ucucaagauuggaagcaca

SEQ ID NO: 2418919 - RNA, 19 nt, Homo sapiens
  misc_RNA (1)...(19): siRNA sense strand
ccacauugcucauuggccu

SEQ ID NO: 2418920 - RNA, 19 nt, Homo sapiens
  misc_RNA (1)...(19): siRNA sense strand
ccugcucgcugguggucaa

SEQ ID NO: 2418921 - RNA, 19 nt, Homo sapiens
  misc_RNA (1)...(19): siRNA sense strand
gguuuaggucugagaagau

SEQ ID NO: 2418922 - RNA, 19 nt, Homo sapiens
  misc_RNA (1)...(19): siRNA sense strand
uguuguuccuggagggauu

SEQ ID NO: 2418923 - RNA, 19 nt, Homo sapiens
  misc_RNA (1)...(19): siRNA sense strand
acacugagcgagaggcaga

SEQ ID NO: 2418924 - RNA, 19 nt, Homo sapiens
  misc_RNA (1)...(19): siRNA sense strand
cagaacauuuugaggguga

SEQ ID NO: 2418925 - RNA, 19 nt, Homo sapiens
  misc_RNA (1)...(19): siRNA sense strand
agauguuccgaguggcaaa

SEQ ID NO: 2418926 - RNA, 19 nt, Homo sapiens
  misc_RNA (1)...(19): siRNA sense strand
ggagauguuccgaguggca

SEQ ID NO: 2418927 - RNA, 19 nt, Homo sapiens
  misc_RNA (1)...(19): siRNA sense strand
ucaaagaggagcuggaccu

SEQ ID NO: 2418928 - RNA, 19 nt, Homo sapiens
  misc_RNA (1)...(19): siRNA sense strand
guauaauccuccugcucca

SEQ ID NO: 2418929 - RNA, 19 nt, Homo sapiens
  misc_RNA (1)...(19): siRNA sense strand
acuuugaugcugugcagua

SEQ ID NO: 2418930 - RNA, 19 nt, Homo sapiens
  misc_RNA (1)...(19): siRNA sense strand
aggaggagaugaagggcaa

SEQ ID NO: 2418931 - RNA, 19 nt, Homo sapiens
  misc_RNA (1)...(19): siRNA sense strand
cuuagaagagagacgcaaa

SEQ ID NO: 2418932 - RNA, 19 nt, Homo sapiens
  misc_RNA (1)...(19): siRNA sense strand
agaugaagggcaagggcca

SEQ ID NO: 2418933 - RNA, 19 nt, Homo sapiens
  misc_RNA (1)...(19): siRNA sense strand
uguggagagaggagaaaga

SEQ ID NO: 2418934 - RNA, 19 nt, Homo sapiens
  misc_RNA (1)...(19): siRNA sense strand
agguguggagagaggagaa

SEQ ID NO: 2418935 - RNA, 19 nt, Homo sapiens
  misc_RNA (1)...(19): siRNA sense strand
gguguggagagaggagaaa

SEQ ID NO: 2418936 - RNA, 19 nt, Homo sapiens
  misc_RNA (1)...(19): siRNA sense strand
gccuauaucaagaaggaau

SEQ ID NO: 2418937 - RNA, 19 nt, Homo sapiens
  misc_RNA (1)...(19): siRNA sense strand
gacaagaaauauaacccua

SEQ ID NO: 2418938 - RNA, 19 nt, Homo sapiens
  misc_RNA (1)...(19): siRNA sense strand
acaauauagagaaggacau

SEQ ID NO: 2418939 - RNA, 19 nt, Homo sapiens
  misc_RNA (1)...(19): siRNA sense strand
ccuauaucaagaaggaauu

SEQ ID NO: 2418940 - RNA, 19 nt, Homo sapiens
  misc_RNA (1)...(19): siRNA sense strand
acgucacacacgagacaaa

SEQ ID NO: 2418941 - RNA, 19 nt, Homo sapiens
  misc_RNA (1)...(19): siRNA sense strand
aggccauggagaaguacaa

SEQ ID NO: 2418942 - RNA, 19 nt, Homo sapiens
  misc_RNA (1)...(19): siRNA sense strand
caaguaaacugaagcguga

SEQ ID NO: 2418943 - RNA, 19 nt, Homo sapiens
  misc_RNA (1)...(19): siRNA sense strand
caucaaacguuaugccaga

SEQ ID NO: 2418944 - RNA, 19 nt, Homo sapiens
  misc_RNA (1)...(19): siRNA sense strand
gaguuuauugagagaacau

SEQ ID NO: 2418945 - RNA, 19 nt, Homo sapiens
  misc_RNA (1)...(19): siRNA sense strand
gguuucugugagagacaaa

SEQ ID NO: 2418946 - RNA, 19 nt, Homo sapiens
  misc_RNA (1)...(19): siRNA sense strand
acaaggaggacuuccggaa

SEQ ID NO: 2418947 - RNA, 19 nt, Homo sapiens
  misc_RNA (1)...(19): siRNA sense strand
aagugaaaugccugaccaa

SEQ ID NO: 2418948 - RNA, 19 nt, Homo sapiens
  misc_RNA (1)...(19): siRNA sense strand
cugaguuuauugagagaac

SEQ ID NO: 2418949 - RNA, 19 nt, Homo sapiens
  misc_RNA (1)...(19): siRNA sense strand
gacucgacucggaggguuu

SEQ ID NO: 2418950 - RNA, 19 nt, Homo sapiens
  misc_RNA (1)...(19): siRNA sense strand
acaagaacauuaaaggaug

SEQ ID NO: 2418951 - RNA, 19 nt, Homo sapiens
  misc_RNA (1)...(19): siRNA sense strand
augggaacgcagagcgaaa

SEQ ID NO: 2418952 - RNA, 19 nt, Homo sapiens
  misc_RNA (1)...(19): siRNA sense strand
cggauaaaccggagaacaa

SEQ ID NO: 2418953 - RNA, 19 nt, Homo sapiens
  misc_RNA (1)...(19): siRNA sense strand
uggcaaagguggaugggaa

SEQ ID NO: 2418954 - RNA, 19 nt, Homo sapiens
  misc_RNA (1)...(19): siRNA sense strand
aaacaaagagagagaugaa

SEQ ID NO: 2418955 - RNA, 19 nt, Homo sapiens
  misc_RNA (1)...(19): siRNA sense strand
gguuaaagacugggacaaa

SEQ ID NO: 2418956 - RNA, 19 nt, Homo sapiens
  misc_RNA (1)...(19): siRNA sense strand
cugaaggcauggaaggaaa

SEQ ID NO: 2418957 - RNA, 19 nt, Homo sapiens
  misc_RNA (1)...(19): siRNA sense strand
gaugaaacaaagagagaga

SEQ ID NO: 2418958 - RNA, 19 nt, Homo sapiens
  misc_RNA (1)...(19): siRNA sense strand
caucaguacuaaugggauu

SEQ ID NO: 2418959 - RNA, 19 nt, Homo sapiens
  misc_RNA (1)...(19): siRNA sense strand
caacaaugccaucgagaau

SEQ ID NO: 2418960 - RNA, 19 nt, Homo sapiens
  misc_RNA (1)...(19): siRNA sense strand
gagaauuacaucagggaga

SEQ ID NO: 2418961 - RNA, 19 nt, Homo sapiens
  misc_RNA (1)...(19): siRNA sense strand
gguaaugagaagaggagau

SEQ ID NO: 2418962 - RNA, 19 nt, Homo sapiens
  misc_RNA (1)...(19): siRNA sense strand
gagcaauauuccagcccua

SEQ ID NO: 2418963 - RNA, 19 nt, Homo sapiens
  misc_RNA (1)...(19): siRNA sense strand
ccacaaauggagugauaca

SEQ ID NO: 2418964 - RNA, 19 nt, Homo sapiens
  misc_RNA (1)...(19): siRNA sense strand
gggaaaaguucuggaaauu

SEQ ID NO: 2418965 - RNA, 19 nt, Homo sapiens
  misc_RNA (1)...(19): siRNA sense strand
uggcaaaugauguggcaau

SEQ ID NO: 2418966 - RNA, 19 nt, Homo sapiens
  misc_RNA (1)...(19): siRNA sense strand
agccacaaauggagugaua

SEQ ID NO: 2418967 - RNA, 19 nt, Homo sapiens
  misc_RNA (1)...(19): siRNA sense strand
ccacagaagacaacugcaa

SEQ ID NO: 2418968 - RNA, 19 nt, Homo sapiens
  misc_RNA (1)...(19): siRNA sense strand
gugaugaaacaaagagaga

SEQ ID NO: 2418969 - RNA, 19 nt, Homo sapiens
  misc_RNA (1)...(19): siRNA sense strand
gcacauacagaguggcaga

SEQ ID NO: 2418970 - RNA, 19 nt, Homo sapiens
  misc_RNA (1)...(19): siRNA sense strand
guacaugccaagaaggcua

SEQ ID NO: 2418971 - RNA, 19 nt, Homo sapiens
  misc_RNA (1)...(19): siRNA sense strand
cuacauuggagauggauuu

SEQ ID NO: 2418972 - RNA, 19 nt, Homo sapiens
  misc_RNA (1)...(19): siRNA sense strand
ggauaauaaagcugcucaa

SEQ ID NO: 2418973 - RNA, 19 nt, Homo sapiens
  misc_RNA (1)...(19): siRNA sense strand
agacccaacaagagugaaa

SEQ ID NO: 2418974 - RNA, 19 nt, Homo sapiens
  misc_RNA (1)...(19): siRNA sense strand
agaaugagugugagugcaa

SEQ ID NO: 2418975 - RNA, 19 nt, Homo sapiens
  misc_RNA (1)...(19): siRNA sense strand
ugggaaaaguucuggaaau

SEQ ID NO: 2418976 - RNA, 19 nt, Homo sapiens
  misc_RNA (1)...(19): siRNA sense strand
cugccaaggcugacuguaa

SEQ ID NO: 2418977 - RNA, 19 nt, Homo sapiens
  misc_RNA (1)...(19): siRNA sense strand
gcgauaaggacaaucaaau

SEQ ID NO: 2418978 - RNA, 19 nt, Homo sapiens
  misc_RNA (1)...(19): siRNA sense strand
ggaguaaaccaaagggugu

SEQ ID NO: 2418979 - RNA, 19 nt, Homo sapiens
  misc_RNA (1)...(19): siRNA sense strand
caaccaagguacagcaagu

SEQ ID NO: 2418980 - RNA, 19 nt, Homo sapiens
  misc_RNA (1)...(19): siRNA sense strand
gggagagacugcucggaga

SEQ ID NO: 2418981 - RNA, 19 nt, Homo sapiens
  misc_RNA (1)...(19): siRNA sense strand
uuaaagacugggacaaaua

SEQ ID NO: 2418982 - RNA, 19 nt, Homo sapiens
  misc_RNA (1)...(19): siRNA sense strand
ugacggaagugcuggccua

SEQ ID NO: 2418983 - RNA, 19 nt, Homo sapiens
  misc_RNA (1)...(19): siRNA sense strand
gcagcugccagaagggaua

SEQ ID NO: 2418984 - RNA, 19 nt, Homo sapiens
  misc_RNA (1)...(19): siRNA sense strand
gggaaaucuucaacagcga

SEQ ID NO: 2418985 - RNA, 19 nt, Homo sapiens
  misc_RNA (1)...(19): siRNA sense strand
ggacaaucaaauaaagcuu

SEQ ID NO: 2418986 - RNA, 19 nt, Homo sapiens
  misc_RNA (1)...(19): siRNA sense strand
ggguuaaagacugggacaa

SEQ ID NO: 2418987 - RNA, 19 nt, Homo sapiens
  misc_RNA (1)...(19): siRNA sense strand
caggcaagaagaugugaua

SEQ ID NO: 2418988 - RNA, 19 nt, Homo sapiens
  misc_RNA (1)...(19): siRNA sense strand
uugcaaagcaggauaugaa

SEQ ID NO: 2418989 - RNA, 19 nt, Homo sapiens
  misc_RNA (1)...(19): siRNA sense strand
ggcaaagguggaugggaau

SEQ ID NO: 2418990 - RNA, 19 nt, Homo sapiens
  misc_RNA (1)...(19): siRNA sense strand
cuguuuggauggagugaau

SEQ ID NO: 2418991 - RNA, 19 nt, Homo sapiens
  misc_RNA (1)...(19): siRNA sense strand
aaacaaacuggaaugcaaa

SEQ ID NO: 2418992 - RNA, 19 nt, Homo sapiens
  misc_RNA (1)...(19): siRNA sense strand
agucggaagaggacauuaa

SEQ ID NO: 2418993 - RNA, 19 nt, Homo sapiens
  misc_RNA (1)...(19): siRNA sense strand
ccuacaaagucuacagugu

SEQ ID NO: 2418994 - RNA, 19 nt, Homo sapiens
  misc_RNA (1)...(19): siRNA sense strand
gggcagaaugagugugagu

SEQ ID NO: 2418995 - RNA, 19 nt, Homo sapiens
  misc_RNA (1)...(19): siRNA sense strand
gggacaaugcagccacaaa

SEQ ID NO: 2418996 - RNA, 19 nt, Homo sapiens
  misc_RNA (1)...(19): siRNA sense strand
caagaagaugugauaggaa

SEQ ID NO: 2418997 - RNA, 19 nt, Homo sapiens
  misc_RNA (1)...(19): siRNA sense strand
ggacagggaaugggagaga

SEQ ID NO: 2418998 - RNA, 19 nt, Homo sapiens
  misc_RNA (1)...(19): siRNA sense strand
acaacaaggacaagcugaa

SEQ ID NO: 2418999 - RNA, 19 nt, Homo sapiens
  misc_RNA (1)...(19): siRNA sense strand
gcacaguuguacaugccaa

SEQ ID NO: 2419000 - RNA, 19 nt, Homo sapiens
  misc_RNA (1)...(19): siRNA sense strand
agaaagguuacguggguga

SEQ ID NO: 2419001 - RNA, 19 nt, Homo sapiens
  misc_RNA (1)...(19): siRNA sense strand
ccaccuguaaggagaacaa

SEQ ID NO: 2419002 - RNA, 19 nt, Homo sapiens
  misc_RNA (1)...(19): siRNA sense strand
aaaacaaacuggaaugcaa

SEQ ID NO: 2419003 - RNA, 19 nt, Homo sapiens
  misc_RNA (1)...(19): siRNA sense strand
gaucuuuguuagaggaaac

SEQ ID NO: 2419004 - RNA, 19 nt, Homo sapiens
  misc_RNA (1)...(19): siRNA sense strand
gaaacgcagcaguggaauu

SEQ ID NO: 2419005 - RNA, 19 nt, Homo sapiens
  misc_RNA (1)...(19): siRNA sense strand
gcaaagguggaugggaaua

SEQ ID NO: 2419006 - RNA, 19 nt, Homo sapiens
  misc_RNA (1)...(19): siRNA sense strand
agaccugcaccgagggcaa

SEQ ID NO: 2419007 - RNA, 19 nt, Homo sapiens
  misc_RNA (1)...(19): siRNA sense strand
uggaagaaauugagaucac

SEQ ID NO: 2419008 - RNA, 19 nt, Homo sapiens
  misc_RNA (1)...(19): siRNA sense strand
ccacugaagaugaaaacaa

SEQ ID NO: 2419009 - RNA, 19 nt, Homo sapiens
  misc_RNA (1)...(19): siRNA sense strand
uuaccgaggcgauggcaaa

SEQ ID NO: 2419010 - RNA, 19 nt, Homo sapiens
  misc_RNA (1)...(19): siRNA sense strand
cuaugaaggagauggcuuu

SEQ ID NO: 2419011 - RNA, 19 nt, Homo sapiens
  misc_RNA (1)...(19): siRNA sense strand
ugaagaaugaccugcacaa

SEQ ID NO: 2419012 - RNA, 19 nt, Homo sapiens
  misc_RNA (1)...(19): siRNA sense strand
gaugaggaagcucggguua

SEQ ID NO: 2419013 - RNA, 19 nt, Homo sapiens
  misc_RNA (1)...(19): siRNA sense strand
gagaacaacacgugugagu

SEQ ID NO: 2419014 - RNA, 19 nt, Homo sapiens
  misc_RNA (1)...(19): siRNA sense strand
cugcaaacgaggcugggaa

SEQ ID NO: 2419015 - RNA, 19 nt, Homo sapiens
  misc_RNA (1)...(19): siRNA sense strand
ccagaaaauuccagauguu

SEQ ID NO: 2419016 - RNA, 19 nt, Homo sapiens
  misc_RNA (1)...(19): siRNA sense strand
gugcaaauaugaugggccu

SEQ ID NO: 2419017 - RNA, 19 nt, Homo sapiens
  misc_RNA (1)...(19): siRNA sense strand
ugcaauaacaggauagaca

SEQ ID NO: 2419018 - RNA, 19 nt, Homo sapiens
  misc_RNA (1)...(19): siRNA sense strand
guguuugucaagagggcua

SEQ ID NO: 2419019 - RNA, 19 nt, Homo sapiens
  misc_RNA (1)...(19): siRNA sense strand
aaucaaugccugugagauc

SEQ ID NO: 2419020 - RNA, 19 nt, Homo sapiens
  misc_RNA (1)...(19): siRNA sense strand
aggagaaagugcagcugaa

SEQ ID NO: 2419021 - RNA, 19 nt, Homo sapiens
  misc_RNA (1)...(19): siRNA sense strand
cugagcggcuacugggaaa

SEQ ID NO: 2419022 - RNA, 19 nt, Homo sapiens
  misc_RNA (1)...(19): siRNA sense strand
cagcugaagaggaaaguca

SEQ ID NO: 2419023 - RNA, 19 nt, Homo sapiens
  misc_RNA (1)...(19): siRNA sense strand
cccauuuaguacagggauu

SEQ ID NO: 2419024 - RNA, 19 nt, Homo sapiens
  misc_RNA (1)...(19): siRNA sense strand
cuguagugaugguccuaaa

SEQ ID NO: 2419025 - RNA, 19 nt, Homo sapiens
  misc_RNA (1)...(19): siRNA sense strand
gagaaaauaaccagaacau

SEQ ID NO: 2419026 - RNA, 19 nt, Homo sapiens
  misc_RNA (1)...(19): siRNA sense strand
aauuauagucccuggaguu

SEQ ID NO: 2419027 - RNA, 19 nt, Homo sapiens
  misc_RNA (1)...(19): siRNA sense strand
caucauuggagcaggaauc

SEQ ID NO: 2419028 - RNA, 19 nt, Homo sapiens
  misc_RNA (1)...(19): siRNA sense strand
caggaagagauucaaguau

SEQ ID NO: 2419029 - RNA, 19 nt, Homo sapiens
  misc_RNA (1)...(19): siRNA sense strand
ccauuaaugcugaggagcu

SEQ ID NO: 2419030 - RNA, 19 nt, Homo sapiens
  misc_RNA (1)...(19): siRNA sense strand
uuggcuaugugcugacaaa

SEQ ID NO: 2419031 - RNA, 19 nt, Homo sapiens
  misc_RNA (1)...(19): siRNA sense strand
gcugaauugggaacaacua

SEQ ID NO: 2419032 - RNA, 19 nt, Homo sapiens
  misc_RNA (1)...(19): siRNA sense strand
gggaaauguuaacgggagg

SEQ ID NO: 2419033 - RNA, 19 nt, Homo sapiens
  misc_RNA (1)...(19): siRNA sense strand
aguuguaccagaagaagau

SEQ ID NO: 2419034 - RNA, 19 nt, Homo sapiens
  misc_RNA (1)...(19): siRNA sense strand
gcccaggaggacagagaaa

SEQ ID NO: 2419035 - RNA, 19 nt, Homo sapiens
  misc_RNA (1)...(19): siRNA sense strand
aggagguccagaagaacua

SEQ ID NO: 2419036 - RNA, 19 nt, Homo sapiens
  misc_RNA (1)...(19): siRNA sense strand
agaagaacuaugaacacuu

SEQ ID NO: 2419037 - RNA, 19 nt, Homo sapiens
  misc_RNA (1)...(19): siRNA sense strand
aggucaucguccugcauua

SEQ ID NO: 2419038 - RNA, 19 nt, Homo sapiens
  misc_RNA (1)...(19): siRNA sense strand
cuucaucgugcuagagaau

SEQ ID NO: 2419039 - RNA, 19 nt, Homo sapiens
  misc_RNA (1)...(19): siRNA sense strand
gcgccuucaucgugcuaga

SEQ ID NO: 2419040 - RNA, 19 nt, Homo sapiens
  misc_RNA (1)...(19): siRNA sense strand
ucaucgugcuagagaaucu

SEQ ID NO: 2419041 - RNA, 19 nt, Homo sapiens
  misc_RNA (1)...(19): siRNA sense strand
acacaacccucguggggaa

SEQ ID NO: 2419042 - RNA, 19 nt, Homo sapiens
  misc_RNA (1)...(19): siRNA sense strand
ggacauggacgacgggacu

SEQ ID NO: 2419043 - RNA, 19 nt, Homo sapiens
  misc_RNA (1)...(19): siRNA sense strand
gcuucauuguggauggaca

SEQ ID NO: 2419044 - RNA, 19 nt, Homo sapiens
  misc_RNA (1)...(19): siRNA sense strand
cugcauucauggaacaaca

SEQ ID NO: 2419045 - RNA, 19 nt, Homo sapiens
  misc_RNA (1)...(19): siRNA sense strand
cggcuucccucaaggccua

SEQ ID NO: 2419046 - RNA, 19 nt, Homo sapiens
  misc_RNA (1)...(19): siRNA sense strand
gaaggucacuggagggauc

SEQ ID NO: 2419047 - RNA, 19 nt, Homo sapiens
  misc_RNA (1)...(19): siRNA sense strand
ggcucuaccacgauggcaa

SEQ ID NO: 2419048 - RNA, 19 nt, Homo sapiens
  misc_RNA (1)...(19): siRNA sense strand
gggaaguguaagaagcaau

SEQ ID NO: 2419049 - RNA, 19 nt, Homo sapiens
  misc_RNA (1)...(19): siRNA sense strand
ggaacaucuuggugagcga

SEQ ID NO: 2419050 - RNA, 19 nt, Homo sapiens
  misc_RNA (1)...(19): siRNA sense strand
cggacaagcugaaggccca

SEQ ID NO: 2419051 - RNA, 19 nt, Homo sapiens
  misc_RNA (1)...(19): siRNA sense strand
cguucaaccgcaaggacaa

SEQ ID NO: 2419052 - RNA, 19 nt, Homo sapiens
  misc_RNA (1)...(19): siRNA sense strand
uguacaaguguguggucaa

SEQ ID NO: 2419053 - RNA, 19 nt, Homo sapiens
  misc_RNA (1)...(19): siRNA sense strand
agucauuauuggauggcca

SEQ ID NO: 2419054 - RNA, 19 nt, Homo sapiens
  misc_RNA (1)...(19): siRNA sense strand
auucaaacccaaaggacca

SEQ ID NO: 2419055 - RNA, 19 nt, Homo sapiens
  misc_RNA (1)...(19): siRNA sense strand
gggaacagugccaggggaa

SEQ ID NO: 2419056 - RNA, 19 nt, Homo sapiens
  misc_RNA (1)...(19): siRNA sense strand
guuaagaaacacaugcaga

SEQ ID NO: 2419057 - RNA, 19 nt, Homo sapiens
  misc_RNA (1)...(19): siRNA sense strand
gugucaaaugugucaacaa

SEQ ID NO: 2419058 - RNA, 19 nt, Homo sapiens
  misc_RNA (1)...(19): siRNA sense strand
acggugugguggaggugua

SEQ ID NO: 2419059 - RNA, 19 nt, Homo sapiens
  misc_RNA (1)...(19): siRNA sense strand
cuggaggagcugaaggaca

SEQ ID NO: 2419060 - RNA, 19 nt, Homo sapiens
  misc_RNA (1)...(19): siRNA sense strand
ggaguggaacgguggagau

SEQ ID NO: 2419061 - RNA, 19 nt, Homo sapiens
  misc_RNA (1)...(19): siRNA sense strand
gugcagagcagccugaaca

SEQ ID NO: 2419062 - RNA, 19 nt, Homo sapiens
  misc_RNA (1)...(19): siRNA sense strand
agaaacacaugcagaccca

SEQ ID NO: 2419063 - RNA, 19 nt, Homo sapiens
  misc_RNA (1)...(19): siRNA sense strand
ggcaggaggacgaggaaag

SEQ ID NO: 2419064 - RNA, 19 nt, Homo sapiens
  misc_RNA (1)...(19): siRNA sense strand
aggacaaugccgucuacaa

SEQ ID NO: 2419065 - RNA, 19 nt, Homo sapiens
  misc_RNA (1)...(19): siRNA sense strand
uggagggaauggacaauca

SEQ ID NO: 2419066 - RNA, 19 nt, Homo sapiens
  misc_RNA (1)...(19): siRNA sense strand
ucaagugccaagugugcaa

SEQ ID NO: 2419067 - RNA, 19 nt, Homo sapiens
  misc_RNA (1)...(19): siRNA sense strand
gcgggaaguguaagaagca

SEQ ID NO: 2419068 - RNA, 19 nt, Homo sapiens
  misc_RNA (1)...(19): siRNA sense strand
uggaggagcugaaggacac

SEQ ID NO: 2419069 - RNA, 19 nt, Homo sapiens
  misc_RNA (1)...(19): siRNA sense strand
aggaaauagaguugaagaa

SEQ ID NO: 2419070 - RNA, 19 nt, Homo sapiens
  misc_RNA (1)...(19): siRNA sense strand
augaguuacuggagauaaa

SEQ ID NO: 2419071 - RNA, 19 nt, Homo sapiens
  misc_RNA (1)...(19): siRNA sense strand
aggaagaagaagaagaaga

SEQ ID NO: 2419072 - RNA, 19 nt, Homo sapiens
  misc_RNA (1)...(19): siRNA sense strand
ccucaauggccaagcagaa

SEQ ID NO: 2419073 - RNA, 19 nt, Homo sapiens
  misc_RNA (1)...(19): siRNA sense strand
cauuggaagcugagaguga

SEQ ID NO: 2419074 - RNA, 19 nt, Homo sapiens
  misc_RNA (1)...(19): siRNA sense strand
aaagagagacagugggaca

SEQ ID NO: 2419075 - RNA, 19 nt, Homo sapiens
  misc_RNA (1)...(19): siRNA sense strand
uggauauggaagaggaaga

SEQ ID NO: 2419076 - RNA, 19 nt, Homo sapiens
  misc_RNA (1)...(19): siRNA sense strand
aagaagaagaagaagacau

SEQ ID NO: 2419077 - RNA, 19 nt, Homo sapiens
  misc_RNA (1)...(19): siRNA sense strand
ggaucaaagaagccaagaa

SEQ ID NO: 2419078 - RNA, 19 nt, Homo sapiens
  misc_RNA (1)...(19): siRNA sense strand
acagcuuugucaagggaua

SEQ ID NO: 2419079 - RNA, 19 nt, Homo sapiens
  misc_RNA (1)...(19): siRNA sense strand
gcugaaaaguggaaagagu

SEQ ID NO: 2419080 - RNA, 19 nt, Homo sapiens
  misc_RNA (1)...(19): siRNA sense strand
gcccagaagaugugguaca

SEQ ID NO: 2419081 - RNA, 19 nt, Homo sapiens
  misc_RNA (1)...(19): siRNA sense strand
gaagugagccuguggcaga

SEQ ID NO: 2419082 - RNA, 19 nt, Homo sapiens
  misc_RNA (1)...(19): siRNA sense strand
aagaagaagaagacauuga

SEQ ID NO: 2419083 - RNA, 19 nt, Homo sapiens
  misc_RNA (1)...(19): siRNA sense strand
gagaugaagagguccggaa

SEQ ID NO: 2419084 - RNA, 19 nt, Homo sapiens
  misc_RNA (1)...(19): siRNA sense strand
ugccaaagcaggagggacu

SEQ ID NO: 2419085 - RNA, 19 nt, Homo sapiens
  misc_RNA (1)...(19): siRNA sense strand
uguuggaggugaccggaaa

SEQ ID NO: 2419086 - RNA, 19 nt, Homo sapiens
  misc_RNA (1)...(19): siRNA sense strand
aagaggaagaagaagaaga

SEQ ID NO: 2419087 - RNA, 19 nt, Homo sapiens
  misc_RNA (1)...(19): siRNA sense strand
agaugaagagguccggaaa

SEQ ID NO: 2419088 - RNA, 19 nt, Homo sapiens
  misc_RNA (1)...(19): siRNA sense strand
gaagaaagaucauucagga

SEQ ID NO: 2419089 - RNA, 19 nt, Homo sapiens
  misc_RNA (1)...(19): siRNA sense strand
acaaaccugcagugaguaa

SEQ ID NO: 2419090 - RNA, 19 nt, Homo sapiens
  misc_RNA (1)...(19): siRNA sense strand
augaugagacgcugaggua

SEQ ID NO: 2419091 - RNA, 19 nt, Homo sapiens
  misc_RNA (1)...(19): siRNA sense strand
aagaaugaguuacuggaga

SEQ ID NO: 2419092 - RNA, 19 nt, Homo sapiens
  misc_RNA (1)...(19): siRNA sense strand
ccagaauggaagaagaugu

SEQ ID NO: 2419093 - RNA, 19 nt, Homo sapiens
  misc_RNA (1)...(19): siRNA sense strand
ccgcauacaggaaagcaau

SEQ ID NO: 2419094 - RNA, 19 nt, Homo sapiens
  misc_RNA (1)...(19): siRNA sense strand
cuugggagacagaagcaaa

SEQ ID NO: 2419095 - RNA, 19 nt, Homo sapiens
  misc_RNA (1)...(19): siRNA sense strand
auauggaagaggaagaaga

SEQ ID NO: 2419096 - RNA, 19 nt, Homo sapiens
  misc_RNA (1)...(19): siRNA sense strand
ggaaagagugcauuggaag

SEQ ID NO: 2419097 - RNA, 19 nt, Homo sapiens
  misc_RNA (1)...(19): siRNA sense strand
ccaaaucucaaguagaaaa

SEQ ID NO: 2419098 - RNA, 19 nt, Homo sapiens
  misc_RNA (1)...(19): siRNA sense strand
aggugugcgccaaggaaau

SEQ ID NO: 2419099 - RNA, 19 nt, Homo sapiens
  misc_RNA (1)...(19): siRNA sense strand
gcgccaaggaaauagaguu

SEQ ID NO: 2419100 - RNA, 19 nt, Homo sapiens
  misc_RNA (1)...(19): siRNA sense strand
uggaugagggugagaugau

SEQ ID NO: 2419101 - RNA, 19 nt, Homo sapiens
  misc_RNA (1)...(19): siRNA sense strand
agacuuaccuucugccuga

SEQ ID NO: 2419102 - RNA, 19 nt, Homo sapiens
  misc_RNA (1)...(19): siRNA sense strand
ucaauguggauauggaaga

SEQ ID NO: 2419103 - RNA, 19 nt, Homo sapiens
  misc_RNA (1)...(19): siRNA sense strand
gcagugaguaaaagagaga

SEQ ID NO: 2419104 - RNA, 19 nt, Homo sapiens
  misc_RNA (1)...(19): siRNA sense strand
gugugaggcuggaagaucu

SEQ ID NO: 2419105 - RNA, 19 nt, Homo sapiens
  misc_RNA (1)...(19): siRNA sense strand
gcaggagggacuucagaca

SEQ ID NO: 2419106 - RNA, 19 nt, Homo sapiens
  misc_RNA (1)...(19): siRNA sense strand
gacuaaagaaugaguuacu

SEQ ID NO: 2419107 - RNA, 19 nt, Homo sapiens
  misc_RNA (1)...(19): siRNA sense strand
gaugagggugagaugauau

SEQ ID NO: 2419108 - RNA, 19 nt, Homo sapiens
  misc_RNA (1)...(19): siRNA sense strand
ccuucagaguacacuaaau

SEQ ID NO: 2419109 - RNA, 19 nt, Homo sapiens
  misc_RNA (1)...(19): siRNA sense strand
cuuugugacuggcaggauu

SEQ ID NO: 2419110 - RNA, 19 nt, Homo sapiens
  misc_RNA (1)...(19): siRNA sense strand
uggcagaagaugcgacagu

SEQ ID NO: 2419111 - RNA, 19 nt, Homo sapiens
  misc_RNA (1)...(19): siRNA sense strand
cugaggaggaaaaggauuu

SEQ ID NO: 2419112 - RNA, 19 nt, Homo sapiens
  misc_RNA (1)...(19): siRNA sense strand
augugguauuuguggauga

SEQ ID NO: 2419113 - RNA, 19 nt, Homo sapiens
  misc_RNA (1)...(19): siRNA sense strand
uauuuguggaugaggguga

SEQ ID NO: 2419114 - RNA, 19 nt, Homo sapiens
  misc_RNA (1)...(19): siRNA sense strand
uuuaagaagaacaccagaa

SEQ ID NO: 2419115 - RNA, 19 nt, Homo sapiens
  misc_RNA (1)...(19): siRNA sense strand
ccucaauguggauauggaa

SEQ ID NO: 2419116 - RNA, 19 nt, Homo sapiens
  misc_RNA (1)...(19): siRNA sense strand
cugaaguaugagcagcaaa

SEQ ID NO: 2419117 - RNA, 19 nt, Homo sapiens
  misc_RNA (1)...(19): siRNA sense strand
ggguacagucucaggacaa

SEQ ID NO: 2419118 - RNA, 19 nt, Homo sapiens
  misc_RNA (1)...(19): siRNA sense strand
gggcacuaggacugacaau

SEQ ID NO: 2419119 - RNA, 19 nt, Homo sapiens
  misc_RNA (1)...(19): siRNA sense strand
acccgaagcacgugaggau

SEQ ID NO: 2419120 - RNA, 19 nt, Homo sapiens
  misc_RNA (1)...(19): siRNA sense strand
ccugagagccuguggcaug

SEQ ID NO: 2419121 - RNA, 19 nt, Homo sapiens
  misc_RNA (1)...(19): siRNA sense strand
ucgaagaacuggaaccgaa

SEQ ID NO: 2419122 - RNA, 19 nt, Homo sapiens
  misc_RNA (1)...(19): siRNA sense strand
acucggacagagaagguua

SEQ ID NO: 2419123 - RNA, 19 nt, Homo sapiens
  misc_RNA (1)...(19): siRNA sense strand
cggcaaaguuguuggcugg

SEQ ID NO: 2419124 - RNA, 19 nt, Homo sapiens
  misc_RNA (1)...(19): siRNA sense strand
agauaacaacagucgaaga

SEQ ID NO: 2419125 - RNA, 19 nt, Homo sapiens
  misc_RNA (1)...(19): siRNA sense strand
cagccagggaugcaagaau

SEQ ID NO: 2419126 - RNA, 19 nt, Homo sapiens
  misc_RNA (1)...(19): siRNA sense strand
ccaaaguaccaccuggaca

SEQ ID NO: 2419127 - RNA, 19 nt, Homo sapiens
  misc_RNA (1)...(19): siRNA sense strand
aaagcaaauaacugcacua

SEQ ID NO: 2419128 - RNA, 19 nt, Homo sapiens
  misc_RNA (1)...(19): siRNA sense strand
ggacacauccugcuggaca

SEQ ID NO: 2419129 - RNA, 19 nt, Homo sapiens
  misc_RNA (1)...(19): siRNA sense strand
ugucaagugccguggggaa

SEQ ID NO: 2419130 - RNA, 19 nt, Homo sapiens
  misc_RNA (1)...(19): siRNA sense strand
gggcacugucugugaugau

SEQ ID NO: 2419131 - RNA, 19 nt, Homo sapiens
  misc_RNA (1)...(19): siRNA sense strand
ggaagaaccuggagcccau

SEQ ID NO: 2419132 - RNA, 19 nt, Homo sapiens
  misc_RNA (1)...(19): siRNA sense strand
agguugagcuccaggccaa

SEQ ID NO: 2419133 - RNA, 19 nt, Homo sapiens
  misc_RNA (1)...(19): siRNA sense strand
ugaauaagguugagcucca

SEQ ID NO: 2419134 - RNA, 19 nt, Homo sapiens
  misc_RNA (1)...(19): siRNA sense strand
ccuugacagaugagauuaa

SEQ ID NO: 2419135 - RNA, 19 nt, Homo sapiens
  misc_RNA (1)...(19): siRNA sense strand
gcaagcugcuggagagcga

SEQ ID NO: 2419136 - RNA, 19 nt, Homo sapiens
  misc_RNA (1)...(19): siRNA sense strand
agaucaaggcgcuaaacaa

SEQ ID NO: 2419137 - RNA, 19 nt, Homo sapiens
  misc_RNA (1)...(19): siRNA sense strand
cugaaaucucugagcucaa

SEQ ID NO: 2419138 - RNA, 19 nt, Homo sapiens
  misc_RNA (1)...(19): siRNA sense strand
agagcaaggccgaggcuga

SEQ ID NO: 2419139 - RNA, 19 nt, Homo sapiens
  misc_RNA (1)...(19): siRNA sense strand
gauucggagcugaggaaca

SEQ ID NO: 2419140 - RNA, 19 nt, Homo sapiens
  misc_RNA (1)...(19): siRNA sense strand
aggacuacaagaagaggua

SEQ ID NO: 2419141 - RNA, 19 nt, Homo sapiens
  misc_RNA (1)...(19): siRNA sense strand
ggagauuaacagacgcaca

SEQ ID NO: 2419142 - RNA, 19 nt, Homo sapiens
  misc_RNA (1)...(19): siRNA sense strand
ccgcucagagauagggaau

SEQ ID NO: 2419143 - RNA, 19 nt, Homo sapiens
  misc_RNA (1)...(19): siRNA sense strand
ugguggaggacuacaagaa

SEQ ID NO: 2419144 - RNA, 19 nt, Homo sapiens
  misc_RNA (1)...(19): siRNA sense strand
agaccaagauccaggagcu

SEQ ID NO: 2419145 - RNA, 19 nt, Homo sapiens
  misc_RNA (1)...(19): siRNA sense strand
ugcuagagaccaaguggaa

SEQ ID NO: 2419146 - RNA, 19 nt, Homo sapiens
  misc_RNA (1)...(19): siRNA sense strand
agaagagguaugaggugga

SEQ ID NO: 2419147 - RNA, 19 nt, Homo sapiens
  misc_RNA (1)...(19): siRNA sense strand
gggaaugugaagaagcagu

SEQ ID NO: 2419148 - RNA, 19 nt, Homo sapiens
  misc_RNA (1)...(19): siRNA sense strand
agaaugaguuuguggugcu

SEQ ID NO: 2419149 - RNA, 19 nt, Homo sapiens
  misc_RNA (1)...(19): siRNA sense strand
gugcaggaugucuggcgaa

SEQ ID NO: 2419150 - RNA, 19 nt, Homo sapiens
  misc_RNA (1)...(19): siRNA sense strand
auccaaauucugugagcau

SEQ ID NO: 2419151 - RNA, 19 nt, Homo sapiens
  misc_RNA (1)...(19): siRNA sense strand
gggaaaaccaugaugcaga

SEQ ID NO: 2419152 - RNA, 19 nt, Homo sapiens
  misc_RNA (1)...(19): siRNA sense strand
ccacaaagagcgugcgccu

SEQ ID NO: 2419153 - RNA, 19 nt, Homo sapiens
  misc_RNA (1)...(19): siRNA sense strand
ucaucaacggcgaggacau

SEQ ID NO: 2419154 - RNA, 19 nt, Homo sapiens
  misc_RNA (1)...(19): siRNA sense strand
ccucaaagccagagcagga

SEQ ID NO: 2419155 - RNA, 19 nt, Homo sapiens
  misc_RNA (1)...(19): siRNA sense strand
cagaagagaccaagccaga

SEQ ID NO: 2419156 - RNA, 19 nt, Homo sapiens
  misc_RNA (1)...(19): siRNA sense strand
auaccaaaggcuugaagaa

SEQ ID NO: 2419157 - RNA, 19 nt, Homo sapiens
  misc_RNA (1)...(19): siRNA sense strand
ccgagaagucccugguuga

SEQ ID NO: 2419158 - RNA, 19 nt, Homo sapiens
  misc_RNA (1)...(19): siRNA sense strand
agaccaagccagacgcaca

SEQ ID NO: 2419159 - RNA, 19 nt, Homo sapiens
  misc_RNA (1)...(19): siRNA sense strand
aagcaaggacggaacgaca

SEQ ID NO: 2419160 - RNA, 19 nt, Homo sapiens
  misc_RNA (1)...(19): siRNA sense strand
aggagacaccacuggcaaa

SEQ ID NO: 2419161 - RNA, 19 nt, Homo sapiens
  misc_RNA (1)...(19): siRNA sense strand
ggacccaaucaaacaggaa

SEQ ID NO: 2419162 - RNA, 19 nt, Homo sapiens
  misc_RNA (1)...(19): siRNA sense strand
agccagagcaggaaggcau

SEQ ID NO: 2419163 - RNA, 19 nt, Homo sapiens
  misc_RNA (1)...(19): siRNA sense strand
acgagagacuagauagacu

SEQ ID NO: 2419164 - RNA, 19 nt, Homo sapiens
  misc_RNA (1)...(19): siRNA sense strand
aagaggaaggggagggauu

SEQ ID NO: 2419165 - RNA, 19 nt, Homo sapiens
  misc_RNA (1)...(19): siRNA sense strand
aggugaaauuugucugcau

SEQ ID NO: 2419166 - RNA, 19 nt, Homo sapiens
  misc_RNA (1)...(19): siRNA sense strand
aaucaaacaggaagagaac

SEQ ID NO: 2419167 - RNA, 19 nt, Homo sapiens
  misc_RNA (1)...(19): siRNA sense strand
agagaacgcgggaggcaga

SEQ ID NO: 2419168 - RNA, 19 nt, Homo sapiens
  misc_RNA (1)...(19): siRNA sense strand
gaacuaaacacacagcaca

SEQ ID NO: 2419169 - RNA, 19 nt, Homo sapiens
  misc_RNA (1)...(19): siRNA sense strand
ccuaagguacaacgagaga

SEQ ID NO: 2419170 - RNA, 19 nt, Homo sapiens
  misc_RNA (1)...(19): siRNA sense strand
agguacaaguguccucaaa

SEQ ID NO: 2419171 - RNA, 19 nt, Homo sapiens
  misc_RNA (1)...(19): siRNA sense strand
gaugaggguuccauggcuu

SEQ ID NO: 2419172 - RNA, 19 nt, Homo sapiens
  misc_RNA (1)...(19): siRNA sense strand
uggagaacaaggaacgaga

SEQ ID NO: 2419173 - RNA, 19 nt, Homo sapiens
  misc_RNA (1)...(19): siRNA sense strand
gagaaagucgaguggugca

SEQ ID NO: 2419174 - RNA, 19 nt, Homo sapiens
  misc_RNA (1)...(19): siRNA sense strand
caggagacuuuaaggacgu

SEQ ID NO: 2419175 - RNA, 19 nt, Homo sapiens
  misc_RNA (1)...(19): siRNA sense strand
acgagaaagucgaguggug

SEQ ID NO: 2419176 - RNA, 19 nt, Homo sapiens
  misc_RNA (1)...(19): siRNA sense strand
gcaucuucacagaguucaa

SEQ ID NO: 2419177 - RNA, 19 nt, Homo sapiens
  misc_RNA (1)...(19): siRNA sense strand
uggagaacacccagggcca

SEQ ID NO: 2419178 - RNA, 19 nt, Homo sapiens
  misc_RNA (1)...(19): siRNA sense strand
cugaaguccaagaaggcuu

SEQ ID NO: 2419179 - RNA, 19 nt, Homo sapiens
  misc_RNA (1)...(19): siRNA sense strand
cuccuaagguacaacgaga

SEQ ID NO: 2419180 - RNA, 19 nt, Homo sapiens
  misc_RNA (1)...(19): siRNA sense strand
gggaggugguacagaacuc

SEQ ID NO: 2419181 - RNA, 19 nt, Homo sapiens
  misc_RNA (1)...(19): siRNA sense strand
ggguaaagaaagugaacaa

SEQ ID NO: 2419182 - RNA, 19 nt, Homo sapiens
  misc_RNA (1)...(19): siRNA sense strand
ccucauugguagagcauau

SEQ ID NO: 2419183 - RNA, 19 nt, Homo sapiens
  misc_RNA (1)...(19): siRNA sense strand
ccucagaagaguugaagaa

SEQ ID NO: 2419184 - RNA, 19 nt, Homo sapiens
  misc_RNA (1)...(19): siRNA sense strand
cggcaaugauccagguauu

SEQ ID NO: 2419185 - RNA, 19 nt, Homo sapiens
  misc_RNA (1)...(19): siRNA sense strand
ccuuuggacuugagauaaa

SEQ ID NO: 2419186 - RNA, 19 nt, Homo sapiens
  misc_RNA (1)...(19): siRNA sense strand
ggacaaugugcuauacaaa

SEQ ID NO: 2419187 - RNA, 19 nt, Homo sapiens
  misc_RNA (1)...(19): siRNA sense strand
caucuuugccucagggaaa

SEQ ID NO: 2419188 - RNA, 19 nt, Homo sapiens
  misc_RNA (1)...(19): siRNA sense strand
ggauaauaacugaaggcau

SEQ ID NO: 2419189 - RNA, 19 nt, Homo sapiens
  misc_RNA (1)...(19): siRNA sense strand
gauaauaacugaaggcauc

SEQ ID NO: 2419190 - RNA, 19 nt, Homo sapiens
  misc_RNA (1)...(19): siRNA sense strand
cugaagaggaguacagcaa

SEQ ID NO: 2419191 - RNA, 19 nt, Homo sapiens
  misc_RNA (1)...(19): siRNA sense strand
acgaaaagcccaacagaua

SEQ ID NO: 2419192 - RNA, 19 nt, Homo sapiens
  misc_RNA (1)...(19): siRNA sense strand
ggaacgaauccgagugaca

SEQ ID NO: 2419193 - RNA, 19 nt, Homo sapiens
  misc_RNA (1)...(19): siRNA sense strand
guauuugacaagagagaau

SEQ ID NO: 2419194 - RNA, 19 nt, Homo sapiens
  misc_RNA (1)...(19): siRNA sense strand
gcaaacuggagguggauau

SEQ ID NO: 2419195 - RNA, 19 nt, Homo sapiens
  misc_RNA (1)...(19): siRNA sense strand
gagcaugggucaaagcgaa

SEQ ID NO: 2419196 - RNA, 19 nt, Homo sapiens
  misc_RNA (1)...(19): siRNA sense strand
agaaaugagucugcagaaa

SEQ ID NO: 2419197 - RNA, 19 nt, Homo sapiens
  misc_RNA (1)...(19): siRNA sense strand
aggagaaauugaugaagau

SEQ ID NO: 2419198 - RNA, 19 nt, Homo sapiens
  misc_RNA (1)...(19): siRNA sense strand
gcaagguguuggagaaaau

SEQ ID NO: 2419199 - RNA, 19 nt, Homo sapiens
  misc_RNA (1)...(19): siRNA sense strand
acaacaggagcguggauaa

SEQ ID NO: 2419200 - RNA, 19 nt, Homo sapiens
  misc_RNA (1)...(19): siRNA sense strand
augagaaacuggaugaaaa

SEQ ID NO: 2419201 - RNA, 19 nt, Homo sapiens
  misc_RNA (1)...(19): siRNA sense strand
gaguauuugacaagagaga

SEQ ID NO: 2419202 - RNA, 19 nt, Homo sapiens
  misc_RNA (1)...(19): siRNA sense strand
cuugauugacauuggauua

SEQ ID NO: 2419203 - RNA, 19 nt, Homo sapiens
  misc_RNA (1)...(19): siRNA sense strand
ugacauuggauuaguagua

SEQ ID NO: 2419204 - RNA, 19 nt, Homo sapiens
  misc_RNA (1)...(19): siRNA sense strand
aggcugaaaaugaggaaaa

SEQ ID NO: 2419205 - RNA, 19 nt, Homo sapiens
  misc_RNA (1)...(19): siRNA sense strand
ggaaagucuaugaguucua

SEQ ID NO: 2419206 - RNA, 19 nt, Homo sapiens
  misc_RNA (1)...(19): siRNA sense strand
guggaugaacccaaggaaa

SEQ ID NO: 2419207 - RNA, 19 nt, Homo sapiens
  misc_RNA (1)...(19): siRNA sense strand
ggaaaugaaaugaagcuca

SEQ ID NO: 2419208 - RNA, 19 nt, Homo sapiens
  misc_RNA (1)...(19): siRNA sense strand
aagagagaauguagcacaa

SEQ ID NO: 2419209 - RNA, 19 nt, Homo sapiens
  misc_RNA (1)...(19): siRNA sense strand
acaaaguaguauagugguu

SEQ ID NO: 2419210 - RNA, 19 nt, Homo sapiens
  misc_RNA (1)...(19): siRNA sense strand
ggagaggaggccacgguua

SEQ ID NO: 2419211 - RNA, 19 nt, Homo sapiens
  misc_RNA (1)...(19): siRNA sense strand
uggaugaacccaaggaaaa

SEQ ID NO: 2419212 - RNA, 19 nt, Homo sapiens
  misc_RNA (1)...(19): siRNA sense strand
guuugcaggagaagaaaua

SEQ ID NO: 2419213 - RNA, 19 nt, Homo sapiens
  misc_RNA (1)...(19): siRNA sense strand
cagggaaauucaacaacaa

SEQ ID NO: 2419214 - RNA, 19 nt, Homo sapiens
  misc_RNA (1)...(19): siRNA sense strand
aauacaagcaccagagaca

SEQ ID NO: 2419215 - RNA, 19 nt, Homo sapiens
  misc_RNA (1)...(19): siRNA sense strand
ccaggaaaggcaagaaaca

SEQ ID NO: 2419216 - RNA, 19 nt, Homo sapiens
  misc_RNA (1)...(19): siRNA sense strand
gucaaacaaucaagaggaa

SEQ ID NO: 2419217 - RNA, 19 nt, Homo sapiens
  misc_RNA (1)...(19): siRNA sense strand
aaucaaggaagaagucaaa

SEQ ID NO: 2419218 - RNA, 19 nt, Homo sapiens
  misc_RNA (1)...(19): siRNA sense strand
ccauaguccugcugagcuu

SEQ ID NO: 2419219 - RNA, 19 nt, Homo sapiens
  misc_RNA (1)...(19): siRNA sense strand
guaagaaaugaccaggaaa

SEQ ID NO: 2419220 - RNA, 19 nt, Homo sapiens
  misc_RNA (1)...(19): siRNA sense strand
uccauaaggaggagaaauu

SEQ ID NO: 2419221 - RNA, 19 nt, Homo sapiens
  misc_RNA (1)...(19): siRNA sense strand
ucgcuggagagaagaaaua

SEQ ID NO: 2419222 - RNA, 19 nt, Homo sapiens
  misc_RNA (1)...(19): siRNA sense strand
agggagacggguagaaauu

SEQ ID NO: 2419223 - RNA, 19 nt, Homo sapiens
  misc_RNA (1)...(19): siRNA sense strand
cauuagaacugcacagcca

SEQ ID NO: 2419224 - RNA, 19 nt, Homo sapiens
  misc_RNA (1)...(19): siRNA sense strand
agugaguacuggaacuuaa

SEQ ID NO: 2419225 - RNA, 19 nt, Homo sapiens
  misc_RNA (1)...(19): siRNA sense strand
gcauggagaucgcuggaga

SEQ ID NO: 2419226 - RNA, 19 nt, Homo sapiens
  misc_RNA (1)...(19): siRNA sense strand
aggaaaagcacgagccuau

SEQ ID NO: 2419227 - RNA, 19 nt, Homo sapiens
  misc_RNA (1)...(19): siRNA sense strand
ccaacuguuugcaggagaa

SEQ ID NO: 2419228 - RNA, 19 nt, Homo sapiens
  misc_RNA (1)...(19): siRNA sense strand
aggugaaagaggagaucau

SEQ ID NO: 2419229 - RNA, 19 nt, Homo sapiens
  misc_RNA (1)...(19): siRNA sense strand
cuuucaggcuaccgaauaa

SEQ ID NO: 2419230 - RNA, 19 nt, Homo sapiens
  misc_RNA (1)...(19): siRNA sense strand
cucaggaacuggagcaauu

SEQ ID NO: 2419231 - RNA, 19 nt, Homo sapiens
  misc_RNA (1)...(19): siRNA sense strand
ucagaaaggguuacagaga

SEQ ID NO: 2419232 - RNA, 19 nt, Homo sapiens
  misc_RNA (1)...(19): siRNA sense strand
aggaaaggcaagaaacaca

SEQ ID NO: 2419233 - RNA, 19 nt, Homo sapiens
  misc_RNA (1)...(19): siRNA sense strand
ggggagagcugcugguuuu

SEQ ID NO: 2419234 - RNA, 19 nt, Homo sapiens
  misc_RNA (1)...(19): siRNA sense strand
gcucaaacucccggauuua

SEQ ID NO: 2419235 - RNA, 19 nt, Homo sapiens
  misc_RNA (1)...(19): siRNA sense strand
agaaaggguuacagagaug

SEQ ID NO: 2419236 - RNA, 19 nt, Homo sapiens
  misc_RNA (1)...(19): siRNA sense strand
aaaucaaggaagaagucaa

SEQ ID NO: 2419237 - RNA, 19 nt, Homo sapiens
  misc_RNA (1)...(19): siRNA sense strand
gcucuggacuuguuggaga

SEQ ID NO: 2419238 - RNA, 19 nt, Homo sapiens
  misc_RNA (1)...(19): siRNA sense strand
caauauaucaucaugguga

SEQ ID NO: 2419239 - RNA, 19 nt, Homo sapiens
  misc_RNA (1)...(19): siRNA sense strand
acacuuugcaagaggauga

SEQ ID NO: 2419240 - RNA, 19 nt, Homo sapiens
  misc_RNA (1)...(19): siRNA sense strand
uuguaagccaucugagaaa

SEQ ID NO: 2419241 - RNA, 19 nt, Homo sapiens
  misc_RNA (1)...(19): siRNA sense strand
cagaaggagaagagagccu

SEQ ID NO: 2419242 - RNA, 19 nt, Homo sapiens
  misc_RNA (1)...(19): siRNA sense strand
aagagauaacugucagcaa

SEQ ID NO: 2419243 - RNA, 19 nt, Homo sapiens
  misc_RNA (1)...(19): siRNA sense strand
agcccaacuuugcuagaaa

SEQ ID NO: 2419244 - RNA, 19 nt, Homo sapiens
  misc_RNA (1)...(19): siRNA sense strand
gggaguuguacugggcaua

SEQ ID NO: 2419245 - RNA, 19 nt, Homo sapiens
  misc_RNA (1)...(19): siRNA sense strand
gggaauaucaaucugcuca

SEQ ID NO: 2419246 - RNA, 19 nt, Homo sapiens
  misc_RNA (1)...(19): siRNA sense strand
guaccuucgugguggccua

SEQ ID NO: 2419247 - RNA, 19 nt, Homo sapiens
  misc_RNA (1)...(19): siRNA sense strand
gagaaucagcauuacgcua

SEQ ID NO: 2419248 - RNA, 19 nt, Homo sapiens
  misc_RNA (1)...(19): siRNA sense strand
cauuaauuuccuugggcau

SEQ ID NO: 2419249 - RNA, 19 nt, Homo sapiens
  misc_RNA (1)...(19): siRNA sense strand
ugucauugcacauuggaau

SEQ ID NO: 2419250 - RNA, 19 nt, Homo sapiens
  misc_RNA (1)...(19): siRNA sense strand
acaacaggcagcagcguca

SEQ ID NO: 2419251 - RNA, 19 nt, Homo sapiens
  misc_RNA (1)...(19): siRNA sense strand
uuucagagcaggaggccga

SEQ ID NO: 2419252 - RNA, 19 nt, Homo sapiens
  misc_RNA (1)...(19): siRNA sense strand
ucacggaacucaugcgcaa

SEQ ID NO: 2419253 - RNA, 19 nt, Homo sapiens
  misc_RNA (1)...(19): siRNA sense strand
gggagaagcugcacgccau

SEQ ID NO: 2419254 - RNA, 19 nt, Homo sapiens
  misc_RNA (1)...(19): siRNA sense strand
ccuaugaagggaugaccaa

SEQ ID NO: 2419255 - RNA, 19 nt, Homo sapiens
  misc_RNA (1)...(19): siRNA sense strand
ggaagcugggugaaggcua

SEQ ID NO: 2419256 - RNA, 19 nt, Homo sapiens
  misc_RNA (1)...(19): siRNA sense strand
ugagcuaccuggaggagca

SEQ ID NO: 2419257 - RNA, 19 nt, Homo sapiens
  misc_RNA (1)...(19): siRNA sense strand
acuacaaggccaacuggaa

SEQ ID NO: 2419258 - RNA, 19 nt, Homo sapiens
  misc_RNA (1)...(19): siRNA sense strand
ucaccuacuacaaggccaa

SEQ ID NO: 2419259 - RNA, 19 nt, Homo sapiens
  misc_RNA (1)...(19): siRNA sense strand
gggaaauuguggaggaagc

SEQ ID NO: 2419260 - RNA, 19 nt, Homo sapiens
  misc_RNA (1)...(19): siRNA sense strand
uggagaugcuacugcggaa

SEQ ID NO: 2419261 - RNA, 19 nt, Homo sapiens
  misc_RNA (1)...(19): siRNA sense strand
agggagcgagcuugggaaa

SEQ ID NO: 2419262 - RNA, 19 nt, Homo sapiens
  misc_RNA (1)...(19): siRNA sense strand
cuugggaaauuguggagga

SEQ ID NO: 2419263 - RNA, 19 nt, Homo sapiens
  misc_RNA (1)...(19): siRNA sense strand
ugaaaggcuuggugggcua

SEQ ID NO: 2419264 - RNA, 19 nt, Homo sapiens
  misc_RNA (1)...(19): siRNA sense strand
acgaagaggagaaggccuu

SEQ ID NO: 2419265 - RNA, 19 nt, Homo sapiens
  misc_RNA (1)...(19): siRNA sense strand
ccugggacgaagaggagaa

SEQ ID NO: 2419266 - RNA, 19 nt, Homo sapiens
  misc_RNA (1)...(19): siRNA sense strand
cguuugauacugagagcuu

SEQ ID NO: 2419267 - RNA, 19 nt, Homo sapiens
  misc_RNA (1)...(19): siRNA sense strand
ucuauuaugaccuggacaa

SEQ ID NO: 2419268 - RNA, 19 nt, Homo sapiens
  misc_RNA (1)...(19): siRNA sense strand
uggaaaggcacauucggaa

SEQ ID NO: 2419269 - RNA, 19 nt, Homo sapiens
  misc_RNA (1)...(19): siRNA sense strand
aggucaucgugguggacau

SEQ ID NO: 2419270 - RNA, 19 nt, Homo sapiens
  misc_RNA (1)...(19): siRNA sense strand
uggaugagcuguacgagga

SEQ ID NO: 2419271 - RNA, 19 nt, Homo sapiens
  misc_RNA (1)...(19): siRNA sense strand
gccuaagaagccagaguca

SEQ ID NO: 2419272 - RNA, 19 nt, Homo sapiens
  misc_RNA (1)...(19): siRNA sense strand
agcuggaggugcaguggaa

SEQ ID NO: 2419273 - RNA, 19 nt, Homo sapiens
  misc_RNA (1)...(19): siRNA sense strand
agugcauccuggagagcuu

SEQ ID NO: 2419274 - RNA, 19 nt, Homo sapiens
  misc_RNA (1)...(19): siRNA sense strand
cacaaagacaccaggagga

SEQ ID NO: 2419275 - RNA, 19 nt, Homo sapiens
  misc_RNA (1)...(19): siRNA sense strand
acgagugcgccgaggacau

SEQ ID NO: 2419276 - RNA, 19 nt, Homo sapiens
  misc_RNA (1)...(19): siRNA sense strand
cggccgagagccugauaga

SEQ ID NO: 2419277 - RNA, 19 nt, Homo sapiens
  misc_RNA (1)...(19): siRNA sense strand
aagagaugccagugggaaa

SEQ ID NO: 2419278 - RNA, 19 nt, Homo sapiens
  misc_RNA (1)...(19): siRNA sense strand
aagcaguggaugagaugaa

SEQ ID NO: 2419279 - RNA, 19 nt, Homo sapiens
  misc_RNA (1)...(19): siRNA sense strand
agaacuuggaugagacaau

SEQ ID NO: 2419280 - RNA, 19 nt, Homo sapiens
  misc_RNA (1)...(19): siRNA sense strand
agaaccagggauagagcaa

SEQ ID NO: 2419281 - RNA, 19 nt, Homo sapiens
  misc_RNA (1)...(19): siRNA sense strand
aagaaagucuggaguggga

SEQ ID NO: 2419282 - RNA, 19 nt, Homo sapiens
  misc_RNA (1)...(19): siRNA sense strand
ggaaguggggcaaggcaaa

SEQ ID NO: 2419283 - RNA, 19 nt, Homo sapiens
  misc_RNA (1)...(19): siRNA sense strand
gcucuaaggguuaugccua

SEQ ID NO: 2419284 - RNA, 19 nt, Homo sapiens
  misc_RNA (1)...(19): siRNA sense strand
ugcuagacuugcauggaaa

SEQ ID NO: 2419285 - RNA, 19 nt, Homo sapiens
  misc_RNA (1)...(19): siRNA sense strand
uuugaacggcugagguuaa

SEQ ID NO: 2419286 - RNA, 19 nt, Homo sapiens
  misc_RNA (1)...(19): siRNA sense strand
gggcgagcacagaagaaaa

SEQ ID NO: 2419287 - RNA, 19 nt, Homo sapiens
  misc_RNA (1)...(19): siRNA sense strand
ggggcaaggcaaaggauuu

SEQ ID NO: 2419288 - RNA, 19 nt, Homo sapiens
  misc_RNA (1)...(19): siRNA sense strand
cugcaaagucguaugcgau

SEQ ID NO: 2419289 - RNA, 19 nt, Homo sapiens
  misc_RNA (1)...(19): siRNA sense strand
gagacgacauagaugacga

SEQ ID NO: 2419290 - RNA, 19 nt, Homo sapiens
  misc_RNA (1)...(19): siRNA sense strand
gucaauuagucgggccaaa

SEQ ID NO: 2419291 - RNA, 19 nt, Homo sapiens
  misc_RNA (1)...(19): siRNA sense strand
aguaauaagagaugccagu

SEQ ID NO: 2419292 - RNA, 19 nt, Homo sapiens
  misc_RNA (1)...(19): siRNA sense strand
cccaaaaggcugugcuaga

SEQ ID NO: 2419293 - RNA, 19 nt, Homo sapiens
  misc_RNA (1)...(19): siRNA sense strand
acgacauagaugacgaaaa

SEQ ID NO: 2419294 - RNA, 19 nt, Homo sapiens
  misc_RNA (1)...(19): siRNA sense strand
aggcuuuggauuugugaga

SEQ ID NO: 2419295 - RNA, 19 nt, Homo sapiens
  misc_RNA (1)...(19): siRNA sense strand
ggcugagguuaaaagaaaa

SEQ ID NO: 2419296 - RNA, 19 nt, Homo sapiens
  misc_RNA (1)...(19): siRNA sense strand
ccugcaaagucguaugcga

SEQ ID NO: 2419297 - RNA, 19 nt, Homo sapiens
  misc_RNA (1)...(19): siRNA sense strand
ggaacuuuucugugaauau

SEQ ID NO: 2419298 - RNA, 19 nt, Homo sapiens
  misc_RNA (1)...(19): siRNA sense strand
cagaagacacugaaggaga

SEQ ID NO: 2419299 - RNA, 19 nt, Homo sapiens
  misc_RNA (1)...(19): siRNA sense strand
aggaagagaacgagaccuu

SEQ ID NO: 2419300 - RNA, 19 nt, Homo sapiens
  misc_RNA (1)...(19): siRNA sense strand
cugaacaggcugaaggaga

SEQ ID NO: 2419301 - RNA, 19 nt, Homo sapiens
  misc_RNA (1)...(19): siRNA sense strand
ggacaucuccaguggccaa

SEQ ID NO: 2419302 - RNA, 19 nt, Homo sapiens
  misc_RNA (1)...(19): siRNA sense strand
aggcaguacagaagaugaa

SEQ ID NO: 2419303 - RNA, 19 nt, Homo sapiens
  misc_RNA (1)...(19): siRNA sense strand
cgacgaacuggaugagaca

SEQ ID NO: 2419304 - RNA, 19 nt, Homo sapiens
  misc_RNA (1)...(19): siRNA sense strand
auccagagggagaaggaaa

SEQ ID NO: 2419305 - RNA, 19 nt, Homo sapiens
  misc_RNA (1)...(19): siRNA sense strand
ccugaaggccagagaagca

SEQ ID NO: 2419306 - RNA, 19 nt, Homo sapiens
  misc_RNA (1)...(19): siRNA sense strand
ggcugaaggaagagaacga

SEQ ID NO: 2419307 - RNA, 19 nt, Homo sapiens
  misc_RNA (1)...(19): siRNA sense strand
gggccuacggggagaagaa

SEQ ID NO: 2419308 - RNA, 19 nt, Homo sapiens
  misc_RNA (1)...(19): siRNA sense strand
guacagaagaugaagacac

SEQ ID NO: 2419309 - RNA, 19 nt, Homo sapiens
  misc_RNA (1)...(19): siRNA sense strand
ccagagugccagagcagga

SEQ ID NO: 2419310 - RNA, 19 nt, Homo sapiens
  misc_RNA (1)...(19): siRNA sense strand
acgaacuggaugagacaga

SEQ ID NO: 2419311 - RNA, 19 nt, Homo sapiens
  misc_RNA (1)...(19): siRNA sense strand
aggaagaccaccagggcgu

SEQ ID NO: 2419312 - RNA, 19 nt, Homo sapiens
  misc_RNA (1)...(19): siRNA sense strand
ccagcagggcacaggacau

SEQ ID NO: 2419313 - RNA, 19 nt, Homo sapiens
  misc_RNA (1)...(19): siRNA sense strand
ccacagaacugcuggggcu

SEQ ID NO: 2419314 - RNA, 19 nt, Homo sapiens
  misc_RNA (1)...(19): siRNA sense strand
aggagauccacgagaagga

SEQ ID NO: 2419315 - RNA, 19 nt, Homo sapiens
  misc_RNA (1)...(19): siRNA sense strand
cugaaggaagagaacgaga

SEQ ID NO: 2419316 - RNA, 19 nt, Homo sapiens
  misc_RNA (1)...(19): siRNA sense strand
gggacaagcuucagcagga

SEQ ID NO: 2419317 - RNA, 19 nt, Homo sapiens
  misc_RNA (1)...(19): siRNA sense strand
ggaaaugaguugauacgga

SEQ ID NO: 2419318 - RNA, 19 nt, Homo sapiens
  misc_RNA (1)...(19): siRNA sense strand
cggcccaagaagagagaga

SEQ ID NO: 2419319 - RNA, 19 nt, Homo sapiens
  misc_RNA (1)...(19): siRNA sense strand
auacggauaaggaaggaaa

SEQ ID NO: 2419320 - RNA, 19 nt, Homo sapiens
  misc_RNA (1)...(19): siRNA sense strand
gaauacucuccuauggaaa

SEQ ID NO: 2419321 - RNA, 19 nt, Homo sapiens
  misc_RNA (1)...(19): siRNA sense strand
uggccaaagucaugcgcuu

SEQ ID NO: 2419322 - RNA, 19 nt, Homo sapiens
  misc_RNA (1)...(19): siRNA sense strand
augaugacgagaugauaaa

SEQ ID NO: 2419323 - RNA, 19 nt, Homo sapiens
  misc_RNA (1)...(19): siRNA sense strand
ugaagaaggaacugggacu

SEQ ID NO: 2419324 - RNA, 19 nt, Homo sapiens
  misc_RNA (1)...(19): siRNA sense strand
gaaaugaguugauacggau

SEQ ID NO: 2419325 - RNA, 19 nt, Homo sapiens
  misc_RNA (1)...(19): siRNA sense strand
cauaaugauccgagugugu

SEQ ID NO: 2419326 - RNA, 19 nt, Homo sapiens
  misc_RNA (1)...(19): siRNA sense strand
gcucaguaucgguuugaau

SEQ ID NO: 2419327 - RNA, 19 nt, Homo sapiens
  misc_RNA (1)...(19): siRNA sense strand
gggccuacgugaaggugca

SEQ ID NO: 2419328 - RNA, 19 nt, Homo sapiens
  misc_RNA (1)...(19): siRNA sense strand
acggauaaggaaggaaaua

SEQ ID NO: 2419329 - RNA, 19 nt, Homo sapiens
  misc_RNA (1)...(19): siRNA sense strand
cggauaaggaaggaaauau

SEQ ID NO: 2419330 - RNA, 19 nt, Homo sapiens
  misc_RNA (1)...(19): siRNA sense strand
gaugcaaagccgagucaca

SEQ ID NO: 2419331 - RNA, 19 nt, Homo sapiens
  misc_RNA (1)...(19): siRNA sense strand
ccuggagaacagaggauga

SEQ ID NO: 2419332 - RNA, 19 nt, Homo sapiens
  misc_RNA (1)...(19): siRNA sense strand
gaucagaaccucaggagac

SEQ ID NO: 2419333 - RNA, 19 nt, Homo sapiens
  misc_RNA (1)...(19): siRNA sense strand
gcgaagauagagagguucu

SEQ ID NO: 2419334 - RNA, 19 nt, Homo sapiens
  misc_RNA (1)...(19): siRNA sense strand
acacuguggagcagggaga

SEQ ID NO: 2419335 - RNA, 19 nt, Homo sapiens
  misc_RNA (1)...(19): siRNA sense strand
gaugaagauaugugccaga

SEQ ID NO: 2419336 - RNA, 19 nt, Homo sapiens
  misc_RNA (1)...(19): siRNA sense strand
ggguagcuguuuuggggaa

SEQ ID NO: 2419337 - RNA, 19 nt, Homo sapiens
  misc_RNA (1)...(19): siRNA sense strand
acaaugaugacgagaugau

SEQ ID NO: 2419338 - RNA, 19 nt, Homo sapiens
  misc_RNA (1)...(19): siRNA sense strand
guacaaaauccgagaacuc

SEQ ID NO: 2419339 - RNA, 19 nt, Homo sapiens
  misc_RNA (1)...(19): siRNA sense strand
acccgaaauugcugcacaa

SEQ ID NO: 2419340 - RNA, 19 nt, Homo sapiens
  misc_RNA (1)...(19): siRNA sense strand
agagagaucuacaacccua

SEQ ID NO: 2419341 - RNA, 19 nt, Homo sapiens
  misc_RNA (1)...(19): siRNA sense strand
caucaaagcaccucgguac

SEQ ID NO: 2419342 - RNA, 19 nt, Homo sapiens
  misc_RNA (1)...(19): siRNA sense strand
ucaucauguuuaucagcaa

SEQ ID NO: 2419343 - RNA, 19 nt, Homo sapiens
  misc_RNA (1)...(19): siRNA sense strand
uaaugauccgaguguguaa

SEQ ID NO: 2419344 - RNA, 19 nt, Homo sapiens
  misc_RNA (1)...(19): siRNA sense strand
gcuggaauaucuuucggaa

SEQ ID NO: 2419345 - RNA, 19 nt, Homo sapiens
  misc_RNA (1)...(19): siRNA sense strand
ucuccuauggaaagauuua

SEQ ID NO: 2419346 - RNA, 19 nt, Homo sapiens
  misc_RNA (1)...(19): siRNA sense strand
uugcaauaaccaaggacga

SEQ ID NO: 2419347 - RNA, 19 nt, Homo sapiens
  misc_RNA (1)...(19): siRNA sense strand
aggacuucuuugcuaauaa

SEQ ID NO: 2419348 - RNA, 19 nt, Homo sapiens
  misc_RNA (1)...(19): siRNA sense strand
ggaaggaccuguugcagcu

SEQ ID NO: 2419349 - RNA, 19 nt, Homo sapiens
  misc_RNA (1)...(19): siRNA sense strand
agaaggggcagaagggcaa

SEQ ID NO: 2419350 - RNA, 19 nt, Homo sapiens
  misc_RNA (1)...(19): siRNA sense strand
ccugaugagccugggaaau

SEQ ID NO: 2419351 - RNA, 19 nt, Homo sapiens
  misc_RNA (1)...(19): siRNA sense strand
gcccaagaagagagagauc

SEQ ID NO: 2419352 - RNA, 19 nt, Homo sapiens
  misc_RNA (1)...(19): siRNA sense strand
agauccaggccgucuguaa

SEQ ID NO: 2419353 - RNA, 19 nt, Homo sapiens
  misc_RNA (1)...(19): siRNA sense strand
cuggauuugugcagcauca

SEQ ID NO: 2419354 - RNA, 19 nt, Homo sapiens
  misc_RNA (1)...(19): siRNA sense strand
gugaauaaguacuggcugu

SEQ ID NO: 2419355 - RNA, 19 nt, Homo sapiens
  misc_RNA (1)...(19): siRNA sense strand
cacaaagcccggagcggaa

SEQ ID NO: 2419356 - RNA, 19 nt, Homo sapiens
  misc_RNA (1)...(19): siRNA sense strand
aggcaaagagggcaaucaa

SEQ ID NO: 2419357 - RNA, 19 nt, Homo sapiens
  misc_RNA (1)...(19): siRNA sense strand
ggcauuaucaucugggcaa

SEQ ID NO: 2419358 - RNA, 19 nt, Homo sapiens
  misc_RNA (1)...(19): siRNA sense strand
gcugaaaggagaaaggauc

SEQ ID NO: 2419359 - RNA, 19 nt, Homo sapiens
  misc_RNA (1)...(19): siRNA sense strand
cugaagucugggagggaca

SEQ ID NO: 2419360 - RNA, 19 nt, Homo sapiens
  misc_RNA (1)...(19): siRNA sense strand
ggagaaaggauccuggguu

SEQ ID NO: 2419361 - RNA, 19 nt, Homo sapiens
  misc_RNA (1)...(19): siRNA sense strand
caaagauggaguugcacau

SEQ ID NO: 2419362 - RNA, 19 nt, Homo sapiens
  misc_RNA (1)...(19): siRNA sense strand
ccugcagcgcaauggguua

SEQ ID NO: 2419363 - RNA, 19 nt, Homo sapiens
  misc_RNA (1)...(19): siRNA sense strand
cggcgugguuuaugaggca

SEQ ID NO: 2419364 - RNA, 19 nt, Homo sapiens
  misc_RNA (1)...(19): siRNA sense strand
ccaaagauggaguugcaca

SEQ ID NO: 2419365 - RNA, 19 nt, Homo sapiens
  misc_RNA (1)...(19): siRNA sense strand
gcgcaugagucacggcaac

SEQ ID NO: 2419366 - RNA, 19 nt, Homo sapiens
  misc_RNA (1)...(19): siRNA sense strand
agggcaaucaagacaacaa

SEQ ID NO: 2419367 - RNA, 19 nt, Homo sapiens
  misc_RNA (1)...(19): siRNA sense strand
uuauugacucugagaccaa

SEQ ID NO: 2419368 - RNA, 19 nt, Homo sapiens
  misc_RNA (1)...(19): siRNA sense strand
agaccucgcugaaaggaga

SEQ ID NO: 2419369 - RNA, 19 nt, Homo sapiens
  misc_RNA (1)...(19): siRNA sense strand
ucuuaggagcugugagaaa

SEQ ID NO: 2419370 - RNA, 19 nt, Homo sapiens
  misc_RNA (1)...(19): siRNA sense strand
caguaugggccaagaagaa

SEQ ID NO: 2419371 - RNA, 19 nt, Homo sapiens
  misc_RNA (1)...(19): siRNA sense strand
gguauauaacucagagauu

SEQ ID NO: 2419372 - RNA, 19 nt, Homo sapiens
  misc_RNA (1)...(19): siRNA sense strand
ggaguagagcugugguaau

SEQ ID NO: 2419373 - RNA, 19 nt, Homo sapiens
  misc_RNA (1)...(19): siRNA sense strand
aggaauggcacaagugauu

SEQ ID NO: 2419374 - RNA, 19 nt, Homo sapiens
  misc_RNA (1)...(19): siRNA sense strand
uuacauuugcagaaggaaa

SEQ ID NO: 2419375 - RNA, 19 nt, Homo sapiens
  misc_RNA (1)...(19): siRNA sense strand
aggaaauucaccaggagaa

SEQ ID NO: 2419376 - RNA, 19 nt, Homo sapiens
  misc_RNA (1)...(19): siRNA sense strand
uacagaaauccuugagaaa

SEQ ID NO: 2419377 - RNA, 19 nt, Homo sapiens
  misc_RNA (1)...(19): siRNA sense strand
ugagaaaauuggagauuca

SEQ ID NO: 2419378 - RNA, 19 nt, Homo sapiens
  misc_RNA (1)...(19): siRNA sense strand
ucagaauggagcaggagaa

SEQ ID NO: 2419379 - RNA, 19 nt, Homo sapiens
  misc_RNA (1)...(19): siRNA sense strand
gagaaauggagauacggua

SEQ ID NO: 2419380 - RNA, 19 nt, Homo sapiens
  misc_RNA (1)...(19): siRNA sense strand
uguugaggauacagggaau

SEQ ID NO: 2419381 - RNA, 19 nt, Homo sapiens
  misc_RNA (1)...(19): siRNA sense strand
ccaccuacccagacaggaa

SEQ ID NO: 2419382 - RNA, 19 nt, Homo sapiens
  misc_RNA (1)...(19): siRNA sense strand
uguaagugagacugaauua

SEQ ID NO: 2419383 - RNA, 19 nt, Homo sapiens
  misc_RNA (1)...(19): siRNA sense strand
cugaagagaaacccaguaa

SEQ ID NO: 2419384 - RNA, 19 nt, Homo sapiens
  misc_RNA (1)...(19): siRNA sense strand
gcuaagaaaauuuguggaa

SEQ ID NO: 2419385 - RNA, 19 nt, Homo sapiens
  misc_RNA (1)...(19): siRNA sense strand
cagaauggagcaggagaaa

SEQ ID NO: 2419386 - RNA, 19 nt, Homo sapiens
  misc_RNA (1)...(19): siRNA sense strand
cgucuuaggagcugugaga

SEQ ID NO: 2419387 - RNA, 19 nt, Homo sapiens
  misc_RNA (1)...(19): siRNA sense strand
aauuaguaucacagggaau

SEQ ID NO: 2419388 - RNA, 19 nt, Homo sapiens
  misc_RNA (1)...(19): siRNA sense strand
aguguaugcaguaaggaaa

SEQ ID NO: 2419389 - RNA, 19 nt, Homo sapiens
  misc_RNA (1)...(19): siRNA sense strand
cuucaauggacuacagaca

SEQ ID NO: 2419390 - RNA, 19 nt, Homo sapiens
  misc_RNA (1)...(19): siRNA sense strand
gacuacagacagugggaau

SEQ ID NO: 2419391 - RNA, 19 nt, Homo sapiens
  misc_RNA (1)...(19): siRNA sense strand
agacugaauuagaaagugu

SEQ ID NO: 2419392 - RNA, 19 nt, Homo sapiens
  misc_RNA (1)...(19): siRNA sense strand
cgaugagguaccugaaaga

SEQ ID NO: 2419393 - RNA, 19 nt, Homo sapiens
  misc_RNA (1)...(19): siRNA sense strand
aguuggagauguugaggau

SEQ ID NO: 2419394 - RNA, 19 nt, Homo sapiens
  misc_RNA (1)...(19): siRNA sense strand
agagaaacccaguaacaga

SEQ ID NO: 2419395 - RNA, 19 nt, Homo sapiens
  misc_RNA (1)...(19): siRNA sense strand
ccccaaaauugacaagaaa

SEQ ID NO: 2419396 - RNA, 19 nt, Homo sapiens
  misc_RNA (1)...(19): siRNA sense strand
ggucaaagucauagccuuc

SEQ ID NO: 2419397 - RNA, 19 nt, Homo sapiens
  misc_RNA (1)...(19): siRNA sense strand
cauccaugagguacagaaa

SEQ ID NO: 2419398 - RNA, 19 nt, Homo sapiens
  misc_RNA (1)...(19): siRNA sense strand
agaacaaguguaugcagua

SEQ ID NO: 2419399 - RNA, 19 nt, Homo sapiens
  misc_RNA (1)...(19): siRNA sense strand
ggguaaccuuccagaacca

SEQ ID NO: 2419400 - RNA, 19 nt, Homo sapiens
  misc_RNA (1)...(19): siRNA sense strand
acaagaacccaaagaacca

SEQ ID NO: 2419401 - RNA, 19 nt, Homo sapiens
  misc_RNA (1)...(19): siRNA sense strand
cagcugugguaucaguaaa

SEQ ID NO: 2419402 - RNA, 19 nt, Homo sapiens
  misc_RNA (1)...(19): siRNA sense strand
aguuaaacaagaacccaaa

SEQ ID NO: 2419403 - RNA, 19 nt, Homo sapiens
  misc_RNA (1)...(19): siRNA sense strand
gugaauaguccucgggaug

SEQ ID NO: 2419404 - RNA, 19 nt, Homo sapiens
  misc_RNA (1)...(19): siRNA sense strand
aggaaacagcuaagaaaau

SEQ ID NO: 2419405 - RNA, 19 nt, Homo sapiens
  misc_RNA (1)...(19): siRNA sense strand
caaccauaaugacggugaa

SEQ ID NO: 2419406 - RNA, 19 nt, Homo sapiens
  misc_RNA (1)...(19): siRNA sense strand
ugaagaaaauccagaaagu

SEQ ID NO: 2419407 - RNA, 19 nt, Homo sapiens
  misc_RNA (1)...(19): siRNA sense strand
gaaaauuuguggaaaggga

SEQ ID NO: 2419408 - RNA, 19 nt, Homo sapiens
  misc_RNA (1)...(19): siRNA sense strand
gcacaaaugaugaucguug

SEQ ID NO: 2419409 - RNA, 19 nt, Homo sapiens
  misc_RNA (1)...(19): siRNA sense strand
gauuauaccucaggggcaa

SEQ ID NO: 2419410 - RNA, 19 nt, Homo sapiens
  misc_RNA (1)...(19): siRNA sense strand
gagcaggaaagcaggucuu

SEQ ID NO: 2419411 - RNA, 19 nt, Homo sapiens
  misc_RNA (1)...(19): siRNA sense strand
caucuaaucuguauggacu

SEQ ID NO: 2419412 - RNA, 19 nt, Homo sapiens
  misc_RNA (1)...(19): siRNA sense strand
ugaccggaaugcuggaaga

SEQ ID NO: 2419413 - RNA, 19 nt, Homo sapiens
  misc_RNA (1)...(19): siRNA sense strand
agugagacugaauuagaaa

SEQ ID NO: 2419414 - RNA, 19 nt, Homo sapiens
  misc_RNA (1)...(19): siRNA sense strand
cugugguaucaguaaauaa

SEQ ID NO: 2419415 - RNA, 19 nt, Homo sapiens
  misc_RNA (1)...(19): siRNA sense strand
uggacgagcugguagaagu

SEQ ID NO: 2419416 - RNA, 19 nt, Homo sapiens
  misc_RNA (1)...(19): siRNA sense strand
gcaacuuguggaugugaau

SEQ ID NO: 2419417 - RNA, 19 nt, Homo sapiens
  misc_RNA (1)...(19): siRNA sense strand
gggaguagagcugugguaa

SEQ ID NO: 2419418 - RNA, 19 nt, Homo sapiens
  misc_RNA (1)...(19): siRNA sense strand
gcugguagaaguuggagau

SEQ ID NO: 2419419 - RNA, 19 nt, Homo sapiens
  misc_RNA (1)...(19): siRNA sense strand
aaguguaugcaguaaggaa

SEQ ID NO: 2419420 - RNA, 19 nt, Homo sapiens
  misc_RNA (1)...(19): siRNA sense strand
ggacgagcugguagaaguu

SEQ ID NO: 2419421 - RNA, 19 nt, Homo sapiens
  misc_RNA (1)...(19): siRNA sense strand
ggauacagggaaucuggaa

SEQ ID NO: 2419422 - RNA, 19 nt, Homo sapiens
  misc_RNA (1)...(19): siRNA sense strand
ccaauacagauuauagaca

SEQ ID NO: 2419423 - RNA, 19 nt, Homo sapiens
  misc_RNA (1)...(19): siRNA sense strand
aaguuaaacaagaacccaa

SEQ ID NO: 2419424 - RNA, 19 nt, Homo sapiens
  misc_RNA (1)...(19): siRNA sense strand
ggauucuuccuuuggacaa

SEQ ID NO: 2419425 - RNA, 19 nt, Homo sapiens
  misc_RNA (1)...(19): siRNA sense strand
caccaaaguggaaacaaau

SEQ ID NO: 2419426 - RNA, 19 nt, Homo sapiens
  misc_RNA (1)...(19): siRNA sense strand
ccaaaguggaaacaaauca

SEQ ID NO: 2419427 - RNA, 19 nt, Homo sapiens
  misc_RNA (1)...(19): siRNA sense strand
cuucaggacuucuggauac

SEQ ID NO: 2419428 - RNA, 19 nt, Homo sapiens
  misc_RNA (1)...(19): siRNA sense strand
cugugguaauggaguguca

SEQ ID NO: 2419429 - RNA, 19 nt, Homo sapiens
  misc_RNA (1)...(19): siRNA sense strand
cugcagaaacugaaggagu

SEQ ID NO: 2419430 - RNA, 19 nt, Homo sapiens
  misc_RNA (1)...(19): siRNA sense strand
ugguggaauacuaggauau

SEQ ID NO: 2419431 - RNA, 19 nt, Homo sapiens
  misc_RNA (1)...(19): siRNA sense strand
ucauacagugucagaacaa

SEQ ID NO: 2419432 - RNA, 19 nt, Homo sapiens
  misc_RNA (1)...(19): siRNA sense strand
gguaugauguacaguggga

SEQ ID NO: 2419433 - RNA, 19 nt, Homo sapiens
  misc_RNA (1)...(19): siRNA sense strand
cggacuuagauauugcaua

SEQ ID NO: 2419434 - RNA, 19 nt, Homo sapiens
  misc_RNA (1)...(19): siRNA sense strand
uaugauguacagugggaau

SEQ ID NO: 2419435 - RNA, 19 nt, Homo sapiens
  misc_RNA (1)...(19): siRNA sense strand
aggacaacaaggauaugaa

SEQ ID NO: 2419436 - RNA, 19 nt, Homo sapiens
  misc_RNA (1)...(19): siRNA sense strand
acaaaggcugggaugggua

SEQ ID NO: 2419437 - RNA, 19 nt, Homo sapiens
  misc_RNA (1)...(19): siRNA sense strand
acagaauguugcugcggga

SEQ ID NO: 2419438 - RNA, 19 nt, Homo sapiens
  misc_RNA (1)...(19): siRNA sense strand
gagaagaggaagaggagga

SEQ ID NO: 2419439 - RNA, 19 nt, Homo sapiens
  misc_RNA (1)...(19): siRNA sense strand
agauauggaaagaggagaa

SEQ ID NO: 2419440 - RNA, 19 nt, Homo sapiens
  misc_RNA (1)...(19): siRNA sense strand
augacauggaugagggaaa

SEQ ID NO: 2419441 - RNA, 19 nt, Homo sapiens
  misc_RNA (1)...(19): siRNA sense strand
cggaggaguuggaggagga

SEQ ID NO: 2419442 - RNA, 19 nt, Homo sapiens
  misc_RNA (1)...(19): siRNA sense strand
aagaggaagaggaggaaga

SEQ ID NO: 2419443 - RNA, 19 nt, Homo sapiens
  misc_RNA (1)...(19): siRNA sense strand
aguuggaggaggagggaga

SEQ ID NO: 2419444 - RNA, 19 nt, Homo sapiens
  misc_RNA (1)...(19): siRNA sense strand
aggaggagggagagaauga

SEQ ID NO: 2419445 - RNA, 19 nt, Homo sapiens
  misc_RNA (1)...(19): siRNA sense strand
cguuuaacagauauggaaa

SEQ ID NO: 2419446 - RNA, 19 nt, Homo sapiens
  misc_RNA (1)...(19): siRNA sense strand
aaagaggagaagaggaaga

SEQ ID NO: 2419447 - RNA, 19 nt, Homo sapiens
  misc_RNA (1)...(19): siRNA sense strand
gcguauacuacuacaucaa

SEQ ID NO: 2419448 - RNA, 19 nt, Homo sapiens
  misc_RNA (1)...(19): siRNA sense strand
agagaaugauauuggggaa

SEQ ID NO: 2419449 - RNA, 19 nt, Homo sapiens
  misc_RNA (1)...(19): siRNA sense strand
ucaucaaaggcaugggcaa

SEQ ID NO: 2419450 - RNA, 19 nt, Homo sapiens
  misc_RNA (1)...(19): siRNA sense strand
gggcaaaugaccugcggca

SEQ ID NO: 2419451 - RNA, 19 nt, Homo sapiens
  misc_RNA (1)...(19): siRNA sense strand
cggaaugaggcaggcgaaa

SEQ ID NO: 2419452 - RNA, 19 nt, Homo sapiens
  misc_RNA (1)...(19): siRNA sense strand
gaggagaagaggaagagga

SEQ ID NO: 2419453 - RNA, 19 nt, Homo sapiens
  misc_RNA (1)...(19): siRNA sense strand
uaugaaggagagugggcaa

SEQ ID NO: 2419454 - RNA, 19 nt, Homo sapiens
  misc_RNA (1)...(19): siRNA sense strand
gggaguaugaccaggagga

SEQ ID NO: 2419455 - RNA, 19 nt, Homo sapiens
  misc_RNA (1)...(19): siRNA sense strand
gauccagauaugaaggaga

SEQ ID NO: 2419456 - RNA, 19 nt, Homo sapiens
  misc_RNA (1)...(19): siRNA sense strand
uggagggcuucgaggguga

SEQ ID NO: 2419457 - RNA, 19 nt, Homo sapiens
  misc_RNA (1)...(19): siRNA sense strand
gcucggaggaguuggagga

SEQ ID NO: 2419458 - RNA, 19 nt, Homo sapiens
  misc_RNA (1)...(19): siRNA sense strand
aguaugaccaggaggaguu

SEQ ID NO: 2419459 - RNA, 19 nt, Homo sapiens
  misc_RNA (1)...(19): siRNA sense strand
agcugagagugcaggagaa

SEQ ID NO: 2419460 - RNA, 19 nt, Homo sapiens
  misc_RNA (1)...(19): siRNA sense strand
gugugaacaacauggugaa

SEQ ID NO: 2419461 - RNA, 19 nt, Homo sapiens
  misc_RNA (1)...(19): siRNA sense strand
aggcucugcuggagggcuu

SEQ ID NO: 2419462 - RNA, 19 nt, Homo sapiens
  misc_RNA (1)...(19): siRNA sense strand
aagaagaagaaacuagaca

SEQ ID NO: 2419463 - RNA, 19 nt, Homo sapiens
  misc_RNA (1)...(19): siRNA sense strand
uggaaagaggagaagagga

SEQ ID NO: 2419464 - RNA, 19 nt, Homo sapiens
  misc_RNA (1)...(19): siRNA sense strand
ggugugaacaacaugguga

SEQ ID NO: 2419465 - RNA, 19 nt, Homo sapiens
  misc_RNA (1)...(19): siRNA sense strand
uguauuugauguugggugu

SEQ ID NO: 2419466 - RNA, 19 nt, Homo sapiens
  misc_RNA (1)...(19): siRNA sense strand
gagcugagagugcaggaga

SEQ ID NO: 2419467 - RNA, 19 nt, Homo sapiens
  misc_RNA (1)...(19): siRNA sense strand
gcuucgagggugagaugga

SEQ ID NO: 2419468 - RNA, 19 nt, Homo sapiens
  misc_RNA (1)...(19): siRNA sense strand
agucaguggaggugcgaga

SEQ ID NO: 2419469 - RNA, 19 nt, Homo sapiens
  misc_RNA (1)...(19): siRNA sense strand
ggacauggaugagggcaca

SEQ ID NO: 2419470 - RNA, 19 nt, Homo sapiens
  misc_RNA (1)...(19): siRNA sense strand
gcuuaaaggaacuuagaaa

SEQ ID NO: 2419471 - RNA, 19 nt, Homo sapiens
  misc_RNA (1)...(19): siRNA sense strand
uugcaaacuuuauggccua

SEQ ID NO: 2419472 - RNA, 19 nt, Homo sapiens
  misc_RNA (1)...(19): siRNA sense strand
augaagaaugccagagaca

SEQ ID NO: 2419473 - RNA, 19 nt, Homo sapiens
  misc_RNA (1)...(19): siRNA sense strand
gaggaaggcuuaaaggaac

SEQ ID NO: 2419474 - RNA, 19 nt, Homo sapiens
  misc_RNA (1)...(19): siRNA sense strand
gggcaagagcuauggggau

SEQ ID NO: 2419475 - RNA, 19 nt, Homo sapiens
  misc_RNA (1)...(19): siRNA sense strand
ugggaauuacauugggaau

SEQ ID NO: 2419476 - RNA, 19 nt, Homo sapiens
  misc_RNA (1)...(19): siRNA sense strand
aaaccuucucugugugaaa

SEQ ID NO: 2419477 - RNA, 19 nt, Homo sapiens
  misc_RNA (1)...(19): siRNA sense strand
gagaaaagaccccagagaa

SEQ ID NO: 2419478 - RNA, 19 nt, Homo sapiens
  misc_RNA (1)...(19): siRNA sense strand
aggaaggcuuaaaggaacu

SEQ ID NO: 2419479 - RNA, 19 nt, Homo sapiens
  misc_RNA (1)...(19): siRNA sense strand
gcacacaggaguggaauga

SEQ ID NO: 2419480 - RNA, 19 nt, Homo sapiens
  misc_RNA (1)...(19): siRNA sense strand
uuaauagccgagugggcaa

SEQ ID NO: 2419481 - RNA, 19 nt, Homo sapiens
  misc_RNA (1)...(19): siRNA sense strand
cagucauccuccuggccaa

SEQ ID NO: 2419482 - RNA, 19 nt, Homo sapiens
  misc_RNA (1)...(19): siRNA sense strand
agaaaagaccccagagaac

SEQ ID NO: 2419483 - RNA, 19 nt, Homo sapiens
  misc_RNA (1)...(19): siRNA sense strand
acaauaaaccagaggaagg

SEQ ID NO: 2419484 - RNA, 19 nt, Homo sapiens
  misc_RNA (1)...(19): siRNA sense strand
acacaggaguggaaugaag

SEQ ID NO: 2419485 - RNA, 19 nt, Homo sapiens
  misc_RNA (1)...(19): siRNA sense strand
caacauauguaaaaggauc

SEQ ID NO: 2419486 - RNA, 19 nt, Homo sapiens
  misc_RNA (1)...(19): siRNA sense strand
cgagaguggaagugacgca

SEQ ID NO: 2419487 - RNA, 19 nt, Homo sapiens
  misc_RNA (1)...(19): siRNA sense strand
gaguaaugguugaucguga

SEQ ID NO: 2419488 - RNA, 19 nt, Homo sapiens
  misc_RNA (1)...(19): siRNA sense strand
cugcaaucuccuugacaaa

SEQ ID NO: 2419489 - RNA, 19 nt, Homo sapiens
  misc_RNA (1)...(19): siRNA sense strand
ccuucgagaguaagaguaa

SEQ ID NO: 2419490 - RNA, 19 nt, Homo sapiens
  misc_RNA (1)...(19): siRNA sense strand
agucaaggaaauaaagaca

SEQ ID NO: 2419491 - RNA, 19 nt, Homo sapiens
  misc_RNA (1)...(19): siRNA sense strand
cacugaaauaugugugaau

SEQ ID NO: 2419492 - RNA, 19 nt, Homo sapiens
  misc_RNA (1)...(19): siRNA sense strand
gaaauaaagacacagcuga

SEQ ID NO: 2419493 - RNA, 19 nt, Homo sapiens
  misc_RNA (1)...(19): siRNA sense strand
acauugcauuuguggaaaa

SEQ ID NO: 2419494 - RNA, 19 nt, Homo sapiens
  misc_RNA (1)...(19): siRNA sense strand
agacaaaagacuauguuca

SEQ ID NO: 2419495 - RNA, 19 nt, Homo sapiens
  misc_RNA (1)...(19): siRNA sense strand
cugaaauaugugugaauac

SEQ ID NO: 2419496 - RNA, 19 nt, Homo sapiens
  misc_RNA (1)...(19): siRNA sense strand
gugaauuggcugacaucca

SEQ ID NO: 2419497 - RNA, 19 nt, Homo sapiens
  misc_RNA (1)...(19): siRNA sense strand
ggauaucacuguuacgaac

SEQ ID NO: 2419498 - RNA, 19 nt, Homo sapiens
  misc_RNA (1)...(19): siRNA sense strand
caagaagacaaaagacuau

SEQ ID NO: 2419499 - RNA, 19 nt, Homo sapiens
  misc_RNA (1)...(19): siRNA sense strand
cuucaaaauacuacugcaa

SEQ ID NO: 2419500 - RNA, 19 nt, Homo sapiens
  misc_RNA (1)...(19): siRNA sense strand
agacagaaguuguaaccug

SEQ ID NO: 2419501 - RNA, 19 nt, Homo sapiens
  misc_RNA (1)...(19): siRNA sense strand
ccacaggaaacgagagcca

SEQ ID NO: 2419502 - RNA, 19 nt, Homo sapiens
  misc_RNA (1)...(19): siRNA sense strand
ccauaaaagccccaguaaa

SEQ ID NO: 2419503 - RNA, 19 nt, Homo sapiens
  misc_RNA (1)...(19): siRNA sense strand
caguaaaguccacagaaaa

SEQ ID NO: 2419504 - RNA, 19 nt, Homo sapiens
  misc_RNA (1)...(19): siRNA sense strand
ccauaugcaccaaagggaa

SEQ ID NO: 2419505 - RNA, 19 nt, Homo sapiens
  misc_RNA (1)...(19): siRNA sense strand
uggacagaugggagagaau

SEQ ID NO: 2419506 - RNA, 19 nt, Homo sapiens
  misc_RNA (1)...(19): siRNA sense strand
cagucaaggucacaggaga

SEQ ID NO: 2419507 - RNA, 19 nt, Homo sapiens
  misc_RNA (1)...(19): siRNA sense strand
gagaagaccauaugcacca

SEQ ID NO: 2419508 - RNA, 19 nt, Homo sapiens
  misc_RNA (1)...(19): siRNA sense strand
ccucaauaaagauggcuca

SEQ ID NO: 2419509 - RNA, 19 nt, Homo sapiens
  misc_RNA (1)...(19): siRNA sense strand
cggucuaccugauggagca

SEQ ID NO: 2419510 - RNA, 19 nt, Homo sapiens
  misc_RNA (1)...(19): siRNA sense strand
ccagaaaagccuacgcuau

SEQ ID NO: 2419511 - RNA, 19 nt, Homo sapiens
  misc_RNA (1)...(19): siRNA sense strand
ccagaaaagaccacgucaa

SEQ ID NO: 2419512 - RNA, 19 nt, Homo sapiens
  misc_RNA (1)...(19): siRNA sense strand
agaaaagccuacagaaaac

SEQ ID NO: 2419513 - RNA, 19 nt, Homo sapiens
  misc_RNA (1)...(19): siRNA sense strand
cacgucaaccacagagaaa

SEQ ID NO: 2419514 - RNA, 19 nt, Homo sapiens
  misc_RNA (1)...(19): siRNA sense strand
cuauaaaaccuucagucaa

SEQ ID NO: 2419515 - RNA, 19 nt, Homo sapiens
  misc_RNA (1)...(19): siRNA sense strand
cagaaaaguccacagaaca

SEQ ID NO: 2419516 - RNA, 19 nt, Homo sapiens
  misc_RNA (1)...(19): siRNA sense strand
cccagaacacccaguacaa

SEQ ID NO: 2419517 - RNA, 19 nt, Homo sapiens
  misc_RNA (1)...(19): siRNA sense strand
gaggagaauucuugggaga

SEQ ID NO: 2419518 - RNA, 19 nt, Homo sapiens
  misc_RNA (1)...(19): siRNA sense strand
caucaauguuacuaggcaa

SEQ ID NO: 2419519 - RNA, 19 nt, Homo sapiens
  misc_RNA (1)...(19): siRNA sense strand
aggacagaacugaggacaa

SEQ ID NO: 2419520 - RNA, 19 nt, Homo sapiens
  misc_RNA (1)...(19): siRNA sense strand
ugggaaguguggagcgaau

SEQ ID NO: 2419521 - RNA, 19 nt, Homo sapiens
  misc_RNA (1)...(19): siRNA sense strand
cuagagagugaacgagaaa

SEQ ID NO: 2419522 - RNA, 19 nt, Homo sapiens
  misc_RNA (1)...(19): siRNA sense strand
cugaacaagacgagaacau

SEQ ID NO: 2419523 - RNA, 19 nt, Homo sapiens
  misc_RNA (1)...(19): siRNA sense strand
aguucugagcauuggaaua

SEQ ID NO: 2419524 - RNA, 19 nt, Homo sapiens
  misc_RNA (1)...(19): siRNA sense strand
gaguuuacuguguggacaa

SEQ ID NO: 2419525 - RNA, 19 nt, Homo sapiens
  misc_RNA (1)...(19): siRNA sense strand
gcacaagaggacagcacuu

SEQ ID NO: 2419526 - RNA, 19 nt, Homo sapiens
  misc_RNA (1)...(19): siRNA sense strand
gggcaaauucugugaaggu

SEQ ID NO: 2419527 - RNA, 19 nt, Homo sapiens
  misc_RNA (1)...(19): siRNA sense strand
gugccaucccagaggagaa

SEQ ID NO: 2419528 - RNA, 19 nt, Homo sapiens
  misc_RNA (1)...(19): siRNA sense strand
gcccauugacucugaacaa

SEQ ID NO: 2419529 - RNA, 19 nt, Homo sapiens
  misc_RNA (1)...(19): siRNA sense strand
agggaaugucagugcagaa

SEQ ID NO: 2419530 - RNA, 19 nt, Homo sapiens
  misc_RNA (1)...(19): siRNA sense strand
ugguagaggauggcagaaa

SEQ ID NO: 2419531 - RNA, 19 nt, Homo sapiens
  misc_RNA (1)...(19): siRNA sense strand
gagcugaguaccacggcaa

SEQ ID NO: 2419532 - RNA, 19 nt, Homo sapiens
  misc_RNA (1)...(19): siRNA sense strand
acaccagggcugaccauaa

SEQ ID NO: 2419533 - RNA, 19 nt, Homo sapiens
  misc_RNA (1)...(19): siRNA sense strand
aguuaaagcucucagugau

SEQ ID NO: 2419534 - RNA, 19 nt, Homo sapiens
  misc_RNA (1)...(19): siRNA sense strand
acucugaacaagacgagaa

SEQ ID NO: 2419535 - RNA, 19 nt, Homo sapiens
  misc_RNA (1)...(19): siRNA sense strand
gcuaagaggagaagccugu

SEQ ID NO: 2419536 - RNA, 19 nt, Homo sapiens
  misc_RNA (1)...(19): siRNA sense strand
gcaucaagguggacagcuc

SEQ ID NO: 2419537 - RNA, 19 nt, Homo sapiens
  misc_RNA (1)...(19): siRNA sense strand
agacggagccagagugacu

SEQ ID NO: 2419538 - RNA, 19 nt, Homo sapiens
  misc_RNA (1)...(19): siRNA sense strand
aagugaugucaguggaaga

SEQ ID NO: 2419539 - RNA, 19 nt, Homo sapiens
  misc_RNA (1)...(19): siRNA sense strand
aggagaagccugucggcca

SEQ ID NO: 2419540 - RNA, 19 nt, Homo sapiens
  misc_RNA (1)...(19): siRNA sense strand
aaauaaaaccccaaagcau

SEQ ID NO: 2419541 - RNA, 19 nt, Homo sapiens
  misc_RNA (1)...(19): siRNA sense strand
ugacaauggcgaagcccuu

SEQ ID NO: 2419542 - RNA, 19 nt, Homo sapiens
  misc_RNA (1)...(19): siRNA sense strand
cauuuaaagaagaggacac

SEQ ID NO: 2419543 - RNA, 19 nt, Homo sapiens
  misc_RNA (1)...(19): siRNA sense strand
caauguucgcugugguaga

SEQ ID NO: 2419544 - RNA, 19 nt, Homo sapiens
  misc_RNA (1)...(19): siRNA sense strand
ugaaaggcaucaaggugga

SEQ ID NO: 2419545 - RNA, 19 nt, Homo sapiens
  misc_RNA (1)...(19): siRNA sense strand
ccauugacucugaacaaga

SEQ ID NO: 2419546 - RNA, 19 nt, Homo sapiens
  misc_RNA (1)...(19): siRNA sense strand
cagccagaucugacaguga

SEQ ID NO: 2419547 - RNA, 19 nt, Homo sapiens
  misc_RNA (1)...(19): siRNA sense strand
gagauugggaggacacaca

SEQ ID NO: 2419548 - RNA, 19 nt, Homo sapiens
  misc_RNA (1)...(19): siRNA sense strand
gcucucggacucaggaaau

SEQ ID NO: 2419549 - RNA, 19 nt, Homo sapiens
  misc_RNA (1)...(19): siRNA sense strand
gcaaauucugugaaggucu

SEQ ID NO: 2419550 - RNA, 19 nt, Homo sapiens
  misc_RNA (1)...(19): siRNA sense strand
agaggacacagcagggcaa

SEQ ID NO: 2419551 - RNA, 19 nt, Homo sapiens
  misc_RNA (1)...(19): siRNA sense strand
gcugcauuucaaagggaau

SEQ ID NO: 2419552 - RNA, 19 nt, Homo sapiens
  misc_RNA (1)...(19): siRNA sense strand
cugcauuucaaagggaaua

SEQ ID NO: 2419553 - RNA, 19 nt, Homo sapiens
  misc_RNA (1)...(19): siRNA sense strand
cuuuacagacggagccaga

SEQ ID NO: 2419554 - RNA, 19 nt, Homo sapiens
  misc_RNA (1)...(19): siRNA sense strand
ccucaagggucacgcgcua

SEQ ID NO: 2419555 - RNA, 19 nt, Homo sapiens
  misc_RNA (1)...(19): siRNA sense strand
ggauggaggggaagggaaa

SEQ ID NO: 2419556 - RNA, 19 nt, Homo sapiens
  misc_RNA (1)...(19): siRNA sense strand
ccaagaaggaggacggcuu

SEQ ID NO: 2419557 - RNA, 19 nt, Homo sapiens
  misc_RNA (1)...(19): siRNA sense strand
uggugaaaguguuuggaga

SEQ ID NO: 2419558 - RNA, 19 nt, Homo sapiens
  misc_RNA (1)...(19): siRNA sense strand
uggagguggcgcuggguaa

SEQ ID NO: 2419559 - RNA, 19 nt, Homo sapiens
  misc_RNA (1)...(19): siRNA sense strand
acgcgcuagcugugagaaa

SEQ ID NO: 2419560 - RNA, 19 nt, Homo sapiens
  misc_RNA (1)...(19): siRNA sense strand
gugucaacgccgaggacga

SEQ ID NO: 2419561 - RNA, 19 nt, Homo sapiens
  misc_RNA (1)...(19): siRNA sense strand
gggagaugcaggaaggcca

SEQ ID NO: 2419562 - RNA, 19 nt, Homo sapiens
  misc_RNA (1)...(19): siRNA sense strand
uggcggaguuuaucggaca

SEQ ID NO: 2419563 - RNA, 19 nt, Homo sapiens
  misc_RNA (1)...(19): siRNA sense strand
gcgaguggacggacgacau

SEQ ID NO: 2419564 - RNA, 19 nt, Homo sapiens
  misc_RNA (1)...(19): siRNA sense strand
gcgucgggaagguggugaa

SEQ ID NO: 2419565 - RNA, 19 nt, Homo sapiens
  misc_RNA (1)...(19): siRNA sense strand
cgguugaccuaguggaaaa

SEQ ID NO: 2419566 - RNA, 19 nt, Homo sapiens
  misc_RNA (1)...(19): siRNA sense strand
uggaaaagacucugaggaa

SEQ ID NO: 2419567 - RNA, 19 nt, Homo sapiens
  misc_RNA (1)...(19): siRNA sense strand
gcagcaaaguggccggaga

SEQ ID NO: 2419568 - RNA, 19 nt, Homo sapiens
  misc_RNA (1)...(19): siRNA sense strand
ggagacaucuucaaggaca

SEQ ID NO: 2419569 - RNA, 19 nt, Homo sapiens
  misc_RNA (1)...(19): siRNA sense strand
gaucaugagcagugccaca

SEQ ID NO: 2419570 - RNA, 19 nt, Homo sapiens
  misc_RNA (1)...(19): siRNA sense strand
acgagaacccugagaucuu

SEQ ID NO: 2419571 - RNA, 19 nt, Homo sapiens
  misc_RNA (1)...(19): siRNA sense strand
gcacagagaagaacagcac

SEQ ID NO: 2419572 - RNA, 19 nt, Homo sapiens
  misc_RNA (1)...(19): siRNA sense strand
gcccgugcacagagaagaa

SEQ ID NO: 2419573 - RNA, 19 nt, Homo sapiens
  misc_RNA (1)...(19): siRNA sense strand
cuaaaauccugguggggaa

SEQ ID NO: 2419574 - RNA, 19 nt, Homo sapiens
  misc_RNA (1)...(19): siRNA sense strand
gcgacagggacguaggcaa

SEQ ID NO: 2419575 - RNA, 19 nt, Homo sapiens
  misc_RNA (1)...(19): siRNA sense strand
ggauagugcugcugcggca

SEQ ID NO: 2419576 - RNA, 19 nt, Homo sapiens
  misc_RNA (1)...(19): siRNA sense strand
gggacguaggcaagaguga

SEQ ID NO: 2419577 - RNA, 19 nt, Homo sapiens
  misc_RNA (1)...(19): siRNA sense strand
cugugcaucugguggacaa

SEQ ID NO: 2419578 - RNA, 19 nt, Homo sapiens
  misc_RNA (1)...(19): siRNA sense strand
gcuaagggccugaaugcca

SEQ ID NO: 2419579 - RNA, 19 nt, Homo sapiens
  misc_RNA (1)...(19): siRNA sense strand
cgacagggacguaggcaag

SEQ ID NO: 2419580 - RNA, 19 nt, Homo sapiens
  misc_RNA (1)...(19): siRNA sense strand
gugagauccuggagagccu

SEQ ID NO: 2419581 - RNA, 19 nt, Homo sapiens
  misc_RNA (1)...(19): siRNA sense strand
ggauuaagaagauugagga

SEQ ID NO: 2419582 - RNA, 19 nt, Homo sapiens
  misc_RNA (1)...(19): siRNA sense strand
gguuguuucuggugggauc

SEQ ID NO: 2419583 - RNA, 19 nt, Homo sapiens
  misc_RNA (1)...(19): siRNA sense strand
gagaaacacccuugacuuu

SEQ ID NO: 2419584 - RNA, 19 nt, Homo sapiens
  misc_RNA (1)...(19): siRNA sense strand
uauaagacacucugggaau

SEQ ID NO: 2419585 - RNA, 19 nt, Homo sapiens
  misc_RNA (1)...(19): siRNA sense strand
ccuucugauugcugugaaa

SEQ ID NO: 2419586 - RNA, 19 nt, Homo sapiens
  misc_RNA (1)...(19): siRNA sense strand
gcaugaagcagccaagcaa

SEQ ID NO: 2419587 - RNA, 19 nt, Homo sapiens
  misc_RNA (1)...(19): siRNA sense strand
uggaugaagcugaugaaaa

SEQ ID NO: 2419588 - RNA, 19 nt, Homo sapiens
  misc_RNA (1)...(19): siRNA sense strand
gaccugugauggagaaaca

SEQ ID NO: 2419589 - RNA, 19 nt, Homo sapiens
  misc_RNA (1)...(19): siRNA sense strand
cgacucugaucaaacauaa

SEQ ID NO: 2419590 - RNA, 19 nt, Homo sapiens
  misc_RNA (1)...(19): siRNA sense strand
ggagaaacacccuugacuu

SEQ ID NO: 2419591 - RNA, 19 nt, Homo sapiens
  misc_RNA (1)...(19): siRNA sense strand
ucagcuaaguauucaagaa

SEQ ID NO: 2419592 - RNA, 19 nt, Homo sapiens
  misc_RNA (1)...(19): siRNA sense strand
cuauaagacacucugggaa

SEQ ID NO: 2419593 - RNA, 19 nt, Homo sapiens
  misc_RNA (1)...(19): siRNA sense strand
aagcuggucugguggaaaa

SEQ ID NO: 2419594 - RNA, 19 nt, Homo sapiens
  misc_RNA (1)...(19): siRNA sense strand
augcaauggaugaagcuga

SEQ ID NO: 2419595 - RNA, 19 nt, Homo sapiens
  misc_RNA (1)...(19): siRNA sense strand
auucaagaccugugaugga

SEQ ID NO: 2419596 - RNA, 19 nt, Homo sapiens
  misc_RNA (1)...(19): siRNA sense strand
ccuaagugcucaaaacaga

SEQ ID NO: 2419597 - RNA, 19 nt, Homo sapiens
  misc_RNA (1)...(19): siRNA sense strand
gucaagcgauggucagcaa

SEQ ID NO: 2419598 - RNA, 19 nt, Homo sapiens
  misc_RNA (1)...(19): siRNA sense strand
aagaauuagagaagggaaa

SEQ ID NO: 2419599 - RNA, 19 nt, Homo sapiens
  misc_RNA (1)...(19): siRNA sense strand
aggaagaguuagaagaaga

SEQ ID NO: 2419600 - RNA, 19 nt, Homo sapiens
  misc_RNA (1)...(19): siRNA sense strand
ugucaauccacgaaagaaa

SEQ ID NO: 2419601 - RNA, 19 nt, Homo sapiens
  misc_RNA (1)...(19): siRNA sense strand
aagaagaggaagacgaaga

SEQ ID NO: 2419602 - RNA, 19 nt, Homo sapiens
  misc_RNA (1)...(19): siRNA sense strand
aagaggaagaagaggaaga

SEQ ID NO: 2419603 - RNA, 19 nt, Homo sapiens
  misc_RNA (1)...(19): siRNA sense strand
ccauugaagccgucgcaaa

SEQ ID NO: 2419604 - RNA, 19 nt, Homo sapiens
  misc_RNA (1)...(19): siRNA sense strand
gguggaagaauuaaagaau

SEQ ID NO: 2419605 - RNA, 19 nt, Homo sapiens
  misc_RNA (1)...(19): siRNA sense strand
aagacgaagaggaggauau

SEQ ID NO: 2419606 - RNA, 19 nt, Homo sapiens
  misc_RNA (1)...(19): siRNA sense strand
aagcagaaauacacagaca

SEQ ID NO: 2419607 - RNA, 19 nt, Homo sapiens
  misc_RNA (1)...(19): siRNA sense strand
aggagaagggguuggaaaa

SEQ ID NO: 2419608 - RNA, 19 nt, Homo sapiens
  misc_RNA (1)...(19): siRNA sense strand
agagcaagauguuggugaa

SEQ ID NO: 2419609 - RNA, 19 nt, Homo sapiens
  misc_RNA (1)...(19): siRNA sense strand
ucuacaaagcagugucaaa

SEQ ID NO: 2419610 - RNA, 19 nt, Homo sapiens
  misc_RNA (1)...(19): siRNA sense strand
cagaagaggaagaagagga

SEQ ID NO: 2419611 - RNA, 19 nt, Homo sapiens
  misc_RNA (1)...(19): siRNA sense strand
cagacauggccaaggagua

SEQ ID NO: 2419612 - RNA, 19 nt, Homo sapiens
  misc_RNA (1)...(19): siRNA sense strand
gcauagagaaacuuggaga

SEQ ID NO: 2419613 - RNA, 19 nt, Homo sapiens
  misc_RNA (1)...(19): siRNA sense strand
uggaagaaucaaagcuaau

SEQ ID NO: 2419614 - RNA, 19 nt, Homo sapiens
  misc_RNA (1)...(19): siRNA sense strand
cagcaaaggaaguggggau

SEQ ID NO: 2419615 - RNA, 19 nt, Homo sapiens
  misc_RNA (1)...(19): siRNA sense strand
cccuaaagcaacugagaca

SEQ ID NO: 2419616 - RNA, 19 nt, Homo sapiens
  misc_RNA (1)...(19): siRNA sense strand
aggaagaagaggaagacga

SEQ ID NO: 2419617 - RNA, 19 nt, Homo sapiens
  misc_RNA (1)...(19): siRNA sense strand
aggaagacgaagaggagga

SEQ ID NO: 2419618 - RNA, 19 nt, Homo sapiens
  misc_RNA (1)...(19): siRNA sense strand
aguuagaagaagaucacaa

SEQ ID NO: 2419619 - RNA, 19 nt, Homo sapiens
  misc_RNA (1)...(19): siRNA sense strand
ugaaaucaagagagaagaa

SEQ ID NO: 2419620 - RNA, 19 nt, Homo sapiens
  misc_RNA (1)...(19): siRNA sense strand
aaaacgaagcucaggaaaa

SEQ ID NO: 2419621 - RNA, 19 nt, Homo sapiens
  misc_RNA (1)...(19): siRNA sense strand
agcaagaaguucaagaaga

SEQ ID NO: 2419622 - RNA, 19 nt, Homo sapiens
  misc_RNA (1)...(19): siRNA sense strand
agaaaaugucaaaggagaa

SEQ ID NO: 2419623 - RNA, 19 nt, Homo sapiens
  misc_RNA (1)...(19): siRNA sense strand
gugagacaccagaggguau

SEQ ID NO: 2419624 - RNA, 19 nt, Homo sapiens
  misc_RNA (1)...(19): siRNA sense strand
gcuaauguugacagaggaa

SEQ ID NO: 2419625 - RNA, 19 nt, Homo sapiens
  misc_RNA (1)...(19): siRNA sense strand
agacaaagccaaaagaaga

SEQ ID NO: 2419626 - RNA, 19 nt, Homo sapiens
  misc_RNA (1)...(19): siRNA sense strand
agaacaugcucuuggcaca

SEQ ID NO: 2419627 - RNA, 19 nt, Homo sapiens
  misc_RNA (1)...(19): siRNA sense strand
agacuggggcauagagaaa

SEQ ID NO: 2419628 - RNA, 19 nt, Homo sapiens
  misc_RNA (1)...(19): siRNA sense strand
gcacagaggucagagguca

SEQ ID NO: 2419629 - RNA, 19 nt, Homo sapiens
  misc_RNA (1)...(19): siRNA sense strand
guucuugauccaaaggaaa

SEQ ID NO: 2419630 - RNA, 19 nt, Homo sapiens
  misc_RNA (1)...(19): siRNA sense strand
uggugaaacugaagaugau

SEQ ID NO: 2419631 - RNA, 19 nt, Homo sapiens
  misc_RNA (1)...(19): siRNA sense strand
uagagaagggaaaggaaga

SEQ ID NO: 2419632 - RNA, 19 nt, Homo sapiens
  misc_RNA (1)...(19): siRNA sense strand
gagaagggaaaggaagaaa

SEQ ID NO: 2419633 - RNA, 19 nt, Homo sapiens
  misc_RNA (1)...(19): siRNA sense strand
ggggauaaauggucaaaca

SEQ ID NO: 2419634 - RNA, 19 nt, Homo sapiens
  misc_RNA (1)...(19): siRNA sense strand
gggauaaauggucaaacaa

SEQ ID NO: 2419635 - RNA, 19 nt, Homo sapiens
  misc_RNA (1)...(19): siRNA sense strand
augacaaaccaaaggaaca

SEQ ID NO: 2419636 - RNA, 19 nt, Homo sapiens
  misc_RNA (1)...(19): siRNA sense strand
acgaagaggaggauauuga

SEQ ID NO: 2419637 - RNA, 19 nt, Homo sapiens
  misc_RNA (1)...(19): siRNA sense strand
ccgauggccuagagcaaga

SEQ ID NO: 2419638 - RNA, 19 nt, Homo sapiens
  misc_RNA (1)...(19): siRNA sense strand
aagagaaaagcaaggaaaa

SEQ ID NO: 2419639 - RNA, 19 nt, Homo sapiens
  misc_RNA (1)...(19): siRNA sense strand
uuucagaagaggaagaaga

SEQ ID NO: 2419640 - RNA, 19 nt, Homo sapiens
  misc_RNA (1)...(19): siRNA sense strand
auggaagaucccaaagaaa

SEQ ID NO: 2419641 - RNA, 19 nt, Homo sapiens
  misc_RNA (1)...(19): siRNA sense strand
aagaaaaugucaaaggaga

SEQ ID NO: 2419642 - RNA, 19 nt, Homo sapiens
  misc_RNA (1)...(19): siRNA sense strand
ugagaaauuuugaggcauu

SEQ ID NO: 2419643 - RNA, 19 nt, Homo sapiens
  misc_RNA (1)...(19): siRNA sense strand
uuagaaaggaagaguuaga

SEQ ID NO: 2419644 - RNA, 19 nt, Homo sapiens
  misc_RNA (1)...(19): siRNA sense strand
caaaggaaguggggauaaa

SEQ ID NO: 2419645 - RNA, 19 nt, Homo sapiens
  misc_RNA (1)...(19): siRNA sense strand
ucgacauggaaaugauaaa

SEQ ID NO: 2419646 - RNA, 19 nt, Homo sapiens
  misc_RNA (1)...(19): siRNA sense strand
ugacaaaccaaaggaacaa

SEQ ID NO: 2419647 - RNA, 19 nt, Homo sapiens
  misc_RNA (1)...(19): siRNA sense strand
auagagaaacuuggagaua

SEQ ID NO: 2419648 - RNA, 19 nt, Homo sapiens
  misc_RNA (1)...(19): siRNA sense strand
agaaguucaagaagacaaa

SEQ ID NO: 2419649 - RNA, 19 nt, Homo sapiens
  misc_RNA (1)...(19): siRNA sense strand
gagcaagauguuggugaaa

SEQ ID NO: 2419650 - RNA, 19 nt, Homo sapiens
  misc_RNA (1)...(19): siRNA sense strand
auggaagaaucaaagcuaa

SEQ ID NO: 2419651 - RNA, 19 nt, Homo sapiens
  misc_RNA (1)...(19): siRNA sense strand
ggagaaaacagaugaaacu

SEQ ID NO: 2419652 - RNA, 19 nt, Homo sapiens
  misc_RNA (1)...(19): siRNA sense strand
cgaugguggaagaauuaaa

SEQ ID NO: 2419653 - RNA, 19 nt, Homo sapiens
  misc_RNA (1)...(19): siRNA sense strand
cuaaagcaacugagacaga

SEQ ID NO: 2419654 - RNA, 19 nt, Homo sapiens
  misc_RNA (1)...(19): siRNA sense strand
guuucaguuugcagagauu

SEQ ID NO: 2419655 - RNA, 19 nt, Homo sapiens
  misc_RNA (1)...(19): siRNA sense strand
guauaaaagcagaaccauu

SEQ ID NO: 2419656 - RNA, 19 nt, Homo sapiens
  misc_RNA (1)...(19): siRNA sense strand
ucaugaaggguguuggaau

SEQ ID NO: 2419657 - RNA, 19 nt, Homo sapiens
  misc_RNA (1)...(19): siRNA sense strand
aagaaguucaagaagacaa

SEQ ID NO: 2419658 - RNA, 19 nt, Homo sapiens
  misc_RNA (1)...(19): siRNA sense strand
agacagacugcaaugacaa

SEQ ID NO: 2419659 - RNA, 19 nt, Homo sapiens
  misc_RNA (1)...(19): siRNA sense strand
agugaaaucaagagagaag

SEQ ID NO: 2419660 - RNA, 19 nt, Homo sapiens
  misc_RNA (1)...(19): siRNA sense strand
agauaaaccugaaggaaau

SEQ ID NO: 2419661 - RNA, 19 nt, Homo sapiens
  misc_RNA (1)...(19): siRNA sense strand
agaaagaguuagaggcauu

SEQ ID NO: 2419662 - RNA, 19 nt, Homo sapiens
  misc_RNA (1)...(19): siRNA sense strand
gcauaugcaaagagaguaa

SEQ ID NO: 2419663 - RNA, 19 nt, Homo sapiens
  misc_RNA (1)...(19): siRNA sense strand
agaaagaacuggaggacca

SEQ ID NO: 2419664 - RNA, 19 nt, Homo sapiens
  misc_RNA (1)...(19): siRNA sense strand
ccauaaaacuacaggagaa

SEQ ID NO: 2419665 - RNA, 19 nt, Homo sapiens
  misc_RNA (1)...(19): siRNA sense strand
agaagaaacccgaaacaaa

SEQ ID NO: 2419666 - RNA, 19 nt, Homo sapiens
  misc_RNA (1)...(19): siRNA sense strand
ucauaggacuggaggacaa

SEQ ID NO: 2419667 - RNA, 19 nt, Homo sapiens
  misc_RNA (1)...(19): siRNA sense strand
uagauaaaccugaaggaaa

SEQ ID NO: 2419668 - RNA, 19 nt, Homo sapiens
  misc_RNA (1)...(19): siRNA sense strand
ccgaagaauuggagaagca

SEQ ID NO: 2419669 - RNA, 19 nt, Homo sapiens
  misc_RNA (1)...(19): siRNA sense strand
agaucuaagucgucaguaa

SEQ ID NO: 2419670 - RNA, 19 nt, Homo sapiens
  misc_RNA (1)...(19): siRNA sense strand
ccagagaacagaacagaaa

SEQ ID NO: 2419671 - RNA, 19 nt, Homo sapiens
  misc_RNA (1)...(19): siRNA sense strand
gauaauaagcaggaggaaa

SEQ ID NO: 2419672 - RNA, 19 nt, Homo sapiens
  misc_RNA (1)...(19): siRNA sense strand
ugacaaagcgggagcaaaa

SEQ ID NO: 2419673 - RNA, 19 nt, Homo sapiens
  misc_RNA (1)...(19): siRNA sense strand
cagccaagccucagauuaa

SEQ ID NO: 2419674 - RNA, 19 nt, Homo sapiens
  misc_RNA (1)...(19): siRNA sense strand
cuggaugauucuuggguua

SEQ ID NO: 2419675 - RNA, 19 nt, Homo sapiens
  misc_RNA (1)...(19): siRNA sense strand
ucgaacaccugaugggaaa

SEQ ID NO: 2419676 - RNA, 19 nt, Homo sapiens
  misc_RNA (1)...(19): siRNA sense strand
caaaagaacacaaaggaaa

SEQ ID NO: 2419677 - RNA, 19 nt, Homo sapiens
  misc_RNA (1)...(19): siRNA sense strand
gcagaagaacuuuggaaau

SEQ ID NO: 2419678 - RNA, 19 nt, Homo sapiens
  misc_RNA (1)...(19): siRNA sense strand
ggaaaggaagagaaagcaa

SEQ ID NO: 2419679 - RNA, 19 nt, Homo sapiens
  misc_RNA (1)...(19): siRNA sense strand
auaauaagcaggaggaaaa

SEQ ID NO: 2419680 - RNA, 19 nt, Homo sapiens
  misc_RNA (1)...(19): siRNA sense strand
aggaggaaaggaagagaaa

SEQ ID NO: 2419681 - RNA, 19 nt, Homo sapiens
  misc_RNA (1)...(19): siRNA sense strand
aggcaaucuuagugaauuu

SEQ ID NO: 2419682 - RNA, 19 nt, Homo sapiens
  misc_RNA (1)...(19): siRNA sense strand
gagacaaaggagaggauga

SEQ ID NO: 2419683 - RNA, 19 nt, Homo sapiens
  misc_RNA (1)...(19): siRNA sense strand
acaaaggagaggaugauaa

SEQ ID NO: 2419684 - RNA, 19 nt, Homo sapiens
  misc_RNA (1)...(19): siRNA sense strand
agaacagaacagaaagaaa

SEQ ID NO: 2419685 - RNA, 19 nt, Homo sapiens
  misc_RNA (1)...(19): siRNA sense strand
auaucaagcuuuagaguga

SEQ ID NO: 2419686 - RNA, 19 nt, Homo sapiens
  misc_RNA (1)...(19): siRNA sense strand
ccaaauugcuacuagaaaa

SEQ ID NO: 2419687 - RNA, 19 nt, Homo sapiens
  misc_RNA (1)...(19): siRNA sense strand
cuaaaggaaagaaaggaaa

SEQ ID NO: 2419688 - RNA, 19 nt, Homo sapiens
  misc_RNA (1)...(19): siRNA sense strand
gcaagaaaaggcagaaaua

SEQ ID NO: 2419689 - RNA, 19 nt, Homo sapiens
  misc_RNA (1)...(19): siRNA sense strand
cagcaggaggagauagaaa

SEQ ID NO: 2419690 - RNA, 19 nt, Homo sapiens
  misc_RNA (1)...(19): siRNA sense strand
guuuagagcauguaggaau

SEQ ID NO: 2419691 - RNA, 19 nt, Homo sapiens
  misc_RNA (1)...(19): siRNA sense strand
agaagaaacuuaaugguga

SEQ ID NO: 2419692 - RNA, 19 nt, Homo sapiens
  misc_RNA (1)...(19): siRNA sense strand
acauaaugcagcagaagaa

SEQ ID NO: 2419693 - RNA, 19 nt, Homo sapiens
  misc_RNA (1)...(19): siRNA sense strand
cagcagaauugaaagugaa

SEQ ID NO: 2419694 - RNA, 19 nt, Homo sapiens
  misc_RNA (1)...(19): siRNA sense strand
aagaagaagaacugcuaaa

SEQ ID NO: 2419695 - RNA, 19 nt, Homo sapiens
  misc_RNA (1)...(19): siRNA sense strand
agaaaagacuugauggaau

SEQ ID NO: 2419696 - RNA, 19 nt, Homo sapiens
  misc_RNA (1)...(19): siRNA sense strand
ccaacaaccaugugaaaca

SEQ ID NO: 2419697 - RNA, 19 nt, Homo sapiens
  misc_RNA (1)...(19): siRNA sense strand
gaacaacgacagagaacau

SEQ ID NO: 2419698 - RNA, 19 nt, Homo sapiens
  misc_RNA (1)...(19): siRNA sense strand
acguuuagaugcagaagaa

SEQ ID NO: 2419699 - RNA, 19 nt, Homo sapiens
  misc_RNA (1)...(19): siRNA sense strand
caaaaggaagugagaauaa

SEQ ID NO: 2419700 - RNA, 19 nt, Homo sapiens
  misc_RNA (1)...(19): siRNA sense strand
gaaaaggguuugaagacaa

SEQ ID NO: 2419701 - RNA, 19 nt, Homo sapiens
  misc_RNA (1)...(19): siRNA sense strand
gaugauaggcagucgagaa

SEQ ID NO: 2419702 - RNA, 19 nt, Homo sapiens
  misc_RNA (1)...(19): siRNA sense strand
ccuaucaguuauauggaaa

SEQ ID NO: 2419703 - RNA, 19 nt, Homo sapiens
  misc_RNA (1)...(19): siRNA sense strand
gaacgauaucagugcuaua
